United States Patent Application Publication US 2004/0214272 A1 - sequence listing, part 60

SEQ ID NO: 345450 - protein, 158 aa, Zea mays
  unsure (1)..(158): unsure at all Xaa locations
  Clone ID: MRT4577_78218C.1.pep
KKKSQNKKKKIKKRKVPKKKXKKKEKIKKKKKKRXNKKTTKKIXKKKCKKKRKTKKKKNLKNEXKRNQKKRNDNKRKSXKYKKNYENKKIKRXKRKNLKKKSKXNKWQYLYNNYKKNIDKXTGMGNXKKKKKKQXKKKKKKKKKKKKKRSICAHWINT

SEQ ID NO: 345451 - protein, 118 aa, Zea mays
  Clone ID: MRT4577_78219C.1.pep
MASLKVAFLAAVLCMVVVSAPMAHAAITCGQVTNSLINCIGYLQNGGTPPSGCCNGVKSLNAAAKTTADRQTACNCLKSAASQISGFKANNAASLPGKCGVSIPYKISTSTNCATIKV

SEQ ID NO: 345452 - protein, 259 aa, Zea mays
  unsure (1)..(259): unsure at all Xaa locations
  Clone ID: MRT4577_7821C.1.pep
MALGSVSKTRGDINTNYYGLGLILNSGNLCTQLPFSERWKMLEDEIIQPRNNEKGLERGAKSNPLYKYDMELFSVRRKAFWVLLTVKKVLKVFIPSLCHDADGLIFQGWDDPYVTRTHEGLLKWKYPEMNSVDFLFELTNDNRQLVFLYERGKKKLMDGARISFTDDVDPSSVAGRIVECSWXQGKQCWACMRIRSDKSTPNDINTYRKVMRSITDNITEEKLLEETDEITLLPMYADRMNVRVHTKMAQHRRRLPPQC

SEQ ID NO: 345453 - protein, 562 aa, Zea mays
  unsure (1)..(562): unsure at all Xaa locations
  Clone ID: MRT4577_78220C.1.pep
MAPLVAAATNHTAHRSHIVGPNNENFPRHQPCSSQNRNKRLRLRSRAQRISSQLLASRKLMPWQIPKRDWFPPSFIFGAATAAYQIEGAWNEDGKGPSNWDHFCHNYPDWILDGSNGDTGANSYHMYPADVRLLKEIGMDAYRFSISWSRILPKGTLEGGINQAGIKYYKKLINLLIENGIEPFVTIFHWDVPQALEDKYGGFLXQDCVCNFFRKDYTDFAKVCFENFGDKVKNWLTFNEPQTFTTFSYGTGVFAPGRCSPGEKCAQPIANSLTEPYIAGHNILRAHAMTVDLYNKNYKGTDGRIGLAFDVMGRVPYGNTFLDEQAQERSLDQNLGWFLEPVVRGDYPFSMRSLARKRLPFFTDNEQAMLAGSYDILGINYYTSRFSKHVDFSEDYSPKLNADDAYATAEIFGPDGNSIGPPMGNPWIYMYPKGLKDLLMIMKNKYGNPPIYITENGIGDVDTKDNPLSMQDALDDYKRLDYLQRHISVIKESIDLGADVRGHFTWSLLDNFEWSSGYTERYGIIYVDRDDGYRRYLKRSAKWLREFNGAAKKAEKKVLTPA

SEQ ID NO: 345454 - protein, 57 aa, Zea mays
  Clone ID: MRT4577_78221C.1.pep
LPGIPLSYGGFFLLILGGATDTRALVFLWVKGKPLNLLMVANSWVASKMGIGFSPGA

SEQ ID NO: 345455 - protein, 78 aa, Zea mays
  Clone ID: MRT4577_78222C.1.pep
LWNPTLVLYSLRKVWCEDQGNEGAVLLQTIKGSRKDEWTAPLPHVTVTFAQATRSVQLEAIRNFVVGNDTNKNGESCP

SEQ ID NO: 345456 - protein, 57 aa, Zea mays
  Clone ID: MRT4577_78223C.1.pep
LACRHTLFPFNIAGQSFSLCPSKYHTLSLSRTLDLRRKAPNLSAHDTLCSGSGMINR

SEQ ID NO: 345457 - protein, 51 aa, Zea mays
  Clone ID: MRT4577_78224C.1.pep
FISNLKDATSAAWVASCNKAGFIRKNWLYDGNCSCYRKPSINELATASVLQ

SEQ ID NO: 345458 - protein, 43 aa, Zea mays
  Clone ID: MRT4577_78225C.1.pep
YDTPCSQFTKGNRVNFPACSMLALYNRCSFSLLDIGHGENGLT

SEQ ID NO: 345459 - protein, 74 aa, Zea mays
  Clone ID: MRT4577_78226C.1.pep
MAGPSKSLVLDPALQKYYELNANRYKYFKWTPRNAWLTLLYVGIVPSIIGYVAYTTDGKYDLRGKRRGDTIAEF

SEQ ID NO: 345460 - protein, 85 aa, Zea mays
  unsure (1)..(85): unsure at all Xaa locations
  Clone ID: MRT4577_78227C.1.pep
WRQGRERDRRSPSRRRWCGCPPSSSEICLVTDLSDKMVKICCIGAGYVGGPRWRGLPSSAQTLRSSSMTSTKXPLQFVSIVIDLW

SEQ ID NO: 345461 - protein, 63 aa, Zea mays
  Clone ID: MRT4577_78228C.1.pep
TSNFPPLNKTYFFPKLLPINPFHSYIPFLCCSPPFYSPFFRPHHLIYHHIHTLPPKPPLHTLI

SEQ ID NO: 345462 - protein, 78 aa, Zea mays
  Clone ID: MRT4577_78229C.1.pep
MCSTLNSARMSSEMWHLIVEVPMWSRRATSQGDWASIVAEHCGPAIRRWCTWSPPLTRMRTLCTLSNLFVGHVHIYCG

SEQ ID NO: 345463 - protein, 101 aa, Zea mays
  Clone ID: MRT4577_7822C.1.pep
GPSSAPGAVFFWRNCTLRLAAQVGRPNCGLFLWQVPVRQPLFRSRRANGVAATGFLMGGSKSNNCQGPGRAPPWRGLSVTIFNNHGFFSLSPVCRRNTPTI

SEQ ID NO: 345464 - protein, 73 aa, Zea mays
  unsure (1)..(73): unsure at all Xaa locations
  Clone ID: MRT4577_78230C.1.pep
PSGVREGEXLSNKGGFWVGFPTQVQEEEQTSVSAPFLWSSSSRICVSAPASHSLSICLLFLFGSLLLSSFWPA

SEQ ID NO: 345465 - protein, 231 aa, Zea mays
  unsure (1)..(231): unsure at all Xaa locations
  Clone ID: MRT4577_78231C.1.pep
MDVNHPENKQVHVAGDDKFPVDTSIPERKTGNSSEDEKIVTTKSHPQVEIPIYNDVERVDQTDLSFAAILKGTAANPLNVFEKKAALINVEIDKFGMGRYQICIWFLCGFGYFLDLAWXPKALXLIVTSIXQEMDVPAPEQGNIFSIANAGLAIGALFFGLAXDVIGRKWAFNLTCLITSIFGLLLAAPKFNYSAICAIYFLASLGLGGNIPIDATIALEFLPHNRRFLVA

SEQ ID NO: 345466 - protein, 78 aa, Zea mays
  Clone ID: MRT4577_78232C.1.pep
MAHQSFSGPPEAFSPPFSPLCSWIHGPFLAIKFAVAPSSSLPNSDDPGTPLARASLNSDDFTTAESRGAARSRLFPLV

SEQ ID NO: 345467 - protein, 55 aa, Zea mays
  Clone ID: MRT4577_78233C.1.pep
QSRGGRCHEVAMRWSVVFSGCVTYLQVRSSSVYQRMWSVAFNPPPLVGVCALYST

SEQ ID NO: 345468 - protein, 407 aa, Zea mays
  unsure (1)..(407): unsure at all Xaa locations
  Clone ID: MRT4577_78234C.1.pep
CRRPQRGSVHGSADLSHARAWKQISPRWRRATPPALGASGHGAGEAHGPPGGADAAPGHSDGDKTNLTNKVVGEAVQEAPGEVATVTAHAARGLTDGHQRPSKHGRHHHRRPGPISRLLVLCAALRTSNPSALRETVVEVPNVSWEDIGRLENVKRELQETVQYPVEHPEKFEKFGMSPSKGVLLYGXRGCSKTLLAKAIANECEANFISVKGSELLTMWFGDSEANVHEIFDKARQSAPCVLFFDELDPIASQRGSSLGDAGGATDRVLNXLLTKMDGMNAKKTVFIIGATNRHDIIDPALLRPGRLDQLIYIPLSHEQSRLQIFKACLRKSPVAKDVDLNALAEYTQVFSXADITKICQRACKYAIRENIEKXNDNEDTQAREHSDEEMDSDEEHERAKKDVSLN

SEQ ID NO: 345469 - protein, 67 aa, Zea mays
  Clone ID: MRT4577_78235C.1.pep
EHNKERTQPNNHLSNGLLHSKTWPPKTMTTPLGRPRTHEGQPAKSVVRADSWGTNPPNRRRSPRLRL

SEQ ID NO: 345470 - protein, 71 aa, Zea mays
  Clone ID: MRT4577_78236C.1.pep
MLSSLIIDHPVITWFSVIFNSIPPLSVVGLSEEQALEEANGDILVFISSFNPMKNSISKRQEKTIMKLVVD

SEQ ID NO: 345471 - protein, 35 aa, Zea mays
  Clone ID: MRT4577_78237C.1.pep
SNVSIEKANLLSPGTYISIRVRERQVEVPTQPLSP

SEQ ID NO: 345472 - protein, 58 aa, Zea mays
  Clone ID: MRT4577_78238C.1.pep
VIHQEGSHSNARTTGPSGLPETAATHNYLLKLARRPPGYLIILTEAPTTTPHGSLNAA

SEQ ID NO: 345473 - protein, 119 aa, Zea mays
  unsure (1)..(119): unsure at all Xaa locations
  Clone ID: MRT4577_78239C.1.pep
TCAPFPATRSRIVPRXSRRAGLLLRVRTPQESGSSATXPRIRRPXNVEGMEPTXERSKRRSQKCXTEVYDKNAELSKPXETGQSPGNMEHACYDSRVCPSXTLGLKSGEGFTVRKIASM

SEQ ID NO: 345474 - protein, 63 aa, Zea mays
  Clone ID: MRT4577_7823C.1.pep
MAISTMALSSTAFSGNAVNVPLSHFGEVRVTFRKTAAKAKPAASSGSPWYGPDRELYLGSLSG

SEQ ID NO: 345475 - protein, 113 aa, Zea mays
  Clone ID: MRT4577_78240C.1.pep
CMVFDMWFPDVVQVQQTIQQEQRNKRAPEEGRVNKQSSTKHGVGMRTTYNRALLELNEDEGNRKQTGHTHVGLHSTKNRWLIQVQQLTEPLGLLKTMGLPAATRRSKSLAVLH

SEQ ID NO: 345476 - protein, 57 aa, Zea mays
  Clone ID: MRT4577_78241C.1.pep
LYDTKNNQKKKKADLPKESKFTYTFIQLNNYFILPPNINSLAKFLKHQYLKNPVLPQ

SEQ ID NO: 345477 - protein, 95 aa, Zea mays
  unsure (1)..(95): unsure at all Xaa locations
  Clone ID: MRT4577_78242C.1.pep
RASSLVGVVGVRGASGSCPLLGCVSRCRCCGRAWASCGCPRRWRCSGRGRSAPLRRLCPSCGAALPFPGPSPLPALSSSPXRGPRSRARVRRLGK

SEQ ID NO: 345478 - protein, 37 aa, Zea mays
  Clone ID: MRT4577_78243C.1.pep
PITTHPICRPIGTVHLWCVCPTPFAGLLALSIYGVFV

SEQ ID NO: 345479 - protein, 115 aa, Zea mays
  unsure (1)..(115): unsure at all Xaa locations
  Clone ID: MRT4577_78244C.1.pep
LLVLDRAEYLKYKYPXQAGARSIDDLLXPMTINEYIGLMTHIERENATDDALAXLYTQSAIARXSCVPAPQVSAQAXTAMVTEMQKAALSTRLGIPTIYGIDEVDGHHNVDIDTI

SEQ ID NO: 345480 - protein, 125 aa, Zea mays
  Clone ID: MRT4577_78245C.1.pep
MDELQIGSIFQQLLNDGDAARMIPRQNQKATFGTEQHEETAPCMLPRRQGGLRVVIHDRFPSDGAEKNLGHAAGKLVLLPDSLQELMKVAEVKFGKAPRRVLTVEGAEVDDVAVLRDGDHLVLCC

SEQ ID NO: 345481 - protein, 77 aa, Zea mays
  Clone ID: MRT4577_78246C.1.pep
KWRRRRNGGHPEVLVVRLPQDVDHDVLCVRAHLVVLVVVKFVTVVRRVSDGCHSHLNLRERKGAYDSEGSIRSLRYY

SEQ ID NO: 345482 - protein, 53 aa, Zea mays
  Clone ID: MRT4577_78247C.1.pep
FFFFFFFNKYHATSLIRCQILPTSILDFMLAKNRKKLLSVNKYKNIFLYKFDS

SEQ ID NO: 345483 - protein, 135 aa, Zea mays
  Clone ID: MRT4577_78249C.1.pep
ARGIRLRLSGNFFPAPLALMLWPPSLLLMADLWPLPAAGRRFPSLLLEPVVLTVSPFCFPHPAVVLQPRSSRYSKSNAPLSTASSPARPSLRPSPAAAARPLFALLLSSGRQFPAPSPLLLSPSSLQLPMAITAP

SEQ ID NO: 345484 - protein, 54 aa, Zea mays
  Clone ID: MRT4577_7824C.1.pep
DDLGALQWKLPGARGTALMIDYLHMTIWTAQYVKLFNRIGIDLQGLHIDVQYSM

SEQ ID NO: 345485 - protein, 89 aa, Zea mays
  unsure (1)..(89): unsure at all Xaa locations
  Clone ID: MRT4577_78250C.1.pep
MADSSTPLASADALLLXLLAPLAEEGDKSIGCYHERSEEEARRMYAEWIEAHGRTYNALGEDERRIEAIRXDNLTYLDAHNGCVDAGVH

SEQ ID NO: 345486 - protein, 99 aa, Zea mays
  Clone ID: MRT4577_78251C.1.pep
FVPHPLGRVFVLVTALDRMFPLSLGPARYSMSSHGPFLFAIILSNSSSFLLVSWGGVLVPFWVFSSVFTVLDSFRSMFGPFFGSVCFPIFSFCLLFTFN

SEQ ID NO: 345487 - protein, 94 aa, Zea mays
  Clone ID: MRT4577_78252C.1.pep
PKTTTGQSFLGSKNFPFINPFPNFFLSTNSIPFLNIFIFFTFFIWVWCFFIFLFNSINMFYFFYLYILFFSLFLLFIFLLLYFLFFFFHIFFPY

SEQ ID NO: 345488 - protein, 71 aa, Zea mays
  Clone ID: MRT4577_78253C.1.pep
LVNNIQRCLRFQCGAIRLAGEHAHLTDGLYGSIGDTDTQLSKVSPSSLGWTAVHQLCMRYVHISHSPRLYC

SEQ ID NO: 345489 - protein, 160 aa, Zea mays
  unsure (1)..(160): unsure at all Xaa locations
  Clone ID: MRT4577_78254C.1.pep
RPGRGEQQHPIPPILLLHWLTLVSVYKASAAASPLHPLSSIPPATMPSRSDSDSLLVRAEGMRDAALDYHGRPADRGATGGWRSALFIIVVEIAERFTFYGVSANLINYLTGLVXLATAXAAEAINAXNGERHLMTMMSGSLADERVSRYRTIGSATILY

SEQ ID NO: 345490 - protein, 294 aa, Zea mays
  Clone ID: MRT4577_78255C.1.pep
PRVRSQTSLSALSLTENILILLCILAKYHFPRDTGKKEVDSELREIIIHLLAFISKGSVKTGNASKWNSSFFCPAVIKEEVALNEKPPLICSKYGWFRFAASCTLSTAGVSVSPSAALSVVRRDKTSGDSDSIRQTRFTEILAVQIYRIAFLIMKFLCSQAKEAVKRAEELEFLDLAHFPELPMPDILHGLQDQVVCIVTEIFEANGSSTLNPETEKVCQLLLVTLETSLYMELCVSQSCGIRPVLGRLEDFCKGIKAMLQAIEKHSSFEPFVRSLTEITSLLYPGLLHNNLLM

SEQ ID NO: 345491 - protein, 85 aa, Zea mays
  Clone ID: MRT4577_78256C.1.pep
QRRVRGITRNALHFSFEFLVEGTGGSSVFDRFHDKKDSDSKNEMGGVEKLKGNLDGGRGNAAESSDTQKKKKKKKKSTLRCYHCL

SEQ ID NO: 345492 - protein, 203 aa, Zea mays
  unsure (1)..(203): unsure at all Xaa locations
  Clone ID: MRT4577_78257C.1.pep
MPSRSDSDSLLVRAEGMRDAALDYHGRPADRGATGGWRSALFIIVVEIAERFTFYGVSANLINYLTGPLGEGTAAAAAAINAWNGVAQLLPLLGGALADKWLGRYRTIVIASLLYILGLGMLAFSTFLXPPAAATSAPXAGGQICAPSGLKVTFFYVSLYIVGVAQGGHKPCVQAFGADQFDQTDPRETVSRSSFXFNWWYFG

SEQ ID NO: 345493 - protein, 79 aa, Zea mays
  Clone ID: MRT4577_78258C.1.pep
FNPFVTSDRCKNRKRHFNAPSHIRRKIMPSPLSKELRHKYNVRSMPIRKDDEVQVARGHYTGQQIGQVVQVYRKTYVIY

SEQ ID NO: 345494 - protein, 136 aa, Zea mays
  Clone ID: MRT4577_78259C.1.pep
TIVLLQVDPLGKVDPEVEDLLLEIADDFIDSVTAFACTLAKHRKSSVVEAKDVLLHLERNWHLSVPGFSREDKNPQRNSVKPLVDPQQSESDVTGIRGTSNKLGANNSVGNHQIRPPMAETSAVPTVGSLSKAPRF

SEQ ID NO: 345495 - protein, 67 aa, Zea mays
  Clone ID: MRT4577_7825C.1.pep
PPTPQLIPTATKAAGAGPKTFCRSSLLSDPRPQRPQQKTMPSTPATVLLQPDKGARHWNYPTRFRSK

SEQ ID NO: 345496 - protein, 32 aa, Zea mays
  Clone ID: MRT4577_78260C.1.pep
ARAARGPRPRLRACRLQTVLTEEARNVYFQFT

SEQ ID NO: 345497 - protein, 36 aa, Zea mays
  Clone ID: MRT4577_78261C.1.pep
HTLTRCLQTHFSRAQMRTSDPASFIASLNGSALSLA

SEQ ID NO: 345498 - protein, 64 aa, Zea mays
  Clone ID: MRT4577_78262C.1.pep
WYPYGDGAETDHAVNSVSNSLSLFRTVCLGRHQCVLWFARILWLCAYSEIKQSWFFVETEISSG

SEQ ID NO: 345499 - protein, 52 aa, Zea mays
  Clone ID: MRT4577_78263C.1.pep
LLNSRSKFFLENSFKKLKYKNLKLFSNECSWGAPARVSGVSCLDLARSLWAG

SEQ ID NO: 345500 - protein, 89 aa, Zea mays
  Clone ID: MRT4577_78264C.1.pep
LHDATTADGALVAADIEAHTRLHLHLQLVSAEPCDVQHDSVERASVHPLAVRVDLGENARQPRSSRLHIYPLCFLLLGRAGGRVGGRVG

SEQ ID NO: 345501 - protein, 54 aa, Zea mays
  Clone ID: MRT4577_78265C.1.pep
ILYFCYCGALIYGGKTRISSGLIINLVLLVVREYSHTYQEVCFSSAPVNNRSLY

SEQ ID NO: 345502 - protein, 316 aa, Zea mays
  Clone ID: MRT4577_78266C.1.pep
MLRRQPRLPAAPSPPLAVLRRAFRSEAALEAIRSHLHSPPSKSTSTSSDADGDDKAAPASLALYNYPTFAGAYAALAARLFHQRVRRRLLVLPFSSVVPFRAEDFKDAGFQTCYLLDFIGPKKFAFELARFIPSVKAFDHRQSTLARIPKLGQCPNNVELHIDISIGSARSVFDYFSKELAGTKSDSRMWENLLEQEHVERVSNVLECIEDADLRRYQLPNTKEFQTALRDERAKLNCVTNPHVFEQLLQLDVGDLLTREKSRVRGLLQSAGAFIQKPFRIQLGRGSYGECLVCERHALAFSTDSITCVCLPLIAS

SEQ ID NO: 345503 - protein, 76 aa, Zea mays
  Clone ID: MRT4577_78267C.1.pep
LAALLAAAPATLLSPVWARLLGVTSRIQDADCHPGLSFQSLEAASCHIRTVPGIMQFPAHLCIGKAVPTREPIFRE

SEQ ID NO: 345504 - protein, 214 aa, Zea mays
  Clone ID: MRT4577_78268C.1.pep
SHFSSCPYPHSNNCYNNNNLHTKEEVIRQRSVKAQTLVFGRNYKAQQPTPSTPRASGYHLPRIGPRRPRAPRRRRPPRPALARPRRAPRRPPAAGPRWRPPSPPPSPPPSRPPRPPPRPPPPPAPPRPPPPSRLPRPPPRPPPPPPPPPPPPPSPPRPPPPPRAPASCGCRRDRCPRRSLGELSLPMLLEPPWTAGAGPPSAGRAAPRRRRRPR

SEQ ID NO: 345505 - protein, 79 aa, Zea mays
  Clone ID: MRT4577_78269C.1.pep
HAHDHQMLGRAQTPEPPEHFQAHHAVHRVHDLGREGAGHLLYHRLAAHGGRIPPPINARAGYSAIDSCTLDASQLGDAS

SEQ ID NO: 345506 - protein, 48 aa, Zea mays
  Clone ID: MRT4577_7826C.1.pep
HAYNAVWGSVCSSEPLAYIYIYIYIYIYIYIYIYIYIYIYIYIYIYLL

SEQ ID NO: 345507 - protein, 156 aa, Zea mays
  unsure (1)..(156): unsure at all Xaa locations
  Clone ID: MRT4577_78270C.1.pep
HTFIHNLLVLYVYVATHGHVPYNNNNLHTKEVISKLQRHRQRSAKAQTLVFGRNYKAQQPTPSRPRASGYHLPRIGPRRPRAPRRRRPPRPALARPRRAPRRPPAAGPRWRPPSPPPSPPPSRPPRPPPRPPPPPAPPRDEPADPXPRPPPGPWRR

SEQ ID NO: 345508 - protein, 95 aa, Zea mays
  Clone ID: MRT4577_78271C.1.pep
FDSGCLFRESWDPQVLSGRPVLVLLYDASRYHGPQKLHDARSLAPACTTRYAPARQACPFQSCMKPHARTVHDHIECDLGPRHRAPSGGLDQTRR

SEQ ID NO: 345509 - protein, 36 aa, Zea mays
  Clone ID: MRT4577_78272C.1.pep
WYNMFTSKGGVQLCGGHGLFPLYQTALLKKEIQGFT

SEQ ID NO: 345510 - protein, 48 aa, Zea mays
  unsure (1)..(48): unsure at all Xaa locations
  Clone ID: MRT4577_78273C.1.pep
TRQIWRHGSIFNYELXSGACQYLLPMRLIMQNSLVALHSLDSNYKAIV

SEQ ID NO: 345511 - protein, 153 aa, Zea mays
  Clone ID: MRT4577_78274C.1.pep
AEGMYGTMAEIPTGYPPALFVHMPKDTERARLVAESMYKLREKHVDVREIQCDDFAVSAEFLAERVPGLTWAFANALVDMLRRKGFVDEKGMLKKDGRRTPWKEAAEEAKVLPERFGLERHVTEELNVAYAYHEFTSLKNTEVFQWFESHMNH

SEQ ID NO: 345512 - protein, 142 aa, Zea mays
  unsure (1)..(142): unsure at all Xaa locations
  Clone ID: MRT4577_78275C.1.pep
NQPRPTTHEAKQRGQSTHGPHKTTGGGGTXTEAHKXXQAHGPGPGQPAPTKHRXRTGETRGKHXKGRETGTPXERKKPGAGREDPPPGRXPGPGRAQDAPRKKTGGRKRGGGXGPGGRSRTXGAGRGRGRRRGRPPGAGGDP

SEQ ID NO: 345513 - protein, 54 aa, Zea mays
  Clone ID: MRT4577_78276C.1.pep
STEIKSPISVEADTSEQKLWVKKSSEEEKNPDDSLSDKHKKLTAVRLDHFDDNG

SEQ ID NO: 345514 - protein, 100 aa, Zea mays
  Clone ID: MRT4577_78277C.1.pep
GRIPLGGGSPKGPRPKGEPPRGIPQFFSGGGKQRAPKTQFFWGPWGAKFPYKLKTLRGFPQKPGKKPWVWGKVKGEKLCSCPPPGEKKAPPGQKGGFWWP

SEQ ID NO: 345515 - protein, 129 aa, Zea mays
  unsure (1)..(129): unsure at all Xaa locations
  Clone ID: MRT4577_78278C.1.pep
SLSTDAYGSRSRAAALCFVFXXFFFFFRFVLNGRLPAFFFYNPTIILKNPPITLSIPSNPLPFFNTLKHTHPFNLFITLSFQNPQPIFIHIYLNIYFTDKLSKPHTKSKFLQNLLFPKPFFCKKLTPFF

SEQ ID NO: 345516 - protein, 97 aa, Zea mays
  Clone ID: MRT4577_78279C.1.pep
GPEVLRGGLLCPRRDLPQERLSMVYRDALGVPHSAWIEIIQRLGVSVYKASPKMTGGKLTSRQSTEGDPGTEWTSTEDPYASGREGGLTFIRGEAAR

SEQ ID NO: 345517 - protein, 36 aa, Zea mays
  Clone ID: MRT4577_7827C.1.pep
AAYLITLRVLITRLNETHNGLHCYHCTCRPGGILST

SEQ ID NO: 345518 - protein, 127 aa, Zea mays
  Clone ID: MRT4577_78280C.1.pep
NFREIRQNGPMYHFQQDKVKNKFYTVFKFKNNNKKKRVFISTSQENKEPKAKSTHESATSRPPGNSQPLKSSYPTNQQHHNLFPPPPQENRMNRSGDAESDPETDRSSLLYQIQQGKQTREGEQSKP

SEQ ID NO: 345519 - protein, 41 aa, Zea mays
  Clone ID: MRT4577_78281C.1.pep
ISIKNKKKKKKKKKKKKKKKKKKKKKKKKKKKKKKKKKKAA

SEQ ID NO: 345520 - protein, 71 aa, Zea mays
  unsure (1)..(71): unsure at all Xaa locations
  Clone ID: MRT4577_78282C.1.pep
GXCAXPFFLFXVXACWLSSWFXRCXFALXFLPRLCXXGLXXRXCVAPVXGLXLXRGXXXRXCXXCLFALXL

SEQ ID NO: 345521 - protein, 60 aa, Zea mays
  Clone ID: MRT4577_78283C.1.pep
GPNSNMIHYCEYLVCANFILDRLPSSNIRFVTFYGKTQIHMLIIKTYKSIILFGLQFIKG

SEQ ID NO: 345522 - protein, 34 aa, Zea mays
  unsure (1)..(34): unsure at all Xaa locations
  Clone ID: MRT4577_78284C.1.pep
EEINIVVKDLINGMLGWDYMSFGRVLXKLVKDXV

SEQ ID NO: 345523 - protein, 1599 aa, Zea mays
  Clone ID: MRT4577_78285C.1.pep
MPVNHKLTPLPHRCPTLLPPTPQVSLSPPRMAATAPLTSQHHAPPPAPSRSPTSPLLPAFPALPPRHAPSTTSAHPPPVGVTPISSLSETVECASLTSSVRQGSLEVFLSLGRHDVAAAFAFVRITPQLAVSAPAPFIREAIRAAFPLITFEVLPSSFGSLLVRFQSAGDCTAAVSRSPLLHEDVAIFFERHDGRSVKQPVDVLAVLSVHGFPLTFWHEEFIRQAFQVFCSVVEVDWRCTSGLDYSSVRVVVRVEEVTSIPADLCIHDSSSGDSFVCQVKLVDSWPLPVDYGQHGTLRPYFGWPPHPVLPPPAPTPHRTTPLQPLRHHLSRNLARQLTVVPLATLQPDQSLVTCLARTLLALVLNQPHRLLLPCLPSFPIIIHKNILPLHPAPAFSAPFPPFPLTSCSTVAPAIADVEVLSPSPLPPSSLQPDPDHESSARKSRARTKRTADLAAKNKKIAPASRHSVRLRDKEPANYVDMSSKATNLKALKNELANCSNNLKAKETKLSEISAQKFKSFLPASLSGHSFLPADGSRGGIATAWNAAHFTLVSTSSTTHSLSTVLSYNASDLTFTLTNVYAPADHRYTAEFLGELRSLANLISGPWLVTGDFNLVREPSDKNNDNFNVCLASAFNSAIHDMSLIELPLLDRLFTWSNKRTLPVLARLDRTFINGDFESAVPNTSLTSLPHATSDHTPLKITIDTSIPKKHCFRFENAWLHDPSFLPAIEPVWSAVTNLAGGATGAFVARLKGTRRVAKAWSKNKHTPFLINNCKFIIKLLDLHEELHFLTTGETVLRSLCREKLILQIRARAAYWKQRGKFKVLKEADENTRFHHARASQRLRQNQIRALELDGVRYTSHASKAMVLDNHFTALLGAAMDTVWDFDMATLYRGLPKVNLVPLIEPFTEAEAWAAIKAMNHNSAPGPDGFGPSFYRASWHIVKSTVMQFLASFHHGDADMERINRAYIVLIPKIVGAVAPGSFRPISLQGCPVKIVGKILTSHLQQQVTSLVDLDQTGFLKGRSISENFVYATELVQCCYKRKAPTVVLKLDFAKAFDSVSWDALLTVLQARGFPPLWCDWIKLLQVSAKSAVLLNGVPGRWISCKKGLRQGDPLSPYMFILVADVLQQLLARDSTIRHPLTADRSCTILQYADDTLIVARADELAMLQLKSILQSFTHATGLDINYNKSTLVPMHVPALDVTRFVNILGCAEGAFPQTYLGLPLSNEKLNLAAFAPIIASADRYLSGWWASLLNHHGRLTLVNAVLDSLPVYAMGALALPPGVIEAIDSRRRAFLWAGEETVSGAKCLVNWERACLPRKDGGLGVRDLRLQNTCLLLKFLHRAHNSRDSAWARWLEVEFGGPMSAPDNTAAGTHWAALRRLLPDYRLLTTVEVGDGRSTAFWHDCWLSTGPLVDAMPALYSHARRKETSVCNVLSTTLRLAFVPRLSTVAARELEQLEALLVGVSLSATPDLRLCPWEDMAHKLNSSTVYQAVVTNGQGCEYYKFIWENRAPPKVKFFGWLLVQNRIQTKDNLLKKHCVENDICELCLSAVESSVHLISGCPFAVGFWARLGISLTDEDASHLWSVQQIEHVRVYITHL

SEQ ID NO: 345524 - protein, 110 aa, Zea mays
  unsure (1)..(110): unsure at all Xaa locations
  Clone ID: MRT4577_78286C.1.pep
GRHSIQCIPISARAEYELRSITGLGRRGRIVSCGSLQSEDATASSALNDPSISTNYMTYVIXHYFVHEHWKHSDITLKDSNTLLFIDHPGPRFGIXNPEEIPWRDSMRCV

SEQ ID NO: 345525 - protein, 59 aa, Zea mays
  Clone ID: MRT4577_78287C.1.pep
TCLCILKSVRSVWPFPSKATRCCVYSPRFITFGVPPPCDSLNVTRWGPSPTPILIASPL

SEQ ID NO: 345526 - protein, 71 aa, Zea mays
  Clone ID: MRT4577_78288C.1.pep
KDSLKREGVVINTRCGELDQVQEYGLAFHDRPGTDPEADRHPPGIKDLGNDHYEEGVVREKDRGTRRTMIR

SEQ ID NO: 345527 - protein, 30 aa, Zea mays
  Clone ID: MRT4577_78289C.1.pep
YIRLVLFPLSVLHLMIRVPSLVGHMWIFNK

SEQ ID NO: 345528 - protein, 191 aa, Zea mays
  unsure (1)..(191): unsure at all Xaa locations
  Clone ID: MRT4577_7828C.1.pep
MGKIKIGINGLGRIGRMXVAHAARRSYSVGCRSVVXVDDPSITTVLHRAYTVTSYVHRLTAHXSTANITLKDSKTLLFGDKPVTAFGITNPEEIPWGEDGSEYVMESTGVFTDKDKAAAHLKGGAKKVVISAPSRDAPMVVDGVNDDKYTSHVNIGSNASCTTDWLAPLGKGIHDNFGIGEVQMTTDHDIT

SEQ ID NO: 345529 - protein, 123 aa, Zea mays
  Clone ID: MRT4577_78290C.1.pep
VLLPVCQFGGSGISSRFRGGGVKKTFPGAVLGLLRPGSWCCPRRRRCCRGGRRRRCGCGGSGSLPRGRCLLWPRCGGGLVPRGISCAVSVSCGPGFFVGVLCFAGSLCRSFPVLSLRLRLSFG

SEQ ID NO: 345530 - protein, 53 aa, Zea mays
  Clone ID: MRT4577_78291C.1.pep
FRHKVRLQYHRHCVIKTDRDWLLQGWKERILYAMSTWVANDDPVSKHPHTYTY

SEQ ID NO: 345531 - protein, 244 aa, Zea mays
  Clone ID: MRT4577_78292C.1.pep
PGLISLLAHLSGARPQPTELPPSCSPWPSALPSSNSPALGFLLAKSISLPSAVPPPAPPRRSVPARRLCNSPMAPISLAATSLLLLSPAAVFPALAQPSSSLRACSPASSRARETSLLTALPVCSAMVKPSLPWMPEFLCSFSWPPSSFRRAPISSAPPRASWDSPSRRSVPGRGRRTRPARIFAWSPAVYQYRGLARTRTVTIVPARTPWYPCSLLGRPSAASSAASRPPSCSAASNLCRSSY

SEQ ID NO: 345532 - protein, 39 aa, Zea mays
  Clone ID: MRT4577_78293C.1.pep
DLTTAKKPRREKETTATEAKEAIMVSDAIALRWVRDAAD

SEQ ID NO: 345533 - protein, 165 aa, Zea mays
  Clone ID: MRT4577_78294C.1.pep
MNNEKSNIPNFSLYDIDVAPTTHNSLATNGLSQTQPSYGMSMNSYAGPQPPPPIWDKPTILRMAGPSGSKLGLSDPAAAGPVLSDKPPRSRLGPRTPHKDFNDKKVLVWLDVANTDKCKGIIIGDPRALNENTKNCSWEVVAKRTLDGGETLKIIIKSTDVGGQA

SEQ ID NO: 345534 - protein, 80 aa, Zea mays
  Clone ID: MRT4577_78295C.1.pep
MSRSGQPPDLKKYMDKKLQIKLNANRVVIGTLRGFDQFMNLVIDNTVEVNGNDKTDIGMVVIRGNSVVMIEALEPVAKSQ

SEQ ID NO: 345535 - protein, 90 aa, Zea mays
  unsure (1)..(90): unsure at all Xaa locations
  Clone ID: MRT4577_78296C.1.pep
SLIRVQQVLGSCYKNLKKDLHIPAVIHLCAQIEXRLGVGNMXLRGFSPPLQKISVXHLFELTQXSLXVSTLVCISGIGWIFVDSEPLSAL

SEQ ID NO: 345536 - protein, 122 aa, Zea mays
  Clone ID: MRT4577_78297C.1.pep
IAPPLPSRPTFPKPYQPTPITMTPMPCQDLPPPITQRRTSQKLCESGQRRSASSKSSAKLMYDLVVVADPAIKRIEKEDAKRHIRSLQVYLDAPRDRRITGRGVSPFETLCFFIRPPRITAP

SEQ ID NO: 345537 - protein, 448 aa, Zea mays
  Clone ID: MRT4577_78298C.1.pep
MARQSALSLVRDRAKTGALKRLTLSSSKTAGRNSSGRITSFHRGGGAKRLQRKVDVKRDACSTGIVERIEYDPNRSSSLALVRWVQGVHFRRPKSPQELSAMSQIQQSATADVSGRFSLAALSSRVHKDKEASALYSALGNGDISASLKSGASSSLPRIAVAGAKPTFFAQAKADEEGKHTFSFTEIQKWATDDVLWAQRMKRQAALSWQNELKKKHLLKTQANSFSSLAAKTSGTSKGPKGKADCIPVSYILASHQCMPGSTVMNYNSSKPSKSSASSPYSLENQFDIIDLNSKVGNCIPLANARIGTWVHNIECRPGQGGKMVRAAGTYAKVVQEPGAKCVLRLPSGAEKAVDSRCHATIGIVSNPSHGTRKLRKAGHSRWLGRRPVVRGVAMNPVDHPHGGGEGRTKGGRPSVSPWGKPTKAGYRSPSVASRKAFAGTKLIQFRK

SEQ ID NO: 345538 - protein, 123 aa, Zea mays
  Clone ID: MRT4577_78299C.1.pep
FPRALGTPWLGPRAPGFPVGGGVVGAPLFLWVRPFFWVPRFCGLCFRLVCRVARFLGFAFCGGGALSAPPPVFWVAPVPVGRPRFVLVIALKKDHKGRKKKKKKIKKKKKKKKKSLCLPGRPL

SEQ ID NO: 345539 - protein, 92 aa, Zea mays
  Clone ID: MRT4577_7829C.1.pep
TNHWIRSVPCPSSFRNFPRHHLTLEGWRSTSQGCRTEITNWFQASGRGRRGEDVGGDEEDDEEREEVNDPGAERWHGCGGGVARQATRREKE

SEQ ID NO: 345540 - protein, 121 aa, Zea mays
  Clone ID: MRT4577_78300C.1.pep
SLLLMEVWLVLLLLLEFLLPATSLVLPPSSPSSSWLSSPSSLASPSSFPSPKPSLRSRITGGTELFSEDVLSSSPSRISSVATFCFTFAMASTSQIWSSSLFSPGSLCLSLHHQHRIGRVG

SEQ ID NO: 345541 - protein, 64 aa, Zea mays
  Clone ID: MRT4577_78301C.1.pep
SPMIPPLCDLIAPPFVEFISVVSAVHSSLSFSVIFQLVFSYSLLFFFFFISFRLYTKQKKNYNN

SEQ ID NO: 345542 - protein, 50 aa, Zea mays
  Clone ID: MRT4577_78302C.1.pep
RCTRLPRRPATVLNTYRCRRLSERHCDMLSKPCRCARASRSKCGGTATRW

SEQ ID NO: 345543 - protein, 107 aa, Zea mays
  Clone ID: MRT4577_78303C.1.pep
FEKTRPGEGTKGGPQKKGAYGGQPGESKLGSLKKAAPPGWGRGRVKRGRRPKQASPKSCPPNFIFSPLFYFLPFFFFFFFWGFFFFFFFFFFKKRVTPCTYFLFNFQ

SEQ ID NO: 345544 - protein, 75 aa, Zea mays
  Clone ID: MRT4577_78304C.1.pep
CFFPFIPVCQAFFCWNQKLTKLKCRHPFGPSPNCFWFLKKPPLGFVANCSLCNRGLTKVPQCTLHGIEIKILVPV

SEQ ID NO: 345545 - protein, 134 aa, Zea mays
  unsure (1)..(134): unsure at all Xaa locations
  Clone ID: MRT4577_78305C.1.pep
CWCAACDCCFFVCITCYWDILYITRHLLVYVCISSKKKKKKKKKKKKKKKKKKKKKKKKPKKKKRGGRFKGSKFTSPCMQSKSFLIXVTKIKXLAGVLKRRNWKNPGLTKLNRFEKKPPFASWGKNKKARTNRP

SEQ ID NO: 345546 - protein, 48 aa, Zea mays
  Clone ID: MRT4577_78306C.1.pep
YNKKHMTNTRYMPVRCNRGHLCTHMSLFSDAIKHQHNNHNKYRNGRLR

SEQ ID NO: 345547 - protein, 56 aa, Zea mays
  Clone ID: MRT4577_78307C.1.pep
VHIHKHNVKLRSLLNVQHCRHSCTHQSLLLLYINMVRILHHHYVNSYLFQVPQRYL

SEQ ID NO: 345548 - protein, 152 aa, Zea mays
  Clone ID: MRT4577_78308C.1.pep
MSTPAMKMGPYGGPGGNHWDINALNPPKKIVSIQIWSTDSSCEGASGVINGISFSYLDMAGQLIPSGPWGSQTGKPHVINIGEDERLISGYGTSDGKFGTWLKFGTDRAVDPYGPYGAPCTISAVSWQGGFMLALLGRFSNKLNGVGGYKLG

SEQ ID NO: 345549 - protein, 68 aa, Zea mays
  unsure (1)..(68): unsure at all Xaa locations
  Clone ID: MRT4577_78309C.1.pep
AAWAXAWGVGGERRRKLRLANPTTHDASKLTPGGSSNILSGYVGPLGYIDGRAFYSLMCGGLCQIWTH

SEQ ID NO: 345550 - protein, 67 aa, Zea mays
  unsure (1)..(67): unsure at all Xaa locations
  Clone ID: MRT4577_7830C.1.pep
FLLLVPFRFRFDPCFLFLMHDVMLADTVTNVIVPSFDVXSLLPIICSTYDAKIDTLKNAHLSDICIS

SEQ ID NO: 345551 - protein, 73 aa, Zea mays
  Clone ID: MRT4577_78310C.1.pep
YVKSIKLSTASFICQHACLLCNGWDKNTWWHSHLEALSEFENFSLKFRFKLPSKDIGGNIEGSKSGNRKKEII

SEQ ID NO: 345552 - protein, 52 aa, Zea mays
  unsure (1)..(52): unsure at all Xaa locations
  Clone ID: MRT4577_78311C.1.pep
KYQSTAIWWITKCIVICTFTSPAHPRRVAEHQTKILIITXRNWCYXRPSFYS

SEQ ID NO: 345553 - protein, 60 aa, Zea mays
  Clone ID: MRT4577_78312C.1.pep
DRYNTKDCVQEIDLNAVSALATLAESRPSAADGVSHRDALHACAHNARLWLIRAEEPIHS

SEQ ID NO: 345554 - protein, 84 aa, Zea mays
  Clone ID: MRT4577_78313C.1.pep
ADQHPEQHRPPTVTLGPGPAVDPASRGGSSSQLLTPPPASATTLADEGLRCASSPSALDWSPPLLAGARRVCPTRPAHASRPRS

SEQ ID NO: 345555 - protein, 100 aa, Zea mays
  Clone ID: MRT4577_78314C.1.pep
QPEYAIGSVNKSEWRALTGHRVADLQSAVGEQYEKAFAGSQHVQVVPVGAGPACCPHHGAPLDGSVVQGVCPSLIGAPVPCIEDRYRGPAPVVAEALFGV

SEQ ID NO: 345556 - protein, 136 aa, Zea mays
  Clone ID: MRT4577_78315C.1.pep
SRWLQPPVPGRNWAQFGLGMGARSWIQTAPLDEWLGCRFHNPPLVLMVFNLNRGMGFALPILGGPVLKPQKAPHVMVGVLKEFGNMLAYGRLDLSITLFFPINKGDVFLFPPKKKKKKKKKKKKKKKKKLEESPGT

SEQ ID NO: 345557 - protein, 80 aa, Zea mays
  Clone ID: MRT4577_78316C.1.pep
WSPPKVTTPPPYSSPRMAYITPKLRIPIFPRGSPPLVFWIPQYENNMLLAIRPCLGLAPNLAPKVLRPSGACPSIRLFPS

SEQ ID NO: 345558 - protein, 172 aa, Zea mays
  Clone ID: MRT4577_78317C.1.pep
MGGVRGVDKAFFGLGKINPPVFLAPPNPTFFLGSGDYIFLGIVPSSQGTNKRGGGALFFGPPEDPGSPPFSPLGPSPPKYYYFFKTSLAPGVFSPLLLTPFFLIGMQLRHFPPLGLYTLFRWEKGPCGAPPSLSIYAGKKNRASPPQKKKKKKKKKKKKKKKKKKKKKKKKK

SEQ ID NO: 345559 - protein, 108 aa, Zea mays
  Clone ID: MRT4577_78318C.1.pep
LRPETTRTPCMKMAAPPAVARRAPDRLPRRGAYPLPVRCSYPLRISPPDATASTSPLTTESMVPYHYRITLSKVAELLLLEIHTMLNKMIFTMLSVIMRMCKDLHFYL

SEQ ID NO: 345560 - protein, 49 aa, Zea mays
  Clone ID: MRT4577_78319C.1.pep
MGKLKRGFSYIKRAGPPGFNPLQKKKKLQPGKNTTLGVEIDNHLGRIFH

SEQ ID NO: 345561 - protein, 85 aa, Zea mays
  Clone ID: MRT4577_7831C.1.pep
MGSGDPAADPLSSFLRHPGAFSFSRRVAMARDATATSVPALRPWIVDLLPLLVVLLIAAHVLALGYWIYRLATDGSRQPARSKKH

SEQ ID NO: 345562 - protein, 111 aa, Zea mays
  unsure (1)..(111): unsure at all Xaa locations
  Clone ID: MRT4577_78320C.1.pep
FNVTLAXLGRIWGSIVLQIVXLVNCEPDAXFIRTLGMMVCSVLCDLGGIFTPCMVLRLMQVWQVLLLIVCWVLGLTXAGAMTLLLPEINGVALTDTIEEAEKLWRGNHRPE

SEQ ID NO: 345563 - protein, 68 aa, Zea mays
  Clone ID: MRT4577_78321C.1.pep
LFYTRLNKYLCRVVTWIKPWATDRVARGVDPPLVPLVITLLHSIIALPRGCAVGHGCRFQCSHGDMCT

SEQ ID NO: 345564 - protein, 102 aa, Zea mays
  unsure (1)..(102): unsure at all Xaa locations
  Clone ID: MRT4577_78322C.1.pep
NITNIRTTSTPXNILRTITINTPINNNTNNTLRIPSTTATKHKKTKPHTTNMKRTKHSNKTRLPTNSNNLQNHHHHYRRRRHNRRNSHCNELHTDRISHFIS

SEQ ID NO: 345565 - protein, 87 aa, Zea mays
  Clone ID: MRT4577_78323C.1.pep
MGTRPAHINIVVIGHVGAGTSTTTGHLIYKCGGIDKRTIEKFEKEAAEMGKGSFKYSWVLDKLKAERERGITIDISLWTPPTSKYYV

SEQ ID NO: 345566 - protein, 91 aa, Zea mays
  Clone ID: MRT4577_78324C.1.pep
SPQERACQFHATYSQSYHQVSQECAVVFPASFIRSQCLSSQYRPHTRCHVCTSSSMQRIIASLICLQYVCHVTSPTMYPLSAPFVVPCVVP

SEQ ID NO: 345567 - protein, 76 aa, Zea mays
  unsure (1)..(76): unsure at all Xaa locations
  Clone ID: MRT4577_78325C.1.pep
KEQDWGTGRLSERRRQERLVRIKVSEKKSYIFRMRKQKRIXGWLFXEVGVSRRLEXXXXXXXXEGPQSCRXGALHX

SEQ ID NO: 345568 - protein, 88 aa, Zea mays
  unsure (1)..(88): unsure at all Xaa locations
  Clone ID: MRT4577_78326C.1.pep
ILIELLQRSGGGGGGDIYHFATEGATSHVQMSNARTLSXLPTAGTTARHLGQTFVPGPPVIYLTHKPVDYQHWGTRYSSTPSKSRPRP

SEQ ID NO: 345569 - protein, 161 aa, Zea mays
  Clone ID: MRT4577_78327C.1.pep
MAAKQRHRQLPLLPLLAAAVAWSLLRAAAAAGTGTGTLGLRHKPARQHNSTRHGGGRRAQRGGAPGTGMASCNLFQGSWVYDDTLPMYDAAGCPFVEPEFDCQKYGRPDKLYLKYRWRPASCELPRFNGQDLLRRWKGKKILFVGDSISLNQWESLACMLR

SEQ ID NO: 345570 - protein, 118 aa, Zea mays
  unsure (1)..(118): unsure at all Xaa locations
  Clone ID: MRT4577_78328C.1.pep
NATYIISVARKIGCSVFLFPEDRAXLNSXQILTLTASIMYWSLQKQPQSQSELTEQSEPSSMTSDAASEVASEDGASTTAPSESEEVNSLSDSISNLTTDDATSNAPSAENGNGVAGS

SEQ ID NO: 345571 - protein, 173 aa, Zea mays
  unsure (1)..(173): unsure at all Xaa locations
  Clone ID: MRT4577_78329C.1.pep
MQPSCLGACSGGGLALSARRLLAPSYCRVAPHRASASCSAGGGGKASPRGKDNVWSVDNDRAAKEAVRGPKHRRRKRPSGRRLXRRGGRGWMRGRXVLVSGAMLVEVETVLQTQEPVIKPSWDTFASSLTGNWKGVGAIFSPITAEMEPVGVGNKEEYLYDCYTLSHIERSFD

SEQ ID NO: 345572 - protein, 82 aa, Zea mays
  Clone ID: MRT4577_7832C.1.pep
FSSLSSNIFMFLIKFCLMIWRKNFLCKVRCLVCCILRLDNRQNPLLTYILTFMLTSMMESCWYLNNQTSQIRGVLNIIPLLE

SEQ ID NO: 345573 - protein, 106 aa, Zea mays
  Clone ID: MRT4577_78330C.1.pep
LLYLSSYHAQEAEVLKISLLVATTLGTMKALFPVTAVYGKKEQGLHNHPHQDPATPFPFSADGAFEVASSVVKFDMLSDSEFHLFLTRTVLSLKHPPPRQLQRLRQ

SEQ ID NO: 345574 - protein, 705 aa, Zea mays
  Clone ID: MRT4577_78331C.1.pep
MSGFVGVVVSDPSLQGQFTQVELRSLKAKFVSLKRDSGHVTTKNLPVMMKKLRGLNEVVSVEEIAAFLSESYPDSDQEIEFESFLREYLNLQARVSAKEGGAGGGRGGKSSFLKSSITTLLHNLNQAEKSSYVAHINTYLREDPFLKKYLPIDPSGNQLFDLIRDGVLLCKLINVAVPGTIDERAINTKRPLNPWERNENHTLCLNSAKAIGCTVVNIGTQDLVEGRPHLVLGLISQIIKIQLLADLNLKKTPQLVELFDDSKDIDEVLSLSPEKMLLRWMNHHLKKAGYKKTVNNFSSDVKDGEAYAYLLKALAPEHSPETTLDTKDPNERAKLVLEQAEKLDCKRYLTPKDITEGSANLNLAFVAQIFQHRNGLTSDTKQVTLTQTATHDDVLLSREERAFRMWINSLGVESYVNNVFEDVRNGWVLLEVLDKVSPGSVNWKLATKPPIKLPFRKLENCNQVVKIGKQLKFSLVNLAGNDIVQGNKKLIVALLWQLMRFNILQLLNKLRFHSQGGSQGKEISDADILDWANSKVKASGRTSRMESFKDKSLSNGLFFLELLSTVQPRVVNWKVVTKGETDEDKKLNATYIISVARKIGCSVFLLPEDIVEVNQKMILTLTASIMYWSLQNQHQSQSEMPEQSEPSSMASDAASDIASEDGASTTAPSELDEVNSLSDSVSNLTTDDATSNAPSTENGNGVAGS

SEQ ID NO: 345575 - protein, 76 aa, Zea mays
  Clone ID: MRT4577_78332C.1.pep
MDFEHCISCLAAAKRFYAVQLGHSDRAGMDELEMDEEVRPEFLWPYWYEDQDVGSLCAHLEEEHPFQPQAVVCPGC

SEQ ID NO: 345576 - protein, 83 aa, Zea mays
  Clone ID: MRT4577_78333C.1.pep
DGTTEGGCARGSSRSYVSSGRRRSPKVSAICRSLDLRYQCSLTGTSLALPSLLHVANIGLSPAGLLANGAATVAGLTICAAVM

SEQ ID NO: 345577 - protein, 189 aa, Zea mays
  unsure (1)..(189): unsure at all Xaa locations
  Clone ID: MRT4577_78334C.1.pep
LEENLRSPVKRXVXAVXRKTLSTXATGALHXARFCEKDLXTAVXREAVFAYADDPCSATYPLMQKMRSVLVEHALANGEAERDPDTSVFAKVATFEEELRAXLPREVDAARAAVESXTAAIRNRIAECRSYPLYRFVREELGTEYLTGEKARSPGEEVDKVFVAMNLGKHIDAVLECLKEWNGEPLPIC

SEQ ID NO: 345578 - protein, 304 aa, Zea mays
  unsure (1)..(304): unsure at all Xaa locations
  Clone ID: MRT4577_78335C.1.pep
MLDHLVSSYTHRSGGDQPAAPSPCDLASVDDVPGNGGHKPGKAVTASVYRAKIAGHSRVVTVSWSRDLLSHAFSVAISGADGASAECRVELRPWQFWRRAGSRRVELVGGGSASAAVRVLWDLRRARFCGGVPEPRCGYFVALEAAGEVVLVQGDMRRRRAEAEAVPVARREHVFGRRRFAAKARFDEQGDVHDIAIECGGEGGGGDGDVEMTIAIDGEEAVQVKHLQWKFRGNQSLTFSRAKVEVFWDVHDWLFSAGTRPALFIFRPIVLSXASAPAGMLDGGAVVPAATTGFCLYLYAWKLD

SEQ ID NO: 345579 - protein, 54 aa, Zea mays
  Clone ID: MRT4577_78336C.1.pep
PSGLLSGPLMEPMSIRLMRRSLSAAHESVLPAQAARVPAGPAEGAAKPVFLRDR

SEQ ID NO: 345580 - protein, 94 aa, Zea mays
  Clone ID: MRT4577_78337C.1.pep
IPEGFSWGSASPFFFSRLSSLPTVNTGRLCAHLVGSVTSDGTASFLLYWLNLVVVCMVSVYSPCFDTSCFQCLLCLGPTSFDVPKLGIVYSKSL

SEQ ID NO: 345581 - protein, 77 aa, Zea mays
  unsure (1)..(77): unsure at all Xaa locations
  Clone ID: MRT4577_78339C.1.pep
LSYIQGVLAEILXFVMGTRLIQADGEIWRVRRRVIAPALHQKYVNAMIGLLGEASQRLCLQDKRIYIKWQTTRAPYL

SEQ ID NO: 345582 - protein, 77 aa, Zea mays
  Clone ID: MRT4577_7833C.1.pep
EHVHLKNPCKRSRPRTSMHATSSRRNRNPAGSFTILSEQMNCFVSCRNVESLWNSRIQERRPLASSLLTSGGAVIYC

SEQ ID NO: 345583 - protein, 88 aa, Zea mays
  Clone ID: MRT4577_78340C.1.pep
HDGQGPLLGTGLTAQPPASRAPMRLRLRLPGSPLQVPRPAASTMTATAPLTACMTSRFISSTITITPRSSPSRSYTRTRLHSTLQKKR

SEQ ID NO: 345584 - protein, 115 aa, Zea mays
  Clone ID: MRT4577_78341C.1.pep
FENSNVLQQLRCGGVLEAIRISCLGYPTRRRFDEFVDRFGVLLPEVLGESYDEVTATNMLLDKVNLTGYQVSYKWLTFVVFMCLNQSSTMFGFSLSSQLFSFILIHHISCILVIL

SEQ ID NO: 345585 - protein, 106 aa, Zea mays
  unsure (1)..(106): unsure at all Xaa locations
  Clone ID: MRT4577_78342C.1.pep
AELPSPRPTKPHRAPTALRPPPXNHAAGAQPSCTSALIARAPWSTSHPVPLVWLSLPSGPILSYPASSDCNKLQKLRSGILRPIWPIRQLLRAMKAGPCDLLPHQT

SEQ ID NO: 345586 - protein, 127 aa, Zea mays
  unsure (1)..(127): unsure at all Xaa locations
  Clone ID: MRT4577_78343C.1.pep
FARLKLQPGDXRALWFFFTWMQAKHANFFXVIDLHDEGCPTNVLWADARPRAMCEFYRDVVTLDTXYEARKYNMPLATLIGVNHHGQYVLMGCAXISDETTETYSWLLKTWIACMYGNLTNAIDTDY

SEQ ID NO: 345587 - protein, 28 aa, Zea mays
  Clone ID: MRT4577_78344C.1.pep
LASHHGCTTLDPAPASPHPTRYRASVSH

SEQ ID NO: 345588 - protein, 61 aa, Zea mays
  Clone ID: MRT4577_78345C.1.pep
RKKILLFITKIKKTTRALKKACNGMCSYPWPYMNTASTPTLFIYDIMTPSHARHPHTYIYV

SEQ ID NO: 345589 - protein, 74 aa, Zea mays
  Clone ID: MRT4577_78346C.1.pep
SSQHSILLHYKLSFKSYRARLLRGPSLLSLFLTFIPFLLGPPLFNPAPLFFHPLPWKYPLRSPIFSFWSHSLFP

SEQ ID NO: 345590 - protein, 98 aa, Zea mays
  unsure (1)..(98): unsure at all Xaa locations
  Clone ID: MRT4577_78347C.1.pep
EIQSLRDLDLYDNQIKKIENLEAXLTELEILDISFNLLRNIEGVEKLTRLKKLFLVNNKISTIVNLSNLHQLXMLELGSSRIRAIANIGTLSILESLF

SEQ ID NO: 345591 - protein, 74 aa, Zea mays
  unsure (1)..(74): unsure at all Xaa locations
  Clone ID: MRT4577_78348C.1.pep
VCTEKYRVWLLHAKEKGLCSALTNIVLVGIQLFGEHCCSVLVCLGLPFLKRCGXVDVALVFRTAGVNAEEWVYV

SEQ ID NO: 345592 - protein, 49 aa, Zea mays
  Clone ID: MRT4577_78349C.1.pep
MAGEHGLKLRDQVRKLRATLEAAVAPGGSSRRNFDDFVDELKRKLKDAS

SEQ ID NO: 345593 - protein, 66 aa, Zea mays
  Clone ID: MRT4577_7834C.1.pep
AEPWRPRKYFKFFRVARKTRVLGYYSPGEGRGVNNNKRLKKFGGFPMGKRLFVPRNEVIPGVGFVE

SEQ ID NO: 345594 - protein, 264 aa, Zea mays
  unsure (1)..(264): unsure at all Xaa locations
  Clone ID: MRT4577_78350C.1.pep
SYAVKVLENAGLSTCXQVXXPMEXRLKLLKDSDSPQVDATKYRSLIGSLRYLMNTRPDLAFSVGYLSRFMQDPRQEHLVAMKRVLRYIAGTVNHGLVYNKMGEELSLTGYSDSDHGGDANDGKSTTGVIFFLNECPVTWQSQKQRVVALSSCEAEYIAGAVGACQGVWLKRLLADILGTNLASPVLMMDNMSALALSKNPVLHDRSKHIDLKYHYLRECAENGEVQLQFVRSEEQCADILTKALGKTKFQEFRKKIGVVRHDGD

SEQ ID NO: 345595 - protein, 110 aa, Zea mays
  Clone ID: MRT4577_78351C.1.pep
DVNICLIKCYMQQLFVGLQHCHERGILHQDIKGSNLLIDYPDIPPCNNGVGSTMQDLAHAIGNTEVRPIPWPSFSFSPIGLASLLALESIAVVGGRCVLQKSAKLRLSIG

SEQ ID NO: 345596 - protein, 300 aa, Zea mays
  Clone ID: MRT4577_78352C.1.pep
IEHLLQQYLKPSPTLIGAKLFVGLQHCHERGILHQDIKGSNLLIDYPDMLGDFGLNNYGAGHRQPLTSRVVTLWYRTPVLLLNSTSYGVGFDLWSAGCLNEIFFGKPLMPGSGEMYQLLKIFKLCGSPPDMVELQQHINNGHAVLGAHRVFEELSSHVIATCNNGVGSTMQDLAHAIGNTEVWPIPWPSFSFSPIGLAPLLALESIAVVGGRCVLQKSAKFKIIYRLSSVLAWFVGSGDQELRWLSSYLFMHYGNSWKLVVYDGQGHILVTMLSSISIREVGSFRCVLKFIWVLFWSWVS

SEQ ID NO: 345597 - protein, 116 aa, Zea mays
  Clone ID: MRT4577_78353C.1.pep
PPPPKGGPSRGGPGGFSLWAPPGGPGFVFGALGGPISGFFFFPPPLPRGLPVFGPNKKPCGPGGTGGIRIIIVFFRGAAFCPPNGLAPGWGRLCCLLGCRAGNVSPFSNFNQVGWF

SEQ ID NO: 345598 - protein, 153 aa, Zea mays
  Clone ID: MRT4577_78354C.1.pep
MSHLLERETDIAVLPHSDQRDGVEARLILRGCTPASFTVASIGPNNEISGAVPPDALAKAAPALFASRAPRPSLKYLELLLPAEIGSDHIELPTAATARHIVAQVTGSNMVSVAEGQLRCALVITHNFLSGHHQAVSKEWDVVAFAHPVCNLE

SEQ ID NO: 345599 - protein, 119 aa, Zea mays
  Clone ID: MRT4577_78355C.1.pep
KKIRGGNIFWGLGRGEIPKPRLTPPYTNEKLRTPPYSGVKRGQTYVPPQKKGGAGYNFKTPTRRKRGGTTIRGGSISRKRGVFFPRGPSGGTWGPFFFRGARGRENPREPRPPPPKPFS

SEQ ID NO: 345600 - protein, 106 aa, Zea mays
  Clone ID: MRT4577_78356C.1.pep
PGLGRQGPQKRGPGRRPVWGSGGGFALTRGDHPRVPGDPFLKKTCLRGVPWAGAGVPLCGPNKGLIFWGLPKKKKKKKKKKKKKKKKKKPKKKKKKKKNTLRCYHC

SEQ ID NO: 345601 - protein, 172 aa, Zea mays
  unsure (1)..(172): unsure at all Xaa locations
  Clone ID: MRT4577_78357C.1.pep
MSTEEAAEADVPVALDVAXEIPKRQVMKAPKAKKAPKDXKGPSEXELPWANKPAGDAPHXREXMCVRASRLXSRVEGRCYYSHGXCKYVRGRRHGGXKLRTNFRKQLTAQLXKLVVDGRLMRGNNFLMLPATDSKPKVDNPMVPKAEPKPKSSAEAKAKTAAKPKAVLVQTQ

SEQ ID NO: 345602 - protein, 52 aa, Zea mays
  Clone ID: MRT4577_78358C.1.pep
QGGGPLILYKHKHNGVFTYWGREARPLNPNYTLNKGGRSTLYNYYRAAARVA

SEQ ID NO: 345603 - protein, 83 aa, Zea mays
  unsure (1)..(83): unsure at all Xaa locations
  Clone ID: MRT4577_78359C.1.pep
IVRGSVLKDAGESLYNAGKIRERQVMITATSKGNITVLTGLPRHRYNGXFWYSGTHRTGTMGVELMGILETRGDIRPRFDEQC

SEQ ID NO: 345604 - protein, 99 aa, Zea mays
  Clone ID: MRT4577_7835C.1.pep
WGGQLTRSYLNPAFIFIPLGGVVLLNFGPHSRAGRAGLIAISKRTTPIGAPIAGVEIPTPPLGGPLKTPGAGLGGRPNKNQGLKASGGGGLHLRGHAIA

SEQ ID NO: 345605 - protein, 154 aa, Zea mays
  Clone ID: MRT4577_78360C.1.pep
RHKHLMAGHPRAAKILGGPNKGETNQTGHPGPPGISFFTGFPPGLWTPNIGRTPGKHYNTNGVGPHPRHWSHPHLGREPPGVPRGGGGKKNPGPAAAAGAPMGGAPPGLFPLFFFLGLLPLGALGLGPPGLFAGPPGDLGLDLFHKAPLGPPAL

SEQ ID NO: 345606 - protein, 98 aa, Zea mays
  unsure (1)..(98): unsure at all Xaa locations
  Clone ID: MRT4577_78361C.1.pep
FGSRTNDLSSLAYHQGGDRLLSNTASINXPDHVELKWPLDPGTDAKLQAICGTIVFLTASYTSSKAKSTAMPINAYALAAEKERASDITYDDXGSGSG

SEQ ID NO: 345607 - protein, 68 aa, Zea mays
  unsure (1)..(68): unsure at all Xaa locations
  Clone ID: MRT4577_78362C.1.pep
GLSDDREAVGXIKLNSYNAPRLDMFSRLGFFVRPMVSGEGLCKTCAVHIDESVRNNAWAXATNVVCGS

SEQ ID NO: 345608 - protein, 106 aa, Zea mays
  Clone ID: MRT4577_78363C.1.pep
KTFHLLKKKKKKIKRTKKLGRNKQKNTCMLTIIGGRVALLNVVSLTVLVRGPNWKYPAGSFLSGVVEHRGVSKCHGLAEVSPFGPYHHLHSVHGDWDAPWDGPLNV

SEQ ID NO: 345609 - protein, 88 aa, Zea mays
  Clone ID: MRT4577_78364C.1.pep
GTAIGPGVTDPVPPGYRCFFWRWRGATSPATEQRASWGRWVRSLFQPLRCLASWGFARSRYWWFLRDGYGLHLFSVGFGVVTLAFKTG

SEQ ID NO: 345610 - protein, 332 aa, Zea mays
  Clone ID: MRT4577_78365C.1.pep
MARAGGGGPVRGAALVVVLLGIVAGAARAQLRLNYYGSSCPSAESTVRSVISQRLQQSFAVGPGTLRLFFHDCFVRGCDASVMLMAPNGDDESHSGADATLSPDAVDAINKAKAAVEALPGCAGKVSCADILAMAARDVVSLLGGPSYGVELGRLDGKTFNRAIVKHVLPGPGFNLDQLNALFAQNGLTQTDMIALSGAHTIGVTHCDKFVRRIYTFKQRLAWNPPMNLDFLRSLRRVCPLSYSPTAFAMLDVTTPRVFDNAYFNNLRYNKGLLASDQVLFTDRRSRPTVNLFAANATAFYEAFVAAMAKLGRIGLKTGADGEIRRVCTAVN

SEQ ID NO: 345611 - protein, 52 aa, Zea mays
  Clone ID: MRT4577_78366C.1.pep
FTDRRSRPTVNLFAANATAFYEAFVAAMAKLGRIGLKTGADGEIRRVCTAVN

SEQ ID NO: 345612 - protein, 66 aa, Zea mays
  Clone ID: MRT4577_78367C.1.pep
CTWKTGIMGGEQVSKAKTLQLLLFLLVLSRWPAQSLLWSFTARPICKGTAAVVDLRAQSNKEREEK

SEQ ID NO: 345613 - protein, 79 aa, Zea mays
  Clone ID: MRT4577_78368C.1.pep
MYNSGITTSYQSLETDTSYKFKTKKNKQEDRQTSLHSTTHLGDLSRTSYLAHAYRITNGDPTVPEHVAHQVRQPCCLRR

SEQ ID NO: 345614 - protein, 513 aa, Zea mays
  unsure (1)..(513): unsure at all Xaa locations
  Clone ID: MRT4577_78369C.1.pep
NAAGAEAGVGAAVTRRIMASLKIPGDEYAMVCTANRTAAFRLLAESYSFQPGKQLLPVYDYESEAVGAMADSARRRGAEVASATFAWPSMRIHGADLRKRLARGRRRGGGGRGLFVFPLASRMTGARYPYLWMSAAHQQGWHVALDACALGTKDLDTLGLSLIRPDFIVCNFFKVFGENPSGFAGLFVKRSSGLAALERSVIARSIGIVSIVPARRWSLHDGYSTELEHSRSFPKLAADPALDDADVETKSSFSGPLSSTAITRSRTLQSDAAENGDAHAHAPEIREVGSTAENGFYSEEPRAEETERLAKEEQDGEGRESVMEVECRGLDHADALGLIAIGNRLRCISNWLVVALQKLRHPHADNGHPLVRLYGPRVKFDRGPSLAFNVFDWKGERVSPLLVQKLADRHNISLTCGFLCNIWFSDKHEAERAVVLEHRXRRSRRRGQRRREEEEGRXGGDVGILVVNASLGFLSNFEDAYRLWAFVAKFLDADFVEKERWRYTALNQKTVEV

SEQ ID NO: 345615 - protein, 61 aa, Zea mays
  Clone ID: MRT4577_7836C.1.pep
TVFLYYLVQYQLNFNTIHVLFQWTIHFNVYCNYFIIYQMYDRHQPNLFFLLYLNTLMFYHF

SEQ ID NO: 345616 - protein, 348 aa, Zea mays
  Clone ID: MRT4577_78370C.1.pep
MAKGGGERGTLLPVSADDGKGNDGGGGGDDAVLFKGSAMTRRGGAAALSYMACSVLLVMFNKAALSSYKFPCANVITLLQMVCSTCLLYVLRRLKIISFTNSDPSVPSDSLFFVPFRLLLRTTPLSLAYLLYMLASMESVRGVNVPMYTTLRRTTVVFTMTMEYFLAKQRHTPPIIGSVALIVFGAFVAGARDLSFDARGYAIVFVANITTAVYLATINRIGKSSGLNSFGLMWCNGLVCGPSVLFLTYIQGDLKRTMEFPYLHSLGFQVVLLFSCILAFLLNYTIFWNTILNSALTQSMCGNLKDFFTVGIGWVLFGGLPFDLLNVIGQGLGFLGSGLYAYCKIRGK

SEQ ID NO: 345617 - protein, 130 aa, Zea mays
  Clone ID: MRT4577_78371C.1.pep
RNRHRWPGQPTSPPRAGTRRLGPGPQGEALAPPTNWGGLPPPGHPGVPSCCCIPCRRVKQKIWSSVPGNCFKICPRKKFWFLCKPKPVGNNPTPTGGQKCLDLKIEIFPGVFGRWVWLKKKGVSFLFSEV

SEQ ID NO: 345618 - protein, 124 aa, Zea mays
  Clone ID: MRT4577_78372C.1.pep
MTRRGGAAALSYMACSVLLVMFNKAALSSYKFPCANVITLLQMVIVAHHTSFLGLFTLHASMESVRGVNVPMYTTLRRTTVVFTMTMEYFLAKQRHTPPIIGSVALIVFGAFVAGARDLSFDAR

SEQ ID NO: 345619 - protein, 66 aa, Zea mays
  unsure (1)..(66): unsure at all Xaa locations
  Clone ID: MRT4577_78373C.1.pep
MVKICCIGAGYVRGPPMAEIGLKCPDIAVDGVDIHKQRIEAWNSDTLPIXYEPRLHDLVKQCCGRN

SEQ ID NO: 345620 - protein, 348 aa, Zea mays
  Clone ID: MRT4577_78374C.1.pep
MAKGGVERGALLPVSADDGKGNGGGAGGDDAVLFKGSAMTRRGGTAALSYMACSVLLVMFNKAALSSYNFPCANVITLLQMVCSTCLLYVLRRLKIISFTNSDPSVPSDSLFFVPFRLLLRTTPLSLAYLLYMLASMESVRGVNVPMYTTLRRTTVVFTMTMEYFLAKQKHTPPIIGSVALIVFGAFVAGARDLSFDARGYAIVFVANITTAVYLATINRIGKSSGLNSFGLMWCNGLVCGPSVLLLTYIQGDLKRAMEFPYLYSPGFMTVLLFSCILAFLLNYTIFWNTILNSALTQSMCGNLKDFFTVGIGWVLFGGLPFDLLNVIGQGLGFLGSGLYAYCKIKGK

SEQ ID NO: 345621 - protein, 71 aa, Zea mays
  Clone ID: MRT4577_78375C.1.pep
GPEPQGFIGPGGQGATQPHLWGGPTGPGLKHYPGDKGPGRGSYFGCRLIKEPGGPLPPPHPGRALFDRDPL

SEQ ID NO: 345622 - protein, 83 aa, Zea mays
  unsure (1)..(83): unsure at all Xaa locations
  Clone ID: MRT4577_78376C.1.pep
PTQRTQTXDTKNKXSFXYXXXNKNTRPFYLKFQNPTTXXXXKFKEIVKSYESIKSYRKNSLNLFKLPLLSYQLLKTLTLSLSN

SEQ ID NO: 345623 - protein, 45 aa, Zea mays
  Clone ID: MRT4577_78377C.1.pep
IMWPGFPPRFGAFSTSFRRCGLRLCTFSGPLPHVGLRRLCPMLSS

SEQ ID NO: 345624 - protein, 65 aa, Zea mays
  Clone ID: MRT4577_78378C.1.pep
GAHSIYHAPFIRLCCRMTRQGRRGITTRRCRCQRPTEAFLPGVVIPREAESHTSPPLSRSGCAFT

SEQ ID NO: 345625 - protein, 87 aa, Zea mays
  Clone ID: MRT4577_78379C.1.pep
QTSHKAVGIPRALDQAFPEPVESAGGLVRPGRCKDRVDSRAWGLPVSVPLAPVSKVGATRGHPGSSPSLQMKTATRSQLPPPRRESV

SEQ ID NO: 345626 - protein, 79 aa, Zea mays
  Clone ID: MRT4577_7837C.1.pep
YMYIEPTHPQSCLLNWRNTLPKHYFICIPYLAVEIKGAIHNTDPAWTNRKPAHIIAFLKGRKFLLPFDEPYVCNHEAMG

SEQ ID NO: 345627 - protein, 56 aa, Zea mays
  Clone ID: MRT4577_78380C.1.pep
IPSGMTSVIHVVSAAHPACLEPALAASARRARATISTFMVSSSPNLESMSLIVRLT

SEQ ID NO: 345628 - protein, 69 aa, Zea mays
  Clone ID: MRT4577_78381C.1.pep
WPARPNLKTKTAGKDKATPKGRESQNEPLSTQPLRFPGRNHWPTHLQPFRTNPVQLSPCLQGRHSLWAC

SEQ ID NO: 345629 - protein, 125 aa, Zea mays
  Clone ID: MRT4577_78382C.1.pep
RGTGGSSTARGQTTCSLGQAGGLGAGARRATRARGLARPRPQRLPSQRTSPWRGGPRPQRLGRGTTMAAQGAAPGGVGAQPLLAGRRPWRGISARPPSWRGPSSALLQRVARARSNDQQPPCRCL

SEQ ID NO: 345630 - protein, 93 aa, Zea mays
  unsure (1)..(93): unsure at all Xaa locations
  Clone ID: MRT4577_78383C.1.pep
QKPPREAPGEAKAAAARQRGTEKXHNDTKGXGXNTPEDGSEEXXXHQXXXKXEGHRXHAEGEEEEXTDTEGDDGRXKAXDXTGPDGTXDRGGG

SEQ ID NO: 345631 - protein, 60 aa, Zea mays
  Clone ID: MRT4577_78384C.1.pep
MDPNCSCSTGGSCTCSSSCGFKNCKCTSCNKICCSCCPVGCSKCAQGCVCKGASDKCTCC

SEQ ID NO: 345632 - protein, 515 aa, Zea mays
  Clone ID: MRT4577_78385C.1.pep
MDGLVAPSPSHSGATSGGGASHRKRKLPPSSLSDATGDEDDDTTAPSSPSTAPSSPSRPSSPSSSHSDDDDDDSLHTFNAARLDGAPSGGSASGRPPKPDSSSVSAAAAAAAAAVGGGPKPEPGSANAGDGKEDTKGLFTDNLQTSGAYSAREEGLKREEDSGRLKFLCYSNDGVDEHMIWLVGLKNIFARQLPNMPKEYIVRLVMDRTHKSMMVIRNNIVVGGITYRPYASQRFGEIAFCAITADEQVKGYGTRLMNHLKQHARDADGLTHFLTYADNNAVGYFVKQGFTKEITLDKERWQGYIKDYDGGILMECKIDPKLPYVDVATMIRRQRQAIDEKIRELSNCHIVYSGIDFQKKEAGIPRRLIKPEDIPGLREAGWTPDQLGHSKSRSSFSPDYNTYRQQLTTLMQTALKNLNEHPDAWPFKEPVDSRDVPDYYDIIKDPIDLRTMLRRVDSEQYYVTLEMFVADMKRMFSNARTYNSPDTIYYKCATRLENFFSGRITVLLAQLSTKS

SEQ ID NO: 345633 - protein, 166 aa, Zea mays
  Clone ID: MRT4577_78386C.1.pep
AWRQRQLAVQLVAWACLPPMQSIRARWSRPRRGLERRGPGLAQRGRSSLRGHCQPGAALARARGLAAGVWPRRGAGVVSVLGEPLLGGRALDGVGAQSLWRKFWRAARPSSVRKIAAHMCAKNSTIAHENRQIQDDFVGTKLKKTSNREPLTIFMFVVAKKKKKQK

SEQ ID NO: 345634 - protein, 433 aa, Zea mays
  Clone ID: MRT4577_78387C.1.pep
MPPGKRSTRPSQNSEEDPRTEYEKMRAMNMMKNNQLFQRLGLGQLKTMITATTANNKQGSPQELGSLYDGENVEDSGEEDVGMEFEARKGVPTHISNDGEQMSTKVTRGNKRIMAPVQERPVRVTRQRVAELNQESTHSLNVCTQPSSSAATNHDLTHNLIVPTHPSSSTATNHEPIQDMDTVAQPTFQIQEGDNHTGNQEIIPRRKSMGRQLESLSRGLGIKIPIQISEGNKRPEPPIQAAKFASEGGITLRQHIPIFNHWKEYKKRENEPIIRNYIGKVTANFTVDSESKTVEDACLDMLKSGQRQMRYRLKQKYFNGIPANQVRTTSPISSMSDNDWRKLVEKWSTPNHKESCVKNKLNREKVQYQQCTGSQSYIAKAYILVDLEEIVAAPVQDGQQPKSPTKVVSNVLSSSSVFLCNLVFIPPPRKAPQ

SEQ ID NO: 345635 - protein, 140 aa, Zea mays
  Clone ID: MRT4577_78388C.1.pep
VCLLFAAASTIQPAVCGLHFAFVPFYHLAAFNSRAYFQQHQLLPFSHLVSLSRGLSRHSHNCCGCPSTLRLTLAPFYHCHGCHHSAWPAFPNPLSCSYQTTHHWWCPLIDLKIRKSSKKKKKKKKSLFKKKSLYLPGRPL

SEQ ID NO: 345636 - protein, 205 aa, Zea mays
  Clone ID: MRT4577_78389C.1.pep
MPPGKRSTRPSQNSEEDPRTEYEKMRAMNMMKNNQLFQRLGLGQLKTMITATTANNKQGSPQELGSLYDGENVEDSGEEDVGMEFQARKGVPTHISNDGEQMSTKVTRGNKRIMAPVQERPVRVTRQRVAELNQESTHSLNVCTQPSSSAATNHDLTHNLIVPTHPSSSTATNHEPIQDMDTVAQPTFQIQEGDNHTGNQGKWAS

SEQ ID NO: 345637 - protein, 86 aa, Zea mays
  Clone ID: MRT4577_7838C.1.pep
CSSCALRGPTSCQGGRRRIKSSYEPRSEGEVVHLLRAIAEEVLVVDAGPVQDHLVDRHSGRAASALSPSSLAFAPSASSSLEVHSR

SEQ ID NO: 345638 - protein, 104 aa, Zea mays
  Clone ID: MRT4577_78390C.1.pep
VWTSRGMGYGGRPEPPLPHDASSTLYIEGLPANCTRRDMVADLSHLFRLMHQALYILRAYLQTAHDGRFHIYFAHLLVFVKFVLSTRSPDNTCGSPPGCLPTRP

SEQ ID NO: 345639 - protein, 538 aa, Zea mays
  Clone ID: MRT4577_78391C.1.pep
MPPGKRSTQPSRNSEEDPLTEYEKMRAVNMMKNNQLFQRLGLGQLKTMITATTTNNNQGGPQESGSLYDGENVEDSGEEDVGMEFQARKGVPTHISNDGEHMSTKVTRGNKRIMAPVQERPVRVTRQRVAEVNQMSTHSLNVSTQPSSSAATNHDLTHNLIVPTHPSSNTATNHEPIQDMDTIAQPTFQIQEGDNHTGNQEIIPRRKSMGRQLESLSRGLGINIPIQITEGNKRPEPPIQAAKFASEGGITLRQHIPIFNHWKEYKKRENEPIIRNYIGKVTANFTVDSESKTVEDACLDMLKSGQRQMRYRLKQKYFNGIPANQVRTTSPIPSMSDNDWRKLVEKWSTPNHKESCVKNKLNREKVQYQQCTGSQSYIAKAFILKQEKYKDAEPSAIDLFKEMHCSKKKGFSENVQKAIVDMEEMVAAPVQDGQQPKSPTEVVSNVLPGSSVFLRNVGLKSASQKSSTTTVSAKVQQLQDELETEKQEKDGLREEVETLKAQAQASQETVDSMKRSMEENNNLLRQLLSFNRGQVPPS

SEQ ID NO: 345640 - protein, 105 aa, Zea mays
  unsure (1)..(105): unsure at all Xaa locations
  Clone ID: MRT4577_78392C.1.pep
NKFTXXESXGWKIGXXYXNWASXKIFTDXDXLVXNXXXGSYDVVEVDKSGXDXCXXXNXANKXXXXXAXVNXIFGXYYXIXGISGHCSGGMKFXVXVGFGFGFGF

SEQ ID NO: 345641 - protein, 175 aa, Zea mays
  Clone ID: MRT4577_78393C.1.pep
MSPPGGSERESGLARVLGSGSAGIAELAVFHPVDTIAKRLMSNQSRISGSSQLNQVIFRDTASATVGKKFVSLFPGLGYAAGYKVLQRIYKYGGQPVARDFLAKNYGSDFENAFGKKTGKAIMHSTAGSLIGIGEIVLLPLDVLKIKRQTNPEAFRGRGVLKIVADEGFGLYRGW

SEQ ID NO: 345642 - protein, 65 aa, Zea mays
  Clone ID: MRT4577_78394C.1.pep
ESGTSLITYLLESLGPNFLKPRAIITYQFWPNSLLLQLLCNIPKQILPSYGTAKESLFKGHIHWL

SEQ ID NO: 345643 - protein, 157 aa, Zea mays
  Clone ID: MRT4577_78395C.1.pep
SWPCRLRFCCCLLADSAVLGAPVLRGSRCCACPLSGPVGPPPPAPSPVAGVVLGRRCVVAVFRPSAAVSAFPAPRLAFCPRWARSSASAVRALVLYLSGLSCSSCTHRTGAVFSSSPSPVSSGGGGGAVWSSGARWRCVVSRWLIGERSCCVAGCVG

SEQ ID NO: 345644 - protein, 385 aa, Zea mays
  unsure (1)..(385): unsure at all Xaa locations
  Clone ID: MRT4577_78396C.1.pep
PAGIAAVSSSLHVGKAGPMVXTGACIAAIFGQGGSRKYGLTCRWLRYFKNDRDRRDLVTIGAGAGVAAAFRAPVGGVLFALESLSSWWRSALIWRSFFTTAVVAVVLRLFIELCGTGRCGMFGRGGLIMYDVSTVFDDLMTYHLKDVPTVILIGVTGALLGGLYNFLMIKVLRLYNAINERGGAHKLLLAATVSIVTSCCVFGLPWLAPCRPCPTTGPLSSPDGTCHALNRFRRFHCPKGHYNDLASLFLNINDDAIRNLYSTGTNDVYHPVSMVIFFVASYALGVLSYGVVAPSGLFVPIILTGATYGRLVAMLLGGRSGLDHGLVAILGSASFLGGTLRMTVSVCVIILELTNNLLLLPLVMLVLLISKTVADSFNSSIYDLI

SEQ ID NO: 345645 - protein, 69 aa, Zea mays
  Clone ID: MRT4577_78397C.1.pep
PITRLNNGCHTNHIHAGSIVPNPMLCVRKTHAPCHLVSPCVRECVREFGLDPNNNLCISQRFTHICMVW

SEQ ID NO: 345646 - protein, 44 aa, Zea mays
  Clone ID: MRT4577_78398C.1.pep
FLLLLTWIYILLCLLTYKSHIFPILFASRTRLFNIPTRHIRHIR

SEQ ID NO: 345647 - protein, 64 aa, Zea mays
  Clone ID: MRT4577_78399C.1.pep
YPVICHEVVLIVLCFGRFLPIRRCVVYNLRCKTLFPPFPTGLLSLAIMFYKSIKSFAFTTCFIC

SEQ ID NO: 345648 - protein, 40 aa, Zea mays
  Clone ID: MRT4577_7839C.1.pep
EKNRQSYRQLRDYRKVPSAKALRPRLSGRGQGRGEVQFQP

SEQ ID NO: 345649 - protein, 145 aa, Zea mays
  unsure (1)..(145): unsure at all Xaa locations
  Clone ID: MRT4577_783C.1.pep
QALKAKIQVWPRXLSAEAGGKGADKKNLTDQRDLFQRILDFVKYGECPEESIKIAGKRDVLRVSSWSELIQLNFLKRFLGKGFLKHVQENGLLQDIFDIKVDKTETLSSTDKKIFRSEEEKERALRLNKERRLAQVRKNAVMLDE

SEQ ID NO: 345650 - protein, 66 aa, Zea mays
  Clone ID: MRT4577_78400C.1.pep
FGSRRNTAYISPVGPRRDCTMQRIPPHSYVTRCHTRYIRIFVHWTLKALYKERIADHYSTVHTILA

SEQ ID NO: 345651 - protein, 53 aa, Zea mays
  Clone ID: MRT4577_78401C.1.pep
ICYLWDSLPMKATKRFLLLHTLKHIMAPARLTKSNCGLKTKQTNHCEEFIFVL

SEQ ID NO: 345652 - protein, 249 aa, Zea mays
  Clone ID: MRT4577_78402C.1.pep
IISEELRLKDIEFVEKALENQKKKTRMGGQSLELKKAKIEQEMIEKVLAWLQDGKEVRKGNSAPEQIEVINPLFLLTAKPVVYLVNLSEKDYIRKKNKYLPKVAEWIKEHAEGDPIIPISVSFEERLTRYETEEEAKEEQKNVGAESALPKLIVQMRKALQLGSFFTTGTDEVRQWTIRNGIKAPQAAGVIHTDFEKTFIQAIVYNFSVIKELGDEAEVKAKGKVMTKGKEYVVEDGDIMLIKAGAAKS

SEQ ID NO: 345653 - protein, 120 aa, Zea mays
  Clone ID: MRT4577_78403C.1.pep
MAMEARMKGTVKWFNDTKGFGFISPDDGSEDLFVHQSSIKADGFRSLAEGEVVEFAVSEGDDGRTKAVDVTGPDGSFVQGGAGGGGGGGGFGSRGGGGSRGGGGFGGRGGDGSGGYGGGY

SEQ ID NO: 345654 - protein, 87 aa, Zea mays
  Clone ID: MRT4577_78404C.1.pep
NCAPKGGRRGKFLFFFLQPRTPQESSQGGGLPCESFPGLTCFCRVVSQIVKLFFFVKFGFPPTSGWGFCPGAVWNHIPSCSSGGVRL

SEQ ID NO: 345655 - protein, 236 aa, Zea mays
  unsure (1)..(236): unsure at all Xaa locations
  Clone ID: MRT4577_78405C.1.pep
MSCRAAPWSRPSHIAGPRVPTPARPRFALGSRNLWKNSWTIGAGVSNMFALPSTLFRCMASSGSGDGDFARSTLTDEAAPFPLYSWPDKQRPRVCILGGGFGGLYTALRLESLVWPNDKRPQVLLVDQSDKFVFKPMLYELLSGEVDIWEIAPSFTELLKNTSVQFVRDSVKLLRPSDHLRRKPGEXALXGVVHLESGTVIXMIARLVLALGAEAKIECCPGSAEYAPPFTTLEDA

SEQ ID NO: 345656 - protein, 48 aa, Zea mays
  Clone ID: MRT4577_78406C.1.pep
MTMPWGLAACIVDMVWAVLAGWVSTCLVIANEVARGMRSGEIGPFVVG

SEQ ID NO: 345657 - protein, 121 aa, Zea mays
  unsure (1)..(121): unsure at all Xaa locations
  Clone ID: MRT4577_78407C.1.pep
KNXQFRRETGRSGTLFANFWKWGSQRQVTIGILIRFAALKIWTSDPSHVAMSSHQLIPASAFMPRIKSRPRLGYMAYEPAGHLAELRKYVLARYGEVRGSWLKSRCGLLVSSGSEALEVQL

SEQ ID NO: 345658 - protein, 45 aa, Zea mays
  Clone ID: MRT4577_78408C.1.pep
KQDYFTQIGPQLKKKQRGGQRGRHRNKKRGKGIPVLKLKHLKGGG

SEQ ID NO: 345659 - protein, 59 aa, Zea mays
  unsure (1)..(59): unsure at all Xaa locations
  Clone ID: MRT4577_78409C.1.pep
FFFFFFLLQLTQHLTTVLQLIAMSNQRRHPMIVHVFLKADPSMXKTLWSFWPGMCGISH

SEQ ID NO: 345660 - protein, 104 aa, Zea mays
  unsure (1)..(104): unsure at all Xaa locations
  Clone ID: MRT4577_7840C.1.pep
SPVLVAATFMEPSQREEMPSMCRLHLLFQNTLGSLEKKIQGFFFFSCPSHQYVFCFVHKPWSILAELHIGEQMLDYDVGMFXGAGAANRVLALHSLRNYELKRA

SEQ ID NO: 345661 - protein, 60 aa, Zea mays
  unsure (1)..(60): unsure at all Xaa locations
  Clone ID: MRT4577_78410C.1.pep
ERIRRRPRIXQIAFGSGFKFNRAVXGALRSFNPAEERNPXMDKIDRFPVDVPKVFKVSSD

SEQ ID NO: 345662 - protein, 411 aa, Zea mays
  unsure (1)..(411): unsure at all Xaa locations
  Clone ID: MRT4577_78411C.1.pep
MPAAALSCTWTCGCCAGRRRTSGGAAGDTAGASGRAAEKGDEWSLFIHLPVLTLSPTSTYSLNHLLCCGQPKKHYGVMENGQQIAVKRLSLGSRQGVREFLNEVRLLLKVQHRNLVSLLGCCASSGHKMLVYPYFPNSSLDHTLFXNKCAALDWPKRYHIIVGLARGLLYLHEESPVKIIHRDIKASNVLLDDQLNPKISDFGMARLFLEDATHVNTFRISGTYGYMAPEYAMNGYLSAKTDVFSFGILVLEIVSGRKNIVRHLDDEKVDLLSYTWKLFGEGRSLEIVDPSLSSPDSDQALLCIQLGLLCCQAAVSDRPDMHSVHLMLSSDSFTLPRPGKPAVHGRAGRWTAATTTASGSASASSATNTTSTFGFGTDTNTTRASAAALLASVAEDESRNSISISFTTDGR

SEQ ID NO: 345663 - protein, 89 aa, Zea mays
  Clone ID: MRT4577_78412C.1.pep
MFPSKKATSSAAAAAAAVSSNDSRQQAMCVQADSGSGLVLTTDPKPRLRWTVELHERFVDAVTQLGGPDKATSKTIMRVMGVKGLTLYH

SEQ ID NO: 345664 - protein, 78 aa, Zea mays
  Clone ID: MRT4577_78413C.1.pep
PQIHVGPLKYKTEERHQKQELTPAPVFPLIVGVSVVALVISMPRLNDLYQSAVGMTSLGSGMAPTKKEPRKNILRKRV

SEQ ID NO: 345665 - protein, 651 aa, Zea mays
  Clone ID: MRT4577_78414C.1.pep
MNDRVEVKNSLPEGLAKDDWCWDQSILNIDVGTDDVRDIVFVQKGYWIELVSTHDTNAYIQQPDSSRLDLLIKKGSQRICVETSGQHEIHLTNPCISFGTSSVLFDTANLMPIHINAKKYLVKGEIHVDMSSIQENIDSKDIVVDILKSDGSFIEKISTSLVLGKDNQNDFTAFEYSIWADLGEDFIFVPHDSSIGRNKVLFYPARQQYSVSMNGCQDTVPLITARTGLYLEGSVLPATSDVDIKILAAGKSNYAHLNKGDVATEAKTDSEGSFFAGPLYDDIVYKVEASKDGYHLKQTGPYTFSCQKLGQILVRIYGENSELLPSVLLSLSGEKGYRNNSISSSGGTFTFDNLFPGSFYLRPLLKEYKFNPSAVAIDLNSGESREAEFRATRVAYSAMGSVTLLTGQPKEGVFVEARSESTGFYEEATTDSFGRFRLRGLVPGSTYSIRVAAKDNLQFAAVERASPEYLSVNVGHEDMTGIDFVVFERPEVTILSGHVEGDGIDTLHPHLSVEIRSATDSSRVEAVLPLPLSYYFEVRDLPKGKHLVQLRSGLPSHTHRFESELVEVDLEKDPQIHVGPLKYKTEERHQKQELTPAPVFPLIVGVSVVALVISMPRLNDLYQSAVGMTSLGSGMAPTKKEPRKNILRKRV

SEQ ID NO: 345666 - protein, 113 aa, Zea mays
  Clone ID: MRT4577_78415C.1.pep
RTGPLIYIIGTDYNPKQTPPITRGTSFPPKWLIRWGQITKNHNREKTARLGKDNNGTKNISFTPTERMGGMYIGTSDPWFTQGQGEGLDQDSKKGPGFAIFGWKKHFPRTQGV

SEQ ID NO: 345667 - protein, 51 aa, Zea mays
  Clone ID: MRT4577_78416C.1.pep
WLDVLKNGATDTSHVFNDLNADALPEYVIICHDNGLVPIVQPEILVDGAHD

SEQ ID NO: 345668 - protein, 160 aa, Zea mays
  unsure (1)..(160): unsure at all Xaa locations
  Clone ID: MRT4577_78417C.1.pep
MLAVFSGQVVEVPAELVALGXRTPSSLGEWGGXXXSFCLFSNXNKYVQFGDHGHFXYCYINXGVLTXRSFLCIDXVXCLFXGVLDNLGWVSQKHWLLSKGANEVVLVIEGYKTLCDWAPYPASFMLCQVNWSYALVFFDEXTNSLLVGIVPLGRVAXLFW

SEQ ID NO: 345669 - protein, 237 aa, Zea mays
  Clone ID: MRT4577_78418C.1.pep
SPLLRFFTVMRAASLSSSPGCSFLISSLQRSVPVHLSSSRSSWRRKPSQAKAPPLDLPWLVCGPHFCSSSLSSESFLFSLSQTLSCLWSPNSPSSSPVRPVLPRALPSSARSFHAARPACSACLVAALFCSLHPLCSPCSSPRPISLDSLQLRFAVAFCSLVAEHSPCARDFSVQFLKHLGMPMVAPFVFGVRLPVSACCVALVQIAAMAFPVELLCCARKVLYSLQRVELPRRIFF

SEQ ID NO: 345670 - protein, 42 aa, Zea mays
  Clone ID: MRT4577_78419C.1.pep
CGIPISFGLPFHLALGPWCTLIGQKWSIAWSSCIGTLIQWDC

SEQ ID NO: 345671 - protein, 65 aa, Zea mays
  Clone ID: MRT4577_7841C.1.pep
AGWPGQPLPQARTATAVEGRQAVPCRHDRPDQRELVRASARWGERDFVLELPWRRWSAAVSWRVT

SEQ ID NO: 345672 - protein, 47 aa, Zea mays
  Clone ID: MRT4577_78420C.1.pep
GRFGNGGPVFRNKVLNWFGKFFRGSRAGGTLQKRETEQSTAAALNRS

SEQ ID NO: 345673 - protein, 147 aa, Zea mays
  unsure (1)..(147): unsure at all Xaa locations
  Clone ID: MRT4577_78421C.1.pep
MAAASSSSVLLLLLAAALAGMSANAATFTITNYCMLTVWTAATPVGGXGTQLNPAVTRTVNETGGTSSDRVRRRTGCSFNXNRGSCQTDDCLVALDCTLSGHTPLTMNELTIHGNHDIYDISVIDEYNLAMVFSCNTSERLPCTYPG

SEQ ID NO: 345674 - protein, 61 aa, Zea mays
  Clone ID: MRT4577_78422C.1.pep
QQPKFKNKHAYQQFKRVMAYLFSNMNVLGWRNNIGDLNIYSIIYPLMTVPWVFSIRVISFA

SEQ ID NO: 345675 - protein, 58 aa, Zea mays
  Clone ID: MRT4577_78423C.1.pep
RPRFFNRFGGCLFLTFNHFPITNKNFHDQGQNIFKIVKQSDKIVTLNLNLLLRFHQIL

SEQ ID NO: 345676 - protein, 158 aa, Zea mays
  Clone ID: MRT4577_78424C.1.pep
RLGAGKQRPRQGSSASWATARRAPGTSSRRSQTRLVMRVGEKEKLDAEQKFDTRRDQASWRVSRTRAREDGAGREHARARELDGWASWSRRASERAGRELEGDGTTGSLTGRRSRDEHGGISVGEGNPSQGRAPESRAARLRAGSRRAQQGEDAERRG

SEQ ID NO: 345677 - protein, 97 aa, Zea mays
  unsure (1)..(97): unsure at all Xaa locations
  Clone ID: MRT4577_78425C.1.pep
GXEDGXXDLNKXXEXXEVFFLRXYDIKNVGGGVXLIEKGXKNMVGWKGFXIXKXKDIEXXIFXLKEEXEFFXDEELRLDXEIREXKEKIXXFXXDGD

SEQ ID NO: 345678 - protein, 67 aa, Zea mays
  unsure (1)..(67): unsure at all Xaa locations
  Clone ID: MRT4577_78426C.1.pep
PXWLMLWSVVAQHXLGDASXRPXPRXLPXVAQPREYGDAVLRLSLFFSPLLGEARGRIPARPASRVP

SEQ ID NO: 345679 - protein, 85 aa, Zea mays
  unsure (1)..(85): unsure at all Xaa locations
  Clone ID: MRT4577_78427C.1.pep
KILLLEWFAHEFTKSGSALXYVPVKSQEGSQFFTGFGGKEDILRYLVGTRSFDQLSYNEGVYEHSELLKSFIWLCWTLDSMQELE

SEQ ID NO: 345680 - protein, 77 aa, Zea mays
  Clone ID: MRT4577_78428C.1.pep
LCIFLRQYNECVTMFDEKEKKCTYYTYLVFTVDQLLTTTDQRIGKALTAKNKFCTTFVVGRKKCFGLFLELLLLIAQ

SEQ ID NO: 345681 - protein, 59 aa, Zea mays
  unsure (1)..(59): unsure at all Xaa locations
  Clone ID: MRT4577_78429C.1.pep
YIFPLAVPSSLREFTIAAATKIQPVYVIDVAAAIVTSLSXDGTSSSNIDYIHRLNLSRS

SEQ ID NO: 345682 - protein, 55 aa, Zea mays
  Clone ID: MRT4577_7842C.1.pep
MEVLFRGTYWCRFWGMLQRHKVDTRSMREACRLLETSMMQVFSTHGWTFCNRLTM

SEQ ID NO: 345683 - protein, 142 aa, Zea mays
  unsure (1)..(142): unsure at all Xaa locations
  Clone ID: MRT4577_78430C.1.pep
GSGLPPPVEVFQFFWKSPLVKFQDLFKKKGVKAKLRFXGANPFFFYNPKYMVVFYFKTPIKDALAPGQEISPLEGVFAPGLFFNMGGSVFIFGTAGVSVKTKWVFELLCCLGWVFPFNGPAFGVKPPYKMLPKRGSPHVGVA

SEQ ID NO: 345684 - protein, 113 aa, Zea mays
  unsure (1)..(113): unsure at all Xaa locations
  Clone ID: MRT4577_78431C.1.pep
LELPSIEHVSVAANCFTGLLAANMSCGENLRFVXVSTDLLTCSLRSCLNTLRSSSNSKQVAVLAASTCLSGGEDSTQQQALFCQNQALSVGIVPVQARVVGKAKGKAGTVAGA

SEQ ID NO: 345685 - protein, 186 aa, Zea mays
  unsure (1)..(186): unsure at all Xaa locations
  Clone ID: MRT4577_78432C.1.pep
MAGQGDGXGMGIYLGTTYSCVXCAQHDRVEIIVNDQGNRTTPSHVVLTYSERLIGDAANNQVAVNPINTVFDAKRXLIGRRFTDASVQSDIKLCPFKVISGPGEKPMIVWQHKGEEKQFAAEEISSMVLIKMREIAEAYLGSTIKNAVVTVPAYFNDSQRQATKDAGVIAGLNVLGIINEPTAAAI

SEQ ID NO: 345686 - protein, 229 aa, Zea mays
  unsure (1)..(229): unsure at all Xaa locations
  Clone ID: MRT4577_78433C.1.pep
MGSPPAEAVQLKDEGNKAFKNQEWDKALEFYTKAIEAYDAEPSFYTNRAQTYIKLEQYGYAIQDADKAIELDPNNVKAYFRRASANTAILKHREALRDWKLVVKKAPNDANAKLRMAECDKIVKRDAFLKAIEVEDAPSAAEGLDLEHMVVDPSYDGAKLEDKMTLEFIEDMIERFKNGKKLAKKYVYQIIIAVMDIIKKEPTMVEHDVEQGHEITVCGDTHXQFFDLM

SEQ ID NO: 345687 - protein, 207 aa, Zea mays
  unsure (1)..(207): unsure at all Xaa locations
  Clone ID: MRT4577_78434C.1.pep
QTSGKGDGPAIGIDLRTTYSXLGVREDDRVXSIGNDQGSRTTASYAAFTDSERIIADATKNQVXMNRINTXFDAKRLIATRFSDASDQRDIKLRPFKVISGPGEKPMIVVQHKGEEKQFAAEEISSMVLIKMREIAEAYLGSTIKNAVVTVPAYFNDSQRQATKDAGVIAGLNVLRIINEPTAAAIPYGLDKKATSVGEENVLIFDS

SEQ ID NO: 345688 - protein, 191 aa, Zea mays
  unsure (1)..(191): unsure at all Xaa locations
  Clone ID: MRT4577_78435C.1.pep
MSEKKRWRGKGDGXPIGLDLGTTHSCVGVWHHDQAEIIGNDQGNRTTSLWTSAFSRLPDRLIADAGNNQGVMNPINTVFDAKXRLIGRRFSDASVQSDIKLRSFKGISGPVDKPMIVVHHKGEEKQFASEEISSMVLIKMREIAEAYLGSTIKNAVVTVPAYFNDSQRQATXDAGVIAGLNVLRIINEPTT

SEQ ID NO: 345689 - protein, 122 aa, Zea mays
  Clone ID: MRT4577_78436C.1.pep
NPLVYTSLHCISPRPRRNHHALASSEQPQEHRCVRASSSSSSSRHFGAPLDSAMSPCRVADIHGAGVLCRCLCSILTGVDVDEPFSSLASPSSPIVICSRASRNRRSSFSDQEIKLYEFYEA

SEQ ID NO: 345690 - protein, 160 aa, Zea mays
  unsure (1)..(160): unsure at all Xaa locations
  Clone ID: MRT4577_78437C.1.pep
SRSTTPRSCWRHSDPPQILAEHPRNSSSPSYCTYSHSNRLIQYACKNQYAMNPINTVFDANRPLIRRLTDVFVHSDIKLWPFKVISGPGEKPMIVVQHKGEEKQFAAEEISSMVLIKMREIAEAYLGSTIKNAVVTVPAYFNDSQRHAPQDAAXIAALNV

SEQ ID NO: 345691 - protein, 53 aa, Zea mays
  unsure (1)..(53): unsure at all Xaa locations
  Clone ID: MRT4577_78438C.1.pep
KSIHHARVLIRQRHFRVGXQHVTIPSFMVTVDXKKHIDFRPTSQIGGGAPGRV

SEQ ID NO: 345692 - protein, 105 aa, Zea mays
  Clone ID: MRT4577_78439C.1.pep
FCSATCMVFMSGVVVGRASRSVTHRTPVSGKPWEVYLDTRCRESCSAMVTRQRHAAAAASATPPSRCCSSPVRKSTVGPHRDWSTGTLRPVARFSGARPGARATA

SEQ ID NO: 345693 - protein, 35 aa, Zea mays
  unsure (1)..(35): unsure at all Xaa locations
  Clone ID: MRT4577_7843C.1.pep
CVRNWLYGSNGWCCXKAGTDXLGTVRGLSFWCVVV

SEQ ID NO: 345694 - protein, 85 aa, Zea mays
  Clone ID: MRT4577_78441C.1.pep
RSPPRRCGGPARRGTRRRRRQTGGPAAARPPRRASPPPAPQRARPPRRRQHPRRRRPAPTRASGRPRLTMPPRRRRAPRAGRTPR

SEQ ID NO: 345695 - protein, 93 aa, Zea mays
  Clone ID: MRT4577_78442C.1.pep
SPRASSISPWGTRFHSPGLASLGPSIVSLLRGGRNQTQPAPGFSPYPMGFFPQVFGAPLGPVVWCFVQMLLAPILRGLTKKNPQNLADEMLLL

SEQ ID NO: 345696 - protein, 92 aa, Zea mays
  Clone ID: MRT4577_78443C.1.pep
FFLDNGLGLKLLIHPQSHQSVPPTSSPPAPPSIPHLVMLVAGEGPQEDLGTKHGVAAPVAESPPREERTHAGGNGKKRKGIRGLPENARVGL

SEQ ID NO: 345697 - protein, 128 aa, Zea mays
  Clone ID: MRT4577_78444C.1.pep
RLLKLPHASGKAHSRTRSLPLAELLVQLPALQKLLLRLIYCQPEGAACTNYLVQYALALVLKESFKIYCSINDGIINLVDMYFEMPKYDAIKALEIYKRAGQQAEKLSNFYDHCKLLELARTFQFPTL

SEQ ID NO: 345698 - protein, 132 aa, Zea mays
  Clone ID: MRT4577_78445C.1.pep
MGSAMNKDKVHDKETHGTSSDITEKTPVETVKGPNLLERAKEEIEALAGAVHTKMEHHSSPHAKKDESHKEDKEGSLHKIKAHTDETHGTSADINENTPVDKVKGPNVFERAKEEIEAIVEAIHPKNGSDSK

SEQ ID NO: 345699 - protein, 87 aa, Zea mays
  Clone ID: MRT4577_78446C.1.pep
SPTRAFSGSPRIPFLFFPLPPACVLSSLGGDSATGAATPCLVPRSSWGPSPATSITSEKMRDRGRRRRRARGRNRLVRLRMDQELEP

SEQ ID NO: 345700 - protein, 84 aa, Zea mays
  unsure (1)..(84): unsure at all Xaa locations
  Clone ID: MRT4577_78447C.1.pep
MEEPLLASLSMENSNSHPCTLLSMDPAGSHPASIESSGXGGSAATNGAGNGVDRELFVTPRRESAHPGPPDINLPLSADHSPLP

SEQ ID NO: 345701 - protein, 361 aa, Zea mays
  Clone ID: MRT4577_78448C.1.pep
LGLGSLSWAGHQIHVSLPINQFLDSGVDPKEIPLPHEFILNRDLLAQLYPSFAEGATPFFTLNWSKYAEFLSFRGGLDPITGGLWLSDIAHHHLAIAILFLIAGHMYRTNWGIGHGLKDILEAHKGPFTGQGHKGLYEILTTSWHAQLSLNLAMLGSTTIVVAHHMYSMPPYPYLATDYGTQLSLFTHHMWIGGFLIVGAAAHAAIFMVRDYDPTTRYNDLLDRVLRHRDAIISHLNWVCIFLGFHSFGLYIHNDTMSALGRPQDMFSDTAIQLQPIFAQWIQNIHAGAPGVTAPGATTSTSLTWGGGELVAIGGKVALLPIPLGTADFLVHHIHAFTIHVTVLILLKGVLFARSSRLIPD

SEQ ID NO: 345702 - protein, 97 aa, Zea mays
  Clone ID: MRT4577_78449C.1.pep
RPPPFVFFPGFLSLRVGRLIYVFVLTDFPPDFFSFSATFFICFSSLILPPWLSPFFFRPRMFVALFPASYFSPPPPVPLCYAPLSPPSPPPELARLQ

SEQ ID NO: 345703 - protein, 105 aa, Zea mays
  unsure (1)..(105): unsure at all Xaa locations
  Clone ID: MRT4577_7844C.1.pep
LTINGHRTIVWQGSLVLIKSEGQHSYGGEILPNCLVLDFVTNVHIRWITLLNKKFLHLNIFECKNILIDKMTVLVPLDRPNTDCMHIXXXSNVTIMNSTIGMRYY

SEQ ID NO: 345704 - protein, 78 aa, Zea mays
  Clone ID: MRT4577_78451C.1.pep
RFYMCLGSIGKSLSFHRVAYALWLGAVSRSEFTSWPVLYMVIELSTYVAVNIIMVTVERITSSLLIEQPTPPVVDFGL

SEQ ID NO: 345705 - protein, 77 aa, Zea mays
  Clone ID: MRT4577_78452C.1.pep
HVLLLSDCIFYQLSHLVQESLDLSCVSVRVHINTRMAGLKTRGWNREYSAALDVGRGEAPLHVHGDDIDRHQALHLV

SEQ ID NO: 345706 - protein, 48 aa, Zea mays
  Clone ID: MRT4577_78453C.1.pep
GVKQDSTLGDDYYSAALPVVEKRIAQGGVRLAAILNRIFSGNGELQSI

SEQ ID NO: 345707 - protein, 53 aa, Zea mays
  Clone ID: MRT4577_78454C.1.pep
NGFLLFSLFILTFTHITFKFRFRSFVHGLNLLQHYPKLNIHLHQQSLYSPIMT

SEQ ID NO: 345708 - protein, 28 aa, Zea mays
  Clone ID: MRT4577_78455C.1.pep
QGCNEYLQDSNDQLRRSSGSFKEKVFLA

SEQ ID NO: 345709 - protein, 221 aa, Zea mays
  unsure (1)..(221): unsure at all Xaa locations
  Clone ID: MRT4577_78456C.1.pep
DAWVQEALNRIMLDRTTLVVAHRLSTVRNADCISVVQQGKIVEQGPHDELVMNPDGAYSQLIRLQESKEEEEQKPERHVSDSRSKSRSLSLKRSISRGSMGNSSQHSLTLPIGMPGSVELLEGNDENWEEDEKEQARDGDREAPKKAPMGRLASLNKPEVPILVLGSLAAGVHGVLFPLFGLMISNAIKTFYEPPHQLKXDASFWXXLMCVVLGIVSILSI

SEQ ID NO: 345710 - protein, 394 aa, Zea mays
  Clone ID: MRT4577_78457C.1.pep
MEAMDFTVASADTGCQEPPNTLVDWALEILSTADPDEKARLGDLAASRWLRGDIPLPYDPSRPARPPPDRPARSAEVRLLPPSRMPKLGKGGSAQSRLAMLHSLAHTESWAVDLSWDIVARFGAAMRMPRDFFDDFARVAQDEGRHYTVLSARLRELGSHYGALPAHDGLWDSAMRTSHSLLARLAVEHCVHEARGLDVLPTTISRFRAGGDEQTARLLEDIIYPEEVTHCSAGVRWFRYLCLRSHGNHPTSYPVPGLEPRSSGLPGDGTADGKTAREAEGEPTPKLAKDVRGDDKMVQQVEDELPSRIAQDANGRSKVTEHVEDGLSKCKLDDSIEKYEELVIRTFHRVVREYFRGPLKPPFNTEARKAAGFEPAWYEPLAVKEACIEGETIE

SEQ ID NO: 345711 - protein, 131 aa, Zea mays
  unsure (1)..(131): unsure at all Xaa locations
  Clone ID: MRT4577_78458C.1.pep
CRVRHHALRRERRENAAFYAARRLVSRAGAPPTARGALDTAEMTPQCPLAPRSIITXKRSPPIXMGFEHPAVQAHTRPQTIAASVLQQPINXLLQQSLAHLTIQTIASXHQQQILPALSHLAMVNPDAYLQ

SEQ ID NO: 345712 - protein, 39 aa, Zea mays
  Clone ID: MRT4577_78459C.1.pep
LITQKTAVWPAETLKTRNALTLSDFIYICSVTIQWYLMT

SEQ ID NO: 345713 - protein, 61 aa, Zea mays
  unsure (1)..(61): unsure at all Xaa locations
  Clone ID: MRT4577_7845C.1.pep
GDGELLLXRGVVXSYRASTSGRSVAAYTVEDAWVNVKAYEFIARFYAHMNFQRQIWWLQFI

SEQ ID NO: 345714 - protein, 70 aa, Zea mays
  Clone ID: MRT4577_78460C.1.pep
RDLERPVESSGDGKCSSDNSNKKSVGNPIYGPLNIGRAESVNLQFGTFGISAWPTDTGFTMSIQLLRRTG

SEQ ID NO: 345715 - protein, 103 aa, Zea mays
  Clone ID: MRT4577_78461C.1.pep
FRRVPGAFPPQFFSFNPLGALDFPGFFQEGPLFPFSPLGGVGPAPFFIQPPVLPFFQPGGPNAGPLFQLAPLVPFHPPGFANPAGVFPPPPLGGAPLLVFFGV

SEQ ID NO: 345716 - protein, 95 aa, Zea mays
  Clone ID: MRT4577_78462C.1.pep
RHSRAVRIGGGGWTRGPRRNSQGRGNTSQHPGRPPSRALPLQTQQKPDTPARSESRRALAPRPSGPREKPRTQSRAENTLLVMTLLRALLCYLLV

SEQ ID NO: 345717 - protein, 62 aa, Zea mays
  Clone ID: MRT4577_78463C.1.pep
GSVVYMKGSWKVKVNGKRSGFDHTELSVWREKMMRFSGFVMPVPVLVFIGIRVWSVSEIRKE

SEQ ID NO: 345718 - protein, 61 aa, Zea mays
  Clone ID: MRT4577_78464C.1.pep
YIHAPSYQAIYDQCIATPTSQSGHSVLPTNPKIASGSKSWSGLIRLMQLPLYMELTSSVRH

SEQ ID NO: 345719 - protein, 244 aa, Zea mays
  unsure (1)..(244): unsure at all Xaa locations
  Clone ID: MRT4577_78465C.1.pep
MVVALPIHRTAASLYASAAAAGGGGGGREDAWSDGATSALIDAWGERFVALGRGSLRQPHHXGVADAAPIIXGLINWISMPWDKKKKPRSDVQCKNRIDTLKKKYKVERAKPVSAWQFFDRLDFLLAPTYGNDRARGLRELAHAIRRLGEAYERVEAAKLEQAAEMERQRMDFAQELESQRVQFFLNHASPATVARPAAGGSSRRTSVVTDAGGSSNHHSCYRISHGDRHRHAPRSHYQPAAVP

SEQ ID NO: 345720 - protein, 72 aa, Zea mays
  Clone ID: MRT4577_78466C.1.pep
HLDKHVSNKKQLTKSKDIPFFLICTSYLVSTYELKTMCWASNHQNNYRNVLRAHFPFNLPLLVIHANTLKSN

SEQ ID NO: 345721 - protein, 104 aa, Zea mays
  Clone ID: MRT4577_78467C.1.pep
HHVRTCMDLSPLRQPPFFFFFFSYRYRPVFPLVPPRSKTPASACRRISGPCGSSSVGDSTCDRTVMLQYGFTPFCGWGANRPSRSDLTQTRTSTRTSTRTSTST

SEQ ID NO: 345722 - protein, 59 aa, Zea mays
  unsure (1)..(59): unsure at all Xaa locations
  Clone ID: MRT4577_78468C.1.pep
LLFICVISGACVSLWENNXVRAHASRNLVKLVFSKQMTCIILCELARAIFVFNKFEEIX

SEQ ID NO: 345723 - protein, 64 aa, Zea mays
  Clone ID: MRT4577_78469C.1.pep
AMAPFLSSCLCTSFSLYAFFCTGAINLNNGASIFKSSHAKSHCVTNFTRGVRALNFRNADFIIC

SEQ ID NO: 345724 - protein, 46 aa, Zea mays
  Clone ID: MRT4577_7846C.1.pep
LIQPPYRVGRALRTTHVTLVRQLEMKLSAPDVVIGPTRRIVRPPKK

SEQ ID NO: 345725 - protein, 85 aa, Zea mays
  Clone ID: MRT4577_78470C.1.pep
VTEARVITDRDTGKSRGFGFVNYTSSDAANAAISGMDGKEIDGRPVRVNIANDRPAGNRGGGGYGGGGFGGGGYGGGNQSYGGGY

SEQ ID NO: 345726 - protein, 147 aa, Zea mays
  Clone ID: MRT4577_78471C.1.pep
LYDVAHVPQLHGLLTGHYFNPNTLRTLPSSSARWCSVRDAAIFIFSLRCHHILLRRHHHNTSILIYLYRDSPLARWNHVMFSPKSHRYQALFSDVRFFFFFFGARLDDTLQFAAQTNGEHVQIAQRRDIPTITNAIRPHTTRCGELV

SEQ ID NO: 345727 - protein, 61 aa, Zea mays
  Clone ID: MRT4577_78472C.1.pep
ATLRHTPFHSIHLPCFMDSTELPKTPSELMNYMLLIQFLLTFLLGLVLNLICSHSTLYFPH

SEQ ID NO: 345728 - protein, 118 aa, Zea mays
  Clone ID: MRT4577_78473C.1.pep
MGQCVSAPRHRKPPPLPLSPALSFRPQILSSIADAVGEDHTADLPEELLALVFGLLGSGDRKRCSLVCRRWPVVEAASRFRLAFFFRPSPLAESALPRLLARFPADSKLALKCDRRAE

SEQ ID NO: 345729 - protein, 180 aa, Zea mays
  unsure (1)..(180): unsure at all Xaa locations
  Clone ID: MRT4577_78474C.1.pep
MGKPSLKKKRASGGGKSGDHGGKPASLERSGSKVLDGDETLFTDMAQEHKEEGNKLFQRRDYDRALLNYDKAIKLLPRAHPDVAYLHSNIAACYMQMSPPDYYRAINECNIALEASPKYTKALLKRARCFEALGRLDLACRDVNKVLALEPNNLTALDVSDRIKKTMEEKGIVLDDXEIM

SEQ ID NO: 345730 - protein, 104 aa, Zea mays
  Clone ID: MRT4577_78475C.1.pep
PPWGPPGWITRPTGFPTPPPPSRITGGSSGDTWAPAPRTPPPGGRGAPPGVHFFQPPSVGPLTIGHPPGGGGGFSSSCIGGGDFAPIFPRPCCQTNFGPLACFF

SEQ ID NO: 345731 - protein, 76 aa, Zea mays
  Clone ID: MRT4577_78476C.1.pep
EDSWGAIGGGFGRGQHCGGRGGDDEEERQKGSSSSPSSSYGGGGRWEKDCIKDSMGSLVLSVGGGKRLYGFCGWLL

SEQ ID NO: 345732 - protein, 107 aa, Zea mays
  Clone ID: MRT4577_78477C.1.pep
RLIKYKGYQVPPAELEHILNSHPDIMDAAVIPYPDEDAGQLPMAFIVRKPGSNLTEQQVMDFVAKQVAPYKKVRRVAFVSAIPKSPAGKILRRELVKQAVSMGTSKL

SEQ ID NO: 345733 - protein, 70 aa, Zea mays; identical to SEQ ID NO: 261799
  Clone ID: MRT4577_78478C.1.pep

SEQ ID NO: 345734 - protein, 147 aa, Zea mays
  unsure (1)..(147): unsure at all Xaa locations
  Clone ID: MRT4577_78479C.1.pep
TFGLSYVLGSADLLLLQSCDLLAVTGKTKTGTNGPGRTGRSAVRAVSXSEDAESAVANDFPTIMDHTIHTPKHDIAYGYRKYSDTISKDLKISSPGDKLAIAPGTRNFEETLRGEVGVEHAAEHTGAPIDKDKVVVYSKGGVKEGRT

SEQ ID NO: 345735 - protein, 72 aa, Zea mays
  Clone ID: MRT4577_7847C.1.pep
LKKPHLGTIFFGGHRARNCRINNFLYRMWLAFLKKAFGKACVQFGVTNHSSGPRFHALNGCVSVSNNIVVPN

SEQ ID NO: 345736 - protein, 184 aa, Zea mays
  unsure (1)..(184): unsure at all Xaa locations
  Clone ID: MRT4577_78480C.1.pep
SAYSAFFEGSVKFRPWRLIWKSWAPLRCKFFLWLARNNRCWTMDRLAKRGLSHPDSCPLCDQAGETLQHILIGYIFSRQIWALILQSLHLEAITPNGXSWAELGFFSWWTRSVKMVPKNIRKGWNTLFILIAWEIWKFRNLCVFEGSQPNVELLHRIGSEGLLWCAAGAARLLELLNRSLSPAS

SEQ ID NO: 345737 - protein, 210 aa, Zea mays
  Clone ID: MRT4577_78481C.1.pep
MAMHFGEITTAFPGGGGIAGASTARTTPAASPYQAAVEIEEQIYSPAFGNIEVQDSRGCCSGFTGSVTKLLFIFHLLAFIALTAFLGVQASYHQNPAYKPFSNFIPLVSSVIVSTIAACFWVILAVTNPPKAIKTSLWAAPVSALACDVVILLVGNTAALGIGALVVVFAIAAGLYSCWATGPRLKHASDMLSVSVIGAHLPPATSCLVY

SEQ ID NO: 345738 - protein, 70 aa, Zea mays; identical to SEQ ID NO: 261799
  Clone ID: MRT4577_78482C.1.pep

SEQ ID NO: 345739 - protein, 75 aa, Zea mays
  Clone ID: MRT4577_78483C.1.pep
ARNTELRCVWAIIRNYRGQWIKWVKGFYLVRAPPHQGGSCSASEGADTGDRLGDLPGLSWTGAGGYGLWIGSSDA

SEQ ID NO: 345740 - protein, 82 aa, Zea mays
  Clone ID: MRT4577_78484C.1.pep
LLYELHGAGTTGIFLHPPPEQSPSRTTGWTMVCARVLRSHYGNAVDIYIPAQPPDWGCAGARDRDGQLRRRRPQCHCQGLTA

SEQ ID NO: 345741 - protein, 472 aa, Zea mays
  Clone ID: MRT4577_78485C.1.pep
MGALRSGRKNSARIATVSAMATACRSPLVWLFALAAALFFLSWYLLLNSAAGPTAARRPNQGLRLGGAGRKCDPAEALLRVFMYDLPPEFHFGLLDWKPPGFGGGVWPDVRDGVPDYPGGLNLQHSIEYWLTLDLLASEQGAPTPCAAARVRHAADADVVFVPFFASLSFNRHSRVVPPARNSEDRALQRRLLEFLAARPEWRRTGGRDHVVLAHHPNGMLDARYRFWPCVFVLCDFGRYPPSVANLDKDIIAPYRHLVANFANDTAGYDDRPTLLYFQGAIYRKDGGSIRQELYYLLKDEKDVHFSFGSVAGNGIEQATQGMRSSKFCLNIAGDTPSSNRLFDSIVSHCVPVIISDEIELPFEDVLDYSKFSVIVRGADAVKKGFLMSLIKGISQEEWTHMWNKLKEVEKHFKYQYPSQTDDAVQMIWKAIARKVPSIRLKINRLRRFSRFDTNRTDETLPSPSWLQNQAS

SEQ ID NO: 345742 - protein, 322 aa, Zea mays
  Clone ID: MRT4577_78486C.1.pep
MLRNGNEGMSTIPGFSQIQFEGFCRFINQGLAEELEKFPTIKDPDHEIAFQLFAKGYQLLEPSIKERNAVYESLTYSSELYVSARLIFGFDVQKETISIGNIPIMNSLGTFIINGIYRIVINQILLSPGIYYRSELDHKGISIYTGTIISDWGGRSELAIDKKERIWARVSRKQKISILVLSSAMGSNLREILDNVSYPEIFLSFPNAKEKKRIESKEKAILEFYQQFACVGGDLVFSESLCEELQKKFFQQKCELGRVGRRNMNRRLNLDIPQNNTFLLPRDVLAATDHLIGMKFGTGILDDDDMNHLKNKRLSVYNTSVN

SEQ ID NO: 345743 - protein, 178 aa, Zea mays
  Clone ID: MRT4577_78487C.1.pep
MAAAAACRSPLVWLFALVTALFFFSWYLLLDSAAGPAGARRPNQWLRLGGGGRRSGPGRKCDPAEALLRVFMYDLPPEFHFGLLDWKPPGFGGGVWPDIRDGVPDYPGGLNLQHSIEYWLTLDLLASEQGAPTPCAVARVRHAADADVVFVPFFASLSFNRHSRGGTARAGQRGPRAA

SEQ ID NO: 345744 - protein, 75 aa, Zea mays
  Clone ID: MRT4577_78488C.1.pep
IEVEALKGKVVPGSGRGLRVMSDYATLCSFFGVFPEFLFCMPCFLIFYISKSRSSYWYKMAGSILTLKSGFTIRL

SEQ ID NO: 345745 - protein, 94 aa, Zea mays
  Clone ID: MRT4577_78489C.1.pep
HFILHAVLVTKKASLTSTVTAEITKILLKGGGGGKKKTIYVCRSLAGCISPFHKDEDVYPAGAGVKHQRRHSKEMWRSIMNAPNANIEGRLLMY

SEQ ID NO: 345746 - protein, 98 aa, Zea mays
  unsure (1)..(98): unsure at all Xaa locations
  Clone ID: MRT4577_7848C.1.pep
NAKNQGPNPGHXPNPNARAQQNPGPKTGGGQPDKAKAAQDAQGXRAKANPRAQRGKXTPNDQAPHPPQGKKDKNSEARPTPGKPPPPRKKRPRSTTPE

SEQ ID NO: 345747 - protein, 124 aa, Zea mays
  unsure (1)..(124): unsure at all Xaa locations
  Clone ID: MRT4577_78490C.1.pep
MPGSVPLGLCLDTAGVQVPWYFRCPISLELMRDPVTVSTGQTYDRASIESWVATGNTTCPVTRTALADFTLIPNHTLRRXIQEWCVAHRSMGVERIPTPKQPADPELVRSLVAQGPGVPPLRRL

SEQ ID NO: 345748 - protein, 85 aa, Zea mays
  Clone ID: MRT4577_78491C.1.pep
TEKTWDKNNRSFSFSHIRISFNCLVSIKIRNTFRMKTYLNETLRNSKEYDWKETKMIKKILRVTSIIIAIFVFIVICMHIDVQLL

SEQ ID NO: 345749 - protein, 54 aa, Zea mays
  unsure (1)..(54): unsure at all Xaa locations
  Clone ID: MRT4577_78492C.1.pep
GAXXVSXGPPAXXGXXXXXGXXXSXXWPXSACXXXXLLPCCXXVVXLFLXXLFL

SEQ ID NO: 345750 - protein, 110 aa, Zea mays
  Clone ID: MRT4577_78493C.1.pep
GSFKLLLTDLGKFQPIVMPCTCLHSEEYFMPIVMSLSLPELWGVHGARDHFKKLEKDLSVGSPLPGGILNQIKVFWGVKGELFLLVILTNSFLGWVTLILSTPFLNWSFF

SEQ ID NO: 345751 - protein, 95 aa, Zea mays
  Clone ID: MRT4577_78494C.1.pep
RPPVSVEVLVATTPLTVRRNHWSREVPCRLAPAVVGRRSSRGRVRRGASSGHMQSVVRWLGYVQVTLSVMFRRTIRLTRSRSWGLLLLVSSVCNG

SEQ ID NO: 345752 - protein, 130 aa, Zea mays
  unsure (1)..(130): unsure at all Xaa locations
  Clone ID: MRT4577_78495C.1.pep
MCELRTTFTGYDWYPIPHPYLHRVLSWMFTCIPLVQSYMLNCGDXGMLDMILXERLQSCYSNXLLVRLAQTFTTTKLQHLFLLNNYDMAISVLKETGDEAKKLQKYFEEKLESNMMAFVDDLLMXHLSDL

SEQ ID NO: 345753 - protein, 136 aa, Zea mays
  unsure (1)..(136): unsure at all Xaa locations
  Clone ID: MRT4577_78496C.1.pep
NPLVLFRRESVNMQPINDTFLKNLITSXPYXXLIPSSASPPCLXGHTLSCLNGSXLIIFGRYGRQTLPNYFFTLYFDTNQSTSPQIPRFSPLFPHSSHTLCTLDRTNFVPSIRCTDSCILLNNTYLFXLTHSSPTP

SEQ ID NO: 345754 - protein, 303 aa, Zea mays
  Clone ID: MRT4577_78497C.1.pep
MTSSGTVAQQLPRTEARSLSGHEGAVLAVRFNRDGNYCLSCGKDRTLRLWNPHTGAQVKTYKSHAREVRDVHSSSDNAKLVSCGADRQIFYWDVASGRVIRKFRGHNSEVNSVKFNEYNAVVVSAGYDRTVRAFDCRSQNNDPIQTIDTFQDSVMSVNLTKTEIIAGSVDGTVRAFDIRMGRETVDNLGHPVNCVSLSNDNNCLLANCLDSTVRLLDKSSGELLQEYKGHTCKSFKMDSCLTNDDAFVVGGSEDGYIFFWELVDAPVVARFRAHSSVVTSISYHPTKACMLTSSVDGSIRVWT

SEQ ID NO: 345755 - protein, 46 aa, Zea mays
  Clone ID: MRT4577_78498C.1.pep
SLCQPPPRRSHALCARRGGSSAPADSFRLTHMAFIARSCGLFFAMP

SEQ ID NO: 345756 - protein, 201 aa, Zea mays
  unsure (1)..(201): unsure at all Xaa locations
  Clone ID: MRT4577_78499C.1.pep
LVESLGYNLLSVSQLCHMGHNCLFTNIDVYVFRRSDRSLAFRGVLDGKLXLVDFXKENADLDACLIAKINLCWLXHRHLAHVGMKNLHKLLKEEHVLGLTNVCFXKERPCAACQAGKXVGTNHPSKNVMITSRPLELLHMDIFGPVAYLSIGERAVFSYKLSRGLRATFHLVSPIHITSPPRRTRRLPSIHRRRRRRRESR

SEQ ID NO: 345757 - protein, 99 aa, Zea mays
  Clone ID: MRT4577_7849C.1.pep
GFPGPPKKPIKVGNPFYEPGVKTETGGLDMGWGHNIQGGGAFPKKILGSGGTNKRFLEICPTFFGKGGGHFLGFGNARGLGKPLKPFRGKIGGPGLWFF

SEQ ID NO: 345758 - protein, 98 aa, Zea mays
  Clone ID: MRT4577_784C.1.pep
TTFLVQFQSSSFFLFRPKDFLVSGRQGFGFVNLNVKYILKKSILLYRGIQNLSCHLLNTWFTNNLSENTNLNMASESLSPKTPFKKFNWVNSDHDDTL

SEQ ID NO: 345759 - protein, 146 aa, Zea mays
  Clone ID: MRT4577_78500C.1.pep
GIHATTFHILAHLPPTRHCKPLDARHVRFQEVPPRETRHVAATDSVQDALQKISKISPLLEVKKVSEKGVLPSRGSALGAGYELSSAEEMLLPARENVLVASDLSVDIPHGTYARIEPRSGLELKHSIDVGVGVIHAYYRGPVGVI

SEQ ID NO: 345760 - protein, 82 aa, Zea mays
  Clone ID: MRT4577_78501C.1.pep
MAVYYWDRVSHRANWGAIRFDPFTLGFIFSKLASLHTIISCAQFNPCRSRKHSKSSLNHKESSVGVFGGNLLALSISPRFIR

SEQ ID NO: 345761 - protein, 56 aa, Zea mays
  Clone ID: MRT4577_78502C.1.pep
YNETNRERQELYFVILNIISNYQSWCAMTFHANSFFILTLSCFCPRTISHGGNLYQ

SEQ ID NO: 345762 - protein, 130 aa, Zea mays
  unsure (1)..(130): unsure at all Xaa locations
  Clone ID: MRT4577_78503C.1.pep
PLCANAPAEKGGKNFMIDFMMXRCIHAXGFTNTCCLXPSEPEKLVIQNQDMNIDHGRLSEPSNGIXTVVPRXISDARIFFLWRGNTANVIRYFPTQALNFAFKDYFKRVFNFKNDTDGYWKGFAGDLASG

SEQ ID NO: 345763 - protein, 34 aa, Zea mays
  Clone ID: MRT4577_78504C.1.pep
PSPWYGYPVLCVRVTARSSQRPRTLCAGRVLHPP

SEQ ID NO: 345764 - protein, 231 aa, Zea mays
  unsure (1)..(231): unsure at all Xaa locations
  Clone ID: MRT4577_78505C.1.pep
TRKWLVVWQVVQELCTIRGTCANGRICVPVGVDSTTCVCPPGYRXHPDGXPCTPKKRYSGRGDDDTFVRMDFVSFSGAANSSASDPGPLMTKLTPQNLADCERLCRSNSTCVAFGYKFGGDRTCLQFTGLVDGYWSPATEMSTYLRVVASDNDSNPFTGMTTMIXTVCRVQLALPVPPKESQTTIQNVVIITALFVMELLARVLSFWAVLRKYSQXTXMARTLXLEYLPAE

SEQ ID NO: 345765 - protein, 145 aa, Zea mays
  unsure (1)..(145): unsure at all Xaa locations
  Clone ID: MRT4577_78506C.1.pep
RAATAAXAAAXAKPAAXKGPAGSXXTGRKPAXARPXARTSRRPRAAAAAAKHGDKSAHPDPDDXGNTTGQRDPHGTDAPPPHNPPQSKPNETNAAPNTKRGQXXKPPQPGGDTQXADXSATAPPDPQPNKKAPQEPPQPGPRGKT

SEQ ID NO: 345766 - protein, 93 aa, Zea mays
  unsure (1)..(93): unsure at all Xaa locations
  Clone ID: MRT4577_78507C.1.pep
SYDLRVRPRVRDKIAFVPISGFEGDSMIERYTNLDWYKGPTLLEALDQITEHNRPLHKPLLLPLQHAHMIDAIRTVPTXPEETHNMNPGMELT

SEQ ID NO: 345767 - protein, 101 aa, Zea mays
  Clone ID: MRT4577_78508C.1.pep
SDEHEREHTTKSSQVICRYATHVTMWSRGQCSRHVSIERTDIYMQLVSICEDLHLLVYLMCVAHMRKVSGSSVGHVDSRDDCVVSPKSMFTRTAWRSVLRS

SEQ ID NO: 345768 - protein, 131 aa, Zea mays
  unsure (1)..(131): unsure at all Xaa locations
  Clone ID: MRT4577_78509C.1.pep
MAATDDGAVDSASAAAAARAVEEARALGGAPAPFFYDEDLEERAYEAAEKVIVSISGGPDPEDVDGDGGGGGAELCSSSGSSPPPFSWRKLWLFTGPGFLMSIAFLDPGNLEGDLQAGAVAGDTLLXLLMW

SEQ ID NO: 345769 - protein, 91 aa, Zea mays
  Clone ID: MRT4577_7850C.1.pep
LPKTALSGVLLPRGAPFFSFFDPLPPAVFFRPPPLFFRAKKTLSPQSSGSRQLTIFPPPLIFFFFPAFDQFFWGVLFPLGGLVFKNFGKIK

SEQ ID NO: 345770 - protein, 42 aa, Zea mays
  Clone ID: MRT4577_78510C.1.pep
CRADREMHLKRLTYIGRRTADSTDHLNLEQSLLGCDYHYVSH

SEQ ID NO: 345771 - protein, 115 aa, Zea mays
  Clone ID: MRT4577_78511C.1.pep
VGGSASAPPAPRSERFRTKFTAEQKDLMREFAHRVGWRVHKPDADAVDAFCAQVGVSRRVLKVWMHNNKHLAKVPPSPPSSSYPQPLPRHHPPPPPLHIHHHPPPQQQQQQQHDA

SEQ ID NO: 345772 - protein, 76 aa, Zea mays
  Clone ID: MRT4577_78512C.1.pep
ESSNAGHGISIGGDRLEHGEFIVGALHRRVTAAHRSQGTPLRGGRSKVMRNPKTNLVKYLGSQVQGDFDFGMKDLS

SEQ ID NO: 345773 - protein, 77 aa, Zea mays
  Clone ID: MRT4577_78513C.1.pep
ESSKAGHGISIGGDRLEHGEFIVGALHSRVTAAHRSQGTPRSGGRSKVMRNPKTNLVKYLGSQVQGKLCPWSLFFTQ

SEQ ID NO: 345774 - protein, 127 aa, Zea mays
  Clone ID: MRT4577_78514C.1.pep
VCLWVPGRFLFLFIPVSPLLDGLFSCAVVPLWGAGSAFFVPACSCSSYVPWHHWARGLLSSVLILHYCSILPVMLTASSASVGLRVWRVLIVVPLPVWRLPVAVLFGFVGPRFSWTPSPTVAGAVVP

SEQ ID NO: 345775 - protein, 189 aa, Zea mays
  Clone ID: MRT4577_78515C.1.pep
MGGSRRKLKRSRTKVRVGLPRRKPNEFKAAFELPEALAAAAGAGAGWDAEGSVVKNYAAFGVVANPNLLGAHSRGTPRLVQSAALQAPDVAAAHAPVPEFEPIDTGSDLEDDDLKSALGKKRKDGKSAPLQPLTKVQRVCIGRLIEKYGDDYKAMFMDTKLNAMQHSVGTLKKLCERHHVDGKIFVYPL

SEQ ID NO: 345776 - protein, 121 aa, Zea mays
  Clone ID: MRT4577_78516C.1.pep
GFVGFGGRSSCGRHAAVPTSPSGRPANRNVVVCNFDSAVPFYSVGVIFSGPLGHGSFRLSSRLKLRLGRVPPGLQTSCGNLPVMCTLLPLPFQLPISEEGRIGPLLPLIFARHGRPASGPC

SEQ ID NO: 345777 - protein, 125 aa, Zea mays
  Clone ID: MRT4577_78517C.1.pep
FRTYFNLFLRRRARCLSGAARSQDACELRAEGAREGNSLVVSMRDGQDVADEFRSVPLWWSSVVTAEREEVAWERSRLLRSVLGRRRGGSQRRMRRRWYEASAKKSPAPTAAIAPREFWRQERKA

SEQ ID NO: 345778 - protein, 43 aa, Zea mays
  Clone ID: MRT4577_78518C.1.pep
LVLLAACWHRSRPCSPSPSCIVIASRCSGSLPRSGILAALCWL

SEQ ID NO: 345779 - protein, 44 aa, Zea mays
  Clone ID: MRT4577_78519C.1.pep
NGFNRNMLGAVACRIALDYLSPRGFKYGLNLARGGTLFTCMFFP

SEQ ID NO: 345780 - protein, 60 aa, Zea mays
  Clone ID: MRT4577_7851C.1.pep
AIEAPPPLGVCSRQHRQGLANWGPAKILRLLGAHQPLCVHGPMTTKQTSSGPDAWLEPGV

SEQ ID NO: 345781 - protein, 108 aa, Zea mays
  Clone ID: MRT4577_78520C.1.pep
MDQNHTSPTDDLSIFRSGSAPPTVEGSRTAIGALFPGPQLHANSLGDGGGGGGTDAGVDMLTEEEIRSHPAYLSYYYSNEHLNPRLPPPMVSKEDWRAAQWFQAVSGG

SEQ ID NO: 345782 - protein, 128 aa, Zea mays
  Clone ID: MRT4577_78521C.1.pep
PAGSSHGPKPHDLSIFRSGSAPPTVEGSRTAIGALFPGPQPHANSLGDGGGAGGTDAGVDMLTEEELRSHPAYLSYYYSNEHLNPRLPPPMVSKEDWRAAQRFQAVSGGIGDRRRPSEVGSGNSLFSV

SEQ ID NO: 345783 - protein, 49 aa, Zea mays
  Clone ID: MRT4577_78522C.1.pep
ICSHRDLLRRKKRSVSEFAGTLDQRSNIQPINKIIRTPGKRCELLISRL

SEQ ID NO: 345784 - protein, 111 aa, Zea mays
  unsure (1)..(111): unsure at all Xaa locations
  Clone ID: MRT4577_78523C.1.pep
SPYDHTALQIVTNFHIRCVVNPLIIIHYSQIMQQLIYVRLPIVTPNHTKPINDITNYIVINYLTSSYTKNHKLFHLYLTNFSXQKSLXYVFAPHXNPILPQANFDMFYIHP

SEQ ID NO: 345785 - protein, 77 aa, Zea mays
  Clone ID: MRT4577_78524C.1.pep
RESDFYTTTARAYTPAPRRLLPWRATCHRRRLPVQHHAGRAPIGDGLRLSRAGPVTPRHDTLLLLPQERPRARRPGP

SEQ ID NO: 345786 - protein, 57 aa, Zea mays
  Clone ID: MRT4577_78525C.1.pep
SAFQNVLYSSFVASLRRGSVQPDATGIKYQVFSIHKYINAKCFLLNKKCGFLKYFSL

SEQ ID NO: 345787 - protein, 65 aa, Zea mays
  Clone ID: MRT4577_78526C.1.pep
PRVRPGVRPRVRRLLMTALNRCARGRRIYFFTGQVLVSAPSSTVEVEPPIGSFISYGASSPIAYF

SEQ ID NO: 345788 - protein, 69 aa, Zea mays
  Clone ID: MRT4577_78527C.1.pep
MAFLLPKLTTPSCKLPPSPLLKPQLVPPGHGGGKIQGSSVSGSGAAQVAGPGHLSLLLLLSASQQAAGP

SEQ ID NO: 345789 - protein, 98 aa, Zea mays
  unsure (1)..(98): unsure at all Xaa locations
  Clone ID: MRT4577_78528C.1.pep
MPXKLDPSQVAEVFVRETVSLVGAASSLAPKIGPLGLSPKKIGEDIDXETDMDWKGLRVTVKLTVQNLQAKVYVVTSADALVIKALNEPERDRKKVKN

SEQ ID NO: 345790 - protein, 52 aa, Zea mays
  Clone ID: MRT4577_78529C.1.pep
MRECISVHIGQAGIQVGNACWELYCLEHGIQPDGQVPGDKTAGHHDDAFSTS

SEQ ID NO: 345791 - protein, 47 aa, Zea mays
  Clone ID: MRT4577_7852C.1.pep
HKFLDSFLVFSLLDLEYNISHSNPTLHFFFQFYPLHYSPFSGHNFIL

SEQ ID NO: 345792 - protein, 96 aa, Zea mays
  Clone ID: MRT4577_78530C.1.pep
AHTYRADFDFKDRMLVPHCQAYYTKLEQASVQGTLTRYPLHGRRNSLHMYPASAFTTRILPNTEPAESSWDPLDLLLTLKALVFPFNNGRNGIFSD

SEQ ID NO: 345793 - protein, 162 aa, Zea mays
  unsure (1)..(162): unsure at all Xaa locations
  Clone ID: MRT4577_78531C.1.pep
RKYDKGLETRTNSPYLLDSLGALSSFYVQNTPXVRRNLKSXIEQRALGINTHFXLYASLPDHKALDRVQGEVHGLIDSXEELGXALNRCNASTGDIMNRTERLHRNLKCITQRQDIVSCFLRDYQFSNDXINALREEEIDDQFSQAXLLHVQEIHYNCKVLL

SEQ ID NO: 345794 - protein, 336 aa, Zea mays
  unsure (1)..(336): unsure at all Xaa locations
  Clone ID: MRT4577_78532C.1.pep
MSGEVEALVPLVIKEVTKEDIAGGVGGKFTGSGGRKVRITCTPKYTKMVVGWRGAKESKAGCGSANHLGRKAIKEVGGGVEAFSPVASRNGGVEEHGAMEHMMLFYKSMTTCNMDNKNMENLGVEKGDCINSSSVKRLGPDRLRATQATRDRRMTGRKGRMADNTRYWPARWRCARLAVYLDVFSVVVIVLGGALACYGAVLFSKMSKVRSETVSTEKWKVASLAAVSLICFSSSAILALVTNVPVLLYWYSTDVDIINNAVILFIYYFIAYCQAVFYEANDMLLGSSVPSGFVLWIMREMPHRXRERPSTTQDPQWRTAVTSSNKGHNWRLLALR

SEQ ID NO: 345795 - protein, 49 aa, Zea mays
  Clone ID: MRT4577_78533C.1.pep
NLFVYSRGQPQFLVQNHPIEPSLVQLRRFSKQAGFFFFEILLCSFFSHV

SEQ ID NO: 345796 - protein, 71 aa, Zea mays
  Clone ID: MRT4577_78534C.1.pep
RTRPKLVFSLCTSFRFTVLNPEAVFGGIYYWYMPHMIRGGGFLRSSLSKWGGGGGEHPPVLCWWSGGVWLW

SEQ ID NO: 345797 - protein, 45 aa, Zea mays
  Clone ID: MRT4577_78535C.1.pep
SRSSSNFVEKYIHAVAFFLFNRRSLYCYSVNHHCNIIKVFLFVAV

SEQ ID NO: 345798 - protein, 120 aa, Zea mays
  Clone ID: MRT4577_78536C.1.pep
GFFFLRPKGYSTRNEPQGLWAHTPRLCRERHKASDSGGTTPTENQLKPPSLTRGTEAYIRLMRTTLNTGGGGGVLIPSTLGPRRSRSRSPPTARRGPRRRKPPLEPGPGTDDPVHGPPCP

SEQ ID NO: 345799 - protein, 81 aa, Zea mays
  unsure (1)..(81): unsure at all Xaa locations
  Clone ID: MRT4577_78537C.1.pep
VLKQVHPVIGISSKXVSIMNYLASXIFKKLAGKPANMAWYNNKPAIMSLEIQPPVLIVLAGELAKHAVQEETKTVAKFTSN

SEQ ID NO: 345800 - protein, 43 aa, Zea mays
  Clone ID: MRT4577_78538C.1.pep
YTGSSMDSLDMAKFRVNIHEKWLMVAHTKLHRGTERVLREQDT

SEQ ID NO: 345801 - protein, 36 aa, Zea mays
  Clone ID: MRT4577_78539C.1.pep
EIYTVLLSLAVVPGRQGTWADSTTLNRHGRELPRFG

SEQ ID NO: 345802 - protein, 340 aa, Zea mays
  Clone ID: MRT4577_7853C.1.pep
MSGSTAPPHVVEDFLGVIQIFSDGSIVRGDESTIMPAGPCPDVPGVQWKDAVYEATRGLKVRVYKPPPTPGGGNKGKLPVLVYFHGGGYCGGAYDYPLLHSCCQRFAAELPAVVLSVQYRLAPEHRLPAAVEDGAAFFSWLRSQAQAQPAAPGAAAAADPWLAESADFSRTFVSGGSAGANLAHHIVVRIASGQIALGAAVRVAGYVLISAFFGSVERVATESDPPAGVYLTVETIDQLWRMALPVGATRDHPLANPFGPGSPSLEPLPLPPALVVAPERDVLHGHVRRYAARLREMGKPVELAEFAGEGHGFSVGPWSEARDELMRILKRFVNQGAGLG

SEQ ID NO: 345803 - protein, 160 aa, Zea mays
  unsure (1)..(160): unsure at all Xaa locations
  Clone ID: MRT4577_78540C.1.pep
TFVPHTYGNNRQLDVIHSRWAMLGALGCVFPELLYRNGVKLCEAEWFKDDSHIFIEGGXDYLGNPNLIHAQSILAIWACQVLLMGALEGYRIDGGPLIEVVDPLYPCGRFXPLGLADHPEDFADLKXKELKNRRLSMLSMFGFLRQAIVTGKGPFENLSD

SEQ ID NO: 345804 - protein, 30 aa, Zea mays
  Clone ID: MRT4577_78541C.1.pep
VSRYNESKEEIGEHMNDEYAQHDLMLSKGQ

SEQ ID NO: 345805 - protein, 52 aa, Zea mays
  Clone ID: MRT4577_78542C.1.pep
VAKGGSIFPNEEKLREAPKFFKACGAIWPPKKGAIRGLPSVAPAQGLVGKGN

SEQ ID NO: 345806 - protein, 129 aa, Zea mays
  Clone ID: MRT4577_78543C.1.pep
PPRNPNNRLAMERWGTWGGARVTSAFFASLEGWFWINLFPDDDDDDEGPAEGKGGALIFAAGPRHGFAAKADSESPPEGQGGQKQKQPPLPAVLIETDSLVVITGTAVLLPKKIGGGGGFRNNGLVVLS

SEQ ID NO: 345807 - protein, 70 aa, Zea mays
  Clone ID: MRT4577_78544C.1.pep
TQYMADINGGPVYIQASCLLGAARWLVHSTQQMGPTGRFSESYTANNVVVAGIPFNPLPDPEPMLTSDYR

SEQ ID NO: 345808 - protein, 34 aa, Zea mays
  Clone ID: MRT4577_78545C.1.pep
WRDITLVFVNLITCTTNRDGLYLLRSSREQEIEP

SEQ ID NO: 345809 - protein, 164 aa, Zea mays
  Clone ID: MRT4577_78546C.1.pep
MRTTMSFTGSAPANDPCLAKILSKQGDNKVLFADKVLKFTQSGKMKRRILVITDFALYLVDPEANILKRRIALAAVDKLCISNLSDNFFAIIVPTEYDCLMASTRKKEIVDVIVKAIKSTSEYEPEVASSNRFEYHAAAEVIKVVEFEEVDGGTKTRITNREKS

SEQ ID NO: 345810 - protein, 81 aa, Zea mays
  Clone ID: MRT4577_78547C.1.pep
GRRPKRFPLLRGKRKTPLSCLTQHPPPGPIRDFSIPRPPLVSLLKMGKNGPPIKFGYLTPCSHPNLFHLIPHPHFAARLNN

SEQ ID NO: 345811 - protein, 224 aa, Zea mays
  Clone ID: MRT4577_78548C.1.pep
MRTTMSFTGSAPANDPCLAKILSKQGDNKVLFADKVLKFTQSGKMKRRILVITDFALYLVDPEANILKRRIALAAVDKLCISNLSDNFFAIIVPTEYDCLMASTRKKEIVDVIVKAIKSTSEYEPEVASSNRFEYHAAAEVIKVLEFEEVDGMFNVDITQYSWRHENQDHEQGEIMIQISLDGWFPADCITLGFIGCVGLLSSHVTCSVYRNLNVSAFWIWLWI

SEQ ID NO: 345812 - protein, 173 aa, Zea mays
  unsure (1)..(173): unsure at all Xaa locations
  Clone ID: MRT4577_78549C.1.pep
MRTTMSFTGSAPANDPCLAKILSKQGDNKVLFADKVLKFTQSGKMKRRILVITDFALYLVDPEANILKRRIALAAVDKLCISNLSDNFFAIIVPTEYDCLMASTRKKEIVDVIVKAIKSTSEYEPEVASSNXQHGALSSCRFEYHAAAEVIKVVEFEEVDGGTKTRITNREKS

SEQ ID NO: 345813 - protein, 91 aa, Zea mays
  unsure (1)..(91): unsure at all Xaa locations
  Clone ID: MRT4577_7854C.1.pep
MRECISIHIGERWYRVSXVCWEVYCIXHGVVPDGQTTGPNTTGGAALSFITFFYKTGDGKNLLREFITKNLVQLRLTHALTSPYCLVPPPL

SEQ ID NO: 345814 - protein, 161 aa, Zea mays
  unsure (1)..(161): unsure at all Xaa locations
  Clone ID: MRT4577_78550C.1.pep
ACKSEFVKASKRHLSDLKDLQKXDPPNTRSAGPAXGDDPFHWQATILGPPDRPSAGGVFLSXNSTFPPXNPFXKPPKGFLFKKKVFHPNINRNGSICLDILQKQWSPALTISKXVLLFICSLLTEPNPDEPFVPENAQMYKKDRPKYESTARNWTQKYPMG

SEQ ID NO: 345815 - protein, 167 aa, Zea mays
  Clone ID: MRT4577_78551C.1.pep
MDGLVGLLKVRVVRGINLAYRDARGSDPYVVLRLGKKKLKTSVKKRSVNPIWHEELTLTVTDPSLALKLEVFDKDTFSRDDPMGDAEIDVAPLVEAAKPIRPRVRRNGAIILSVRPSATNCLADESHVCWRNGKFAQDMILRLRNVESGEIQLQLQWLSIPPAAASR

SEQ ID NO: 345816 - protein, 167 aa, Zea mays
  Clone ID: MRT4577_78552C.1.pep
MDGLVGLLKVRVVRGINLAYRDARGSDPYVVLRLGKKKLKTSVKKRSVNPIWHEELTLTVTDPSLALKLEVFDKDTFSRDDPMGDAEIDVAPLVEAANASPEASLRNGAIILSVRPSATNCLADESHVCWRNGKFAQDMILRLRNVESGEIQLQLQWVSIPPAAASR

SEQ ID NO: 345817 - protein, 75 aa, Zea mays
  Clone ID: MRT4577_78553C.1.pep
LFQAHDAYGGEFVRQSGWKTKPKKLVQECKKQQRGRQIKRAAMNRFLTQSNVYLKSTDLCAYLQVTSKPFALKHC

SEQ ID NO: 345818 - protein, 48 aa, Zea mays
  Clone ID: MRT4577_78554C.1.pep
MVPATSSLYELNWTKGIKNVILAINSTCRPSQISSLFYGRWITHYITC

SEQ ID NO: 345819 - protein, 50 aa, Zea mays
  Clone ID: MRT4577_78555C.1.pep
SPLSSYVDPIFVLTVFYSCLPVLFISSVLLSKFNLIFKKNIPITKFKHYT

SEQ ID NO: 345820 - protein, 576 aa, Zea mays
  unsure (1)..(576): unsure at all Xaa locations
  Clone ID: MRT4577_78556C.1.pep
MAHLRCTTRKSMIPFLPYHLAERPLHRTVSEQLSHLERLHHCLREKQDSSPSPQQEVESRRHPSSVPQLEVPLAPLQGTLAAGQDPDEDDDDRSSSHNTEPFGVADGLKLKYYPCCSTGSTGSVIVSLIGEGNPKLSSMMFDNRRQGWRRTQQEQEKVLYGPHLLRGVAQSWWESYLATHANHEAITWEEFKDNFRQYHVPEGLMIVRKEEFLALKQGPLSVSEYMDKFMQLSCYALKDVNTDAKRQPGAAIVPVSQAIHPSSSSRATLKDISTRISILISSNSRGSSLSSNSSTASTTNQEEVSIRGRIVWHLTFLPQQPIRIARQPQRKEEAEDASIVESKRAYRVFAPELVELKKQIDELLEKGYIRLSTSRWVAPVLFAEKKYGTKRMCIDHRALNEVTIKNKYPLPRIEDMFDQLRFSKIDLRSGYHQLRIRTSDIPKMTFSTKYGLYEYTIMSFGLTNASTFFMYLMNNVFMDYLDKFVVNEEEHEEHLKMVLQRLREHQLYAKLGKVTYILDWKAPRNARGVKSFIRMAGYYRHFIEGFSKIARPMTALLAKKVEFKWTXECQESFEAL

SEQ ID NO: 345821 - protein, 62 aa, Zea mays
  Clone ID: MRT4577_78557C.1.pep
QPLYLLSLQSMKNTPWRDLTLWSSIDGLSWKKNNSLANCQITRTSISSWRPYKMVIACLASP

SEQ ID NO: 345822 - protein, 68 aa, Zea mays
  Clone ID: MRT4577_78558C.1.pep
SWKVSCYLGANMKLHRQLFIFCQTGGTDRGRREMLWPFVSRSLDVYFRLFFGVLPSLPLKLSEYLCTK

SEQ ID NO: 345823 - protein, 50 aa, Zea mays
  Clone ID: MRT4577_78559C.1.pep
MGKLCCSQEDDEPAFNLLGLLVTVVLALLLLMLCTPPRRRRCVAYYPPCC

SEQ ID NO: 345824 - protein, 90 aa, Zea mays
  unsure (1)..(90): unsure at all Xaa locations
  Clone ID: MRT4577_7855C.1.pep
TMVLGFERFTILPSKVAENAPSQRKLDSSDQSRKDDSPSTPGTRMGILARNGEIPPDGLMCPVGXKLPVDNNASLVQSEGRSNLGKQLEA

SEQ ID NO: 345825 - protein, 152 aa, Zea mays
  Clone ID: MRT4577_78560C.1.pep
IGNHILELAMHIIITSEHKKRSCTTAAATTLLSSSGRAKSGCMKPENPTTTASTSISAFPDGMGLSVCPALKKTPAHQESSWPNSFHPFHLLAASPVLITPFQCDHAVPLPSVLLLLAAFLEPWPATSLPDLLLVAMQQELVDAPGLCGQRP

SEQ ID NO: 345826 - protein, 76 aa, Zea mays
  Clone ID: MRT4577_78561C.1.pep
MVGDRQRLALYKCIRLRSAMARPRHQPTIRLPNERSTGDYAVLTQRTVLISGFNGYYNYRHQADIWHAYQIMKKGG

SEQ ID NO: 345827 - protein, 146 aa, Zea mays
  Clone ID: MRT4577_78562C.1.pep
MAQSSSASVKLLVLVVLPALLLLLVQAQGARPAAANATTPTPTTTTGCAASSVTVSQSNTGDRAGYDPVFEVTVRNACRCAVRAVRLRSEGFASSVPVDPRLFRRAGRDYLVADGRRIEPGADARFRYAWDRAFRMTAAAVRDDCS

SEQ ID NO: 345828 - protein, 104 aa, Zea mays
  unsure (1)..(104): unsure at all Xaa locations
  Clone ID: MRT4577_78563C.1.pep
IPDINXGXXLFXLRKXLVXMXNGSFLKCEEGGGSFXXSXXXMLXXKIVKVLIREXMIXSWIXMVXXXXMGXXKIXLXKXXMRKWEKXLDXLKXRLXFKMXILIF

SEQ ID NO: 345829 - protein, 144 aa, Zea mays
  Clone ID: MRT4577_78564C.1.pep
MAQSSSASVKLLVLVVLPALLLLLVQAQGARPAAANATTPTPTTGCAASSVTVSQSNTGDRAGYDPVFEVTVRNACRCAVRAVRLRSEGFASSVPVDPRLFRRAGRDYLVAHGRRIEPGADARFRYAWDRAFRMTAAAVRDDCS

SEQ ID NO: 345830 - protein, 115 aa, Zea mays
  unsure (1)..(115): unsure at all Xaa locations
  Clone ID: MRT4577_78565C.1.pep
PRRPRRDPPQGGTGEQQTHTEPRQAPTGRAPSSEKXGXKKGPXTPEEDKAPXAHSQSNGHSNXRAQPKQAGKPRGGKSSRHRRTNXRRPDNKRGNNSKEEEDAKNSQHEQHGNRG

SEQ ID NO: 345831 - protein, 46 aa, Zea mays
  unsure (1)..(46): unsure at all Xaa locations
  Clone ID: MRT4577_78566C.1.pep
GPYYDPTHTKQIPLFVPGIYYIPLAISRDPYHLINRGQPWGGQXVR

SEQ ID NO: 345832 - protein, 51 aa, Zea mays
  Clone ID: MRT4577_78567C.1.pep
SIIIILCSFFEVVGMMSVYLCFLTQSNMFLICVMNGTFYRPAPHKKKPSYD

SEQ ID NO: 345833 - protein, 61 aa, Zea mays
  Clone ID: MRT4577_78568C.1.pep
FWAPKEVRPLPGAVQKKNRFVRYQWGLGHLLFFRRPWQELYLPKTGAFMCSVKCSFHWQKM

SEQ ID NO: 345834 - protein, 53 aa, Zea mays
  Clone ID: MRT4577_78569C.1.pep
PTEAIEWKGKMGKLRLLVPALGVPHSLPNLSPLRGAARRAPASCLSPSSLCFL

SEQ ID NO: 345835 - protein, 241 aa, Zea mays
  Clone ID: MRT4577_7856C.1.pep
GTSSRQAGEKLCSSYLLTARSLPLVRFFLSRSSNVVSETAATLLLRRPKPTATHTLSLYPSSSFFIHLFQNRARLADAGVRSSGERGVGVSSAARPTPRRPCLWMPIARGYGRQPELKYCTSSQSKSVLLGAGFGRHVTRSNPYLLQNSSSTTMARLQKSGQFQQLVLDPSRNYLTKTFYNANMKRRVLSRVECFVSSDPINNGWLKPRRAENFTSLESACVQREYKLPVRTRGDCKEKQN

SEQ ID NO: 345836 - protein, 160 aa, Zea mays
  Clone ID: MRT4577_78570C.1.pep
HELHDGNRYPLIPESINKALPKHENKTVHHLLAMMGGGHGKGGPNGPTNKCAPTVPLRAQSVQKLPRHSRVRRARLAVLLRSAPHAQAGRSPLTMTTPTSHCLAWQRHGGSVAGVGRQRQGAPRRPSPGQAPARPEPRPLLGAVGGDRRRTRRGCVRLCK

SEQ ID NO: 345837 - protein, 87 aa, Zea mays
  Clone ID: MRT4577_78572C.1.pep
MAGVQREVYSKKGVMRRLMRWSRPRWAAAEQAECAVCLDEFRAGDVLAHLRCGHRFHWACALPWLEGTSRCPFCRAAVDAGAAADGA

SEQ ID NO: 345838 - protein, 60 aa, Zea mays
  unsure (1)..(60): unsure at all Xaa locations
  Clone ID: MRT4577_78573C.1.pep
LFDRLLCASSRPLAVALTISDPNKASRIRXRXESVLEERLVTDNPGDTEASLGGHGTAEE

SEQ ID NO: 345839 - protein, 66 aa, Zea mays
  Clone ID: MRT4577_78574C.1.pep
KGPAACPTLSRCNAGACQPNRGECHARSILGLAIARCPTTAHHISLLQNCTKFAERRAPHPAQRDG

SEQ ID NO: 345840 - protein, 56 aa, Zea mays
  Clone ID: MRT4577_78575C.1.pep
LKRARFHWSSYANYDASTCRHLPACRSCQEDEHWPLSLPRVQVLIITQKGRPFSAP

SEQ ID NO: 345841 - protein, 200 aa, Zea mays
  Clone ID: MRT4577_78576C.1.pep
LSELLKILQDNCVPSIFIQKIFTQVFSFINAQLFNSLLVRHECCSFSNGEYVKQGLAQLEVWCGEVKPEYAGSALDELKHIRQAVGFLVIFKKFRISYDEIVNDLCPVLSVQQLYKICTQYWDDKYNTESVSEEVLEEMRTLMTKESSDETLGNTFLLDDEISLPISLEEIADSMDAKEFQNIAPPQELTAIPAFQFLKS

SEQ ID NO: 345842 - protein, 67 aa, Zea mays
  Clone ID: MRT4577_78577C.1.pep
NSECQVMQSCDSLPDSSQLQQPARVAQNSEALIILCETELEMAVHPAPKYSLSHAMNQRRAPQPHIM

SEQ ID NO: 345843 - protein, 107 aa, Zea mays
  Clone ID: MRT4577_78578C.1.pep
LYQDPWVHLCLRPLPREVGPWLEGELLTVLLAIPYSRAHTDGVAAAALEGPRTRRHGGPRTLDSSYGECKLLPNQIPRVESDHSDRAPPMLWSHEPCRTTLLIPSDS

SEQ ID NO: 345844 - protein, 110 aa, Zea mays
  unsure (1)..(110): unsure at all Xaa locations
  Clone ID: MRT4577_78579C.1.pep
FGNHXFPRDFCFPRKINLFSLGQNRNPLGKWCSQTSPNSSPNFPRFIVTRGLSRALLQLTTHTSHAVSEALLETPVVDIVHQCHGPSVHGDSCLLRRGYTSLPRGAAYPT

SEQ ID NO: 345845 - protein, 111 aa, Zea mays
  Clone ID: MRT4577_7857C.1.pep
FAMSIRFHHLYRFLKIMVNFAPRFNVLEGIALLESLVPACCDSCRGHLGNSLFAHVPRGARVTSHVVRCDNYTYQGASEILSMEHIMLANQKQPATVRGCHHGRTFYFRPA

SEQ ID NO: 345846 - protein, 77 aa, Zea mays
  Clone ID: MRT4577_78580C.1.pep
TWELRRIEAMVQSKSSPIVWLHPKPLLHTQAQHRPASIPPLTNTDQNAKRREIWSRGVYTLYMAFSLSSMHLEWPLR

SEQ ID NO: 345847 - protein, 37 aa, Zea mays
  Clone ID: MRT4577_78581C.1.pep
VFLGCFHPRWDVLYTPLFPRYPVRHSCLCPDIGCLMS

SEQ ID NO: 345848 - protein, 127 aa, Zea mays
  Clone ID: MRT4577_78582C.1.pep
RPGRNHADEIYIDVRDPSTRLIRNTDVCGTAHSTAVPARQATPRWRIRRTATHDLHLTHRNNLSTLPLLVQHCPQGVRAAREGLLRQLPRQRATDDRHQATMRADGDAVENNSTVLTYTTRMTTLYG

SEQ ID NO: 345849 - protein, 236 aa, Zea mays
  Clone ID: MRT4577_78583C.1.pep
MSSQMDNRIQSAGKRARTDGSRREDDWICPSCNNVNFAFRTTCNMRNCDQSRPADHTAMQTPPHYSVPGRYMPPGTPPSMYLTGAPPPYGSNLYNGHPMPRYGIPQLPPGSGYPYGYGGRVPMGSPYGPMHMAAPPPYSSGSMVGAGGMYSISMPMDRYGLGSPAGPGAMGTRAGSYSDEGSQKKSAGAGRDNDWKCPNCNNINFAFRTVCNMRKCNTPRPDTQGSKPDSSELQNQ

SEQ ID NO: 345850 - protein, 57 aa, Zea mays
  Clone ID: MRT4577_78584C.1.pep
GRLQWPHTAEGPRLNLPQLLACRGARVDTIRTSYIYPYRSVRIIIFAEKICMCPPPS

SEQ ID NO: 345851 - protein, 100 aa, Zea mays
  Clone ID: MRT4577_78585C.1.pep
APRSIARRSHEQRLRRSNRRSRLDLCLSVQPAAALPQYPKRFPSPRCVGARSPPRVGSLPVGTVGSRGRWEPHHGARGMSECRLLGSRRRTGYRVPSSCP

SEQ ID NO: 345852 - protein, 80 aa, Zea mays
  Clone ID: MRT4577_78586C.1.pep
HSSSDLLKYAHSLSLLLPPPIHSILSLFNIHLFTFSSPTLILDPRTPFLIPTPINLLPRLTFPFSTLALSLSHTFFLPHL

SEQ ID NO: 345853 - protein, 65 aa, Zea mays
  Clone ID: MRT4577_78587C.1.pep
MQVGDGGGDSADLRGRHRIQAELKKLEQEARFLEEELEELDKADKSWDRWFEGPQDLRGCKCWFL

SEQ ID NO: 345854 - protein, 94 aa, Zea mays
  Clone ID: MRT4577_78588C.1.pep
MQVGDGGGDSADLRGRHRIQAELKKLEQEARFLEEELEELDKADKVSSALQEFLIAMERKADPLLPVSAGPVNQSWDRWFEGPQDLRGCKCWFL

SEQ ID NO: 345855 - protein, 67 aa, Zea mays
  Clone ID: MRT4577_78589C.1.pep
NCVPSYHKSIDLKTPPLNKASSFRNKFVVPFTLGIKTGSAQAVPCTHNSLTTRYSSSTPSPFYLSLV

SEQ ID NO: 345856 - protein, 75 aa, Zea mays
  Clone ID: MRT4577_7858C.1.pep
ARGNTQTDAVPCCSAPVAAQTLCRTHLRLSLPLLLYLLLLLLKPETKKKVELFVTILLYLLSASPFCLYDLTISF

SEQ ID NO: 345857 - protein, 72 aa, Zea mays
  unsure (1)..(72): unsure at all Xaa locations
  Clone ID: MRT4577_78590C.1.pep
RRCVQLLCGGLTLKSSQNIDNLSGGEKTLRYLALEEAIHHYKPTLLYVIDDSDAASDFKNXIIVGHYVKDRT

SEQ ID NO: 345858 - protein, 91 aa, Zea mays
  Clone ID: MRT4577_78591C.1.pep
SACLFFSPSLDFRRFQSISDFLFFKKRVDGKQFLCFLCVRWTIAKLERKGESDISRAGYLSIIFYTSVPCPIIEHVYCCWSLLSFDACTYI

SEQ ID NO: 345859 - protein, 126 aa, Zea mays
  Clone ID: MRT4577_78592C.1.pep
LLAPLWQARFQPLWESIFSKLDEFVASLVILLSSLHRPGSEIAGLGMCSPPHLMGSSRPSPSPRMSASFAAWLLSPAVPLYCAFFTKIGVPALRSLLDAKLPPVPPPPPEYFSLTCPRILTFKTKP

SEQ ID NO: 345860 - protein, 229 aa, Zea mays
  unsure (1)..(229): unsure at all Xaa locations
  Clone ID: MRT4577_78593C.1.pep
MFFQRKKSKKAKDSGGSQKKGKDGRGKNAKGGGLDALAGSLQSAKKDAETATEKLQGDVKSGMETILHKGSGLLEKAKEELGSHSDASRSSKELERGSEEQGNNKDMDAFSAVMDKVKGHPEAMEKVSAVMDKVKSHPEVVDKVKDEVMSLAGALRLRRHGSEDKEAESEEKAEGAQSADEGASDGMAGEXPSVLEQAVXEXIQAVAAALQQTAEPRAXNXAETAAAAA

SEQ ID NO: 345861 - protein, 126 aa, Zea mays
  Clone ID: MRT4577_78594C.1.pep
RTTESRSQAYTRLIHEDKYGSLSLRRGRDHLTTVRGTPLEADSIEHSSTRTPCRHAMSTSLMWSSSMYTVQYDQSIHLIVGVYPRSRFSSLLHACPVRALYNLCVMNWDAAHYRISVGVVSKVVRS

SEQ ID NO: 345862 - protein, 56 aa, Zea mays
  Clone ID: MRT4577_78595C.1.pep
YALKNHELYTYIRIELMISRTLLFTKKKKKGCRLLLNLSYPIINSLPVPSYLPAFP

SEQ ID NO: 345863 - protein, 263 aa, Zea mays
  Clone ID: MRT4577_78596C.1.pep
MFFQRKKSKKAKDSGGSQKKGKDGRGKNAKGGGLDALAGSLQSAKKDAETATEKLQGDVKSGMETILHKGSGLLEKAKEELGSHSDASRSSKELERGSEEQGNNKDMDAFGAVMDKVKGHPEAMEKVSAVMDKVKSHPEMVEKVKDEVMSLAADALRLRRHGSGDKEAESEEKAEGAQSADEGASDGKAGEPSVLEQAVQEIQAVAAALQQTAEPEAEIPAETAAAAAAETSAGGDKPEETNGEVEQDDPKKALDFAGFFAML

SEQ ID NO: 345864 - protein, 279 aa, Zea mays
  Clone ID: MRT4577_78597C.1.pep
MFFQRKKSKKAKDSRGSQKKGKDGRGKNDLFDRAKGGLDALAGSLQEAKKDAETATEKLQGDVKSGMETIRHKGSGLLEKAKEELGSHSDASRSSKELERGSEEQGNNKDMDAFSAVMDKVKGHPEAMEKVSAVMDKVKSHPEVVDKVKDEVMSLAGALRLRRHGSEDKEAESEEKAEGAQSADEGASDGMAGEPSVLEQAVQEIQAVAAALQQTAEPEAEIPAETAAAAAAETSAGGDKPEETNGEVEQDDPKKRLDFAGFFAMLLERFCSPASKKKD

SEQ ID NO: 345865 - protein, 61 aa, Zea mays
  Clone ID: MRT4577_78598C.1.pep
GLYTYVPLCIYIRVTLWVSCKIRRKKTKIKRIDIGEAFQEPSLLIITIYCCFSFTAVIFKG

SEQ ID NO: 345866 - protein, 232 aa, Zea mays
  unsure (1)..(232): unsure at all Xaa locations
  Clone ID: MRT4577_78599C.1.pep
MFFQRKKSKKAKDSGGSQKKGKDGRGKNAKGGGLDALAGSLQSAKKDAETATEKLQGDVKSGMETILHKGSGLLEKAKEELGSHSDASRSSKELERGSEEQGNNKDMDAFGAVMDKVKGHPEAMEKVSAVMDKVKSHPEMVEKVKDEVMSLAADALRLRRHGSGDKEAESEEKAEGAQSADEGASDGKLEKPSVWSRXVQEIXAVAXALQQAAEPEAXIXAETAAAAAETSA

SEQ ID NO: 345867 - protein, 81 aa, Zea mays
  Clone ID: MRT4577_7859C.1.pep
MHDRPDRRMQYERHEAKKDPEHAQRHKIEEGVAAVAALGSGGFAFHEHHDKKEAKDAAEDAGEEEESGRRGEGKKKHHFFG

SEQ ID NO: 345868 - protein, 130 aa, Zea mays
  Clone ID: MRT4577_785C.1.pep
TRTWATLYEKRATTREAALGKLVDAFESFMLHGLVEDKYATLMSQFNNSVKRGSTKEVFLASHSIGLLAITLGVGSSSHEIMEESHPQLCRILQAWSDASKMISALDCLAVITFVGASDLAETELSLKAM

SEQ ID NO: 345869 - protein, 56 aa, Zea mays
  Clone ID: MRT4577_78600C.1.pep
KKIAVGIQSSKSTNSKRFEGQNCGNFLRDRPSTKVQKAPGGDFSLGYFFRGRKNGK

SEQ ID NO: 345870 - protein, 65 aa, Zea mays
  Clone ID: MRT4577_78601C.1.pep
TGEQLGTGGDKYNWVFMPKHFGVGEFSFGTFQETCPPTLNLWDIISCICSFGGFDPHGPWEFLKG

SEQ ID NO: 345871 - protein, 124 aa, Zea mays
  unsure (1)..(124): unsure at all Xaa locations
  Clone ID: MRT4577_78602C.1.pep
WSVKSVEVESVCVKAGGEVGMVNVVRSVEVRPLPSVAPAGPELLQLPQQLRARVLCACAFVGVGVAWVRAVVLGEGHGSEEECDDQGVAHGAGLLVVVVGXGXGLELMRCAXAPXWXWNKDLWT

SEQ ID NO: 345872 - protein, 103 aa, Zea mays
  unsure (1)..(103): unsure at all Xaa locations
  Clone ID: MRT4577_78603C.1.pep
RPGRDAGSRADAQPADPAGQAPPTGTXQNEEXKTGDXEGARKXXATNRXXXAKDXAXXQNNXGHXXAKGXXXXHXTTXXXXGXXXXQGXADSXXDRXXQKKTK

SEQ ID NO: 345873 - protein, 491 aa, Zea mays
  Clone ID: MRT4577_78604C.1.pep
MARPHVVVVPYPGSGNINPALQIARLLHRHGVYVTFVNTEHNHRRVQATEGAGAVRGGEGFRFEAIPDGLSEAERGKQDYGRSLAVSTSTRCAAPLRDLIARLNGTPGVPPVTCVLPTMLMSFALGVARELGIPTMSFWTASAASLMTHMRLRELQERGYVPLKDESFLTNGYLETTVIDWIPGVPPIRLGDFSSFLRTTDPDDFGLRFNESEANSCAKAGALILNTFDGLEADVLAALRAEYPRVYTVGPLGLLLRQDDDRDSSASASGSTESTGLSLWKQDAECLAWLDAQERGSVVYVNFGSHTVVTPEQLNEFAWGLAASGHRFLWSMRDNLVRGGGGGGGAGLDAMPSTFKAETAGRCHVTAWCPQEQVLRHPAVGCFLTHSGWNSTCESLAAGVPMVCWPGFSDQYTNCKYSCEVWGVGVRLEATVEREQVAMHVRNVMASEEMRKSAAKWKEEAEAAGGPGGSSRENLLSMVRALSSAPNSPDA

SEQ ID NO: 345874 - protein, 49 aa, Zea mays
  Clone ID: MRT4577_78605C.1.pep
LPVLPRIPVHHIIDFSMSKTPSSSNHIVLQQSKSLASKHTLYQPFVVST

SEQ ID NO: 345875 - protein, 47 aa, Zea mays
  Clone ID: MRT4577_78606C.1.pep
LKKNGSGSQHKLRPPRHFKNLNKGGEIPEFGHVSRDTVPPLHLYIKE

SEQ ID NO: 345876 - protein, 84 aa, Zea mays
  Clone ID: MRT4577_78607C.1.pep
KKEEEEKKHNPLGSCCPGCLAPPTATEGGAEPPFQSSYGKRRAALNYQSPVLAFFWPCTELLMSRSCFFIGNCPRFSIRNSRGR

SEQ ID NO: 345877 - protein, 232 aa, Zea mays
  unsure (1)..(232): unsure at all Xaa locations
  Clone ID: MRT4577_78608C.1.pep
MGGVTSSVAAKMAFFPPTPPSYALVEDXRCGGHXTLSGQPHRENVELLRFRTRKGNTLAAMYVRHPDAASTVLYSHGNAADLGHLYQLFLHLSFNLRVNILGYDYSGYGQSSGKNIDKIPQVTCPVLIIHGTADEVVDWSHGKQLWELCKDKYEPLWLRGGKHCDLELFPEYIRHLKNFFHSLEKSPSHRQAWRENVDRIEPSRKSTDFFEPSRKSTDQREKIKVNSRDEKH

SEQ ID NO: 345878 - protein, 63 aa, Zea mays
  Clone ID: MRT4577_78609C.1.pep
HLLTLLTMYSSNNYYHFIQLACWSPACFLSQQLFVVSLPVRFALSWHDVSTCFICCLFNQLGF

SEQ ID NO: 345879 - protein, 55 aa, Zea mays
  Clone ID: MRT4577_7860C.1.pep
FKIYTKPLIIGIEVDTCESKRPKPQLCLALLFLHIRFSGCWVILLSYCSLFNFSS

SEQ ID NO: 345880 - protein, 367 aa, Zea mays
  Clone ID: MRT4577_78610C.1.pep
MGGVTSSVAAKMAFFPPTPPSYALVEDAGAGVTTLSGQPHRENVELLRFRTRKGNTLAAMYVRHPDAASTVLYSHGNAADLGHLYQLFLHLSFNLRVNILGYDYSGYGQSSGKPSEHNTYADIEAAYKCLIEKFGAKEEEIILYGQSVGSGPTVDLASRLSQLRAVVLHSPILSGLRVMYPVKRTYWFDIYKNIDKIPQVTCPVLIIHGTADEVVDWSHGKQLWELCKDKYEPLWLRGGKHCDLELFPEYIRHLKNFFHSLEKSPSHRQAWRENVDRIEPSRKSTDFFEPSRKSTDQRKKSRSTRDKTRNTEHRYSNVEKVDKLKISFDQFEKSRRSVDIFERPKRNIEQLDCGRKSVDRLDRIWAS

SEQ ID NO: 345881 - protein, 106 aa, Zea mays
  Clone ID: MRT4577_78611C.1.pep
KPPIKTLRGKPAKLGKKERKKTERTGGKGLAKGTGHMGGTPTTPRVKGPVKGGVHCQLRWGNVWKGDRGGPFLVITQLAKRGISSKRIKWGKARVFQFPRLKNPAN

SEQ ID NO: 345882 - protein, 49 aa, Zea mays
  Clone ID: MRT4577_78612C.1.pep
AVVLYSSQVVMFTVVQPLYESLALGNLLMLVWFPMSNSITYGARVLVCL

SEQ ID NO: 345883 - protein, 52 aa, Zea mays
  unsure (1)..(52): unsure at all Xaa locations
  Clone ID: MRT4577_78613C.1.pep
SLSAALINXKMLCRYCARSHXXXXPSMICSFFTLSVLIMFSPSILFTFLTFF

SEQ ID NO: 345884 - protein, 128 aa, Zea mays
  Clone ID: MRT4577_78614C.1.pep
GGISPIQKQSSFRRKPYGSQWAKPPLKNKVFSAAGSPKYRPLPGAKKSGGKLSIREAHLDRALQKKTAFPAKLGQTPLRGNTRFIRKIPKLAAPFRGRQHRLWNHDGFVSAQGPITLGLHILGDTPHY

SEQ ID NO: 345885 - protein, 86 aa, Zea mays
  Clone ID: MRT4577_78615C.1.pep
GILLAHLRGSNISPFQHVPAVRSPLHLSRKDDEGEHFHAHRIRCVRRRAGHADSCHGASMVLKLRLICTRTRPWGQFMMVPKHSAV

SEQ ID NO: 345886 - protein, 58 aa, Zea mays
  Clone ID: MRT4577_78616C.1.pep
LFRGGGHSSAEEHADGSFHLGVHCRHPVPYLSATARSAEEEEETVRATWIQMTLTRMD

SEQ ID NO: 345887 - protein, 176 aa, Zea mays
  Clone ID: MRT4577_78617C.1.pep
MSKKIVVKLHLQDNKDKQKAMKAVSALTGIDEISADMASHKMTVVGMVDPVSVVSKLRKASWSATIESVGPAKEPEKKDGEAAKKDGGEGEKKEGGEGEKKEAGEGEKKEAGGEKDKDGKKAAPPTPTPTPTEQQVQLAELLNQYYRASSYYPYPPVATHYHVQSMEEDPNSCTVC

SEQ ID NO: 345888 - protein, 109 aa, Zea mays
  Clone ID: MRT4577_78618C.1.pep
MKRQPPHPRSGDDSPAGERGSDGGLKKGKGRGRWGGGSRRRNDQRLGGGGGGALSLAAFASAKSRTSGYNPALIKKQKEFYKNAKLISKCKKTKKQQSQSNNHSEISVH

SEQ ID NO: 345889 - protein, 105 aa, Zea mays
  Clone ID: MRT4577_78619C.1.pep
PRLGFLWRGGLPRDPPPPSVGLDPCRPLWVKVGFAPFVPPGSWICFYSVPFGFLPFDSLPLFFFVPLFTCSPLGFLTPVPPFCWVGCDFPPVFFWAPHFRGLCFF

SEQ ID NO: 345890 - protein, 168 aa, Zea mays
  unsure (1)..(168): unsure at all Xaa locations
  Clone ID: MRT4577_7861C.1.pep
MADEYGRSGYGRSGAGDDYDSGYNSKSGTDDYGRGTXRSGGDGXGGYNKSGGDDDYGRSGGDGYGRSGGDDYGRGTGGGGYNKSGGGDDYGRGTGGGGYNKSGNDGYDSGYNRSGTTNDDEYGRGTGGGYGSKPSGDDAYAGGGGGGYGKQSGGGADQGGEYGSSRDD

SEQ ID NO: 345891 - protein, 61 aa, Zea mays
  Clone ID: MRT4577_78620C.1.pep
KQVTAGRNVFFFFFFFFWQESCFKKGAITGHRDNATNNHSLTLTNGASCGYLECRNGQHKL

SEQ ID NO: 345892 - protein, 123 aa, Zea mays
  Clone ID: MRT4577_78621C.1.pep
HFFFVLFRAVEDRSGGGAVGQKRSSPDKMHRSTMDAVYHHHHHHQESPLTGNVAATASAGKKLGVERFELPPIYISLSRKEKDDNFLAMKGTKLPQWPKKRAKNVETLQVLNTWPEIDLILYF

SEQ ID NO: 345893 - protein, 125 aa, Zea mays
  Clone ID: MRT4577_78622C.1.pep
CPSRFRIVLSGLSSPVSPPSVSGISSPPPRHASIALVTKMQFMLSPKPTLPSLGGMELAGNVPGHQDSLRANMPPLKRRCEFPNVELSPEPVETHGHVDLSAHGGVHRVGFGSCYPCDDFPTTPM

SEQ ID NO: 345894 - protein, 527 aa, Zea mays
  Clone ID: MRT4577_78623C.1.pep
MSPLALLQALIFILCCSPLASASSSELTLAGAACGDDQLVIFDASDGLLNLSVNGVLMQDRVFACQKLGFYFGSGCLRCSNLSDAWRSAVKQYCGEGSEKSHATLHQDVPRKLLRWSTENSSRNACERSGLNENNQDIGDSSEKQEHLLAVPGVILLCCGLMLPCFHAERKEVSRHDNATIQRNALESVSSYEGSMSSEKVPPTPHRIPPSPSRFAPSPQIARVGSVNLSIQQILRATQNFSPSFKLGEGGFGMVYRAVLPDGNVVAVKRAKKDQFAGPRDEFSNEVDLLAKIDHRNLVRLLGFTDKGNERIIITEYVPNGTLREHLDGQHGRVLDFNQRLEIAIDVAHALTYLHLYAEKTIIHRDVKSSNILLTDSYRAKVSDFGFARSGPSDTEKTHISTKVKGTAGYLDPEYLRTYQLTPKSDVFSFGILLVEILSARRPVELKRTPEERITIRWTFKKFNEGNTREILDPLLEDHVDDEVLEKLLSLAFQCAAPTRDDRPTMKEVGEQLWEIRKEYGKSVRKV

SEQ ID NO: 345895 - protein, 75 aa, Zea mays
  Clone ID: MRT4577_78624C.1.pep
AYTYDVALKLPFLIQSDVALISDANYTADILSAINAPTEVALQVFLSSMVNMGAIEVKTDYRGDTRKHCSLDNRH

SEQ ID NO: 345896 - protein, 50 aa, Zea mays
  Clone ID: MRT4577_78625C.1.pep
VDAWPRRLLRCVSRYAGSLLVPRRSPPARRLCLNMPSHPAAGHELSDVHP

SEQ ID NO: 345897 - protein, 109 aa, Zea mays
  Clone ID: MRT4577_78626C.1.pep
WGPPSPDPPPDRGGGREFFPWASRGVSAIGREGGFSALKFGPRLGKCVCMERGAYKHSSPPVVDGGHFREPQTTRWVYRTGPVFFSPRVGFFKFFRFKKKFFPLNRLFG

SEQ ID NO: 345898 - protein, 124 aa, Zea mays
  Clone ID: MRT4577_78627C.1.pep
YWHADDERPYQTHIFHDLASNGSPKLDCEAERQSNHKIEADKMVEQTNQSEVSFVKAEHLNGGKIRKTRIEDYSYDKDVVEIKLPDTDLSSDYGVHFVKDVCIDEGVLPDQKISSEKQVDQKGL

SEQ ID NO: 345899 - protein, 247 aa, Zea mays
  unsure (1)..(247): unsure at all Xaa locations
  Clone ID: MRT4577_78628C.1.pep
MAPRRLLVLAVVALAATAAAANSGFADSNPIRPVTDRAASALESTVFAALGRTRDALRFARFAVRYGKSYESAAEVHKRFRIFSESLQLVRSTNRKGLSYRLGINRFADMXXWEEFRATRLGAAQNCSATLTGNHRMRPAAVALPETKDWEGGSCWTFSTTGALEAAYTQATGKPISLSEQQLXXDCGFAFNNFGCNGGLPSQAFEYXXYNGGLDTEESYPYQGVNGICKFKNXEMVGVKVLDSVNI

SEQ ID NO: 345900 - protein, 64 aa, Zea mays
  Clone ID: MRT4577_78629C.1.pep
AEATKHMYPNLSICASPHHPSCNDLIQKQTSMAINCCNVNGNGKAAPSDMDVPDIKFTNLFINC

SEQ ID NO: 345901 - protein, 90 aa, Zea mays
  Clone ID: MRT4577_7862C.1.pep
CSSTRSSSRLVSTSWLEAHISVLSIHSLFEHNCSCRLSCDNEADSMQSDALAQTVKRTTQRATCSTDYVYPGSSQRVVLLIGSMGLSGLM

SEQ ID NO: 345902 - protein, 361 aa, Zea mays
  Clone ID: MRT4577_78630C.1.pep
MALRRQLALAVLALAATTAAANSGFADSNPIRPVTDRAASALESTVFAALGRTRDALRFARFAIRYGKSYKSAAEVQKRFRIFSESLQLVRSTNRKGLYYRLGINRFADMSWEEFRATRLGAAQNCSATLAGNHQMRTAAAAALPETKDWREDGIVSPVKNQGHCGSCWTFSTTGALEAAYTQATGRAISLSEQQLVDCGFAFNNFGCNGGLPSQAFEYIKYNGGLDTEESYPYQGVNGICKFKNENVGVKVLDSVNITLGAEDELKDAVGLVRPVSVAFEVITGFRLYKRGVYTSDHCGTTPMDVNHAVLAVGYGVEDGVPYWLIKNSWGADWGDEGYFKMEMGKNMCGVATCASYPIVA

SEQ ID NO: 345903 - protein, 361 aa, Zea mays
  Clone ID: MRT4577_78631C.1.pep
MALRRQLALAVLALAATTAAANSGFADSNPIRPVTDRAASALESTIFAAVGRTRDALRFARFAIRYGKSYKSAAEVQKRFRIFSESLQLVRSTNRKGLYYRLGINRFADMSWEEFRATRLGAAQNCSATLAGNHQMRAAAAAALPETKDWREDGIVSPVKNQGHCGSCWTFSTTGALEAAYTQATGKAISLSEQQLVDCGFAFNNFGCKGGLPSQAFEYIKYNGGLDTEESYPYQGVNGICQFKAENVGVKVLDSVNITLGAEDELKDAVGLVRPVSVAFEVISGFRLYKSGVYTSDHCGTTPMDVNHAVLAVGYGVENGVPYWLIKNSWGADWGDEGYFKMEMGKNMCGVATCASYPVVA

SEQ ID NO: 345904 - protein, 65 aa, Zea mays
  Clone ID: MRT4577_78632C.1.pep
KKRGVPFFRVGVGVPQKPHGGVSIFFIRGWGREYLFVGRPNWILFMVKKDFFSTRAHFNVIPVLG

SEQ ID NO: 345905 - protein, 378 aa, Zea mays
  Clone ID: MRT4577_78633C.1.pep
MALRRQLALAVLALAATTAAANSGFADSNPIRPVTDRAASALESTVFAALGRTRDALRFARFAIRYGKSYKSAAEVQKRFRIFSESLQLVRSTNRKGLYYRLGINRFADMSWEEFRATRLGAAQNCSATLAGNHQMRAAAAAALPETKDWREDGIVSPVKNQGHCGSCWTFSATGALEAAYTQATGKPISLSEQQLVDCGFAFNNFGCKGGLPSQAFEYIKYNGGLDTEESYPYQGVNGICQFKAENVGVKVLDSVNITLGAEDELKDAVGLVRPVSVAFEVISGFRLYKSGVYTSDHCGTTPMDVNHAVLAVGYGVENGVPYWLIKNSWGADWGDEGYFKMEMGKNMCASWLTRACIGSNARISLPRSCSRMHGDLN

SEQ ID NO: 345906 - protein, 88 aa, Zea mays
  Clone ID: MRT4577_78634C.1.pep
VTRSLSLQHFLSMSPFYKIILTYLDVILVQVMVLHSPHSIVKTDPPAAAVGVLNSNQVRASCVHSVSSCSTHPPRIVWISPVYRPTRP

SEQ ID NO: 345907 - protein, 41 aa, Zea mays
  Clone ID: MRT4577_78635C.1.pep
MAESTARTVKDVNPHEFVKAYSAHLKRSGKVTVLDSPPFPI

SEQ ID NO: 345908 - protein, 273 aa, Zea mays
  unsure (1)..(273): unsure at all Xaa locations
  Clone ID: MRT4577_78636C.1.pep
MAPRRLLVLAVVALAATAAAANSGFADSNPIRPVTDRAASALESTVFAALGRTRDALRFARFAVRYGKSYESAAEVHKRFRIFSESLQLVRSTNRKGLSYRLGINRFADMSWEEFRATRLGAAQNCSATLTGNHRMRAAAVALPETKDWREDGIVSPVKNQGHCGSCWTFSTTGALEAAYTQATGKPISLSEQQLVDCGFAFNNFGCNGGLPSQAFEYIKYNGGLDTEESYPYQGVNGICKFKNENVGVMVLDSXYITLGAEXDELKDAVGLV

SEQ ID NO: 345909 - protein, 103 aa, Zea mays
  unsure (1)..(103): unsure at all Xaa locations
  Clone ID: MRT4577_78637C.1.pep
SLVNLYLHXFAAQQLQQGVLSTINQVVAANLAAYLQQQQFLPFNQLAGVNXLLYLQAQHLLPFNQLVMSPAAFFLHQQLLSFHLTSCGNSLLLFCNNINCFPF

SEQ ID NO: 345910 - protein, 361 aa, Zea mays
  unsure (1)..(361): unsure at all Xaa locations
  Clone ID: MRT4577_78638C.1.pep
MAPRRLLVLAVVALAATAAAANSGFADSNPIRPVTDRAASALESTVFAALGRTRDALRFARFAVRYGKSYESAAEVHKRFRIFSESLQLVRSTNRKGLSYRLGINRFADMSWEEFRATRLGAAQNCSATLTGNHRMRAAAVALPETKDWREDGIVSPVKNQGHCGSCWTFSTTGALEAAYTQATGKPISLSEQQLVDCGFAFNNFGCNGGLPSQAFEYIKYNGGLDTEESYPYQGXVNGICKFKNENVGVKVLDSVNITLGAEDELKDAVGLVRPVSVAFEVITGFRLYKSGVYTSDHCGTTPMDVNHAVLAVGYGVEDGVPYWLIKNSWGADWGDEGYFKMEMGKNMCGVATCASYPIVA

SEQ ID NO: 345911 - protein, 48 aa, Zea mays
  unsure (1)..(48): unsure at all Xaa locations
  Clone ID: MRT4577_78639C.1.pep
ESSRPRXHKVGSYRGXPXRKXDGLHKKDRTQENITQIKQITLGPRSGD

SEQ ID NO: 345912 - protein, 277 aa, Zea mays
  Clone ID: MRT4577_7863C.1.pep
MADEYGRSGYGRSGAGDDYDSGYNSKSGTDDYGRGEGGYNKSGGDDDYGRSGGDGYGRSGGDDYGRGTGGGGYNKSGGGDDYGRSGGDGYGRSGGDDYGRGTGGGGYNKSGNDGYDSGYNRSGTTNDDEYGRGTGGGYGSKPSGDDAYAGGGGGGYGKQSGGGADEGGEYGSSRDDSEKYRKEEKEHKHKEHLGEMGALAAGAFALYERHEAKKDPEHAQRHKIEEGVAAVAALGSGGFAFHEHHDKKEAKDAAEDAGEEEESGRRGEGKKKHHFFG

SEQ ID NO: 345913 - protein, 69 aa, Zea mays
  Clone ID: MRT4577_78640C.1.pep
LVFTSASLQDFYLLSRRRSEYNFSLFIFFHDSITVYYNIVLLFMMFPLFHMFWSLHLEYVYDRCQVCFS

SEQ ID NO: 345914 - protein, 49 aa, Zea mays
  unsure (1)..(49): unsure at all Xaa locations
  Clone ID: MRT4577_78641C.1.pep
MADPPPVAASALPAQPDQVAASVSTPQNPNPNPXLFPQILPSTTVLHLH

SEQ ID NO: 345915 - protein, 45 aa, Zea mays
  Clone ID: MRT4577_78642C.1.pep
IQLIIFGIFLNTELTGSIVFANYLGAFQNKMSRLLVKTKVGWLFF

SEQ ID NO: 345916 - protein, 91 aa, Zea mays
  unsure (1)..(91): unsure at all Xaa locations
  Clone ID: MRT4577_78643C.1.pep
DKDALITLVSSCLSGEAEQIXWSQIHTPTEDVLAPNDILSPPXPEDLMEYKNLMYKLDVLKLNEVVGTTMDCTGPKAVIVARKGYTFLDLI

SEQ ID NO: 345917 - protein, 79 aa, Zea mays
  Clone ID: MRT4577_78644C.1.pep
IVNEDTTHNPPPSCIGGNSGQKGKPCLRNDHKHHIYNQLEQKDLNTKLVCMTTLNNQTPVDLGLTRAFLPRKPRADSAR

SEQ ID NO: 345918 - protein, 49 aa, Zea mays
  Clone ID: MRT4577_78645C.1.pep
LLQHDPAVQDPCAQRFDLYLMDPPVGLIQPPLVDVPPVCKKTENMSSSR

SEQ ID NO: 345919 - protein, 14 aa, Zea mays
  Clone ID: MRT4577_78646C.1.pep
MGKPPDPTGKRTHR

SEQ ID NO: 345920 - protein, 84 aa, Zea mays
  Clone ID: MRT4577_78647C.1.pep
MYTLPATSLISASAPVSAPSFVMSRSSWLSLCQPTADLPQAYGTSRARKGVGALGAEYSSGRSRRQFPRASSGSRRRMTAPRRC

SEQ ID NO: 345921 - protein, 69 aa, Zea mays
  unsure (1)..(69): unsure at all Xaa locations
  Clone ID: MRT4577_78648C.1.pep
RIRFEMYLGCALCGFLILNGGSYSETNGWRNKILCFTXNTAAEAAGLLLIVLLSLAAAADMSIVXYGGR

SEQ ID NO: 345922 - protein, 91 aa, Zea mays
  Clone ID: MRT4577_78649C.1.pep
QGITRKILTLKVFWEARKKNLHIHQNKESRKSLTKATVIKKLKTKKRGLGQEALTWWDGSPNLAFIKAKKNWFKTKMGGNPEISERVIKQN

SEQ ID NO: 345923 - protein, 44 aa, Zea mays
  Clone ID: MRT4577_7864C.1.pep
YLVITNVRIHVQSAMSHNGRHPHGPASSQSQTLVQTNYPKKKRE

SEQ ID NO: 345924 - protein, 34 aa, Zea mays
  Clone ID: MRT4577_78650C.1.pep
ERGSCMFRAPDLAAQVTCDWCTVLKFLPIHHYCV

SEQ ID NO: 345925 - protein, 113 aa, Zea mays
  unsure (1)..(113): unsure at all Xaa locations
  Clone ID: MRT4577_78651C.1.pep
MRPGLILFLYNYYKHQVRGMLEAVSFRQTDMHPTDXKTKRTAATSGFPAHAXSATRKIYDPLEEDALRTVLDQFDDHSYGVELYLPMTMACSTTSATRTKTVANLNCRRVNLS

SEQ ID NO: 345926 - protein, 70 aa, Zea mays
  Clone ID: MRT4577_78652C.1.pep
WYPDRDLDVIFSNVVTWRNRFCRQGQPLGYLRLSTCVKVVVDAFVSIVEEQASSRRMSDDQRWRLESRSI

SEQ ID NO: 345927 - protein, 100 aa, Zea mays
  unsure (1)..(100): unsure at all Xaa locations
  Clone ID: MRT4577_78653C.1.pep
MRVLLVALALLALAASATSTHTSXRCRCQPPSSGHLPPPGHLPATAHLPTPTHATPPVQLPASVHLPSSVHVPPAAYMPSPPCHYHTQPSRPKTDSQPHP

SEQ ID NO: 345928 - protein, 233 aa, Zea mays
  Clone ID: MRT4577_78654C.1.pep
MAAGGELQLLSSWYSPYVIRAKVALGLKGLIYEFIEEDLFSKSDLLLKLNPVHKKVPVLVHGGRPVCESLVIVQYVDETWAAGTGTPLLPADAHDRATARFWAAYVDDKFCKEWIKLYRSTTAEKAAEALGGVVPVVETLEQAFRECSRGKPFFGGDAVGLVDIALGSFVVWIRVVDEAAGVKLLDEARFPALTAWAERFLAVDAVKEVMPDAGRLLEHYRGFLAKRAPPAGY

SEQ ID NO: 345929 - protein, 99 aa, Zea mays
  Clone ID: MRT4577_78655C.1.pep
PRVRPRVRPRVRPRVRFFGGDAVGLVDIALGSFVVWIRVVDEAAGVKLLDEAKFPALTAWAERFLAVDAVKEVMPDAGRLLEHYKGFLAKRASPSPAGY

SEQ ID NO: 345930 - protein, 181 aa, Zea mays
  unsure (1)..(181): unsure at all Xaa locations
  Clone ID: MRT4577_78656C.1.pep
MANGGELQLLGSWYSPYVIRAKVALGLKGLSYEFVEEDLSRKSDLLLKLNPVHRKVPVLVHGGRPVCESLVILQYVDETWAGTGTPLLPADAYDRAMARFWAAYVDDKFYKEWNRLFWSTTAEKAAEALGVVVPVVETLEQAFRECSKGKPXSSAATPSGSWTSRSGASWCGSGWWTRRPA

SEQ ID NO: 345931 - protein, 159 aa, Zea mays
  unsure (1)..(159): unsure at all Xaa locations
  Clone ID: MRT4577_78657C.1.pep
SRSCLATHEGLPRPQRYHTVWQWHWHHGRGARRLTDKEEAGPSSPAASRAHVAEMGGAGGGGRNGAATRRYNRSKVPRLRWTSELHRNFVRAVDCLGGQDSTFCSCLLTSHAKHACIHTYMSXGLVSSLYLSFLVGQNGPGLIHVLSSWSMSTACRSYS

SEQ ID NO: 345932 - protein, 68 aa, Zea mays
  Clone ID: MRT4577_78658C.1.pep
YVSSEFGSRPHKAHARNKLLAGAPRLSFLAGAPPNPKRPGAKHLALVARRVQKTPNLMARACPAWRPP

SEQ ID NO: 345933 - protein, 60 aa, Zea mays
  Clone ID: MRT4577_78659C.1.pep
FYGANYMPLYFILSERCKKAPAGRCCGLENVLFACTHAANYTQVFVYLHAREKLYRIFYL

SEQ ID NO: 345934 - protein, 95 aa, Zea mays
  Clone ID: MRT4577_7865C.1.pep
VVDHATCISGNVPGHSVMSCGQRRSGYVIRRKEVMGWEVNNRRTRTAWCSWRIISWSASPWPTKARPQLPLSCGIIPTLGSMLRVWLVTTCDHIS

SEQ ID NO: 345935 - protein, 69 aa, Zea mays
  Clone ID: MRT4577_78660C.1.pep
LLDPYSELSLNLPIQELDLCNRWQLHTLNEATVQDIDHHILRKPHVHDRTDRHPLCGHTQNRMVEDYTH

SEQ ID NO: 345936 - protein, 68 aa, Zea mays
  Clone ID: MRT4577_78661C.1.pep
PGKQKGSAQRLLYSNPLAKHLSYITLYPPLACSVLFLAYNVVAQVTGKPIHTAIFYDNHYSKIWYASI

SEQ ID NO: 345937 - protein, 222 aa, Zea mays
  Clone ID: MRT4577_78662C.1.pep
GTALFFYTRRRPGFFLLPHGVSSTSHSARSPLLSQRSSLCSIFKPPCPLPHLPGCALPQIAASSQDPSPMAIPSSSPSLRAAASLPQLLPVASLLQPSRASSLLAQLGLHPTSRATVALSAPHDAPAPMELLPACATLSLAELPCRGSSTARFCPVRRPSPCFPAGLLSPMAPCSDFAMVTPSRASLRAPSLLQPSAHGVPCFSRACHPQARGALLGAGRSS

SEQ ID NO: 345938 - protein, 57 aa, Zea mays
  Clone ID: MRT4577_78663C.1.pep
KKLLSGKKEGLFQLPSGKALLFDPSFRPLVSKNAADEDAFFSGYAKAPLKLSKLGFS

SEQ ID NO: 345939 - protein, 104 aa, Zea mays
  Clone ID: MRT4577_78664C.1.pep
MSEEKHHHHLFHHRKAEEEEGASGEVDYEKKEKHHKHMEKLGELGAIAAGAYALHEKHKAKKDPENEHGHRVKEEVAAVAAVGSAGFAFHEHHEKKDAKKHAHN

SEQ ID NO: 345940 - protein, 104 aa, Zea mays; identical to SEQ ID NO: 345939
  Clone ID: MRT4577_78665C.1.pep

SEQ ID NO: 345941 - protein, 133 aa, Zea mays
  unsure (1)..(133): unsure at all Xaa locations
  Clone ID: MRT4577_78666C.1.pep
MPHSIQAPIVGLVAPNLSPXATLNVXENPRXQPYRTQQVHLTGXILPLLTLPLQQPQHLSQELXPMLHSVAQNKRPQQLQQLVLPNLGGYSXQHQGLPSNQLPALNSGDYWEQQLPFTQLTVDYPQQLLPLNQ

SEQ ID NO: 345942 - protein, 141 aa, Zea mays
  unsure (1)..(141): unsure at all Xaa locations
  Clone ID: MRT4577_78667C.1.pep
MSEEKHHHHLFHHRKAEEEEGASGEVDYEKKEKHHKHMEQLGQLGAIAAGAYALVRPKKPNLHPFGRLIDACHGPALDLCVSVRVHRRVAXHEKHKAKKDPENEHGHRVKEEVAAVAAVGSAGFAFHEHHEKKDAKKHAHN

SEQ ID NO: 345943 - protein, 139 aa, Zea mays
  unsure (1)..(139): unsure at all Xaa locations
  Clone ID: MRT4577_78668C.1.pep
MSEEKHHHHLFHHRKPEEEGASGEVDYEKKEKHHKHMEKLGELGAIAAGAYALXNKKTNLDLFDRLSHACHGPVLDLCVSVRVHRRVAXHEKHKAKKDPENEHGHRVKEEVAAVAAVGSAGFAFHEHHEKKDAKKHAHN

SEQ ID NO: 345944 - protein, 159 aa, Zea mays
  Clone ID: MRT4577_78669C.1.pep
PSNRSQDGQGAGITAFLTQYANVQLAVTRLNGSTVFRFNSTESRNKYTPLPEAWEEEPIRLMIDMCTPDEYLFSATLAEGDSETLQLGKAATSQLSGRTGSFVGTLIGVYATCNGAGDHVLDCPENTPKAWYNKWRYAGLKQWVDKGISVASEGFNQGI

SEQ ID NO: 345945 - protein, 269 aa, Zea mays
  unsure (1)..(269): unsure at all Xaa locations
  Clone ID: MRT4577_7866C.1.pep
MADEYGRSGYGRSGAGDDYDSGYNSKSGTDDYGRGEGGYNKSGGDDDYGRSGGDGYGRSGGDDYGRGTGGGGYNKSGGGDDYGRSGGDDYGRGTGGGGYNKSGNDGYDSGYNRSGTTNDDEYXRGTGGGYGSKPSGDDAYAGGGGGGYGKQSGGGADEGGEYGSSRDDSEKYRKEEKEHKHKEHLGEMGALAAGAFALYERHEAKKDPEHAQRHKIEEGVAAVAALGSGGFAFHEHHDKKEAKDAAEDAGEEEESGRRGEGKKKHHFFG

SEQ ID NO: 345946 - protein, 72 aa, Zea mays
  Clone ID: MRT4577_78670C.1.pep
FLPSKLYLDFIGYSIISISSLGKLCRSQLTKKKLVPWQRENGGATNDGVNWKPDLHILELNGFPQGSRSMRV

SEQ ID NO: 345947 - protein, 93 aa, Zea mays
  Clone ID: MRT4577_78671C.1.pep
SIFTSSLTIHRSMHSAVDRPAQILGQRLVHGRLHRLRRSRRRSLRCHGCLRSWLHSRHERCHRHSRSHETTDLRRTCHFMSPCSAPRSSKLAH

SEQ ID NO: 345948 - protein, 183 aa, Zea mays
  Clone ID: MRT4577_78672C.1.pep
MVAGMEAEEGVMATDFFWSYTDEPHASRRREILAKYPQIKELFGTERRAFNKTGMVPAQSYLASSSLDKFTREAFEGGAMSEEKHHHHLFHHRKAEEEEGASGEVDYEKKEKHHKHMEKLGELGAIAAGAYALHEKHKAKKDPENEHGHRVKEEVAAVAAVGSAGFAFHEHHEKKDAKKHAHN

SEQ ID NO: 345949 - protein, 326 aa, Zea mays
  Clone ID: MRT4577_78673C.1.pep
MTTAAPALPMFLRLCPASPFLLPPSLHVPSSRRPTPSRLSSFRPARPLFPISAVEKTNEAAAAGEGELEGMPPEFYDEEWQARQRERTKEWHAYRQKEEAEEERITNEYREIGMRLKAYPQEEVRKARILVSSFIRAGGDVEEEIEKAAERGELTELVLMVIWNRLDIARRDDERDAIRSLDLLYRRVETEILKSEATPAMRLLNDLLNLHDGGDNEKWLKKCRKRMLEVFPREDPFTVVFPAGFNMENREGRIELPPQDDDLLLRVDFVREVDELLKEVRAVEDKNKQQIGFDPESVAYMLKQQEKMQTMRQVESLLDLASSLKW

SEQ ID NO: 345950 - protein, 206 aa, Zea mays
  Clone ID: MRT4577_78674C.1.pep
RPGHHSAPLRHGHLPPTPLSPPPRAARHLLRPPCALHPAPVPSPSPSPTPSSARRLPHFLSFLAAAAAAAGGATVALCDSGLDHRVGGKDSADLVVRGERKFVPQEFIDELASFLGDNITLDYEERSFHGTPQNSFHKAVNLPDVVVFPSSQDEVQRIVMACNKHKVPIVPYGGATSIEGHTLAPHGGVCIDMTLMKNSSRQVISS

SEQ ID NO: 345951 - protein, 325 aa, Zea mays
  unsure (1)..(325): unsure at all Xaa locations
  Clone ID: MRT4577_78675C.1.pep
MTTAAPALPMFLRLCPASPFLLPPSLHVPSSRRPTPSRLSSFRPARPLFPISAVEKTNEAAAAGEGELEGMPPEFYDEEWQARPRXTKEWHAYRQKEEAEEERITNEYREIGMRLKAYPQEEVRKARILVSSFIRAGGDVEEEIEKAAERGELTELVLMVIWNRLDIARRDDERDAIRSLDLLYRRVEXLVCDGIIRNHNLNXTEILKSEATPAMRLLNDLLNLHDGGDNEKWLKKCRKRMLEVFPREDPFTVVFPAXFNMENREGRIELPPQDDDLLLRVDXAGEVDELLKEVRAVERQNKQQIGFDPESVAYMLKQQEKMQTM

SEQ ID NO: 345952 - protein, 103 aa, Zea mays
  Clone ID: MRT4577_78676C.1.pep
MSEEKHHHHLFHHRKPEEEGASGEVDYEKKEKHHKHMEKLGELGAIAAGAYALHEKHKAKKDPENEHGHRVKEEVAAVAAVGSAGFAFHEHHEKKDAKKHAHN

SEQ ID NO: 345953 - protein, 49 aa, Zea mays
  Clone ID: MRT4577_78677C.1.pep
QLADRSPGGIHVEQAWRYRLEVPGRRLVRRDLTISLHVAVAAPEACSVR

SEQ ID NO: 345954 - protein, 65 aa, Zea mays
  Clone ID: MRT4577_78678C.1.pep
FKTSNNLPSGSSGRVTFPNGVSSIAFSSLELFVDSRTDAIEKSVAAVELLVFGGGLNRFSGGTMG

SEQ ID NO: 345955 - protein, 167 aa, Zea mays
  Clone ID: MRT4577_78679C.1.pep
MARLFAARALTLARPSAAPSALRFCPSRALSDKVDFIEIDLSEESPSSSSGGGGAGDPATVQAQMGSRRLEDAIHGVLVRRAAPEWLPFVPGASYWVPPLPRALGVAELLSSAMHITRGAEAMTEEEALSFTTVRGWPSAAYFVAVSSIGDLLSNVLKWLPVIKGTF

SEQ ID NO: 345956 - protein, 73 aa, Zea mays
  Clone ID: MRT4577_7867C.1.pep
NKNKKKLNIKGRLTKYTRKYIHKHSMISRKKPLPQLLHLSPSQSPFTFGCTATNHILMHYFSMALFPALENSL

SEQ ID NO: 345957 - protein, 84 aa, Zea mays
  unsure (1)..(84): unsure at all Xaa locations
  Clone ID: MRT4577_78680C.1.pep
MGSRRLEDAIHGVLVRRAAPEWLPFVPGASYWVPPXAAGARGGGASQLXMHITRGAEAMTEEEALSFTTVRGWPSAAYFVAGSY

SEQ ID NO: 345958 - protein, 189 aa, Zea mays
  unsure (1)..(189): unsure at all Xaa locations
  Clone ID: MRT4577_78681C.1.pep
MIAKLKCRELPPFRVSPLLRLLSTLPFSAHRNLSTTHVPASMARLFAARALTLARPSAAPSALRFCPSRALSDKVDFIEIDLSEESPSSSSGGGGAGDPATVQAQMGSRRLEDAIHGVLVRRAAPEWLPFVPGASYWVPPXAAGARGGGASQLXMHITRGAEAMTEEEALSFTTVRGWPSAAYFVAGSY

SEQ ID NO: 345959 - protein, 53 aa, Zea mays
  Clone ID: MRT4577_78682C.1.pep
NGFSLKFSKLEVFINWGGHLIRGFWGAFPFLQKSQFEKGPYQVNFRHLLNFVW

SEQ ID NO: 345960 - protein, 85 aa, Zea mays
  unsure (1)..(85): unsure at all Xaa locations
  Clone ID: MRT4577_78683C.1.pep
RWYREDYSVHCFCEDDLKNDCRVGSLKNHFIEHCLSTVDXRKHQPXIMFYTHRVLGYSINAWDNMEXSXDEPEDDENLNHLRYKY

SEQ ID NO: 345961 - protein, 55 aa, Zea mays
  Clone ID: MRT4577_78684C.1.pep
FMNVSIWPDESSWIHVVVAGHMSDEGRIGSSCTLKGSVMVVESRSIKTGPVCARD

SEQ ID NO: 345962 - protein, 141 aa, Zea mays
  Clone ID: MRT4577_78685C.1.pep
IGRKGGSALHIVQLIIHQERPVELLRLENFRLQENWGMQHQSPAKVGQLVCRQSCCHSHRISTVQQLAGLRHQETLVTLKMYRPVIVELREQEQVELLVQVRGQGQGQVQQLQVQEAAHQNQILPEACALVPHHGHGYCFC

SEQ ID NO: 345963 - protein, 96 aa, Zea mays
  Clone ID: MRT4577_78686C.1.pep
ACRSCIRPNQDRGPPFIFQLPSPSLAGAWWFCRDEEAPTTNSNPPGAPNRLQTMRPYHMKSDNLPRCPSPEPSDGGTSFSLPSLFSWLGTALPARR

SEQ ID NO: 345964 - protein, 112 aa, Zea mays
  unsure (1)..(112): unsure at all Xaa locations
  Clone ID: MRT4577_78687C.1.pep
PGYERTCPVYENACGXKGSDLYAGAFTXTTHVVVGGGGATLPDYRAAGARWTHVRAPDFGLVKLTGFTHTRLLLESKKTRDGRVHAHFPISRDYHDVLAWGVDNCPSPPRGW

SEQ ID NO: 345965 - protein, 123 aa, Zea mays
  unsure (1)..(123): unsure at all Xaa locations
  Clone ID: MRT4577_78688C.1.pep
LLGVLVRPVGFSLGGRARARXGGAGVAXGALPSGAVVAAXAXXXGVXAXGALGXXXXLXGXVLXXAPPAAXVXLXLPXXLLXVAXLRXPPPAAAAXSVAPXAVXXXAXAPLXRLRRRPRSPCP

SEQ ID NO: 345966 - protein, 96 aa, Zea mays
  Clone ID: MRT4577_78689C.1.pep
ASDSIGTSARGRTGQSVKHTHQGALRVSYCETGQGGRRRRAESGLGAWHDRRPRSAVAPRWHDRRPRSSVASPLGRLPDRVAAPRQAARPLGCRYW

SEQ ID NO: 345967 - protein, 202 aa, Zea mays
  Clone ID: MRT4577_7868C.1.pep
MADEYGRSGYGRSGAGDDYDSGYNSKSGTDDYGRGEGGYNKSGGDDDYGRSGGDGYGRSGGDDYGRGTGGGGYNKSGGGDDYGRSGGDDYGRGTGGGGYNKSGNDGYDSGYNRSGTTNDDEYGRGTGGGYGSKPSGDSEKYRKEEKEHKHKEHLGEMGALAAGAFALYERHEAKKDPEHAQRHKIEEGVAAVAALGSGGFAF

SEQ ID NO: 345968 - protein, 157 aa, Zea mays
  Clone ID: MRT4577_78690C.1.pep
LTLKALTRDFSPLPTRVNLSNPYNPPLPIFEVTYPLGGPGKKVGSGPIRAPGWFPPKGSPPLEIPPKVPYDFLVSLVREVARDWDIDSELQVGLPVALPIVGNFPIPLSPFGGFKPPPPKAFFFFSRSSLPFFFVGGGPTPPPPQFFQKKNPAPFFF

SEQ ID NO: 345969 - protein, 115 aa, Zea mays
  Clone ID: MRT4577_78691C.1.pep
STIGDGQTLALGVRRAAAPWQLALRSTDCISRQDSASPPVLRFSLRRTNLLLDFSGCPCGGRHIGKPGSQLVSSKSDSVIIHSILTDLNPSETCMDFEEQDADSDPDVMNDYGEL

SEQ ID NO: 345970 - protein, 89 aa, Zea mays
  Clone ID: MRT4577_78692C.1.pep
LLPPLPLIPTTLDQQSVSGSFERYKDRSIDLSSWRGRTKGCCQRRSSTAICTPLYRHSRSTTFSVSVATPTDGRTRVRRTSISRPPPTQ

SEQ ID NO: 345971 - protein, 99 aa, Zea mays
  Clone ID: MRT4577_78693C.1.pep
VVDGSSRSLIERNGEILPKLGRLQLRSSDSLHGSGNLLDGSNRLHSNSQVFKTRHVSGLGGHGSRGSEECPRGKSSGGKKRHISSPKKNTEKKKGLGRR

SEQ ID NO: 345972 - protein, 105 aa, Zea mays
  Clone ID: MRT4577_78694C.1.pep
VESGFGLRTEEKETRSVCAWPHHITPLMEVPSFKILVAASSLQYCSKDITRHRIRPPLLILLRRPHHGVYGGWKDGPRLQQRLLFIRPRLQRRLGQLVLLLKTHQ

SEQ ID NO: 345973 - protein, 81 aa, Zea mays
  Clone ID: MRT4577_78695C.1.pep
MYDRSLQPPLHLSPHPKNIELAYRPTHPPYGPQPRKTKPSSLPQPHLASTNPQTRNPLTINQTTIARLNPPQQTPSFSSKL

SEQ ID NO: 345974 - protein, 81 aa, Zea mays
  Clone ID: MRT4577_78696C.1.pep
HQQSFSNECCQRDGLRGTLGSMSSLLYTILHDIHGGLPCTFHHTNRYFNHYDSDVSSMGWARVRIRAPTLASALFLVKIWI

SEQ ID NO: 345975 - protein, 56 aa, Zea mays
  Clone ID: MRT4577_78697C.1.pep
HGAPKQYSGLLLLASTSRSIAMALFCSVGPIATFINASDHVAISDNVVLKTSSLLA

SEQ ID NO: 345976 - protein, 121 aa, Zea mays
  Clone ID: MRT4577_78698C.1.pep
HHHISLTPQILLTVLTLGAFFFFARQNILLVRLYRTATKSLQVLNSAMHCVPPLCAYCSQPFSDQGNKFARLSARSSSGMAATATNDTKVDDIFNLFMRRTAKTSETMRDEYDEITTCDDV

SEQ ID NO: 345977 - protein, 66 aa, Zea mays
  Clone ID: MRT4577_78699C.1.pep
GAALDVLCRQGDVSHMARPASSREGIGHPQYDLRLEQVGAICRSLGSMCTSYHGNGCMALYQFGFR

SEQ ID NO: 345978 - protein, 53 aa, Zea mays
  Clone ID: MRT4577_7869C.1.pep
YIINKQLMKKKKKKKKKKKKKKKKKKKKKKKKKIKKKKKKKKKKKVLTCPGGR

SEQ ID NO: 345979 - protein, 99 aa, Zea mays
  Clone ID: MRT4577_786C.1.pep
MIWHGYQMRTGKTLLSPDYRVQLVSWEKIKVQRRHRQLFHGYLERMAFRVLEGIEILQALILRYLVTRQDESTLRATWLNVKFQALVRARMIESLRDAC

SEQ ID NO: 345980 - protein, 77 aa, Zea mays
  Clone ID: MRT4577_78700C.1.pep
MLGEANVKVAPRSMGGEDFAFYAQRAAGAFFFIGVGNETTMDMVRPVHSPHFVLDEDVLPIGAAFHAAVAIEYLNRA

SEQ ID NO: 345981 - protein, 60 aa, Zea mays
  Clone ID: MRT4577_78701C.1.pep
RKTVRGRYIGQQFINVVFRWLPGLGDPIVHRLSVMKFLDAVVMKGCMIECAASPHMHCGP

SEQ ID NO: 345982 - protein, 55 aa, Zea mays
  Clone ID: MRT4577_78702C.1.pep
NMHGPNRKLFFFAYHGPLVSFMVNKKIFLLGQWILFLVIPGSKRCVVWPHYYIYR

SEQ ID NO: 345983 - protein, 290 aa, Zea mays
  Clone ID: MRT4577_78703C.1.pep
MAASALLLSPRLVSFPPHPSLAPLFTKRPPPYPLGGAGARLRAVGDGPGAGLPPEQATVYDGAYGPWTLEDSDVREVLLYRSGLVTAAASFVAASSAAFLPEGNPAASAVTGAADLLYAAGAAGLGLSLVLIHIYVTPIKRFLQALWAAGALGSVGTYLVAARPLDEGLVQYVLDHPAALWFVGPTFAALTGLVFKEGLCYGKLEAGILTFLIPGLLLGHLSGLMDNSTKAGLLGLWMLLFTIFAARKFQQPIKDDVGDKSVFMFNALPEEEKKAWIQKLERQKGQELFE

SEQ ID NO: 345984 - protein, 172 aa, Zea mays
  unsure (1)..(172): unsure at all Xaa locations
  Clone ID: MRT4577_78704C.1.pep
LNEGLVQYVLDHPAALWFVGPTFAALTGLVFKEGLCYGKLEAGILTFLIPGLLLGHLVTQKPTTSIYLLKLLVSASVVLQSLXSGLMDNSTKAGLLGLWMLLFTIFAARKFQQPIKXTISASDSFLIRTXLTMSPXDDVGDKSVFMFNALPEEEKKAWIQKLERQKGQELFE

SEQ ID NO: 345985 - protein, 102 aa, Zea mays
  Clone ID: MRT4577_78705C.1.pep
PETHATRPTTIDGYALLLSPGLVSFPPHPSLAPLFTKRPPPYPLCGASARLRAVGDGPCAVLPPEQATVYDSAYGPWTLDDSYGRKVLLYRTGLVSSAASFV

SEQ ID NO: 345986 - protein, 89 aa, Zea mays
  Clone ID: MRT4577_78706C.1.pep
MYCPHLICSCDNRCNTAPVKVLKPGNYLESSQARCPTSCRRSQRPLPPAVTRGGEIGAPPCAGREGAVLVRGVERRSLCGGARHPGPAG

SEQ ID NO: 345987 - protein, 59 aa, Zea mays
  Clone ID: MRT4577_78707C.1.pep
LASGMVTIYALVHISSGWSASHVVFGCWWCFLPPRIFKKSFVFILKIKKKKKGARSRGV

SEQ ID NO: 345988 - protein, 76 aa, Zea mays
  Clone ID: MRT4577_78708C.1.pep
MAPPPPPPPLPPMAIPSASTASGHRHAREREGRRLYARWRGMGRRRRHTWWRDWGAAVCGQGRGGIGERCPGMPVP

SEQ ID NO: 345989 - protein, 118 aa, Zea mays
  Clone ID: MRT4577_78709C.1.pep
FPFTQQGALNLVFYWHQQQFPFGRVPVAPPQQFFPFNQGGGLNFPAYLQRQQFLPFSQVGGGGPAPFLKHPRWVRFYRPGGPKGGPLLQRQQWGPFTPLVLTNPGGFSPHPTMGGAPF

SEQ ID NO: 345990 - protein, 71 aa, Zea mays
  Clone ID: MRT4577_7870C.1.pep
FCLGGSMLHVCSRLNVYVDVSICKVLTLFFFFLFFFFLFFFFFFFFYQETPPLFYFFRYDKSLRTRGRTRG

SEQ ID NO: 345991 - protein, 97 aa, Zea mays
  Clone ID: MRT4577_78710C.1.pep
GSRTSSDKNQRTRRRRAPTGTSSGSATSSRTQSTRGSRICYTTSSPQLTRTHTYSRDKQRYKGRHHDLAFQTFGLNSAGWPDIIFLAHIGNCTMHVI

SEQ ID NO: 345992 - protein, 83 aa, Zea mays
  Clone ID: MRT4577_78711C.1.pep
VSNKHEHGKAESLLVLRELKRRRPRGQANYGWAAMMATSASGVSLLLLLGHPVPPPHPDNGDRSLRWKPFYKMFPWNTEPREQ

SEQ ID NO: 345993 - protein, 92 aa, Zea mays
  Clone ID: MRT4577_78712C.1.pep
GGVFLNGPIAFLFGLYPRPLGFVGPFFAGAIYGGGRLMLPLPSPKRMWVGAWLIFGAWGVFLPFLKSEGVGPMFFPAPGPAFFRAAPPGEKA

SEQ ID NO: 345994 - protein, 343 aa, Zea mays
  Clone ID: MRT4577_78713C.1.pep
MAAKGEGPAIGIDLGTTYSCVGVWQHDRVEIIANDQGNRTTPSYVAFTDSERLIGDAAKNQVAMNPINTVFDAKRLIGRRFADSTVQSDIKLWPYKVIPGPADKPMINVQYKGEEKQFAAEEISSMVLIKMREIAEAFLGSTVKNAVVTVPAYFNDSQRQATKDAGVIAGINVLRIINEPTAAAIAYGLDKKASSVGEKNVLIFDLGGGTFDVSLLTIEEGIFEVKATAGDTHLGGEDFDNRMVNHFVQEFKRKNKKDITGNPRALRRLRTACERAKRTLSSTAQTTIEIDSLYEGIDFYSTITRAGVDVLAQLLAVEEVLEQLLHPGDPSGATNKYNVMDGF

SEQ ID NO: 345995 - protein, 72 aa, Zea mays
  unsure (1)..(72): unsure at all Xaa locations
  Clone ID: MRT4577_78714C.1.pep
SRSRTKTALCITPVLAYAAYHYFLAYCVMRKMTGCGRSRTVNTATVEVWSRXYRGAISSDPTGDMEPTHRTG

SEQ ID NO: 345996 - protein, 99 aa, Zea mays
  unsure (1)..(99): unsure at all Xaa locations
  Clone ID: MRT4577_78715C.1.pep
AGAHIEDLANASDDLYSGHESRNELYRTARKGXTAVRGSTGRQSVEDQDHLPEGRKQLGQTLRNQMLQHGYSEMKMKGGLSTTVEYCVELASSDVVNMD

SEQ ID NO: 345997 - protein, 296 aa, Zea mays
  unsure (1)..(296): unsure at all Xaa locations
  Clone ID: MRT4577_78716C.1.pep
GDKPMINVQYKGEEKQFAAEEISSMVLIKMREIAEAFLGSTVKNAVVTVPAYFNDSQRQATKDAGVIAGINVLRIINEPTAAAIAYGLDKKASSVGEKNVLIFDLGGGTFDVSLLTIEEGIFEVKATAGDTHLGGEDFDNRMVNHFVQEFKRKNKKDISGNPRALRRLRTSCERAKRTLSSTAQTTIEIDSLFEGIDFYSTITRARFEEMNMDLFRKCMGPVEKCLRDAKMDKSTVHDVVLVGGSTRIPKVQQLLQDFFNGKELCKSINPXDEAVAYGAAVQAAILSGEGNEKVQD

SEQ ID NO: 345998 - protein, 648 aa, Zea mays
  Clone ID: MRT4577_78717C.1.pep
MAAKGDGPAIGIDLGTTYSCVGVWQHDRVEIIANDQGNRTTPSYVAFTDSERLIGGAAKNQVAMNPINTVFDAKRLIGRRFTDSTVQSDIKLWPFRVVAGPGDKPMINVQYKGEEKQFAAEEISSMVLIKMREIAEAFLGSTVKNAVVTVPAYFNDSQRQATKDAGVIAGINVLRIINEPTAAAIAYGLDKKASSVGEKNVLIFDLGGGTFDVSLLTIEEGIFEVKSTAGDTHLGGEDFDNRMVNHFVQEFKRKNKKDISGNPRALRRLRTACERAKRTLSSTAQTTIEIDSLYEGIDFYTTITRARFEELNMDLFRKCMEPVEKCLRDAKMDKSTVHDVVLVGGSTRIPRVQQLLQDFFNGKELCKNINPDEAVAYGAAVQAAILSGEGNEKVQDLLLLDVTPLSLGLETAGGVMTVLIPRNTTIPTKKEQVFSTYSDNQPGVLIQVYEGERTRTRDNNLLGKFELSGIPPAPRGVPQITVCFDIDANGILNVSAEDKTTGQKNKITITNDKGRLSKDEIEKMVQEAEKYKSEDEEHKKKVESKNALENYAYNMRNTIKDDKIASKLAADDKKKIEDAIDQAIQWLDGNQLAEADEFDDKMKELEGLCNPIIAKMYQGAGADMAGGMDEDDAPPAAGGAGPKIEEVD

SEQ ID NO: 345999 - protein, 165 aa, Zea mays
  unsure (1)..(165): unsure at all Xaa locations
  Clone ID: MRT4577_78718C.1.pep
MAAKGDGPAIGIDLGTTYSCVGVWQHDRVEIIANDQGNRTTPSYVAFTDSERLIGDAAKNQVAMNPINTVFDAKRLIGRRFTDSTVQSDIKLWPFKVVAGPGDKPMINVQYKGEEKQFAXAEEISSMVLIKMREIAEAFLATTAKNAADPVPAYFHDSHTQHTKD

SEQ ID NO: 346000 - protein, 93 aa, Zea mays
  Clone ID: MRT4577_78719C.1.pep
QFVRFDNDAASPRMVPRAPWMEQEAPEYWDRETRSARDTAQIFRVNLRTLRGYYNQSEAGSHTLQWMHGCELWPDRRFLRGYEQVAYDGQDYL

SEQ ID NO: 346001 - protein, 94 aa, Zea mays
  Clone ID: MRT4577_7871C.1.pep
RRRIIYSLHFRLGWGIVCRRLCGMCISVANSTTHELVSTSAVNLREHDLGLGPIGLVTTTSLESGSTCLTNSKSFSANLLASPEVWSEPLPHAS

SEQ ID NO: 346002 - protein, 37 aa, Zea mays
  Clone ID: MRT4577_78720C.1.pep
KSVEDVAKVESSQRVDGHYNGINIAQIEQHGDGAQAP

SEQ ID NO: 346003 - protein, 73 aa, Zea mays
  Clone ID: MRT4577_78721C.1.pep
YVLTSRLPHNDALVHRSYDSRTLAIGDSDHSDIIVALATHADIAISVLIAHIPFDVVALIAPLHNTFYGPCAS

SEQ ID NO: 346004 - protein, 45 aa, Zea mays
  Clone ID: MRT4577_78722C.1.pep
FRSTRLLVGGRPFFFFFYGNPFPHGLLTELAVQHLITTNEWSVTS

SEQ ID NO: 346005 - protein, 40 aa, Zea mays
  Clone ID: MRT4577_78723C.1.pep
CYPTITSHNKTLLSGQLCSRKYTRDCNNQATFTVAASQPT

SEQ ID NO: 346006 - protein, 180 aa, Zea mays
  unsure (1)..(180): unsure at all Xaa locations
  Clone ID: MRT4577_78724C.1.pep
GPRAGGTPSSLLGLGSPCYLAFTDLPLPNRTVTSRRPGAVVLRLIAARQWWRAADRIEQRMDGGGGLGGLRWTAEEASTIGGIATVSLLHSFIPTHWLPFSIVARAQRWPLSRTLLVXTITVMTSLVALSFYGASQIKFHWVERYDKILVGTVLCLVGVLTYVFHHHDGDEHVHQKLVSP

SEQ ID NO: 346007 - protein, 306 aa, Zea mays
  Clone ID: MRT4577_78725C.1.pep
HSYGRLGPSRPAGPGLTHTQSHTHRPPSLVLGSPCYLAFTDLPLPNRTVTSRRPGAVVLRLIAARRWWRAADRIEQRMDGGGGLGGLRWTAEEASTIGGIATVSLLHSFIPTHWLPFSIVARAQRWPLSRTLLVTAFGGVLHVVSTALLGITAVTMANTIAGEETVHKLASLLLIFLGASYILLFALGKGGHSHAHNHPMEKMAVAGLVLVPALSPCATTLPVFLAVGNSSSMMILAIIVLLFSTITVMTSLVALSFYGASQIKFHWVERYDKILVGTVLCLVGVLTYVFHHHDGDEHVHQKLVSP

SEQ ID NO: 346008 - protein, 164 aa, Zea mays
  Clone ID: MRT4577_78726C.1.pep
MGPSGFPIYFRLCYFLGIAGFSLFFPGSYFVSFFARFLISPRIGKFGCFPGPVLGFPVGPTGPPPGPGPKFFGSPPPAVTFFWGLGLFSPPPFVAFLGGLCPFWPWAFRAIPGLSPPLFLGSPRPFPCCPPAQVGEFTEKFNCRRTIKKNKKIKKLNKKKKIRK

SEQ ID NO: 346009 - protein, 204 aa, Zea mays
  Clone ID: MRT4577_78727C.1.pep
MARGGAGRAVALGLVLRLLFGLRTGLEAAPAPAHTRVQVSGSRADSCPTDTFQCLTSGYCVPLSWRCDGDQDCSDGSDEEDCRIESCAQNGQCQPQSALPCSCDNISGCSDVSDKNLNCSRPPCQESELHCILDDVCIPHTWRCDGHPDCLDSSDELSCDTDTEIDKIFQEENATTTRISTTMENETSFRNVTFTSAGDSSRNP

SEQ ID NO: 346010 - protein, 98 aa, Zea mays
  Clone ID: MRT4577_78728C.1.pep
MVSGCGVCAKRIVVDTRHHMLGRLSSIIVKELLNGQKVVAVRCEEICMWGGLVRQKMKYLRFLRTRMNTKPSHGPIHLRAPFKILVRTIRGMMPHKTK

SEQ ID NO: 346011 - protein, 48 aa, Zea mays
  Clone ID: MRT4577_78729C.1.pep
TSLQTQIRLYFTTPNKKRGGPNVMHFVTRNNKPPPQPHNSHNTIGQRS

SEQ ID NO: 346012 - protein, 147 aa, Zea mays
  unsure (1)..(147): unsure at all Xaa locations
  Clone ID: MRT4577_7872C.1.pep
KGPPCPPLAPAPGGGPQGPRVVPYAPRGGPPEXPPPRGGPKGGXPGGGPPPPGPXLKGPXELGGPPEGVPCEERGGKGPKGGYGGGKETWVRGENPPLGGPGPGGPAGRGKLFPKPFRISRPGFSQGNFPNWFPREKRFLGQKGFCF

SEQ ID NO: 346013 - protein, 96 aa, Zea mays
  Clone ID: MRT4577_78730C.1.pep
TNMLVHKNQCTKSRIIPLCRFALLPPFDIVSYLNHLYWHMITKILRNGPRAHFPFGCAPRRQGISDRPCSMRSVLQQGWQNCYKNHYVLKLVDDVQ

SEQ ID NO: 346014 - protein, 135 aa, Zea mays
  unsure (1)..(135): unsure at all Xaa locations
  Clone ID: MRT4577_78731C.1.pep
PTARKGKQEQQESNKGGPRRGQPKPPTRPXQXXQXXXXAXXPPNXPTXTAAGGENPAXQPXRXQQAXATSKRXXPPXDXQQTPAQXXEQTTEQTTRAQQXQQXEQPGTSQAAPANHQTDPQQQQRKTDKQQATQN

SEQ ID NO: 346015 - protein, 178 aa, Zea mays
  unsure (1)..(178): unsure at all Xaa locations
  Clone ID: MRT4577_78732C.1.pep
MGCASGVCAKRIVVDSRHLMLGRLSXSIIANELVNGQMVVAFRCEEICVSDGLVHQKMKYLLFLLKRMNTKSCHGPMHFRAQSKILRCTIRGMIPDKTNRGEAALARLKTYEGRPPAYNKTKRLGIPDAVKVLRLXPRHKYCLLAELSKEVGWNYHDTIWELEVNRKDKAKXAYDRRK

SEQ ID NO: 346016 - protein, 120 aa, Zea mays
  Clone ID: MRT4577_78733C.1.pep
ELIPALVDLASLTTFKVVNPSLNRSSAAQSLESTAIIIPASRHSKRVSRPSGQQVFASASSTSLSYSHSSVSSTPALTPSFSTVSQSPTGSLSTSNARLRPYKFLPLEIETPGTNTEKDK

SEQ ID NO: 346017 - protein, 50 aa, Zea mays
  Clone ID: MRT4577_78734C.1.pep
HREWKVLLKCVSYLFICLCAQALKLGYVCLSPQVWLATLVTPISVNLKVL

SEQ ID NO: 346018 - protein, 72 aa, Zea mays
  Clone ID: MRT4577_78735C.1.pep
GQGTHASIYLEVGFSMGLLPWVPPNQGVISNCLLDNNHSGLIKKECQDAPLLLPLYTEKARPIEVPPNQMTD

SEQ ID NO: 346019 - protein, 244 aa, Zea mays
  unsure (1)..(244): unsure at all Xaa locations
  Clone ID: MRT4577_78736C.1.pep
RLQVPVRNSRVDPRVRRKKILFYHPNEVEKNEKIRNVGXCEAIVQFTRTFSPSKPAKSLHTQKNRQFFNEPEENFWMVMVVRNPIIEKQSKDGKAVVEYQEEELLDKVYSSVLQQCYSMYKLFNGTFLKAMEDGGVKLLKERLEKFFHRYLQTLHLQSCDLLDIFGGISFFPLDKMTYLKIQSFINRMEESLSVVKYTAFLYNDQLIWSGLEQDDMRILYKYLTTSLFPRHIEPELAGRDSPVR

SEQ ID NO: 346020 - protein, 52 aa, Zea mays
  Clone ID: MRT4577_78737C.1.pep
MATSGPMVRESEPGRDLFPSLSLKDFHHQGWGGECAELRSAPAWVAARSFTK

SEQ ID NO: 346021 - protein, 71 aa, Zea mays
  Clone ID: MRT4577_78738C.1.pep
KTKVLSLSPWVKNQQRAPQFGPRSQGYGPGKILNPLFWAQGAPPKKRGGFCSLKGPQGKKKNPQGFFFVRG

SEQ ID NO: 346022 - protein, 90 aa, Zea mays
  Clone ID: MRT4577_78739C.1.pep
KKKQKKKKKKKKKKNKKKLLPPLQSTASTARKWTETHLFNKELDADTKLNVQKKRVAFGYIKTSSVCCQYTLLTFPTYSGALFETALSSV

SEQ ID NO: 346023 - protein, 101 aa, Zea mays
  Clone ID: MRT4577_7873C.1.pep
GDARTRREDRLGEDHARADASTSSCDESSGGASHQPHKGGEHLLLRAVQEHERTADACLTLGLCGPDVAYDVHFCRMARAWLSVHHTGYGHAVRGYATYTA

SEQ ID NO: 346024 - protein, 172 aa, Zea mays
  Clone ID: MRT4577_78740C.1.pep
GGTASALLAAKGRAVTQVAKKNLIQIAVPIFIELKRLLESKNSPLIGCLMECLRALLKDYKNEMEEILVADKQLQRELLYDMHKYEAGKGKGKAAAQAEAEAGAGLSGIGRSPAVRSVLKEVNRKTTPTQPLHSMSVPKVKSILGSAGPGSGRPDVLQSVRRLQPFESDDES

SEQ ID NO: 346025 - protein, 77 aa, Zea mays
  unsure (1)..(77): unsure at all Xaa locations
  Clone ID: MRT4577_78741C.1.pep
MGISGDSMHNXRSTGGKHKAWRKKRKYXLGRQPTNTKLSSNKTVRKVRVRGGNVKWMALRLDTGNYSWRSEAVTLKT

SEQ ID NO: 346026 - protein, 188 aa, Zea mays
  Clone ID: MRT4577_78742C.1.pep
MALFAACVPQGSTAPPATEGALECALTHDLATASNPSRTSSGAAPCYVEQYVDPSSTSRTDQRLTAASPPTVRQARELPRYVEAATYHVQALIAREIRARKNMEVCFTVALHRNEQCRTSAAQFGLLHAAWKPSPPAARWFLGSDHSPSSEGDSLSPPLATFNGEAANLAVWWWRPVLLVRMTQAATT

SEQ ID NO: 346027 - protein, 152 aa, Zea mays
  Clone ID: MRT4577_78743C.1.pep
MAAEEDVKQRQIIENRARNISHNVRCTECGSQSIEDSQADVAILLRKLIRDEIKAGKSDKEIYKKLEDDYGETVLYAPKFDLQTAGIWLSPVIVGGIAAGIWAYQRHRQRTNVHIMALNLVRGVPLTPREKETMLDILTPPPAPRKWWWPGK

SEQ ID NO: 346028 - protein, 129 aa, Zea mays
  Clone ID: MRT4577_78744C.1.pep
MALFAAYAPQGSTAPPATEGALECALTHTLTTASNPSRTSSGVAPCYVEQYANPSSTSRTDQRLTVASPPTVRHRITKVRRSCNLPRASSNRQGDKGEEEHRGGAGADDPGGHNLSKMVAARGGDVEER

SEQ ID NO: 346029 - protein, 61 aa, Zea mays
  Clone ID: MRT4577_78745C.1.pep
QCGVWLCSLMYSRYVLWVTITCDLSPRPVSLVSALARQFNHWLRYKKERHVIVAPAIKPMS

SEQ ID NO: 346030 - protein, 388 aa, Zea mays
  Clone ID: MRT4577_78746C.1.pep
MPEVGQYGYKKTDGICDSVCGEPVSKTALTMSRLKCALRGFDLRALMVLLIGVPILILMIYAHGQKVTYFLRPIWESPPKPFKTIPHYYHENVTMENLCKLHGWKVRDFPRRVFDAVLFSNELDILEIRWNELSPYVSEFVLLESNSTFTGIKKPLHFKENKHRFGFAKSRLTYGNIGGRFVKGENPFVEESYQRVALDRLLKLARIEDDDLLIMSDVDEIPSGHTIDLLRWCDGIPDILHLQLRNYLYSFEFFLDDKSWRASIHKYQAGKTRYAHFRQADELLADSGWHCSFCFRYISDFAFKMQAYSHVDRIRFKYFLNPERIQDVICRGADLFDMLPEEYTFQEIIAKLGPIPSTYSGVHLPSYLLRNVDRFRYLLPGNCRRESG

SEQ ID NO: 346031 - protein, 46 aa, Zea mays
  Clone ID: MRT4577_78747C.1.pep
KNLRKKNKSQGFSNFFLPTGPFISTLLKKKSPFLNPGPYKPLFEQI

SEQ ID NO: 346032 - protein, 76 aa, Zea mays
  Clone ID: MRT4577_78748C.1.pep
GIKSDPPQEFMAPNKVEVTDPLYSDLPIIRERNFFFLGYPHLLDGLVYRALKPTLKRGTLTGVWSGFLTNPRHPKN

SEQ ID NO: 346033 - protein, 68 aa, Zea mays
  unsure (1)..(68): unsure at all Xaa locations
  Clone ID: MRT4577_7874C.1.pep
WVXXLTRIPLVTASEPGAAQPGAYMPQQGAAVPHPAVVVPAITPHSERCRLMFDSAALTEAVDHLLPH

SEQ ID NO: 346034 - protein, 47 aa, Zea mays
  Clone ID: MRT4577_78750C.1.pep
LILCFGEQHALSIKFFHAKLTELSRKEQKNDPWGTSITDPGGAINTL

SEQ ID NO: 346035 - protein, 48 aa, Zea mays
  Clone ID: MRT4577_78751C.1.pep
IYIYCILRYHGTWRLTASTESISAIIELFDTHTICLLDSYTIILKTRP

SEQ ID NO: 346036 - protein, 162 aa, Zea mays
  unsure (1)..(162): unsure at all Xaa locations
  Clone ID: MRT4577_78752C.1.pep
KSRVPDPQRMIRAYSQSVATLNLLRALATGGYAAMQRVTQWNLDFMDXSEQGDRYRELAHRVDEALGFMTAAGLTVDHPIMTTTDFWTSHECLLLPYEQSLTRKDSKDYACLFVDAWCGGLVGALGTSYMLGSYRRVPVALWKTVASIMCCNCMPSFHVLGA

SEQ ID NO: 346037 - protein, 161 aa, Zea mays
  unsure (1)..(161): unsure at all Xaa locations
  Clone ID: MRT4577_78753C.1.pep
MSGPATCCHRFHLLLVLLLFLLAGEGRSQPAAASTSDRDTLLAVKKDWGSPPQLKTWDPAAPNHCNWTGVTCPTGGGGVVTGLTLSSMKLTGSVPASVCALKSLTHLDLSYNNLTGDFPGAALYACAGLTFLDLSNNQFSGPLPLXIDRLSAAMEHLNLST

SEQ ID NO: 346038 - protein, 50 aa, Zea mays
  Clone ID: MRT4577_78754C.1.pep
RRWCASSAGGQRQRLLGRVGGQRHCDLRARSARWVGRKVAVDGEESCCAG

SEQ ID NO: 346039 - protein, 109 aa, Zea mays
  unsure (1)..(109): unsure at all Xaa locations
  Clone ID: MRT4577_78755C.1.pep
LNISIMHFTSLHLGEERRASTGTSYSYPQHVTCAINTHHHHHQVTTLSINKTRRPLSLSLPSHHSYSYPPLCLAPATAATGFLSXPSHHSFSYPPLCLAPAPLKAXGGC

SEQ ID NO: 346040 - protein, 82 aa, Zea mays
  Clone ID: MRT4577_78756C.1.pep
WGKGGPPYVYNQKGELPAPICFIRPPIKHLDVGYPNWIPFRSGWGWNLNGAGGSIKLGPPVLRKNLVLKPPLQTVALFARFP

SEQ ID NO: 346041 - protein, 83 aa, Zea mays
  Clone ID: MRT4577_78757C.1.pep
DQEGKSPQEGIPLEMTGQNVTECIGGSRTVTFDDLSDRYPTPCDPRLNASQSLELAFIIAKRLRKRRMRSGLNNSLPLPPLAF

SEQ ID NO: 346042 - protein, 80 aa, Zea mays
  Clone ID: MRT4577_78758C.1.pep
MPRKLFMYQPLQRRLRRLQVSPLKPRPAHHPRQRHKAHTQPRKAIHTWPSKIIECEYARAHAGGDRMNLTRFLACTSCYW

SEQ ID NO: 346043 - protein, 204 aa, Zea mays
  unsure (1)..(204): unsure at all Xaa locations
  Clone ID: MRT4577_78759C.1.pep
MLVLFETSVGYAIFKVLNEKKLQEVDSLWKEFETPEKANKIVKLKHFEKFQDTAEALAAFTALMEGKINKQLKKVLKKIVKEAHEPLAVADAKLGGVIKEKLNLSCIHSPVVNELMRGIRSQMDGLIPXVEPREMAAMCLGLAHSLSRYRLKFSADKVDTMIVQAISLLDDLDKELNNXIMRCREWYGWHFPELGKIISDNLTY

SEQ ID NO: 346044 - protein, 113 aa, Zea mays
  Clone ID: MRT4577_7875C.1.pep
FSLQATSFMSLQPTTSWIMSLSSTNSEQYTLAEWWPPRQLLITDCHSYALCLARDSRSSMVRCWLSFLPRNFCPKCSVSPAWFTFERYSVYFNLSILAPWFGGKTQNALKKNH

SEQ ID NO: 346045 - protein, 540 aa, Zea mays
  unsure (1)..(540): unsure at all Xaa locations
  Clone ID: MRT4577_78760C.1.pep
MALATNSAAAAAAVSGGVASQPRRAAVFLPLKRRTISAIHAADPSKNNGPAVPAAAGANSSASAVATPEKKPAAHGKWAVYSWRSKKALQLPEYPNAEELDAVLKTIETFPPVVFAGEARRLEERMAEAAMGRAFVLQGGDCAESFKEFHANNIRDTFRVLLQMGVVLMFGGQMPVVKVGRMAGQFAKPRSEPFEEKDGVKLPSYRGDNVNGDDFTEKSRVPDPXQRMIRAYAQSVATLNLLRAFATXGGYAAMQRVTQWNLDFMDHNEQGDRYRELAHRVDDALGFMTASGLTVDHPIMTTTDFWTSHECLLLPYEQALTREDSTSGLFYDCSAHMLWVGERTRQLDGAHVEFLRGVANPLGIKVSDKMNPSELVKLIDILNPSNKPGRITIITRMGAENMRVKLPHLIRAVRNAGLIVTWITDPMHGNTIKAPCGLKTRPFDSILXAEVRAFFDVHDQEGSHPGGVHLEMTGQNVTECIGGSRTVTFDDLSDRYHTHCDPRLNASQSLELAFIIAERLRKRRMRSGLNSSLPLPPLAF

SEQ ID NO: 346046 - protein, 83 aa, Zea mays
  Clone ID: MRT4577_78761C.1.pep
AEGSGGHPRNPSSYSSVKTPPSEALDRAWPVTARGHSTGFWCPLTPFSRDTKASRGTKEAGWAGQVERLVLSHRGSVSGLDLP

SEQ ID NO: 346047 - protein, 538 aa, Zea mays
  Clone ID: MRT4577_78762C.1.pep
MALATNSAAAAAAAVSGGAASQPHRAATFLPLKRRTISAIHAADPSKNNGPAVPAAAAAKSSASAVATPEKNPAAPVKWAVDSWKSKKALQLPEYPNQEELDTVLKTIETFPPVVFAGEARHLEERMAEAAMGRAFILQGGDCAESFKEFHANNIRDTFRILLQMGAVLMFGGQVPVVKVGRMAGQFAKPRSEPLEERDGVKLPSYRGDNVNGDDFTEKSRVPDPQRMIRAYSQSVATLNLLRALATGGYAAMQRVTQWNLDFMDHSEQGDRYRELAHRVDEALGFMTAAGLTVDHPIMTTTDFWTSHECLLLPYEQSLTRKDSTSGLFYDCSAHMLWVGERTRQLDGAHVEFLRGVANPLGIKVSDKMNPSDLVKLIEILNPSNKPGRITIITRMGAENMRVKLPHLIRAVRNAGLIVTWITDPMHGNTIKAPCGLKTRPFDSILAEVRAFFDVHDQEGSHPGGIHLEMTGQNVTECIGGSRTVTFDDLSDRYHTHCDPRLNASQSLELAFIIAERLRKRRMRSGLNNSLPLPPLAF

SEQ ID NO: 346048 - protein, 65 aa, Zea mays
  Clone ID: MRT4577_78763C.1.pep
SFLCLARSLIQQNNDLARQKRKSRKKNKEETYYHASCPMPAYRHHHQPMQFNQAKQLYPADSAKP

SEQ ID NO: 346049 - protein, 98 aa, Zea mays
  unsure (1)..(98): unsure at all Xaa locations
  Clone ID: MRT4577_78764C.1.pep
FHNGGNRKPLHVSVQLLLLIYLLITCTTRCGRHQPSRGGLHVVGERRLALVRVHRRRAAVVVRLRRGEVLPEHRGVSESHPAGGAAGXGXPXGGRXXA

SEQ ID NO: 346050 - protein, 125 aa, Zea mays
  unsure (1)..(125): unsure at all Xaa locations
  Clone ID: MRT4577_78765C.1.pep
PSVRAVVCRFSSFFRISFVMLVNRLSLVAVLSDCCYVVNTCRHLNRMSEMFLPKKKKKKKKKKNQKKKKKKKKKKGKPRPRGTKRTHPCMRRHSPATGPPQSXPLRRRATTXETGQNPGVPQPNP

SEQ ID NO: 346051 - protein, 72 aa, Zea mays
  Clone ID: MRT4577_78766C.1.pep
MHWLAKRAHYCGAHLLPFCCNPPKVLFPAAHETGSVLQWIISFVQQSSALYFFLMPLWGLSSRLTSLYDSVV

SEQ ID NO: 346052 - protein, 72 aa, Zea mays
  Clone ID: MRT4577_78767C.1.pep
RRSRPSWLIHLPLWLLPLWLLPPQLLLLLLQPQLRLKPRKSRRSRTRIWDLVSLTNHQKATNLASFICKTRK

SEQ ID NO: 346053 - protein, 81 aa, Zea mays
  unsure (1)..(81): unsure at all Xaa locations
  Clone ID: MRT4577_78768C.1.pep
LLHAVLARDGGVXGTIFCTRQGEGPTTVTRSASGLMSGLHGFHGHXFGATTSGCLPPGPHYPPACKXMALPQHENRPCRPI

SEQ ID NO: 346054 - protein, 71 aa, Zea mays
  Clone ID: MRT4577_78769C.1.pep
PKISTAAFLDNGFYLKALKNKGSKESKAFLLKMPPDFGLFNPKKILYFTPKKKVFKGATPFSPPLAIGGGG

SEQ ID NO: 346055 - protein, 234 aa, Zea mays
  unsure (1)..(234): unsure at all Xaa locations
  Clone ID: MRT4577_7876C.1.pep
RGRPDDSVWTVARALDAFFDDGGRISFTNDSRLRDETGGTLHLEAMSVFDMGNKLLNKIRNVNFTGVSGQVQFNAQFELIHPAYDIISIIGNGMRTIGFWSNYTRLLSTILPEDLYSKPPNTSLANQQLYDVIWPGETAQRPRGWAFPSNAKELKIGVPNRFSFKDFVSKDNATXSMKGYCIDVFTQALALLPYPVTYRFIPFXNGTXNPHYSQLVQMGADNDFDAAIGDIVIM

SEQ ID NO: 346056 - protein, 55 aa, Zea mays
  unsure (1)..(55): unsure at all Xaa locations
  Clone ID: MRT4577_78770C.1.pep
XYGGAYHILRVTFTSLHIYHFKLPLKFKTFFPHPFFQPKNSFNNHLLISYNRHLK

SEQ ID NO: 346057 - protein, 146 aa, Zea mays
  Clone ID: MRT4577_78771C.1.pep
MNDKFLAYLYKKNAENDLLKEKHAQLIEVQAAIVTRVKAERVAEVAKLEEEHASAVVQLTKHLNEEHAASIARLNKEHATDLARAKEKHAAEVAKLNQAHDAAVTWLKEEHSVDVARVQQAAEDVVQDVKKDIALALFPDLDASLL

SEQ ID NO: 346058 - protein, 101 aa, Zea mays
  unsure (1)..(101): unsure at all Xaa locations
  Clone ID: MRT4577_78772C.1.pep
MIDKQNNRKTKQQGASGGKSQSRKESPGGGKHGGGGTRGGGGGRXGAQGQGGPGQGGGGEGREGRGERRRRGXGPRSTPRGAARKTGPARSATGQRVTGTG

SEQ ID NO: 346059 - protein, 93 aa, Zea mays
  Clone ID: MRT4577_78773C.1.pep
MKTGVVALQLLTITMFLVLSSAADSTAARIGPDYFQDTCSARISPGARCQPRKCAADCTRQFRGGVGGCDRSGCTCVYTCPAVPPLAKNESIA

SEQ ID NO: 346060 - protein, 156 aa, Zea mays
  Clone ID: MRT4577_78774C.1.pep
RRILNNTAKHLYKTPIPSTRKGTVDRQVKSNPRNKLIHGRHRCGKGRNARGIITARHRGGGHKRLYRKIDFRRNQKDISGRIITIEYDPNRNAYICLIHYGDGEKRYILHPRGAIIGDTIVSGTKVPISMGNALPLTDMPLGTAIHNIEITRGRGG

SEQ ID NO: 346061 - protein, 204 aa, Zea mays
  Clone ID: MRT4577_78775C.1.pep
MRGFNSRRSPIALLQIPKMQFSIFLVTYLLTATKNKTITIFFPFPSSSSKRRITTQSTFFFFFFFLPMGAFPSPPPWGWSTGFITTPLTTGRLPSQHLDPALPKLFWFTPTLPTCPTVAKQFWDTKRTSPDGNLKVANLPSFAISFATAPAALANCPPLPRVISMLCMAVPKGISVEVDSSFFSKNPFPNCTSFFQSIRLSRCI

SEQ ID NO: 346062 - protein, 229 aa, Zea mays
  unsure (1)..(229): unsure at all Xaa locations
  Clone ID: MRT4577_78776C.1.pep
ALDLIXEPKRPSDKPLRLPLQDVYKIGGIGTVPVGRDDTSLNTPGMVVTFGPSGLTTEVKSVEMHHEALQEALPGDNVGFNVKNVAVKDLKRGYVASNSKDDPAKEAASFTSQVIIMNHPGQIGNGYAPVLDCHTSHIAVKFAELITKIDRRSGKELEKEPKFLKNGDAGMVKMVPTKPMVVETFSEYPPLGRFAVRDMRQTVAVGVIKSVEKKDPTGAKVTKAAAKKK

SEQ ID NO: 346063 - protein, 53 aa, Zea mays
  unsure (1)..(53): unsure at all Xaa locations
  Clone ID: MRT4577_78777C.1.pep
MATAXGKEIKCKAAVAWDAGQPLTIEEVQVAPPHAMKVRVEILFTSLCHTDVY

SEQ ID NO: 346064 - protein, 66 aa, Zea mays
  Clone ID: MRT4577_78778C.1.pep
MELFLILVGLHFTVVVSDTSTLHSILFHKTDDDKILVLDSHTLLGSLWEPGDLLLFTVSIQKNLHL

SEQ ID NO: 346065 - protein, 178 aa, Zea mays
  unsure (1)..(178): unsure at all Xaa locations
  Clone ID: MRT4577_78779C.1.pep
MQQQQHGGGGGASGGGPAQQFCAQQVEMPLPFSPVGGAGQRISLAEAPSPISSXARRPAPAQQYDELGPSGAGAVGFDAEGLAAAAAGEDGASGGSAGNRWPRQETLELLKIRSDMDTAFRDATLKAPLWEQVSRKLAEKGYXXRSAKKCKEKFENVHKYYKRTKESRAGRNDGKTYR

SEQ ID NO: 346066 - protein, 90 aa, Zea mays
  Clone ID: MRT4577_7877C.1.pep
SGGGLGLIKKAMQAGPFDKEVNKSCQWPAFVCSVQFGFSQTEGKLPFAVIIWYNPSPFGSPWYKGYSHSPPRHEKALLHLIDQHWLERKG

SEQ ID NO: 346067 - protein, 255 aa, Zea mays
  unsure (1)..(255): unsure at all Xaa locations
  Clone ID: MRT4577_78780C.1.pep
MDTALPSVLIGGGLSVSVSISTATKAGSQSISSHLSTSSLRLTARHRNRRRLPLLASSSESPPAQLAAASTESQSRSSRWVVVMDTPPAAAGGSGVSRAEAVDYYAATLAQVVGSEKEAQMRICEASWDGTYEFRCEIDEDASKELAKMPGVLSVQLDMGNKSEKDNHSLSLSTANLVSISDGASTSSSGKNEFWLVRMEKPGVEVVTKAQMVDHYTQILMKVLGNEQDAQVSIYHVSWDRDYGFXCCHIDEECA

SEQ ID NO: 346068 - protein, 64 aa, Zea mays
  Clone ID: MRT4577_78781C.1.pep
VISIITSANGRVTGHLTVSLNAMLKSVQLAARLSELHMREAPSRSTHTLLLSCSTGYAAVVASI

SEQ ID NO: 346069 - protein, 167 aa, Zea mays
  unsure (1)..(167): unsure at all Xaa locations
  Clone ID: MRT4577_78782C.1.pep
LFFVSSGIFIFHQPCMSESRFYVPPQEDTIDDVGLGARSSERSHIVEGNMSXGSVLASDGCDVPLQGSITEPFFQQDKHDHTGIVGPKSCKRKSPILSYCADGDGADGGGSSNQSSKVSIREGPSTHATVTPGFDRISDVLPIDASESEHFPECIAAQDTTISQTDS

SEQ ID NO: 346070 - protein, 66 aa, Zea mays
  Clone ID: MRT4577_78783C.1.pep
MIFCQDVVALVVEMFLQYLALFHLLLGVVVDDQPAPNDCRPCRHRSFSWIRRLPWTWLGVAVSTFL

SEQ ID NO: 346071 - protein, 76 aa, Zea mays
  Clone ID: MRT4577_78784C.1.pep
KVKEKILMLRNSDNQEFEGKESVAMQSMTLKKMVEDRFADKGIPVPNVTFHILVKGIEYWNKHAQPTGPGDAVGTN

SEQ ID NO: 346072 - protein, 111 aa, Zea mays
  Clone ID: MRT4577_78785C.1.pep
WLVSSRTFGFGPPPPWPDLKRKFSRELSTIPGYSRCPALTPPMDGPIPPGPDPQLEAPLKALPGSPREVQRGFPPPPVPEAEFPLPPPPGVPQCPWFPGGGTIPPQYLRRP

SEQ ID NO: 346073 - protein, 127 aa, Zea mays
  Clone ID: MRT4577_78786C.1.pep
ALSIPLIAAFPFMTHLSGSKLGLALYFATILKAALGITILTGTSLLQNYAVPQHQRGAANGVAATAMSFFKAIGPAGAGALFSWTQKRQDAAFFPGDHMLFFILNLVQCIGLVLTLKTFLAVPKHYK

SEQ ID NO: 346074 - protein, 99 aa, Zea mays
  Clone ID: MRT4577_78787C.1.pep
GFPLGPPGLLITPGWVPPQNVFFNVAPSPPKGGKFGGFFFWGRFFGQLFPFPRMVKGFAWLGFLAPFQANLPAYWVPPFFFAPPPFLTQGLCRGVAFFC

SEQ ID NO: 346075 - protein, 29 aa, Zea mays
  Clone ID: MRT4577_78788C.1.pep
SWCTYSSEILNTAGPTLYFLQRDIYILVY

SEQ ID NO: 346076 - protein, 88 aa, Zea mays
  Clone ID: MRT4577_78789C.1.pep
PLYLPQNLHVERTATATQPRKRKQSKARRERKKSFFLHLKRPPNPASPNKKAWSTRDHRMRKRKKRTRRRRKKKTTRTRKKRRMRRRP

SEQ ID NO: 346077 - protein, 94 aa, Zea mays
  Clone ID: MRT4577_7878C.1.pep
MDGKKVQERAAWCATDGAANLVQDAAHYRGCRPHKYQTAGWASDALALGIHLCHRLSTMGIAGNLATYLTATMHLPRPPAANGATDLMGTSFLL

SEQ ID NO: 346078 - protein, 71 aa, Zea mays
  Clone ID: MRT4577_78790C.1.pep
TYCFFNTEEAQVDQHTGSLRVGQYYILTQSIAWELPDIPDRRLKPSHPLPIPRLLRACFPHGLRCGLGDKR

SEQ ID NO: 346079 - protein, 73 aa, Zea mays
  unsure (1)..(73): unsure at all Xaa locations
  Clone ID: MRT4577_78791C.1.pep
KPPPPLKGGGAPPPPRGGSFETPPNPXLRPXLFEAAGSVPLKPPLERDPPEEPLGGEGPPPPPLEGAPPKNPG

SEQ ID NO: 346080 - protein, 48 aa, Zea mays
  Clone ID: MRT4577_78792C.1.pep
KKKKKKKKKKKKKKKKKKKKKKKKKNKKKKPKKKKKKKKKVGTGRGGR

SEQ ID NO: 346081 - protein, 40 aa, Zea mays
  Clone ID: MRT4577_78793C.1.pep
TCRRRLPDASQSCMLPPALWAVVASLPNRLVERASNNRTR

SEQ ID NO: 346082 - protein, 143 aa, Zea mays; identical to SEQ ID NO: 270436
  Clone ID: MRT4577_78794C.1.pep

SEQ ID NO: 346083 - protein, 47 aa, Zea mays
  Clone ID: MRT4577_78795C.1.pep
AGRLNTSTLWAVPLGYLGYPADHLFDKVFIPLDDMSKSYPILLVVCS

SEQ ID NO: 346084 - protein, 89 aa, Zea mays
  Clone ID: MRT4577_78796C.1.pep
CCAQVHPGDERERRPGPQEYSQGSHELPSGSCKNYRGTYRTITLITSLSSATGKTAVYRCKSLFDLEEASPCTQCYHVPVSVKQGHRMP

SEQ ID NO: 346085 - protein, 93 aa, Zea mays
  unsure (1)..(93): unsure at all Xaa locations
  Clone ID: MRT4577_78797C.1.pep
IRLSNYIYEIVYIWXVLYIRSTILPCSHLSVYYICINVNDRRSYVENYVTRPLHEYNSAVRRTLHTCIYITPSVRTYQFDRDLCGEGEDVGAG

SEQ ID NO: 346086 - protein, 86 aa, Zea mays
  Clone ID: MRT4577_78798C.1.pep
LVATHSYIGFWNGILLFHRVTEERPGWCSDPHLPPCAAFVEIMATVFSRDAWRCVWHMIQNDLVHGWGLDFALRKCVEVYSSSILL

SEQ ID NO: 346087 - protein, 41 aa, Zea mays
  unsure (1)..(41): unsure at all Xaa locations
  Clone ID: MRT4577_78799C.1.pep
LPTFAFDSSSKTVXASKXLHIFLWVHIPYECQSTKIIVXDY

SEQ ID NO: 346088 - protein, 273 aa, Zea mays
  unsure (1)..(273): unsure at all Xaa locations
  Clone ID: MRT4577_7879C.1.pep
MSMDDDSMDDEFVKAIEAEERRLEAQNEQDDARCFLLGSSSAAAIEVDGTGAGTGTETGPSMADTLTGSTSPMAIADASRSVAASGKRSRRRGPTSKVWLHFEEVTQKQGGNEVTISAICLHCKHTLSAKSSSRTGHLIHHLELCPAKKEKEKTSRSQSLLKFNVDGSVVQWEYSPSVARTELCRMIARLDLPLCFGESSAFQEYITHAHNPRFVKSSRQTNARDLIRLFNDRAEQLINVLKFVSSVALTSDIWSGKAKEDYISVXIAHFVNS

SEQ ID NO: 346089 - protein, 133 aa, Zea mays
  Clone ID: MRT4577_787C.1.pep
MIPLNRRASLPRAGMEYFDARRKPRNVGKIIAALVLTTLCIFALKQSPGFGGNSVFSRHEPGVTHVLVTGGAGYIGSHAALRLLQDSYRVTIVDNLSRGNMGAVKVLQGLFPQPGRLQFIFADLGDRNLTDIC

SEQ ID NO: 346090 - protein, 133 aa, Zea mays
  unsure (1)..(133): unsure at all Xaa locations
  Clone ID: MRT4577_78800C.1.pep
MGNRLSITTWLTTKPLGSHVVLLGAAXSWDFIKTVRDRLXEQEIAFIVHGPFRAELLQTISGIPMVKTDTCQGEELSQAYARXDVXVRPLETKQHVFEGLKAMSSGITVXASRLMXIPDIIPDYYVGRTSLLY

SEQ ID NO: 346091 - protein, 131 aa, Zea mays
  unsure (1)..(131): unsure at all Xaa locations
  Clone ID: MRT4577_78801C.1.pep
RKKRKKKRKERVKRGRGKEKETEEKERKERGGKGGIKREKRIGKRXKSKQEGRGIKRGGKRGRPMKKKRGEKKGSKKGKAMEXKKRRGKWDEEKKHKVGKRKGIRREEEEKKRKVKKTPGPTKQDQRSSML

SEQ ID NO: 346092 - protein, 64 aa, Zea mays
  Clone ID: MRT4577_78802C.1.pep
EKSFVIPFGKDIDRFLGNQSFHGHSWITPPPSLGKPTFLGNYGHVTHLILVKRTMIVIPGVMPP

SEQ ID NO: 346093 - protein, 75 aa, Zea mays
  unsure (1)..(75): unsure at all Xaa locations
  Clone ID: MRT4577_78803C.1.pep
DVTSLHELAHRINVAQICXHHHPQSPSAYLDLCLIFRRFLFSLLMRFFFHLALIVASLRALLGVSSAAASAAELT

SEQ ID NO: 346094 - protein, 70 aa, Zea mays
  Clone ID: MRT4577_78804C.1.pep
KSNYTRRVPSIKLVHPQFYDQQKRVSLAQDGSGLLWHHFLWLVVFPALRAIISFLVGGMLGKLDSPAPTP

SEQ ID NO: 346095 - protein, 82 aa, Zea mays
  unsure (1)..(82): unsure at all Xaa locations
  Clone ID: MRT4577_78805C.1.pep
YNTQPHSKVRVSHMXIELRHNFFQAAAALSPAVASXLQLXQLPPSSSNVGASHLLRTAAACVSASSHSPXKSSRRNNPDRTQ

SEQ ID NO: 346096 - protein, 47 aa, Zea mays
  Clone ID: MRT4577_78806C.1.pep
QKDYLYYIKNRTESQSVLFASSHTYVHAIRLFNLETQLKKRASTSRA

SEQ ID NO: 346097 - protein, 45 aa, Zea mays
  Clone ID: MRT4577_78807C.1.pep
GMGAIIICCDGSQMSVCRIRAIGFNLPRSWNKSTPNKKKKKKKNK

SEQ ID NO: 346098 - protein, 93 aa, Zea mays
  Clone ID: MRT4577_78808C.1.pep
FVFPLFFPVFQLAIWPAPLILFSSLLLLPGLSLFCLPSLFFLCFLAVFCFPPFTPLAFLPATFFTPLSTLSLVPPRSRTGLSGVARSAPPGGP

SEQ ID NO: 346099 - protein, 105 aa, Zea mays
  Clone ID: MRT4577_78809C.1.pep
QGTIPFPSSGQKPSCPAPAPAVSNLLLATLLSCGARAIRTHCGYVSAVGDPGMLRDSLRVAWEAWNCCNEDGQEAPGMGSPRSANCYDLLGPTIPSLTILYHRRE

SEQ ID NO: 346100 - protein, 123 aa, Zea mays
  unsure (1)..(123): unsure at all Xaa locations
  Clone ID: MRT4577_7880C.1.pep
AHALAWDRRRWPCGVTNPWANWGPDSEDAEPAPAAYVDPSSRLHSGGTCLKAGASLSSAPTPTKPXPXPIDPVLAQPMEDVRTIYTVPNELGRGQFCITSLRTHKDTMDSCACMTIVKHKLST

SEQ ID NO: 346101 - protein, 90 aa, Zea mays
  unsure (1)..(90): unsure at all Xaa locations
  Clone ID: MRT4577_78810C.1.pep
GNKGDMEESKRAVPTWKGQAXLADEYGIXFFETSAKTNLNVEQFFFSIARDIKQSLSEPYPKPEARPIKIKSKGKVETAAAAKNPPLCGS

SEQ ID NO: 346102 - protein, 199 aa, Zea mays
  Clone ID: MRT4577_78811C.1.pep
MKATLKGRYEGDKATAATTLAAPAGDLRLKASATEAAFTNGPSLRGLTLTLEKPGAFLVDLKPHNQDVRFQFMNSAPPSRTALDCTVTFDPANKVSLSHSLGSGGCRLKYTYAHGVDRLTTIEPLFDTNKNAWEFAITRKFAGGDAVKGTYQASTKLLGLEWSRDSLAGGSFKVATTFDLSDQSKAPKLIAESTWNYEI

SEQ ID NO: 346103 - protein, 226 aa, Zea mays
  Clone ID: MRT4577_78812C.1.pep
MKATLKGRYEGDKATAATTLAAPAGDLRLKASATEAAFTNGPSLRGLTLTLEKPGAFLVDLKPHNQDVRFQFMNSALVLDKRVSLTYTHSTSLAAAPAAPAAAPPSRTALDCTVTFDPANKVSLSHSLGSGGCRLKYTYAHGVDRLTTIEPLFDTNKNAWEFAITRKFAGGDAVKGTYQASTKLLGLEWSRDSLAGGSFKVATTFDLSDQSKAPKLIAESTWNYEI

SEQ ID NO: 346104 - protein, 98 aa, Zea mays
  Clone ID: MRT4577_78813C.1.pep
MVLVIKHSKNTLKERKDYSNKGKSKEKRACFKCGKFGYFVANFYDNENDQDKEKKGKKVEKKKFYKKKGESSLVSFGGLDDNPIKGLTVTRLKMKLKK

SEQ ID NO: 346105 - protein, 143 aa, Zea mays
  Clone ID: MRT4577_78814C.1.pep
KKKGLSFFPFLGGLKKFASPGTWFFFSGGLRGVRFVGLTKNPPSGVSGGPKILIVQPAAAFLKQKFQQGIWGGFTPQSKKNLAFGQDFFFFAHGRGENRFLLLGAGGCPFTGSLKSSPPWGEKRGPNPRASTPLTLIRFLRTP

SEQ ID NO: 346106 - protein, 121 aa, Zea mays
  Clone ID: MRT4577_78815C.1.pep
HFGINKLGKKDFEMTDNGIGSVEGDGGKGQVKVYGWVARAEVYNAPSVVGRFLRKPPVLKPIDGVSPPEFGKSGEMVAILASQIEGKTRPLQVLETKKNASDLSLSRLEAGGIRVTCRRVN

SEQ ID NO: 346107 - protein, 80 aa, Zea mays
  Clone ID: MRT4577_78816C.1.pep
CFTVGYPAKGLLLYRIPMDEDDSWQLCRLLYCIRALGEASASAADAPRGHPPTTATRSVHAEDDEEVVRGKREIESAAAE

SEQ ID NO: 346108 - protein, 182 aa, Zea mays
  Clone ID: MRT4577_78817C.1.pep
LGTSRPAGSRPHSISPFPLTTSSSSSACTLRVAVVGWPRGASAAEALALPRARMQVLSPTNLAADFSRALPPGAPIPMLRREVLHSFLRRRGRARPGPHHLRREVLHSFVFKLSPQGCASARCGEPADQGNRPWPPQALHLHWLLLVTSKNNQSKEVYIIAKNHLHPWGSGKAAAPRLGNLL

SEQ ID NO: 346109 - protein, 104 aa, Zea mays
  Clone ID: MRT4577_78818C.1.pep
CQVRRASRSRKPPVAAPSVTSALAAAGDKQEQPKDANMSSDTDMSKVFEDRTFVSSILNSFPGVDPNDPSVKDLLASLHSQKEEEKKEDKSDKTEDEKNCFKLE

SEQ ID NO: 346110 - protein, 650 aa, Zea mays
  Clone ID: MRT4577_78819C.1.pep
MYQEALWHKRGRPRELYPDVSSKDAPVPPELPVPNCDCGRLAWWIDGPDKFDPRYLLFANWLCGRTSHEHFKRWVPPPLNPPPMTDAEKEVATERRMDSPPRCDCGDRAVIDEDTAKQFVCPNIDYETRKCSWEGYDDKGEVMCTIGSKRLMGQKILCGSELVDSYINHRIHDMRRYAKSAFYDSPKHAEYTRLKAADEKRAQDAREWEAARAEKQMLDNLGDRLKGKIGCGVNYMADEAHARYVLEKMAMVELMEEDDNTSRLSELIALAEAGLHEEEEDDTSRLSELVALAEAGLCAQEEEEEFMSQAAEEVEAAYYKQKSDEAEAEDELFSQAADEAEANYYKRTVDKCDAGQCRLEKKKFGMKTVGPLQSLPIPTWKWEDISMDFIVGLPRTAKGFDSIWVIVDRLTKIAHFLSVKASYPVLTYAQTIVSDRGPQFVSEFWEELHKSLSTKLLHSSAYHPQTSGQTERVNQILEDMLRACVLEFPQKWDECLPLAEFSYNNSYQESIKMAPFEALYGRRCRTPLNWSEPGERWFFRPDMVKEMEEKVQRIIHNLKEAQARQKSYTDKQRQPLYFRVKDCVYLKVSPMKGVTRFSVKGKLAPRYIGLFPILEQCGPVAYRLQLPETLSAVHNVFHVSQLKKCIRVPY

SEQ ID NO: 346111 - protein, 134 aa, Zea mays
  Clone ID: MRT4577_7881C.1.pep
LLPTVLSVVGVLDGSSVVVSPFGLAGHSSHQLIFFVFFIRWDLRGCMHLSAGSGSDLIMLLWRGERRALRKRQMCMLLLKKQAVKYSCACVALLGVVGAWHPLSVLSVRCMCLRLPAVDGEYLNRGRGKLLQYR

SEQ ID NO: 346112 - protein, 138 aa, Zea mays
  Clone ID: MRT4577_78820C.1.pep
SSTSILYLSATVSISGKLTEKSDVYAFGVVLLELLMGRKPVEKMSQTQCQSIVTWAMPQLTDRTKLPHIVGPVIRGPMDPKHLYQVAAVAVLCVQPEPSYRPLITDVLHSLVPLVPVELGGTLRVVEPPSPNLKHSPC

SEQ ID NO: 346113 - protein, 75 aa, Zea mays
  Clone ID: MRT4577_78821C.1.pep
KKGFFRPGGPGAPHIINMPHNMGHACPDDDQKNILIRPNTHPLNRAGAQMRKKKKHFRTGPCLDPGGDAHTNTYS

SEQ ID NO: 346114 - protein, 54 aa, Zea mays
  Clone ID: MRT4577_78822C.1.pep
ARNPASASAMSSLNLDVSSSSSSCNPASSRAISSLNLDVSSSSSSISSTVAILS

SEQ ID NO: 346115 - protein, 451 aa, Zea mays
  Clone ID: MRT4577_78823C.1.pep
MRPPPPPLPSLRSSALVLVLLLLLAACSSPASGRAVPLASPPGTASVAPAPPPVVIIVERRNRFHRELVVACALASIAIAAIILSALYAWVLWRRSRRLPRGNKGARSADTASARGIMMAPILSKFNSLKTSRKGVVAMAMIEYPSLEAATGKFSASNVLGVGGFGCVYKAVFDGGVAAAVKRLEAGGPECEKEFENELDLLGRIRHPNIVTLLGFCVHEGNHYIVYELMHKGSLDTQLHGASRGSALSWHVRMKIALDMARGLEYLHEHCSPPVIHRDLKSSNILLDSDFNAKISDFGLAVTSGNIDKGSMKLSGTLGYVAPEYLLDGKLTEKSDVYAFGVVLLELLMGRKPVEKMSQTQCQSIVTWAMPQLTDRTKLPNIVDPVIRDTMDPKHLYQVAAVAVLCVQPEPSYRPLITDVLHSLVPLVPVELGGTLRVAEPPSPNLKHSAC

SEQ ID NO: 346116 - protein, 216 aa, Zea mays
  unsure (1)..(216): unsure at all Xaa locations
  Clone ID: MRT4577_78824C.1.pep
PRGWAGKTSYPVLTYAQVYIACILSLHGVPKTIVSDHGPQFVSNSRKNSXKSLGTKLLHSSAYHPQTSGHTERVNQILEDMLQACVLEFPQKWDDCLPLAEFSYNNSYQESIKMAPFEALYGRRCCTPLNWSEPGERWFFKPDMVKEMEEKVQRIIHNLKEAQAQQKSCADRRRQPLYFQVTDYVYLKVSPMKGVTRFGVKGKLAPRYIGPFPGPF

SEQ ID NO: 346117 - protein, 107 aa, Zea mays
  unsure (1)..(107): unsure at all Xaa locations
  Clone ID: MRT4577_78825C.1.pep
QARTTKALQMSVQDANMSSDTDMSKVFEDRTFVSSILNSVCIILKLMAYRYILXQLQEFIGPFMCKITXPGVDPNDPSVKDLLASLHSQKEVCSFLGSSEGLCIVMQ

SEQ ID NO: 346118 - protein, 100 aa, Zea mays
  Clone ID: MRT4577_78826C.1.pep
RFQSTEFVFTTAKKFKRKNKLKPFLLIFRSWIFTPLHPQKSMKHWFNLVKRPCIIRAILLGGPHIYICYLIIIGGHAYYDMIDDSLWEIKIWVAVCTKIK

SEQ ID NO: 346119 - protein, 145 aa, Zea mays
  unsure (1)..(145): unsure at all Xaa locations
  Clone ID: MRT4577_78827C.1.pep
QATILQSESQSMSNSSSESSVAQSSTTTSXLAALSCITLVTSSFVIXASASSAAWENSSSSASASSXTSSCXAASTSAAACDINSSSSSXSTXNPASASAMSSLNLDMSSSSSSCNPASARAISSLNLDVSSSSSSISSTVAILS

SEQ ID NO: 346120 - protein, 81 aa, Zea mays
  Clone ID: MRT4577_78828C.1.pep
CLYVALQMSVQDANMSSDTDMSKVFEDRTFVSSILNSLPGVDPNDPSIKDLLASLHSQGEEEKKEDKLDKTEDEKNCFKLE

SEQ ID NO: 346121 - protein, 206 aa, Zea mays
  unsure (1)..(206): unsure at all Xaa locations
  Clone ID: MRT4577_78829C.1.pep
MPPPSSSRYSPGRLLAARPASATTVGRWARLSCSLSMNGCAPGAGDRGAVCVRETRALPAAPAPHDAVGRLRAAVDALWSNAAPPAAPSGIIRIEVPITQRVDAVEWLHAQTTLPRCFFSARAPLPDAPALAGNGNGNGSVHRQQPVSVAGVGSAVFFXRDXEPFSLADWRAIKRFLPRDCPLVRAYGAIRFDATSDASVEWEARL

SEQ ID NO: 346122 - protein, 38 aa, Zea mays
  Clone ID: MRT4577_7882C.1.pep
PQGSGFSHHQRAKTLGWPSLNREKRIWVLQTDGPEIRQ

SEQ ID NO: 346123 - protein, 48 aa, Zea mays
  Clone ID: MRT4577_78830C.1.pep
FDHCCYVQKYLIFIVHKKQAPHTASLAICENAQNDGNRILESMVYQVT

SEQ ID NO: 346124 - protein, 446 aa, Zea mays
  unsure (1)..(446): unsure at all Xaa locations
  Clone ID: MRT4577_78831C.1.pep
MRPPPPSLPSLRSSVLVLVLLPLLAACSSPASGRAVPLSPGTASVAPAPPPVVIIVERRNRFHRELVVASALASIAIAAIILSALYAWVLWRRSRRLPRGNKGARSAHTARGIMLAPILSKFNSLKTSRKGVVAMAMIEYPSLEAATGKFSASNVLGVGGFGCVYKAVFDGGVAAAVKRLEAGGPECEKEFENELDLLGRIRHPNIVSLLGFCVHEGNHYIVYELMEKGSLDTQLHGASHGSALTWHIRMKIALDMARGLEYLHEHCSPPVIHRDLKSSNILLDSDFNAKISDFGLAVTSGNIDKGSMKLSGTLGYVAPEYLLDGKLTEKSDVYAFGVALLELLMGRKPVEKMSQTQCQLIVTWAMPQLTDRTKLPNIVDPVIRDTMDPKHLYQVXLDSLLMVFYFIXFILPTILIAILYLCXAAVAVLCVQPEPSYRPLITDVLA

SEQ ID NO: 346125 - protein, 68 aa, Zea mays
  unsure (1)..(68): unsure at all Xaa locations
  Clone ID: MRT4577_78832C.1.pep
LSSSLXIGVFFIWFRVSTSSSVSFLGERKKRRKKNPRKFLKNERKIENQFEKAKKKVFTIGKKIVMMS

SEQ ID NO: 346126 - protein, 106 aa, Zea mays
  unsure (1)..(106): unsure at all Xaa locations
  Clone ID: MRT4577_78833C.1.pep
FEFPLFPPDVHNCEPFRICHQGISMWHVMSREVFNSISLAGLAGFLLISISFVSFMIMDALLSIIVRLPKXXXDLPSTRLVDIIRKSRCGFQMIKGMTCDQQELEA

SEQ ID NO: 346127 - protein, 90 aa, Zea mays
  unsure (1)..(90): unsure at all Xaa locations
  Clone ID: MRT4577_78834C.1.pep
LEAGRYRPADALEHLQDSKGTDLPESFTVKKLREGDNDDVGNIVSSSNIFADRCNSETAAGILRRRFRTSDIQPWADSGTIPEHTQGGGX

SEQ ID NO: 346128 - protein, 126 aa, Zea mays
  Clone ID: MRT4577_78835C.1.pep
GSSFIAFAYKKKGLLGETASRKGTFQTRKLNMTSGGVEFAFLRLYKKKPGYPQLKFRFFEEEIFFHQPKISMAFFPKKHNCPKQSGRAAQRWGMNLFGKQHPPGVLDNILDAPKKKNSLFAIDKPG

SEQ ID NO: 346129 - protein, 135 aa, Zea mays
  Clone ID: MRT4577_78836C.1.pep
PLRGFRIPGGPPGEGVYPLFPGGSFVPLGLPHAPKAFSGLKVKGPKNGPPPLFSLLGFFVPALVPGKGPPENPPVPLSAPVPPHAWASPPPFVPGQLGRPPRCPLWGPDAFGRPLVFGLSPYVNFCSLPQGYLCS

SEQ ID NO: 346130 - protein, 55 aa, Zea mays
  Clone ID: MRT4577_78837C.1.pep
LYQNSSRAPRSTMFPVGLTTQHKADRSSRMKRFDKYMLPKHGSAGAEVEHSTNNL

SEQ ID NO: 346131 - protein, 116 aa, Zea mays
  unsure (1)..(116): unsure at all Xaa locations
  Clone ID: MRT4577_78838C.1.pep
PTRPPTRPPTRPPLDPPQSIWRXGGGDACGCARRHFDLQHCGRRLITWISDARGGRVGDACLPLCSSSLGSPAWWSPPHRRVSRCPTVATGSASSPCPVPSSSTSATSCDSHFSCF

SEQ ID NO: 346132 - protein, 179 aa, Zea mays
  Clone ID: MRT4577_78839C.1.pep
MKFDTSILLASLAASAAAAPAARPNNVALEKRFPDGTAAQQLPAHFISTVRRLTGEKIKTKRQLDGLLGSLGGGGLGDLLGGLTGGGGGNKENAQADSGNAQEGSGNAQEDSGNAQEESGNNQNAGAGAGAENGAANNGTEAAGAENAAAGNGQAQIEGEDEQAQGNAGNENAAEEDDI

SEQ ID NO: 346133 - protein, 245 aa, Zea mays
  unsure (1)..(245): unsure at all Xaa locations
  Clone ID: MRT4577_7883C.1.pep
MATAARSLHLPGPTPPKSSTPSSHRLPVPCHLRPQRRRLAASSSDLTSFPEPPPAPNGVYVPWAAASSVAAAAASIVVDAATEAELRENGFRSTRRTKLVCTVGPATCAAAELEALAVGGMNVARVNMCHGDREWHREVIRAVRRLNDEKGFAVAVMMDTEGSEIHMGDLGGAPSAKAEDGEVWTFSVRSSDTSLPDRIIHVNYDGFAEDVKAGDELFADRGMARFEVIEXLGPDVKCRWTDPGL

SEQ ID NO: 346134 - protein, 59 aa, Zea mays
  Clone ID: MRT4577_78840C.1.pep
TEQRFITLENAYPHLFIHVCRFLFFFYKISKSNVNTPAHKPITHFTQKSTTKNDRPPPI

SEQ ID NO: 346135 - protein, 113 aa, Zea mays
  unsure (1)..(113): unsure at all Xaa locations
  Clone ID: MRT4577_78841C.1.pep
DQRPSTRPRASPRTTTWXGCTRXXTTMVSRDSXNISSSPQPHGTRLTTAIIWPTDKRPTCHKSSPHNRPIQXVVXYEDRAECWXQVRVNGLGLHSDRYSLPPSCYIASHQVRP

SEQ ID NO: 346136 - protein, 79 aa, Zea mays
  Clone ID: MRT4577_78842C.1.pep
GQAEEESGDTARTKRSHWLAPVGGGGRWTACGGRGGRQRHRKAGSDLGYSQLQPPPASLAATAWWREAPRRASVSPRRV

SEQ ID NO: 346137 - protein, 124 aa, Zea mays
  Clone ID: MRT4577_78843C.1.pep
QRAAEQHSASKSLPSRCSLTSVSGSSSGVSANVVREEGGHAGTDDEGCVRGGDSGGRRSRRLRGQRHGGRAGDEDGAGALLHLHPWMRRLINDRRDAGGGMEWRRESLSLLRRSLTWVVRTPAG

SEQ ID NO: 346138 - protein, 63 aa, Zea mays
  Clone ID: MRT4577_78844C.1.pep
SSVPQFHVVVVVVYLTPQYAVCTLQKQHLNVLGLHMLACLHVVVCCFQSGTGFVKDNNENIFT

SEQ ID NO: 346139 - protein, 62 aa, Zea mays
  Clone ID: MRT4577_78845C.1.pep
NQLGPVNPKINNPAKVLKPLPGYKIFLKKKTFIQGKFHKWLVSLLLNHLPTLKVLSCYSKSP

SEQ ID NO: 346140 - protein, 71 aa, Zea mays
  unsure (1)..(71): unsure at all Xaa locations
  Clone ID: MRT4577_78846C.1.pep
TTKLLQDLHEAQAERGGSRPSSNLSSLSNASERDQHHLGSPSRLSVGEXPDVTHDPYEFLQSPEPAASAKT

SEQ ID NO: 346141 - protein, 57 aa, Zea mays
  Clone ID: MRT4577_78847C.1.pep
GGGASIFFNDRGLSSLVKYFFDKKKTVCDMSYTSRLFFEKQPVTVCHILEESQAFLS

SEQ ID NO: 346142 - protein, 83 aa, Zea mays
  unsure (1)..(83): unsure at all Xaa locations
  Clone ID: MRT4577_78848C.1.pep
LLLELDDTVYXNDTGIXLDLRRNIDKFLQAKLEGSADEAXNTRAKLLRAHGSYLGGLIELGYDVHPDEYHSYMHGRLPYDMIA

SEQ ID NO: 346143 - protein, 72 aa, Zea mays
  Clone ID: MRT4577_78849C.1.pep
VVRGGTTADEFKLSFPFGAHMHERASSCPLHLEMARLLLSVAGINSPPTSYVGDLRPLCFVCFALCCDHVTP

SEQ ID NO: 346144 - protein, 112 aa, Zea mays
  Clone ID: MRT4577_7884C.1.pep
VRKFVASPVGCLRLPLKVRVAVYPLLAWYILPPFPVFLFFSPPVAPLLPSRCLLDVMCPLLLPWRRKGSLFSVLLACGSHAFPFHSDHFLHLGGFCVIFTESPSQKKKTLVI

SEQ ID NO: 346145 - protein, 59 aa, Zea mays
  Clone ID: MRT4577_78850C.1.pep
HAYRNTVPRMTAIYSSLGFMRGLTIYLILLYTRAFAIPNREPCSLTVIIKQMRLLYNCD

SEQ ID NO: 346146 - protein, 85 aa, Zea mays
  Clone ID: MRT4577_78851C.1.pep
DHFGGNSKGPKLHLEKGGWGPGSLGDPGLKEGDHCTKNWIGQLEARLAVLAKCMAQSKGGNQGDVYYPLHRNHKFFLIWRSGKRA

SEQ ID NO: 346147 - protein, 78 aa, Zea mays
  unsure (1)..(78): unsure at all Xaa locations
  Clone ID: MRT4577_78852C.1.pep
MAPPQPKTGLTVGINKGHXLTKRELTLHPSHRKGKATKRVTMVRGLISXVAGFDPYEKRLTELLXKVGNDKRGLKLAK

SEQ ID NO: 346148 - protein, 86 aa, Zea mays
  unsure (1)..(86): unsure at all Xaa locations
  Clone ID: MRT4577_78853C.1.pep
LSLTFNYLPFILSYSFFFINXFLFNFLFFISFFFIXFYFNSFFIXIFLFFFFFLIFYIILYLSYIFLFXHFFFFIFFFIILFFFFL

SEQ ID NO: 346149 - protein, 154 aa, Zea mays
  Clone ID: MRT4577_78854C.1.pep
PAGTRIPLPRALSPLRCHQPRLPIYRPRRPPPHAFPPTPAPACSPTPGAPPTTPRPRHGGESKPGHGARRPRPPARHAHPLPPARRRTFPRRVRGGPRAGRVRGGAGRAAAPPAAPARHRAPVGAGRGRARRRRRRRGNGRRALRQLAARGRGQ

SEQ ID NO: 346150 - protein, 45 aa, Zea mays
  Clone ID: MRT4577_78855C.1.pep
KCPQTRLFRAFVFSGAYMSSDDICPPLLYAFLSHLAARPLVLVSA

SEQ ID NO: 346151 - protein, 79 aa, Zea mays
  Clone ID: MRT4577_78856C.1.pep
RLTGSRKKRGQYRNPGGGRNQRCSTLSYSARHPRRSCPGLRSAEPEPFVLRTHRAIYPCVLSAVSPFQGRRRAVTPKKS

SEQ ID NO: 346152 - protein, 133 aa, Zea mays
  unsure (1)..(133): unsure at all Xaa locations
  Clone ID: MRT4577_78857C.1.pep
RNSAGAAGQTLSAGRWGGPGGEFXGGIRVDHPEVLTELPGTIGNPDGHTVITSIKWVTSVKTYGPLRAWGDGSDTPLAIPEQKGSAIDGFXARAGAYLDALGVYGRSLGSDPHQRGRLLLCYAPPGLIESPFG

SEQ ID NO: 346153 - protein, 50 aa, Zea mays
  Clone ID: MRT4577_78858C.1.pep
TYFYRPTIFSFDRGGSFLFEGPLDISEEVGLLLRGEINFGGGGYEKLLWG

SEQ ID NO: 346154 - protein, 79 aa, Zea mays
  Clone ID: MRT4577_78859C.1.pep
CPIFGKKKKKKKKKKKKKKKKKKKKKKKKKKKKKKKKKKKKKKKKRGGGLFKRTIFTTPGLQLKTFFLGPPKLNYGPGF

SEQ ID NO: 346155 - protein, 101 aa, Zea mays
  unsure (1)..(101): unsure at all Xaa locations
  Clone ID: MRT4577_7885C.1.pep
GPDSRARLGEESERRIASRRRGSQRQGGGRRSRRRREAGMEDLSVEELASNLSTYKEQLREVKKLIKEKGGDXXISXYXXXXXXXQXXIXXTXXXXXTXKQ

SEQ ID NO: 346156 - protein, 112 aa, Zea mays
  Clone ID: MRT4577_78860C.1.pep
MASFSEAPPGNPKAGEKIFKTKCAQCHTVDKGAGHKQGPNLNGLFGRQSGTTAGYSYSAGNKNKAVVWEENTLYDYLLNPKKYIPGTKMVFPGLKKPQERADLIAYLKEATA

SEQ ID NO: 346157 - protein, 197 aa, Zea mays
  Clone ID: MRT4577_78861C.1.pep
MSSGRYMAYSPSPSTTPHSPRIAGLRAPSAAVAEQEKYLAELLAERQKLGPFVPVIPHSVRLLNQGGLYSNGAATDMNVWTSAFQPESSPAYSWLGGSQGSSSGLIVKKTMKVDIPVDKYPTFNFVGRILGPRGNSLKRVEANTDCRVLIRGRGSIKDPAREEMMRGKPGYEHLNGPLHILVGAELPVEIIDARLMQ

SEQ ID NO: 346158 - protein, 68 aa, Zea mays
  Clone ID: MRT4577_78862C.1.pep
VAFLGPHSCSRMGVCFRLGWGYGPLSKGFAIWPPDFLFSISVPSGGERKKPENPPKKNPKKKKKKKGD

SEQ ID NO: 346159 - protein, 85 aa, Zea mays
  Clone ID: MRT4577_78863C.1.pep
IKHPKYCLASMVRSIPATQSVSKFPASFPPAYGPKIGAFPLEKSANSSRTGVQLSLQIKQSDFRYDLVLRLTHSVVESRVSSRLQ

SEQ ID NO: 346160 - protein, 286 aa, Zea mays
  Clone ID: MRT4577_78864C.1.pep
MSSGRYMAYSPSPSTTPHSPRIAGLRAPSAAVAEQEKYLAELLAERQKLGPFVPVIPHSVRLLNQEILRVSTLLENASLLNQSGLEHGSPLTTGGLYSNGAATDMNVWTSAFQPESSPAYSWLGGSQGSSSGLIVKKTMKVDIPVDKYPTFNFVGRILGPRGNSLKRVEANTDCRVLIRGRGSIKDPAREEMMRGKPGYEHLNEPLHILVEAELPVEIIDARLMQAREILEDLLKPVDESQDYFKKQQLRELAMLNGTLREEGMQRSGSASPFHNSLGMKRAKTRG

SEQ ID NO: 346161 - protein, 245 aa, Zea mays
  unsure (1)..(245): unsure at all Xaa locations
  Clone ID: MRT4577_78865C.1.pep
MSSGRYMAYSPSPSTTPHSPRIAGLRAPSAAMAEQEKYLAELLAERQKLGPFVPVIPHSVRLLNQEXSPAYSWLGGSQGSSSGLIVKKTMKVDIPVDKYPTFNFVGRILGPRGNSLKRVEANTDCRVLIRGRGSIKDPAREEMMRGKPGYEHLNEPLHILVEAELPVEIIDARLMQAREILEDLLKPVDESQDYFKKQQLRELAMLNGTLREEGMQRFGSASPFXSLGMKRARQGGYESCKHHEG

SEQ ID NO: 346162 - protein, 286 aa, Zea mays
  Clone ID: MRT4577_78866C.1.pep
MSSGRYMAYSPSPSTTPHSPRIHGLRTPSAAVAEQEKYLSELLAERHKLTPFIPVIPHSVRLLNQEIFRVSTLLENASLLNQSGLEHGSPLTTGGLYSNGAATDMNGWPSAFQSESSPAYSWLGGSQGSSSGLIVKKTMKVDIPVDKYPTYNFVGRILGPRGNSLKRVEANTDCRVLIRGRGSIKDPAREEMMRGKPGYEHLNEPLHILVEAELPVDIIDARLMQAREILQDLLKPVDESQDFFKKQQLRELAMLNGTLREEGMQRFGSASPFHNGLGMKRAKTRG

SEQ ID NO: 346163 - protein, 226 aa, Zea mays
  unsure (1)..(226): unsure at all Xaa locations
  Clone ID: MRT4577_78867C.1.pep
MSSGRYMAYSPSPSTTPHSPRIHGLRTPSAAVAEQEKYLSELLAERHKLTPFIPVIPHSVRLLNQEXSPAYSWLGGSQGSSSGLIVKKTMKVDIPVDKYPTYNFVGRILGPRGNSLKRVEANTDCRVLIRGRGSIKDPAREEMMRGKPGYEHLNEPLHILVEAELPVDIIDARLMQAREILQDLLKPVDESQDFFKKQQLRELAMLNGTLREEGMQRFGSASPFHT

SEQ ID NO: 346164 - protein, 51 aa, Zea mays
  unsure (1)..(51): unsure at all Xaa locations
  Clone ID: MRT4577_78868C.1.pep
MGKRKSAAKPPPKKRMDKLDTVFSCPGCNPGSRAECPIDMXNLTAEASRTT

SEQ ID NO: 346165 - protein, 50 aa, Zea mays
  Clone ID: MRT4577_78869C.1.pep
SGAEKRWLNTAEVLIALYTRTLKEIEAVPKDHGYLIVRYFLHQSPTAYLP

SEQ ID NO: 346166 - protein, 190 aa, Zea mays
  Clone ID: MRT4577_7886C.1.pep
SISLEESITPDIPQVSDIENVILTAPFIADEVREAIFHMEHNKAPGPDGFPAEFYQVFWELIKDDLLALFMEFHNGTLPVYSLNFGIVTLLPKKCNALKIQDYRPICLLNVSFKIITKVLTNRIGVVADKIINPSQTAFMPGRNILEGVIVLHETIHELHRKKMNGVILKLDFEKAYDKVKWPFLQQAMR

SEQ ID NO: 346167 - protein, 61 aa, Zea mays
  Clone ID: MRT4577_78870C.1.pep
RPESKKDPSPARPSASRCLARRPSRARQSSRPHTGHSTARPPPSHRIPPSPSLPMGGGPMR

SEQ ID NO: 346168 - protein, 47 aa, Zea mays
  Clone ID: MRT4577_78871C.1.pep
MSAPATPEGGFLCLRRQLCSDGSKPGPAGRVDKVPPSVAGEVRGRMA

SEQ ID NO: 346169 - protein, 67 aa, Zea mays
  Clone ID: MRT4577_78872C.1.pep
KKGEGKKEKRAGGVGALEKGRSLDWRKSPTPPGFIGALRAGSPSPLRGGEFWERRKVGAFWIIGNSG

SEQ ID NO: 346170 - protein, 143 aa, Zea mays
  unsure (1)..(143): unsure at all Xaa locations
  Clone ID: MRT4577_78873C.1.pep
ARFLAXPLXXFGXXGXPXVSLPLGLXXAXXXXPGFPGVXXXXXXXSXAPLXVPSPSXGCXSARXXAPXRPLFGVSPLXPXFVAXXSAAALXXVGXCLVLCGARPPXVPXLXSGRXXXAVVXXGAPPARGXWPXCXVPLVGAGV

SEQ ID NO: 346171 - protein, 166 aa, Zea mays
  Clone ID: MRT4577_78874C.1.pep
CSSVVRRLELDAGSPDRRARLRMGSTVGRSHEGDRREQEENTRRERAAQGRGLRWASSTGAPESELEGEHHGNHGSSALQNSSRGQGGWARRSTNGADKSEGERSKEGAEGGRLFTASRGRARHIEEEERSALLPGAGSEIRSQSLGEIQRPTSKQEQEPTSYGGL

SEQ ID NO: 346172 - protein, 54 aa, Zea mays
  Clone ID: MRT4577_78875C.1.pep
KEWKIKIPFSGAGPKKRFKKWPPVKPTQPGKEGNSNGWVGFLNGPNGGKSFRFD

SEQ ID NO: 346173 - protein, 77 aa, Zea mays
  unsure (1)..(77): unsure at all Xaa locations
  Clone ID: MRT4577_78876C.1.pep
TAALXVASYLPPPYSVLSSLLIVPTPLRDTVYDYIAKNRYSWFGKDDECIVTKDKEILERFIDREEMLGGGPSNSFF

SEQ ID NO: 346174 - protein, 52 aa, Zea mays
  Clone ID: MRT4577_78877C.1.pep
VSLRVGTRVQSRICASPRACADGSGHAHLHLPPLMSWCWILRPSPHRESRRR

SEQ ID NO: 346175 - protein, 176 aa, Zea mays
  unsure (1)..(176): unsure at all Xaa locations
  Clone ID: MRT4577_78878C.1.pep
GSITFEPWXELWKSWAPPKRKYFLWLAIRIKCWTSDRLERRGLDHPESCPLCDQGQETVQHLLCTCIFARQFWHIILSPLGFGNLSPSGDDISFPEWWRKVCKKVHKSKRKRLNNVIILGAWCLWTHRNKAVFNGENLSLSTVRRVFLDELVCWSKAGAKHLEILDLEVALNRVGA

SEQ ID NO: 346176 - protein, 105 aa, Zea mays
  unsure (1)..(105): unsure at all Xaa locations
  Clone ID: MRT4577_78879C.1.pep
MPILDELIPIPLKRANRACRGIWNFPPPGAVTPPEFFELSKKSPPPDSKGAPFPPENQAQVKVXAPKTNTKMAPSKLKAGFPQLLPPKDSLTKNVFDPPRRVPVN

SEQ ID NO: 346177 - protein, 79 aa, Zea mays
  Clone ID: MRT4577_7887C.1.pep
NLRNWSNRFTGPQFFRGSQVGHQLCCLGLAQVLGDHNMGRIQSRRVQKGSGSFAEPKNSLFVLFGLNWAFCKGLHGPPG

SEQ ID NO: 346178 - protein, 211 aa, Zea mays
  Clone ID: MRT4577_78880C.1.pep
MLARTIGGAVRTRLAPSLASLLCRGYASPASSADDLVIDEDPPRAASTSVAATTVAATVPTLLQPRVLIYDGVCHLCHRGVKWVIRTDKHAKIKFCCVQSKAAEPYLRLVGMDREDVLRRVLFVEGPEAYYEGSTAALKVASYLPPPYSVLSSLLIVPTPLRDAVYDYIAKNRYDWFGKDDECIVTKDKEILERFIDREEMLGGGPSNSFF

SEQ ID NO: 346179 - protein, 100 aa, Zea mays
  Clone ID: MRT4577_78881C.1.pep
GTRGATRKIRTETRKAKQFPKKEEPKKQGEKTGKPNAGEKKKKGKKAKKKKARKKKGKSRGPKKRGQTKKRGGGQKARQKGEKPDQRDEKKKTPPPGEGG

SEQ ID NO: 346180 - protein, 56 aa, Zea mays
  Clone ID: MRT4577_78882C.1.pep
KKTCPTAKQRVDPLSLNVFGGPFFHPIGWSPGFGDLILPYPTTGGKNPTFTRINNL

SEQ ID NO: 346181 - protein, 104 aa, Zea mays
  Clone ID: MRT4577_78883C.1.pep
MHTCMHAWFIHFKGLRFKKCGVTTLCQSSYTLKILEQAGMKGCNACSVPMENRLKLSKKDESPPVDKTKYRSIIGSLRYLVNTRPDIAFAVGIVSRFMEDPRAK

SEQ ID NO: 346182 - protein, 99 aa, Zea mays
  unsure (1)..(99): unsure at all Xaa locations
  Clone ID: MRT4577_78884C.1.pep
LADLCACLHLPAQKDTHPLERXESRSRVRHHCCRWGGRAYTSLVRCHSSRGHVPTGEGTFAVIGVSHVVKHWYEASKELGFDGSDAIRVRIDQGILNNG

SEQ ID NO: 346183 - protein, 105 aa, Zea mays
  Clone ID: MRT4577_78885C.1.pep
HLLRMLHSYSKDTLTHTHLTQCGGASQNLHRETHTRAGTGHTYNRAGTSCCATPSCQRVTDHISVPNVQLHTSDDDDVSCDSGAWHDLCRGAGEHADRSHVDHGG

SEQ ID NO: 346184 - protein, 149 aa, Zea mays
  Clone ID: MRT4577_78886C.1.pep
NSARGQHVLQSPPAHPLRKQEQGQKTETIINKSASSRSPGPGPGPIQYSCFFSDATQRNATPTPQARGNREYLTLCNRRHAQVLTVDLMDQIMDFPVDPIMAAKAYKYKAEILFNEYLLADSYVLYTSVLAGLLMCKLVLLFTHSEFIC

SEQ ID NO: 346185 - protein, 46 aa, Zea mays
  Clone ID: MRT4577_78887C.1.pep
ANGRSSPSSGIALPWAPIPKSPASIMCLRDAIASHDYAATKAAADA

SEQ ID NO: 346186 - protein, 76 aa, Zea mays
  Clone ID: MRT4577_78888C.1.pep
RPVCSTRTSHVPCGGIVCRSSGKDSDNNSDLDEAREPEQAILSKMRSRQIEEVEHVQSGHAYTDVPADVKLRYRLG

SEQ ID NO: 346187 - protein, 69 aa, Zea mays
  Clone ID: MRT4577_78889C.1.pep
MEPKNYGSYSTQASAAAATAELLKKQEELNRKAEELDRRERELQHAALGGTATRQNNWPPLPSFCPVQP

SEQ ID NO: 346188 - protein, 157 aa, Zea mays
  unsure (1)..(157): unsure at all Xaa locations
  Clone ID: MRT4577_7888C.1.pep
MDTHIGSVDGPSPAAVNGAVGCPASAPGCPIMSSHPVVSAGEASLGRHLARRLVQVGVSDVFAVPGDFNLTLLDHLVDEPGLRLVGCCNELNAGYAADGYARARGVGACAXTFTVGGLSVLNSPLQREPSSALEGGLSEPTPATDAVLRGPAALTLV

SEQ ID NO: 346189 - protein, 215 aa, Zea mays
  Clone ID: MRT4577_78890C.1.pep
KVSKGPFPVGSRGGEGSIYPLRGPLERPGGKTSPPKNFFSWGWETFSKKKIPPPRFLEELFPGFFPPPQKKTPQLFFPPGGLFPHFFFPGWGGQEKKGAGFLPPPPPGPQGAQGWLVSPRAQGPPRENGFLNKLGQGGLGTPPPVFPPLFQGGCLKFDKPPLTFFLKLGCHPVEGGPKKKKKKKKKKKKKKKKKKKKKKKKKKKKKKKLERGRRY

SEQ ID NO: 346190 - protein, 109 aa, Zea mays
  Clone ID: MRT4577_78891C.1.pep
GSEAWEELLEVCISSPWEGPREKYSRSLSPYLGRGRGRSYSRSPSHYHRRGRSWSYSRSHSPRNNSKAYGEELPSTRSGYSRGPRRSSPPMERAECNGGSPMRGEARGK

SEQ ID NO: 346191 - protein, 133 aa, Zea mays
  Clone ID: MRT4577_78892C.1.pep
FVECHGKSGKDEVLPSNMREHPAKKNLNNLNILCRVPTRTHSAKYSLPSVRSRTVDKVSYRIKKLSSARLRALGKEHLLSPDRRLVAPFFYTPSPLPPHLHRRRRRANYIAAEPTSSLPRPAPPPPPPSTVQP

SEQ ID NO: 346192 - protein, 55 aa, Zea mays
  Clone ID: MRT4577_78893C.1.pep
FLSHTCSLSLRSCDYIVPGCRYKSFLAPTMATVAVSFDEKLYMLRAKIFKLYQIS

SEQ ID NO: 346193 - protein, 177 aa, Zea mays
  unsure (1)..(177): unsure at all Xaa locations
  Clone ID: MRT4577_78894C.1.pep
MPIIYLLRSAPSGVSLVHCISGLVLLFSQLVIFPLRSCAARQEKPDDMRCAIVERRGTMFKVTSCHNILVLLLWHDAGTYDNNMTRSXRRXGANDSLRFXQHEGXGPNDAHENDLKLIQPIKXRFLELLYVIWYILPSXMDIEEDXGLRIPMIYGRDDDIGPQSXPRDAMLPADGPP

SEQ ID NO: 346194 - protein, 73 aa, Zea mays
  Clone ID: MRT4577_78895C.1.pep
GCCCCCCSCCSLVSVSSSTLACVVPLIVTPKSDNDKGAYLPRNVDMYPHFFLSVNLIGVRTGVLQKKKKKRGG

SEQ ID NO: 346195 - protein, 67 aa, Zea mays
  Clone ID: MRT4577_78896C.1.pep
MGIVEAWMREKPIRTFLARLAQRRAAAAAAFLASPSATTVIDGEGGSDGSIPQLSSVANSVVSRCSR

SEQ ID NO: 346196 - protein, 121 aa, Zea mays
  Clone ID: MRT4577_78897C.1.pep
GQALLQCTPHMCPIRVHWHVKLNYKDYWRAKIAITNYNYRMNYTQWTLVAQHLNLDNVTEVFSFQYKPLQPYGSINDTGMFYGLKFYNDFLMEAGPFGNVQSQLVLSAAASAFLLLLLLVA

SEQ ID NO: 346197 - protein, 50 aa, Zea mays
  Clone ID: MRT4577_78898C.1.pep
LLVASSKKKKKKKKKKKKKKKKKKKKKSRKKIKEKRIKKKKNKNKKNLIL

SEQ ID NO: 346198 - protein, 82 aa, Zea mays
  unsure (1)..(82): unsure at all Xaa locations
  Clone ID: MRT4577_78899C.1.pep
CSPPLGPLRXXFSXFSCPPLLLXPFSXAFSSSLXPLXPXPRXLRCRXLXAXLVALXAAXXALXXAXVXALPCSXXSPKXLPL

SEQ ID NO: 346199 - protein, 69 aa, Zea mays
  Clone ID: MRT4577_7889C.1.pep
AESLLISYGTQCNYCYTVQGSIDITDTPMSKCGSKIQDNMCLGSVRHHLEGVEEFPPWKTEVSHVCDLC

SEQ ID NO: 346200 - protein, 434 aa, Zea mays
  Clone ID: MRT4577_788C.1.pep
MGKSKKSKARGGGDDLIDSSDADSVGSSSTALSDLSISYATEHVNSQEFVLDKYIDALYEKRGSTREAALVKLVDAFESFMLHGLVENRYATLLSQFNNSVKKGSTKEFFLASHAIGLLAITLGAGNSSHEIMEESHPQLCRVLQAWSDASKMIPALDCLAVITFVGATDLAETESSLKAMWDVIHPKSGSNVGTVRKPRPPVLAAAVSAWTFLLTTIGSWRINTDSWKEPIAFLSTLLEADDRAVRMAAGEALVLCFELNLLDVSSREDGDVNTGGTGGSKNKLFLDMQALKAKISGLASNLSAEAGGKGADKKNLTDQRDLFQRILDFVKYGDCPEESIKIAGKRDVLRVSSWSELIQLNFLKRFLGKGFLKHVQENGLLQDIFDIKVDKTETLSSTNKKIFRSEEEKERALRLNKERRLAQVRKNAVMLDE

SEQ ID NO: 346201 - protein, 450 aa, Zea mays
  Clone ID: MRT4577_78900C.1.pep
MTMGLRVRDSSALLALAVALACCSVAVVAYDPLDPNGNITIKWDVISWTPDGYVAMVTMSNYQMYRHIMAPGWTLGWSWAKKEVIWSIVGAQATEQGDCSKFKGGIPHCCKRTPAVVDLLPGVPYNQQIANCCKAGVVSAYGQDPAGSVSAFQVSVGLAGTTNKTVKLPRNFTLMGPGLGYTCGPAAVVPSTVYWTPDHRRRTQALMTWTVTCTYSQQLASRYPSCCVSFSSFYNSTIVPCARCACGCGGHGGHAGPGGCIEGDSKRALSAGVNTPRKDGQALLQCTPHMCPIRVHWHVKLNYKDYWRAKIAITNYNYRMNYTQWTLVAQHPNLDNVTEVFSFQYKPLQPYGSINDTGMFYGLKFYNDFLMEAGPFGNVQSEVLMRKDARTFTFSMGWAFPRKIYFNGDECKMPPPDSYPYLPNAAPVVASQLVLSAAASAFLLLLLLVA

SEQ ID NO: 346202 - protein, 48 aa, Zea mays
  Clone ID: MRT4577_78901C.1.pep
TIDDRITHTSMLPALLLPSWTVNLLMCNLYMSIISMTIELICHGITTI

SEQ ID NO: 346203 - protein, 265 aa, Zea mays
  Clone ID: MRT4577_78902C.1.pep
MQLYHHPYSLDSQKVRMALEEKGIDYTSYHVNPLTGKNMNVDFFRMNPSAKLPVFQNGAHVIYRAIDIIQYIDRLAVHLSGEIPPVNTEVHQWMQKVDAWNPEMFTLTHTPAKYRAFVSKFIRRVLIARMAQAPDLASMYHVKLREAYETDDKVKDPDIMKQSEEELSKLLDDVEAQLGKTKYLAGDEFSPADSMFVPVLARITILDLDDEYINCRPKILEYYNLVKLRPSYKITIGRYFSGWKKYRTLFKTSFFLCVRTLFRKY

SEQ ID NO: 346204 - protein, 112 aa, Zea mays
  unsure (1)..(112): unsure at all Xaa locations
  Clone ID: MRT4577_78903C.1.pep
SMGFEHPAVHAYWLQQAVAGSVLQQPISQLQQQSWEHITLQYHAHLQXQQTFXLPALSHLAMENPSSYLQQMVIASNPVAVHKVRGNQPQHQLXQFSVAFSQIAMGNPAAYL

SEQ ID NO: 346205 - protein, 71 aa, Zea mays
  unsure (1)..(71): unsure at all Xaa locations
  Clone ID: MRT4577_78904C.1.pep
FSHNSAHGSLAPMAFQASVMSNCVNKRYLXSRLNXLYRHGDNHGXTLXSLPALNSAMVRYWWVINPTLGKF

SEQ ID NO: 346206 - protein, 103 aa, Zea mays
  unsure (1)..(103): unsure at all Xaa locations
  Clone ID: MRT4577_78905C.1.pep
LPPSPWIARSAWTPARSPVASPRPRTCATSCTSCAPARSRPPRAAPTCRGAACAPRRPXRPRTXTPNXXCPPLPPPPPRPPPAPPXPTPPPPPPPPPAPPPSP

SEQ ID NO: 346207 - protein, 166 aa, Zea mays
  Clone ID: MRT4577_78906C.1.pep
VQSIGSWSGQTILDDEILDEENTGVSPGFVPSLDVLMDRTAKLKRYLNSKDFLDLWRSIAEGLDYYIYSSIRWAEVSFSDPGITQLRVDIKALLHIFRPFCSRPEAFLPFLSESLRLLTMKKSDAQCLLETLMDDTKSDDCLKREGLHHVNASQAAKILSSRKFSG

SEQ ID NO: 346208 - protein, 221 aa, Zea mays
  Clone ID: MRT4577_78907C.1.pep
MARRPARCYRYCKNKPYPKSRFNRGVPDAKIRIFDLGRKKANVDDFPLCIHLVSNEYEQLSSEALEAARICANKYMVKSGGKESFHLRVRVHPYHVVRINKMLSCAGADRLQTGMRGAFGKPNGLVARVNIGQILMSVRTRDSNRAIALEALRRCQYKFPGRQKIIVSKNWGFTPLKREEYVQQRQEGKVKIDGAYVQFLRNKGNLADNIRRFPTAFEASA

SEQ ID NO: 346209 - protein, 55 aa, Zea mays
  unsure (1)..(55): unsure at all Xaa locations
  Clone ID: MRT4577_78908C.1.pep
QQLQPQHLYXHQQQQQQRQDXCIGQQLHHQLSQGHVHQHEQSHEHHQCQIHYQQH

SEQ ID NO: 346210 - protein, 126 aa, Zea mays
  Clone ID: MRT4577_78909C.1.pep
DKLFFFFFFFFFCTSFFFFFIQPFFFFFFLFFTFFLFALLFPTAFLGGGGGAVPSPCSHLFPSYSDTALWKPSPSQICLCDSRSVLCHDIICGDQELYCPNPAGGFVEYSAFFPPPSTAPFPSSCG

SEQ ID NO: 346211 - protein, 58 aa, Zea mays
  Clone ID: MRT4577_7890C.1.pep
PCLWASAALHHGRPVEGWALTIHFSLGTAKWESLMVMRQGTANIQLRRVVISPISISN

SEQ ID NO: 346212 - protein, 146 aa, Zea mays
  unsure (1)..(146): unsure at all Xaa locations
  Clone ID: MRT4577_78910C.1.pep
MASLVAVSEKPVAIKGLAGSSISGTKIIRAPWPSXRSIRRSLATVVVDKYGDKSVXYFDLDDIXNXTTGQWNLYGSDATSPYKPLHSKXFETIANPFTKRCLLLEILLLGDGXLLGYVSAIAXPDLXLSIEKGHQEPPQTSARDKI

SEQ ID NO: 346213 - protein, 232 aa, Zea mays
  unsure (1)..(232): unsure at all Xaa locations
  Clone ID: MRT4577_78911C.1.pep
IPIGRAANKVRGDENGSNDRHQGRQWLRRRAPARAAGVRRHEAGGERSGGLRRQVHPVHLPPPAGSPERHNFSGASAAVAALRRRHPGGGPLGDAARGPSRAGEARGRDGGLLLAGEPRSAGGADGRHAPRFVFELLSESLGMPSDHLYEMECTQNLNVVCQYYPPCPEPHRTVGVKRHTDPGFFTILLQDGMGGLQVRLGDGQNGGWXVDIAPRXGALMVNIGDLLQLVTN

SEQ ID NO: 346214 - protein, 45 aa, Zea mays
  Clone ID: MRT4577_78912C.1.pep
QTYQRCDLLKLQGGSLEMLKTLSVSYKVSALEWCRLPRSIMLSNN

SEQ ID NO: 346215 - protein, 202 aa, Zea mays
  unsure (1)..(202): unsure at all Xaa locations
  Clone ID: MRT4577_78913C.1.pep
MAPTTATKDDSGYGDERRRELQAFDDTKLGVKGLVDSGVKSIPSIFHHPPEALSDMISPAPPLPPSSPSAAAIPVVDLSXDAARGXLVEQVRHAAGTVGFFWLVNHGVPEELMGGMLRGVRQFNEGPVEAKQALYSRDLARNLRFASNFDLFKAAAADWRDTLFCEVAPNPPPREQLPEPLRNVMLEYGAAVTKLAGFVFEL

SEQ ID NO: 346216 - protein, 114 aa, Zea mays
  unsure (1)..(114): unsure at all Xaa locations
  Clone ID: MRT4577_78914C.1.pep
MAPTTATKDGDERRRELQAFDDTKLGVKGLVDSGVKCIPSIFHHPPEALSDMISPAPLPPSSPSGAAIPVVDLSXDAARGXLVEQVRHAVGTVGFFWLVNHGVAEELMGGMLRG

SEQ ID NO: 346217 - protein, 55 aa, Zea mays
  Clone ID: MRT4577_78915C.1.pep
TVRGRMAPCLSLQIGCISTIVSCVRERRCYVKRSGIVTSCGVVLRSRQVSQQLAD

SEQ ID NO: 346218 - protein, 57 aa, Zea mays
  Clone ID: MRT4577_78916C.1.pep
GSRWLFIFPMGGKKKNGGEHHPFLKGSPLDLKSKFKTTPLFDVFGQILCHPRVGMGG

SEQ ID NO: 346219 - protein, 374 aa, Zea mays
  Clone ID: MRT4577_78917C.1.pep
MAPTTATKDDSGYGDERRRELQAFDDTKLGVKGLVDSGVKSIPSIFHHPPEALSDIISPAPLPPSPPSGAAIPVVDLSVTRREDLVEQVRHAAGTVGFFWLVNHGVPEELMGGMLRGVRQFNEGPPGRAKQALYSRDLARNLRFASNFDLFKAAAADWRDTLFCEVAPNPPPREELPEPLRNVMLEYGAAVTKLARFVFELLSESLGMPSDHLYEMECMQNLNVVCQYYPPCPEPHRTVGVKRHTDPGFFTILLQDGMGGLQVRLGDGQNGGCWVDIAPRPGALMVNIGDLLQLVTNDRFRSVEHRVPANKSSDTARVSVASFFNTDVRRSERLYGPIPDPSKPPLYRSVRARDFIAKFNTIGLDGRALDHFRL

SEQ ID NO: 346220 - protein, 114 aa, Zea mays
  Clone ID: MRT4577_78918C.1.pep
NRRSPKNRHEWANGKYKYSTRQRGNPRNTHTQDESATTTKRRKRTRKNLTSHVNHAGSNQRGAKAYRGSSDGESGISPGGSPWRKFVGIRIGGRGTIATGLWLKSGGEGERTGP

SEQ ID NO: 346221 - protein, 375 aa, Zea mays
  Clone ID: MRT4577_78919C.1.pep
MAPTTATKDDSGYGDERRRELQAFDDTKLGVKGLVDSGVKSIPSIFHHPPEALSDIISPAPPLPPSSPSGAAIPVVDLSVTRREDLVEQVRHAAGTVGFFWLVNHGVAEELMGGMLRGVRQFNEGPVEAKQALYSRDLARNLRFASNFDLFKAAAADWRDTLFCEVAPNPPPREELPEPLRNVMLEYGAAVTKLARFVFELLSESLGMPSDHLYEMECMQNLNVVCQYYPPCPEPHRTVGVKRHTDPGFFTILLQDGMGGLQVRLGNNGQSGGCWVDIAPRPGALMVNIGDLLQLVTNDRFRSVEHRVPANKSSDTARVSVASFFNTDVRRSERMYGPIPDPSKPPLYRSVRARDFIAKFNTIGLDGRALDHFRL

SEQ ID NO: 346222 - protein, 47 aa, Zea mays
  Clone ID: MRT4577_7891C.1.pep
KKGIFRLVGGTGNFLMGGGIATLGTTPFQGLYFFRLKMENKPHKCNV

SEQ ID NO: 346223 - protein, 85 aa, Zea mays
  Clone ID: MRT4577_78920C.1.pep
LWVISTTIVLYQGHTYGIDQSTMHGPWIISSLSWLHGMGMDRSTCLTMISTHVSLVRAVACRVMKGHPQVRQKRPPARTRGLELE

SEQ ID NO: 346224 - protein, 374 aa, Zea mays
  unsure (1)..(374): unsure at all Xaa locations
  Clone ID: MRT4577_78921C.1.pep
MAPTTATKDDSGYGDERRRELQAFDDTKLGVKGLVDSGVKSIPSIFHHPPEALSDIISPAPLPSSPPSGAAIPVVDLSVTRREDLVEQVRHAAGTVGFFWLVNHGVAEELMGGMLRGVRQFNEGPVEXKQALYSRDLARNLRFASNFDLFKAAAADWRDTLFCEVAPNPPPREELPEPLRNVMLEYGAAVTKLARFVFELLSESLGMPSDHLYEMECMQNLNVVCQYYPPCPEPHRTVGVKRHTDPGFFTILLQDGMGGLQVRLGNNGQSGGCWVDIAPRPGALMVNIGDLLQLVTNDRFRSVEHRVPANKSSDTARVSVASFFNTDVRRSERMYGPIPDPSKPPLYRSVRARDFIAKFNTIGLDGRALDHFRL

SEQ ID NO: 346225 - protein, 374 aa, Zea mays
  Clone ID: MRT4577_78922C.1.pep
MAPTTATKDDSGYGDERRRELQAFDDTKLGVKGLVDSGVKSIPSIFHHPPEALSDIISPAPLPPSSSPSAAAIPVVDLSVTRREDLVEQVRHAAGTVGFFWLVNHGVAEELMGGMLRGVRQFNEGPVEAKQALYSRDLARNLRFASNFDLFKAAAADWRDTLFCEVAPNPPPREELPEPLRNVMLEYGAAVTKLARFVFELLSESLGMPSDHLYEMECTQNLNVVCQYYPPCPEPHRTVGVKRHTDPGFFTILLQDGMGGLQVRLGDGQNGGCWVDIAPRPGALMVNIGDLLQLVTNDRFRSVEHRVPANKSSDTARVSVASFFNTDVRRSERLYGPIPDPSKPPLYRSVRARDFIAKFNTIGLDGRALDHFRL

SEQ ID NO: 346226 - protein, 133 aa, Zea mays
  Clone ID: MRT4577_78923C.1.pep
MAAAALRPAILRRIRLSPSPSLALAAAGTGASHPHALGRWLARPMSSHDAHLTRDEVIDRILDVIKSHPKIDPSKVTPEAHFEKDLGLDSLDTVEVVMAIEEEFKLEIPDMEADKIDSLPLAIEYVANHPMAG

SEQ ID NO: 346227 - protein, 56 aa, Zea mays
  Clone ID: MRT4577_78924C.1.pep
MWVMLSRFARSENCKFYRVLDSSVPLKLTFNGSSLENIGCFAHCVNPDGSSSAYSF

SEQ ID NO: 346228 - protein, 102 aa, Zea mays
  Clone ID: MRT4577_78925C.1.pep
STTSLILLISLLVCTYAQKKPVWPTAASASLFITGFGERRDERHFFRYFYNQDFERFDGPRNFFGEQYWTTAIHDVKGKQEWFIAYQRDLVDCESFANNRTL

SEQ ID NO: 346229 - protein, 223 aa, Zea mays
  unsure (1)..(223): unsure at all Xaa locations
  Clone ID: MRT4577_78926C.1.pep
FYDFYNLYXLGEGFGIRYAKSRTNVKGTRCMQEFVCCCSGKPKEPNSTSSRCQCQAMIRLLRTDDDGWYINEFRSSHNHQMLNTCAEKLHFPSHRHIDKYTRELVSQLRENNVNLSKVYSTLATFFGRVENVPFTKRCLRTLCGKLSREQADDDVRKTMAIFSEMKVQDSEFSYNVQVDDESRIRTLMWTNGRSKKQYHHFGDXGTXEPTYKTNLYEMPFGIF

SEQ ID NO: 346230 - protein, 65 aa, Zea mays
  unsure (1)..(65): unsure at all Xaa locations
  Clone ID: MRT4577_78927C.1.pep
MPTPSHLNKNPRYLDFRAARRVPESRAWPGLHDHPVXDFCAPGPDAVPVVDLGAXDXAPAAGAAA

SEQ ID NO: 346231 - protein, 61 aa, Zea mays
  unsure (1)..(61): unsure at all Xaa locations
  Clone ID: MRT4577_78928C.1.pep
RSYARRDILDIADLFRAKPTXVSDHTVAPQLTGDLAEMVPPHRLLEPYGICEVARTARVAR

SEQ ID NO: 346232 - protein, 240 aa, Zea mays
  unsure (1)..(240): unsure at all Xaa locations
  Clone ID: MRT4577_78929C.1.pep
MGEPQFIIGTPMSDMLAGMERDGRDPATLDLGSNYLLYFLYDYLPHPPVSPAATRSLSGVPWAPGGLDRISRLPDALLAEILSRLPAKDAARTSTLASRWRPLWRSAPLSLVDGHLLPDGGAAGQLPIGVPSPRAVTAAVSRILAAHPGPFRCVHLTRTTMEEHRGEISRWLDILVAKGVQELVFVNRPWPIDLRLPATLFGCASLTRLYLGLWRLPDTAAVPCGAXIPNLKELGLCMTV

SEQ ID NO: 346233 - protein, 93 aa, Zea mays
  Clone ID: MRT4577_7892C.1.pep
HYGEAILVMGVEAPPTVAMDCYSTSRFPLTPRWGAQIRIDAPSQLHHLDFEDRYRSWGRTLHPQHLGIHSRALQLSWNSTLRIKLWTMVLTLI

SEQ ID NO: 346234 - protein, 78 aa, Zea mays
  Clone ID: MRT4577_78930C.1.pep
VIDVPVDSRVEVHLVEDDVDELVVKVLLYKRSQLGALHGHLRVHDRARLVDRVLEPEHVRHVNHVRHVIHQASVHDLL

SEQ ID NO: 346235 - protein, 171 aa, Zea mays
  Clone ID: MRT4577_78931C.1.pep
MEGGGEVLLPLGSSLPARRGRGDADEVPHRWEKWRRWGGVGWRWIRHPHGRIWRGSAARGGARLGVATVARRRNAAGGSGGGPVAGSSTWQGGGGSGGAPLGSGVPAAGSDSRMARVVMAGVAGDRRTARAEGRRMRDERTPTSRSMRAAPCSGLTWQWLAPAMLAAGPHG

SEQ ID NO: 346236 - protein, 52 aa, Zea mays
  Clone ID: MRT4577_78932C.1.pep
MMMSGAGEPNQIKSNKRAVAKKKKKKKKKKKKKKKKKKKKKKKKKKKKKKAA

SEQ ID NO: 346237 - protein, 110 aa, Zea mays
  Clone ID: MRT4577_78933C.1.pep
HCPPVLVDLMHAKTPHSAGQLFVGVFLSLVHGHIVRAHYQFKKKDADRMLLETYRRPDRHLVPLYLETFIKRIQTFFASMPLVDLYVKWLNNRVHSIPVMAPINTAFSYL

SEQ ID NO: 346238 - protein, 149 aa, Zea mays
  unsure (1)..(149): unsure at all Xaa locations
  Clone ID: MRT4577_78934C.1.pep
MTDRLNHIAAHLSTAQAPASPTSPPRLSRPPRPKKRTETRNEMATPTDIHLYTAQTPNGIKVSLLLEELGLQYKVTALDLTQNVQKEPWFLEINPNGPIPXALTDTHTDGKPIRLFESGSILLYLADRYDTEHKISYPFGTXEYYEVNT

SEQ ID NO: 346239 - protein, 36 aa, Zea mays
  Clone ID: MRT4577_78935C.1.pep
TYLWEGKRIRINSSRTKLPVYSSNSPYKFRKLSLTL

SEQ ID NO: 346240 - protein, 82 aa, Zea mays
  Clone ID: MRT4577_78936C.1.pep
SLPPLSTESCKVAEGRFISRFRDSRPSWRSCQQWVGSLSSLGLACQPGVLPVLLDHLSCLRFHLVLSFLEGFRLCFGVIPDV

SEQ ID NO: 346241 - protein, 317 aa, Zea mays
  Clone ID: MRT4577_78937C.1.pep
MARPGWGSLFGCFSSSSSSSRGDGKKKQGKGKGAGKMTKKKQKSKQQQKVAAGSRPRSLQSRMSFTELSLSGMVSPEDLSLSLAGSNLHVFTIAELRAVTRDFSMTNFIGEGGFGPVYRGYVDDKTKRGLAAQPVAVKLLDLEGGQGHTEWLTEVFFLGQLRHPHLVKLIGYCYEDEHRLLVYEFMTRGSLEKHLFKKYAASLPWSTRLKIAIGAAKGLAFLHEAEKPVIYRDFKTSNILLDSDYKAKLSDFGLAKDGPEDDETHVSTRVMGTQGYAAPEYIMTGHLTAKSDVYGFGVVLLELLSGRKAVDKSRPPR

SEQ ID NO: 346242 - protein, 48 aa, Zea mays
  Clone ID: MRT4577_78938C.1.pep
LLEFLATHKGFYLKRKDKTPELRRRTNNQNNPQGVTAMTGLTGATLTQ

SEQ ID NO: 346243 - protein, 59 aa, Zea mays
  Clone ID: MRT4577_78939C.1.pep
MSNLGFLCCKDCTLAFRNPVGCILVFGYFVQHPGKRLVSHFVVCKHMWVVESLKCSWLF

SEQ ID NO: 346244 - protein, 52 aa, Zea mays
  unsure (1)..(52): unsure at all Xaa locations
  Clone ID: MRT4577_7893C.1.pep
NPYGCLGSLHVKRFKGDPFPRTISNPAGCPKIKGLFSKWGPGPYFGPPPWXE

SEQ ID NO: 346245 - protein, 200 aa, Zea mays
  unsure (1)..(200): unsure at all Xaa locations
  Clone ID: MRT4577_78940C.1.pep
PSLAGWMANAAASSSVQSAVXXXXXIPVPPNQESEQLMKRLRPGGGHGIDEATYPAPTPQPAWSVDDLPRTVACSLSHGSNVTSMDFHPTRHTLLLVGSANGEFTLYEIGLRETLLSKPFKIRDINACSPQFQNAVVKDSSISINQVTWSPDGDMIGVAFTKHLIHLHGYQPPNETRHLLEIEAHSGGVNDIAFSRPNKQ

SEQ ID NO: 346246 - protein, 111 aa, Zea mays
  Clone ID: MRT4577_78941C.1.pep
FLSFLIKDFNFHLSLHFYTFQQPTTSHLNIHHNFNPFHIFNHTIEFFLNLQILIPPNHDYQISILNIVSFKTSNSPYNSYFFTTFSNKSLYISLLHIHIILIIPNNLLPFY

SEQ ID NO: 346247 - protein, 1125 aa, Zea mays
  Clone ID: MRT4577_78942C.1.pep
MSSLSRELVFLILQFLDEEKFKETVHKLEQESGFFFNMKYFEEKVHAGEWDEVERYLSGFTKIDDNRYSMKIFFEIRKQKYLEALDRHDRAKAVDILVKDLKVFSTFNEELYKEITQLLTLENFRENEQLSKYGDTKSARSIMLVELKKLIEANPLFREKLVFPTLKASRLRTLFNQSLNWQHQLCKNPRPNPDIKTLFTDHTCSPPNGARASPVSVPLAAVPKAGAAYPPLTAHTPFQPPPGPSLAGWMANAAASSSVQSAVVAAASIPVPPNQAVSMLKRPALTDYQSAESEQLMKRLRPGGHGIDEATYPAPTPQPAWSVDDLPRTVACSLSHGSNVTSMDFHPTRHTLLLVGSANGEFTLYEIGLRETLLSKPFKIRDINACSPQFQNAVVKDSSISINQVTWSPDGDMIGVAFTKHLIHLHGYQPPNETRHLLEIEAHSGGVNDIAFSRPNKQLCVVTCGDDKLIKVWDMHGHKLFTFEGHEAPVYSICPHHKESIQFIFSTSLDGKIKAWLYDNMGSRVDYDAPGKWCTTMLYSADGTRLFSCGTSKEGDSYLVEWNESEGSIKRTYSGFRKRSAGVAGVVQFDTAQNDILAAGADNHIKFWDVDNNNMLICTDAEGGLPALPRLRFNKEGNLLAVTTADNGFKILANADGLRTLRALGSRPPFEAFRPQYEASSMKVSGAPVVASISPNIGRMDHLDRNSPAKPSPILNGGDTASRSIDIKPRISEEKPDKAKPWELMEVLNPQQCHVATMPETPDQARKVVRLLYTNSGVGLLALGSNAIQRLWKWSRNEQNPSGKATASVVPHHWQPNSGLVMTNDTADTNPEEAVPCIALSKNDSYVMSACGGKVSLFNMMTFKVMTTFMPPPPASTFLAFHPQDNNIIAIGMEDSTIHIYNVRVDEVKTRLKGHQRRITGLAFSTNLGILVSSGADAQLCVWTNDTWEKKRTVSIQMPAGKTPSGDTRVQFSSDQSHLLVVHETQLAIYDASKMERIYQWIPQDTLSASISHASYSCNSQLVFAAFTDGNLGVFDAENLRLRCRIAPSVINSNPPVHPLVVAAHPHEPNQFAVGLSDGSVKVLEPLESEGKWGAPAPADNGIIPNGKTPASSATSNPAADQIQR

SEQ ID NO: 346248 - protein, 242 aa, Zea mays
  Clone ID: MRT4577_78943C.1.pep
PVYNHVTGLLDPPELITPPNILVINGLHPMFDERVRDLLDFSIYLDISNEVKLAWKIQRDMGERGGHSLESIKASIEARKPDFEAYIEPQKQYADAVIEVLPTQLIPGDDECKVVRVKLIMKEGVEHFAPVHLFDEGSTVYWIPCGRKLSCSYPGIRFAYGFDTYFGHEVSVVEMDGQFDKLDELIYVETHLSNLSTKFYGEVTQQMLRHADVPGSNNGTGLFQTIVGLKIRDLYEQIVALR

SEQ ID NO: 346249 - protein, 99 aa, Zea mays
  unsure (1)..(99): unsure at all Xaa locations
  Clone ID: MRT4577_78944C.1.pep
RQSRAGTQKRDPKKERTRQERKRARSXRTKPSQGRSSGLEKKSKRHRETKGAVEPDQRRLNGRHCLVSRPGKKKLDKDDPTRQLSSEDKKTFNRRVADV

SEQ ID NO: 346250 - protein, 45 aa, Zea mays
  Clone ID: MRT4577_78945C.1.pep
WDHIIDCRYHQHWRLDSCGVRIINPMSSQVLNPSIILSQCQVKNQ

SEQ ID NO: 346251 - protein, 103 aa, Zea mays
  unsure (1)..(103): unsure at all Xaa locations
  Clone ID: MRT4577_78946C.1.pep
NWEVLKTKLAGISGGPGKPHLPLKKPPPNRKNPRXGVLNPPPLNKLPRGNPSKILGTAEKPRGQAPPGSVVPVVNAXPPPRGQGQPQTPPPWVPPPSGRQGPF

SEQ ID NO: 346252 - protein, 134 aa, Zea mays
  Clone ID: MRT4577_78948C.1.pep
STGHAGFRPELVGVLGASSKPPEAREMAGESLCALVTVPRNRKRFVQEDRDVARVLQLLGPDEEKEKPAPARRFLLSTVAHLTDSSSGRRKIMSSEHVRNLEKLAEADVPDAKRIVKRLGGSRLRSIFHGIWSL

SEQ ID NO: 346253 - protein, 269 aa, Zea mays
  Clone ID: MRT4577_78949C.1.pep
MQPKVGRGSGGAAGPQAGGNYGGGRGGPVGPGAGGGAGGGGGNWGRGGGGMGNRGPIGNMRNRMGPAGGGRGIMGNGGMVAPPPPMMPPGGMLGQGFDPTGYGAMGRMGGGFGGFPGGPGAMPFPGLMQPFPPVVAPHVNPAFFGRGGMGAGGMWPDPNMGAWGGEEQSSYGDDAASDQQYGEGGSHGKERPPEREWSGAPERRREREKDAPPAQEWPERRQRDERDMDRERNRDYDRDREKDRDRERDRDRDRERDRDREREREREKE

SEQ ID NO: 346254 - protein, 28 aa, Zea mays
  Clone ID: MRT4577_7894C.1.pep
HNVDLVSVPDDMTLDEWARFCKNDFGRY

SEQ ID NO: 346255 - protein, 64 aa, Zea mays
  Clone ID: MRT4577_78950C.1.pep
RAQANALRRNTTVKGPRGIFFWLQTEDATNKMRTPKNREAREEGVNGGRSTLDTQWVLEGAPGS

SEQ ID NO: 346256 - protein, 106 aa, Zea mays
  unsure (1)..(106): unsure at all Xaa locations
  Clone ID: MRT4577_78951C.1.pep
XNGRQGAGRRHEDNETPTSHATXPASKKEQDPDTRPPSRRHXRTRAQNDACCWVGLLSGAYGSSGINQSRRASERERTGTFASIMASEHAQLAGKAAADRRLAETT

SEQ ID NO: 346257 - protein, 71 aa, Zea mays
  Clone ID: MRT4577_78952C.1.pep
RSLHTLFRAARVLWGATTYLQNSPSSAQRHHRVRTAISLESQTVNDITLDVSICLTMAHLDDISKNKASMS

SEQ ID NO: 346258 - protein, 91 aa, Zea mays
  Clone ID: MRT4577_78953C.1.pep
TPRKPARRAPAGPCAARPSCGSTTSSWWAPPGPARGPRPSPPSRSARAGGPSPSPRWSAPAGCPRWPSPGSSAWTPPKQKPPDSDRSLIQR

SEQ ID NO: 346259 - protein, 42 aa, Zea mays
  unsure (1)..(42): unsure at all Xaa locations
  Clone ID: MRT4577_78954C.1.pep
MAGKGDGPAIGIDLETTYSCVRVRQHDRIKIIANHXGYRTTP

SEQ ID NO: 346260 - protein, 122 aa, Zea mays
  unsure (1)..(122): unsure at all Xaa locations
  Clone ID: MRT4577_78955C.1.pep
KPVDPHDLTLAFITSDVHGSLSRADGVCTPQAIAAYSQRVESPDPLSPWAGPRRVSLEPWNLSPTHRSLSPATRGPPPPPLISSTPEARVALFPPWTWRSRSTWTQTLLHPASNAEWXLYTT

SEQ ID NO: 346261 - protein, 42 aa, Zea mays
  Clone ID: MRT4577_78956C.1.pep
TPKPLSQKKKKKKKKKKKKKKKKKKKKKKKKKKKKKKKKNPN

SEQ ID NO: 346262 - protein, 307 aa, Zea mays
  unsure (1)..(307): unsure at all Xaa locations
  Clone ID: MRT4577_78957C.1.pep
MEAVRASAAWVASRSSHVTVDLQEIEKVVDQIQGDVPKVQWDYEGIHYFDNGPLTVQYLFVLDALNFCFWPDKDLSYDHLASGLKSALEKDKNALDSDRLQNYTGPQLRQLLNWPRPLPIEEERVRLLHEVGQELKRSFGGQAANLVKSAGNSAATLIELITRHFPGFRDHSLYKGHQVFLYKRAQIFVADLWGAFKGQNYGEFHDINSITIFADYIVPAVLRELGVLKYGSNLSCSIDSNSEIVPGSEEEVEIRACSIYAVEKMRDLISKKFGKQLLSIDIDLWLWSXRRXQNMALSHHRTLSIYY

SEQ ID NO: 346263 - protein, 48 aa, Zea mays
  Clone ID: MRT4577_78958C.1.pep
HHEFIIVLIGRLCNVSQYRAPLSSNWFTQPHGLVPTCVVIPHEHGKYG

SEQ ID NO: 346264 - protein, 79 aa, Zea mays
  Clone ID: MRT4577_78959C.1.pep
IGRLGRGRGPVSCTRHRSASKAPSRSASATERCRWSCSHPADRRPPAEPPHEGYDIQCDLINKAIVWRIGMFSVLLNVT

SEQ ID NO: 346265 - protein, 46 aa, Zea mays
  Clone ID: MRT4577_7895C.1.pep
LSRQNGLDNLTVWTLHNYINSQWKSCTQFQFWDTLQNPSESMDRHQ

SEQ ID NO: 346266 - protein, 113 aa, Zea mays
  Clone ID: MRT4577_78960C.1.pep
HGSKKKKFTPPSIKLSTGPAVLDPISSPKFGGAGGGPKNFWPKVVGLRVEAPKKVFLKDKPGPQIVVFPLGPLVPPDYPPTRGRIFLEIFAQTPPMGLKKKKKPLFPFLAPEL

SEQ ID NO: 346267 - protein, 73 aa, Zea mays
  Clone ID: MRT4577_78961C.1.pep
AFVMKLPSYLLRWASVCPASAPLLASLSQFWVWLDYAPQEEHLSFCHQYLPFYMDWQEAAESFWVHLEDFVEY

SEQ ID NO: 346268 - protein, 86 aa, Zea mays
  Clone ID: MRT4577_78962C.1.pep
MASFAAQVMDMFFVLVERVTGYGGHAEDDQKDASGAHEPTKLLTSSGVSETEQGEEEVVVAVQNVQIRARGGGEPFVQGGSMPQVN

SEQ ID NO: 346269 - protein, 54 aa, Zea mays
  Clone ID: MRT4577_78963C.1.pep
CLLIYLHLNSSLVILPFWGAVINLYVDGKVVSFKSWTGRGTMWDPYIRFSSLVT

SEQ ID NO: 346270 - protein, 48 aa, Zea mays
  Clone ID: MRT4577_78964C.1.pep
SQDNNKIMSYHLSFASVCLHLLLSATLSSVMTHPRFICQWIMYINMHN

SEQ ID NO: 346271 - protein, 60 aa, Zea mays
  Clone ID: MRT4577_78965C.1.pep
AHPFPYDPKSEVDIHPLPISTAAEHLALKSLHHQTPPQCPLERQSSARTSEHLWTSGSSL

SEQ ID NO: 346272 - protein, 110 aa, Zea mays
  Clone ID: MRT4577_78966C.1.pep
WARSLFTGLRWAHSFLNPSARVGLVLSFPSTTFSSSSAGCLFVLLFGLSGRNNWPRCTPAGLRRSACPGRAVPGYQDEITGRAERRPPGEEALARALLPLFGRAIPTRVP

SEQ ID NO: 346273 - protein, 89 aa, Zea mays
  Clone ID: MRT4577_78967C.1.pep
IGYLEAGRVTQDDLMHVFSKLPRDLNFIDHTSNISWKAFARAMPVIIDPALYMKKKGDLFWVPERRSLPTAFKLFTGASTALSLSTRDC

SEQ ID NO: 346274 - protein, 101 aa, Zea mays
  Clone ID: MRT4577_78968C.1.pep
IRHEAPLSALAHAASSSPSPLRRGGSRRPTPPSSASADASSSPTLPSSAASMSSTGRLTSSASSPTTTPALPLPPSGRRHAASWPNRSGARCLTLLLHTHV

SEQ ID NO: 346275 - protein, 50 aa, Zea mays
  Clone ID: MRT4577_78969C.1.pep
LFTHAHASPSPLQSVFHFGRMTLGYGPSRPLVNLAPVEKHQHWGGCCELL

SEQ ID NO: 346276 - protein, 108 aa, Zea mays
  Clone ID: MRT4577_7896C.1.pep
SGAGLSPGGSAPGPLFFFFSHGWDFLLRKAALWPEQWPTPTKTRTRAYSNGNSFYWKTGRKAFFPVGPALTFLTAFLGKGTYLTFSKSRTPAGGAPNGGSTMGLAPNT

SEQ ID NO: 346277 - protein, 91 aa, Zea mays
  Clone ID: MRT4577_78970C.1.pep
IASIVGQSENLPRVGRHRTSTPIYVVSFSARASLRGYRPPPSVEDTSQKHLCVVACGGGSAMSLYMMCGVRDSRACWIEDSLVSLCHVWTV

SEQ ID NO: 346278 - protein, 133 aa, Zea mays
  Clone ID: MRT4577_78971C.1.pep
MSGTGGSMVEGEGMFVEGAVMGVGRGFKEGMVMVGFVEGMAMPAALLLFLLVLSAFEAGELARCSAAAAGKPAVLVHDDLSPVQDTSPIRNSPLHEPDSRHYSLAFHNIHPIHALPERYAHTHHSSPRTSSLL

SEQ ID NO: 346279 - protein, 100 aa, Zea mays
  Clone ID: MRT4577_78972C.1.pep
QTTQRRRLGSCWVDRLAAGLLRIPPCSAGIWKLDRWESLTSDWSITQTWHDSFSLGVFFSTSFSGGIGFSRIGIDIVYYSLHSEWCTSRSTTAVCVPCMG

SEQ ID NO: 346280 - protein, 45 aa, Zea mays
  unsure (1)..(45): unsure at all Xaa locations
  Clone ID: MRT4577_78973C.1.pep
TPGLGGQFALRGVACFGIKIGRIXGVTPVPPGSTFKKGGKRGKKL

SEQ ID NO: 346281 - protein, 140 aa, Zea mays
  Clone ID: MRT4577_78974C.1.pep
MAKVHPNAAGSVVATAAAVGRAPAEADGEPSTVLTVWRKSLLFNCDGFTVYDASGDLAFRVDCYAGSTRRWRRAGVVLMDASGKPLLTVRRKTRLGLAERWVIYDADADDGTTTTARATPLLSVRRRIGACCKTLALAHS

SEQ ID NO: 346282 - protein, 40 aa, Zea mays
  unsure (1)..(40): unsure at all Xaa locations
  Clone ID: MRT4577_78975C.1.pep
ASLSRSTIKIFACRVAFQLVIAGLDRLNPPHTWSTRXAAR

SEQ ID NO: 346283 - protein, 164 aa, Zea mays
  unsure (1)..(164): unsure at all Xaa locations
  Clone ID: MRT4577_78976C.1.pep
MVKENPHIDLVDIGHIYSAPPHNHRIACYSQTLHSVDHPXIDRCQNDFAEISLTDFKNDFMLDHLKAAPXRGITIDIALTKCENTSCYXTLIDAPXHRDFIDNLXITETSXADCAILIVVSTNVAYVDNISTDXTTLEHALLAFHFVVNQKICCCDDMDATTPM

SEQ ID NO: 346284 - protein, 77 aa, Zea mays
  Clone ID: MRT4577_78977C.1.pep
LVRYVNSLRVVDSFSGSNWALLFLLPVIYHDLIHWYSSSHWSHSVKVQDQCTSVRWPVVLEVYHSLTSWRLLLSVNS

SEQ ID NO: 346285 - protein, 100 aa, Zea mays
  Clone ID: MRT4577_78978C.1.pep
YHGPTTPARAPEDHISDLPIAGRRSPSELITGLYRFVNSSPFGATSPELHADTPCLSTRTSPIFAATARARLARKVARVLHFITAVAYGGLAALVLVAPT

SEQ ID NO: 346286 - protein, 542 aa, Zea mays
  Clone ID: MRT4577_78979C.1.pep
MAAVARRGPGARLLAALLLLALVVSGHCLDAHHRGLKRRRRKHEIHSPVKTVVVVVMENRSFDHILGWLRRTRPDIDGLTGRESNRLNASDPASPEIFVTDEAGYVDSDPGHGFEDIREQIFGSADTSAVPPPMSGFAQNARGMGLGMPQNVMSGFKPDAVPIYASLADDFAVFDRWFASVPTSTQPNRLFVHSATSHGLTFNARKDLIHGFPQKTIFDSLEENGLSFGIYYQNIPATLFYQSLRRLKHLIKFHQYSLKFKLHAKLGKLPNYVVIEQRYFDCEMFPANDDHPSHDVARGQRFVKEVYETLRASPQWNETALIITYDEHGGFYDHVPTPVVGVPQPDGIVGPDPYYFKFERLGVRVPTFLISPWIDKGTVIHEPNGPQDTSQYEHSSIPATVKKLFNLHSNFLTKRDAWAGTFESYFKIRKTPRTDCPEKLPEVTKSLRPFGPKEDSSLSEFQVELIQLASQLNGDHVLNTYPDIGRTMTVGEANRYAEDAVARFLEAGRIALRAGANESALVTMRPALTSRASMSSGLSSEL

SEQ ID NO: 346287 - protein, 73 aa, Zea mays
  Clone ID: MRT4577_7897C.1.pep
GGLFLVTQKKRWVCSTSWIGAPGSRNPPKKQVYTFPKKPPASPEVAKGKKIAFSWEDCIFFVNFGKRGSSFVS

SEQ ID NO: 346288 - protein, 150 aa, Zea mays
  Clone ID: MRT4577_78980C.1.pep
EHSSILQQVKKLFNLHSNFLTKRDAWAGTFEDYFKIRRTPRTDCPEKLPEVTKSLRPFGPKEDSSLSEFQVELIQLASQLNGDHVLNTYPDIGRTMTVGEANRYAEDAVARFLEAGRIALRAGANESALVTMRPALTSRASMSSGLSSEL

SEQ ID NO: 346289 - protein, 177 aa, Zea mays
  unsure (1)..(177): unsure at all Xaa locations
  Clone ID: MRT4577_78981C.1.pep
GRDLSLSPWIEKGTVIHEPNGPQDTSQYEHSSIPATVKKLSXHSNFLTKRDAWAGTFESYFKIRKTPRTDCPEKLPEVTKSLRPFGPKEDSSLSEFQVELIQLASQLNGDHVLNTYPDIGRTMTVGEANRYAEDAVARFLEAGRIALRAGANESALVTMRPALTSRASMSSGLSSEL

SEQ ID NO: 346290 - protein, 447 aa, Zea mays
  unsure (1)..(447): unsure at all Xaa locations
  Clone ID: MRT4577_78982C.1.pep
MWAASCLASCCAACACEACRTAVGSVGRRSARIAYCGLFALSLFASWALREVAAPLLQSIPCXALTRIPPTFPRFDSSVQFIETFIETSLSVSAGINHFHKTPDREWFETDAVLRVSLGNFLFFTILAVIMAGIKDQKDPRDKIHHGGWMAKIFCWVIIVFLMFFVPNGVVSFYESISQFGSGLFLLVQVVLLLDFVHGWNENWVAKDEQFWYMALLVVSVVCYIATFCFSGLLFHWFTPSGHDCGLNLFFIVFTLILVFAFAIVALHPKINGSLLPASVIGMYCTYLCYSGLSSEPRDYECNGLHNHSKXAVSTGSLTLGLLTTVLSVVYSAVRAGSSATVLSPPDSPRGTDKPLLPFSKADEQEDKKDVPRPVTYSYSFFHLIFSLASMYSAMLLTGWSTSVGESGKLVDVGWPSVWVRIATQWATAGLFIWSLVAPVLFPDREF

SEQ ID NO: 346291 - protein, 89 aa, Zea mays
  unsure (1)..(89): unsure at all Xaa locations
  Clone ID: MRT4577_78983C.1.pep
WPLLPCWLVLVVFCFPSAVAFVRLCCGHCVVDVGVSALFCISCRARWAFMLAPLGAMMLLVCFSLYVATNKVGRPGXSGPVPAGVXAFP

SEQ ID NO: 346292 - protein, 44 aa, Zea mays
  Clone ID: MRT4577_78984C.1.pep
PIPKNRSFNKTCCNPSQMCSSLDHPRTPKCSCDVFERVILLFGV

SEQ ID NO: 346293 - protein, 142 aa, Zea mays
  Clone ID: MRT4577_78985C.1.pep
RPTANDGVDCMHGPSECMGNIIELCARELYPDPKINLGFIMCLSRDYSDIPGRSLVEDCALESAIDFQQLNECAVKEDGGYGLSLLRHSIKRTADAGVTKSATIRLFFEIHCIRDGGEWSDCPHGSSVNDLLIAIEKLRRQS

SEQ ID NO: 346294 - protein, 57 aa, Zea mays
  unsure (1)..(57): unsure at all Xaa locations
  Clone ID: MRT4577_78986C.1.pep
QPSSMQQTLPSQXPYWTDPRPALVPCCSHRPDVHRSRPGPGLPGTXGCSDRPPVCPI

SEQ ID NO: 346295 - protein, 65 aa, Zea mays
  Clone ID: MRT4577_78987C.1.pep
SSGCVLLLLLLLWRRFPILVPLLPKDGCVWVIELGPQQQKLYVLHKNPRLDLGMVRSAKKPTPKK

SEQ ID NO: 346296 - protein, 95 aa, Zea mays
  unsure (1)..(95): unsure at all Xaa locations
  Clone ID: MRT4577_78988C.1.pep
WLLLLXLLWFSFFXRXLXPVVLLFGXLLLVPCFWGXLFLGLCRFCCXCVRLLVFLALCCFCVALGFGSSXXXXXFSLWWLVAAVFLLFRXGFFVG

SEQ ID NO: 346297 - protein, 117 aa, Zea mays
  unsure (1)..(117): unsure at all Xaa locations
  Clone ID: MRT4577_78989C.1.pep
PAGTLSPPLVSLLPRPTQQQPPETTRSPRTRAAQAPDVLPIRAAARALPRAPRRPLACTTHAVRANRSCVANPARRPTATSSARXXXAAXLFLFCVNGVYCVRFSPLLPSFKLHERH

SEQ ID NO: 346298 - protein, 440 aa, Zea mays
  Clone ID: MRT4577_7898C.1.pep
MSYKTGKREWKFQNNPVSMDLEAGRGIAIARLMQAHKGEFPRPPVHTSSPPLHSHTRTLRPPAAYPRRPPPIAMPPSAAATAAAFLFPAVAIPCRVFPQRRARSLAVRAVASPPAFAVKPAPLPSKTGKWEWKFENKPVNIYYEEHEQEVAENMKNILMIPTISDVSTVEEWRVVAKDIVGRKGELGYRVTIVDWPGLGYSDRPSLNYNADVMESFLVELMNSPNSPVANADDELIIVGGGHAATIAVRAAGKDLIKPSAVAAVAPTWAGPLPIVFGRGSDMETRYGLLRGTLRAPALGWMMYNVLVSNEKSIQSQYKSHVYANPDNVTPDIIESRYELTKRKGARFVPAAFLTGLLDPVQSREEFLQLFAKLDGDVPVLVVSTVNAPKRSKAEMEALRGSKGVTKFVEVAGALLPQEEYPLAVAEELYSFLQESFAARR

SEQ ID NO: 346299 - protein, 154 aa, Zea mays
  unsure (1)..(154): unsure at all Xaa locations
  Clone ID: MRT4577_78990C.1.pep
MTPEGQKFLSLGIVSPSPAPRDLVKCQASSTVVAIPPVHAPGHGKLPSMKIEGHDSLVPSVKPSLAPSKAPKLHEPVIADTSIKGCDSLALSITPNVHDSLASSNKTPKRHESAIVDTMPESSRSQGEGVAAKAYDARXTKNWEPKKRHAAVTG

SEQ ID NO: 346300 - protein, 598 aa, Zea mays
  unsure (1)..(598): unsure at all Xaa locations
  Clone ID: MRT4577_78991C.1.pep
MGRDGEETRRRSRKRSRDASPSSSDSDSFDSPSSPSSSPERRSRSSKRNRSSSSHRHSRKKSDRSRRSRDEDRRRRRRRGQERKRHGGDGGRSSDSQSSEEDRAEEAREIVRDILIELPAIAEELRQLLQIIDSGESIDISGISDKLLVKRLKKLFRSLRLKESASGAYLLPSKNVPTLDIVGSLLLASSKLADNKSGKPVSPNREALQQANFDVQNKDKDYIVSEEPKIVDVEEEPPKRRIIGPAMPSRELLAAAAEMTEALRCRDAELEANDDLLIGPPPPAVVAEAASANEAERFEEVTRILAADTNSPYEVLGVNWKMSTDNMKKRYWKLSLLVHPDKCPHPSAQEAFVKLNNAFKDLQDPDKRGAIDEKIKKKEEMEQFEVELKAMREAAEWRRIQGVSLAGDDELLAGPKESQRPTRDEWMTTLPPERKAGVPMHSTTSFSMNGKEGRGDTSVWTDTPLDRAQKAQQSYLEAYNKTKAIAEGDDVKSKNPDASIVDKYNTSKRSVSLVQKHRESKTEKKXQKPLEKEEWEGNHPWKPLHREKDLSAGRQNGALDAENMSQGLSVRFASGAVQRNLLRAVWKDNYPWSMVKNR

SEQ ID NO: 346301 - protein, 115 aa, Zea mays
  unsure (1)..(115): unsure at all Xaa locations
  Clone ID: MRT4577_78992C.1.pep
MTRSCTDETLLMHPLGKAHAATPADLFIIDLYXVVARCHLTIIHXAYMEIXGTLPFDSFLSRVLSCIRTALLAGCLRFQVNNYNRXFRELPPERALADLLLCYLVLHLVIMNFLR

SEQ ID NO: 346302 - protein, 76 aa, Zea mays
  Clone ID: MRT4577_78993C.1.pep
ALFSQKKKKKKKKKKKKKKKKKKKRGGGGKKKKKKKKKKKKKKKKKKKKKGRAPFKEPNFTSPSFQLKTFFLGPPK

SEQ ID NO: 346303 - protein, 83 aa, Zea mays
  Clone ID: MRT4577_78994C.1.pep
LFLPIKKQKKIQVGGIVWGKPSWCLKTNLMAPMLNPSIPIIFEPTKTTTSCKGDLLTVWIPFAGIFNPPFRIAVLLKKQKIPW

SEQ ID NO: 346304 - protein, 48 aa, Zea mays
  Clone ID: MRT4577_78995C.1.pep
HSLPSIIYPYYITHTSSQTLFLYSNIFLKYLFIYNLNLPIIYTNHPLF

SEQ ID NO: 346305 - protein, 172 aa, Zea mays
  unsure (1)..(172): unsure at all Xaa locations
  Clone ID: MRT4577_78996C.1.pep
LLSGALSPPAHLGFCPWTPTPAGLGPGAGRASSGRAGLAXNTVHSEVLPSLPLPTLPRELGFDALRDDEPLAAPDRPDMIMQAANIARILADTDVSHLGFTAADNVEVDPSRCSWLWREVLKHNPDAFKVKAPGPSSQGPFGGPGYHNQEREKHFEHLTPNMSKTRNGSAFS

SEQ ID NO: 346306 - protein, 48 aa, Zea mays
  Clone ID: MRT4577_78997C.1.pep
MAPVEAEQHRRRALALAAHDASGAVSPIRISRRYAYAFAHAGGAGSWP

SEQ ID NO: 346307 - protein, 34 aa, Zea mays
  Clone ID: MRT4577_78998C.1.pep
VYCSGGHTSHSAMKLLSSLTTKNCWGCVHSTLIV

SEQ ID NO: 346308 - protein, 246 aa, Zea mays
  Clone ID: MRT4577_78999C.1.pep
MYKEALVCLEEERKRLEPPRPVAAELPPPPAVEPVEAKAKTRAGNVRMRKPKAREPNKREMSLEEKNMLRLGLVSLPEEKMHNVLQIVRKRNNNPEMLGDEIELDIDEMDVETQWELDRFVTNFNKALKKSQRAAMLNGGVADVTSTAVAEDDTAPVGDVPTLVGNDDAESEEPVKSTTVAEQVDEYVDIGDEMPAATYQSMEIEKDAEGRTGSGGSGSGSSSSSGSESRSSGDSASGAGNAHSLT

SEQ ID NO: 346309 - protein, 442 aa, Zea mays
  unsure (1)..(442): unsure at all Xaa locations
  Clone ID: MRT4577_7899C.1.pep
RSEFGSATTQNGCEAACLGDCNCTAYSFSTDGKCSVWNGDLLNVDQADSTISSQGVLYLRLAKSDFQGLSRGNKRTPTAAIAAGAVGSGILVLAVLALVIWRCNNVPPPLHAGVGDGGGIMAFKHTDLCRATKNFSDRLGGGGFGSVFKGLLGDSTAVAVKRLDDARQGEKQFRAEVSSVGMIQHINLVRLIGFCCEGDKRLLVYEHVVNGSLDAHLFQQSSAAAVATALDWSKRYRIAVGVARGLCYLHQSCRECIIHCDIKPENILLDASFAPKIADFGMAAFVGRDFSRVLXTTFRGTAGYLAPEWLSGVPXPITPKVDVYSFGMVVLEIVSGQRNTPPQALSRSGYYHAAAYFPVQAITKLHEGDLQGLVDPRLQGDLSLEEAERLFKVAFWCIQDDECDRPTMADVVRVLEGLQELDMPPVPRLLAAITARANADFM

SEQ ID NO: 346310 - protein, 249 aa, Zea mays
  unsure (1)..(249): unsure at all Xaa locations
  Clone ID: MRT4577_789C.1.pep
CSSTPISLFSSLQPRILVAGTPPHFQNPNGILQESRWNFTGISSISRNKRRSKEILSRSPHLFPLATTRRVLPALHEVFICDEHPPGMEYFDARRKPRNVGKIIAALVLTTLCIFVLKQSPGFGGNSVFSRHEPGVTHVLVTGGAGYIGSHAALRLLQDSYRVTIVDNLSRGNMXAVKVLQGLFPQPGRLQFIFXADLGDQKSVNKIFAEXAFDAVMXFAAVAXVGESTLXPLRYYHNITSTLLRGFWR

SEQ ID NO: 346311 - protein, 82 aa, Zea mays
  Clone ID: MRT4577_78C.1.pep
SDTESMSALLPVKKGSWRCRKVWSVGQESTCSLAAIRHLRTCVVSLNYEVGPASRGQSKSVGYSASLPLCVCTCPPQKNERC

SEQ ID NO: 346312 - protein, 217 aa, Zea mays
  unsure (1)..(217): unsure at all Xaa locations
  Clone ID: MRT4577_79000C.1.pep
GGDELRLESLLKASAEVLGKGVSGSTYKAVLEDGVLVAVKRLSALQFPAGRSKAFDRHMRLVGRLRHRHVVSLRAYCNSNGERLLVYDFXPNGSLQSLLQANGGGARNLDWTARKSILFGAAQGLNYIHTFPARPALVHANVKPSNILLGERGGACVSECGLMRYATNIQQSIAPQATRTRCPPELFLERDTGTTTSAPASSGWHGYAAPELASGAA

SEQ ID NO: 346313 - protein, 83 aa, Zea mays
  Clone ID: MRT4577_79001C.1.pep
ITNWLCGCLLAPCVCKLVVEGIGVLKVVDRPSGMEGARASVCVLCSTIVLVQTSYVINDLCMTLKYGCISPNAKKKKKRGSGV

SEQ ID NO: 346314 - protein, 290 aa, Zea mays
  Clone ID: MRT4577_79002C.1.pep
RSARRPWARARPARSGTASRGSSPRCAPSSPASTPGSSRARRRAGLRGEVRKRCGQILTRLRKDKRSVWFNAPVEVERLGLHDYHAVIKRPMDLGTVKEGLAAGRYASHDDFAADVRLTFTNALRYNPVGHEVHTFAGALLAYFERMYKEALACFEEDCKRPEPPRPVAPELTPPPAAEPVEAKVKPRAGNVRMRKPKAREPNKREMSLEEKNMLRVGLESLPEEKMHNVLQIVRKRNNNPEMLGDEIELDIDEMDVETQWELDRFVANFNKALKKSQRAVLKQYSTMCM

SEQ ID NO: 346315 - protein, 129 aa, Zea mays
  unsure (1)..(129): unsure at all Xaa locations
  Clone ID: MRT4577_79003C.1.pep
LKKTTTYHHWLPTSYILLSLFALLVSATNKSIIQQCSLASNAIIPXILPPVTSMGFEHPXAQAYRLQLSLAASALQQPIAQLRQQSLAHLSLRTISTXPPPHFLASLSHLSGAHPVAYFATKLLVSNPL

SEQ ID NO: 346316 - protein, 129 aa, Zea mays
  Clone ID: MRT4577_79004C.1.pep
VTQSLLTRTTYQVLTHVDYLASKHWAWDSTNCSHLGRRHPTQSGGDSLLPQKTGAGGARRACSASCLFSGETALSDHRVADYRTAIVNRGRHGGCWKLHGARRRLLRRQPDGLVHIQGARSAPERAHGQ

SEQ ID NO: 346317 - protein, 58 aa, Zea mays
  Clone ID: MRT4577_79005C.1.pep
SFFYFLPWLGQNPCLVFRYITKTTHKHLKQETYCTIHFNPNPPLLYFITPTNEHHTNP

SEQ ID NO: 346318 - protein, 97 aa, Zea mays
  unsure (1)..(97): unsure at all Xaa locations
  Clone ID: MRT4577_79006C.1.pep
YQCWFPFSAVAVHSFNGHLYPKSTNIFPDAAQDPTHSGTPYIIHECNIMLSRDTDLHFDLEPSSFSPHQSLCLLPQNEXLLVFGCRQQLERFPSTTS

SEQ ID NO: 346319 - protein, 55 aa, Zea mays
  Clone ID: MRT4577_79007C.1.pep
TPTCVRHQSGFHFDTVSRGGSRALMAYMICPYYNRNSRLFSVLSNRYHEILYYCF

SEQ ID NO: 346320 - protein, 81 aa, Zea mays
  unsure (1)..(81): unsure at all Xaa locations
  Clone ID: MRT4577_79008C.1.pep
PSFGSRSSQQTCAICLGGMRSGQGHALFTAECSHKFHFHCISSNIKHGNLIXPICRAKWKELPGAQPADASYGRARVNPLN

SEQ ID NO: 346321 - protein, 74 aa, Zea mays
  Clone ID: MRT4577_79009C.1.pep
FGLHDYAWPKVLPRTPRCRGATPSPTAPRAVRLTGRTCLNLGALGAAGCLSDGRLRHLLALKGAHLGRRGMVVL

SEQ ID NO: 346322 - protein, 108 aa, Zea mays
  Clone ID: MRT4577_7900C.1.pep
GRSQGFFFFKYPTPTNNKKKNKGKGKPKKFFPPGKKTRYLQKKVFNTSGWRGFFLTHLVHKINLSPGTATRKKARLKPYSNFHELLAPPTWIPTPIFTGEKKRANLPP

SEQ ID NO: 346323 - protein, 87 aa, Zea mays
  Clone ID: MRT4577_79010C.1.pep
TGSARFPGSYPRVRGFSTRSRRGRWHNLDITAAEVGAAKDIVEDKAAVPFPPSPAKPADNDSKAIAAHASNDSAAVKPSTSFACSST

SEQ ID NO: 346324 - protein, 66 aa, Zea mays
  Clone ID: MRT4577_79011C.1.pep
IISFLPSTEERLAKQVINFRSAQRGPKETPDHCGPPKWESLSKRVSVPPHPLEKKPCLVRGGVKLK

SEQ ID NO: 346325 - protein, 258 aa, Zea mays
  Clone ID: MRT4577_79012C.1.pep
MDVEASHESPPLRSKTMRRLLVATNCVMLALGVTGGQLLSRLYFSKGGHRQWLSGWLQTGGWPLLLPPVAASYVRRRARDRSAPVLLTQTQPRILLAAAGLGLIAGVDNLLYAWGLEFLPVSTSAILISTQLAFTVLFAYLIVRQRLTMATVNAVALLTVGAVVLGLHVSSDRPAGVTRSQYWLGFTLTLGAAVLYGLFLPLVELTYKCAAGGGRPVTYALVVELQLVMGFVATAFCTVGMIVNKDFQVMHDNSIYQI

SEQ ID NO: 346326 - protein, 85 aa, Zea mays
  Clone ID: MRT4577_79013C.1.pep
MTMIYRSELVNITLVLLGPNLRASEALTPKQGVRSKTCLNPPMLVPPDDVVHKVYYDIRYPRGHVGLKSFNGEVVNECRYTRTIP

SEQ ID NO: 346327 - protein, 160 aa, Zea mays
  Clone ID: MRT4577_79014C.1.pep
VLSILKLRQDRWLHIDDAKLEHNHPYNQSTTSLINCYKKLTDAKNGVSASRLKGRRNIPAEKEQGNFTEIGRLKFGEGDDEYIQKFFGNMQNKNPYFFYLVDLDNQGRLRNLFWSDARSRAANDYFGHDVVYFDTSYLTEKYDLPLVFFTGMNNHGQPVL

SEQ ID NO: 346328 - protein, 37 aa, Zea mays
  Clone ID: MRT4577_79015C.1.pep
YSCHFSITDSFRSVALLCRAVSGLSKARFKLWTEFRD

SEQ ID NO: 346329 - protein, 149 aa, Zea mays
  unsure (1)..(149): unsure at all Xaa locations
  Clone ID: MRT4577_79016C.1.pep
TYANLLSYYGMCNVVKDILLQCYFRKGVRGGSAEPESDIVQACRSFLDQQQCVNVWRFIXTINERKDLTENLKQLQCRTLIFVGENSQFHAEAVHMTAKLDRRYSALVEVQACGSVVTEKQPHAMLIPMEYFLMGYGLYRPRQINYSPR

SEQ ID NO: 346330 - protein, 157 aa, Zea mays
  unsure (1)..(157): unsure at all Xaa locations
  Clone ID: MRT4577_79017C.1.pep
GGAQGGPPXPGVSPPQKPRXGVPRGPPSPGICSPEPRRGPPGRPXPRPXPSPPPPGEGVEHGPQDPXFLHPCPAGGGPQDSFPRGXITKTPPAGAGPQKGPALWPPPQGFRRPLTLAKTRFWAFCQGHGFSAHLCLGMFRAPGSPPRQSCPGKGAPG

SEQ ID NO: 346331 - protein, 421 aa, Zea mays
  Clone ID: MRT4577_79018C.1.pep
MASSSSAATTSGDSQGLKARDACIVGVARTPIGALLGSLSSLPATKLGSIAIQGALKRAKVDPALVQEVFMGNVLSANLGQAPARQAALGAGLPNSVPCTTVNKVCSSGMKAVMFAAQSIQLGINDVVVAGGMESMSNAPKYVAEARRGSRFGHDVLVDGMLKDGLWDVYNDFPMGMCAELCSDQHSISREEQDSYAILSNERGIAARDSGAFSWEIVPVEISSGRGKPPVVVDKDESLAKFDPVKLKKLGPTFKTNGSVTAGNSSSISDGAAAIVLVSGERAKNLGLEVIARITGYADAAQAPELFTTAPALAIPKAISNAALQTSQIDYYEVNEAFSVVAIANQRLLGIPSGKLNLSGGAVSLGHPIGCSGARIIVTLLGILRQKNGKFGVAGVCNGGGGASALVLELMQPSSHIHSSL

SEQ ID NO: 346332 - protein, 132 aa, Zea mays
  Clone ID: MRT4577_79019C.1.pep
GGQAYLGAYDSEEAAAHTYDLAALKYWGPDTILNFPAETYTKELEEMHFVSVEESLASLRRQSSGFSRGVSKYRGVARHHHNGRWEARIGRVFGNKYLYLGTYNTQEEAAAAYVISAIEYRGANAVTNFDIR

SEQ ID NO: 346333 - protein, 62 aa, Zea mays
  unsure (1)..(62): unsure at all Xaa locations
  Clone ID: MRT4577_7901C.1.pep
PXDKFSQSXYXXIIXXRKXTSPXYERASPLIXXYIXSXWVIIKRXGTPPXXMGLLHLVQDXG

SEQ ID NO: 346334 - protein, 69 aa, Zea mays
  Clone ID: MRT4577_79020C.1.pep
FQCMHASIMLIRNKVYVPGSVNECPLAAFFGAVCTVAGLMLIYISLNTVPRKKRKRKKTKRRARLLEDT

SEQ ID NO: 346335 - protein, 84 aa, Zea mays
  Clone ID: MRT4577_79021C.1.pep
PKYTSPSTEPTVYIANPSPQQPLSGSFAPGIRGLKQSKISMVVLNGLSSPIRQSLQLYHLEQTGDTGYFVSGARRNMDPRDSTI

SEQ ID NO: 346336 - protein, 73 aa, Zea mays
  unsure (1)..(73): unsure at all Xaa locations
  Clone ID: MRT4577_79022C.1.pep
MAGGQVNVLTTLDQTDTQWYHLMAIVICAMXIFTDTYHLFCIALATKLLWRIYYSDPTCKDPRSLPPNVIDAG

SEQ ID NO: 346337 - protein, 97 aa, Zea mays
  Clone ID: MRT4577_79023C.1.pep
PPRASMGCFKPQQTKFPPSGAPPPPKQPRTLARDGGPKTKLGCGYPFWAQKNLLGVFLSSTGINSRGGFNFYFSPPPARGKGKNNFGRPPQRQRGGF

SEQ ID NO: 346338 - protein, 69 aa, Zea mays
  unsure (1)..(69): unsure at all Xaa locations
  Clone ID: MRT4577_79024C.1.pep
MAVVMRETIGYALVPXIARGVMLGADQPVILHMLDIPPAAEALNGVKMELVDAAFPLLKGVVATTDVRG

SEQ ID NO: 346339 - protein, 173 aa, Zea mays
  unsure (1)..(173): unsure at all Xaa locations
  Clone ID: MRT4577_79025C.1.pep
MSMPLPPPRRWLTESSCMLLLLYTGTWEWTCLSWPTTSPQSDDAPSVVRTPAWHCRDGPTWRTRMRMLVTRPTPTAYADFQAPHRTWTLLAHWDDMEKIWHHXTLYNELRVAPDQHPVLLTEAPLNPKAHRQKMTQIMLETFNVPAVHVALQAGLSLYAGGRTTGXVLDSGGG

SEQ ID NO: 346340 - protein, 146 aa, Zea mays
  Clone ID: MRT4577_79026C.1.pep
TAPPVSSGFLPRWPPVAVFPPRLGAPLAFRAPCVSVFFFSRPLSLFFRFPGVGTLFPFCVLFAPAPFFSRCLGLGFFFPPPPPLKNPWALFPFEAPPPFHFEAARPFPFLVTPPPFFPSPWSSLCLGKKWGFFFSIKKKKEKHLYQ

SEQ ID NO: 346341 - protein, 127 aa, Zea mays
  unsure (1)..(127): unsure at all Xaa locations
  Clone ID: MRT4577_79027C.1.pep
GPWPSSHXPCARPRPLLGFRPSELPRYGRLAPAPARLLTSSFFGATTSLSYLRSMPCVFPTKSPSALALDHGVWHSGSSPLLSPSSSHALGCRSPAPQQPSSHAQDRFGVRVVFLALLTPMVAAPHH

SEQ ID NO: 346342 - protein, 240 aa, Zea mays
  unsure (1)..(240): unsure at all Xaa locations
  Clone ID: MRT4577_79028C.1.pep
MDSAANWRSTQGTDPAAGGVDPNAAAPAGSDWRTQLQPEARHRIVNKIMETLKKHLPVSVPEGLTELHKIAVRFEEKIYTAATSQSDYLRKTSLKMLSMESQTKTQQNPGNVQVIPNQNPPGPAPGLPPQVSNPAQSSAIPLISQQQTRQSNASTSVQGSLPSLGQNSSSVSQASTLHNMSVMPQNTMNNGLAQGTPQDMYAAQRQMAGRQQQQQQQXAHNQXIYXQQKYLKPELQQNHL

SEQ ID NO: 346343 - protein, 121 aa, Zea mays
  Clone ID: MRT4577_79029C.1.pep
NATNTSFSKLPSRASGKKKTPPTNHRRVESNKKNRGQRANPTQEPFGGPLRGWKVIPKQKGWEGTGKNRKKVGLVGDQNPAKPTEPTGVGSQPNKPLKKGRGPTPLTKGKEKKGVPNGQGG

SEQ ID NO: 346344 - protein, 182 aa, Zea mays
  Clone ID: MRT4577_7902C.1.pep
RLRITARHTASRRYGQGTRRPRRRTGAANAAPDGRRAQPPTPGVAQPRRAGTPAQAPASAQARALGPWLRAQAQPSSPGGHGLRKRLPEARPRRAQQPRRAGARPWQRAGKRSHPGAQAWHPARGHGSTRAGESPAAQAAWARTRSQFAPGGYSTPTAAQPPQRVPGRSHDAGVFLPVIQAE

SEQ ID NO: 346345 - protein, 54 aa, Zea mays
  Clone ID: MRT4577_79030C.1.pep
SLLVCSPGIHSNQRRMISRCPGDFDIQIQLIRLQRKLWIFRLKVNVLLIIVVRE

SEQ ID NO: 346346 - protein, 67 aa, Zea mays
  Clone ID: MRT4577_79031C.1.pep
LFLYLKDRNQGLFINMPRDHLAGGSRRVHEEEWKVHLRAPPREGPTIHSLFHSHSSRGNPIKRKNSK

SEQ ID NO: 346347 - protein, 199 aa, Zea mays
  Clone ID: MRT4577_79032C.1.pep
RTTTLTIGIRGVRSSTSIRQRHGSRFQTHPPRVQPAVRRAEHSLGPALRHIRQCAAHRHRRQLGRVLRRRRAILRGTICHRRRLGWVLRREATERHRGWPTWRRGGATRSSSHSSWPRCSRLRGRAGHSSQLYLGSLCRDSEDVQAAQLARSFRALSGFVIPCALSGFAAASGFTWWWATAVPPSARQPAGPPRSTIGC

SEQ ID NO: 346348 - protein, 624 aa, Zea mays
  unsure (1)..(624): unsure at all Xaa locations
  Clone ID: MRT4577_79033C.1.pep
MITGRDIYDVLAAIVPLYVAMFLAYGSVRWWAIFTPDQCSGINRFVAVFAVPLLSFHFISSCDPYAMQYRFLAADSLQKLVILAALAVWHNVLSRYRRGAAASSLDWTITLFSLSTLPNTLVMGIPLLRAMYGDFSGNLMVQIVVLQSVIWYTLMLFLFEYRGAKALISEQFPPDVGASIASFRVDSDVVSLNGREALQADAEVGSDGRVHVVIRRSASASTTGGGHGAARSGAGYRPYGPSSAMTPRASNLTGVEIYSLQTSREPTPRGSSFNQSDFYAMFNGSKMASPLAQPGAARAPGLDEQVANKFASGKGGDAAAYPAPNPGMMPPPRKKELGGSNSNSNKELHMFVWSSSASPVSEANLRNAVNHAASTDFAAAPPPSMPVDGATPKGVSGTVXGQEAGPRGQRRGPGDRGRPQEPRDGAGRXFPVSGSPYVAPRKKGADAPGLEEAAHPMPPASVMTRLILIMVWRKLIRNPNTYSSLIGLVWSLVSFRFNIQMPSIIKGSISILSDAGLGMAMFSLGLFMALQPKLISCGKRVATFAMAVRFLTGPAVIAATSIAIGLRGVLLHVAIVQAALPQGIVPFVFAKEYNCHPQILSTAVIFGMLIALPITILYYVLLGI

SEQ ID NO: 346349 - protein, 196 aa, Zea mays
  Clone ID: MRT4577_79034C.1.pep
EELRTSLKELLFKEGSFRWNRLENLLRNAKNSPGFDFDYVLNEATEFLLSDRGQFIRDRLVAELVNSIDQLGRNTWQQVSHNIQERISFLGDLGNGNGKAHQTKTIKVVPQPAIAQQEETWQHLQNLWQILKETPGFDPLKFVPVLSQIIVNPTSRRMGQQVAEGLLQKAIARVIRQWALALESQPNPAIKIRNAA

SEQ ID NO: 346350 - protein, 167 aa, Zea mays
  unsure (1)..(167): unsure at all Xaa locations
  Clone ID: MRT4577_79035C.1.pep
PAAGPPRSAHWLCILTEWDEFKTLXDYHEDLHNMHKPAFTSQXHNIESPXKLKEIGFIIYSMGGGLDSWLKDMPWGRLIPPDLPMDFIHRKEEETSWLTALYYTLITQATVPILSCVKHKKRVDGLLVYHDYRCFCFWGRLHMYNRSRALRSARGSCPRTNGPAIPG

SEQ ID NO: 346351 - protein, 102 aa, Zea mays
  Clone ID: MRT4577_79036C.1.pep
HNLGSGRLAAGVRRQPWRHAVATHWCGLRCGWPVAGSRSAGRRWLAAWDLPGGWLLPRWLGTCAGGRTALGLGRSHAGRLMPTAYCLGWGGWSGVAVRQWAV

SEQ ID NO: 346352 - protein, 64 aa, Zea mays
  Clone ID: MRT4577_79037C.1.pep
IEEGTTHPHTRRKQHTNRRTTPLTGHNIPTNATPLPHLTTLDMIQDYPPGSSINARVESRFNPL

SEQ ID NO: 346353 - protein, 149 aa, Zea mays
  Clone ID: MRT4577_79038C.1.pep
PPPQKLSPSIPFLFKGKKNGGFFPQTFWGPPPARFLPRDPRGAGFFGFAKKIQFPKLPLQGPFLKGPPLGKSFPYQRFSRGGLQGPSPPLFLPQGVLEFPPPVSGGGKKNPPGSVKHGGLGFQNFCGPPQFFILNFSPFFLGQTLFFPF

SEQ ID NO: 346354 - protein, 104 aa, Zea mays
  Clone ID: MRT4577_79039C.1.pep
PQQFFPFNQLGGLDFPGFFQREQFFPFSQVGGVGPAPFFIQPRLLPFFQAGGPNGGPLFQLQQLLPFNPLVFANPAGFFPQPPLGGAPFLVFFGVRVQKKVFCF

SEQ ID NO: 346355 - protein, 53 aa, Zea mays
  Clone ID: MRT4577_7903C.1.pep
INFICSQAQATCDGQVRILELAFVRRVGSSEELSFFVSKKKKKKNKKKKKKAA

SEQ ID NO: 346356 - protein, 134 aa, Zea mays
  Clone ID: MRT4577_79040C.1.pep
RTTAVGTRKFSIVLQGNGSGDGTSDSGKGNAANGENGGGGSLQVTEQQVARLMEEDMGTAMQYLQGKGLCLMPISLASAISSATWPSLLSRPSMGAMGDARGPLHDGGSPASPPLVNCGDDSSTVKDAGAGGKR

SEQ ID NO: 346357 - protein, 207 aa, Zea mays
  unsure (1)..(207): unsure at all Xaa locations
  Clone ID: MRT4577_79041C.1.pep
XXXXXXXXXXXXXXXXXXXXXXXXXXXXXXXXXXXXXXXXXXXXXXXXXXXXXXXXXXXXXXXXXXXXXXXXXXXXXXXXXXXXXXXXXXXXXXXXXXXXXXXXXXXXXXXXXXXXXXXXXXXXXXXXRGWYAVDTVFDGSKLGIEPHAAQINRAGDLLLLDSISSNIYRVQLSLSPCEHALPPTTPCPFQVFQSSWDSASLGDVSS

SEQ ID NO: 346358 - protein, 55 aa, Zea mays
  Clone ID: MRT4577_79042C.1.pep
ANKQGLLQALPADEISETLTLQLIKDRQWSIVACSAKSKEGLHEGMEWLISQIKK

SEQ ID NO: 346359 - protein, 248 aa, Zea mays
  Clone ID: MRT4577_79043C.1.pep
MLRRAAPTSAALCRRALSTTPSSSRTAAETAAVSSELNSVLLRSLKEHYLEVCKMTPPPKVSPPKPFTIVKGALDQPSGPVLRREYGEDGEEISISVARLANILPAGADSDSDGTGEGGGMSASISQLLLHVDISKPGIGKSMQFLCGLYPDALGIHSVCLRSKNADPFDGDMTSKGEYRGRIFQELDEKVRDALHLYIEARGINEKLFRFLQAWLYVKDHRNLVRWFKSVGSFISDQSQSKMSRTPR

SEQ ID NO: 346360 - protein, 58 aa, Zea mays
  Clone ID: MRT4577_79044C.1.pep
GLSNGFYSWGKHGDATLPLITHLMLYKNLNTNRKHDDNFNILLVYVIVRIIKEDTINQ

SEQ ID NO: 346361 - protein, 68 aa, Zea mays
  Clone ID: MRT4577_79045C.1.pep
GKPKQLNLLVNQGCLPFFGPWPPVIPKPMLSPPFSFHRLRCPPFLCIKRAHSFLPPPKTGGPLFLKLV

SEQ ID NO: 346362 - protein, 64 aa, Zea mays
  Clone ID: MRT4577_79046C.1.pep
PETHWHIPRGVAVFRPRRSSRAIRRGWGGRGILIEGGPEPVAGSPLSLSTCAHPACAEAMCAFL

SEQ ID NO: 346363 - protein, 108 aa, Zea mays
  Clone ID: MRT4577_79047C.1.pep
LKLPPAQNACSWRGAEAKGCLRRGKPCCTRHYSLSRRKILTHEVLRSIGFSLKPPNYTLPLIGHNHKQILAHPRPKRASGGLSQTAQIICEPLLVRAEGLQLLPIQLI

SEQ ID NO: 346364 - protein, 62 aa, Zea mays
  Clone ID: MRT4577_79048C.1.pep
FTRLPTPVFGTGSPDRGGKNFLTDSMTGGVSDAVKNTAAAPIVLAMLGIRSQEDRPTAVKRS

SEQ ID NO: 346365 - protein, 48 aa, Zea mays
  Clone ID: MRT4577_79049C.1.pep
RQLHSRRLLGVGTGCNGGGRHEPLYDSPRQRRSWVPTPMLPRRVVRPR

SEQ ID NO: 346366 - protein, 74 aa, Zea mays
  Clone ID: MRT4577_7904C.1.pep
KHQILRSSRPPPTESDCNKHLQLIYMMCMGERKRQTKEKTRREMRHKPDESGSESGVKERKRRRWTDRRDRKTA

SEQ ID NO: 346367 - protein, 105 aa, Zea mays
  Clone ID: MRT4577_79050C.1.pep
RDLICRLSQALQWSPRSIVHIIALLNFYTHLFPYIYQILLRSSLIDCTLLTYIPAIDVLSQPNLLINSSTQLDHTHFFSVLYLSAPGSYLDEYNTYLKHSTRFML

SEQ ID NO: 346368 - protein, 96 aa, Zea mays
  unsure (1)..(96): unsure at all Xaa locations
  Clone ID: MRT4577_79051C.1.pep
PVGRPFQEARRSLMPSRPSCPECTPADRGDPARGRWHPQAARAGRXSHRVYGRIYDIYTIYDLISHMVYISIYIYIYIYIFPPFMRRLPLLLVVGP

SEQ ID NO: 346369 - protein, 63 aa, Zea mays
  Clone ID: MRT4577_79052C.1.pep
NPRGPPILKSRCAFYSLLLTLGKFGGLAMAFPEKRDGLGRTGSRGPTFWTCAQASANAWADAW

SEQ ID NO: 346370 - protein, 100 aa, Zea mays
  unsure (1)..(100): unsure at all Xaa locations
  Clone ID: MRT4577_79053C.1.pep
NRSSNLYIYTNSSHSTIRKDSQLQDSQLQGCHFSLQGHNFGLQLCIEHKIISSNIYDDRVKRNQWSEYNRATIICSSGSPVNCNAALSCHRMTXKYMVTS

SEQ ID NO: 346371 - protein, 60 aa, Zea mays
  Clone ID: MRT4577_79054C.1.pep
DLKKKKKKKKKKKKKKKKKKKKKKKKKKKKKNFKTQNLTTSQEQFVADFSLHCRGPKDSL

SEQ ID NO: 346372 - protein, 424 aa, Zea mays
  unsure (1)..(424): unsure at all Xaa locations
  Clone ID: MRT4577_79055C.1.pep
AKRKRGHHNGEQNDDLSDSSVECIPRGEISPDDIVAGIGSKAFYTLSXKIYSQQRVFAVQVFELHKLIKVQKLIAASPHLLIEGDPVLGNALTGKRNKLPKGNSKVQTLSITNKDDIQPTLEQPELSKQDTEGNLLAHSHDDGLGDNHHNQAATNETFTSNPPAMHVAPDNKQNNWCMNPPQNQWLVPVMSPSEGLVYKPFAGPCPPVGNLLTPFYANCAPSRLPSTPYGVPIPHQPQHMVPPGAPAMHMNYFPPFSMPVMNPGTPASAVEQGSHAAAPQPHGHMDQQSLISCNMSHPSGVWRFLASRDSEPQASSATSPFDRLQVQGDGSAPLSFFPTASAPNVQPPPSSGGRDRDQQNHVIRVVPRNAQTASVPKAQPQPSSGGRDQKNHVIRVVPHNAQTASESAAWIFRSIQMERNQNDS

SEQ ID NO: 346373 - protein, 73 aa, Zea mays
  Clone ID: MRT4577_79056C.1.pep
RGSPIVLSAGQRHTWRTAASSDLTTNGYQDISPPCAPCPFSERNRCSVVSAQCSVAPRAIIAQVLRPATSGGL

SEQ ID NO: 346374 - protein, 138 aa, Zea mays
  Clone ID: MRT4577_79057C.1.pep
SPTSGPHAYWKRGGGGQIHHIEPAENLLLLPVCILLQNLRLLVLDRTFKEVNCPMIHLHRTNTKWMTPKSNPIQKSPEMQKLVTLMPPPPPQNGLTTTRMCSCQTRTRPRAARRLVPQSSTKTSWRLVWLELGYNSLN

SEQ ID NO: 346375 - protein, 80 aa, Zea mays
  Clone ID: MRT4577_79058C.1.pep
STLYTQQHKTGYINPHHLPPATYTIILHQKPTITSLPLSLNHNHKETCSTTAYIIMHIHTKNNWQSIVSNLISHNCPRQL

SEQ ID NO: 346376 - protein, 59 aa, Zea mays
  Clone ID: MRT4577_79059C.1.pep
ATRHRSTPRPRPPSLRRAAARAAMEVFYYVVFGALVAVVVTLELDKRDKEREHTTSIHN

SEQ ID NO: 346377 - protein, 165 aa, Zea mays
  unsure (1)..(165): unsure at all Xaa locations
  Clone ID: MRT4577_7905C.1.pep
VRVAARGGGGAFGXAHRAAAFPVGVAXFLKPAVAGFLLRMGLDXLVGAVAXPEPWGGXGGGSLVSRSIGVLVSLLAXVDVLLLGGGLIYPFCWARGCSVGCSLVGEGRLGLAPSLLGVAWAVGVSLLLPAGFVVAGRFAADAGSAIGPGPAVPGGWVGLGVGPGA

SEQ ID NO: 346378 - protein, 98 aa, Zea mays
  Clone ID: MRT4577_79060C.1.pep
TQKKNKNEASPTNLQKVQEKSGERARDSNRVRLIDRSSSRDREYARIKSHDRLHDRERERDSRQSRSYDSRSHRRSYSPRGSSRDYDRSGRHERRDRY

SEQ ID NO: 346379 - protein, 410 aa, Zea mays
  Clone ID: MRT4577_79061C.1.pep
MDAIRKQLDQLMGANRNGDVREVSRKYYDRDVCRLYLAGLCPHDLFQLTKMDMGPCPKLHSLQLRKEYEEAKAKGTDNYDRELEETIERLIVECERKIQRALKRLEEEDAKAAIAISVTEVTQTKEVMELSKQIRQKMKDIDAFDLEGNTEGKIRATEELDKLKEQRAEEQAKMLLEAFNKDRASLINSLQNATQTTTPVPPAAPDARTQEMINEKLKKAEELGENGMVDEAQKLLDEAEALKKLATRPQAVPDSTKMSAHVQITDQKLRLCDICGAFLSVYDSDRRLADHFGGKLHMGYMLIRERLSELQEEKNKKRKLDRAEYDRRSRERSGERARDSSRDRYIDRSSSRDREYDRRRSHDRYHDRERERDSRQSRSYDSRSHRRSYSPRGSSRDYDRSGRHERRDRY

SEQ ID NO: 346380 - protein, 62 aa, Zea mays
  Clone ID: MRT4577_79062C.1.pep
MFGRAPKKSDNTKYYEILGVPKSASQDDLKKAYRKAAIKNHPDKGGDPEKVFHPLSPLPIWP

SEQ ID NO: 346381 - protein, 166 aa, Zea mays
  unsure (1)..(166): unsure at all Xaa locations
  Clone ID: MRT4577_79063C.1.pep
MEKEKANWDAHHITIFXEICKDEVDAGNRPKGCLNRRGYTHLEDKFFDRTRKRCSQNQFKNKRDMLKRQYVQFMLLKNAATGLGWDDVNKTIIADDDWWKIHLKKNPKHAKYKKKXLANLEEIHVMFANAHVTXATSSIPGEMSDNTNDDDMPDVGEESEEDGNAL

SEQ ID NO: 346382 - protein, 170 aa, Zea mays
  unsure (1)..(170): unsure at all Xaa locations
  Clone ID: MRT4577_79064C.1.pep
RPRRHPXPGTAQHRPPGPTXTXRSTXQPQXGRRRRHTRGRPGARRRRQARPPQRQARARRQPAPAKPARRRRHRHARSRRRPPPRQGPRRKGQREPGQHAGRERQPXGPPPSPSARKPSPEPQRQTATTSRXRTTRPGTRTPAPTTPPQPAPTPPRNGTSAHDPAHGHRQ

SEQ ID NO: 346383 - protein, 803 aa, Zea mays
  Clone ID: MRT4577_79065C.1.pep
MAEFMRGHPPVFAHSVDPMDAEDWLCTIERELHTAQCNGCEKVLYGPCLLRGAAQSWWESYLATHADLEAITWEEFRDNSQSGSRSHPRYSSNPSKQFKQGHQHQHQRQHQQQYQRQFPQQQHQQYRQNNQQGGSQYQRQNNQSDRMCPNLRIEIRGIYFPVNLVVMGTQGLDVILGMKWLYKNKATVSCDKRTVKLVSPSGKEVVTKLYLPELEGACQYLSVDDKEANLIEDIIIVSKFLDVFPGELPGMPPERKVEFTIELILGTALISKRAYRVSRPKLVELKKQIDELLEKGYIRPSTSPWVAPVLFVDKKDGTKRMCIDYRSLNEVTIKNKIRPSDVPKTTFITKYGVYEFTVMSFGLTNALAYFMYLMNNVFMDYLDQFVVVFIDDILVYSQNEQEHEEHLRKVLQRLRDYQLYAKLSKCEFWISEVLFLGHIINRDGLVVDPKKGFSKVARPMTALLAKKVEFKWTPACQESFEMLKKKLTTALKCDIYMDHKSLKYIFTQQSNVVADALSRKSQVNMLAGYPMLYELGKEFDRLSLGFLKNTQGVTVELEPTLEQDIRKGQKDDEKINEIRQLIIDRKGPDFCEDAEGVVWFKDRLCVPDIKSIQELILKEAHETTYSIHTGSEKMYQDLKKRFWWYSMKREIAEYVARCDSCQRIKAEHQRPTGLLQSLQIPQWKWDEIRMDFIVGLPRTRAGYDSIRIVVDRLTKAAHVIRVKTTYSSAVLAELYMSQITDGQTERTNQILEDMLRTCALQDKLGWDKRLPYAEFSYNNNYQTSLKMSPFQALYGRNCRTPLH

SEQ ID NO: 346384 - protein, 118 aa, Zea mays
  Clone ID: MRT4577_79066C.1.pep
PSPVPGAIRCGFSVPFFSNNPRGSSRPFLRPRLPPPFRGFWAFNFTNPVPSLLNQLPGVFSFWGTLACGYNVMGPLPSSPARLFSPFPPFGYVVSPPPLGGRFGHSPDCPFLWEGIFF

SEQ ID NO: 346385 - protein, 83 aa, Zea mays
  Clone ID: MRT4577_79067C.1.pep
TGDRHPKFGDGVLIGAGASVLGNVRVGAGAKIGAGAVVLRDVPEGTTAVGNPAKAVGKKAAPQRRPEEQPGVTMEQGWSDYVI

SEQ ID NO: 346386 - protein, 28 aa, Zea mays
  Clone ID: MRT4577_79068C.1.pep
PGSVTVRDLRRCNTVASLMPVMNRHIIL

SEQ ID NO: 346387 - protein, 48 aa, Zea mays
  unsure (1)..(48): unsure at all Xaa locations
  Clone ID: MRT4577_79069C.1.pep
TIMEXRSAIEXLRSQXLSXSVSXRHHSXAXXLVLQSPRXSXGNXKXSP

SEQ ID NO: 346388 - protein, 88 aa, Zea mays
  Clone ID: MRT4577_7906C.1.pep
ASLPLLSPPPALSRGDDWAGVAAALHGYAQVLFGPLAVTSTTRESKRLTFWLEPMDFEGYGFRGSTFQQTYSWYDAPVIDKRQHDAVD

SEQ ID NO: 346389 - protein, 67 aa, Zea mays
  Clone ID: MRT4577_79070C.1.pep
LRGGSICHLGWANFWKGDWWGPFWFYANLGKGDFVQSDLIWVRQGFSSSDGVKRRAVELYLVAPKER

SEQ ID NO: 346390 - protein, 36 aa, Zea mays
  Clone ID: MRT4577_79071C.1.pep
RMVLILMWIKFHNFVVSTYIRAYNTGKTNCEKIWWL

SEQ ID NO: 346391 - protein, 87 aa, Zea mays
  Clone ID: MRT4577_79072C.1.pep
VVAVMLVFQAVETTSVAAITCGYVRSAIAPWLFYSRKKLTRPCGGAVACSWNLNSLIKIVAFWLTYCNCLNNNTLGYDMDSTSLMPT

SEQ ID NO: 346392 - protein, 102 aa, Zea mays
  Clone ID: MRT4577_79073C.1.pep
MGGLGGATTTSVCALSLLSALLLLHYCLLLAPSAAVVSKERTQSRKLLQSLVVVARVSSDSEKARPEVVRAAAKPAAMGPGGAAVSENLKKQTPSRSNPIQN

SEQ ID NO: 346393 - protein, 117 aa, Zea mays
  unsure (1)..(117): unsure at all Xaa locations
  Clone ID: MRT4577_79074C.1.pep
KQERLYPKCEIFLLGSHLPVAWAILVISAPAPFCSNSATSSPFPLIHLPSPFADLVKGPSFLXKVVLTGALNFCAEIYLYGGQVTLLNNDNGEYLLFLXSINAYFKPPKSISGCIPI

SEQ ID NO: 346394 - protein, 119 aa, Zea mays
  unsure (1)..(119): unsure at all Xaa locations
  Clone ID: MRT4577_79075C.1.pep
NLLXLLALSTCVANATIFPQCSQAPIFSLFPPYLPSIIASLCENPPLQPYTLQQAISASNIPLSPFLFQQSPALSLVQTLVQTINSHQLQQTLLPVINQITFSNLSSYSSXQQFVPFNP

SEQ ID NO: 346395 - protein, 67 aa, Zea mays
  Clone ID: MRT4577_79076C.1.pep
HCPICDRFTSTGIFSPQRHLSSVYVVCRSTHNRSRKPPPVNPADGPVCKTWVVPSDSGKGTCPRPCF

SEQ ID NO: 346396 - protein, 68 aa, Zea mays
  Clone ID: MRT4577_79077C.1.pep
VLSTMPRRRKRHVDEAQCIPSPCMLSHAFFVAFCSHSSFLWTSHVQGMRPYSDPHHSVTGSCIAAIPS

SEQ ID NO: 346397 - protein, 147 aa, Zea mays
  unsure (1)..(147): unsure at all Xaa locations
  Clone ID: MRT4577_79078C.1.pep
PKNRERDPLIWGGPQPPPKKLFLGIPPKRPPKRGPPQGRGGGRGRRGLPNQGGQGAPMGGGEKGGGGYPQPGGKKAAPGGGPKXPPPGATSGLKGGRIRGRKKPXRGPGPPMGKREXWWGPKEAPXPPGGREKXXARKKPPGPRKTG

SEQ ID NO: 346398 - protein, 147 aa, Zea mays
  unsure (1)..(147): unsure at all Xaa locations
  Clone ID: MRT4577_79079C.1.pep
TSPPLTPMPPKTVRPTTTTTTTPNITTXTTPPPSSSPXTSXKTQTTTTTTATAATTIHAPSPTTNATXISXPSSSTASPPMLKEQEEXTKTTSKTTLITPXATTLLTSLPRPTLTTNFTLPNTTTGSLSSNTSPNSTPSTESNDPST

SEQ ID NO: 346399 - protein, 48 aa, Zea mays
  unsure (1)..(48): unsure at all Xaa locations
  Clone ID: MRT4577_7907C.1.pep
DLVSVREQRVVLRLVLLVECVGSGGDGPGLCQGTACVCGPSPQSXTCL

SEQ ID NO: 346400 - protein, 47 aa, Zea mays
  Clone ID: MRT4577_79080C.1.pep
FMGWVRSLRSAGILGVLQLVYGSFMDWSAPTLSTPAPGAGSGRKDRV

SEQ ID NO: 346401 - protein, 118 aa, Zea mays
  unsure (1)..(118): unsure at all Xaa locations
  Clone ID: MRT4577_79081C.1.pep
MVPLLAAAMKHAACHPGXEAASHDPTLTSFPTRTSCALSSHHXSAEKXIDVIFTTQLAKACRHQVIQPWIPSPIPHTDCVPSDFAISAYTSADQMARAXRENGKGDCPWALFGHDHPR

SEQ ID NO: 346402 - protein, 56 aa, Zea mays
  Clone ID: MRT4577_79082C.1.pep
REGRPFFFFFFFNFFQETWVVLKDFKGILTNHAVYVTRPKAGSKANSTKLNAACLA

SEQ ID NO: 346403 - protein, 40 aa, Zea mays
  Clone ID: MRT4577_79083C.1.pep
SRGGVHHAGTRTGSMIYKPEIMAIGLVSMYWKQVKIDPQD

SEQ ID NO: 346404 - protein, 103 aa, Zea mays
  Clone ID: MRT4577_79084C.1.pep
SEVIARGGISYTINQLIKYYLIGHNVMFAASIFCFNIIQSNFCFKSPKNCSGRRKAFEVCLPFRILSSEGCNNQNPRNNKVILHQTGIRLSCCWDRPLCMWRK

SEQ ID NO: 346405 - protein, 89 aa, Zea mays
  Clone ID: MRT4577_79085C.1.pep
GSRAPGRTGRRNAQRSRRRTTSPASTRTAPRTTYRPVLKRSMHGISCAHQWSWDLKGQMHQKVPERPSGGTSQRSGASPPPSAAGARIN

SEQ ID NO: 346406 - protein, 55 aa, Zea mays
  Clone ID: MRT4577_79086C.1.pep
SGGQRGGGHGQRRQPTRDHADGAVPCALVGNPGPHGSRDDGLGSCCLSLGASCRI

SEQ ID NO: 346407 - protein, 119 aa, Zea mays
  unsure (1)..(119): unsure at all Xaa locations
  Clone ID: MRT4577_79087C.1.pep
VPTRYPCVISFNDSMRDTSNYPFVYGNDSAXAQAALRPHYAKTFFNRAYGRASNVRLVVFFSRTTTALSFVRPHLSQRTPDDSQRGPYFDLILDTCLRTYSYRVTCFHPCETKWTATCR

SEQ ID NO: 346408 - protein, 55 aa, Zea mays
  Clone ID: MRT4577_79088C.1.pep
RPYSNTISLLDKTITRLARVFLNIILNHMNYNITKNMRPMNTKPLQHINHDQDYQ

SEQ ID NO: 346409 - protein, 72 aa, Zea mays
  Clone ID: MRT4577_7908C.1.pep
SAGGLACPPSVQEVDNVLVHLFLHASSRRSEASPPSKSHGSVLSLFPLAIVARVGSLSFTLDLVARLGREDE

SEQ ID NO: 346410 - protein, 57 aa, Zea mays
  Clone ID: MRT4577_79090C.1.pep
QLPAPGKPTEFEQRLIFEIYKSIVASKELTTMLHSSAAHLPPAASAAGLPSTHLLDM

SEQ ID NO: 346411 - protein, 256 aa, Zea mays
  Clone ID: MRT4577_79091C.1.pep
MATALPASASAACLLQLSRRGLPGTSSVLSPLRTATFRWHGACNVACSCSPGPRPAVPAERRDGVAGHATSPEGTVRIVAVVGEGSISPIKDAPWEEVMRHTADRLKWVDEGFEMLVFTDNLVGHDNLRKELLSHCDMLVNVAITNQDAVQWLINNSKHISNVICFQSSPSLVNKLGGTYVQYTGEQDMFGKLTSIGKPSGIEESTEVMKTISNAWERHNSDDIRFCLLVVVNAYIRPVAMLKNLRAKGLSTLTCM

SEQ ID NO: 346412 - protein, 82 aa, Zea mays
  Clone ID: MRT4577_79092C.1.pep
KAFVFAHHKRALSGSSHYFLLGQDSPPCRVMPLPPILGSCSCLYNTNSAEARTSTLHHHRRAPASSKLLTPSPLQAVSPSIN

SEQ ID NO: 346413 - protein, 76 aa, Zea mays
  unsure (1)..(76): unsure at all Xaa locations
  Clone ID: MRT4577_79093C.1.pep
ESFSFFXKVVPPIPEFFFFGFGKPIHPVSLXLRKFFFSIGMKLKPVVSRNGVSPFNFFTQEGRPVAPPVFPFGVPC

SEQ ID NO: 346414 - protein, 100 aa, Zea mays
  Clone ID: MRT4577_79094C.1.pep
FVFYQLLRLAFILSASLGFRRCQGLRFRPKTSPSARRLRLLLACSPAASLWLDTFFSFVFRRPFRFDRYLDPDPFGDHIQLPLLEILLLFGDPVASVRGD

SEQ ID NO: 346415 - protein, 80 aa, Zea mays
  Clone ID: MRT4577_79095C.1.pep
SACGQGMVRGKCERAHNLQIRQTRLGDKRIKFRSIELTKLKDYIIILFFYLLYFFLFIIWNRWSIFLFSFQLFNQVIANN

SEQ ID NO: 346416 - protein, 104 aa, Zea mays
  Clone ID: MRT4577_79096C.1.pep
SPSVGTPHLAFSPSCFVSLSSSPCHLGFVGVKDSTFARRLRLLLAYSPAVSLWLDAFFSFVFRRPFRLGRYLVPDPFVDHIEPPLLEILLLFGILLLQCVEIEI

SEQ ID NO: 346417 - protein, 208 aa, Zea mays
  Clone ID: MRT4577_79097C.1.pep
AFILSASLGFRRCQGLRFRPKTSPSARRLRLLLACSPAASLCIRLSQVGDFRLCSLRPRRRRRRRSVHGGRLLHERIDSIARYGYLELAIEQMAETANATNALDHGLHYLRSTDNACAARALLWWGWENSDAHAGMASSVELSLFLPPSVNFLGSCLLRQLHVLTADVAATHRLLCSSSGEHPLLEPPWRSATGRHDSSSPSDASRLF

SEQ ID NO: 346418 - protein, 115 aa, Zea mays
  Clone ID: MRT4577_79098C.1.pep
SCIFQHSSCRPSSSSRFRVLVALLRTSTSLLSQSRTFKLEVDVVTHTYSAEPVSAVADLRAHHRLVPKLSGCRTPAILGWDCLIGVVECPPSVSVHRHLRHPEVTFVCPLMHRAH

SEQ ID NO: 346419 - protein, 113 aa, Zea mays
  Clone ID: MRT4577_79099C.1.pep
THENTIDVSILLLTHFVKQAACIAWGAAVMTLYSRAPWWFEQWMFAGGEAQETVCGGNISREYRKFAEGGKNRGSHRRRQEQGKFDGSGHTSVSIRVLPYPPYQRPRRTCIAG

SEQ ID NO: 346420 - protein, 97 aa, Zea mays
  Clone ID: MRT4577_7909C.1.pep
RRTCTPLLASLHYITHEPVYPMPFRTSLLLPVGSAQQKKLAQTGDIQLLASLPSQRTWLAMGGGMVPISERRKMAAARCHGGKWETKKRRWCLGSRP

SEQ ID NO: 346421 - protein, 129 aa, Zea mays
  Clone ID: MRT4577_790C.1.pep
EAGGQGADKKKLTDQRDLFQRILDFVKYGDCPEESIKIAGKRDVLRVSSWSELIQLNFLKGFLGKGFLKHVQENGLLQDIFDIKVDKTETLSSTNKKIFRSEEEKGRALKLNKERRLAQVRKNAVMLDD

SEQ ID NO: 346422 - protein, 79 aa, Zea mays
  Clone ID: MRT4577_79100C.1.pep
MRESRSPIGLNMNSTFVGISTSIQEMFRRVNQQFTAMFKRRGPLHWYTGERLLEKGCHQGGLHDERPEPSEETGPARKC

SEQ ID NO: 346423 - protein, 55 aa, Zea mays
  Clone ID: MRT4577_79101C.1.pep
NTTTTFNIMRGDHLLYPNHLDLEIILNVCFEEDAHLFRNSFVAFVARAMCSVCVV

SEQ ID NO: 346424 - protein, 212 aa, Zea mays
  Clone ID: MRT4577_79102C.1.pep
GTPGFGRGRLRLLLACSPVASLCIRVAQVGDFRLCSLRPRRRRRRRSVHGGRLLHERIDSIARYGYLELAIEQMAETADATNAFFFGLHYLRSTDNACAARALLWWGWENSDAHAADVAATHRLLCSSSGEHPLLEPPWRSATGRHDSSSPSDASRLFDEIIFDRNKGFVMRSATGRHDSSSPSDASRLFDEMCEKQNEHARVLGPLCDPNN

SEQ ID NO: 346425 - protein, 228 aa, Zea mays
  Clone ID: MRT4577_79103C.1.pep
TISIFFWLTGSQEVQMNIWFQICASIISSCQLGRRHVYFHSCALILASSIVSFRCTTDLVCVKCIRLSQVGDFRLCSLRPRRRRRRRSIHVGRLLHGRIDATACYGYLELAIEQMAETADASNALDHGLHYLRSTGNACAARALLCWGWENSDAHAGRHDSSSPSDASRLFYEMCEKQNRDINSVFMCLIQIYFCPKVLLNRHQLREGVCFLRTYQEHHHFWTMNASL

SEQ ID NO: 346426 - protein, 185 aa, Zea mays
  Clone ID: MRT4577_79104C.1.pep
PRVRHASATRPLAFYQLLRLAFILSASLGFRRCQGLRFRPKTSPSARRLRLLLACSPAASLCIRLSQVGDFRLCSLRPRRRRRRRSVHGGRLLHERIDSIARYGYLELAIEQMAETANATNALDHGLHYLRSTDNACAARALLWWGWENSDAHAGRHDSSSPSDASRLFDEMCEKKNRDINGVFM

SEQ ID NO: 346427 - protein, 45 aa, Zea mays
  Clone ID: MRT4577_79105C.1.pep
QVFIQYRITVVLFFNSIMCQLVTGWSISRTAFVIAMGWVLLLWVI

SEQ ID NO: 346428 - protein, 35 aa, Zea mays
  Clone ID: MRT4577_79106C.1.pep
EAPFICSAILFRSMHRIKLICLEWIFKISKRGRVG

SEQ ID NO: 346429 - protein, 64 aa, Zea mays
  Clone ID: MRT4577_79107C.1.pep
YQTQGFGPGRYQGESFVLLMMVLSMGGLGLLINISTLSISHIRTGQLSECTTFITVQDSCEYKV

SEQ ID NO: 346430 - protein, 94 aa, Zea mays
  Clone ID: MRT4577_79108C.1.pep
MKRAPAVCLLATLLAFYFLVPSIAVALSRVQKMAMQEDGQIPSVQSSTLQPKMKNEKFVPEDDESVITARMAFETQDYAPPGPNNHHKPPAGWR

SEQ ID NO: 346431 - protein, 83 aa, Zea mays
  Clone ID: MRT4577_79109C.1.pep
AESVAPYALHFSVKASSSPVHKESPPCRFFFLSCWNGWQSCAFHWTSTGGESSRQSPQRLIGPSRLILNTADRRTRLLFFRHR

SEQ ID NO: 346432 - protein, 77 aa, Zea mays
  unsure (1)..(77): unsure at all Xaa locations
  Clone ID: MRT4577_7910C.1.pep
IRVIKFLECSGLTHIWEQYFLHSCLNKNCWYIYFNCKACILFIHNLGMAFLFFKKKFTTPPIINSTKKKKKKKKXLX

SEQ ID NO: 346433 - protein, 62 aa, Zea mays
  Clone ID: MRT4577_79110C.1.pep
SAQADYDHLTPAERRYIEQKQKIDVHKLAKVADKSHRDRIQDFNQYLANLSEHYDIPKVGPG

SEQ ID NO: 346434 - protein, 112 aa, Zea mays
  unsure (1)..(112): unsure at all Xaa locations
  Clone ID: MRT4577_79111C.1.pep
QLNKLRKLHRAASIIYADCYGGAMWIFLSRARYSMEYPVVACCGGQAPYGVSPSTGCGYLRIXLSHNPHKYGSWHGFHPSNFAPRASSMXVLFGSYTRRSFTSPSASCPQFM

SEQ ID NO: 346435 - protein, 47 aa, Zea mays
  Clone ID: MRT4577_79112C.1.pep
THIKQRAQPTGHQKLPQKEPLNIWRSKHITRLPYTFYMKRLVLKALK

SEQ ID NO: 346436 - protein, 88 aa, Zea mays
  unsure (1)..(88): unsure at all Xaa locations
  Clone ID: MRT4577_79113C.1.pep
PTRTSTISPSIKLSLSLNLRSQPAGVNTMIDCMCSQPDGVLTYNVSTXIWTQFAIPLSLHLTDHTLAEIHRKVIHMCLLCIYAFTCIY

SEQ ID NO: 346437 - protein, 137 aa, Zea mays
  Clone ID: MRT4577_79114C.1.pep
SIGAPTKNPMGLSTVIFPTISPFPKGKIGCSLLGPPQLFMGGTPLCFWPPPVFAKQPGLPPSVGKKRPWVFFKLVSGGPPELVSKFCPLLGGLGKKTTRAGFKKVFSPPGPGYFMCPLKIRFQNLGGKIPFFVFFGG

SEQ ID NO: 346438 - protein, 146 aa, Zea mays
  Clone ID: MRT4577_79115C.1.pep
PRAGGRRTVPARSSPEIRTPSCPRPVPCPPPHTTETTAMMEPPPPRAPHRSRARLAGRLDELLPIVGGRHWQPSSFRGGVDPPLGQGAEFRPTPLPRPSRPSPVLRRDSELVVFCLGSARPRGWHVRWQLGALQPRACILWRRFGD

SEQ ID NO: 346439 - protein, 130 aa, Zea mays
  Clone ID: MRT4577_79116C.1.pep
SIPLHRPNSMFNSHGELIHQTEHHNFFFYFYPLPLGLTGGPLVCQPPSRGGMNCFFWEPSRKPSTTQAEEEHGGPCPPKTLKLKSSFYQPTCHEAKQRGLVHDIQVPGTDAEGPRERTPGGYPRAGWLTT

SEQ ID NO: 346440 - protein, 106 aa, Zea mays
  Clone ID: MRT4577_79117C.1.pep
LSLDINELVQTSGTKHKRTGRDSHNQRSIDRSVTNCKVASFFVAADHCVLWHSKLRIMAMTSATMEQHIYQGTIFLRWMCSLAPLAELDDGAVPHADGFLVSPVRR

SEQ ID NO: 346441 - protein, 159 aa, Zea mays
  unsure (1)..(159): unsure at all Xaa locations
  Clone ID: MRT4577_79118C.1.pep
SSFLVCGRSGVARTVLGYADAVAHHAGQAVAEGAKIINERVSTQNYKSVKQTVKRLEEVAVSSRRDERVQVLRRWLGALQEVEAEVGGSGGSQRQNVSISKPNSSKPSLAKVLFYDADIGGPSMNFRDVLLYSHALEGITLSMILELLXGEEVSLLLEI

SEQ ID NO: 346442 - protein, 304 aa, Zea mays
  Clone ID: MRT4577_79119C.1.pep
MIVDKFEEVLQTAALPAAASVAPIPSVIPGSEPIYQVAGDAGQKVLWVVFAIMLVASGAFTLMSWNVPLNKRLYHVVTTIITLTAALSYFAMATAHGVSLTKIVEREQHDHVPDTFTTTYREVYWARYVDWTITTPLLLLDLGLLAGMAGGHLIMMIVADIFMVLTGLFAAFGSEDTPQKWGWYTISCISFIFVFWHLGLNGGANANAKGEKLRGFFVSISVYTAILWTAYPIVWGIADGARKVSVDTEIIAYAILDVLAKAVFGAWLLIVHSNMRESDAELNGFWANGLSRDGAIRIGEDDGA

SEQ ID NO: 346443 - protein, 122 aa, Zea mays
  unsure (1)..(122): unsure at all Xaa locations
  Clone ID: MRT4577_7911C.1.pep
AIIRGPRSKPVLPLQPERDSSPWSEDTKAKECSLHNDIIDRDSQAAAPMFVNCNGSAVAPNIFMSPSVVCLTTTLIHNLVRLKNRSXPWLXILARSXCSFCQAMEAYYVELAEKLAVSGVKV

SEQ ID NO: 346444 - protein, 57 aa, Zea mays
  Clone ID: MRT4577_79120C.1.pep
LKGGVAHQSQQASLHDMYKRMNSGGFDATHRSLNEATNALGDGAGKEGEKAGLRTRG

SEQ ID NO: 346445 - protein, 90 aa, Zea mays
  Clone ID: MRT4577_79121C.1.pep
GCCKEGVGREGRFKPGSYFGGVPLSFWSLGGGKVNCWLSASRYFRLKKRSWGPLAPRFRGWEGRCGFPLVWVAFVGPPRWGALACLCFSR

SEQ ID NO: 346446 - protein, 88 aa, Zea mays
  Clone ID: MRT4577_79122C.1.pep
VHFSWAFGCLPSGRPLFMGIGHPPPPSLVPGPLVSPAPPLCLLQASPPPRAWPPSVSFFRGGVGFLLPPVFFSLKQPPGLSFLCGAPP

SEQ ID NO: 346447 - protein, 74 aa, Zea mays
  Clone ID: MRT4577_79123C.1.pep
KRINRVLYKWMNGAQHHRASPTNLSEPRSYTVATRTNRYAASPTESNAEWNMDIGWKKKKWEKKKKNYPGRPRG

SEQ ID NO: 346448 - protein, 125 aa, Zea mays
  Clone ID: MRT4577_79124C.1.pep
MIAHVISRRCYGENKGHTTGMCHVTIQKQKEIAEAAAQQAQPKQVMHTASYHSPYIPEYVGNHPAVSVASASQPQASWQQPQPPPPTQRGQQPEGSQHAPHQRDFREQSEARTVNSTVPESKHIY

SEQ ID NO: 346449 - protein, 119 aa, Zea mays
  unsure (1)..(119): unsure at all Xaa locations
  Clone ID: MRT4577_79125C.1.pep
PPXQTXXLXLXLHHXTXXXCGXLLTECRXXIPSXXDGXKVIIGDIMIDHCGPXXFSHLLMDIGMMTMTKGRQRDXKKLSELFTKARFNQYKILKEFXTXVSFEIYPLDFTWTIHIYLHT

SEQ ID NO: 346450 - protein, 104 aa, Zea mays
  Clone ID: MRT4577_79126C.1.pep
VIQLLQNPPSTTRPITRLPVPPSNQQSDYHWKYSSHLAPTRSPRPMITKLDHPPETCTPMYQADKPNKIDTRVDLIPRSESSPTCPYTRSLRIVRYSLSRIPLK

SEQ ID NO: 346451 - protein, 98 aa, Zea mays
  unsure (1)..(98): unsure at all Xaa locations
  Clone ID: MRT4577_79127C.1.pep
MAASVERHLAPHPWPANAPPKSFDMFRSGGPGGKRRTGPDSDSEDEDSIPPDWRSLYSPRLEVEPSAHDPRDEATSDAWVRRHPALVRLTXKHPFNSE

SEQ ID NO: 346452 - protein, 118 aa, Zea mays
  Clone ID: MRT4577_79128C.1.pep
NQTGGGKEKKREDDLGSLTPLRSTKVGRADPPALSSALVPGGGRHSPVDGKIRSGGVFNHPSHRGQRVCAACIQQAMAVSLQPATAYCATVKGARAAHFQQNRRLDWLQQGPLKGPVP

SEQ ID NO: 346453 - protein, 56 aa, Zea mays
  Clone ID: MRT4577_79129C.1.pep
TWNNFGGEIFSKHNTYTIHDAHFTTHNCTLRTPSTYQQSLQLHSNFSNTHPSKVYY

SEQ ID NO: 346454 - protein, 106 aa, Zea mays
  unsure (1)..(106): unsure at all Xaa locations
  Clone ID: MRT4577_7912C.1.pep
MADELCSMSVGQKFHGQSVLLSRISSYSAMNNPVFNNAYSAYNVPQRSYHGMNATAGLSSVMAPSPVFASAPKEKGFSXFMIDXMMGGVSAAVFMTAAASIERVML

SEQ ID NO: 346455 - protein, 70 aa, Zea mays
  Clone ID: MRT4577_79130C.1.pep
RGALMDGDRDFLMGKLALCLIVSFLAFVYGLFVVYCLQCSIIFLIYCIIFCFFKFSFFVRKDWRKDWVDG

SEQ ID NO: 346456 - protein, 48 aa, Zea mays
  Clone ID: MRT4577_79131C.1.pep
MGKSKKGGSSSHHSNDKRKREPTPPSEDFGDSEYSEEEFSSESEGSPP

SEQ ID NO: 346457 - protein, 77 aa, Zea mays
  unsure (1)..(77): unsure at all Xaa locations
  Clone ID: MRT4577_79132C.1.pep
LRWWTKEVEVFWEWREFLWQXSSCPYHQQYYVHLPCWILGVLVVMPPCRHSEYILKQEELFGIQSVVFLDGKSGRLV

SEQ ID NO: 346458 - protein, 91 aa, Zea mays
  Clone ID: MRT4577_79133C.1.pep
LYSNTRHRRRLPRALGRRGAVVAGRARDRPLPGGEAAERVHLPRPHRSLPPPRAGRSPAARPSRDHHLALRTSLVFEQRLRCGRRGWRGNV

SEQ ID NO: 346459 - protein, 77 aa, Zea mays
  Clone ID: MRT4577_79134C.1.pep
LASSHGLLLAPLRPPPLSPTPPPTRGILHRYGRGANRRTQASHQLRPLHLRPVPLSKDEAKAIIERMKAVGAKVVMD

SEQ ID NO: 346460 - protein, 194 aa, Zea mays
  Clone ID: MRT4577_79135C.1.pep
MASSLLRSGHRLFLRRHRLPAAFSTATAEELIDVRKLPTNYDPSTFDPSSPSRPPPSDRVWRLVEDVSSLTLAETAALSSLLLRRLDIPSAPPIAILNSAAGLGGAATAGAAGEKAGAAGAAEKTVFELRLEGYDAASKIKVIKEIRSFTDLGLKEAKELVEKAPAVIKGGLSKDEAKAIIERMKAVGAKVVMD

SEQ ID NO: 346461 - protein, 54 aa, Zea mays
  unsure (1)..(54): unsure at all Xaa locations
  Clone ID: MRT4577_79136C.1.pep
LALMIWEIQPPPPGALGLAHGFDVDGEAGVKILLXVFDTTHGVKKARLGRGSIT

SEQ ID NO: 346462 - protein, 75 aa, Zea mays
  Clone ID: MRT4577_79137C.1.pep
LFHSILQANLFMVTHTRVGLHLQPFHSFPCPPHFALPNHHNTDSPPTTYLNILIHTYLSNSAPTSSEHPDYSTGT

SEQ ID NO: 346463 - protein, 89 aa, Zea mays
  Clone ID: MRT4577_79138C.1.pep
GGSAEADGLASEPAWEPMGDTARCCGRPTRSGPMARTYMTNNYGAPPSSYTLCSIPCPLMLIWPNYRITWLKKRSLRETQTMICCRYLK

SEQ ID NO: 346464 - protein, 96 aa, Zea mays
  Clone ID: MRT4577_79139C.1.pep
MAIVYTLVARCTEVLAEFAAVSGNAGAEARWILEKLSADAETRLVFAQDRDIFHVLRSDADSITFLCMVNDTFGRRILFFYLEAIQMRFMKNYGRC

SEQ ID NO: 346465 - protein, 104 aa, Zea mays
  unsure (1)..(104): unsure at all Xaa locations
  Clone ID: MRT4577_7913C.1.pep
AARTSRGRQDAGFSTLRSRTRDHPARPCRKKGYIPLTTYLRTYKIGDYVDVKENGAVHKEEPHKVYHSRTGRGCNASXRDISEEPNKHVKGRIMFFFFPHPPAV

SEQ ID NO: 346466 - protein, 87 aa, Zea mays
  Clone ID: MRT4577_79140C.1.pep
INPSKLNSLFHFKVTIEHPLRTDGGYYRFVRSVIVNRLIGRGSKSGIHARLPAGSTQILTFRREDQRSYRSVDSALALCSESSMVAP

SEQ ID NO: 346467 - protein, 56 aa, Zea mays
  Clone ID: MRT4577_79141C.1.pep
SGEPSTMIHLRFPALRTVRRSVEEEGEEGDDERRGDGHCGGGGGAGERNSRAADRA

SEQ ID NO: 346468 - protein, 166 aa, Zea mays
  Clone ID: MRT4577_79142C.1.pep
KQSLGSLPPFSIKKKSSSKGLHAPQSFRLNNTRSMQANEATKRAEAPKPHAKKGNKKRANPPPQSPVKQKNTTGSGGGPHFFNKQPYQLFPTEKGKTQIFAPGVQGEQKNNQDRRTDLPLKFQQPQGAPKAGKTKPACSPQTRRGPKLPAPPTLERASHPNKKTGD

SEQ ID NO: 346469 - protein, 139 aa, Zea mays
  Clone ID: MRT4577_79143C.1.pep
MLEERSGDAGFTKDAYALKWTFNNDLGLVFVAVYQGMLHLLYVDDLLAAVRKEFSQIYNPKRVSYDDLFTETLRQLHLEGEARAEDMKKTGSSPTTPPLAVPCVRPEDSSSPPETALSMAYLHRTRISNLIHYCCLPGD

SEQ ID NO: 346470 - protein, 234 aa, Zea mays
  unsure (1)..(234): unsure at all Xaa locations
  Clone ID: MRT4577_79144C.1.pep
MAPKEHIFLLLRPAIPLLVLLPLVASTTSNHSFSFLYHGFSGVNLTLDGNAMVTPDGLLELTNDTINLGHAFYPTPLSLSGSPNGTVRSFSLSFAFAILSVHDGISADGMAFFVAPTKNLSNTWAQYMGLLNSGNNGNASNHMFAVELDTTQNEEFQDMDNNHVGIDINSLNSLQAYRTXYYDDGSGSFNNLTLISGKAMQVWADYDGESTQINVFLAPLGFAKPGEALLSSPY

SEQ ID NO: 346471 - protein, 64 aa, Zea mays
  Clone ID: MRT4577_79145C.1.pep
LTTSSMEPGGGCTPACVVSFGGEWEREDYKIDPLVNGVSFIRVATAGTWCGVIYDPTSDESMHA

SEQ ID NO: 346472 - protein, 72 aa, Zea mays
  Clone ID: MRT4577_79146C.1.pep
ETQSVRVRIKRPYSTIRATTVRHYTPAEANERVPREPPLTAGSLQQTTPTAGQFFPVHGTLQGPCNLQASVF

SEQ ID NO: 346473 - protein, 394 aa, Zea mays
  Clone ID: MRT4577_79147C.1.pep
ADYNVISDLALKRVKQDLTMHGGQVCSSIAPATHLVVVSVLQVYNFDNLYKSFPPAERRYLHDKRLHVVSNKWLEDSVEKQMKLSETAYSLKPDTLEELEIERSEENVQPPEHKFEEHKEFERSHAENMPRKRSRPTSSRTARAAPRAVRRIRPRRGNQKAKIGDVESEESGPSECQDDENLDTDDTSKIEEGITNKNKGLPAPASKPAWRTRATKGNQHTKMGDGGSGPCETGKDDQKLDTDYISKMEVDNIDNDCGPPPGAQLFTLGEQEVKGVKLNTVEEKQDIPFQRTTAAEAMSSTPGEKIEQMADPLHAMLLDMLPLLGQKRTEDTSKAPLAKAEKDPPAIGSSTSNSEILLPDAGTSGVPAPEPSAAPPKKKKVSYRDVVSELLKDW

SEQ ID NO: 346474 - protein, 83 aa, Zea mays
  unsure (1)..(83): unsure at all Xaa locations
  Clone ID: MRT4577_79148C.1.pep
RPCVRVAFAMAHVQHAATASHRSACTPRSFLRLSLASQVMHSGRANMICMSTHSYXRSSRAGEGAGGDAHQQLKDSMSYNSYV

SEQ ID NO: 346475 - protein, 74 aa, Zea mays
  Clone ID: MRT4577_79149C.1.pep
ILPNIKRNGKFHPSFLVTLTLHVGPPLWGVHAHYSPHLFYQKTYLSPLLIFPPPPQNKNRYSRIRRMEDSPIFF

SEQ ID NO: 346476 - protein, 128 aa, Zea mays
  Clone ID: MRT4577_7914C.1.pep
PRVRPRVRPRVRPRVRYDCLEPVLLVGTLQDNFLASFLLGWGITIGAGLASYPIDTVRRRMMMTSGEAVKYNSSLDAFKQIVAKEGTKSLFKGAGANILRAVAGAGVLAGYDKLQVIVFGKKYGSGGG

SEQ ID NO: 346477 - protein, 46 aa, Zea mays
  Clone ID: MRT4577_79150C.1.pep
VQQGGEAHQLLGRHAVTPLHSWTVMDCVFMLSVRRIFPPPVCCKDQ

SEQ ID NO: 346478 - protein, 234 aa, Zea mays
  unsure (1)..(234): unsure at all Xaa locations
  Clone ID: MRT4577_79151C.1.pep
MFIESFRVESPHVRVMLVGWGGNNGSTLTAGVIANREGISWATKDKVQQANYYGSLTQASTIRVGSYNGEEIYAPFKSLLPMVNPDDLVFGGWDISSMNLADAMTRAKVLDIDLQKQLRPYMESMVPLPGVYDPDFTAANQGSRANNVIKGTKKEQVEQIIKDIREFKEKNKXDKVVVLWTANTERYSNVCAGLNDTMENLLASVDKNEAEISPSTLYAIACXVTERVPFINGS

SEQ ID NO: 346479 - protein, 326 aa, Zea mays
  unsure (1)..(326): unsure at all Xaa locations
  Clone ID: MRT4577_79152C.1.pep
MFIESFRVESPHVRYGPTEIESEYRYDTTELVHEAKDGASRWVVRPKSVKYNFRTSTAVPKLGVMLVGWGGNNGSTLTAGVIANREGISWATKDKVQQANYYGSLTQASTIRVGSYNGEEIYAPFKSLLPMVNPDDLVFGGWDISSMNLADAMTRAKVLDIDLQKQLRPYMESMVPLPGVYDPDFIAANQGSRANNVIKGTKKEXQVEQIIKDIREFKEKEQVGQGSVLWTANTERYSNVCAGLNDTMENLLASVDKNEAEISPSTLYAIARVTEGVPFINGSPQNTFVPGLIDLAIKNNCLIGGDDFKSGQTKMKSVLVDFLVGT

SEQ ID NO: 346480 - protein, 116 aa, Zea mays
  unsure (1)..(116): unsure at all Xaa locations
  Clone ID: MRT4577_79153C.1.pep
FLLNTAPRAFFISRRANISFFHHHHNQPXPPASVPNQVFKIFCRANXNYCLAVRDGTVLLSPLNPNDHHHHFYNDIRFITRVKDXEGMPAVALVNKATXLAIKHFLFQSHPIKLPP

SEQ ID NO: 346481 - protein, 95 aa, Zea mays
  Clone ID: MRT4577_79154C.1.pep
AVFPVTHASLFLGPSRHWRDFLIDWSAPPPFSRAITGSPSFSRKATDLPLFAGAWAQDPASRQLEKGERHGDLHNAAGEGRERLCGPRRRQRLLH

SEQ ID NO: 346482 - protein, 108 aa, Zea mays
  unsure (1)..(108): unsure at all Xaa locations
  Clone ID: MRT4577_79155C.1.pep
TIAGDDAGTRKDTNNIAEHSYKTGAWKTINEKMAPLWKTTGQSRKKTTDYIDLTPEIDTRIELLRTLRRDSARXIYVEIERARVITRIENIDEEQAKMEDDGDQKQEG

SEQ ID NO: 346483 - protein, 67 aa, Zea mays
  unsure (1)..(67): unsure at all Xaa locations
  Clone ID: MRT4577_79156C.1.pep
MTDAPFLPRGRLFRLXHPFRGVTWHTYLGGRCDVITSVAFPLALAASPLFVIGRGAYNLSHGIGVRG

SEQ ID NO: 346484 - protein, 67 aa, Zea mays
  Clone ID: MRT4577_79157C.1.pep
SGEALYAPGDQLRSSWGLPGLKKTAPPPYDLSARSLPFVAWAHSLPCCSRSGKAPRRRARNCSTTPR

SEQ ID NO: 346485 - protein, 72 aa, Zea mays
  Clone ID: MRT4577_79158C.1.pep
KDTAVVYDEVGIKLYSSCRFHHRSSHYTDYHLQENQQLRDYSRSSSPGRSYRPQYRASQQTNHPIFLPCRGC

SEQ ID NO: 346486 - protein, 95 aa, Zea mays
  Clone ID: MRT4577_79159C.1.pep
DTQLSCLDMSAQGICPSYALSSCPVCISLGACTMQLQFPAVIRVLQAVGKGAKVLEDSRPALEASSACVCVCVCVDKLSLCHPRWSAVVQSMVTA

SEQ ID NO: 346487 - protein, 162 aa, Zea mays
  Clone ID: MRT4577_7915C.1.pep
PRVRGGEKQFNGLVDVYRKTLASDGIRGLYRGFNISCVGIIVYRGLYFGMYDSLKPVLLVGTLQDNFLASFLLGWGITIGAGLASYPIDTVRRRMMMTSGEAVKYNSSLDAFKQIVAKEGTKSLFKGAGANILRAVAGAGVLAGYDKLQVIVFGKKYGSGGG

SEQ ID NO: 346488 - protein, 61 aa, Zea mays
  unsure (1)..(61): unsure at all Xaa locations
  Clone ID: MRT4577_79160C.1.pep
SPVRTLKFMTNQLLARXQYALEEIHPGRTNVYKAELKDRLAKAYEVKDHNTIFVYKFRTHF

SEQ ID NO: 346489 - protein, 70 aa, Zea mays
  Clone ID: MRT4577_79161C.1.pep
QQRTQGFDMGGGDKEQPSLTGVKGLGTIRLGGDPYSNSQAQFCQGDQKLGDLDDKPRGLILDKGRLIGGG

SEQ ID NO: 346490 - protein, 332 aa, Zea mays
  Clone ID: MRT4577_79162C.1.pep
MRSRRWHSVVAVALAAAAWWWCAAAQAQAQAQLSQSYYASTCPDVETLVRGAVTQKLQETFNAAPGTLRLFFHDCFVRGCDASVLLSGPDDEHSAGADTTLSPDALDLVTRAKAAVDADPRCANRVSCADILALAARDVVSQTGGPYYQVELGRLDGKVGTRAAVKHSLPGAGFDLDQLNKLFAANGLTQTDMIALSGGHTIGVTHCDKFVRRLYPFKGAAAGPPMNLYFLRQMRRTCPLNYSPSAFAMLDAVTPRAFDNGYYRTLQQMKGLLASDQVLFADRRSRATVNRFAANQTAFLDAFANAMAKLGRVGVKTAAADGEVRRVCTRVN

SEQ ID NO: 346491 - protein, 93 aa, Zea mays
  Clone ID: MRT4577_79163C.1.pep
SGLLSIETVNQNRFGIFARKCTHLKFKRPSRPRYIALELSPNVKAHVCNFVSFIPRSYTYVYSTPVLFTLPWHLLLRHPCIFISFQPEGTFII

SEQ ID NO: 346492 - protein, 70 aa, Zea mays
  Clone ID: MRT4577_79164C.1.pep
FFRGQNGVFLGGVFVWFKQGGGLFVFVTEGPGLLNSGGAKKEFWRRRHAEVKQEIRKGFSPKKNKKNQTK

SEQ ID NO: 346493 - protein, 55 aa, Zea mays
  Clone ID: MRT4577_79165C.1.pep
KWKEIRMNFIVELARTHAEADSKMLSLHARCRAAVQKLFESQISWLQLALLTYNI

SEQ ID NO: 346494 - protein, 141 aa, Zea mays
  unsure (1)..(141): unsure at all Xaa locations
  Clone ID: MRT4577_79166C.1.pep
EELHKKREEEYDPFTSTNAQDLAQPLVHAQIPFMIHVGNDHYMNERLXLQAERLVLPVMIMGSRGSRACLQGHTGTLVSGSYYXIHHXAYPIVIASYLVYSSHTTGDAXGTTNDMLTEPGDEPVYHYAPGVQKENLATPKQ

SEQ ID NO: 346495 - protein, 144 aa, Zea mays
  Clone ID: MRT4577_79167C.1.pep
MASQAIESHRAGAEVVTGGDAICRKKSIELLEELGLPKGFLPLEDIQEFGYNRVTGFMWLVQGKKKVEHTFKKIKQTVSYATEVTAFAEKGKLRKITGVKTKELMLWLSVVEVYVPEASPEKVTFKTGTGLSDTFDASAFALGE

SEQ ID NO: 346496 - protein, 128 aa, Zea mays
  Clone ID: MRT4577_79168C.1.pep
EQKFPGLFPRGFKKKGGTKQPPWGEPLFYGFYKKTGLLHRGGFVQGGPKRKAPNFGGPGQGKTKRPLALVPPSKKQGRGPLKIGGFLKGETLGPHGGLKNPRAFLKKKTRFRGNLNLNLWFFFPKIGG

SEQ ID NO: 346497 - protein, 227 aa, Zea mays
  Clone ID: MRT4577_79169C.1.pep
MSNGDTLDKLVVFLAKRDGIDKLVKTFQYVSKLAHWGAESSLPELAQRAKSWETASGLSRKAFRSGRFLAGFNALRRGPVPVPGELGALAVLANAGEMVYFFFDHFTWLSRAGVLEPWLARRASFVSAFGEAVGYVFFIAMDFIMIRRGLRQERELLREGAKDAAEKEVRRIRVDRVMRLMATAANAADLIIAVAETDPNPFCNHAVTLGISGLVSAWAGWYRNWPS

SEQ ID NO: 346498 - protein, 380 aa, Zea mays
  Clone ID: MRT4577_7916C.1.pep
MADELRSTSVGQKFHGQSVLLSRISSYSAMNNPVFNNAYSAYNVPQRSYHGMNATAGLSSVMAPSPVFASAPKEKGFSGFMIDFMMGGVSAAVSKTAAAPIERVKLLIQNQDEMLKTGRLSEPYKGIGDCFGRTIRDEGFVSLWRGNTANVIRYFPTQALNFAFKDHFKRMFNFKKDKDGYWKWFAGNLASGGAAGACSLFFVYSLDYARTRLANDAKAAKKGGERQFNGLVDVYRKTLASDGIRGLYRGFNISCVGIIVYRGLYFGMYDSLKPVLLVGTLQDNFLASFLLGWGITIGAGLASYPIDTVRRRMMMTSGEAVKYNSSLDAFKQIVAKEGTKSLFKGAGANILRAVAGAGVLAGYDKLQVVVFGKKYGSGGG

SEQ ID NO: 346499 - protein, 69 aa, Zea mays
  Clone ID: MRT4577_79170C.1.pep
CRKKKNLKKKNNKKNTTHQLQIKNQILHNNVHNSRQKCLNTGCFQVQPYQTTPSATRAPGPMHLTSHTR

SEQ ID NO: 346500 - protein, 56 aa, Zea mays
  Clone ID: MRT4577_79172C.1.pep
DSNLYGLQFKQQISLQITFTQELICFHEEYFRGYSPRVRPRVRPRVRPRVRPRVRP

SEQ ID NO: 346501 - protein, 48 aa, Zea mays
  unsure (1)..(48): unsure at all Xaa locations
  Clone ID: MRT4577_79173C.1.pep
VEDFFFLKKKKKKKKKKKKKKKKKNKKKKKXKKNKKKKKKKKKNTHTP

SEQ ID NO: 346502 - protein, 96 aa, Zea mays
  Clone ID: MRT4577_79174C.1.pep
VPRGRPGREYRLRLHAMLTSGTGMKGQLLLFWSEKKLKGCRKIEQSRCLLRSTCRWRLFFRSYATTYVHITSAKAPLVAAISSAISQIPNRSRFPV

SEQ ID NO: 346503 - protein, 67 aa, Zea mays
  Clone ID: MRT4577_79175C.1.pep
LVKPWRWVPIFGTHIHGLKLSPQPPFFRIVCFSFKKKKMFCFFLKGFGHVVTNVVLVNCPPKGLFFF

SEQ ID NO: 346504 - protein, 113 aa, Zea mays
  Clone ID: MRT4577_79176C.1.pep
RQTIFYTLSDLVSAHPKSLSLLAVTSKLNYADMLEKRIKSRFGKATLDVSYPILDDVLASLKLWLTLPLGDDSPPHFHTWNKKIVKLFEIEDDTENHFLALIKNEYSYTRDMF

SEQ ID NO: 346505 - protein, 119 aa, Zea mays
  unsure (1)..(119): unsure at all Xaa locations
  Clone ID: MRT4577_79177C.1.pep
MYIIFACTVFQVSSDLQFKSETLLFSFSLSLSLTPSPPPXSPPSRSGPPRARPLPAAARPRHAPPRPSPPRATTPYRVPPRRRSPRMAPPRRAPPTPPPXSPPPPHAHQRVSKPRHTHH

SEQ ID NO: 346506 - protein, 55 aa, Zea mays
  Clone ID: MRT4577_79178C.1.pep
PSTKKGIFFLKRHLFSPKIELIPLQILYPFRLGIPNSPVGIPFLKTPLKILTPNY

SEQ ID NO: 346507 - protein, 40 aa, Zea mays
  Clone ID: MRT4577_79179C.1.pep
RVKLYNMVCVNSRKFGAVIYRSLIRTRILLSENDSCFCPK

SEQ ID NO: 346508 - protein, 88 aa, Zea mays
  Clone ID: MRT4577_7917C.1.pep
HWVPRGRPEARLVYSAELGPTREPCRAWAAGSARSAGPARSAGPARHDYMFFILQNIIYIYLHFIFDIYNKCSRVLLVSLFQLVLSAC

SEQ ID NO: 346509 - protein, 33 aa, Zea mays
  Clone ID: MRT4577_79180C.1.pep
TMPPAVKVQDMMNIPTSRELELTCLDCSSSNLL

SEQ ID NO: 346510 - protein, 90 aa, Zea mays
  unsure (1)..(90): unsure at all Xaa locations
  Clone ID: MRT4577_79181C.1.pep
NVTNVAVKDLKRGYVASNSRDDPAKEAASFTSQVIIMYHPGQIGYGHAPVLDCHTSHIAVKFXGLITKIDMRPGIELGQEPKFLKNGDAG

SEQ ID NO: 346511 - protein, 152 aa, Zea mays
  unsure (1)..(152): unsure at all Xaa locations
  Clone ID: MRT4577_79182C.1.pep
MPRQRTLTSEAAGGRLLLVVVAVLLCLSVPLGRAAPPGAEVAEFPGFTGKLPSKHYAGYVTVGRHEQRKRHLYYYLAVSERNPSLDPVVIWINGGPACSGFSAFLHSFGPFRMEGSQFISTXPRITVXPYSWTKMASSSWSIPTVAIPDEDY

SEQ ID NO: 346512 - protein, 75 aa, Zea mays
  Clone ID: MRT4577_79183C.1.pep
AQQPPIKSHEPNPFARIKLTWALHTIYIIGSRWLLHPITCMGWLALTNPLLNPNDNTTNPMLNPNQIQFKSCMTP

SEQ ID NO: 346513 - protein, 63 aa, Zea mays
  Clone ID: MRT4577_79184C.1.pep
LIPLYFVAISALKAFLFPPPLFNTSCLADDYISLRLARIPKLYCSDPTISPLLYYICFLMDTV

SEQ ID NO: 346514 - protein, 177 aa, Zea mays
  Clone ID: MRT4577_79185C.1.pep
IKVGRPPLRPPRVFPFILRVGILGEIVRENHFPPGTTFALVSPKLGPRPGPPRTAPQGVEIPPKGGPAQGPRVGEGGGKKGAPTKYGSSNPRNQFWNHGSGWLVSPTPNQGKKKKAGAKKRGKIGQTAGWGGKPQPGGKSVGKKQPLVPPKKKKKKKKKKKKKKKNKKKKKKKKKAC

SEQ ID NO: 346515 - protein, 225 aa, Zea mays
  Clone ID: MRT4577_79186C.1.pep
EAWKLTPFQPLDFDEGPVLHGLADENLIGKGGAGRVYRVECPSRSGASGGTVVAVKRIWTGGKVERKLEREFESEVDVLGHVRHTNIVKLLCCLSRAETKLLVYEYMGNGSLDKWLHGHRWPAPAGSSMPARAPSVRRAPLNWPARVRVAVGAARGLSYMHHECSPPVVHRDVKCSNILLDAELNAKVADFGLARMLVEAAGTTPHDTMSAVAGTFGYMLPVRTD

SEQ ID NO: 346516 - protein, 162 aa, Zea mays
  unsure (1)..(162): unsure at all Xaa locations
  Clone ID: MRT4577_79187C.1.pep
MMSTANVSFMGFVEAHNVQDRVAKLXINWKICRGRAPRKYVQRPGDPRSGEEIASSALGGRPDXDLAVXAGREAFQRGXWTRMTXHERVRILHRDEELVDKHSXDLAQLDTRDDDELLRARKGRCIPGGAHLLXYYCDADREADGETFKMWHCMYDDMLKEP

SEQ ID NO: 346517 - protein, 118 aa, Zea mays
  unsure (1)..(118): unsure at all Xaa locations
  Clone ID: MRT4577_79188C.1.pep
EFFLKGSLDLELFLVETTGLSWATRYQITLDTTXGXLNYLHEKFRVCIMHCDVNTENILLGESFMPKAADITLAELLGRDVMLVLTTLRGTRCYLAPEWISDVAITVKAEVFSYGMML

SEQ ID NO: 346518 - protein, 138 aa, Zea mays
  Clone ID: MRT4577_79189C.1.pep
PVDHARPCPDSELDSSGPVLPLPPRSLQRSRPVCHSLRWRSQESRTRAGKSRLAVGSWGLYRGRGFMLQSRAARARPLSRSLERNEHMPRHVCRVHSGLRYGTAKYHGLTTVTAVHGWDGVIITTRSVNTLISLHAGL

SEQ ID NO: 346519 - protein, 86 aa, Zea mays
  Clone ID: MRT4577_7918C.1.pep
SNFHHIPLSPYIFFLGHPNSNPPPQLLHSLNGKNHALSKFKFFATIPLFTRWVNTKVARPIPPSKYCPTLIFKWTPPLSPPLTLGV

SEQ ID NO: 346520 - protein, 94 aa, Zea mays
  Clone ID: MRT4577_79190C.1.pep
WPVNACSSARGPTTDACHRGGSRRSTRSRGTSSRSPSRRPRISGAALRLRRGGGCRDRRQQVCVSLLLRDGAWRHRGAGAQRSSMGLGFVESGT

SEQ ID NO: 346521 - protein, 211 aa, Zea mays
  Clone ID: MRT4577_79191C.1.pep
SAGLSPFSHLLSTAQAPVLLLALPPPPGSFMCRSPPPSPTPAEWDFNSAEPSLCLPVSSPSLQMENEVAAISSVSPSLPHSSLVETAAPLLTLMALTTPFLSPALPLLFPLSINRELMTRGACSWLPNLSTRSVFSLVVELAAAAPIRHRRSHRTPPVASTWVPERLVDPAAGVPLSRLPVGVPASSLTITSSPVALCVETEKRRLKVEER

SEQ ID NO: 346522 - protein, 107 aa, Zea mays
  unsure (1)..(107): unsure at all Xaa locations
  Clone ID: MRT4577_79192C.1.pep
IVGPDGKVWGQFQNFPQVKPXEGSWIIKDFYXPGTFAPTGFFVGGSKDKVIPGXPGGVNPRKKGPGGLSIQKTGKXLITGFKINPXTPGPSQKVVERVGDYLIEQGF

SEQ ID NO: 346523 - protein, 175 aa, Zea mays
  unsure (1)..(175): unsure at all Xaa locations
  Clone ID: MRT4577_79193C.1.pep
MKPCQWSPNTKTTQPGLHSPTRGWGTKISIPIFSSEGGLFGKGRYKGGALGAIGLLGLWSMFAASVTLGLSSVDLATTLGDASDPFIDELDPLDXAVSTMLNCXNSYPYMNFSLHWGRGMGQREKLGRRMGDVSTRPDIHVRLPRFWQEALGAAFEELAGGVALPTGAGGGGWGG

SEQ ID NO: 346524 - protein, 65 aa, Zea mays
  Clone ID: MRT4577_79194C.1.pep
ARPASDPCTGCKTRNGRGKYTEYVLSTFYERSPMASFSVLHSSTEIDFFSINHPVPVYGVVSYKT

SEQ ID NO: 346525 - protein, 145 aa, Zea mays
  unsure (1)..(145): unsure at all Xaa locations
  Clone ID: MRT4577_79195C.1.pep
MVLERNDSVYPDPVWYLRVGSWVTDATLKYMKLGLNATPKLSPRLLDTPGPVMVVPGRSATAFXLDDTGWELMAHHCGQLVSALWSDMIRNGLDMDAAPGGSVCRLHYDPTGVMNICFWFGAXCLGRRLCGGSIGVTHDWGEALF

SEQ ID NO: 346526 - protein, 71 aa, Zea mays
  Clone ID: MRT4577_79196C.1.pep
ISKKKKKKKKKKKKKKKKKKKKKKKKKKKKKKKTPNKKKKKKKKFLPSPGGPLKGQFLNFSFPLGAVGPFF

SEQ ID NO: 346527 - protein, 96 aa, Zea mays
  Clone ID: MRT4577_79197C.1.pep
MATALNRGLRSGLRLLAAGAEASKPASRGFHATGVKRMGGHGHDEPYYIHAKHMYNLHRMKHQGLKVTLSVLGAVGIGVGVPVYAVIFQQKKTASG

SEQ ID NO: 346528 - protein, 195 aa, Zea mays
  Clone ID: MRT4577_79198C.1.pep
MSNLRSQKRLAASVLGVGKRKIYLDPSHISEIGQANSRQNIRRLRKDGYIIVKPQVVHSRVRAREHDAAKAKGRHTGTGKRKGSAEARMPTKVLWMRRQRVLRRLLRKYREEGKINRHLYHELYMKAKGNVFKNKRVLMDHIHKAKAEQNRTKVLADQMEARRAANKAARARRAERVAEKRSAILAVEAEGETRE

SEQ ID NO: 346529 - protein, 96 aa, Zea mays; identical to SEQ ID NO: 346527
  Clone ID: MRT4577_79199C.1.pep

SEQ ID NO: 346530 - protein, 66 aa, Zea mays
  unsure (1)..(66): unsure at all Xaa locations
  Clone ID: MRT4577_7919C.1.pep
RHQXHVAVDLAYNKXGICDHPIGHSIAXGXRXXYXCESVQKGATIFLSRMMFGMXSMLEPXQVEEL

SEQ ID NO: 346531 - protein, 139 aa, Zea mays
  unsure (1)..(139): unsure at all Xaa locations
  Clone ID: MRT4577_791C.1.pep
MIPLNRRTSLPRAGMDYFDARRKPHNVGKIIAALVLTTLCIFVLKQSPGFGGNSVFSRHEHGVTHVLVTGGAGYIGSHAALRLLKDNYRVTIVDNLSRGKHGAVKVLQGLFPQPGRLXFIFXADLGDQKSVTRYLLKCI

SEQ ID NO: 346532 - protein, 46 aa, Zea mays
  Clone ID: MRT4577_79200C.1.pep
RSMKIISGRQGQQAISLSSWVTLACSHDEPCKNEKSVSPRPAAGKG

SEQ ID NO: 346533 - protein, 89 aa, Zea mays
  unsure (1)..(89): unsure at all Xaa locations
  Clone ID: MRT4577_79201C.1.pep
GLAREVXDXSPPYSEHALTRWYXAPNVLLQSSRIRTCRXDMWPTGAIMAELGTLHSLFTGSSALDEMHNICKVMRRPKDHYRPTRLSVA

SEQ ID NO: 346534 - protein, 199 aa, Zea mays
  unsure (1)..(199): unsure at all Xaa locations
  Clone ID: MRT4577_79202C.1.pep
CCAAKMGSQVLVPFRGCEDSPRHLKIMGDLGQIVPMKYHPRDVDSIKAVMAKSNVVINLIGREYETRNYSFEEVNHHMPEQLATIAKEHGGIIRFIQVSCLGASPSSESRMLRTKAAGEQSVFKEFPEATIMRPATMIGTEXRILNSKTQFANESGYAPSGGASSQPEAVFFCWNMTAYTGTPTPMPTAPSTESVTFKP

SEQ ID NO: 346535 - protein, 111 aa, Zea mays
  Clone ID: MRT4577_79203C.1.pep
HSLCWDRLASVLKSLCMQSYSSSSRLPLAEMMPLACLHMKTYFKRHFFEVKSLDFILSWLLPDTAFSNHKLKPRFFRFGVGRDFSVHNVKAWALQAVKIGKNTAMISFVTF

SEQ ID NO: 346536 - protein, 68 aa, Zea mays
  Clone ID: MRT4577_79204C.1.pep
SNFFKMKDPNGPLVKLRSIGEMCVCSETCLQASHVWLDFHKRETINFGFYVHLKSLSNDQKQKMVRMQ

SEQ ID NO: 346537 - protein, 96 aa, Zea mays
  unsure (1)..(96): unsure at all Xaa locations
  Clone ID: MRT4577_79205C.1.pep
MATALNRGLRSGLRLLAAGAEASKPASRGFHXTGVKRMGGHGHDEPYYIHAKHMYNLHRMKHQGLKVTLSVLGAVGIGVGVPVYAVIFQQKKTASG

SEQ ID NO: 346538 - protein, 137 aa, Zea mays
  Clone ID: MRT4577_79206C.1.pep
RTCAAREGPTATKHTESPSRPPGHHHTTPHHTTGGGGDPVENTKAMATALNRGLRLLAAGAEASKPASRGFHATGVKRMGGHGHDEPYYIHAKHMYNLHRMKHQGLKVTLSVLGAVGIGVGVPVYAVIFQQKKTASG

SEQ ID NO: 346539 - protein, 174 aa, Zea mays
  Clone ID: MRT4577_79207C.1.pep
SPSSDTSPSTPGGGGGYYGPPSPSSGTSPSTPGGGGGYYGPPSPSSGTSPTTPGGSGGGCSAPPSPSSDTSPSTPGGGAGYCGPPSPSSGTSPSPPGGGGGGYYGPPSPSSDTSPTTPGGGGGGYSAPPSPSSDTSPSTPGGGSGYYGPPSPSSGTSPTTPGGGGYYGPPSSSD

SEQ ID NO: 346540 - protein, 56 aa, Zea mays
  Clone ID: MRT4577_79208C.1.pep
LAGRSRGPTRRLITIRATILAPNRSWSTFGCLLIVLDISGCMYNYVYISNTTIDII

SEQ ID NO: 346541 - protein, 357 aa, Zea mays
  Clone ID: MRT4577_79209C.1.pep
MGRDGGGGVAGGMSESVLRKVLLSYLYVAVWIFLSFSVIVYNKYILDPKMYNWPFPISLTMVHMGFCSSLAVALVRVLRVVDLPTSPSMTPQLYTSSVVPIGALYAMSLWFSNSAYIYLSVSFIQMLKALMPVAVYSIGVLFNKETFRSSSMLNMLSISFGVAIAAYGEARFDVRGVALQLAAVAFEATRLVLIQILLTSKGISLNPITSLYYVAPCCLCFLVVPWVFVELPRLRAVGTFQPDFFVFGTNSLCAFALNLAVFLLVGKTSALTMNVAGVVKDWLLIAFSWSVIRDTVTPINLFGYGIAFLGVAYYNHVKLQALKAKEAQKKAAQADEEVGSLLQERDGHGDHKSDNQA

SEQ ID NO: 346542 - protein, 86 aa, Zea mays
  Clone ID: MRT4577_7920C.1.pep
LLQTCLRGWPGFGPDSPTTWKLNYKNVGLGPRESNEAPPGVLVKTDTSLRTGQIIQAGPQKIGHLIVWAPTDYSQTKTYRSNTRTK

SEQ ID NO: 346543 - protein, 357 aa, Zea mays
  Clone ID: MRT4577_79210C.1.pep
MGRDGGGGVAGGMSESVLRKVLLSYLYVAVWIFLSFSVIVYNKYILDPKMYNWPFPISLTMVHMGFCSSLAVALVRVLRVVDLPTSPSMTPQLYTSSVVPIGALYAMSLWFSNSAYIYLSVSFIQMLKALMPVAVYSIGVLFNKETFRSSSMLNMLSISFGVAIAAYGEARFDVRGVALQLAAVAFEATRLVLIQILLTSKGISLDPPTSLYYVAPCCLCFLVVPWVFVELPRLRAVGTFQPDFFVFGTNSLCAFALNLAVFLLVGKTSALTMNVAGVVKDWLLIAFSWSVIRDTVTPINLFGYGIAFLGVAYYNHVKLQALKAKEAQKKAAQADEEVGSLLQERDGHGDHKSDNQA

SEQ ID NO: 346544 - protein, 53 aa, Zea mays
  Clone ID: MRT4577_79211C.1.pep
FAPILFYSKLGAWNLGGPLHFGPTYEPTLAKCCPLKNRQKHQTLNRKFLSWEG

SEQ ID NO: 346545 - protein, 105 aa, Zea mays
  unsure (1)..(105): unsure at all Xaa locations
  Clone ID: MRT4577_79212C.1.pep
PVNQRGTKTGRGPTGRKEQGPIGVILCETHGGHPGRTGLGGGPGGRPPKGPQGRAARAPPXSKGEXGGEGALTKNQKKGPLGPKWVQPPIGPGTEKGKKRGGRIE

SEQ ID NO: 346546 - protein, 58 aa, Zea mays
  Clone ID: MRT4577_79213C.1.pep
EYRAGYCGGVIRAKCECPLIEALIFWSGDAFPGPTTPVTQAHKQAHKQAHKSAQRSRA

SEQ ID NO: 346547 - protein, 68 aa, Zea mays
  Clone ID: MRT4577_79214C.1.pep
MRAPSTPTQRELYSLFREYLRGLRRGSCMPASVSRALRVRAWPSRWPTRASVARRPFGSPSGSLPSPP

SEQ ID NO: 346548 - protein, 35 aa, Zea mays
  Clone ID: MRT4577_79215C.1.pep
ISLYSALVWCINKFNIQANMNCVKLHNAVMLTYNM

SEQ ID NO: 346549 - protein, 131 aa, Zea mays
  unsure (1)..(131): unsure at all Xaa locations
  Clone ID: MRT4577_79216C.1.pep
ATRSTGGYASAYSSDYYYCYPSRVAYGAGAAAKAQQATKKKKKEKEKRGEKAEAEADGLGVAVEKESSEPRADFRDSMVQMVLKMXLCDWDGLRGMLRRLLALNAPPHHAAILTALAEVCAQLAGAAAALE

SEQ ID NO: 346550 - protein, 96 aa, Zea mays
  Clone ID: MRT4577_79217C.1.pep
AGFFFLGEKEGPPGLFWGSSPLCYYPIGGGEARAPIGSAVFQLIWGVFGGARFPSPPGEKPFPWGAKKMFGWGLGRPPQFFCSGFFYRERGFALGP

SEQ ID NO: 346551 - protein, 62 aa, Zea mays
  Clone ID: MRT4577_79218C.1.pep
PYILSHSDAYKIYLQKATKLGGGFTLRGGWPERTTVVSLPPTRYDTPANNINMNVHAKTKIY

SEQ ID NO: 346552 - protein, 122 aa, Zea mays
  unsure (1)..(122): unsure at all Xaa locations
  Clone ID: MRT4577_79219C.1.pep
LCSSRILWPFGLSLVSSPGLAGLLCLAYGCCPARCRRGSGSASAAWRCRRGGPRSSAPGLPXPRSVPPWTLWLLRLQLGSCCCALDAPPPRLIDLFSWLVFVNPQVLVRVGGRVGRPRFPGP

SEQ ID NO: 346553 - protein, 81 aa, Zea mays
  Clone ID: MRT4577_7921C.1.pep
GSQARCGFCKQGSAESITDDPPATLSFMSTAALTRNWLHKRSRYFSMQDATVRINLSLHSAKLHNRLAYFTHQLANSKIWR

SEQ ID NO: 346554 - protein, 104 aa, Zea mays
  unsure (1)..(104): unsure at all Xaa locations
  Clone ID: MRT4577_79220C.1.pep
ALSPGESNPPASAERQSPIQSGXXGRSXYLTSGXXREGMLYLVFWVQSWXXCEEEAXXVDYXSPPEERGXXQXSSLLSXHHLVPREEGAFKEPSKTXLLSGSCR

SEQ ID NO: 346555 - protein, 75 aa, Zea mays
  Clone ID: MRT4577_79221C.1.pep
KGWAHYQIAPIQTCDDQGPSLLCALAPNTTRSPATRPRLQPRWGLHVIYGELAYHILSPAPINLQIYLPLLTFYI

SEQ ID NO: 346556 - protein, 136 aa, Zea mays
  unsure (1)..(136): unsure at all Xaa locations
  Clone ID: MRT4577_79222C.1.pep
MPPPPPPPPRRQGRRPSRRAPRXRTPMPAXPGGAVPRHAPRPPXPGSPPPPRPGPXRPAPAPAAPAPPPRPPGAAPPRGRRPGPGXPPPPPPPRQGRRPSRRAPQRSGRPCRPTGRRCTAACSAAAPCSGSPAPTS

SEQ ID NO: 346557 - protein, 85 aa, Zea mays
  Clone ID: MRT4577_79223C.1.pep
RKGCGCAILCIVCSSCKIGLFIFILCCGGFKWGVGCVSLFSLMISCNCFVYCLCIKLFVLVVTIVVLFNPKMFLSHGFLLKIMEG

SEQ ID NO: 346558 - protein, 144 aa, Zea mays
  Clone ID: MRT4577_79224C.1.pep
MWSNVGEKTLEGPAFVQEAEEKVALIRKRLLEAQSRQRSYADNRRRELNFQEGDFVYIKVSPMKASEMLKVPDCHIMEDLVQIQKDLQYREKLLKILDSAVRKTRNSEVRLCKVQWSKEGVEEETWESEDSMRKEYTSLFSNSA

SEQ ID NO: 346559 - protein, 55 aa, Zea mays
  Clone ID: MRT4577_79225C.1.pep
KECTSKRLYISVQYWCHTFRTSSKWVNPSTLDADRIIIVNDGWLYWLVYNSVLVQ

SEQ ID NO: 346560 - protein, 49 aa, Zea mays
  Clone ID: MRT4577_79226C.1.pep
AVQLTQNFIGWVPRWSISHNASAVSSVMYMSRNGTQFDAYSIKLSLFMY

SEQ ID NO: 346561 - protein, 114 aa, Zea mays
  unsure (1)..(114): unsure at all Xaa locations
  Clone ID: MRT4577_79227C.1.pep
CGLLCRSRPRLPPXRGRATTSTPTDSGPXSTSAACFADPXVVYHHHEQAIPAAPDAPAACTEPLVYHLVAIHRDYRHVHPMVTRRADSVLHPVEGLILATDTTATPADAYPIPS

SEQ ID NO: 346562 - protein, 62 aa, Zea mays
  Clone ID: MRT4577_79228C.1.pep
ATRQKKITLVPIDGISFDHTEVRIKFTTKTLAIQEMHLSPQTQPPLILLLCLSLTTLLVALP

SEQ ID NO: 346563 - protein, 98 aa, Zea mays
  Clone ID: MRT4577_7922C.1.pep
ENPEEFIPERFENSPLGFKGTFFEALPFGFGPRMGPGANFGVANLELALASLLFPFDWELPSGQEPKDVYVWEAAGLVSKKNTGLVLPPVNPIGPGKA

SEQ ID NO: 346564 - protein, 178 aa, Zea mays
  Clone ID: MRT4577_79230C.1.pep
MGSRHSACSAEAECRGSFVLLLLVTLLRGVVAFGAIYAQRLLMRPKPGSGEDVIPPEVEVEAEPWGRARRRPPSEVEVEAEPWGSGEAELPVAPKAGLSCCQPHPGGWHSSRRGASGAVFLSGHSVGGRSDCDHFDLDDWGTCVRIRRQAILALNAPAIRSVGETIWPGLLHYEACPS

SEQ ID NO: 346565 - protein, 45 aa, Zea mays
  Clone ID: MRT4577_79231C.1.pep
VFCREFSRFFPQRGENGRIAQALINPLCSTGGQKEKSRKLIGPLA

SEQ ID NO: 346566 - protein, 130 aa, Zea mays
  Clone ID: MRT4577_79232C.1.pep
MRRRGVAAADADGDVELRFRGVRKRPWGRYAAEIRDPAKKARVWLGTFDSAEDAARAYDAAARMLRGPKARTNFPLPAAAALHHPHMPAAAAAAAPPYTTYPTATGVVSTPPVARPACSSLSSTVESFSG

SEQ ID NO: 346567 - protein, 88 aa, Zea mays
  unsure (1)..(88): unsure at all Xaa locations
  Clone ID: MRT4577_79233C.1.pep
EKVKLIAVASKKRTPSMPACTPFLTSSSRSAKSGERSFPSVLRTTIQPAYDERSTSIERTKVTRCVDRHARPPARSTVEXEXSXAEXX

SEQ ID NO: 346568 - protein, 188 aa, Zea mays
  unsure (1)..(188): unsure at all Xaa locations
  Clone ID: MRT4577_79234C.1.pep
LNSVIAARVCGVRYLGSAAFSKAIQAHDLHTGMDVCVKIIKNNKDFFFSFLDEIKLLXCVDKHDPXDKYHLLRLYDYFYYRANLYEFQKFNRESGGEVYFTMPRLQSIAIQCLEVLQFLHGLGLIHCDLKPENILVKSYSRCEIKVIDLGSSCFETDHLCSYVQSRSYRAPEVILGLPYDKKIDIWAL

SEQ ID NO: 346569 - protein, 49 aa, Zea mays
  Clone ID: MRT4577_79235C.1.pep
QLVVACKLWSKQTNATTQLVYSRSTTQWADIAHTCYGNITWLQQISAKH

SEQ ID NO: 346570 - protein, 259 aa, Zea mays
  Clone ID: MRT4577_79236C.1.pep
TSYNKVCCVCCTTYFKHCLQEHLLIVCELLKANLYEFQKFNRESGGEVYFTMPRLQSIAIQCLEALQFLHGLGLIHCDLKPENILVKSYSRCEIKVIDLGSSCFETDHLCSYVQSRSYRAPEVILGLPYDKKIDIWSLGCILAELCTGNVLFQNDSPATLLARVMGIIGAIEQAMLAQGRDTFKYFTKNHMLYERNQESNRLEYLIPKKTSLRYRLPMADQGFIEFVACLLEVNPKKRPSASEALKHPWLSFPYEPISS

SEQ ID NO: 346571 - protein, 708 aa, Zea mays
  unsure (1)..(708): unsure at all Xaa locations
  Clone ID: MRT4577_79237C.1.pep
VGYTRQPIEDETWFLAHEIDYPSDNEKATGHTRGNDRHDRPTKDEDDDQSFVEEDSYISGEQYFHGKNIAQIGTSEGTMVRGIPDSDMVAQYVGQRLACEXLLSXELXEPGWQDFVSKNSELGRLVIGTSLYDPEATHPEVLCVEDDQHSTVTSIGVGIISDADDIGSNVRESLIGGSSEGDIEFFNESSLSVNGKRHPQQDTEKKRVGAKGVKHDQIIYAADIQKGNLPPGAADVGFSFPPPLHSGKNHESDAKSLWSKKDEMYCINDPDDCQNGMVSDDMLATWRKKNSESSLRSSRDEMTSDVVRSRNSSASYDETEDTSNARHHKLDDAQEDTGTNLDDEEAAALQEQVRQIKAQEEEFETFNLKIVHRKNRTGFEEDKNFHVVLNSVIAGRYHVSEYLGSAAFSKAIQAHDLHTGMDVCVKIIKNNKDFFDQSLDEIKLLKYVNKHDPADKYHLLRLYDYFYYREHLLIVCELLKANLYEFQKFNRESGGEVYFTMPRLQSIAIQCLEALQFLHGLGLIHCDLKPENILVKSYSRCEIKVIDLGSSCFETDHLCSYVQSRSYRAPEVILGLPYDKKIDVWSLGCILAELCTGNVLFQNDSPATLLARVMGIIGSIEQAMLAQGRDTYKYFTKNHMLYERNQESNRLEYLIPKKTSLRHRLPMADQGFIEFVAYLLEVNPKKRPSASEALKHPWLSFPYEPISS

SEQ ID NO: 346572 - protein, 114 aa, Zea mays
  Clone ID: MRT4577_79238C.1.pep
LLSYPFPASRLVLLLTLSSFHSARRSSDLESSGQYNDDTLSFVLVNCSFGRVSNCAPGTTVQFDTLMGLEERCLEAHDGFGKSNGRTPTTVVKIRARSVSNSWTTQIQTRDISF

SEQ ID NO: 346573 - protein, 375 aa, Zea mays
  Clone ID: MRT4577_79239C.1.pep
MAAASWSAPTTSFAPAPAPPWGPWRTKAAPLPIRTLPRRVLLNAVGESAMVAAGDTLLGLYEKERLGLLQYADDESKEERYWETLDADLRYWTRSLRPVQWYPGHIAKTEKELKEQLRLMDVVIEIRDARIPLSTSHPKMDSWLGNRKRIIVLNRKDMISTEDMNAWATYFGNQGIKVVFSNGQLGMGTMKLGRMAKSVASVANTKRKEKGLLPRPVRAGIVGYPNVGKSSLINRLLKRRMCPAAPRPGVTRELKWVRFGTDLELLDSPGILPMRISDQTSAIKLAICDDIGERSYDFADVAAILVQMLIRHPAVGSEAFRRRYKIDVDSECGKTFVTKLSVHLFNGDTSQAAFRILSDYRKGKFGWVALERPPT

SEQ ID NO: 346574 - protein, 120 aa, Zea mays
  unsure (1)..(120): unsure at all Xaa locations
  Clone ID: MRT4577_7923C.1.pep
MGIGXDGRLAWKWTQREGXDRQKHGEYHRIYFHEEGVQRHKGHILXLPDGLLPPXSELIQAEHLVRQPALYYNELLEQRHAGTXIMHPYVARTKGPRRLDLFESGVNHALVVGIGIQILQ

SEQ ID NO: 346575 - protein, 92 aa, Zea mays
  Clone ID: MRT4577_79240C.1.pep
ESRVFIGNLNTLVVKKSDVEAIFSKYGKIVGCSVHKGFAFGQYVNERNARTAVAGEDVRMIAGQVLDINLAAEPQVYRGKAGVKRSAAEMYG

SEQ ID NO: 346576 - protein, 35 aa, Zea mays
  Clone ID: MRT4577_79241C.1.pep
SSSLSSGCVSAQVNQEQPHDGSTPLRVDDKNGDYV

SEQ ID NO: 346577 - protein, 118 aa, Zea mays
  Clone ID: MRT4577_79242C.1.pep
VRPISSITRICLGAHSGWGHGKEWYYVTIKHWVVDQCRPVEDGALEESGAVGDPDYSSGPPQFGRSAVIGLADGIVVVVSQGVVSRLMVVDPSFEPNPRPVSGVVPSAPPYFPEVRLA

SEQ ID NO: 346578 - protein, 76 aa, Zea mays
  Clone ID: MRT4577_79243C.1.pep
NRLCSFNGPGIPPVCDCSQKAKQWGPILFFKPFTLPNQDSLLNPQKNLPFLGPSKKIFGAWTTGSKNFAPAPTFFL

SEQ ID NO: 346579 - protein, 102 aa, Zea mays
  unsure (1)..(102): unsure at all Xaa locations
  Clone ID: MRT4577_79244C.1.pep
VAASTTPEAAPLSLGRXQLPSLQPPTLYITRALPPFLYLSRPPASPTPAHSSSDGSCLYQYCGHNSTRQRRRCRHLGPRFSRSTPRYNERSLLTLDMQPICR

SEQ ID NO: 346580 - protein, 273 aa, Zea mays
  Clone ID: MRT4577_79245C.1.pep
MPTEVTSTPAGRPDCSSSSSMTAGTMRVLGGEVSPFTARARLALDLRGVAYELLDEPLGPKKSDRLLAANPVYGKIPVLLLPDGRAICESAVIVQYIEDVARESGGAEAGSLLLPDDPYERAMHRFWTAFIDDKFWPALDAVSLAPTPGARAQAAEDTRAALSLLEEAFKDRSNGRAFFSGGDAAPGLLDLALGCFLPALRACERLHGLSLIDASATPLLDGWSQRFAAHPAAKRVLPDTEKVVQFTRFLQVQAQFRVHVACQIQRLQSVLET

SEQ ID NO: 346581 - protein, 137 aa, Zea mays
  Clone ID: MRT4577_79246C.1.pep
AHFQRHHVFKLRVPSHHLKRHDIPVHSSVRQPDHWIKIVSVCSIFQALRATLWRGHRLGDSRGLRRPREWITAVSRVALSSFLRTQHKGLVPRITDSVDITFAATPSLSAVRRSTCGRFPWRVRRRARNDALYMAET

SEQ ID NO: 346582 - protein, 265 aa, Zea mays
  unsure (1)..(265): unsure at all Xaa locations
  Clone ID: MRT4577_79247C.1.pep
RSATMRVLGGEVSPFTARARLALDLRGVAYELLDEPLGPKKSDRLLAANPVYGKIPVLLLPDGRAICECAVIVQYMEDVRRESSGAEAGSLLLPDDPYERAMHRLWTVFIDDKXAPSRARQQVSFLQGNAQQTAVPFXFWPALDAVSLAPTPGARAQAAEDTRAGLSLLEGGVKDRSNGRAFFSGGDAAPGLLDLALGCFLPALRACERLHGLSLIDASATPLLDGWSQRFAAHPAAKRVLPDTEKVVQFTRFLQVQAQFRVHVS

SEQ ID NO: 346583 - protein, 128 aa, Zea mays
  unsure (1)..(128): unsure at all Xaa locations
  Clone ID: MRT4577_79248C.1.pep
PTHRLFLLFNRXEYHXRPTQPAQXXAAGEEAKEXXGGRDEXGGGTXXGXTRXXKXAXXTNXREPSXXXGAKTRGQXPXRXQQGSXXPKEXATEXAKEAXQXNGXNXXXXXXNPGTXXXXXXRPGGEQT

SEQ ID NO: 346584 - protein, 39 aa, Zea mays
  Clone ID: MRT4577_79249C.1.pep
QCNAQIISTRFRNFSNVHKLYMKVFYPNLQLEPFLISAI

SEQ ID NO: 346585 - protein, 74 aa, Zea mays
  Clone ID: MRT4577_79250C.1.pep
QIPNKTTALHKQQTVSTSFSRAIHLNDNPIDTYQDLPIRNKLLKKNHIPLWPGTTQIYDLFRTSVSSPTQAMCK

SEQ ID NO: 346586 - protein, 43 aa, Zea mays
  Clone ID: MRT4577_79251C.1.pep
HPPPPPPPPPPPPPPPPPPPPPPLLGKNFKEGLNLWVFPYPKG

SEQ ID NO: 346587 - protein, 75 aa, Zea mays
  Clone ID: MRT4577_79252C.1.pep
CAGTTRQWALSFNHLRGILCDKGQFHLMPKDFQWTLAHPTTRVSVHGCYVRLALFGEVVGVSVSFIDAGRPGCRT

SEQ ID NO: 346588 - protein, 56 aa, Zea mays
  Clone ID: MRT4577_79253C.1.pep
RLAGAHVCPTTSGLALENPCRRAAPASASGRKTTFWTGLSFLMPDQPTLSPQSQMY

SEQ ID NO: 346589 - protein, 92 aa, Zea mays
  Clone ID: MRT4577_79254C.1.pep
DAWTTSLNPSPRAGAAVDERDPRWPCRWCATYHLDSRAPIHRYESVQLLHAGSGAIKDTNALAIYASELPRDCARGDRHVTLQTPHPVCRIC

SEQ ID NO: 346590 - protein, 96 aa, Zea mays
  Clone ID: MRT4577_79255C.1.pep
NYEGRAILFFGFFYLFYPLFPTYFLHLFIKKGNTICRWASWGGQKNQYKFRVNQSGGKKKIWGPIVPLRKTHNFPFPGLGEGQDPYNLGGNNFPQF

SEQ ID NO: 346591 - protein, 80 aa, Zea mays
  Clone ID: MRT4577_79256C.1.pep
TLYISDDCSFLLLQSQYSYHLLKLQNATNHMITISLSLHKGFRFPHQQCFRLLLHYMRKISYSITYPLANIHSIHLIHLI

SEQ ID NO: 346592 - protein, 60 aa, Zea mays
  Clone ID: MRT4577_79257C.1.pep
EREYVKDPSGSVMFNELDSVEYDVGCKEGEPQSVGMKHKVHPHVGSTKAIDDIACMPCES

SEQ ID NO: 346593 - protein, 393 aa, Zea mays
  unsure (1)..(393): unsure at all Xaa locations
  Clone ID: MRT4577_79258C.1.pep
MDDDDDVSPSSSPSPPSSSALPVDGPVTVAAAPPGASMAVALPIHRTAASLYASAGGDGGGGGGREDAWSDGATSALIDAWGERFVALGRGSLRHPQWQEVAEAVSSRDGYSKAPKSDIQCKNRIDTLKKKYKVERIKPVSGWQFFDRLDFLLAPTYGNKPGNGGGGHNSNSRSQMXRRRXSGLPSTQPHAAHARSRIRGQAEGAXSPEPSVSSDSSDGFPPMPALPAVNGKRKRTDDGRSDGGGDRAQGLRELAQAIRRLGEAYERVEATKLEQEAEMERRRMDFAQELESQRVRFFLDTQMELTQAKNHASPATAAVPAVGSSRRIPRMSLVTDAGGSSNHHSRYRISHVDRHRHAPRPHYQQYHDNNNAGAAAASDGEQSDEEDYEEESQ

SEQ ID NO: 346594 - protein, 55 aa, Zea mays
  Clone ID: MRT4577_79259C.1.pep
TGALHVPPGVPEATLYREALYYGLLDRVRAARLGELDGDRVRLAAKRPTLVKKEA

SEQ ID NO: 346595 - protein, 93 aa, Zea mays
  Clone ID: MRT4577_7925C.1.pep
MDPPSSSGRPTTPRRQLQGPRPPRLNVRMESHAIKKPSASGAPPAPGQGRPWDHHHHHPQPGRAPVIIYDASPKVIHAKPSEFMALVHRLTGP

SEQ ID NO: 346596 - protein, 73 aa, Zea mays
  Clone ID: MRT4577_79260C.1.pep
LCHLFKQIVYQGLTAEFWNIHLLICIECSCFSLKGRPNARGCKTSRVWGRDKLMQAFPRKCGEAASNPQPGTQ

SEQ ID NO: 346597 - protein, 54 aa, Zea mays
  Clone ID: MRT4577_79261C.1.pep
HSTFLSFKKEVSYPHEMIYIMHIQKYFVCELATPRGYSDMCDNHFLETLLIICI

SEQ ID NO: 346598 - protein, 69 aa, Zea mays
  Clone ID: MRT4577_79262C.1.pep
NDRGSFLTGPVANLSQVIITTGTHGSCETLQIREPHILLTTCTVNGMHKCLVRVCEVEPYTHREQTESE

SEQ ID NO: 346599 - protein, 49 aa, Zea mays
  Clone ID: MRT4577_79263C.1.pep
SLGTSVAYRSMHAVRAESIIPLFTCMSARSIIDYHFCISWHVLMERRCS

SEQ ID NO: 346600 - protein, 75 aa, Zea mays
  Clone ID: MRT4577_79264C.1.pep
ENNFLINCRKSERALYLVRNITLSIFRGGNDTREASFLVSLFFLEMTFSYFYRESSREARRLIDLLKEDSNGIRA

SEQ ID NO: 346601 - protein, 103 aa, Zea mays
  unsure (1)..(103): unsure at all Xaa locations
  Clone ID: MRT4577_79265C.1.pep
STLDLVLRLTGGMQIFVMTLTGDTMTLEVESSDTIDNVNAKIHDKDGIPPDXQRLIFAGNQLEDVRTLADYNIQNERTSRLVLRLRGGMQISVNTLTGNTITL

SEQ ID NO: 346602 - protein, 75 aa, Zea mays
  Clone ID: MRT4577_79266C.1.pep
MHNMPCSVRFGLVVGTCHVSGYMSSEYIRTMRVVCAQSMITRTPGSCSYRPAILIMLWPLLQCILDSMALLLRPC

SEQ ID NO: 346603 - protein, 79 aa, Zea mays
  Clone ID: MRT4577_79267C.1.pep
LLLPLRFGFGFVRFSCSLQLRRPSSPAPLHGVVVLALSSSSLALGTLPGFNPQAPADLSHGAFSGGEKDPRFLVGEEKN

SEQ ID NO: 346604 - protein, 76 aa, Zea mays
  unsure (1)..(76): unsure at all Xaa locations
  Clone ID: MRT4577_79268C.1.pep
XXKPIRTNAHLFICNYYLGSGWGAESTITFCTTASAKRRMSTTTPTIFFSQRGDHAAAGRPNKKPPQETETKTDQT

SEQ ID NO: 346605 - protein, 241 aa, Zea mays
  unsure (1)..(241): unsure at all Xaa locations
  Clone ID: MRT4577_79269C.1.pep
NWKAXNGLKLNXLENSIWKAYCVLRKSEFPVKYKYCQVSEAGVSSLEFGPNREVDVDLSSPKPSRHILLSDGSLREAPWRGAGVAVPMFSIRSNEDLGVGEFPDLKLLVDWAVNSGFHLVQLLPINDTSVNKMWWDSYPYSSLSVFALHPLYLRVQALSDAIPADVKEEISKAKKELGKKDVDYEAALATKLRVAXKKIFNLEKDKVLNSAPFKQFLSENEEWLKPYAAFCFLRDFFDTSD

SEQ ID NO: 346606 - protein, 90 aa, Zea mays
  unsure (1)..(90): unsure at all Xaa locations
  Clone ID: MRT4577_7926C.1.pep
LIRELLHTLYTSLCTLGQRVGKSVLVGNINMWVYRMDTXLHWQQQLNNIQITRVSGQAQPPPGSRSLHRDTGQTRQDFEFTPVTEESGLF

SEQ ID NO: 346607 - protein, 204 aa, Zea mays
  Clone ID: MRT4577_79270C.1.pep
MGNPEKLMAQIFDLKFTSKSLQRQARKCEKEEKEQKLKVKKAIEKGNVDGARIYAENAIRKRTEHMNYLRLASRLDAVVARLDTQAKMQAIGKSMGSIVKSLDSSLATGNLQKMSETMDSFERQFVNMEVQAEFMEGAMAGSTSLSTPETEVNSLMQQVADDYGLEVSVGLPQAAAHAIPAAKDKEKVDEDDLTRRLAELKARG

SEQ ID NO: 346608 - protein, 100 aa, Zea mays
  Clone ID: MRT4577_79271C.1.pep
VPHDTVASRPPNAHDRNAARRNGAHNTPRREGRHGPRNAKGPPTPYRASNASFAIWGTGRRGIARKLGAKCKGDKTCIWVPKTVGTNPGGPNKSGAPKAQ

SEQ ID NO: 346609 - protein, 73 aa, Zea mays
  Clone ID: MRT4577_79272C.1.pep
IQRKDVCRSVSSRRQLESSCARRMCGTQCHAQCKYEIKRNRSVSRYAGVRLSWIIYNLWPRADPPCPRLGRLS

SEQ ID NO: 346610 - protein, 95 aa, Zea mays
  Clone ID: MRT4577_79273C.1.pep
PGVGASAYCFCASAACMNWCDGFSRWTPRFVLPSFHVVSARSPYKYEWFAEASASISRRMCVQLCIFFRPSSSVGCTYYVVPRLVRPTTSLRIEP

SEQ ID NO: 346611 - protein, 77 aa, Zea mays
  Clone ID: MRT4577_79274C.1.pep
PRFFLWPLLWLQGKSPALNSFSLRVYTGAGAIKLIPVPFGLFNCFKAIFLFLASYGLEGLTPGGGFWGVTREPILAF

SEQ ID NO: 346612 - protein, 94 aa, Zea mays
  Clone ID: MRT4577_79275C.1.pep
PAPSTRSPPRPAAPLPSARPWAAPQPQATGVISHPDLSFLLQCSCRPAALHPPHSRLRSSAYSPPVDGHLLRLLCILFCCLLQLSFFSSFFFRF

SEQ ID NO: 346613 - protein, 70 aa, Zea mays
  unsure (1)..(70): unsure at all Xaa locations
  Clone ID: MRT4577_79276C.1.pep
PTRPNFFPTPPVHRSLSNDGVHPGEVRFNLPYCFILXNVAMYYPISVGVHSCRLTAVLPKTLLLFLGACP

SEQ ID NO: 346614 - protein, 1009 aa, Zea mays
  Clone ID: MRT4577_79277C.1.pep
MLSLQQQHGGAVAAGGDARHHAPQPSVLGGGADWLVFGGRADLEEPARNAPSPALFLLPPAGLDDRAAQPEPNPKPAQLAGAVDEERHLALAHQNYRSGKYREALEHGNVVYEKNPRRTDNLLLLGAIYYQIRNYDMCIAKNEEALAIDPHFAECYGNMANAWKEKGDIDLAIRYYLTAIQLRPNFCDAWSNLASAYTRKGRLNEAAQCCRQALAINPRLVDAHSNLGNLMKAQGFIQEAYSCYIEALRIDPHFAIAWSNLAGLFMEAGDLDKALMYYKEAVKLKPSFADAYLNQGNVYKALGMPQDAIMCYQRALQARPDYAMAYGNLATIYYEQGQLDMAIRCYNQAIVYDPQFIEAYNNMGNALKDAGRVEEAINCYRSCLALQANHPQALTNLGNIYMEWNMISAATSFYKAAISVTSGLSSPLNNLAVIYKQQGNYADAITCYTEVLRIDPTAADALVNRGNTFKEIGRVNEAIQDYVQAATIRPNMPEAHANLASAYKDSGHVETAIISYKQALRLRPDFPEATCNLLHTLQCVCDWENRDGMFRDVEEIIRRQIKMSVLPSVQPFHAIAYPIDPLLALEISRKYAAHCSLIASRFGLPPFVHPPPVPVKAEGKHCRLKVGYVSSDFGNHPLSHLMGSVFGMHDRANIEVFCYALSQNDGTEWRQRIQSEAEHFVDVSAMTSDNIAKLINQDKIQILINLNGYTKGARNEIFAMQPAPIQVSYMGFPGTTGAAYIDYLVTDEFVSPSSYAHIYSEKLVHLPHCYFVNDYKQKNRDCLTPVCPHKRSDYGLPEDKFIFACFNQLYKMDPEIFDTWCNILKRVPNSALWLLRFPAAGETRVRAYAAARGVRSDQIVFTDVAMKNEHIRRSALADLFLDTPLCNAHTTGTDILWAGLPMITLPLEKMATRVAGSLCVATGLGEEMIVSSMKKYEDRAVELALNPVKLQALTNKLKEVRMTCPLFDTARWVRNLERAYYKMWNLYCSSRHPEPFKVVEDDNESPFDR

SEQ ID NO: 346615 - protein, 63 aa, Zea mays
  Clone ID: MRT4577_79278C.1.pep
LGYKFNFGVGGIWSGMLCGVTLQTIILLVVIWRRDWKSEAAQASSRVQKWGGKGTDEVKPLLQ

SEQ ID NO: 346616 - protein, 180 aa, Zea mays
  Clone ID: MRT4577_79279C.1.pep
MLSLQQQHGGAVAAGGDARHHAPQPSVLGGGADWLVFGGRADLEEPARNAPSPALFLLPPAGLDDRAAQPEPNPKPAQLAGGDRADCFDFGLGEVGTKAVDEERHLALAHQNYRSGKYREALEHGNVVYEKNPRRTDNLLLLGAIYYQIRNYDMCIAKKEEALAIDPHFAECYGNMANAW

SEQ ID NO: 346617 - protein, 53 aa, Zea mays
  Clone ID: MRT4577_7927C.1.pep
LGPFLLGPGGGLFGRGEALFVLPVRGLLLGRLSLSPWDPLLVLLVAMVLWSLF

SEQ ID NO: 346618 - protein, 97 aa, Zea mays
  Clone ID: MRT4577_79280C.1.pep
RVAGSLCVATGLGEEMIVSSMKKYEDRAVELALNPVKLQALTNKLKEVRMTCPLFDTARWVRNLERAYYKMWNLYCSSRHPEPFKVVEDDNESPFDR

SEQ ID NO: 346619 - protein, 60 aa, Zea mays
  unsure (1)..(60): unsure at all Xaa locations
  Clone ID: MRT4577_79281C.1.pep
MAPKRGGRAPVPANKNTDNVTNPLFXRRGRSISAICGALPSKKDLHRFXVKWSKVLRIQR

SEQ ID NO: 346620 - protein, 64 aa, Zea mays
  Clone ID: MRT4577_79282C.1.pep
NKNGERETKTRGVIHLGSATTICTPDGYPMIWQRQNKRTEDTYATSIWRVGTKRRMHIGSLNDP

SEQ ID NO: 346621 - protein, 274 aa, Zea mays
  unsure (1)..(274): unsure at all Xaa locations
  Clone ID: MRT4577_79283C.1.pep
RTTVWXYQXNDDGAFDQFQPDEELKRRKKISYVRRRRDMYKALGPGSQAEDATLLAFGTLFSGPYRGSESYFDIHESPKDQRVQRVLEKVEFLPFAPEIMAAGKEFAKNNIKEPFLCAQLRLLDGQFKNHWKATFSALKEKLEAIELEIRRNMTSGLIHMFVMTDLPPTNWTNTFLGDVATDERYKLYTLKESDDLVLQTAERLMAAEHGIRSGFLQKIIESTKKDCDPVQLPEILLYIEESVCSCASLGFVGTAGSTIAGSIETMRKNKVCKL

SEQ ID NO: 346622 - protein, 65 aa, Zea mays
  Clone ID: MRT4577_79284C.1.pep
ILPFNGREICERLVKCSNKLLVERAFLYHYLYDQIQCNYWPYPAHATRLSMVYHMSRAPLNMSRQ

SEQ ID NO: 346623 - protein, 129 aa, Zea mays
  unsure (1)..(129): unsure at all Xaa locations
  Clone ID: MRT4577_79285C.1.pep
PTLKGGLWGSLVIPQGVGGAFPPRLAFGAGFPVLAPPVFFWFPFNLGLGPSPSLGREKPFGGGLGGWVWGAPYAFPFIKKARFPPGFLRXKKKKKKKKKKKKKKKKKKKKKEKKKKKKKKKSTLRCYHC

SEQ ID NO: 346624 - protein, 61 aa, Zea mays
  Clone ID: MRT4577_79286C.1.pep
YVSTELFSCDIYPQQTHSGLCLPPSLWGPQQRLCSMPSPMDPAAADRPCVIQSLLANCNTL

SEQ ID NO: 346625 - protein, 81 aa, Zea mays
  unsure (1)..(81): unsure at all Xaa locations
  Clone ID: MRT4577_79287C.1.pep
HASGGEGERVTVRRXPAVPXSWSDVRCRWGLXCARRPYGIILVEQVASDGGGAFAVSEAARHVWGLLVQARGMERALCFVL

SEQ ID NO: 346626 - protein, 106 aa, Zea mays
  Clone ID: MRT4577_79288C.1.pep
RVPYRGSDWYKDYSIECCPGYDPERRPAAMMPNNIIEQFLYLSFGGGHLKRVGDLLELQQSTADLGLLLKNFYAELRGSADERDIGDTTLTIHTKNRLWRTLRIRT

SEQ ID NO: 346627 - protein, 74 aa, Zea mays
  Clone ID: MRT4577_79289C.1.pep
LAAFRKRRRSLSRHFFLPPPLPVTAGLQGGDAPAPTPPASCLMPAPRGEGVLDALAQRGAERVKVSVIGTAMPG

SEQ ID NO: 346628 - protein, 86 aa, Zea mays
  Clone ID: MRT4577_7928C.1.pep
RELCLWLAMKNRCWTADRLEKRGFPHPVVCPLCDQEQETIQHLLTSCIFGRRFWHSLLLPFGLDHLTPTDYTPSQNGRQFVGFGWC

SEQ ID NO: 346629 - protein, 52 aa, Zea mays
  unsure (1)..(52): unsure at all Xaa locations
  Clone ID: MRT4577_79290C.1.pep
SDKGKMSLSLHSPNGGDALQAAXILXKGXIXGRXNQSFAHLARWIEXLLMAL

SEQ ID NO: 346630 - protein, 100 aa, Zea mays
  unsure (1)..(100): unsure at all Xaa locations
  Clone ID: MRT4577_79291C.1.pep
GTLGRGPLFPPPVEGQGPPISFPGQSKGIWGLVGPWLPPRGPLFFFPSRVFFCLSSGTNGIFLKGHFDSRKMAVFFRLFRRAFPACSFKXXPWAXXXVWG

SEQ ID NO: 346631 - protein, 42 aa, Zea mays
  Clone ID: MRT4577_79292C.1.pep
RLGGKPKNSVIGEPYKFHSYKLFSGRRLNKTTKDFLPMVHIF

SEQ ID NO: 346632 - protein, 93 aa, Zea mays
  Clone ID: MRT4577_79293C.1.pep
ASLGRPVSRRQGFEAPSIRAGLQSSYGLHWFLQHPASTLLLPLRCFQVIRTPCSHTKFGRQARVSLASVKTDPPAGARRGEPPLRRSPKKKEE

SEQ ID NO: 346633 - protein, 141 aa, Zea mays
  unsure (1)..(141): unsure at all Xaa locations
  Clone ID: MRT4577_79294C.1.pep
LRHIVHRAYHALELVADVPGHIHADGSHAGNLLXRVTXERFLWGSYCSLRIYYDPSPSDGGSEIRWDGPYALERQEPYIWPCPCLAMEVNVSRDLLIWLCEWITLQRLTGLETVDGGCIHTKGTNVFAWDEQLGSLDDSRQ

SEQ ID NO: 346634 - protein, 31 aa, Zea mays
  Clone ID: MRT4577_79295C.1.pep
LLVLYNDFVIWFSIFAIVSDVSIIILSTTQY

SEQ ID NO: 346635 - protein, 81 aa, Zea mays
  Clone ID: MRT4577_79296C.1.pep
RQYGSTSMSYDMNSVFRYRHIILGARWSQHQLVCTVCTSQASGGIGQSLYVPVPVCQLSPLHICIAFFNYAKPTVAKGVQH

SEQ ID NO: 346636 - protein, 59 aa, Zea mays
  Clone ID: MRT4577_79297C.1.pep
LEHYISIHKTGSELFLNSFTICLGRLLTLLLQTILFFGKQALWRDPSIKLLQFNLFLED

SEQ ID NO: 346637 - protein, 62 aa, Zea mays
  Clone ID: MRT4577_79298C.1.pep
TFQMVEGKSSALVPCSWVLDEKIYSVMGIKTLGFSKPLATGKNGAPAKKPLDGFPPSSSLWK

SEQ ID NO: 346638 - protein, 216 aa, Zea mays
  unsure (1)..(216): unsure at all Xaa locations
  Clone ID: MRT4577_79299C.1.pep
VAKVLGVSREDSRRRREAERERGAERCRSELVXKHQNTYAWKPNLGRKINETEPGGRFRPLSEITGVCQRCRDQIDWKRKYGKYKPIVEPAKCQKCSKRNVRQAYHNVCTGCSKELGICAKCCTSVKQLVGRDAEEANSERKELEEAIRYARERERRTLLRLMNKNKDESGPSVPKIADRDREGDLFPVASLDEYAEQAVQKDESDEEDARDFVKD

SEQ ID NO: 346639 - protein, 52 aa, Zea mays
  Clone ID: MRT4577_7929C.1.pep
CLCVHNTMICCRNLVIYLLQCQDMLCQYVTRSSFICIAPALLQEFRKCMCSN

SEQ ID NO: 346640 - protein, 58 aa, Zea mays
  Clone ID: MRT4577_792C.1.pep
SVLNIFPIFYCVFDQVVFAMYTILLMLLLMPTKQKQTMKRMHNVATAVNLAWIILIHI

SEQ ID NO: 346641 - protein, 63 aa, Zea mays
  Clone ID: MRT4577_79300C.1.pep
LMFVPRTYIVLSYISTARPSHCKCEGCSCTFSLANFFWFSGCDVVNTQRVHSSLGLTTSWSRQ

SEQ ID NO: 346642 - protein, 216 aa, Zea mays
  Clone ID: MRT4577_79301C.1.pep
MNGVRNYAAFTRDKPHVNIGTIGHVDHGKTTLTAAITKRQAEKGFAKYLDYGSIDKAPEERKRGITISTAHIEYQTENRHYAHVDCPGHADYIKNMITGAANMDGAIIVVAASDGQMPQTREHLLLARQVGVQKIVVFVNKVDAVEDKEMLELVEMEMRELLSSYGFEGDETPIVMGSALCAIENRQPEIGVTKIDELLEAVDSWIPTPQRETDKP

SEQ ID NO: 346643 - protein, 54 aa, Zea mays
  Clone ID: MRT4577_79302C.1.pep
VAEGSGEAGEANGCRRRQRRRGGRKVAAGFGVGRPWGIAGSLPMIHEDRIASPR

SEQ ID NO: 346644 - protein, 105 aa, Zea mays
  Clone ID: MRT4577_79303C.1.pep
FVCEYAAAARCWYCRLGDATGIGFTSMLQTESLQGTSSHENRVCFWPRAIATPCILSLCGKKKWRGHGRPCCLKKKTRIVLLMYSRPGGFQSSISRLLYTELFTM

SEQ ID NO: 346645 - protein, 77 aa, Zea mays
  Clone ID: MRT4577_79304C.1.pep
ALKGPFYLPFPVSFGGFTLLDPNCRWCFVSRELLILVLSAFSVSPPTNLANVSFSHTLELLFSPPKKYNPAHIPPEQ

SEQ ID NO: 346646 - protein, 124 aa, Zea mays
  Clone ID: MRT4577_79305C.1.pep
EKVTLASRFHFESQCLGNTTTKAPIRTNCLADGADDLEADGAGLELRPLGFLVSLRVTPLRVDLLLPARHPFASTSAALTAATGGFLPPAIGFGSPPALPCPALPSSERVRIFFAYLRPASRYP

SEQ ID NO: 346647 - protein, 70 aa, Zea mays
  Clone ID: MRT4577_79306C.1.pep
MTRGKQKIDAQRRNAERNQKSKGSQLEARAVGLKIVCSICKVQLANEKQLTDHYGSKHPKEKPPSTSSTE

SEQ ID NO: 346648 - protein, 32 aa, Zea mays
  unsure (1)..(32): unsure at all Xaa locations
  Clone ID: MRT4577_79307C.1.pep
RVRLLHEHVFLDVVKMMHSCIIAAIYXHVCQI

SEQ ID NO: 346649 - protein, 97 aa, Zea mays
  Clone ID: MRT4577_79308C.1.pep
HASAHASADAWVSMMPMKPDVVIWGSILSASRAQGNVALGERAAEELAKLDQTHGASKIALSNIYADAGHWINVSVVRKELQDANLERLTGRSGIVQ

SEQ ID NO: 346650 - protein, 66 aa, Zea mays
  Clone ID: MRT4577_79309C.1.pep
ARGDLPLAPMPELVSPDRPALYCPMTFDDYRMYIRRKGPRGKSQVDSLKVADAVDADADADGRRCY

SEQ ID NO: 346651 - protein, 142 aa, Zea mays
  Clone ID: MRT4577_7930C.1.pep
SLEQTIFFQQLQFLVLPVFFFVALAFLSPGCEQRQFLPFNHFFSLNLGAHLHPLFFPPSQLAPAYSQQRQHLGFFFLAALRSAFFSQQLGLPPFTLLAAAICASFLPLFQLPPFSPQFAANLGGVLFLQLFVGVLSNMLFFG

SEQ ID NO: 346652 - protein, 129 aa, Zea mays
  Clone ID: MRT4577_79310C.1.pep
MDASGAGMKGKKGAAARKVCGPTNKSSTRPVKAGLQFPVGRIGCYLMNGRNAQRVSTGSPVYLSAVLEYLAAEVLELAGNAWMDNKNTRIIPRHLLLAIRNDHDFAQLLACVTIAHGVPLPCMHSGLLP

SEQ ID NO: 346653 - protein, 238 aa, Zea mays
  Clone ID: MRT4577_79311C.1.pep
MRAAQVDPSPAAPPKSRLKRLFERQLLRVSPAERLPSAPPGGGDKDELPEPSSLCLDGMVRSFLEDGGGGGAERAAAAARCCNCFHAGDTSDDEDGPAAADAAAADIAETIKGLVHCASLRERNLLADVSTLVERHRASGARKRDLLRLLAGSLRAAGHDAAVCLSRWDRSPSHPAGDHAYLDVLLPAASERAGRERVLVDVDFRSAFEVARPTKAYRAVLQRLPPVFVGRDDRLRLL

SEQ ID NO: 346654 - protein, 49 aa, Zea mays
  Clone ID: MRT4577_79312C.1.pep
MGKRKSAAKPPSKKRMDRLDTGFVCRFWNHWRSVVCVIDIRNLIGSGCR

SEQ ID NO: 346655 - protein, 130 aa, Zea mays
  unsure (1)..(130): unsure at all Xaa locations
  Clone ID: MRT4577_79313C.1.pep
MAIIKIRINCFGGSGYLVARLALHSDDFXLVTVNDPFISTDYMTYMFKYDTVHGQWKHHEVKVKDSKTLLFGEKEVAVFGCRNPYDIPWGSLSSEYVVESTDVFTDQXKAAAHLKGGAKKVVISVPNKDS

SEQ ID NO: 346656 - protein, 138 aa, Zea mays
  Clone ID: MRT4577_79314C.1.pep
ISIGLSGGCGQRTLASEAGARCSAASSHPPRLPPPPSLLPRFPPSQSPPSQSLSRPWMVVAAPWSMATQLRCRGRWAWGLNGSTGAAAGGASSRAWAVPQRRTHALISDKLDMVMEVRPMLVGRASMKPKEGKCQPRQ

SEQ ID NO: 346657 - protein, 141 aa, Zea mays
  unsure (1)..(141): unsure at all Xaa locations
  Clone ID: MRT4577_79315C.1.pep
PRVRSAHAKLFLEKMLREDWAISHNTYTYLMIGLCEERNISRFWXCRNLATKCRWSPDSXDMMGLISYLCKWXVIEEALKLMNSLFDCYHDLFLSAYCALLKQLRRTGHTSIGCSLLEDVKEQGVAVHRSLFLYVMDGFLK

SEQ ID NO: 346658 - protein, 200 aa, Zea mays
  unsure (1)..(200): unsure at all Xaa locations
  Clone ID: MRT4577_79316C.1.pep
NVKPKHHPIRSDFVEMKPAVEAEADERAAEEMAPKKAAAAKKAALHPQNYPIHHPRTLNKSSIGRARESTDGTAAGGSVADWRRSVRGGRGSAAGWRPLLEGNQEGRKEIGIKTGTATMAPSQAAAAAGPTFEDLERDLQAVLMDQNHMSPVDDLGMFRSGSAPPTVEGSRTAIGALFSGHRFTPTALAXGRAXVGLLLP

SEQ ID NO: 346659 - protein, 102 aa, Zea mays
  unsure (1)..(102): unsure at all Xaa locations
  Clone ID: MRT4577_79317C.1.pep
EEQRAXXXPPRXRRRRTAXRRRRRXXRRXGGGRRAAGRGRARRRGGGAPSWRPMGREAGSAAAXAAAAAATALARLGCLLPGGERDCERNNQTNGREEGCVT

SEQ ID NO: 346660 - protein, 86 aa, Zea mays
  Clone ID: MRT4577_79318C.1.pep
MAATSSKQPAAARPVQGAAAALLVIADVAVSVLDMSTEQVSDMNNEQVKTSHPAAATTTDPSDAPAQAYRNSLSGADNKCRIGYNN

SEQ ID NO: 346661 - protein, 53 aa, Zea mays
  Clone ID: MRT4577_79319C.1.pep
VFLLLPLGGGYRRRCPASVCVSAVLLGPRAGVGGPRPRGGARQRRLCSRASLL

SEQ ID NO: 346662 - protein, 75 aa, Zea mays
  Clone ID: MRT4577_7931C.1.pep
GVAGMYEACSVIISENGEEGEVTQEKTPPLESRARTWLYFDNCESEPDSPTNEGEEATYFCCFCSKVVPNEEKQD

SEQ ID NO: 346663 - protein, 259 aa, Zea mays
  unsure (1)..(259): unsure at all Xaa locations
  Clone ID: MRT4577_79320C.1.pep
MSLTRLSRLLLLLLCAALPMLFFTCAEAGEVGVSYGRIGNNLMDPASVVQLLKSNGITMVRVYDTDSTVLNAMKNTGIKLVVAVPNENVALAAADPNWAVQWAKNNLMPYYPATDIRGVTVGNEVFNQAKGLTSQLLPAMRNVQAALAGLGLADAVKVTTPIAFNALKKSFPPSKSLFQDDIAQSVMSPTIDFLEQTGSYLMANIYPYYTYTSQSDTINLNYATFRPNDXVVDDGTGVRYDTCLTXQLDXVYYAIDIYG

SEQ ID NO: 346664 - protein, 70 aa, Zea mays
  Clone ID: MRT4577_79321C.1.pep
TTEPNKFDEKLGYIYRYFIGLVGFNNYFEKRNFFLKFGRLLIPFLLIFNFLAIGGGIKQIFLLEGFHLFT

SEQ ID NO: 346665 - protein, 148 aa, Zea mays
  Clone ID: MRT4577_79322C.1.pep
MPTTEKGSDNTRYLALTALATNMRLQVAMEVKEGVSINLMGCHCIVDISRIVFSRKSNQCTQWVRPMDQQGAMNSFTGLTSPFMLSSSPLPKTLMAGKKDGKGWKKNRGDKRERPPTPPLEDFGDSELSDERTPPSSPSSPSSVCTDD

SEQ ID NO: 346666 - protein, 67 aa, Zea mays
  Clone ID: MRT4577_79323C.1.pep
WFTPGSPPGNNARRGPDSGPFMLVFLVVFISFFFFFPLSFFFIFFFFFFPETIGVHILEADVSRQSC

SEQ ID NO: 346667 - protein, 73 aa, Zea mays
  Clone ID: MRT4577_79324C.1.pep
HDHTPAKAHDPASANDVGTTESWPGVWQDDRGQDIVNDEGNRNTPSHAPLTDSERLVAHVENNHGGMKPINTG

SEQ ID NO: 346668 - protein, 53 aa, Zea mays
  unsure (1)..(53): unsure at all Xaa locations
  Clone ID: MRT4577_79325C.1.pep
FIAWXPDTARVRCLIIYASSKGGFKREVDGIQVDLQATDSAXVGLDVIQGHAC

SEQ ID NO: 346669 - protein, 89 aa, Zea mays
  Clone ID: MRT4577_79326C.1.pep
SKKSLQNVFRDRRSHPKMAMVIDDRLNVWDDKDQHRVHVVPAYIPYYAPQAEMANAVPVLCVARNVACNVRGGFFREFDENLLRKVFEL

SEQ ID NO: 346670 - protein, 75 aa, Zea mays
  Clone ID: MRT4577_79327C.1.pep
HIVRKLKMQILGDNPAVQNMSSDSSSNYVEIYNSKRSFHPGFKVHDKKIVYMFHPGSFALCFNVHRPDAQSRSTH

SEQ ID NO: 346671 - protein, 256 aa, Zea mays
  Clone ID: MRT4577_79328C.1.pep
MLLILVFLLFFSSLDLQISGATTDTLTLGQSLPWNQTLVSKGGNFELGLFSPGKSKKHYIGIWFKKVSKQTVVWVANRDRPILDPSASRFTLSNRGELLLHATPSNTLLWSSNASSPSPRTTVATLQDDGNLVVRSNASSAPVAWQSFDHPTDTWLPGARLGYDRARGVHSFLTSWTDADNPAPGAFSMEIDPRGQAKFDLLAGGTHQYWTTGVWDGEVFENVPEMRSGYFEGVTYAPNASVNFFSYKNRVPGIGN

SEQ ID NO: 346672 - protein, 92 aa, Zea mays
  unsure (1)..(92): unsure at all Xaa locations
  Clone ID: MRT4577_79329C.1.pep
CVLVLGPVDGAVAVKSGGSVGGQAFLSAAPXRPXPRINDSRTNIYINPPVAPPLGGYGYGSPFFGGYGYCWSPFIFFARGPSVSVGVGGGFD

SEQ ID NO: 346673 - protein, 96 aa, Zea mays
  Clone ID: MRT4577_7932C.1.pep
LVDIYHSSIRKHIVVISIHHMAASELIQSHSCKQFSHVNERVSGRFILVSGINHDLSYSCSGSCCRCFLTELIVSHSPHGGVYEPFVQSQCAHDPD

SEQ ID NO: 346674 - protein, 182 aa, Zea mays
  unsure (1)..(182): unsure at all Xaa locations
  Clone ID: MRT4577_79330C.1.pep
KKQILPAPSRPPPISPPLPWGRPPFPLGEPXSPGPLRPXPPPPGTTVLPPPPPHLNSPMLKISSPXPQGGAPPSFYWERAPRPLSPLRNTPSPPLFKITRHPPRGRGSYSPPPGVFFSPMDPPPFFPPPPPPKIYPPAPLFPSGQISLWGSPXNQXPFVSPPTPPPPSLXSLPPPFCPPRPS

SEQ ID NO: 346675 - protein, 102 aa, Zea mays
  Clone ID: MRT4577_79331C.1.pep
VILMGAVEGYRVAGNGPLGEAEDLLYPGGSFDPLGLATDPEAFAQLKVKELKNGRLAMFSMFGFFVQAIVTGKGPIENLADHLADPVNNNAWAFATNFVPGK

SEQ ID NO: 346676 - protein, 131 aa, Zea mays
  Clone ID: MRT4577_79332C.1.pep
SPNTTSHQPRLHSRTPASATKISIPISPSDAALFDAGRLFFFAMACLVSEVALGLSPPGACCLLRGGGALLALSLVRRGPVCLGLLRAAVAALVGARAVGPRGSDALWCLGFAPACRGSLAPDAGLRGELF

SEQ ID NO: 346677 - protein, 95 aa, Zea mays
  Clone ID: MRT4577_79333C.1.pep
SMSPRASVPHALALTLCHPHCITPQCPRAYRPRPQPPHSCNPVAAALAVPAPPSLLLPLPSSPYRSAIVVGPSDLKQLLMESWSWACPRGRPVTL

SEQ ID NO: 346678 - protein, 116 aa, Zea mays
  Clone ID: MRT4577_79334C.1.pep
KTPPPRGEIGYITSRGNTNMPPKKKKRGKTPFFLTPALFFFPFGPKKTRRWRHLTPRFFSHFYPTKAVQTLDAQNLSLKGSGGVSFLNSRGPWVGGVVAAPAVSLFFLKKTTKSPP

SEQ ID NO: 346679 - protein, 47 aa, Zea mays
  Clone ID: MRT4577_79335C.1.pep
FSPNVDDSLRLASLHILAPIQHIDTHDLTFHPVKTHIDPSSYYRSDS

SEQ ID NO: 346680 - protein, 103 aa, Zea mays
  Clone ID: MRT4577_79336C.1.pep
YVKPVHHGGNRLKFVGGLHTAAEARACHHCISLIFLNYYWTGEYSTYKFIAVILIYPFHKAIKIHPDTQLITKPLHKHNNILCITSADRMSPGLQKYHMLHHT

SEQ ID NO: 346681 - protein, 73 aa, Zea mays
  Clone ID: MRT4577_79337C.1.pep
NIDSQNRPARSVKWITIGIQVGKVVQLMSIGSPSVGPVLTTLSAELCAFPPSTPYTTLSQRGVIVLHITTSAA

SEQ ID NO: 346682 - protein, 199 aa, Zea mays
  Clone ID: MRT4577_79338C.1.pep
MAENPQLFGNGMPVPFYSEMFVLARDGVEFHVDKIPSAPGGHVKTKGTIYLSNIRMVFVANKHVGNFFAFDMPLKFNQPIFHCNNISGFVEPVVPDNQNRALYSTHTFKVLFKDGGCGTFVPLFLNLTASVRRYNQFETQSAASMAPRVDPLQAVQTPVDDMMRHAYVDPNDPTKIFLQQPAPESQLRRRNYHGPADAN

SEQ ID NO: 346683 - protein, 261 aa, Zea mays
  Clone ID: MRT4577_79339C.1.pep
MSAQRARHASRLGGSNSTTQPTPPSLYAKKHHRETRVVLLSVFARRSIKEEEGEGEMAENPQLFGNGMPVPFYGEMFVLVRDGVEFHVDKIPSAPGGHVKTKGTIYLSNIRMVFVASKPVGNFFAFDMPLLFVHGEKFNQPIFHCNNISGFVEPVVPDNQNRALYSTHTFKILFKEGGCGTFVPLFLNLTASVRRYNEFEAQSAANMAPRVDPLQAAQTPVDDMMRHAYVDPNDPTKIYLQQPAPESQLRRRNYHGPADAN

SEQ ID NO: 346684 - protein, 70 aa, Zea mays
  unsure (1)..(70): unsure at all Xaa locations
  Clone ID: MRT4577_7933C.1.pep
ILQRLVREMCVGLXTDLHLQSYYVATLTEADVAYLVVLYEDTNLCAIHAKRVTIMPKDMQLARRIRGERA

SEQ ID NO: 346685 - protein, 255 aa, Zea mays
  Clone ID: MRT4577_79340C.1.pep
MNFGASSRGGNRPHRATVPCQLPSITAKSNNSLLFVFAPRSIQEGEAEGGMAENPQLFGNGMPVPFYSEMFVLARDGVEFHVDKIPSAPGGHVKTKGTIYLSNIRMVFVANKHVGNFFAFDMPLLFVHGQKFNQPIFHCNNISGFVEPVVPDNQNRALYSTHTFKVLFKDGGCGTFVPLFLNLTASVRRYNQFETQSAASMAPRVDPLQAVQTPVDDMMRHAYVDPNDPTKIFLQQPAPESQLRRRNYHGPADAN

SEQ ID NO: 346686 - protein, 89 aa, Zea mays
  unsure (1)..(89): unsure at all Xaa locations
  Clone ID: MRT4577_79341C.1.pep
HQXTARLGAXPRLAAAPPRSAQLLGCKARKQEAXGDQSDVSRRAALALLAGXTGVAGARVGPAXXVYGEAXXVFXGLKVSTVXIXYRGD

SEQ ID NO: 346687 - protein, 108 aa, Zea mays
  Clone ID: MRT4577_79342C.1.pep
CLYALDMLEAGLMPQPDTFAKLMKGLKKLYNRQIAAEITEEVRKMAEERHVSFKMYKRRGVRDLEEKLKAKRRGQKKRHLRQPGHGQEPSGTSITCEVVCQELLTMRR

SEQ ID NO: 346688 - protein, 57 aa, Zea mays
  Clone ID: MRT4577_79343C.1.pep
GVNYIHSTRSIQSCTSSIGLYCRSILEGPVFVDWGHTRFARQQPKVCKILNTPTHTH

SEQ ID NO: 346689 - protein, 46 aa, Zea mays
  Clone ID: MRT4577_79344C.1.pep
MTYNTRRPWRGRVELCRGLRWQPWQDPSRRPLIYERLHDASQHVQH

SEQ ID NO: 346690 - protein, 428 aa, Zea mays
  Clone ID: MRT4577_79345C.1.pep
FGTVLTAEQLVEEVQPRLPLSLRHYTALLYGWCRQGKLDEAKHVLARMKAADVALDVVVFNTLLAGFVAEGRFEDAFELAGQMEQRGCPPNAVSYTTLIQGLGARGRVDEAMRVFVEMRRKGCAPDAVTYGTLVNTFCKAGKISQGYEFLDAMSRDGLRVDAAVYHGFFVAHEKKEQLEECLELMERMRECRCPPDLKIYNVVIRLACRLGETKQAMTLWNEMESAGLSPVVDTFAIVVSGLVGQGLLIEACSYFKDMVGRGLFVIPQYGVLKDLLNALVRDEKLELAKDVWKCIVSKGCELNVSAWTIWIHALFAKKHVKEACLYCLDMLEAGLMPQPDTFAKLMKGLKKLYNRQIAAEITEKVRKMAEERHVSFKMYKRRGVRDLEEKLKAKRRGQKKRHLRQPGHGQSSRDAGNLDASDEVEFSG

SEQ ID NO: 346691 - protein, 80 aa, Zea mays
  Clone ID: MRT4577_79346C.1.pep
LAGIIPGVFLCKRTGPKGFSNYTAIHPNPHVNWGELQRSQIRAKVEAMFQIIILFLLLKGVGFETRFFFEMRETEIIMYT

SEQ ID NO: 346692 - protein, 81 aa, Zea mays
  Clone ID: MRT4577_79347C.1.pep
VPKKGGQGMKGLGIHLFREDQRVYELNLKGGEIKRAPFFCLNQTEWVFFLRTRNQAGGFLEFGQTRRALTIPSFFPRRGGA

SEQ ID NO: 346693 - protein, 149 aa, Zea mays
  Clone ID: MRT4577_79348C.1.pep
ERRGDFLDAVRLLKLNKQPRAKSLWTLGRRLLLLRRSRKQQQQPVAVEQDSEGEKSHLLSRSSLEQLLVTSSTDGAACRCAKKLGQPVAPLLPEAADADADAAAGAASPTGGAHRGAAPAAHRRFMLGGFRRRLLMRRPWRSMLVCIPE

SEQ ID NO: 346694 - protein, 986 aa, Zea mays
  unsure (1)..(986): unsure at all Xaa locations
  Clone ID: MRT4577_79349C.1.pep
ATNPEPRHEASPVVLNDGSIHELAPASADSVLEDSLEKEQNAENLATASEAVEDVGAEVENVAAPSVDGILSRELAPESINEXNNGADEIEGAXEVVDREEEVAYNDIIEAVPDDEDGIDNEADDDNDGANSYTNPARVAILESSEAAKQIMKELTEGSSSGNVSRDFTNSMDGQIMLDDSEDDDDGDEKEFDSAALAALLKAATGGSSDGNVTVASQDGSRIFTMDRPAGLGSSAPSLRPTAPRQPARSNLFSPSELAVTADPTEEMTEEEKKLHDKVELIRVKFLRLVYRLGATPEETVAAQVLYRLSLAEGIRHGRQTNRAFSLDNARRKALLLEAEGKEDLNFSCNILVLGKTGVGKSATINSIFGEEKSRTDAFSSATTNVREIIGDVDGVKIRIIDTPGLRPNVMDQGSNRKILAAVKNYTKKCPPDIVLYVDRLDSLSRDLNDLPLLKTITAVLGSSIWFNAIVALTHAASAPPEGLNGAPMTYEVLMAQRSHIIQQSIRQAAGDMRLMNPVALVENHPSCRKNREGQKVLPNGQSWRHQMLLLCYSSKILSEANSLLKLQDPNPGKLFGFRFRSPPLPFLLSSLLQSRAHPKLSAEQGGNEGDSDIELDDYSDVEQDDEEEEYDQLPPFKPLTKAQLARLTKEQKNAYFDEYDYRVKLLQKKQWKDEIRRLKEMKKRGKTDLDDYGYANIAGENDQDPPPENVSVPLPDMVLPPSFDCDNPTYRYRFLESTSTVLARPVLDAHGWDHDCGYDGVSVEETLAILSRFPANVAVQVTKDKKEFSIHLDSSIAAKHGENASSLAGFDIQTVGRQLAYILRGEAKIKNIKKNKTTGGFSVTFLGDIVATGLKVEDQLSLGKRLSLVASTGAMRAQGETAYGANLEARLKDKDYPIGQSLSTLGLSLMKWRRDLALGANLQSQFSIGRGSKMAVRLGLNNKLSGQITVRTSTSEQVQIALLGLVPVAASIYRSFRPSEPSFAY

SEQ ID NO: 346695 - protein, 141 aa, Zea mays
  Clone ID: MRT4577_7934C.1.pep
ITFSGRARRVGVLRCLVAAVVVTILLAGLAALIFWLVVRPKPIDYTVTRAVARHFNVTPPPDATANATFYLTLAAGNPNRRVSVLYQWVEVPGLTGEEAQLAVEDAPAFRQPRRNETLWDVRRRGAVGARRGASPAGAAAR

SEQ ID NO: 346696 - protein, 352 aa, Zea mays
  Clone ID: MRT4577_79350C.1.pep
LLCEPCKLSFGQGLTKEQKNAYFDEYDYRVKLLQKKQWKDEIRRLKEMKKRGKTDLDDYGYANITGEDDQDPPPENVSVPLPDMVLPPSFDCDNPTYRYRFLEPTSTVLARPVLDAHGWDHDCGYDGVSVEETLAILSRFPANVAVQVTKDKKEFSIHLDSSIAAKHGENTSSLAGFDIQTVGRQLAYILRGETKIKNIKKNKTTGGFSVTFLGDIVATGLKIEDQLSLGKRLSLVASTGAMRAQGDTAYGANLEARLKDKDYPIAQSLSTLGLSLMKWRRDLALGANLQSQFSIGRGSKMAVRLGLNNKLSGQITVRTSTSEQVQIALLGLVPVAASIYRSFRPSEPSFAY

SEQ ID NO: 346697 - protein, 122 aa, Zea mays
  unsure (1)..(122): unsure at all Xaa locations
  Clone ID: MRT4577_79351C.1.pep
FLFPSPHFPLQPQSPTAAIFLLAYFLFLVVTILFHNFKVTAIATPIDNFPFIVFSSRDKSVLVWDLTNPFHSTXNPAXTADYSVPFRRLTGHSHFVQDVFLSSDGHFSLFCFLDGELRLCDL

SEQ ID NO: 346698 - protein, 68 aa, Zea mays
  Clone ID: MRT4577_79352C.1.pep
NLVELHIDVDQKLAIDRPIVQRLYHTRVRTQQNQIEQWSLRRPNESTIIWKRNDLMCHKINTENETSW

SEQ ID NO: 346699 - protein, 63 aa, Zea mays
  Clone ID: MRT4577_79353C.1.pep
IIFGQKKSLLHTIIVSKERSREMTSQTFFLFRQFAKLKTRAHTNNHDMLVNLALATCFYHNKV

SEQ ID NO: 346700 - protein, 116 aa, Zea mays
  Clone ID: MRT4577_79354C.1.pep
KIRRCYPSVLLKMVVHAIFEKKGVVWPMIKDERLIHLSPHMFTCHRSHSWISIGYHFLVKNCMCYPSVLLKMVVHAIFNKNRGCGPLSSTKGSYTSSHICFIAIDHMLGFLVETKS

SEQ ID NO: 346701 - protein, 44 aa, Zea mays
  Clone ID: MRT4577_79355C.1.pep
RIRGDLSGCGRNNNGGANPEAERYTNGDDARSYECSACFDHPRG

SEQ ID NO: 346702 - protein, 84 aa, Zea mays
  unsure (1)..(84): unsure at all Xaa locations
  Clone ID: MRT4577_79356C.1.pep
MATTGASSLLKFFFAGSRFXXXTRTNTPLFVAVATPRAGGGPIRAFIFFPNPAYDLTFFRFSPIKESIVFREMTRRYMTDMITH

SEQ ID NO: 346703 - protein, 95 aa, Zea mays
  Clone ID: MRT4577_79357C.1.pep
KKLAKTQNKTKQTTQDIEQKGIILDLECNKVLQEDQEGPLQGPRQGEHQDHLLLLEEQHGDSVRALRLLGGRLQAHLLFYQGHHRHTHLFCAYAS

SEQ ID NO: 346704 - protein, 59 aa, Zea mays
  Clone ID: MRT4577_79358C.1.pep
MSKSGALDLASGLGGKINKVEVKSAVDEYEKYHGYYGGKEEARKSNYTDMVNKYYDPAT

SEQ ID NO: 346705 - protein, 43 aa, Zea mays
  Clone ID: MRT4577_79359C.1.pep
NYLFYFGFCSVFSPHFQHPPPPPRLIKRANSPHCSARNVVLCN

SEQ ID NO: 346706 - protein, 79 aa, Zea mays
  Clone ID: MRT4577_7935C.1.pep
HFCREHLPKSDETITLVDEEDDESDTFYLAMQAGLSTGWKEFAIQHKLLDGDCLVFQLIERTKFKVYIIRATLYFESDH

SEQ ID NO: 346707 - protein, 118 aa, Zea mays
  Clone ID: MRT4577_79360C.1.pep
HVDSAPSINTHRVPNPNPGTANPQTNETKRTSQNHLDNSRKNRNKLMQVKPMQGKTVSGAPPQPNARKVAGGPGRAQPARQTYRGPGVLQCEERRIRRGASRDAAGGGIWCLPPARSG

SEQ ID NO: 346708 - protein, 345 aa, Zea mays
  unsure (1)..(345): unsure at all Xaa locations
  Clone ID: MRT4577_79361C.1.pep
MSKSGALDLASGLGGKINKVEVKSAVDEYEKYHGYYGGKEEARKSNYTDMVNKYYDLATSFYEYGWGESFHFAHRWNGESLRESIKRHEHFLALQLGLKPGMKVLDVGCGIGGPLREIARFSSTSVTGLNNNEYQITRGKELNRLAGISGTCDFXVRADFMKMPFDDNTFXAGYAIEATCHAPDPVGCYKEIYRVLKPGQCFAVYEWCITDHYDPNNATHKRIKDEIELGNGLPDIRSTRQCLQAVKDAGFEVVWDKDLAEDSPLPWYLPLDPSRFSLSSFRLTSVGRMITRTMVKALEYVGLAPQGSERVSNFLEKAAEGLVEGGKKEIFTPMYFFLVRKPLLE

SEQ ID NO: 346709 - protein, 189 aa, Zea mays
  Clone ID: MRT4577_79362C.1.pep
RPVRVQFSNRKSSYPIATKFISQFSTWAKFWLSAKKDKKTKRKTIHPAHNKSLDAIPHSQRDLLYQVTCHKLRPNANKKIFSLGDVLHIRKFWEKIERLIYQHEMGYVPSTKRIPFNPDIPGSIYLPKRSRKHILPKTRREPFASSHIVYTFKQDINSIETQQLISDDDDDDDNVPLGILHFSKPFHPM

SEQ ID NO: 346710 - protein, 127 aa, Zea mays
  Clone ID: MRT4577_79363C.1.pep
RRTSQTDHLFFAPALVTLSSVGSFLLHTGDVGDRHGVRHVTDSVEDKSRDIQIGVSFYIELSSDPCLASSASSFVTRFGLRLSSVRPNSPIHAVVDQRPSTLGSNVRRVSVSALRQNRPQSEQAVSL

SEQ ID NO: 346711 - protein, 51 aa, Zea mays
  Clone ID: MRT4577_79364C.1.pep
PKSPQRFKCIFRWRCSNSPSCSFTLVVLKVKTHVELYGGETTPKLSYFPSG

SEQ ID NO: 346712 - protein, 65 aa, Zea mays
  Clone ID: MRT4577_79365C.1.pep
GQLKVLWFLAWIRKSRNLDVSLEAVVERSGWTVCQIRCPRKKKRVYWVDRIPCFRAELKNKFVRK

SEQ ID NO: 346713 - protein, 71 aa, Zea mays
  Clone ID: MRT4577_79366C.1.pep
VRLSTNTSTPFVRWTVLHNEFQGAVFVGMYARVFTRKLVDPFAAPVPNHKLVRSPLIYYCGKNRKFGLYSI

SEQ ID NO: 346714 - protein, 93 aa, Zea mays
  unsure (1)..(93): unsure at all Xaa locations
  Clone ID: MRT4577_79367C.1.pep
PTASAHASAHAFAHAFAHAYAHACAHASGIDNAMRALLLLALFCVEHGENFFSKGNDAKAGGPGGPFDITKXGASGNXGVTDRTXKAVQEAGA

SEQ ID NO: 346715 - protein, 67 aa, Zea mays
  unsure (1)..(67): unsure at all Xaa locations
  Clone ID: MRT4577_79368C.1.pep
QLPEGSKXMVPVWLEILNSDHWPESSRRKLSKKMRQARLVKKERRGWLLGAIHFRAFSPVKVCCWSL

SEQ ID NO: 346716 - protein, 190 aa, Zea mays
  unsure (1)..(190): unsure at all Xaa locations
  Clone ID: MRT4577_79369C.1.pep
MAAERVAPRGGPVVAPSRRRLWPPLPRQMHRSRAPLQPDTCFLPRLPPRRTATPHIPSQHKMXIYTATSRHTTTRSRPLPLYGTHSTSAGDTFYWMRALLTSNRACGREVPITPTVTSRLXMQLLIGSKIIVRHNHLTEDPPLLNAAQKHVAIFIAIDELVQYALPGMHGSARLLATGNAILLILQLFFG

SEQ ID NO: 346717 - protein, 124 aa, Zea mays
  Clone ID: MRT4577_7936C.1.pep
KILRQIRGIELITRDTRVDPVGSSKPSIATTLRTDSSSHRTRLARAGDPIPIGITPSSGIKPNSTKETAQLQLVCTRQLRAPPPSSLQPATPAASAREWAEPQLAPRVASLFSSLEQLRAIAVS

SEQ ID NO: 346718 - protein, 103 aa, Zea mays
  Clone ID: MRT4577_79370C.1.pep
IELPPFCFFFKNPTGPPKKKKKSPRGAPPIFCRGQTGFYHHHHRSLKGCLKNPPLLRERWPKSPTGGGFFLKKRGKLFIFFFQTPPGSGGGPSLSPKGNLTYL

SEQ ID NO: 346719 - protein, 173 aa, Zea mays
  unsure (1)..(173): unsure at all Xaa locations
  Clone ID: MRT4577_79372C.1.pep
NIFQLLLCSSSALYARAKKILAAKPKETGKTKTHNRSNYMRSKLIFIAFYLFNIHVRHTDPVQKTFILLLLMSVTSASYYCSSLFFAKRDALLRKRFKYCCSSLYVQEAPLFTIDASLYVFSXRNTTSHYGNLKSRQQKYPFMHNLTNFKLVAVLSTSTTDSYFDLAHEKRPS

SEQ ID NO: 346720 - protein, 29 aa, Zea mays
  Clone ID: MRT4577_79373C.1.pep
VLIEVHGYNHCRIISLTFGLLLVTEHSSL

SEQ ID NO: 346721 - protein, 169 aa, Zea mays
  Clone ID: MRT4577_79374C.1.pep
GTLGFGQAGTTNYVWSVGVQFGWRTYLALAHNTEYSPQYAQARAAPGGSLPASSIPRSRSSVASMQYPDPSLLPSSTPVDPGSYATCTQTPHAWVPQLRGAGSGYFHPSGDPTPVRCILGDTSRWHTDDPRPSAHTVVARHRILTSLYHTSCEPPTVPFILENTSALDR

SEQ ID NO: 346722 - protein, 94 aa, Zea mays
  Clone ID: MRT4577_79375C.1.pep
VLLPPNLFWRFTNPVQKHKRTALLFPGQLEPKLVFFAFKKHQFGEKFVFAICLIEQSQKLCQLGMPNYFPPRGGSLNPKKNPCHSCFGFCLGCV

SEQ ID NO: 346723 - protein, 58 aa, Zea mays
  Clone ID: MRT4577_79376C.1.pep
MKWYLISFKKKKKKKKKKKKKKKKKKKKKKKKKKKKKKKKKKKKKKKKKGGAPPSRFF

SEQ ID NO: 346724 - protein, 104 aa, Zea mays
  unsure (1)..(104): unsure at all Xaa locations
  Clone ID: MRT4577_79377C.1.pep
MNRCDWDQPEHQRRXSPTHAKGGSGGGDADEATKGAHGLGILTERDQHKTLDYQXILPNRHKAGFALHGRLIVDGERLKESGCIGYSIXGKPLDAWLKDMPADS

SEQ ID NO: 346725 - protein, 513 aa, Zea mays
  Clone ID: MRT4577_79378C.1.pep
METTAPAAASGTIQNARHRTSALKLCYHLAVSNAMYLLLAPAAAAAAHWLSRHSAAELAGSARSAAAANPPLAVALLVLGAVLATAYLMRRPRGVYLVDFACYKPGGEHVVTRETFMRQSEAAGVFTGDNLAFQRKILERSGLGQGTYFPKAVLNSPPNPCMAEARAEAEAVMFGAIDQVLAKTGVRARDIGVVVVNCSLFNPTPSLSAMIVNHYKLRGNVASYNLGGMGCSAGLISIDLAKQLLQVHRDTYALVVSMENITLNWYWGNNRSMLMSNCLFRMGGAAVLLTNRRSERRRAKYQLVHTVRTHHGADDRAYRCVFQEEDETGRVGVALSKDLMAVAGEALRTNITTLGPLALPMSEQILFLASLVARRVFGARGVRPYIPDFKMAFEHFCIHAGGRAVLDTIEKNLGLSAWHMEPSRMTLYRWGNTSSSSLWYELAYTEAQGRVRRGHRAWQIAFGSGFKCNSAVWRALRTIDPAKEKPAGGNPWVDEIHNFPVEVPKVESVVMSS

SEQ ID NO: 346726 - protein, 59 aa, Zea mays
  Clone ID: MRT4577_79379C.1.pep
HASTDASTYAWINPINSYRHVIVSKLPMLLILLLCNESTVHTLYHIVQDSYQKTQFYKI

SEQ ID NO: 346727 - protein, 54 aa, Zea mays
  Clone ID: MRT4577_7937C.1.pep
YNIHWLFNLQISIILSVDKLQIFQLRLYIESRSFRSCFTLSMKVLTLIIYCHVC

SEQ ID NO: 346728 - protein, 63 aa, Zea mays
  unsure (1)..(63): unsure at all Xaa locations
  Clone ID: MRT4577_79380C.1.pep
XAQFSRPXQIFSTQSLQPXRRGAGSKANKGRLGARLAAPGRSRCRGPSRPGCSSPVARIGRYL

SEQ ID NO: 346729 - protein, 226 aa, Zea mays
  Clone ID: MRT4577_79381C.1.pep
MAATFNVNAEAGLKKLDGYLLSRSYISGYQASKDDLAVYSEFSVAPPSTCTNVARWYNHIDALLKLSGVTAPGQGVKVLSSVVPETSTTDVAEAPAADDDDDSDVDLFGEETEEEKKAAEERAAKAKASTKKKESGKSSVLLDVKPWDDETDMVKLEEAVRSIKMEGLLWGASKLMPVGYGIKKLQIMMTIIDDLVSVDTLIEDHLCVEPANEYIQSCDIVAFNKI

SEQ ID NO: 346730 - protein, 37 aa, Zea mays
  Clone ID: MRT4577_79382C.1.pep
VVGYFQAIRRENNIMSGQVLCHITYFSHFHDLFSHSF

SEQ ID NO: 346731 - protein, 466 aa, Zea mays
  unsure (1)..(466): unsure at all Xaa locations
  Clone ID: MRT4577_79383C.1.pep
MAREPSPEIDDELYNEVYGKAYSGPVASATNSVTPKGNAEKRPLTRDKSDDEDEAPDPNAVPTDFTSREAKVWEAKAKATERNWKKRKEEEMICKICGDPGHFTQGCPSTLGANKRNADFFERVPARDKQVRDLFNERVISQIEKDVGCKIRMDEKFLFVSGKDRLILSKGVSAVHKIIQEGKGKHSPSSPKRDRSRSPVRNTTEFRPKHSDSXAHLAQEFDXQWSHSPRNASLSQSKGYYSERHRDGRLHNNMPKFSKGSPQAHANFGAKGRPAQSKSPRHTSYLDELPRTHGENNQFAASRVPNDWGIERHGADASSSLRFDMPSHQQTLEELEMEFKKEATQLARARDQEEDEENYRHRESLRVIRENYMERVITLRNVHAKKWEEFLDTFKSQQQAQPSYIQTGYLGFEQRTAHISATHQPMDSKSTYPYASDSYSAPKAHAAYGEFQHERHDDLGRAYRRY

SEQ ID NO: 346732 - protein, 68 aa, Zea mays
  Clone ID: MRT4577_79384C.1.pep
VVFRCVRIGPVDEPYSELAYQTGVSIGVYTFKGILRDHGPVVYAAVGQLAPSCADYHHQLMVVEATEG

SEQ ID NO: 346733 - protein, 47 aa, Zea mays
  Clone ID: MRT4577_79385C.1.pep
QICSSSQNPPEFIIPVLSHLNLKYIYIYYTSIKSHGLHHTNVHLHQL

SEQ ID NO: 346734 - protein, 74 aa, Zea mays
  Clone ID: MRT4577_79386C.1.pep
NYYGLGNNYNRNWSHSSKTILTYPGWDTNIVSKWRTRGHDQVIRSGALPYNHIAAPRGVFVTASYYYAGSHPVR

SEQ ID NO: 346735 - protein, 45 aa, Zea mays
  Clone ID: MRT4577_79387C.1.pep
TRVMHMSGLMQAIWRRPHAGLGTGCTQGKEAARAAHAGGNLPAGS

SEQ ID NO: 346736 - protein, 65 aa, Zea mays
  Clone ID: MRT4577_79388C.1.pep
SAVSYYAYYGKKLDPEPWRCRRTDGKKWRCSKEAHPDSKYCERHMHRGRNRSRKPVESKTASSPP

SEQ ID NO: 346737 - protein, 82 aa, Zea mays
  Clone ID: MRT4577_79389C.1.pep
QAKIEKIQIEHLMRKVALVQNHLLTHEDQEYSQESKKPLFVKIDNLPGPVRIFPVVPRVPGRLPDAWGGAWRPLGFPWVTQP

SEQ ID NO: 346738 - protein, 253 aa, Zea mays
  Clone ID: MRT4577_7938C.1.pep
MAEAVAVAYEEQRRRQIEMNKRKLEELQLHHLSAAVREAAAAAKPSSAKKRKAPVPRDAATEPPRRSDRLANLPEKPMYREVRVNLPFPEGSKSNARVPLDAANSVVAEPLRWSDRLANLPKKPMYHEDSDEERSYAISKAEELVQELGSSFPIFTQPMTLSHVSGGFWLGLPKHFCREHLPKSDETITLVDEEDDESDTFYLAMQAGLSTGWKEFAIQHKLLDGDCLVFQLIERTKFKVYIIRATLYFESDH

SEQ ID NO: 346739 - protein, 124 aa, Zea mays
  unsure (1)..(124): unsure at all Xaa locations
  Clone ID: MRT4577_79390C.1.pep
PEGGIVQALSTRNRWNGYSMDYQGKNKLVFSLTDPKSCTAQGIRIHIEHLRGXKNWDFEIGGSFADRDCTIVDCTRKIVAQMGTKEPIGGKDFYHVEVQSGYDQAFIIGVMAILDNIHGESTRC

SEQ ID NO: 346740 - protein, 94 aa, Zea mays
  Clone ID: MRT4577_79391C.1.pep
LRIIGPEITVNAGEKITEDKLDSNGGPHLHRQQTKSTIIFTTDINLHQHVYTGPSHFPPVLDATKATNVRRRRPTTSQQGDVAQLVNPRRDHLP

SEQ ID NO: 346741 - protein, 109 aa, Zea mays
  unsure (1)..(109): unsure at all Xaa locations
  Clone ID: MRT4577_79392C.1.pep
PPSIPHLNPVLSRRRLLLVWFPTVADAATPSRRSAARIADAAAPFLSLPPWLSFPRRCSDLAALQRSLLPRLPPLTLDAGSHQLPPMAVSSHLPWPTPTPPMDVXPSLL

SEQ ID NO: 346742 - protein, 208 aa, Zea mays
  Clone ID: MRT4577_79393C.1.pep
MDKSIPVVSKIFCSGTPTMLMIRMRPIVVNGGGFVVTDLSHNIVFVVDGCGILGSKGELMVKDGEGEPILFISKKGGIVQALSTRNKWNVYSMDYQGKNKLVFSLTDPKLCTAQGAPIRIHIEPKRHCKNWDFEIGGSFADRDCTIVDCTRKIVAQVCHAFIIPYTSAFVVNYICRFLVSSLIKGIPELIQVMINRCYSMRAENNVYF

SEQ ID NO: 346743 - protein, 324 aa, Zea mays
  unsure (1)..(324): unsure at all Xaa locations
  Clone ID: MRT4577_79394C.1.pep
MLFDSADSSSKTVSRRQDSRNDFSQLERSELTSGRLFDAVASFKLIWSNSGTSSPKKLSIWRPMLSEGMFYFGDIAVNGYEPPNSTVVLRDTGEDTFLRAPEGFDLVGRIKKHRGTEGVSFWFPKAPSGFVALGCVASKSSPTKEDFSLLRCIRNDMVAGGQFSEESLWDSSNARTSEPFSLWTVDNDAGTFLVRSGYRKPPKRLALKLAGPPTSSSSDSIIVDAKIKTFSAVSFDDYGGMVSHMYMDIYLVTTISYHGGPHHLNATVSLSFVARSYNDKYSXWEPFIEPTDAFLRYQFDMNTPGSPRQLRITSTQDLNLNRQQ

SEQ ID NO: 346744 - protein, 112 aa, Zea mays
  Clone ID: MRT4577_79395C.1.pep
EGHGCWEDRSRVSASCLSTLSCPRSSLSCSSCSTSAFVVAFQSSSCSIAPARVRLFSVCGAGGKCAVCSGSARWVAGISCSRLRGFVEFAVGSYHSESADGVLKSRARPALR

SEQ ID NO: 346745 - protein, 71 aa, Zea mays
  unsure (1)..(71): unsure at all Xaa locations
  Clone ID: MRT4577_79396C.1.pep
VPGGDLAKIQRPVCMISLSHSVVKVFYSIDNKFDIMCAKRAFVVWLVXGDGMWDGKFSEARXDLTALDKVS

SEQ ID NO: 346746 - protein, 91 aa, Zea mays
  unsure (1)..(91): unsure at all Xaa locations
  Clone ID: MRT4577_79397C.1.pep
PPPPLEQAARDDAVVFVLAVVFVARDRSDRRRGLVPAVLVLGCGGAEAKPRSRLLCVAWLVRGGCGXXXWXGGEHPSPVPPXPXGXXGLIV

SEQ ID NO: 346747 - protein, 62 aa, Zea mays
  Clone ID: MRT4577_79398C.1.pep
GGAKFPSFPPVAPLLSSLPKAPLFPPGPPVVTPLSNQRAFLETFIRACVGLPPKNTLFLGSK

SEQ ID NO: 346748 - protein, 220 aa, Zea mays
  unsure (1)..(220): unsure at all Xaa locations
  Clone ID: MRT4577_79399C.1.pep
MHHDPNPFDEGADENPFSNGGGXAWRRRQVAVRVPAXTEPAGFGGGRGDATADIPLDTMNDSKGKAKELSQWESDLRRRDSDIRRREEALKSAGVLMEDKNWPPFFPIIHHDIANEIPANVAGVPMEDKNWPPFFPIIHHDIANEIPANAQKLQYLAFASWLGIVLCLFWNFIAVIVCWIRGGDSKLFFLATIYGMLGIPLSYLMWYRPLYRAMRYMPIG

SEQ ID NO: 346749 - protein, 122 aa, Zea mays
  Clone ID: MRT4577_7939C.1.pep
IYVSACARAVPVESCVLAPTVQFNANMTVSLHLSVCDSVSVVSIAVPASDYECHGLNKVCVVWSGGGSRARCPMCAAAACVSVLHHALCLSTLMNGSLRTGISSMFCLLQKKKKRAPADIRA

SEQ ID NO: 346750 - protein, 112 aa, Zea mays
  Clone ID: MRT4577_793C.1.pep
MIPLNRRASLPRAGMEYFDARRKPRNVGKIIAALVLTTLCIFVLKQSPGFGGNSVFSRHEPGVTHVLVTGGAGYIGSHAALRLLRDSYRVTIVDNLSRGNMGAVKVLQGLFR

SEQ ID NO: 346751 - protein, 108 aa, Zea mays
  unsure (1)..(108): unsure at all Xaa locations
  Clone ID: MRT4577_79400C.1.pep
SRTHLSLVNPVDYLQQRILXYNPLALSNVPAYHQQQRLXQLMPALSQLAMVNPVAYLQQQQLLSSSPLAVGNAPTYLQQQLLQQIVPALTQLAVANPTAYKQQVLTYN

SEQ ID NO: 346752 - protein, 103 aa, Zea mays
  Clone ID: MRT4577_79401C.1.pep
QSEFSTNSPLEQALSPFILYSHITTRGLPGAEDSILSAFLNHRVFGGVWCVPCALSIIPLRKATTANFPFGDILSFSSPSHSTYLLLNLTSDLGVVNYEYRNH

SEQ ID NO: 346753 - protein, 49 aa, Zea mays
  Clone ID: MRT4577_79402C.1.pep
WPSAVKPRRKSAPCLSRPTLATVSHQNPRSRSCYNRSVPPSLSQTILCF

SEQ ID NO: 346754 - protein, 132 aa, Zea mays
  unsure (1)..(132): unsure at all Xaa locations
  Clone ID: MRT4577_79403C.1.pep
MGREEXALLXTEIVNRGVEPXGPGAGSXXFGVRVRLLLPDFLRSGSLKDVRLGDHYLISHGVCLGPIPVIGLGCGAXLGXLSRDELWRKXXXEATYDLATVLXFLGGLAFTISVYIMCRPRAVCLIDFACDK

SEQ ID NO: 346755 - protein, 91 aa, Zea mays
  Clone ID: MRT4577_79404C.1.pep
PTRPSPPANWLVSVRRPSVVRQRFVSFWGLLSFPSFLGTFPLKACLFPVLGWLLVAPLCFLFFFFFLFSILFFFVFYIIFSFVILFYYLCF

SEQ ID NO: 346756 - protein, 114 aa, Zea mays
  unsure (1)..(114): unsure at all Xaa locations
  Clone ID: MRT4577_79405C.1.pep
ESTHRPTSCANDFRYYPLYLSTVPQNFXRFSYSHLYHCHSSMLAHPGIQEPEALALVNSMKAHDWTVVPGGQATYLCTPVPRITLPTILLIDFVSITFPQHQLTMEKDPHKKNY

SEQ ID NO: 346757 - protein, 73 aa, Zea mays
  Clone ID: MRT4577_79406C.1.pep
KKKKMKKKKKKKKKKKKEGGDYKIVMIQKDIEDDGGGPSYCCCCCFSSQCQMLRMPIGLARSPLFPAGVLPVA

SEQ ID NO: 346758 - protein, 78 aa, Zea mays
  Clone ID: MRT4577_79407C.1.pep
TEEAAIPPDLNQASAVNGGEDDISAEFEDGQIHVVQDQEHNAALISEDRTHFDLNMSAGNSRFDRHTQSLYVLGAHAS

SEQ ID NO: 346759 - protein, 74 aa, Zea mays
  Clone ID: MRT4577_79408C.1.pep
ATAVLQQILIKKKKKKKKKKKKKKKKKKKKKKKKKKKKKKKKNKKKKKKKKQKKKKKKGGGPPRIPTLSTAEGK

SEQ ID NO: 346760 - protein, 79 aa, Zea mays
  Clone ID: MRT4577_79409C.1.pep
VIAGQALRKCLPLCDRVLVERSAAETVTKGGIMLPEKSQGKVLHATVVAVGSGGKGKGGEIQPVSVKVGDKVLRPEYGG

SEQ ID NO: 346761 - protein, 125 aa, Zea mays
  Clone ID: MRT4577_7940C.1.pep
PGGLGVFFIFLARRVFRLLTGQCAPRPFCGFAPSFGPPGFPFFGSGLFVVWDLGRVPVSPGARVWPCFPPAWSRGRLPLCRPPVSWESPLPPPARAGKKKKKKKNKKKKKKKKKKKKKKKKKLVL

SEQ ID NO: 346762 - protein, 42 aa, Zea mays
  unsure (1)..(42): unsure at all Xaa locations
  Clone ID: MRT4577_79410C.1.pep
AIFLVNXRKYVMGAVLKNYSNLIKRITTSLCRNDVFDTSEST

SEQ ID NO: 346763 - protein, 56 aa, Zea mays
  Clone ID: MRT4577_79411C.1.pep
MAEGYISACGDLFSSGKLVAVACVSLFQRKSVENVDKQEFAGAAAELLHAASAYGK

SEQ ID NO: 346764 - protein, 237 aa, Zea mays
  unsure (1)..(237): unsure at all Xaa locations
  Clone ID: MRT4577_79412C.1.pep
SRAPAVLQIWNSQASPQKEVFWAPAPLTTKSWAVRAALQEDVESDDEDLDDGAEHEVEDAPAELADKTVEALAAPPKDTERQLXXXXXXXXXXAELDAVLAELGLSGNSTSAXQDAEKEGANQAGDAEXXEDATXXSESKTXXXXXXXXXXXSRANRGPXAAEGSEETASAGPDEEDTIAVDVKERLKKMASMKKKRSSKETDTGAKIAAAEATARSARLAAAKKKEKSHYNQQPVR

SEQ ID NO: 346765 - protein, 125 aa, Zea mays
  Clone ID: MRT4577_79413C.1.pep
KDLFPLPPFWELLVPQWFFFRVPGASNCLKFTSGFLAQRFLEGFFPQFGVSWGQAFFWHFGFWNFFVPLGGLRQSSQFRVFPLGAFFQGGGAFLFFLAGFFSAPFPPLPFFWGVAFFFLFYPRSP

SEQ ID NO: 346766 - protein, 150 aa, Zea mays
  Clone ID: MRT4577_79415C.1.pep
QNQLSFSRHGSREISGSRTAAAARDEMHRTSRTYLPERCSLEEEPPWSVQSALAAPFAEEALFAPSAGPEEMLFEATQSAKAASYAKSAQSARVALAALFAEDALVAPSAGPEEMLAEAAQSARDALVAPFTCAHGDICKAGYKRRSISL

SEQ ID NO: 346767 - protein, 83 aa, Zea mays
  Clone ID: MRT4577_79416C.1.pep
TEHLSVGEKYRNNTSVRAPDIYFIPSRLASRDGNGEFTVGFWLPIPVPAMKKLPRADPHERSGGHFFPISVIPGDKSPSGIPV

SEQ ID NO: 346768 - protein, 191 aa, Zea mays
  Clone ID: MRT4577_79417C.1.pep
MHSARCCCWFLERRDPEGMALEAVVLSQQGSRFGCGAMAAGGPWSGLFFSGMEGVVEIGSGAGGGRDVAGCSPPQLLQEPAARALPVASSVGSASGGAGQDAPAALAVTATAAAGTGRRKRRRMRPLKNEEEVESQRMVHIAVERNRRKQMNEYLAALRSLMPPAYTQRVTDELDSDDPHASHARPFLVPS

SEQ ID NO: 346769 - protein, 101 aa, Zea mays
  Clone ID: MRT4577_79418C.1.pep
IVDLETVNILYKGNHPRLFLRKHLFHAPFAPTREDTGLIPARNFVYIGTKNGRPNLKSTGIEAHIGLAITQRVEKALSLNGTFIVPLGIHCANNTYLLDTL

SEQ ID NO: 346770 - protein, 97 aa, Zea mays
  unsure (1)..(97): unsure at all Xaa locations
  Clone ID: MRT4577_79419C.1.pep
GKAYFKSLRDLEWMMRLTEEPDKDSRKKGTEXAFTGEYCNTNTPGIYQCVCCYTPLFQTSTKFDRGSRLPFYYKPIVENVKNMHDMSIIFMPRTEGL

SEQ ID NO: 346771 - protein, 101 aa, Zea mays
  Clone ID: MRT4577_7941C.1.pep
MEMEKLLAQLVETERANPLVLGLVCFNIVPVGWNGSLATGPNLKGPVTKGKWGAVPIPSMLTGKGWPRGAATSQFGKPAVHMARVALKGKAFEWWGQNPFS

SEQ ID NO: 346772 - protein, 98 aa, Zea mays
  Clone ID: MRT4577_79420C.1.pep
MAKCLKHTTIHALWLVAIVLLASSVVLHARIISRQTKENSNTRSLTMTMMGPASNIIGTGGQLSRGKCIKDHAWFVCVKTMECFVTLVECLIGCSGYD

SEQ ID NO: 346773 - protein, 42 aa, Zea mays
  Clone ID: MRT4577_79421C.1.pep
ETSVRESIWQWSMCLHVGVVDEVHVVVSDLGDDVVVDGAALL

SEQ ID NO: 346774 - protein, 100 aa, Zea mays
  Clone ID: MRT4577_79422C.1.pep
TATIFISRPETELKNEPQQKENRAIFGHKPDDATLAGMMASPFTRHHTADKNPTSASASSAGADTPDAGTAELADLYGAEDEDAPATLTASGEGPSAAVA

SEQ ID NO: 346775 - protein, 139 aa, Zea mays
  unsure (1)..(139): unsure at all Xaa locations
  Clone ID: MRT4577_79423C.1.pep
PKGRGGSTGYDNAVALPSGGKGDEKELQKENIKNAASSTGNITLSVPKSNPXTVEVIGVFEKVQRSNTAILAKSPNHVKMSCSGVRYTASDWSCLSNRLRRVATTGGTAARQRAPVRRSWPAASGWPRLGARLPSSSRR

SEQ ID NO: 346776 - protein, 167 aa, Zea mays
  unsure (1)..(167): unsure at all Xaa locations
  Clone ID: MRT4577_79424C.1.pep
AGLFLHGIRLGFPSYPXPQPPPTPNXPLEPPDTAVVAPREAQPSLPGAATPQSPLPXAAASSPLSPVAAWPLPPRRSASSACSSNPTTPAPSPTASRRWSSTSATSSGPPARPPRPSRPPRRSRPPASGGRFPRRPATSPPAAWGWTRSSPTTTTRPRARVDEVVLF

SEQ ID NO: 346777 - protein, 540 aa, Zea mays
  Clone ID: MRT4577_79425C.1.pep
KRTTKVEIQRLRQKKEKKNTTNSTRLHLGNERKKRGGCALLVRGSNKESGSTTDGFVPYEWKRTIFSWLIDLNVLSVNTKLNCLDESHSKVLLEGFVTRDGINCSCCSEVISVPEFVTHAGSEVNKPYRNILGDGLDIDLLHCLINAWNMQSDAERQDFFPVSIEGDDPNDDTCGICGDGGNLICCDGCPSTFHMSCLGLEALPSDYWCCANCSCKFCHEHSSDGAEDTADVDYSLHTCSQCEEQYHEACSPETDSITNLSSQTGNLFCQQSCRLLFEELQNLLAVKKDLEPEYSCRVVQRIHEDVPEEVLALDKRVECNSRIAVALSLMDECFLPIIDQRTGINLIRNVVYSCGSNFARLDFRGFYIFILERGDEIIAAASVRIHGTKLAEMPFIGTRNMYRRQGMCRRLVDGIEMILSSLNVEKLIIPAITELVDTWTSKFGFSPLEDSEKQEVKSISMLVFPGTGLLQKPLLKALPNEEQCSQGDKTEKSSDVVNEDSPCSDASADPLGLGVKEHEDSSKDADGTCNGDVSQECPHS

SEQ ID NO: 346778 - protein, 53 aa, Zea mays
  Clone ID: MRT4577_79426C.1.pep
LSLYHARRRTLASFLSSGLPFFFFFFFLKTPREFFNTIRYITPIFFCYIQVLP

SEQ ID NO: 346779 - protein, 274 aa, Zea mays
  Clone ID: MRT4577_79427C.1.pep
MQLFEELQNLLAVKKDLEPEYSCRVVQRIHEEVPEEVLALDKRVECNSKIAVALSLMDECFLPIVDQRTGINLIRNVVYNCGSNFARLDFRGFYIIILERGDEIIAAASVRIHGTKLAEMPFIGTRNMYRRQGMCRRLVDGIEMILSSLNIEKLIIPAITELVDTWTSKFGFSPLDDSEKQEVKSVSMLVFPGTGLLQKPLLKASPSEDQCSQGAGAVSSVDKTEKSSDVVNEDSLCSGASADPLGSGVKEHGDTSKDADGTCNGDVSQECPHS

SEQ ID NO: 346780 - protein, 98 aa, Zea mays
  Clone ID: MRT4577_79428C.1.pep
APRAKFLGYPPIFFFSPGEKNFLPPPFLGGGPLVFFFKFFQKPGGPPFQFKAPGFKTQSPRGGGVKNFCLNPKGPLLKTPGLVFFWGGPGENFPFQPN

SEQ ID NO: 346781 - protein, 110 aa, Zea mays
  Clone ID: MRT4577_79429C.1.pep
MQLLLSSLCILVHTLNEEGFLVHNVLVDIGNTADINFAKAFRQMLEQDDKIHDATHPLCGLGGRQIVALGKITMSITFSKMIQKSSLPLLKIFKTKTLHGSNIAKCRSYH

SEQ ID NO: 346782 - protein, 154 aa, Zea mays
  Clone ID: MRT4577_7942C.1.pep
MAFPKPTSRLAALAALAAAMAAAMMAATASAQNTPQDFVNLHNRARAADGVGPVAWDARVARYAQDYAAKRAGDCRLVHSGGPFGENIFWGSASSSSAATTPRATSTASARSSPSTRLPSRGREPGCMQCAYARICVCMAWLLDRSRTACARAP

SEQ ID NO: 346783 - protein, 48 aa, Zea mays
  Clone ID: MRT4577_79430C.1.pep
HQLLTPLLSHRTGIVDTISVSHVRALSCLFNSTQCPRIGFSSSPHRSS

SEQ ID NO: 346784 - protein, 68 aa, Zea mays
  Clone ID: MRT4577_79431C.1.pep
THASIFIFFFFFFFFYIVLFSYEYFWDLIFIWNFFNNIPISRGGSKGSKLTLAYMRIYSSSIVSPKFN

SEQ ID NO: 346785 - protein, 44 aa, Zea mays
  Clone ID: MRT4577_79432C.1.pep
EKPPTTLKKKKKKKKKKKKKKKKKKKKKNKKKKKKKKKKKSLYS

SEQ ID NO: 346786 - protein, 90 aa, Zea mays
  unsure (1)..(90): unsure at all Xaa locations
  Clone ID: MRT4577_79433C.1.pep
VPRSSFPRASRWSAFWRLXWSLPSLVGAWLFFLCSSSLAVVFPVVVLSPSCCCCSAPWLCPWLVVVCGLLVGRGGFSAFVALGGVLARVL

SEQ ID NO: 346787 - protein, 39 aa, Zea mays
  Clone ID: MRT4577_79434C.1.pep
NITDPQKGGPFYRTWVPPLPVHAQSFFSLHRLLRTSPYT

SEQ ID NO: 346788 - protein, 118 aa, Zea mays
  unsure (1)..(118): unsure at all Xaa locations
  Clone ID: MRT4577_79435C.1.pep
RGMQXXRPGQGARTASAGAAHGLRVDAVRGHGCGRPRVHPRRAWRLQQKGAGHGPQRPSRPRCAAASHASGHQLVFRTAIARSACLLGSKGLTYTHIFRMSAMYSCLCSHVFVHEQED

SEQ ID NO: 346789 - protein, 40 aa, Zea mays
  Clone ID: MRT4577_79436C.1.pep
LSEFELGILPLHRNVFLLVLTAGSSVMQLGFVLQINLYCW

SEQ ID NO: 346790 - protein, 98 aa, Zea mays
  Clone ID: MRT4577_79437C.1.pep
FFFFFFFFFYIFFFFSLTGAYSSHMPCGPTPPKLVVDSSSTTEIDYTQPSSLLSTPGRPVMATASAQLELTCRPKRRRCIAFRDSEQTSGPGRQAADQ

SEQ ID NO: 346791 - protein, 58 aa, Zea mays
  Clone ID: MRT4577_79438C.1.pep
LVLAFVRIMELAESEHCGIMIAFVVFSKRAISARRANILEAKHVPLLIGSYAWCVYEC

SEQ ID NO: 346792 - protein, 168 aa, Zea mays
  Clone ID: MRT4577_79439C.1.pep
ESDALFIRKAGEEITQQLYNFEDKGGRRVVLRPEITPSLARLVIKQGKSVSLPLKWFTIGQCWRYERMTRGRRREHYQWNMDIFGVPKVRAEAELLHAIVLLFQRLGITSSDVGIRVSSRKVLQAVLSMYSIPEHLFTQVCVIVDKLGKMTREEIDDIVFPLDEELEG

SEQ ID NO: 346793 - protein, 346 aa, Zea mays
  Clone ID: MRT4577_7943C.1.pep
MRSAGAAATVTRLAQRVVAPAAPTPRGQLPLSWLDRYPTQRALIESLHVFKGRADAGAEAPARAIERALAAALVSYYPIAGRLAVSDEGELVVDCTGEGVWFVEAGASCALADVDYLEYPLMVPKDELLPHPTYPESDLLPEDSLILLVQVTQFACGGFVVGFRFSHAVADGPGAAQFMAAVGDMARGHAAPLVAPAWGREAIPNPPGAAVGALPVPTELRLQYLAMDISTEYIEHLKARFLEQAGQRCSAFEVLIAKAWQSRTRAAGFARGSPVHVCFAMNARPALGVPRGFYGNCYYIMRVSAAAEAVSDASVCDVVRLVREGKKRFLFFFFFFFFACKIIEVL

SEQ ID NO: 346794 - protein, 252 aa, Zea mays
  unsure (1)..(252): unsure at all Xaa locations
  Clone ID: MRT4577_79440C.1.pep
MAGASRKDLLKKVYNMVPPMLESFHKGQLGRVAVIGGSEDYTGAPYFSAMASAKLGCDMSHVICEPGAGAVIKTYSPNLMVHPYMRQSKNLAQSESAESVSAEVVGMLSRLHVVVIGPGLGRDKLMQDTCAKVIEEARKQGIPFVLDADGLYLAQTRPELVEGCKECILTPNVVEFGRLAKAKGVNVDEGDPSELCSKLSXFLGGVTIIQKGAKDYISNGSHTLVSEGEGGLKRSGGQGDTLTGSLATLLTY

SEQ ID NO: 346795 - protein, 50 aa, Zea mays
  Clone ID: MRT4577_79441C.1.pep
SLSLTAGPRGSLAFSGAEVVSFCNAIAVMISIECFYPSGVVRSLILHRLV

SEQ ID NO: 346796 - protein, 58 aa, Zea mays
  Clone ID: MRT4577_79442C.1.pep
MHKFWMHMCMRGNVPSEGGYNVVTVKCGHCTMVLSMDLSPFHQQARTVPDNQVQNQLL

SEQ ID NO: 346797 - protein, 111 aa, Zea mays
  Clone ID: MRT4577_79443C.1.pep
AGKKSTSNQAGPGTDNDPGCRGASPTAERHTAEPRAARQRRKTNTHHHNTQEHTKRAGMQQNRLESMKSVQNAEGAPQARQGRGKKDERPSTQDNKTIKTNYLDANNNTQT

SEQ ID NO: 346798 - protein, 73 aa, Zea mays
  Clone ID: MRT4577_79444C.1.pep
PSLPVDRQNYRAGVIDQRRGGLHGELDARFSSSMLALVLNQDDALRRKSATRLRARSMPLTLSTRYTVTSDTC

SEQ ID NO: 346799 - protein, 88 aa, Zea mays
  Clone ID: MRT4577_79445C.1.pep
AQLTGARANLAYIAERSCLASICMRPDSMQGMTLSSMCRRKLRRHQAVTAIHEQARSQQPGVPGTATGADAENWVTSATLPGSGTATV

SEQ ID NO: 346800 - protein, 210 aa, Zea mays
  unsure (1)..(210): unsure at all Xaa locations
  Clone ID: MRT4577_79446C.1.pep
MVSKEQNKRGALHEKLKILRSVTHSHAISHAVCALLYIYVPIPFSFSDHSYAVKVYATRVRVCVSRMQGDKVSIIADASSYIKELKQKIAKLSQEMASSXSAARHYWCLPTTTVVVVGEXGVLLDKKGRFLVSVFMDESCGPPPAGLLASVLEAFDEIGLTVLEARATCAGSFRLEAVGEEVVVDGGLIVDAHAVEQAVVQAIKNCPANH

SEQ ID NO: 346801 - protein, 152 aa, Zea mays
  unsure (1)..(152): unsure at all Xaa locations
  Clone ID: MRT4577_79447C.1.pep
XWLPXSXSGXWTXPPXGXXHPLGXXHPXGXXXGYXSPDRXLDPGLXCLRXVPRGVHPKGPCYGVTQPNXCLQAFIXGPPASGQPQRWGRPGVGPNRKKTPPRRXREVGGRTPGRGADARACAGGVVLRGGRRLGGGYAWEGDRGEMLVAAFL

SEQ ID NO: 346802 - protein, 150 aa, Zea mays
  unsure (1)..(150): unsure at all Xaa locations
  Clone ID: MRT4577_79448C.1.pep
AFPRSLNIVPNNITPTLKKSSPKESRQSSMECSQYRRSSCPAYTNFRVTRDSGEGQNNLRDETQLRPPALAVVFGGGNMLMSVGPAGWSSTPRTAIAWLSHEHPCMKHSXCKXQVSSLDHTPPPFAPCLDGYQQQKWRPQFPPDACLPTG

SEQ ID NO: 346803 - protein, 85 aa, Zea mays
  Clone ID: MRT4577_79449C.1.pep
PLFPQNKRKKKAGPPKKKRPTLEDGRNGVPWTSMGSPLKCCLSPQLVAKKENFLFFPPGGGSPLDPPPPPPPSSKWAIFCFFFFP

SEQ ID NO: 346804 - protein, 87 aa, Zea mays
  Clone ID: MRT4577_7944C.1.pep
IWSVFLQPGIFATWMERLMGKMSRVAHFRRKCFVSGGFFLHEFTFRIAWYCRAGVLVIWGSRCVSGYDYSLAPGREEPSPRQALATA

SEQ ID NO: 346805 - protein, 49 aa, Zea mays
  Clone ID: MRT4577_79450C.1.pep
RLLIKCVEWFLGSVLVELVNHYVHCNHFKHVLEQYDDLIMIFFVVTFMH

SEQ ID NO: 346806 - protein, 76 aa, Zea mays
  unsure (1)..(76): unsure at all Xaa locations
  Clone ID: MRT4577_79451C.1.pep
YRXXPXKGQXYHXSDIXXIASSWXQHXXTSHPMNXQVTRLSXSXILVGSQCSRVXPDIKASQPVIPQLPXLTPISL

SEQ ID NO: 346807 - protein, 618 aa, Zea mays
  unsure (1)..(618): unsure at all Xaa locations
  Clone ID: MRT4577_79452C.1.pep
MSGPLDRFARPCFEGFVHNDERKESRSDADNSEGDKKTKIGSFKKKAINAGNKFRHSLRRRSKKKTERGDSIKDIRDVKELQDVETFRQCLIDEDLLPPQHDDYHMMLRFLKARKFEVEKAKSMWSDMINWRKEFGVDKIEEFDYTELDEVTEYYPQFYHGVDKEGRPVYIELVGKVDANKLIQVTTLDRYVKYHVKEFEKCFQMKFPACTIAAKKHIDSSTTILDVQGVGFKNFSKSARELITRLQKIDSDNYPETLCRMYIINAGQGFKMLWSTIKSFLDPKTASKIHVLGNKYQHKLLEIIDECELPEFLGGKCNCIEGCQRSDKGPWKDPNIIKRVLNDEANYGRQIVTISSXTGKIIRYARPDHPTRKGSDASAESGSEVEDVTSPTASRNLITHPILTPVHEESKLSAHGSAFVAHASIEENIPVVDKVVDDGWGTPRGSLQASSGSLPSRNTHGTFEGLRTEAVAWLTFLITALFATLCSVPSKMARRISSQSSKHDDYRGEYPQEEEEHKEEFRPPSPAPSYTEKDVLSSMLRRLGELEGRVQVLETKPSEMPFEKEELLNAAVRRVDALEAELISTKKALYDALMRQDELLAYIDRQELIKFRKKKFCF

SEQ ID NO: 346808 - protein, 42 aa, Zea mays
  Clone ID: MRT4577_79453C.1.pep
KTVVVFIGQVKALSPCGRVKALCSHTQPPLWVKMQAPQLFTR

SEQ ID NO: 346809 - protein, 79 aa, Zea mays
  Clone ID: MRT4577_79454C.1.pep
FYFKFFFFFFFYFFFFFFFLKKSLATVILRISFANPPFQRGPNPVGALGSCSAHARATFFSPKREFHSHLPSNYPKVSC

SEQ ID NO: 346810 - protein, 107 aa, Zea mays
  unsure (1)..(107): unsure at all Xaa locations
  Clone ID: MRT4577_79455C.1.pep
DTEKFVGIMIPIMXLKSKLKHFPAGAFIIGSQIQPDNRKEKANVSSPFLSKFRYSQAILGLTLQVSLIILNMKLIHCIPFGKKNTWMFGTGHVVSNIYKIQHAPINL

SEQ ID NO: 346811 - protein, 118 aa, Zea mays
  unsure (1)..(118): unsure at all Xaa locations
  Clone ID: MRT4577_79456C.1.pep
ERRGQQNRRSQEGRLXXXRAEGVWGRVPANSQGSSRGRWSVWSGQCRKVQPGSATEAVHPPPGRRPWRRSRAAARGPAVSRGTAWIVWWYDAEASPPPMAPETTSRRHRRPRRRAACG

SEQ ID NO: 346812 - protein, 92 aa, Zea mays
  unsure (1)..(92): unsure at all Xaa locations
  Clone ID: MRT4577_79457C.1.pep
PSTKTLDNQATTDIHKGPRQAQTGGDAGPRAGKLALGRKLSLRSGTPPGQGLXPPRPWVRAPXKPGPPGGPXGGGGGWPPPVKPGRPPRTFP

SEQ ID NO: 346813 - protein, 41 aa, Zea mays
  Clone ID: MRT4577_79458C.1.pep
QRRGLFIKLVNLCLLKNLTWTFSRGSSVFIICQKITKACDF

SEQ ID NO: 346814 - protein, 61 aa, Zea mays
  Clone ID: MRT4577_79459C.1.pep
TLSLIQGGMTAGSTTSETSCEAVRQSCVALVERLKPIKESLEAKSNTVEWSALIAQVRIIT

SEQ ID NO: 346815 - protein, 53 aa, Zea mays
  Clone ID: MRT4577_7945C.1.pep
MDGRMFGLETPLMEALQHLLDVPDGDACSDGDKAGCGGPTRTYIRYARAMAVT

SEQ ID NO: 346816 - protein, 59 aa, Zea mays
  unsure (1)..(59): unsure at all Xaa locations
  Clone ID: MRT4577_79460C.1.pep
PRVAAKDGDQLNKCGCGRSEDTDLAVMDMRQEFHNDLDHDXIFGSLPENYIAFLYLTMS

SEQ ID NO: 346817 - protein, 102 aa, Zea mays
  unsure (1)..(102): unsure at all Xaa locations
  Clone ID: MRT4577_79461C.1.pep
FFFFIXTANSGIQLQFSACACSAIQFSGHRHATTNVQQRIICPRYKHQSQFQLANLAAHTTTNIHFQLVVQLASVQIQTANGPLLFLPCSMQLSRAHCSLCC

SEQ ID NO: 346818 - protein, 168 aa, Zea mays
  Clone ID: MRT4577_79462C.1.pep
MARLLAARALALARPSGTPSALRFCPSRALSDEVEFVEIDLSEESPASSSGGEGAGDSATVQAQMGSRRLEDAIYGVLVRRAAPEWLPFVPGASYWVPPLPRPLGVSSLLGAAVYTARGATAMTGEEAFSFTTVRGCPSAAYFVGGKFLRPVKKSREDATQTDDDDES

SEQ ID NO: 346819 - protein, 68 aa, Zea mays
  Clone ID: MRT4577_79463C.1.pep
PPPDCHRIPRLCPLIAQLHLCSIGMPEAFCRTYGICADRQAGCVARTMGSKMANCVSRYIVWIRIDVG

SEQ ID NO: 346820 - protein, 130 aa, Zea mays
  Clone ID: MRT4577_79464C.1.pep
GRATRPPTRPPTRPATSQAAEMQLKVGWAPWLKEQANYLRHNRILCSNLDSLTSSNHPLLQDASATNNSPTKYSTECFSHDIVLLRTISAAPTSEDRALQQRRHECLVTRPELARIGGRNYIMLEHHPNR

SEQ ID NO: 346821 - protein, 84 aa, Zea mays
  Clone ID: MRT4577_79465C.1.pep
TERKKGRWPPVHKFTKSGLGLVQPGSNNLCCPETQPTLIWPTPLNPVIPWRTHRPEDPCSDNPYNWPTQCLLLRLEHKLAHSPD

SEQ ID NO: 346822 - protein, 82 aa, Zea mays
  unsure (1)..(82): unsure at all Xaa locations
  Clone ID: MRT4577_79466C.1.pep
MAASASTVSGLSGDSLASRPAFSTSFTRGNRVSARHPLMSRNLQRHGRLTCMTFPRDSLPMDLSVIGFGLIGXMGPSSFPAI

SEQ ID NO: 346823 - protein, 84 aa, Zea mays
  Clone ID: MRT4577_79467C.1.pep
KFFPHLAFPGGGVLRPNPPGEIGPPPLFKKTWPFWGRGPLGKTPLPGENWEVFPLWGKKKKFLYRDQDPPVLIPEPLSGALGAV

SEQ ID NO: 346824 - protein, 38 aa, Zea mays
  Clone ID: MRT4577_79468C.1.pep
ALYINQPPFFTPDNSYRGFLSTRATSINSSYHGTGTPP

SEQ ID NO: 346825 - protein, 84 aa, Zea mays
  unsure (1)..(84): unsure at all Xaa locations
  Clone ID: MRT4577_79469C.1.pep
MGAARGEEDGEGRCGERCPSWYVSREEIESGSPSRRDGVSAAKEAELXATYCSFIRDGCIRLQLPQITMGTENMALPRFYLRQS

SEQ ID NO: 346826 - protein, 91 aa, Zea mays
  unsure (1)..(91): unsure at all Xaa locations
  Clone ID: MRT4577_7946C.1.pep
HPPRAATPLWYSSVRTAAVAAVLSYNLNTKAGXIRKLDEYLLTRRYITGYKGSKDDLCGYTSHSHGPSGKYINVARWCNHIDALVRLSGIT

SEQ ID NO: 346827 - protein, 44 aa, Zea mays
  Clone ID: MRT4577_79470C.1.pep
AVCGPFTLNPEKLRHRLFCPFHGKRLRKNTLQRSRLFKYANLQN

SEQ ID NO: 346828 - protein, 75 aa, Zea mays
  Clone ID: MRT4577_79471C.1.pep
GAGTKGKKTKGVFGAHRIFHITHDWAHLTRRGDIYVGWFIGSSAFKCRIPSIKKRLLLAMNPRHGIPKRFLCPNG

SEQ ID NO: 346829 - protein, 164 aa, Zea mays
  unsure (1)..(164): unsure at all Xaa locations
  Clone ID: MRT4577_79472C.1.pep
VRPDFFSLLGPGPGPPPXXVCPLGLFSLPGLTCMVPPPLDGACPQWVFSFFLRLRSSPLVFGACAAPILRPPSSGLFVQPGLFLAFLAFSFARLLFSLPPSPPFPLLFSALSRLPFCSVRVVPRPPLVVGVLSFPLSVVFTSLGIFRRALLLFLSAFTIVYRTH

SEQ ID NO: 346830 - protein, 61 aa, Zea mays
  Clone ID: MRT4577_79473C.1.pep
LLRANWCPRGRPGSYYWSTIPYWLGSSFYERARSIYQRGLVVLLAHPSPGAGNESLCPRPY

SEQ ID NO: 346831 - protein, 55 aa, Zea mays
  unsure (1)..(55): unsure at all Xaa locations
  Clone ID: MRT4577_79474C.1.pep
YYHLNSIHLPPFYNFFTFKTLSLLILISLQNNPLSPSXLISNNPTPISLSNISST

SEQ ID NO: 346832 - protein, 62 aa, Zea mays
  Clone ID: MRT4577_79475C.1.pep
DAWVLLPALFLRLLLTTEPEPGALTNPMRQAAAMMVYYTLLVGAELDGLTNLQSLHGCNDLN

SEQ ID NO: 346833 - protein, 85 aa, Zea mays
  unsure (1)..(85): unsure at all Xaa locations
  Clone ID: MRT4577_79476C.1.pep
VWLVLALRLGCCSALVFCLVQQLVVVLVHVVVCRCLSRFSSVRPGRFAGCAFRARPLGGPVGPLXSLRWGYGAVPSYNSPRPSCR

SEQ ID NO: 346834 - protein, 52 aa, Zea mays
  unsure (1)..(52): unsure at all Xaa locations
  Clone ID: MRT4577_79477C.1.pep
SAPSEYAPVLPRQRXVPAALPLHTAVRDPHPPTPLPSASSPVPTXXXXPSLP

SEQ ID NO: 346835 - protein, 185 aa, Zea mays
  Clone ID: MRT4577_79478C.1.pep
MAAVYPTTAVLPTRHSPPSFLRPPSLSWSASITQHRIPFSPRLALSPPPAANRRSFVVRAAWTRRSRGELDKSPNRKSWKQRTDMYMRPFLLNVFFSKRFVHAKVMHRGTSKVIAVATTNAKDLRTTLPSLIDDNACRTIGRLIAERSMDADVFAMAYEPKKNERIEGKLGIVIDTIKEYGIIFA

SEQ ID NO: 346836 - protein, 131 aa, Zea mays
  unsure (1)..(131): unsure at all Xaa locations
  Clone ID: MRT4577_79479C.1.pep
MRLIALDRSYCDAFETQSVSDDMSALLSGRVRRRLPYFLHSAKLSXVSLMYHYIISHGEYLTTIPVIVLVCACEMGSISRDEVGGKVWEXGHXDVGTVLAFLAVRAFTISVYCMARTRPVYPIDFACYKPD

SEQ ID NO: 346837 - protein, 116 aa, Zea mays
  unsure (1)..(116): unsure at all Xaa locations
  Clone ID: MRT4577_7947C.1.pep
SSDITLKDSKSVVLCQKPVTVSGIRNPKEIPWGEAGAEYVQESTGVFTDKDKAAAHLKGGAKNVVISALSQDAPMFVVGVNEDKYTCSVNILSKASCTTNXLASLAKVIHDNLGII

SEQ ID NO: 346838 - protein, 51 aa, Zea mays
  unsure (1)..(51): unsure at all Xaa locations
  Clone ID: MRT4577_79480C.1.pep
KPGGKLSSSFLXDSPPPPAVXDPSNLLRSIDSVPMMLAVQDRKAAENPKPP

SEQ ID NO: 346839 - protein, 98 aa, Zea mays
  Clone ID: MRT4577_79481C.1.pep
SSLEGICGGVPMVCWPFFAEQQTNCRYKCTEWGIGLEVREEVRRTEVEAMIREVMDGEKGREMRRRVQELRDSALASARCDGRSMRNVDRLIHEVLLA

SEQ ID NO: 346840 - protein, 76 aa, Zea mays
  unsure (1)..(76): unsure at all Xaa locations
  Clone ID: MRT4577_79482C.1.pep
VNGVSVDGDLLLILPRGWDVEMCGGAILDSGTILTVLLSSAYRAVVAALSRXLAGLPLVVMDPFDYCYNWTSPSTG

SEQ ID NO: 346841 - protein, 53 aa, Zea mays
  Clone ID: MRT4577_79483C.1.pep
MITGGQSYVSAPPAFSADGRLLLVCSGRAVSVFSTATAMLVSELEGHEGDLTA

SEQ ID NO: 346842 - protein, 248 aa, Zea mays
  unsure (1)..(248): unsure at all Xaa locations
  Clone ID: MRT4577_79484C.1.pep
MRFSNLFLGAVFAVTSVAAMANPAAEAGSLMERSKHHHDCGKHASYNTEKKECVCHVSGETYHKKHHKCKKPKEDKKHHSRDVLEERSPKKDEHEHCGKHASFNEEKKECVCHDKSEVFEKHHKKCKKAKDEKKKDDKKXLTRCPRGXVTPRRISTXHCGKHASYSEEKKECVCHNKAEVFERKHKKCKKHISLRSIFNHCXRHAYYDEAKKECICHDAGXNFXQKHKTCACPQGEKWHTLSAVQALA

SEQ ID NO: 346843 - protein, 450 aa, Zea mays
  Clone ID: MRT4577_79485C.1.pep
MFEDWRASVPVVVLSAMGKTTNNLLLAGEKAVGCGVIHVSEIEEWNMVKSLHIKTVDELGLPRSVIQDMLDELEQLLKGIAMMKELTPRTSDYLVSFGECMSTRIFSAYLNKIRVKARQYDAFDIGFITTDEFGNADILEATYPAVAKRLHGDWIQDPAIPVVTGFLGKGWKSGAVTTLGRGGSDLTATTIGKALGLREIQVWKDVDGVLTCDPNIYPHAKTVPYLTFEEATELAYFGAQVLHPQSMRPAREGDIPVRVKNSYNPKAPGTLITRQRDMDKVVLTSIVLKSNVTMLDIVSTRMLGQYGFLARVFAIFEDLCISVDCVATSEVSVSVSLDPSKIWSRELIQQELDHVVEELEKIAIVRLLQQRAIISLIGNVEQSSLILEKTGRVLRKSGVNVQMISQGASKVNMSLIVHDSDAKALVEALHQAFFEDDVLSQVEAENLLVG

SEQ ID NO: 346844 - protein, 436 aa, Zea mays
  unsure (1)..(436): unsure at all Xaa locations
  Clone ID: MRT4577_79486C.1.pep
MFIRLQTEQEDSEMAIPVRSAAAPRRLVPSIPPASSGHVRGLACFGTRTGPRGARGLSMVVADSTSRRAKQADGGDGVLGAPVLGGLGMAGMGEKLSVVMKFRGSSVSSAARMADVAGLILTFPEERPVVVLSAMGKTTNNLLLAGENAVGCVIIHVAEIEEWNMVKXDSPCLNFLQELFYCRSMVIISINVDLXCQIRTVDELGLPRSVIQGKPTTFGDLFCISKPLYNSCGQNLXMLDELEQLLKGIAMMKELTPRTSDYLVSFGECMSTRXXXAYLNKIRVKARQYDAFDIGFITTDEFGNADILEATYPAVAKRLHGDWIQDPAIPVVTGFLGKGWKSGAVTTLGRGGSDLTATTIGKALGLREIQVWKDVDGVLTCDPNIYPHAKTVPYLTFEEATELAYFGAQVLFLLSEESKVTFPPRKIICLGLLKGL

SEQ ID NO: 346845 - protein, 209 aa, Zea mays
  Clone ID: MRT4577_79487C.1.pep
MNARPCTVVRWTAGGGLQFPLFVSPHYWQRSCWIRSLHHLPVCQSTTISTAAPGLRPASCSATGGGVVGECARASGAQLGVLYLALYLTALGTGGLKSSVSGFGSDQFDESDGGEKRQMMRFFNWFFFFISLGSLLAVTVLVYVQDNLGRRWGYGACACAIAAGLLVFLAGTRRYRFKKLAGSPLTQIAAVVVAAWRKRRLPLPADPAM

SEQ ID NO: 346846 - protein, 126 aa, Zea mays
  unsure (1)..(126): unsure at all Xaa locations
  Clone ID: MRT4577_79488C.1.pep
ARRGAGRAPRQVGEPCAKPQGAAASRPAAPLPHPLRAAPPWPRAGRHARAPLAWPMVVTRPRRPHPARPRLAHAGRGRVLAGRTTGKAVPAADRPWLAAPPGRQSRPPCPPMATSMAPYLLLFXKR

SEQ ID NO: 346847 - protein, 610 aa, Zea mays
  Clone ID: MRT4577_79489C.1.pep
MVGLLPETNAAAETDVLLDAWDFKGRPAPRATTGRWGAAAMILVAELNERLTTLGIAVNLVTYLTGTMHLGNAESANVVTNFMGTSFMLCLLGGFVADSFLGRYLTIAIFTAVQASGVTILTISTAAPGLRPASCSATGDGGGVVGECARASGAQLGVLYLALYLTALGTGGLKSSVSGFGSDQFDESDGGEKRQMMRFFNWFFFFISLGSLLAVTVLVYVQDNLGRRWGYGACACAIAAGLLVFLAGTRRYRFKKLAGSPLTQIAAVVVAAWRKRRLPLPADPAMLYDVDVGKAAAVEDGSSSKKSKRKERLPHTDQFRFLDHAAINEDPAAGASSSSKWRLATLTDVEEVKTVARMLPIWATTIMFWTVYAQMTTFSVSQATTMDRRVGGSFQIPAGSLTVFFVGSILLTVPVYDRLVVPVARRVSGNPHGLTPLQRIAVGLALSVVAMAGAALTEVRRLRVARESSESASGGVVPMSVFWLIPQFFLVGAGEAFTYIGQLDFFLRECPKGMKTMSTGLFLSTLSLGFFVSSALVAAVHRVTGDRHPWIANDLNKGRLDNFYWLLAAVCLANLLVYLVAARWYKYKAGRPGADGSVNGVEMADEPTLH

SEQ ID NO: 346848 - protein, 61 aa, Zea mays
  Clone ID: MRT4577_7948C.1.pep
NGGYIVMRKGFTRWGRKSLVPEGYGLSHALTDAFVCWSRPILGDSSRLTRCWLWRNCWRTI

SEQ ID NO: 346849 - protein, 120 aa, Zea mays
  Clone ID: MRT4577_79490C.1.pep
GVGDVNINAAFFRKFDYSNSMVRLIGSVPGYHVGSNIRKWGHMKLRNVLDEIMFNKQFCKSPRIYQFSSLGSLYEKWMSEFACSLSAGKSDDGSQLGIGKPLIVWPTVEDVRCSIKVKKT

SEQ ID NO: 346850 - protein, 96 aa, Zea mays
  unsure (1)..(96): unsure at all Xaa locations
  Clone ID: MRT4577_79491C.1.pep
EGPCEAGTGPXESNPCSEPIGARQXGPWKSNQGNSGCHLGDPPRQEAKVLHATQIKTKLALCSIPSXQPPVTGACFEKALGQGPKPSCNFFWGTPF

SEQ ID NO: 346851 - protein, 78 aa, Zea mays
  Clone ID: MRT4577_79492C.1.pep
PAAKRRMVGTEEVAAGAPPKDAKALLEKPPPVADMVRITMAPMEAGDDVGGDNATSRKAAGCRNTGGGPPLPHYNVAQ

SEQ ID NO: 346852 - protein, 38 aa, Zea mays
  Clone ID: MRT4577_79493C.1.pep
MSVQDLSKFNRGMGRCDRLAIWSHPRGWGLRADERVRV

SEQ ID NO: 346853 - protein, 153 aa, Zea mays
  unsure (1)..(153): unsure at all Xaa locations
  Clone ID: MRT4577_79494C.1.pep
PPINQQIKPAPLPTPMDKHXINQVPAPINRHQINPVPTPTPMDKHHIKQIPAPAPTCRHHIKPVPTPIPTPMDKQQNKPAPTPVDKQQNKLAPTPMDKQQNKPAAAPAPTDRCQRVSTPVPAPRDTQSSRRSFSSSSNTEAPRRVPAGRSSCS

SEQ ID NO: 346854 - protein, 48 aa, Zea mays
  Clone ID: MRT4577_79495C.1.pep
TKKGEVHLWIEIQNLGTDGVMHAGGRVTLAIFKATTTIVKQMGVAYKP

SEQ ID NO: 346855 - protein, 109 aa, Zea mays
  Clone ID: MRT4577_79496C.1.pep
HMISYKLINKGGRPSFFFFFYKKNPIFFIFSLHTFFFCSKGWMSFSPTPFRIPPNKKKRNPSGVGFLITPCFRPPKLSFFFIIPGKRLKTHFLSPSKPFFFLFDAWTRP

SEQ ID NO: 346856 - protein, 159 aa, Zea mays
  unsure (1)..(159): unsure at all Xaa locations
  Clone ID: MRT4577_79497C.1.pep
MSESKHXGSCTEGHTIFKEKFNSSSSNTEAPRRVPAGRSSNEKPRDRSPRHEGHRCRGKDGENQHCQRHRDHNSEQRPEERSNQRALKSGLAYLVRSGGPKDTGAATEIRNLTRRKRRIQEVGGLPTPVYTSDTDAWRQVSAVVLFGTKGQKRPRGDEP

SEQ ID NO: 346857 - protein, 78 aa, Zea mays
  unsure (1)..(78): unsure at all Xaa locations
  Clone ID: MRT4577_79498C.1.pep
VCMIXSTTKSDVEVFSCIDHKSDLMYAKSEFENWYVAPRMEEGYFFEACQDLAALYNDXRXVPPKINEGEEGDDGDEC

SEQ ID NO: 346858 - protein, 37 aa, Zea mays
  Clone ID: MRT4577_79499C.1.pep
LNLCCVVQVFRGGIRIQVSIFDIVVGDIVALNSGARV

SEQ ID NO: 346859 - protein, 121 aa, Zea mays
  unsure (1)..(121): unsure at all Xaa locations
  Clone ID: MRT4577_7949C.1.pep
STGFGKVLKTNHSNILDDPFIRGHIGKLLGNIRTQVLIKLNKPYTRIHIPFXILKGLNLDVADVKAAVHCYXDTLFMGQFDQVNQFLGLDHQKRGGARYTGLDKWTNQLNSLNQAVVSKLA

SEQ ID NO: 346860 - protein, 42 aa, Zea mays
  Clone ID: MRT4577_794C.1.pep
MADEDNQPTVLHRLGGQFHLRSIVSERVESQKICPSVSSYHT

SEQ ID NO: 346861 - protein, 110 aa, Zea mays
  Clone ID: MRT4577_79500C.1.pep
SGRVFFFCGLFSFFFFFFFFGEKRVNPKITFFFGAPGTGGPPIWNPPPHPRVIPTVEVVGGPRGGALPGLPPAAQPKPRFAANARPGGGPPWLQQPGLAEHLATAAGDEP

SEQ ID NO: 346862 - protein, 387 aa, Zea mays
  Clone ID: MRT4577_79501C.1.pep
MFIWKIPAEGYRIQKGTRQVRIHEPEPVVADPGGLCKARNSLCNLQREGFVESSPARVCNICCKEPGFCRECCCLLCNRTVDYSLGSYSCIKCEAVVEENLICGHFAHLECALRCYMAGTVGGSFGLDVQYLCRLCDNKTNLMTHVEKLMETCQSLESRDQIKPMLNLGLCLLRGSKQMRARNLENHMRSAMEKLECGFDFVEVWKLEGDEGRTTLNAGENSPTTNGVTVLGARQVPEAGALTGHPDLIDPLVDNDFETVIENLPVFITGDQNVASAKFEDEIDLALQELKKSQEAEYSVAEQKLYAQKDHILCLYRQLDAERAELADPMPLSDASNYGAMLANVLSRVDQVKREEEKFRSMLKVAGGFAKAPQSVTREMFGLPADK

SEQ ID NO: 346863 - protein, 73 aa, Zea mays
  Clone ID: MRT4577_79502C.1.pep
ATTRPTQLTQLQQMRFIFTADNIQTVLVTIINEHSSKKLLLPNLLQYPKLARHTPPLNLNISHISRIVILNDL

SEQ ID NO: 346864 - protein, 400 aa, Zea mays
  Clone ID: MRT4577_79503C.1.pep
MADAEDAAAARRRAAITDYRKKLLNCRELESRVGTVRESLKNAKRDFTKTEDDLKSLQSVGQIIGEVLRPLDNERFIVKASSGPRYVVGCRSKVDKEKLTSGTRVVLDMTTLTIMRTLPREVDPVVYNMLHEDPGNVSYSAVGGLSDQIRELRESIELPLMNPELFLRVGIKPPKGVLLYGPPGTGKTLLARAIASNIDANFLKIVSSAIIDKYIGESARLIREMFGYARDHQPCIIFMDEIDAIGGRRFSEGTSADREIQRTLMELLNQLDGFDELGKVKMIMATNRPDVLDPALLRPGRLDRKIEIPLPNEQSRMEVLKIHAAGIAKHGEIDYEAVVKLAEGFNGADLRNVCTEAGMAAIRAERDYVVHEDFMKAVRKLNDAKKLESSAHYSADFGKE

SEQ ID NO: 346865 - protein, 178 aa, Zea mays
  Clone ID: MRT4577_79504C.1.pep
LRKFGYARDHQPCIIFMDEIDAIGGRRFSEGTSADREIQRTLMELLNQLDGFDELGKVKMIMATNRPDVLDPALLRPGRLDRKIEIPLPNEQSRMEVLKIHAAGIAKHGEIDYEAVVKLAEGFNGADLRNVCTEAGMAAIRAERDYVVHEDFMKAVRKLNDAKKLESSAHYSADFGKE

SEQ ID NO: 346866 - protein, 210 aa, Zea mays
  unsure (1)..(210): unsure at all Xaa locations
  Clone ID: MRT4577_79505C.1.pep
RYLFDALYTTQSXRYEATMRPVFWGGNWLXLEPFRTGAXSADECRRGECSLENVXXXLELNXEXMAALHKELEEERSASAVAASQTMAMINRLQEEKAAMQMEALQHLRMMEQQADHDHLAIQDLHDLLTEREKELLDLDAELAHCRRLLQNDDPFNGDRFDGTDYTTNNNTDFVGSAMSHFEDDKAYILESLSRLEENLGISTIRLASG

SEQ ID NO: 346867 - protein, 48 aa, Zea mays
  Clone ID: MRT4577_79506C.1.pep
VLGPHACIHSILLASDACMLHISMIKVKHSSNHHSINCTQLLITSSHT

SEQ ID NO: 346868 - protein, 56 aa, Zea mays
  unsure (1)..(56): unsure at all Xaa locations
  Clone ID: MRT4577_79507C.1.pep
QDPDIGLQFCKQYGNCMFFAFIWRPLSFKISSRTCEFFHRIRAMIVLTLCKKKXKA

SEQ ID NO: 346869 - protein, 72 aa, Zea mays
  Clone ID: MRT4577_79508C.1.pep
PCSNMLILRTILTGYIIHMANIRERMRALSDASFLMRWGVGLRLELNIFRVSALRSHVTYTGPNLLGEDVVC

SEQ ID NO: 346870 - protein, 128 aa, Zea mays
  unsure (1)..(128): unsure at all Xaa locations
  Clone ID: MRT4577_79509C.1.pep
FIQALSHLAMVNPVAFVQEQQLLSFSLLSVGDLPTSLQQQFXQQIVPALSHLAVVNHHAXLQQWLPFSEMGVSNFAVYQQQRLQLLNALAVGNLLVAKFLQQQQLLPYTHLSLIYPAFHQPIVVGAIF

SEQ ID NO: 346871 - protein, 350 aa, Zea mays
  unsure (1)..(350): unsure at all Xaa locations
  Clone ID: MRT4577_7950C.1.pep
MGSKKMYVCSLPLMPHVVFGFVSSLLASAPNWQSYKVDDPNAPRMILLVIFYANVILLAEIKNVRIYIETATAVVISYVSLLKISWSYIWLVLFPIVAIGFIVALCKELSHEDEAGGSXIHRSRAMKVKVKAKLLRLHGKSFMLGALTMMMTRLVETGRATAHRGIVPASELLWKASLVVLLVAVHAVAAELLGENALLLCMPEILPVLLWLSVRLDTADDRIKLVLDSNLLPAAPPAVLAMLATGEPLLYWCRKALVSCVVSALLTFYVYFMLCQWPGGQRNRTLTGASLQHAVIHLKSWAKVLLKAVVVLLIFXMLSFQLVLLQEPVVSSSADQIFIDYMXKIHQFII

SEQ ID NO: 346872 - protein, 121 aa, Zea mays
  Clone ID: MRT4577_79510C.1.pep
SPVPCQRRLCPQMPGLSPEYSHEGRLQTIITVKAITNAARNALIRAGPVTVGRNSHGPLVRGEDVRLVDFDRAFVLQQRVRRETAPFFTHSMSSPCSGVLCGYSLRRSDEATKESSEGYHV

SEQ ID NO: 346873 - protein, 106 aa, Zea mays
  Clone ID: MRT4577_79511C.1.pep
DCGQRNPMMNQEPARTTTAMVQRYDPQTCWMQSRSHELSNGPTMEQYSRGDAWQNLERGVEPRVTAREAYAPAPGHASRSSHAVVGCIRQTGGSTRRELCASETGA

SEQ ID NO: 346874 - protein, 121 aa, Zea mays
  unsure (1)..(121): unsure at all Xaa locations
  Clone ID: MRT4577_79512C.1.pep
NRGLAIIHSCLLDEFTLSSSNRIPRPRPRGRCRRPIVYRDRDRAAPRPRPSSIVHRGEDNTAAPDRRLISIHRFILPLGRFHPQVRTTWSVDAIALPLLSRRKEAIPXKRNAPSASVRGGS

SEQ ID NO: 346875 - protein, 58 aa, Zea mays
  unsure (1)..(58): unsure at all Xaa locations
  Clone ID: MRT4577_79513C.1.pep
IGFGVREAGVDRAGGAREGEDGEDEQAAWGHXDXGTGTTPLGXSPTQASRMACWARLE

SEQ ID NO: 346876 - protein, 69 aa, Zea mays
  unsure (1)..(69): unsure at all Xaa locations
  Clone ID: MRT4577_79514C.1.pep
VDWFVVGGCGSSPRQWPLLLMVVAVVLKWLFRFLLICLRDSSHVHRLKRGSGLKTPPEKXVGRPPNNEL

SEQ ID NO: 346877 - protein, 154 aa, Zea mays
  unsure (1)..(154): unsure at all Xaa locations
  Clone ID: MRT4577_79515C.1.pep
MPGSLPLNAEACWPKDVGIVALEIYFPSQYVDQAELEKYDGVDAGKYTIGLGQARMGFCTDREDINSLCLTVVQKLMERHSLSYDCIGRLEVGTETIIDKSKSVKSNLMQLFEESGNTDIEGIDTTNACYGGTAAVFNAXNWVESSSWDGRYAL

SEQ ID NO: 346878 - protein, 94 aa, Zea mays
  Clone ID: MRT4577_79516C.1.pep
VGKSTQRCKSRVMTDENITQSVTSIVGMCSRSTGRGEQQEERETERRFGTHPYGELAMLSFSTYRTRGRTPSNRGRGSSPWHSGRTPSQINRAS

SEQ ID NO: 346879 - protein, 139 aa, Zea mays
  Clone ID: MRT4577_79517C.1.pep
MVLSSIFSSDELDDVSGLWTLGAWTRPVPALLPLIIDEDSMLRLRAVASHALPPELSPQGQAGQPSLARPYCRCCRHLDLFEFEFDCSFVTVPWTPVSLSFAVPYCYDGIYGRAATAIRIDVAPPRPAGRWARTRHCVR

SEQ ID NO: 346880 - protein, 59 aa, Zea mays
  Clone ID: MRT4577_79518C.1.pep
TVLNTPHAHVFQNECVEPPYNGETLSQFLWPQSGFCIIPKNVYFGQKKKKKKKTPPPPA

SEQ ID NO: 346881 - protein, 105 aa, Zea mays
  Clone ID: MRT4577_79519C.1.pep
GTSRPAGKKMLEGRLSLTVDIPTALSPDRASPSQIGFYLGSRHRRPIPGAKAFTDLFAGEERPAEMNVAVPPQSPHLRLYDCAKSAIIKNFAFLYATWNGYRQVV

SEQ ID NO: 346882 - protein, 95 aa, Zea mays
  Clone ID: MRT4577_7951C.1.pep
LPVSVIVSSQCVMCMHSCSIYQFYWFSVLSPFGGFFPDHSSSSMISGDVIPLVRSLYPSLFLSCERTPLWVFSSSPFTYRYQSRACTCRPFTCVA

SEQ ID NO: 346883 - protein, 67 aa, Zea mays
  unsure (1)..(67): unsure at all Xaa locations
  Clone ID: MRT4577_79520C.1.pep
MEHKEAGCQQPEGPILCINNCGLPGSAATMNMSSKCHKXTIMMHEQAHLAAPPIHSIANVADNAKRT

SEQ ID NO: 346884 - protein, 343 aa, Zea mays
  unsure (1)..(343): unsure at all Xaa locations
  Clone ID: MRT4577_79521C.1.pep
MNVAVPPQSPHLRLYDFAKSAIIKIFAFPYATVCDLYCDGGMDTDKWCDAQVGHYIGIDASASGVNYARELWENRRKPFTAEFIELDPSXMVLKLKCRKRASKQIWFAVCSTCSYALRXRTGKEASEQCIITSQTWRLLLWHNSXSSTIWTKYQKNVEASHNKGLKTVPNSIRSENYTITFEVEEEKFPFFGKKYQLKFASDAVFENQCLVHFPTLMRLSREAGLEYVEIQNLTEFYDDNRTQFAPMLGGYGASFLDARGKLVARSYDILGLYSAFVFQKPDPEAIPPIVTPDLPDPDKGHEEQEWLQPQQASVEDGRRSHADVLPIDPEKGILGPGPADMRL

SEQ ID NO: 346885 - protein, 262 aa, Zea mays
  Clone ID: MRT4577_79522C.1.pep
SKYIYLWQVTEVWEWPIALVLKLTIPSTLPSEWSKVYISANISLCPLLILYSFSSFIPLDTRIVFLLPQVRFPLWSVVLFASLCLALSHYLLEKEAPETETIASTIISFIMSVFWISTTAGELLSCLAAVGAIMDFPPAILGMTVLAWGNSVGDLVADVALARAGQPTIAVAGCFAGPMFNMLVGLGTALVVQTARVYPGAFVLEFHVGIVVAFVFLLLSLMGTLLVVTWARFRVPRFWGYCLMGMYILFTVVSIAIASYSG

SEQ ID NO: 346886 - protein, 102 aa, Zea mays
  unsure (1)..(102): unsure at all Xaa locations
  Clone ID: MRT4577_79523C.1.pep
SRVGQHDGRGGSAHDGXMKRGYGHAEIPTSGYRKLRVXLRRRLVKNYDQIRDNRCKNCPFVXMDREHDITVNXTTPNFTGIICLMDPTLSXAARWLKIGRFI

SEQ ID NO: 346887 - protein, 382 aa, Zea mays
  Clone ID: MRT4577_79524C.1.pep
MAAAALAAWWWSLSLLLATIVGGGSASPSPVPGCYTRIFSFGDSLTDTGNYVHLTASSHSPYGAPPYGRTFFGKPTGRASDGRLVIDFIAEEFGLAKVTAIQAGTAPGDFQNGANFAIISATANNGSFFAGNGMDIRPFSLDTQMLWFRTHLRELVQAAAAAAQHQNGSGSVGALLSGALVALGEIGGNDYNFAFSRGVPRDAVRRFVPAVVDKLAGAMEELIAMGARAFVVPGNLPFGCTPLYLQRFRANGGWWDYDPATGCLAWFNRFAQYHNRVLAARLDRLRRLHPDVTIVYADWYEATMSIFQDPGKLGFTNALRTCCGNQTVPCGRPGCSVCKDPSTYGSWDGTHQVIADWVLHGPHASPCSSASPVPLADTCPPT

SEQ ID NO: 346888 - protein, 130 aa, Zea mays
  Clone ID: MRT4577_79525C.1.pep
MLGLSTGSVGSRLSPVAWRPRLRASAHRAGTLCGECFQRCLRGGFSIRKPQILCLSAKSRPYQFREAGQRAMAGVLANGESQGAAQRSYQGAGGGTPDMGIGKDGVLPWKLPGDLKFFKEVTLTTSEPGK

SEQ ID NO: 346889 - protein, 183 aa, Zea mays
  Clone ID: MRT4577_79526C.1.pep
QRPAVRRFVPAVVDKLAGAMEELIAMGARAFVVPGNLPFGCTPLYLQRFRANGGWWDYDPATGCLAWFNRFAQYHNRVLAARLDRLRRLHPDVTIVYADWYEATMSIFQDPGKLGFTNALRTCCGNQTVPCGRPGCSVCKDPSTYGSWDGTHPTEAVYKVIADGVLHGPHASPVPLADTCPPT

SEQ ID NO: 346890 - protein, 104 aa, Zea mays
  unsure (1)..(104): unsure at all Xaa locations
  Clone ID: MRT4577_79527C.1.pep
PPATQTHPAHPTQEPPRRTHAHVTLDPPPRIPHTPHTDQNFPQXPSKAPTQPIEKPXXXXXKKTPPPTQRGXXXXKKKNTVGLSHCNSSATGXTQTPPMESXKR

SEQ ID NO: 346891 - protein, 127 aa, Zea mays
  Clone ID: MRT4577_79528C.1.pep
THPATWARHPTSLRTSVSADIPQEHSANSNTSASSRLPKICKAAGWKEPSFDFEEQGPPHNRVFTCKVTVHLDELVNTIMECFSDPKPKKKAARENAAQGALWCLERSGYVKSSSDVPDLCGHQPFC

SEQ ID NO: 346892 - protein, 186 aa, Zea mays
  unsure (1)..(186): unsure at all Xaa locations
  Clone ID: MRT4577_79529C.1.pep
MQGDIDDENEAYERYTQNVRLLEETFYPMEDADVEPEAEAPSSDEERMDLXSEAKVRLKSDNEIADRFKERVAAILDQKLKKLLESQSADEDDKLSDPDQDDHLNPAKFSAKQKAERSASLNELLGKLTRARSEDDLKPCRDLIEQLFGKEKGSSTDRPAGVEMEQRDQESAAAAVAQPYSVPVVR

SEQ ID NO: 346893 - protein, 308 aa, Zea mays
  unsure (1)..(308): unsure at all Xaa locations
  Clone ID: MRT4577_7952C.1.pep
MDSKKMYVCSLPLMPYVVFGFVGSQLPSAPNWQSYKVDDPNAPRMILLVILYIYVILLAKIKNDRIYIETATAVVISYVSLLQISWSYIWLVPFPIVAIGFIVALCKELSHEDEAGGSHSQEQSNEGEGEATTSSWEKFLLFFSFMLGALTMMMTRLVEXAGHCPXGIVPASELLWKASLVVLLVAVHAVAAELLGENALLLCMPEILPVLLWLSVRLDTADDGIKLVLDSNLLPAALPAVPRHAXAKGEPLLYWCRKALVSCVVSALLTFYVYFMLCQWPGGQRDRTLTVLLQEPVVSSSADQIFDV

SEQ ID NO: 346894 - protein, 99 aa, Zea mays
  Clone ID: MRT4577_79530C.1.pep
GNTSASSRLPKICKAAGWKEPSFDFEEQGPPHNRVFTCKVTVHLDELVNTIMECFSDPKPKKKAARENAAQGALWCLERSGYVKSSSDVPDLCGHQPFC

SEQ ID NO: 346895 - protein, 65 aa, Zea mays
  unsure (1)..(65): unsure at all Xaa locations
  Clone ID: MRT4577_79531C.1.pep
GVGDPTSIKPKLGSSCIRGGKFLGPFLXGGSPAXNKVIAKVAKTHPPVVTLGNSKKVGFRFANKI

SEQ ID NO: 346896 - protein, 184 aa, Zea mays
  Clone ID: MRT4577_79532C.1.pep
MESPRKHKASAVPVKEKVKLEDGNDLLVKRRKTEFSGSIVQPEREIEVFDPENKVPDGLPVEYSTDKDPMDALTSCAVQNFGQAKGNTSASSRLPKICKAAGWKEPSFDFEEQGPPHNRIFTCKVTVHLDGLVNTIMECFSDPKPKKKAARENAAQGALWCLERSGYVKSSSDVPDLCGHQPFC

SEQ ID NO: 346897 - protein, 111 aa, Zea mays
  unsure (1)..(111): unsure at all Xaa locations
  Clone ID: MRT4577_79533C.1.pep
HNTSRXRQTEPTHXMQKEKERERXXRXXFSSFNQKTDTKPICLQKXXKXXEXKPTILIFXXXXPSXSSTQPXYXXKXFXHXPPXNPSXXSXLXXQQLLXXPPNLNPIXLIP

SEQ ID NO: 346898 - protein, 496 aa, Zea mays
  Clone ID: MRT4577_79534C.1.pep
MEVDGEAQHFRLFSKRAKPKLKSEVQPQPEPEPQSRDPAAPKAYLDPAPTIVTETGQADDAADAAGTAPATFADLGLSQWLVDACEALGMRRPTAVQRRCIPRALAGADVLGIAETGSGKTAAFALPILHRLGEDPYGVAALALAPTRELAAQLAEQFRALGAPLGLRCLAAIGGFDSLAQAKGLSRRPHVVVATPGRIATLVKNDPDLAKVFSRTKFLVLDEADRILDVNFEEELRVIFGCLPKKRQTFLFSATMSDNLRSLLELSGNKSYFFEAYEGFKTVETLKQQYIHVPPQGKELHLWHLLSVMKGKTEDPIRSAIVFVSTCKDCQYLDLLLEELGYPAVALNSHKSQAQRLSALNRFKSGQVPVLLATDVGSRGLDIQTVDLVINYDMPMSPRDYIHRVGRTARASRGGLAISFVTQKDICLLHEIEDVVEKQLEAYECSDKEVTKDITKVFKAIRLSKMRRRDEGHDEKVEARKEQKRRDRARKRKHED

SEQ ID NO: 346899 - protein, 91 aa, Zea mays
  Clone ID: MRT4577_79535C.1.pep
KQEKPFFLAFFPHLLWVYPQFRCNTITYPHNTPGGGAKHMGRTPRGDFKLNGRDGRRQRPGAQSSALFSPRSSSGDGWVAAHKEGSSRTRA

SEQ ID NO: 346900 - protein, 120 aa, Zea mays
  unsure (1)..(120): unsure at all Xaa locations
  Clone ID: MRT4577_79536C.1.pep
FWPGARARRAMPWLLPRPVAPXTRGGAAARRSGHRRLGARTHMRPAPTRSALQGAGTGHGGERAAANYGGAERERDRRGKGVDDLTSPHHHDEAQRGETWTAGQRSSGGEGAWRRGFXNS

SEQ ID NO: 346901 - protein, 139 aa, Zea mays
  Clone ID: MRT4577_79537C.1.pep
MFEQAVADFCWHAREVVSSGMGLWGWPWGRRGPSGFGSASTAEEVTAGVDASNITAIVTGATNGIGKETARVLALRGAKVIIPARTLESGLKLKESLADEVPSSKVHVMEMDLSCLSSVRDFARSFNSSHKHLNLLILE

SEQ ID NO: 346902 - protein, 73 aa, Zea mays
  Clone ID: MRT4577_79538C.1.pep
RSQGNVRVYPSYAAPDENMVLDGELLRKRMSNWSSPMNRVGLTGKIPQLTSTHQSRRYSTAAFKALVKVLKNA

SEQ ID NO: 346903 - protein, 367 aa, Zea mays
  Clone ID: MRT4577_79539C.1.pep
MFEQAVADFCWHAREVVSSGMGLWGWPWGRRGPSGFGSASTAEEVTAGVDASNITAIVTGATNGIGKETARVLALRGAKVIIPARTLESGLKLKESLADEVPSSKVHVMEMDLSCLSSVRDFARSFNSSHKHLNLLINNAGIMACPYQLSKDGIELQFATNHVGHFLLTSLLLDKMKSTAAETGVQGRIINVSSVAHKRSDGTCFELNKLNDKARYKPFIAYAHSKLANILHTNELSRRFQEEGCNLTANSLHPGVIITNIIRYVAGNSALISALSPVANLVLKSVPRGAATTCYLALHPNVKGVSGKYFADCNEATPTAVARDSELAKRLWSFSEELVKIYADMSQTTQASEEEETTVTKDVFQDK

SEQ ID NO: 346904 - protein, 64 aa, Zea mays
  Clone ID: MRT4577_7953C.1.pep
KRKAHPQKRLNLRMRMARSQGFFIRMAPVPRKPMPMGNPCFQGPGGANRGLGPQLANCFAALKC

SEQ ID NO: 346905 - protein, 60 aa, Zea mays
  Clone ID: MRT4577_79540C.1.pep
PSPLVVLGRTRKRVPPRQFPGCFGPVGGHRLGHHIYVSKTQIFQMKKKAESQAVSVCPFP

SEQ ID NO: 346906 - protein, 76 aa, Zea mays
  Clone ID: MRT4577_79541C.1.pep
HFPDRKKVLPNPKMNLPSKRGKGAPFPGDDPDNQFPKIILHPWAIPPWPIFTHPSFVTGPVQMGQLKGHQRQPAPF

SEQ ID NO: 346907 - protein, 111 aa, Zea mays
  Clone ID: MRT4577_79542C.1.pep
GKLNPIIGCARHLPSDLHHHMVSLLIIQSWKSWCLLPLCWMGLAPWISLGFDQVSSSDSPFPSGPHSLRVLSVFAVVRGSSALWPPLLKIPVWSPISTMPGTSSVGELEPN

SEQ ID NO: 346908 - protein, 189 aa, Zea mays
  Clone ID: MRT4577_79543C.1.pep
CRAMKAARERRWESRSFRCCSGGVHSCAMPPPRGRGRPLLIDSRFPSTSVIFPAKLTTPPCTHLPTSSPTCSHSCPRLRSSRRRLRWKSGIARLSSTAPPASLRRVHLPPPQRLTPPPLDPTPCPRPSSPTYSPVTTWAPWPDARHGQQVGRNTFYVDPLLPCSSTHESELGLDPLLPLHAGAPSADPK

SEQ ID NO: 346909 - protein, 101 aa, Zea mays
  unsure (1)..(101): unsure at all Xaa locations
  Clone ID: MRT4577_79544C.1.pep
PAIACKFDTLQQKIDRRTGKALEEAPKFVKSGDACLVKMVPSKAMCVEPFSDYPPLGRFAVRDMRQTVAVGVIKSCEKTDGKAAKVTKAAVKAXARSSYAR

SEQ ID NO: 346910 - protein, 88 aa, Zea mays
  unsure (1)..(88): unsure at all Xaa locations
  Clone ID: MRT4577_79545C.1.pep
LWRGWPGLGRLFRXVSXLGSACVSRAASXGLVGGLVLRFWCWFGRWLVLFAFVVRFGRWCRVLVVWCRASALFAPLWLVLLSLDIIWG

SEQ ID NO: 346911 - protein, 107 aa, Zea mays
  Clone ID: MRT4577_79546C.1.pep
RAESTGPQPNSAPAVSNGQTLHSITIFADLITVLQEVTQSTGVREHAFSQISEKVRERNPNFLKNAKISKFKKYLLVAEEAGIVTNRIPNGEGWVTLNDDSMWRVTA

SEQ ID NO: 346912 - protein, 109 aa, Zea mays
  unsure (1)..(109): unsure at all Xaa locations
  Clone ID: MRT4577_79547C.1.pep
GVPKGSRSNIRFVXAHFPIKASIPKSNTAMEIRNFLGKKKVRKVDMLDGVPLPRSKKVKDELILYGNDVEFVSRSPALINQKCHVKKKDIPKFLAGIYVSPKGVLEKDQ

SEQ ID NO: 346913 - protein, 61 aa, Zea mays
  Clone ID: MRT4577_79548C.1.pep
PRVRFQKPGGSPLTRVCQVVIAAFRKWHIEVPHDTSLLYEVDGQTSAIEGSRKLEHTNELE

SEQ ID NO: 346914 - protein, 63 aa, Zea mays
  Clone ID: MRT4577_79549C.1.pep
EARVPLKSKPPPPLFYLFTHGTPGTRVLNKKKKKKKKKKKKKKKKKKKKKKKKKKKKKKPPPP

SEQ ID NO: 346915 - protein, 365 aa, Zea mays
  unsure (1)..(365): unsure at all Xaa locations
  Clone ID: MRT4577_7954C.1.pep
MGSKKMYVCSLPLMPHVVFGFVSSLLASAPNWQSYKVDDPNAPRMILLVIFYANVILLAEIKNVRIYIETATAVVISYVSLLKISWSYIWLVLFPIVAIGFIVALCKELSHEDEAGGSHSQEQSNEGEGEGEATTSSWEKVEGLEAXRWCRTGRFSSWASCIXKFAVSQFLLFFSFMLGALTMMMTRLVEXAGHCPXGIVPASELLWKASLVVLLVAVHAVAAELLGENALLLCMPEILPVLLWLSVRLDTADDRIKLVLDSNLLPAALPAVLAMLATGEPLLYWCRKALVSCVVSALLTFYVYFMLCQWPGGQRNRTLTGASLQHAVIHLKSWAKVLLKAVVVLLIFXMLSFQLVLLQEPVVSS

SEQ ID NO: 346916 - protein, 91 aa, Zea mays
  Clone ID: MRT4577_79550C.1.pep
AAALFFFFFFFFFFFFFFFFFFGPKQRMAFNLVQFLHIHAFHLFHSYEQKFRAGPTGHQLHMLYPTFFLSTKEPKNLTGRTCRHFWIWEQA

SEQ ID NO: 346917 - protein, 35 aa, Zea mays
  Clone ID: MRT4577_79551C.1.pep
FQQPKLVQRLHPVKICNSSNVDKCVHIALNYISAF

SEQ ID NO: 346918 - protein, 72 aa, Zea mays
  unsure (1)..(72): unsure at all Xaa locations
  Clone ID: MRT4577_79552C.1.pep
SSSSIWGYHRHRDKMHGCHMHACLLGPRIVRPRRRLLLVAMLPCCSRPGVCMYFCLIFFLPLGKKVKXXKNI

SEQ ID NO: 346919 - protein, 52 aa, Zea mays
  Clone ID: MRT4577_79553C.1.pep
SKVSYINCLNIFSNPVCQAIALPWHNPGYIPRTGPHYVFPHNNREQHSISSR

SEQ ID NO: 346920 - protein, 57 aa, Zea mays
  Clone ID: MRT4577_79554C.1.pep
NGPPGGGLPPFCWGFPGRGPKKKKKKKKKKKKKKKKKKKKKKKKKKKKKKKKKKKKK

SEQ ID NO: 346921 - protein, 79 aa, Zea mays
  Clone ID: MRT4577_79555C.1.pep
AGRDLFHKRRRRCRRRAHQTFVQSRAHRLSLRCTFRHSTMTSPLCADSTITAVLKSPNAVFPLLTLLGATTQALMSMDL

SEQ ID NO: 346922 - protein, 165 aa, Zea mays
  unsure (1)..(165): unsure at all Xaa locations
  Clone ID: MRT4577_79556C.1.pep
PNRPAPIRKSIPLEEEAGPDQKIKKFLKQPETTLLDILPTQMQALRVITTLGILLLPLPHQEYIGKLAEPFWLEEPLVKAAFXKFGGRIKEIQGFFFECHHHPEVRNPFGTGVVPFEMLKPFFQPGVPRGGIPHSISLLPGRPFPPKGGCPFGGPLTNWLGIKII

SEQ ID NO: 346923 - protein, 208 aa, Zea mays
  Clone ID: MRT4577_79558C.1.pep
MQEEATMQVLLLLLLPLVLPAVILIVRRATPATKACLANLKFVLAGNKPPDMLVTDCAAAYGLLVRGRRTAAGGGGGSFSNRLSSMSPSAVLSGRRYHNITSAPYGQLWRALRHNLASGVLHPTHLHGGYAAARRHALRGLVADLRDQQLANGVVLAAESIRGAVFGLVSAMCFGAADAVVVRAMADVQTELVLSLPAARAFVSGPFP

SEQ ID NO: 346924 - protein, 310 aa, Zea mays
  Clone ID: MRT4577_79559C.1.pep
MKEKFPGFVEKLEKDMIVYTRVLGEGDNPSSSIGRGWQSTFLTKDKAVAEERAAKLGIKLEWTDDGVKTVMGPIPAVKWDESRGRVFTANDSPPDQKIPFHHEMAQVPTFPSKLFFFCEVEPKSGGETPVVPSHYVYKRMKEKFPGFVEKLEKDMIVYTRVLGEGDNPSSSIGRGWQSTFLTKDKVVAEERAAKLGIKLEWTDDSVKTVMGPIPAVKWDESRGRKIWFNSIVAAYIGWKDARNNPMKAVTFGDGSPLPADVIDACGQVLEEESVAVPWQHGDILLIDNWAVLHSRRSFEPPRRILASICK

SEQ ID NO: 346925 - protein, 37 aa, Zea mays
  Clone ID: MRT4577_7955C.1.pep
GSRAGAAKNDSEVPSKIVQLVVKEKSYWLYLFCWVLR

SEQ ID NO: 346926 - protein, 129 aa, Zea mays
  unsure (1)..(129): unsure at all Xaa locations
  Clone ID: MRT4577_79560C.1.pep
VXKPFSLKKTYXFSFVGLHKQLVSDTSCCLSHDPGLRVHGGFRGLCCRHRHDNRLRLRAPLGFVLGDNDQGETLEKYIGLHKSCSSLDDPHCRDFPSTELCQYGERYFCSCGGRWASWPRLSLFCVWAV

SEQ ID NO: 346927 - protein, 203 aa, Zea mays
  Clone ID: MRT4577_79561C.1.pep
VPTFPSKLFFFCEVEPKSGGETPIVLSHYVYKRMQEEFPEFVEKLEKEGLVYTRVLGEGDDPSSPIGGWQSTFLTKDKAVAEERAAKLGIKLEWTDDGVKTVMGPIPAVKWDESRGRKIWFNSIVAAYIGWKDARNDPTKAVTFGDGSPLPADVIDACGQVLEEESVAVPWQHGDILLIDNWAVLHSRRSFEPPRRILASICK

SEQ ID NO: 346928 - protein, 113 aa, Zea mays
  Clone ID: MRT4577_79562C.1.pep
LFFSCSVRCFGGKKKKKKKKKKKKKKKKKKKKKKKKKGGRKKKNASLLKRTKKKNGLSYKGNKNSFTVAVKKTTVVIGENPNLTPNNLLLKKFNLCKNWGNTKKIRKNQNSHN

SEQ ID NO: 346929 - protein, 63 aa, Zea mays
  Clone ID: MRT4577_79563C.1.pep
IYQVRGSLVWSRSVYLWAYVGCSNQNLVQGLARPRFTQLEPVERDSWPVRPGGSCKCVSHSTN

SEQ ID NO: 346930 - protein, 93 aa, Zea mays
  Clone ID: MRT4577_79564C.1.pep
MADGSSNSSASVAMGQEVQAFVENKYGGMVPKKPLISKDQERAYFDSADWVLGKQAANSGTARAATAIEFLKPKLKRTPHHQLPPRKPTCASS

SEQ ID NO: 346931 - protein, 68 aa, Zea mays
  Clone ID: MRT4577_79565C.1.pep
REAPLFLEQLFLIYLSYNKVFVSFSFPQVNSMSHLNWYVHCDLNFGQDLARAPRLSAFHFVLLFCFLI

SEQ ID NO: 346932 - protein, 75 aa, Zea mays
  Clone ID: MRT4577_79566C.1.pep
ISYSLFDGTCYSDNRSNSRANTCNKPRLPGGAHLLDKRLTRALPADPMIHDNLTDRTAFVPATHHSNFCPINFRW

SEQ ID NO: 346933 - protein, 416 aa, Zea mays
  unsure (1)..(416): unsure at all Xaa locations
  Clone ID: MRT4577_79567C.1.pep
ITIPGALVSGNWNEYNLNPLTRTPTAPPSLVMRMAADRQAELHRLSQHXAVSDFPHRNRIHALLRGRFLRNSGLPEERRPPSVAARELGQLRQRHPVSGLREEFRFRLENLVRGQADSQVDASSVHDVELSTNDRSELRPPETTQERHERTSEXQSSTNRQYGNDXGFESGSPNIAEVFCGSHSQAESQDDLEHERRDWQRFSHAVIGEESERTWRENADNMSSHEGTAVEDDNNDHLPEANEESTSVDHLPEGLEGSITDGSLPEAQEDQHDSDHLPAVLEELHGNNHFQESHGEWRRDDRPVEVYDEWQSDDHLPEVNEEWHNDDESNDTADNWHDNNSDQPIDHDAALIRRANTFIPGDDDNVYSTELRELLSRRSVSNLLHSAFRENLDRLIPSYVERQGRGPLPWDLEGTT

SEQ ID NO: 346934 - protein, 85 aa, Zea mays
  Clone ID: MRT4577_79568C.1.pep
MSPSEPTREESVYMAKLAEQAERYEEMVEFMERVARSVGGAGGGEELSVEERKLVFVAYKNVMGARKGLWRIISCIEQKEEGRGN

SEQ ID NO: 346935 - protein, 261 aa, Zea mays
  Clone ID: MRT4577_79569C.1.pep
WVAMRLIHGQGHQRANNETEEARKKIRKFKESAWKCVYFLSGELLSLSVTYNEPWFTNTRYFWVGPGEQVWPDQKIKLKLKAVYMYAAGFYTYSIFALMFWETRRSDFGVSMSHHVATVVLIVLSYVFRFARVGSIVLAIHDASDVFLEVGKMSKYSHCDWLANVSFLFFVISWVLLRLTYFPFWILRSTSYEVLLTLDKKKHNFDGPIYYYVFNSLLFSLLVLHIYWWVLIYRMLVRQIKTRNVGDDVRSDSEGEDDHED

SEQ ID NO: 346936 - protein, 131 aa, Zea mays
  Clone ID: MRT4577_7956C.1.pep
GLGRLPFSLLLRSFLLVLPCSSNVPLPSCSCWCPFFPSSCSYFFPHAPALLHVWLQLFPALAFSFYEASGLICSFPHIFVAVPPSFPALCPKFVRSIVLSPLVCVSPPLFRAVPCKHLEPYSALCTRASRV

SEQ ID NO: 346937 - protein, 63 aa, Zea mays
  Clone ID: MRT4577_79570C.1.pep
LVLYFTISFIGILEDLPRYLHVHMNAGAHWKGHCISSRVLPLVSCTPKDDEDESQSTHRHVGG

SEQ ID NO: 346938 - protein, 307 aa, Zea mays
  unsure (1)..(307): unsure at all Xaa locations
  Clone ID: MRT4577_79571C.1.pep
MGLGEAAGRLLAAVDWEREAYPAYDDFLALPAFVLFFPTVRFLLDRFVFEWVAMRLIHGQGHQRANNETEEARKKIRKFKESAWKCVYFLSGELLSLSVTYNEPWFTNTRYFWVGPGEQVWPDQKIKLKLKAVYMYAAGFYTYSIFALMFWETRRSDFGVSMSHHVATVVLIVLSYVFRFARVGSIVLAIHDASDVFLEVGKMSKYSHCDWLANVSFLFFVISWVLLRLTYFPFWILRSTRYPRVRXKHNFDGPIYYYVFNSLLFSLLVLHIYWWVLIYRMLLRQIKTRNVGDDVRSDSEGEDDHED

SEQ ID NO: 346939 - protein, 311 aa, Zea mays
  Clone ID: MRT4577_79572C.1.pep
MGLGEAAGRLLAAVDWEREAYPAYDDFLALPAFVLFFPTVRYLLDRFVFEWVARRLINRNGHQSANNETEEGRKKIRKFKESAWKCVYFLSGELLALSVTYNEPWFTNTRYFWVGPGEQVWPDQKIKLKLKAVYMYAAGFYTYSIFALMFWETRRSDFGVSMSHHVATVVLIVLSYVFRFARVGSIVLAIHDASDVFLEVGKMSKYSHCDWLANVSFLFFVISWVLLRLTYFPFWILRSTSYEVLLTLDKKKHNFDGPIYYYVFNSLLFSLLVLHIYWWVLIYRMLLRQIKTRNVGDDVRSDSEGEDDHED

SEQ ID NO: 346940 - protein, 153 aa, Zea mays
  unsure (1)..(153): unsure at all Xaa locations
  Clone ID: MRT4577_79573C.1.pep
PGSMSHXVATVVLIVLSYVFRFARVGSIVLAIHDASDVFLEVGKMSKYSHCDWLANVSFLFFVISWVLLRLTYFPFWILRSTSYEVLLTLDKKKHNFDGPIYYYVFNSLLFSLLVLHIYWWVLIYRMLVRQIKTRNVGDDVRSDSEGEDDHED

SEQ ID NO: 346941 - protein, 69 aa, Zea mays
  unsure (1)..(69): unsure at all Xaa locations
  Clone ID: MRT4577_79574C.1.pep
LSGNGANQSGGARIGFGEHSNPQILNLLRSNHGDRLQVLLNSDRRKVWVQXPTHPSTFFGNGGDLLHVK

SEQ ID NO: 346942 - protein, 145 aa, Zea mays
  Clone ID: MRT4577_79575C.1.pep
MNRFKNVVLRKCKSLSSRVGRPPSASPSYRYSSLRSMPMSMSTRRDAGAAAADADDAAASSVGGGAAAAAAALVGSSRRRYVISAEHLSHPLIAALIDDDERHKEPVAVNCEVVLFDHLLWMLDNAVDLHDDDDAMRELAQLYAC

SEQ ID NO: 346943 - protein, 135 aa, Zea mays
  unsure (1)..(135): unsure at all Xaa locations
  Clone ID: MRT4577_79576C.1.pep
MDEHQPGVCEDEGPVLQWLTHPRTRISVDKVAIQAENAKYHTLQTINANAIIINMETPVTYSPLILCYLYYLTGYLSAEIPLLRSVEVVLAHEYILAGFIPLTGHAIYMNMHGHEDELVAXASLVGILIVCLTMN

SEQ ID NO: 346944 - protein, 91 aa, Zea mays
  Clone ID: MRT4577_79577C.1.pep
PKAASPKPKAKAKAKAKAKPVAPAAGLPKPRGGPPRVAKPSARASPPKAAKKGVAPPKKGKAPAAPKKVAPPKKAVSPPPARKDVARKAKK

SEQ ID NO: 346945 - protein, 51 aa, Zea mays
  Clone ID: MRT4577_79578C.1.pep
MKVVSVLVMCLALSAAIASAMQMPCPCAVLQGLYGAGACLTTMMGAGRLYP

SEQ ID NO: 346946 - protein, 76 aa, Zea mays
  unsure (1)..(76): unsure at all Xaa locations
  Clone ID: MRT4577_79579C.1.pep
STYGQVLESKIIRDREAQRSRGFSYATFYTKEAMRNAIKGMNGQELXDGRNIXTDNEAQSHVHRGNRGGGRDPDVR

SEQ ID NO: 346947 - protein, 542 aa, Zea mays
  Clone ID: MRT4577_7957C.1.pep
MSQLQTPPGVTITCAVETPHLAILTPDALKFLATLHRYFEPTRRALLQRRQLEQARLDAGGLPNFHSETKWIRENLAWQAASPAPGLRDRRVEITGPVDRKMVINALNSGAATFMADFEDSHAPTWLNNLDGQINMRDAVRRQISFKAPNGKDYKLNDRIATLIVRARGWHLDEPHLLVDGQPISGGIFDFGLYFFHNAKECIKRGFGPYFYLPKMEHYLEARLWNDIFKIAQDYIHMPRGTIRATCLIETLPAAFQMDEIIFELKEHSAGLNCGRWDYIFSFIKKMRHNPQFVLPDRSDVTMTVPFMDAYVRLLIKTCHSRGVAAMGGMSAQIPIKDNPKANEAAINKVKADKLREVKAGHDGTWVAHPALVKVALDIFNEHMIGPNQYHVRRSEVQVSALDLINTNVPGKITEHGIRENVSAALQYCANWITGVGCVPIANLMEDAATAEIARLQIWQWVRHGSMTDAHKKITAEWIDQILEEESAQAKKTTAKGLPESKVDMAKRYLSGQAHAPVPDDFLTSALMSSLDDMAAPNRSKL

SEQ ID NO: 346948 - protein, 102 aa, Zea mays
  unsure (1)..(102): unsure at all Xaa locations
  Clone ID: MRT4577_79580C.1.pep
NINMEDLPNPNFFDLKYCPNKLGTVNCSSXVTDKDVTFKNITGFLLILEGGSLFCTXRFPSTGVTMVDFNVEFIGTINYTXMVLCTNFKGSSXGCPKELACF

SEQ ID NO: 346949 - protein, 155 aa, Zea mays
  unsure (1)..(155): unsure at all Xaa locations
  Clone ID: MRT4577_79581C.1.pep
PMRASSSADSSAHEVDNQMCQPVNLTLEQVVKHKLRGGRMFTCRXLIGVIXEETGSKELXNLVIVKPIQVEDLLXIVKFXGVYLMECVLDDQYKGKVLSALIEGGLFSVGGSIKDKVVFCFTDNGRAKFCSVXKTDCGIDTQXENVHQLARGLKY

SEQ ID NO: 346950 - protein, 674 aa, Zea mays
  Clone ID: MRT4577_79582C.1.pep
TQLAGLGSFLTGGSCLLVLDGVRDRGGAARCGVPEPPGMADGKVREVIVASRREALCADMGCRNKIKMECLNEEDAWSLFQANVGGDIIHGHAQIPALAKQVAAECKCLPLALVTVGRAMSNKRTPEEWSNALDTLKASLRSGTPGLDKSTQALVKFCYDNLESDMVRECFLTCALWPEDHNISKEELVQSWIGLGLLPDLGDIEEAHRFGLSVIAIMMAACLLEPGDNHRYNMFPSDTHVRMHDVVRDAALRLAPAKWLVRAGAGLREPPREEALWRGAQRVSLMHNTIEDVPAKVGGALADAQPASLMLQCNKALPKRMLQAIQHFTKLTYLDLEDTGIQDAFPMEICCLVSLKHLNLSKNKILSLPMELGNLSQLEYFYLRDNYYIQITIPPGLISRLGKLQVLEVFTASIVSVADNYVAPVIDDLESSGARMASLGIWLDTTRDVERLARLAPGVRARSLHLRKLEGTRALPLLSAEHAPELAGVQESLRELVVYSSDVEEVTADAHVPMLEVIKFGFLTKLRVMAWSHAAGSNLREVAMGACHSLTHLTWVQNLPCLESLNLSGCNGLTRLLGGAEDSGSATEEVIVFPRLKLLALLGLPKLEAVRVEGECAFPELRRLQTRGCPRLKRIPMRPARGQQGTVRIECDKHWWNALQWAGEDVKACFVPVL

SEQ ID NO: 346951 - protein, 68 aa, Zea mays
  unsure (1)..(68): unsure at all Xaa locations
  Clone ID: MRT4577_79583C.1.pep
TGNHDPPPRRCVPIHIFPVKKLVNPAPSSHNXDIPDGNHPEYHQLNIPEDVSVTPLTSEGNTTDDLST

SEQ ID NO: 346952 - protein, 61 aa, Zea mays
  Clone ID: MRT4577_79584C.1.pep
MVSLQPSSAGPLLAEAATENKLPAWVSLVGSVVASSAGTAVTSKKRKRDDSGTRGHEDHRD

SEQ ID NO: 346953 - protein, 100 aa, Zea mays
  Clone ID: MRT4577_79585C.1.pep
LLDASAVSPRRLASKMSALKLWCITHTRTPFGGRSAHTRSCDQQPYRGALFLNESSRPGTSSSDALVTSHRSRTSGPRGGVSVWNVGDRPCSVDRFCDGY

SEQ ID NO: 346954 - protein, 85 aa, Zea mays
  unsure (1)..(85): unsure at all Xaa locations
  Clone ID: MRT4577_79586C.1.pep
RIVFVLMSMGILPCFWRAPTGNXKTSXWTKPYYSRWREAFLDNVLFHIIQFYVKELPDNTLDFFTLYYCVPRHLPKPVYESFYVI

SEQ ID NO: 346955 - protein, 73 aa, Zea mays
  Clone ID: MRT4577_79587C.1.pep
NVITFFWGTLIQINGPRFYTVGPGKTLGFPKLNAFKKNPLFPSCVISKKPPPIPLSKHLPILIAKWTPPFTAP

SEQ ID NO: 346956 - protein, 90 aa, Zea mays
  Clone ID: MRT4577_79588C.1.pep
KIGTTCMCLMVAIFFRSAIKIRPHACVWWGTHLDACSWWSDDIQSRTYFYVTLYTYLCQHQEVFNIFHVGSVFTLKPKGFYARTWRYVHR

SEQ ID NO: 346957 - protein, 83 aa, Zea mays
  Clone ID: MRT4577_79589C.1.pep
HYTITPTKLLACHLVSADDASLHVESNGHRNPGALRGREVPNVAEHHLLDINPVHTVDPKGGVDHGEDPDVIMDEHVQHLIPQ

SEQ ID NO: 346958 - protein, 107 aa, Zea mays
  Clone ID: MRT4577_7958C.1.pep
QLTRSALASLNSLLMHRRYTLHSSIHRHACHQPLLLASRSRYMHVQHGSSGHRARREKGAGQQGARRAPRAGREQLPPRTRFIQREGGSKQGGSREGAAAAGRSDLR

SEQ ID NO: 346959 - protein, 42 aa, Zea mays
  Clone ID: MRT4577_79590C.1.pep
KKNATDILDPTIYFPKVSSFLLPFSWPLLYNPLPCLTLSLPN

SEQ ID NO: 346960 - protein, 84 aa, Zea mays
  Clone ID: MRT4577_79591C.1.pep
RIPVRDSSAAGHQYLFPVPEPRPREPRSPRRQTRHGRLDPLSRIACALDAPVLSRPTYLRRPSLPRPSMLQLILQGTTCAPCGS

SEQ ID NO: 346961 - protein, 109 aa, Zea mays
  unsure (1)..(109): unsure at all Xaa locations
  Clone ID: MRT4577_79592C.1.pep
PRVRPCGRFFLLAFRQYKGGFLSDQVSLSFWGQEXEYGGTLGGFNIHREYTVHIVLRLGGDLIEPCLHALXASEHTXQDDLTEVXYARLHPMAAHCRKNNCRHDDLICQ

SEQ ID NO: 346962 - protein, 81 aa, Zea mays
  Clone ID: MRT4577_79593C.1.pep
SFGVITPLLGHLNSIHLPSFYNLLTWKTLAFPNFIAFQHIPLFPTCLITKKPPTNGLSNNFPTLIANWTPPLTAPLTPPVL

SEQ ID NO: 346963 - protein, 97 aa, Zea mays
  unsure (1)..(97): unsure at all Xaa locations
  Clone ID: MRT4577_79594C.1.pep
PRFLGAWRFAPGGASGSCRGAGVGWPLLVEERGGVARRAFPRXVPGDPXEGLCVSWXXXVQGGGGGRXFXLCWVWGSAXXVLRXCGCGXXWPALFGG

SEQ ID NO: 346964 - protein, 72 aa, Zea mays
  unsure (1)..(72): unsure at all Xaa locations
  Clone ID: MRT4577_79595C.1.pep
IYKKGSLTRQQEPGALPPRGNHRGRLNSVKARDHKTAKGRGRWRSKPGPGGQPGICGPCPXGGTNFPVKGGE

SEQ ID NO: 346965 - protein, 63 aa, Zea mays
  Clone ID: MRT4577_79596C.1.pep
PKVSGKLDNTPKPPKVSAPPVGVLVFFKGFAGLNFYKKPVLVSFMRPIFGPSIVEFEIPLPIP

SEQ ID NO: 346966 - protein, 76 aa, Zea mays
  Clone ID: MRT4577_79597C.1.pep
LLRCSSRCGSGIVAAEGGLRSLSGDSSSGTRVRCVCMNYTPAYIRIHVVYLVMTSSFWSLILFSAIYEAMSGEYVQ

SEQ ID NO: 346967 - protein, 202 aa, Zea mays
  Clone ID: MRT4577_79598C.1.pep
FGTRRHPWLLPCRASPMPKPPWPTSPCSGPTSSPSCCCVQPMPLPPSSSLQQPYHGCAPASMVSSPQPQRQTCRRPHVQLLHPPGSLPAPTRFARSDRSARRALPMPARERPLPSLLLSIDAQADAELPAPPDGVVKHLGTVPFWTSSARSLAPRRCLLRYSVGRLSHMIDVVLVYSELIDVGTLVDHVIWRTRTESTTRCC

SEQ ID NO: 346968 - protein, 89 aa, Zea mays
  Clone ID: MRT4577_79599C.1.pep
MGKITFYEDRGFQGRCYECSSDCPNLQTYFSRCNSVRVDSGCWMLYERPNYQGHQYFLRRGDYPDYQQWLGFSDYIRSCRLIPHTGSHR

SEQ ID NO: 346969 - protein, 134 aa, Zea mays
  unsure (1)..(134): unsure at all Xaa locations
  Clone ID: MRT4577_7959C.1.pep
LLPKELYSWRICRGVTVSIEDTHESVIYVPFLICGLALPVSPFFRGLLDFYDLKILPHFGLWKYLYXLARDGRGTAPXLIGGASLEMRRGRKIEYLDIPLKDSIKGWHLEWFIVENHCESLPLGRGGNQMFVLH

SEQ ID NO: 346970 - protein, 114 aa, Zea mays
  Clone ID: MRT4577_795C.1.pep
VSAWCARLRRRGRYGEGVPSQHDCILAYMGYFHVSMSCHPSVMFFSFVRSVFGMLCEECRCFRPRILSRLQPKNAGGGGGASRLVPEWGPGVTVMSTTGDGSVDFKRRRLQGVP

SEQ ID NO: 346971 - protein, 49 aa, Zea mays
  unsure (1)..(49): unsure at all Xaa locations
  Clone ID: MRT4577_79600C.1.pep
VGISXRMEVGGDFSATGLTQRKRFETDGGACAYASSDRRAILGSVPRSI

SEQ ID NO: 346972 - protein, 183 aa, Zea mays
  Clone ID: MRT4577_79601C.1.pep
DAGRDAWADAWADAWVLMLVHQFITFGFACTPLYFVWEKAVGMHVTRSVFLRALVRLPIVVPVWFLAIIFPFFGPINSAVGALLVSFTVYVIPALAHMLTYRSASARLNAAEKPPSFLPSWSGMFVLNAFVVAWMLVVGFGLGGWASVTNFIKQIDTFGLFAKCYQCPTKPHPGSPLPAPPHH

SEQ ID NO: 346973 - protein, 57 aa, Zea mays
  Clone ID: MRT4577_79602C.1.pep
MYNAPPPPPQDMSYYEHCQRRHEEKGCLYGCIFTALCCFCCYETCECCLDCLCCCCN

SEQ ID NO: 346974 - protein, 105 aa, Zea mays
  Clone ID: MRT4577_79603C.1.pep
RPGVHHSFIPKGEEDQVRSKGREKRVRREREPLLVRSPPQLRSIRKAGSKMYNAPSAQEMSYMEHVQRRHEEKGCLYACIFTALCCFCCYETCECCLDCLCCCCN

SEQ ID NO: 346975 - protein, 29 aa, Zea mays
  Clone ID: MRT4577_79604C.1.pep
MYNAPSAQEMSYLEHVQRRHEEKGCLYAW

SEQ ID NO: 346976 - protein, 130 aa, Zea mays
  Clone ID: MRT4577_79605C.1.pep
MDALTMRCYRYSPSVAMVPMRKTSRTTMTRASISTDGCSSSEPKKKSHSVSFAGKANKVYEDKDMGILCYTDENGELVCEGLDEGPRLTWQDMEKKNENQERQRRQRTPPPTVGRIDWSSLHAAVSMGKN

SEQ ID NO: 346977 - protein, 113 aa, Zea mays
  Clone ID: MRT4577_79606C.1.pep
PFDPAFAPRPHSFVPNGEEDQVRSKGREKRVRREREREREPLLVRSPPQLRSIRKAGKMYNAPSAQEMSYLEHVQRRHEEKGCLYACIFTALCCFCCYETCECCLDCLCCCCN

SEQ ID NO: 346978 - protein, 70 aa, Zea mays
  Clone ID: MRT4577_79607C.1.pep
FKKKKAALETNYYLHATILFMVLIQLCRVYTLLGNLLPTYPLRHPFPAANTKPTTPSHCHLMANGPPVRP

SEQ ID NO: 346979 - protein, 57 aa, Zea mays
  Clone ID: MRT4577_79608C.1.pep
MYNAPPPPPQDMSYLEHVQRRHEEKGCLYACIFTALCCFCCYETCECCLDCLCCCCN

SEQ ID NO: 346980 - protein, 128 aa, Zea mays
  Clone ID: MRT4577_79609C.1.pep
PRLVAAAAEAVEAALAGLVAAEAAQRSEDASVEAALLLVPPLARARSRTCPAAVAARCTSSLSLVRGFSSSPPSGTASGSSLPALLCTAMDEDRSGGRGPTYTRKRTPFRRQCRAPPARAFQKSPLVA

SEQ ID NO: 346981 - protein, 52 aa, Zea mays
  Clone ID: MRT4577_7960C.1.pep
SYFAMDPDTPISSAFAKHGMQWAMYVVTTGAVLALCSNLMGSLLPQVYSDKT

SEQ ID NO: 346982 - protein, 115 aa, Zea mays
  Clone ID: MRT4577_79610C.1.pep
PAGKKRVHHSFVPNGEEDQVRSKGKEKRVRREREREREREREPLLVRSPPQLRSIRKAGKMYNAPSAQEMSYLEHVQRRHEEKGCLYACIFTALCCFCCYETCECCLDCLCCCCN

SEQ ID NO: 346983 - protein, 58 aa, Zea mays
  Clone ID: MRT4577_79611C.1.pep
RLYRGDSHGSHFMTPSFQGVSFLLGDMTLNHLSPYYNNLGCVNPSVSQNNCPCMQTPF

SEQ ID NO: 346984 - protein, 104 aa, Zea mays
  unsure (1)..(104): unsure at all Xaa locations
  Clone ID: MRT4577_79612C.1.pep
RPRVRPRVRIEVLMSKIDALTAGLYDEMAXHHDDLLKYXRSLGHNVNXSEITRSSMLMDRHPDTMSKQDKEICSAIEKLSDCQETILILIRQMTSIPAPIQLLG

SEQ ID NO: 346985 - protein, 84 aa, Zea mays
  Clone ID: MRT4577_79613C.1.pep
MYNAPPPPPQDMSYYEHCQRRHEEKGCLYGWLGGKVDNHANNRTRQSLPDEVHAYCQPKTKPVHDTRTRVSPSFCSPSINSTPQ

SEQ ID NO: 346986 - protein, 87 aa, Zea mays
  Clone ID: MRT4577_79614C.1.pep
GCKSAIKLLIKSEIDHCLRFSLKQTHPPVYFHISLSTLALAFTNTTPILLFLFRNRRFLLWSQLVILLWTIHDLYRTRGWTRGSARE

SEQ ID NO: 346987 - protein, 94 aa, Zea mays
  Clone ID: MRT4577_79615C.1.pep
TLLRTIHIKGSGLRYTKSWRTNAVFPPGPGIFYFMSKKGFEPSQGSHGNFSCSEEGTPLPYQGTRGILHFEPQPFKQAEGLTRFACLKAPFAPL

SEQ ID NO: 346988 - protein, 101 aa, Zea mays
  unsure (1)..(101): unsure at all Xaa locations
  Clone ID: MRT4577_79617C.1.pep
SRGFEVDVLDVDPNGLQIPQKISTYTIGPFQTFKGEKGKLKVKVRFNIHGTGTGDSTIMLEDDGEGPGSFXNEASNDTMKMDTNDAPSDPGVGFDVNIAEP

SEQ ID NO: 346989 - protein, 121 aa, Zea mays
  unsure (1)..(121): unsure at all Xaa locations
  Clone ID: MRT4577_79618C.1.pep
NNTGRAFFPLAPVPFFTKGVKNTPPFLPFAGVKVNPAPPRGFFGGRGFPANPPGFSKILGRGFPAPPFGGHCVXRVGGLVTPGVFFRAPVFPFNSFGAGIAPPGVFLXPRPRGFSPNPKGV

SEQ ID NO: 346990 - protein, 63 aa, Zea mays
  Clone ID: MRT4577_79619C.1.pep
TTANHDLHRFLTQINNTNQIENLISLDENTHFMSTLLPFHSRTTKCGTDYRMRRVNIDLRWSD

SEQ ID NO: 346991 - protein, 202 aa, Zea mays
  Clone ID: MRT4577_7961C.1.pep
GDIQKETSRFCGFYVEVERRKQSGLNVDDKIKEAMAMHERIVGTPFKFMHCWLILRHEMKWNALLDSMNPTDAKETEQKGTNIMEELLPPKIARPTGRDHDKNMKSNISSSSFTACINVLQKLSMEHGAFEERQDATSREEATHMVVRSDRKLALQEEVIIIQKASLEIQQQMLKLQEEEREERVMTMDVNKMEPWVREYYI

SEQ ID NO: 346992 - protein, 58 aa, Zea mays
  unsure (1)..(58): unsure at all Xaa locations
  Clone ID: MRT4577_79620C.1.pep
RIKKGDRTXQIAFGSGFKCNSAVWKALRSVNPAKEKRGNPWMNDIDRYPVAVPKVSAI

SEQ ID NO: 346993 - protein, 62 aa, Zea mays
  Clone ID: MRT4577_79621C.1.pep
AAQAKTKARKSLAKSRPRIVITLLACPEFPENIAWHSMCFFEHFNVSATAVFNFKTSQCLAP

SEQ ID NO: 346994 - protein, 130 aa, Zea mays
  Clone ID: MRT4577_79622C.1.pep
NNGVLIWPERCSKTLRARPGGNMIHFRLWAARLNGSWPERAGCFEKQPITPYVLGIDYLHVMTRVRTHTYNSVIFLTFSLHTWRSRERASLLDEAGSRHTLFSTPTNHVEGGDRCCKPLRPCQPRRRGTS

SEQ ID NO: 346995 - protein, 72 aa, Zea mays
  unsure (1)..(72): unsure at all Xaa locations
  Clone ID: MRT4577_79623C.1.pep
LQRIAVLSAVDTISKHPAFDTDYKITWSNHGHAISIEYSATSALLGDSYRFGKRTTQALLYDERNAXARYYL

SEQ ID NO: 346996 - protein, 54 aa, Zea mays
  Clone ID: MRT4577_79624C.1.pep
RWKRIELVSKGRWNGFMAMICIFILALFTLPMFSLSETINTWDHQVILPLIGFL

SEQ ID NO: 346997 - protein, 169 aa, Zea mays
  unsure (1)..(169): unsure at all Xaa locations
  Clone ID: MRT4577_79626C.1.pep
MHAAYTCTRPSRVALLRRLSVLPAILSPRFFMQDLVSKTLXTRQTITVDAESSDTIDNVKAKIPDKEGIPPDHESLIFPRKHLDEXRTLADYNIQNESSLHLGLRLMGGMQIFVKTLTGKTITLDAEASHTIDNVQAKIQDKEGIPPEQKRVIFAGKHLEDGRTLADYN

SEQ ID NO: 346998 - protein, 69 aa, Zea mays
  Clone ID: MRT4577_79627C.1.pep
NKPQYTTSNPAVKSREGMGLDTLSLLLQHKERMKKKTLDTSRGSQVGQGHSRLQWEPMGTLYKGTSFPT

SEQ ID NO: 346999 - protein, 73 aa, Zea mays
  Clone ID: MRT4577_79628C.1.pep
QFLFFSWLLFYKIHVRIAASYRVLLPCSDTHGDEAGDDGRSKLKEAGCVGRSSPSSSSSLMKRPLNRGRSTAL

SEQ ID NO: 347000 - protein, 40 aa, Zea mays
  Clone ID: MRT4577_79629C.1.pep
VRRGLYRPRRRLQVRSLFDLGAATADVINRPPAYELLAHV

SEQ ID NO: 347001 - protein, 82 aa, Zea mays
  Clone ID: MRT4577_7962C.1.pep
PLPNDSGPGVKGFSHELQSWLGLTCAYTGASRQRVKHLPLRMINPGNIGPNPVIMPSFHTLRHILRGSIIVKRCSCAKLKEV

SEQ ID NO: 347002 - protein, 1021 aa, Zea mays
  Clone ID: MRT4577_79630C.1.pep
CPAFSVHSFNPAHSQGQSQSPEASSRGKYDYSQEIEVARSLNGKQAAGVNLNNINKEHGQSIEQYVSSNVRDEEIKETLESLNNKLSDALLTIRAKEDLVKEHAKVTEEAVAGWEQAEAEATTLKGLLEASCQKNASLQDQVCHLDEALKECVRQLRLAREEQEDKIREIVSKTLVPQSENPELQKHIGELRKRLEVTRLEASSSMLLQHDLQERLQAIERENLGLKAKGQAIERENLDLKAKLLVQSNDLKILMLERDLSNQAAETASKQHLEGVKKIARVEAECRRLQHLMRKATLINNSRSAQNNCCMESLTDSQSDHGEHMVGVDNDLQNSDSWALALIAELDQFKNGKDGSRNIVNNPVEIDIMDDFLEMERLAALPESDGTSSNFEMETDSDKAVARSSSLKIKSEELQNKVANLQEKFEAIASEKRELEMALMEVRNQLDISCDALVAATNRLVEMQMQLESANDSKLSALSLLDGLDSERKALELQLESKSVEVEELLMAVTSLEENTEQKELESQLELMSAQATELRLTVASLEERVQAERNISMQQKENAEAMLSTKEELEAQLCSATTEMGKLRDMVKALENEVKTEKALHEELTAHIQIKVEAAVDAVKEPLEAQLCSTNTEAEKLRDVVKALEDQVEKEKALCEELAAKVELKTKAARTAEAVQESLEAQLSSANAEIQKLEEITKQLQSELEKEKTLHEEFSAQLEMKIEAERARSMESAKESLEEQFQLVNSETAKLRDTVHALEHDVEKEKVFSAELQMQLEALEAVKKVLESEAESAHQDAKILSQKVESLEAKLTEHMLVTDEFTANVESLQSDRIAMEHKLKTADRELIKLTNKVSLLHREIEQERLMSEEYEQKCQKLEDQLSRDSRDAKLWRLANSNGDLKVKKEKELANAAGKLAECQKTIASLERQIKSLTDLDGVVLEPERLESSRDMPLPLDFRNSDAEFAMFTDDLYDFDLPNDSKSFFSPLPSIQTSSPPSEMSVFAGGLSTLSSYRSKRASRR

SEQ ID NO: 347003 - protein, 88 aa, Zea mays
  Clone ID: MRT4577_79631C.1.pep
RAPRASRCCTPVYHCCIATYTSDQPNMRYWWYATPDPSLLSFHCVCVSQQSRSSPRVCINQQPTKSAYERCSRICVAHYFIFELVHNK

SEQ ID NO: 347004 - protein, 116 aa, Zea mays
  unsure (1)..(116): unsure at all Xaa locations
  Clone ID: MRT4577_79632C.1.pep
PQRGREQKNHFSSFERSMVMDRAGWLWRRRSSDKIPGGSDSSLSVSSHSERCSDDQGQSQSPEASSRSKYDYSQEIEVARSLNGKQAAGVNLNNINKEHGQSIEQYVSXNVRDEEI

SEQ ID NO: 347005 - protein, 83 aa, Zea mays
  Clone ID: MRT4577_79633C.1.pep
MSSKRAKAKTTKKRPQRATSDVFAMFDQSQIQEFKEAFNMIDQNRDGFIDKEDLHDMLASLGKRPTDEYLEGMMSEAPGPINF

SEQ ID NO: 347006 - protein, 542 aa, Zea mays
  Clone ID: MRT4577_79634C.1.pep
KRSRRPWESLKLQLSAALSTIRAKEDLVKQHAKVTEEAVAGWEQAEAEVTTLKGLLEASCRKNASLQDQVSHMDEALKECVRQLRLAREEQEDKVREIVSNSLVPQSENPELQNHIAELKKRLEVTRLEASSSMILQHDLHERLRAIERENLDLKAKHQAIEKENIDLKAKLLVQSKDLKILMLERDLSNQVAETASKQHLESVKKIARVEAECRRLQHLTRKTTLINNSRSTQNNCCMESLTDSQSDHGEHMVGVDNDLQNSDSWALALIAELDQFKNGKDGSRNIVNNPVEIDIMDDFLEMERLAALPESDGTSSNFEMETDSDKAVTRNSSLKVKNEELQNKVADLQEKFEAIACEKRELELVLVEVRDQLEISCDALVVAKNRLVEMQMQLDSANDSKLSALDDVERLDSERKALELQLESKSVEVEELLMAVASLEGNAEQKELESQLELMSAQATELRLTVASLEERVQAERDLFVQQKQNAEAMLNAKEELEAQLCSANTKMGKLRDIIKALENEVKKKKKGSRSRSRTRLVLDR

SEQ ID NO: 347007 - protein, 71 aa, Zea mays
  Clone ID: MRT4577_79635C.1.pep
LLGGVQLYGDKGTAAFFSCLHGWAFTLTNFAKRYSSKFGVGGSQMMGRLWGENFFDPATKKWTTHNTRTPT

SEQ ID NO: 347008 - protein, 60 aa, Zea mays
  unsure (1)..(60): unsure at all Xaa locations
  Clone ID: MRT4577_79636C.1.pep
FSPTGFFFVGSKYMVIPGEPXVFTPGKKGPGGLSFKKTGMAFILGIQKAPIPPGANNMVG

SEQ ID NO: 347009 - protein, 128 aa, Zea mays
  Clone ID: MRT4577_79637C.1.pep
KGKRSPNPQGGMVLNHRPPNRMVSSSSRLRVKRKMESVVHMSQGLNSRSIMSPKAAKNVAKCCEVVPIPVAGILPFSQLVGARVPWKCENLCTLKTHVFLGRMIVLVFQTLHRTHMIVPALLKLERTE

SEQ ID NO: 347010 - protein, 54 aa, Zea mays
  Clone ID: MRT4577_79638C.1.pep
SQAIVTLRILYVLCPLVSTSLCSEVFAQIATPLHIIPPISVPPRVHGCRAVGVA

SEQ ID NO: 347011 - protein, 64 aa, Zea mays
  Clone ID: MRT4577_79639C.1.pep
VAHMEVKLWSSTGLTSGQARLFMDAGTLVLGVDILSNQSAPAAPLMLALCVSVAPSCIVPRSLL

SEQ ID NO: 347012 - protein, 72 aa, Zea mays
  Clone ID: MRT4577_7963C.1.pep
AQKKEAAALIGWSLLLTDSRVPVQSKLQERTYTLKTLRSETMSRRAAPLLLACLVAVTEGALADCALLPLVR

SEQ ID NO: 347013 - protein, 137 aa, Zea mays
  unsure (1)..(137): unsure at all Xaa locations
  Clone ID: MRT4577_79640C.1.pep
PLQEAHTTPLLGKPPPPRGGGGRPTQKRPAGDKNRKTEGGGGKXTGPNPGPTPPEGQPXTTPAGQPQRDYPIAEGPQGEPPPTTTETGKRGGSKARSKAYQQKRGPPLQGKDPCRATGAPRGGPPKNGGPPQNPAAP

SEQ ID NO: 347014 - protein, 53 aa, Zea mays
  unsure (1)..(53): unsure at all Xaa locations
  Clone ID: MRT4577_79641C.1.pep
LQQLKYXLXXXXLXXXXPPXXPSNXSXLXXLXCXHSNYHTLTHPXXLFIXTTS

SEQ ID NO: 347015 - protein, 22 aa, Zea mays
  unsure (1)..(22): unsure at all Xaa locations
  Clone ID: MRT4577_79642C.1.pep
IPDRVLKAVFFXSLSVEYVIRA

SEQ ID NO: 347016 - protein, 97 aa, Zea mays
  Clone ID: MRT4577_79643C.1.pep
LTVMAHRWSPLKTLPPFPNRDNGHLSISFSLFWVGKREKSLEGKAKWDRWFWSKFRKNKVVFSDTTPYLRTLWFSVFTYYKPPISTLMLSCFFFFGL

SEQ ID NO: 347017 - protein, 100 aa, Zea mays
  Clone ID: MRT4577_79644C.1.pep
RVNLNRGLFSGRQSPLRALTGKLRALQKLMTACKRLMISLFKSIPSMFHHPPEALSDMISPAPTLPSSSPSAAVIPLMDLSVTRREDLVEHLMHSSFTVG

SEQ ID NO: 347018 - protein, 48 aa, Zea mays
  Clone ID: MRT4577_79645C.1.pep
VNSTTRPPGNVCVVLHPFSLVASSVRLSWWSVGTDPDFMHACRHVVSV

SEQ ID NO: 347019 - protein, 141 aa, Zea mays
  Clone ID: MRT4577_79646C.1.pep
QVLELRRSLETREGGAKANGQNSDAKNNPHSNNKLVKHNAGSTGSSIAALPGTNGQGEDDGDCNGHDMRNAAADGAAKELASLKESSKAVEEELKELHERYSAISLRLAEVEGERQQLVMTVRSLKNSLLAVTDAAPPKLL

SEQ ID NO: 347020 - protein, 83 aa, Zea mays
  Clone ID: MRT4577_79647C.1.pep
MRRKAVFAVGKKKKNGGTAAALRTGRRPFQHMALARLRELKKIVPDAQDAADVDVLLRRTADYICALELKLTVLRRVSAIYGV

SEQ ID NO: 347021 - protein, 136 aa, Zea mays
  Clone ID: MRT4577_79649C.1.pep
MEFDLLNYSPEAQLELMTTMLQLEQLTALDGHQFPTMAPVSPPISPMQTHHAGHSLSPPPHMSATTTTTTTGYPEQYTPAAAVYGATATGLEHLQDYVLSPPGGDCGGAAAAHAGFDVADVGGRDAGGDLHRRAAA

SEQ ID NO: 347022 - protein, 56 aa, Zea mays
  Clone ID: MRT4577_7964C.1.pep
DHTGSLHRAKGGIYWGHTVVENPAEYVLTANKKNAHLAHHIRRAPGSDRGKALCEC

SEQ ID NO: 347023 - protein, 85 aa, Zea mays
  Clone ID: MRT4577_79650C.1.pep
MRRKAVFAVGKKKKNKNGGTAAALRTGRRPSQHMALARLRELKKIVPDAQDAADVDVLLRRTADYICALELKLTVLRRVSAIYGV

SEQ ID NO: 347024 - protein, 230 aa, Zea mays
  unsure (1)..(230): unsure at all Xaa locations
  Clone ID: MRT4577_79651C.1.pep
MAKEVSEEPEHAAPAHKDYSDPPPAPLFDMGELRMWSFYRAIIAEFAATLLFLYITVATVIGYKVQSAADPCGGVGVLGIAWAFGGMIFVLVYCTAGISGGHINPAVTFGLLLARKVSLLRAVMYIVAQCAGGIVGAGIVKGIMKDAYQANGGGANMVASGFSRGTALGAEIVGTFVLVYTVFSATDPKRSARDSHVPXVLAPLPIGIXAVFLGHLXAPSPITGXTRINP

SEQ ID NO: 347025 - protein, 204 aa, Zea mays
  unsure (1)..(204): unsure at all Xaa locations
  Clone ID: MRT4577_79652C.1.pep
VPPXSGREPLAYLQRTRISWPRRSTQGENPTAPACLLPLARSPPLHGSSLRTPKLPPARPLAACARSLPASPSLSRSLSCARPTRAPSSFLVRSATDVNCPPLLVRLCNRVPGSAVFLRALSPTAEFPSHCPLLGAQLGSCPVPRRAPSVRLASPSSVRAXCARLLAPARSSVGAHLPGRAPFPASKLPLXALLLLVQPRSSTG

SEQ ID NO: 347026 - protein, 82 aa, Zea mays
  Clone ID: MRT4577_79653C.1.pep
AVGVGKAEVEEEEKGKEGIGGGEERSRARKAKGKCEFGVLKVEPGGPEGLGGVRLGLIKTRTGGWARGAGRRRRKEKVGKDK

SEQ ID NO: 347027 - protein, 59 aa, Zea mays
  Clone ID: MRT4577_79654C.1.pep
GGAAPVVARVSILAAAAPVEALLGPARWGVLVVVVAALGRGTRSIAAGSQELKLNRCSF

SEQ ID NO: 347028 - protein, 107 aa, Zea mays
  Clone ID: MRT4577_79655C.1.pep
CTYISTLATTTTECGNLVVHMKRKNTLQKCTSEKKEERGQVHVQYDAASLPPAAISASSSSRFLVRCGAVRCCASWRACVRIVMSACCFRGWRTRTSRSGRCPPASC

SEQ ID NO: 347029 - protein, 66 aa, Zea mays
  Clone ID: MRT4577_79656C.1.pep
AYYMLHSLSGPLSHYYRPPSRHDVHTLPPLHIATRRLIIPICTGRLHQVLRQDMLQTISKDVASSF

SEQ ID NO: 347030 - protein, 152 aa, Zea mays
  Clone ID: MRT4577_79657C.1.pep
RIIKNGYSGTRPAEAVRGSSKLAEQNLGNSYSDSDSGSGTCRVTSGRATCGNRRRVCTAGVPGPPDPVRRAERQRVCAQGSDGGMRVRGGGGGKKLGFGRVFLGVGGVGSSWALAGRASRGVGRRASRALDPWRGRGREKREGREGMSLVPN

SEQ ID NO: 347031 - protein, 506 aa, Zea mays
  Clone ID: MRT4577_79658C.1.pep
MKANMGTKARPPSADAEKGEIGEIDTRAPIQSVKAAVSLFGEVRFSSDKSAERKPKAPQTERVLAKETELHMAQKELNKYKEQLSNAETTRVQALSELEKAKKTVEELTAKLDLINKSKQLAIQATEDAKTQIKQLEGGSTSEGLGTDGALKQELESAREQYAVALADLDAAKQELRKLKKDFETSLDMRLSAAQQEEESLHTTEANIEKANQLRSEIAEIQESLMHVKAATVQAHEEEAQILAEKDVARTTYKQALEETQKKLLSLRNDFDPAAYDSLKEKLEQTNSEVASMQKKIEDARAQDLESVAVVSTELDDAKEMLQKVAEEESSLRSLVESLKVELEAVKQEHNQLKEKDTETESIVGDLHVKLQKCKSVLEAAVAAESKATSASDDLMLALQQLSAESNNALQEAEIMQKSAAELREEAKKARAELAEAEQKLQLTLKEAEEAKAAEAMALDRIKQLSDRASAARASTSESGAIIAISKEEFVSLSRKVEESEKLSEM

SEQ ID NO: 347032 - protein, 232 aa, Zea mays
  Clone ID: MRT4577_79659C.1.pep
MPKRTTHTYSSEDALPEGPESDLFVYYCKHCASHVLITDTQLQKMPKRKTDRAHVLDKAKHLSRLNVKEAGKVMLKRGEGKLEKQFRMSCVGCDLFVCYRSEEDLEVAPFIYVIDGALSSVAAETNPHDAPVPPCITQLEGGLVQVAIEVEDRAQRSAITRVNADDVRVTVAALAARGEANSELLEFMGKVLGLRLTQMTLQRGWNNKSKLLIVEDLSARQVYEKLLEAVQP

SEQ ID NO: 347033 - protein, 107 aa, Zea mays
  Clone ID: MRT4577_7965C.1.pep
TKGRIYQYKLIRGNKNGHTAQANLFKHFTQKGGTSSPNRNVKPVFFPFWGYFPNTKRLKRGGIMDSLIIQLNNVFYNQYSVCICKLYKHCHFPCASEQKKKLRALLK

SEQ ID NO: 347034 - protein, 108 aa, Zea mays
  Clone ID: MRT4577_79660C.1.pep
WPSYNVAPLGDDWISSSVMPSSAISGLSGQGDEHGMPGSRVYHSRGARGGRLLGTMTCLFHWCMDRGQHLPFSQTLLHYHQHRLIESNMENTNVVSLFPTKISNYSNI

SEQ ID NO: 347035 - protein, 393 aa, Zea mays
  Clone ID: MRT4577_79661C.1.pep
MFEIVESTLMQNLSLAPRSVAISNVQFSQGNPLTFIVSIFPASGTSFNRSEVIRIISPLVNQTYKAPPNFGPYSFIANTYFTVPSNKKPSMGKAAIIGISIGGVVLILGLVAVATYALRQKRIAKEAVERTTNPFASWGAGGTDNGDAPQLKGARYFPFEELKKCTNNFSETQEIGSGGYGKVYKGRLANGQIAAIKRAQQGSMQGAAEFKNEIELLSRVHHKNLVSLVGFCYEQGEQMLVYEYIPYGTLRENLMGKRGVNLDWKNRLRIAIGSAKGLAYLHELADPPIIHRDIKSTNILLDESLNAKVADFGLSKLVSDTQKGHVSTQVKGTLGYLDPEYYMTQQLSEKSDVYSFGVVLLELVTASQPIEKGRYIVREIRTAIDQYDQKYYG

SEQ ID NO: 347036 - protein, 63 aa, Zea mays
  Clone ID: MRT4577_79662C.1.pep
CFGRRAGLGGHRVPRPHPEPIEQPDGQHDPALDPLGGLDLAKLYTLVYDIRGEALSVEATGGA

SEQ ID NO: 347037 - protein, 55 aa, Zea mays
  Clone ID: MRT4577_79663C.1.pep
DPTRFERHVLFGGSQESILGVMEFSSFKATAFIFKPRGVSDAIKGSFSKILHDCS

SEQ ID NO: 347038 - protein, 42 aa, Zea mays
  Clone ID: MRT4577_79664C.1.pep
VCLFISSIFSNGYPHFPSFIHSCESPPHYINTTICVLATYKR

SEQ ID NO: 347039 - protein, 67 aa, Zea mays
  Clone ID: MRT4577_79665C.1.pep
KKTKKKKPKHKKKKKKKKKREKQKKKKGKHLKRLKSHYPTNLIHHPLPSRISHPTVRFPAPHCSPRK

SEQ ID NO: 347040 - protein, 102 aa, Zea mays
  unsure (1)..(102): unsure at all Xaa locations
  Clone ID: MRT4577_79666C.1.pep
RPDAETHHTRKQWRSHPNSQAKSSPPPSNPKPSTPSSSTSTTSAPSPPKCTKPSSPPPSAPPSSQPTAQASSPXIPPANPTLAPVLDTRPRSRIRRATRRFQ

SEQ ID NO: 347041 - protein, 55 aa, Zea mays
  Clone ID: MRT4577_79667C.1.pep
RTTRVSPPVANHCCLEKRPTRTYIHWMPTTGPQKSNTKSNLKRATPHTTNGRQDC

SEQ ID NO: 347042 - protein, 74 aa, Zea mays
  Clone ID: MRT4577_79668C.1.pep
QCQFVICSSQSDSQPSPMVHGIACHCHAQYALSPYSSGGTDGRTNNWTEMLASCRVCSCPGPFWCYLDPNLTVV

SEQ ID NO: 347043 - protein, 50 aa, Zea mays
  Clone ID: MRT4577_79669C.1.pep
RVSQVLLIFYFNRIWKCNLLFMVGNINQTQTLYNWNAAKKKSERGHHQCC

SEQ ID NO: 347044 - protein, 80 aa, Zea mays
  Clone ID: MRT4577_7966C.1.pep
RMHQSHSGSMCNSSVMTSLKNRLWQIGMMHVSKFRLSHVHCIVVYTGHVIAGYTLSVNYIVPTMIRSWCGSKNKNKSRTS

SEQ ID NO: 347045 - protein, 76 aa, Zea mays
  unsure (1)..(76): unsure at all Xaa locations
  Clone ID: MRT4577_79670C.1.pep
ASWPYVHSRIISSLHIYHATLGGLWSTLEALYYTSLLIFLSVLTIWLHKYCMSQIEPPLRXFPTEEATAYDTMEHA

SEQ ID NO: 347046 - protein, 59 aa, Zea mays
  Clone ID: MRT4577_79671C.1.pep
NHLMLIRYSVDISLDKTVVSNDVFRDPALKRKARRDAKVKFEERYKIGKNKWFFQKLRF

SEQ ID NO: 347047 - protein, 64 aa, Zea mays
  unsure (1)..(64): unsure at all Xaa locations
  Clone ID: MRT4577_79672C.1.pep
ARKTTAANEHTQEHTXXDKATNMSNRGALTRTXTLFCPNRXTVQTTTLNSSRLHCTQTATALAS

SEQ ID NO: 347048 - protein, 102 aa, Zea mays
  Clone ID: MRT4577_79673C.1.pep
EAIAPSQIMHSSSTFHCNIQQDVSLPPSNPTLNLKSVSWPRGIALQGISSYKNSQFPIGKGSRPFGNCPITYYLHIQLKLLVSLEKKHLSEHPTRPSTRPPT

SEQ ID NO: 347049 - protein, 93 aa, Zea mays
  Clone ID: MRT4577_79674C.1.pep
MGHFEEHPDLFCHTHTCVVQIWVDLAVTAYFSKIKGYAYDLAIIDTSPQDDGVITYLLASLSPYYDLFATSMITKSEAPTLDDVYAHLLSYEA

SEQ ID NO: 347050 - protein, 64 aa, Zea mays
  Clone ID: MRT4577_79675C.1.pep
MTVLRYLVQIGFLYLRYGADPKVLWMWYEPYLRDDEEFSPGSNGRKTTMGVYVPAGILGMCYLI

SEQ ID NO: 347051 - protein, 53 aa, Zea mays
  Clone ID: MRT4577_79676C.1.pep
KKNRFIRFWFVPPLLWRPRVHYKRVCCNEFVFGLHRTSPGVILLVELPALLCW

SEQ ID NO: 347052 - protein, 46 aa, Zea mays
  Clone ID: MRT4577_79677C.1.pep
RILYTTLFKTAHHKWIHLHEDIPTCLPLTITLTQCLLQTSNGAASH

SEQ ID NO: 347053 - protein, 401 aa, Zea mays
  Clone ID: MRT4577_79678C.1.pep
MAEALVGLRVAALAVPQARSHRRRLLPAARLAAFRRDRLSTARAAVAGPPEVDEDDSMSIDNLHRFFDLNVGKWDGSFYQFDAHGRVLQEISTRLSVSTYGEDNLISLLQSLYIKQASSAISIVDEEDSEPEWVEYKIKETNIFTVDKYQQIGFFPEEKAFALRYQTAGMLETVLRVGTLGEDDTGEESPKNLKIPSRKPSIVCENCLYSLEGNGRMRAFHIMDPKGVLDTLLIFHEKRQGSELAQSFKHYSVCTKSASSDRISTVLGRWEGHSVTKRSGVYGATLAEADTAVVLKMGSNGQLIQDTLSTKIGTGTTTTVNWTGSANENLLQFDGGYEITLLPGGMYMGYPSDISKSISQLDSFHLEFCWMESPGKRQRLVRTYDAAGLAVSSTYFFETKV

SEQ ID NO: 347054 - protein, 64 aa, Zea mays
  Clone ID: MRT4577_79679C.1.pep
GALGVLRAHNEPRQLHRRGGGGGLRLWRHHLLLPHRSDPTVTRLPVLLIAFSLRTRNTDVLWMF

SEQ ID NO: 347055 - protein, 57 aa, Zea mays
  Clone ID: MRT4577_7967C.1.pep
LYVCLIEYVPRHHGINVYYTASVANPWAVVSSDSSLSQLILSRHHENCPWWHLLLCT

SEQ ID NO: 347056 - protein, 53 aa, Zea mays
  Clone ID: MRT4577_79680C.1.pep
GGHNSVTYSPRGLLPVMRLMQCFWSNQGPSRPLILFGKVRDLRLFGCQQTKKR

SEQ ID NO: 347057 - protein, 131 aa, Zea mays
  Clone ID: MRT4577_79681C.1.pep
RWPQQPGASSHRRAGAAGHRLVGAAGPGAAGHRPVGLGEPRRTTAVLHGRGSSAGAILVARPRPSRRGQGASAPRHDRARRRHGAGAGAGPAGGIGARRSVSERTRPVPGADAGHGGAGVTRSRARAPATA

SEQ ID NO: 347058 - protein, 71 aa, Zea mays
  Clone ID: MRT4577_79682C.1.pep
PEFHRPGVPGERRAHQKKEGKYKAHTRNPLPRRERRYRPRRLVLGTHQPVKVNFFPRFKITKQAGKKTCGT

SEQ ID NO: 347059 - protein, 170 aa, Zea mays
  Clone ID: MRT4577_79683C.1.pep
RLPRGRPGFTLLWSASLLRQGERRRPLRRGPSPATRIQPDNPEDTCARCVDHRDSKALELGVRDDNMSDFEEPFKISGMWQCSICTHENTTYSSSCELCGVLHDLSLYFNDISEDEDGDTSILEYPSLQDLFLHHLVQSQRLLFSLMISKTEEIQQGISKLQWMLYIRHS

SEQ ID NO: 347060 - protein, 68 aa, Zea mays
  Clone ID: MRT4577_79684C.1.pep
MSSEEWITHVFQCGPHPFRFHQLLEFDQLKESYHRRLIGHNERRRRPPPGPLVSHYGRLAALFGGDKS

SEQ ID NO: 347061 - protein, 195 aa, Zea mays
  Clone ID: MRT4577_79685C.1.pep
LGTSRPAAAGCQTSPEVERNQEGEAQQAPVFWTACPSCCHLHQYDHSYESQTLLCPSCRRPFVATAMSTQPPIVPGTDMYYCSWGFFPMGFPGGPAFAEPLNSPQQQAPAALGFYPMGPYLPLPSLSGIVEGEGNKAVDAGTGIPVIPTVAAPAPASSPAPTAATPVEFLHVKVGAKKRGRPKGSKNKKAVVEIN

SEQ ID NO: 347062 - protein, 225 aa, Zea mays
  unsure (1)..(225): unsure at all Xaa locations
  Clone ID: MRT4577_79686C.1.pep
MLGDQRMILGLDSATSSSTAPDLTRAEEDPSVSRSCVIDRLQVGWAQKGGQVEGLVNCYSKKKNKTGSGSRNLAARAWSSEMEGSDEGGEVNTGDLIGGIGRELAISCLLRLPRSYYYDVACVNRSFYSLVRFGELYRLRREAGIVEQMIYCSCNVLEWEGFDPRRQRWFSIPSMPPIECFTLADXESLAVGTNILVFGKKVEAHVVLRYSLLTNSWTTGEMMNT

SEQ ID NO: 347063 - protein, 207 aa, Zea mays
  Clone ID: MRT4577_79687C.1.pep
MQGSRTKSGSAEAKGNGKPDKEKKGGGGTPPTPKDSRPRKPAVPKASAASHGTTRAADKSPGSGSDRKAPTPKAASRLATPPEKQGGKPAKPPQEQQAAKPPQELQAQLAVVREELVKAKEQLVENEKEKGRVLAELERAKQAADEANAKLQEALDAQRRAEDAQEADKLPAGESDQASMHSQQEADVTALRSAVEQLEKPGMSWPT

SEQ ID NO: 347064 - protein, 332 aa, Zea mays
  Clone ID: MRT4577_79688C.1.pep
MSGLVSDEYREEAHALTPSIENEVARRWRHEGREKRSRMTNETVTTGAWTIIIVRRNPHHDTHTRETSDWVRVHSWFKIFTLTRNRWVGYLSGFGSAVNVKWQKEVFPGIEIDTSQPPIVLKSQLYTLTGVPPERQKIMVKGGLLKDDADWSTLGVKDGQKLMMIGTADEIVKAPEKGPLFVEDLPEEEQVVALCKAYQEKWLWLSIAFNKLIKILLAITKWVFGFLIQSVCYKINDTGRISFHLLPLNEQCRRRLLPVTTLLPVEPSSNLLDAREIGQESKCYGTLLNEEYGDDHAAHELKRSHGDFPTTARNSPVFLSQIHLGAATTTTQ

SEQ ID NO: 347065 - protein, 51 aa, Zea mays
  Clone ID: MRT4577_79689C.1.pep
FTCFISTEAFLVFFRSPKKPRCLNLIQNNSKLPTGGSAIKREIESNFFIYP

SEQ ID NO: 347066 - protein, 56 aa, Zea mays
  Clone ID: MRT4577_7968C.1.pep
LVVIVVSAFIGCTCITVISMCRLAWQTTHQCSVASDGRWIRRSRCVAHCAALCAIE

SEQ ID NO: 347067 - protein, 75 aa, Zea mays
  Clone ID: MRT4577_79690C.1.pep
TGAAPPQAQGGNKRTSGAQARQQRTVTHQRRDQMPQHTLERMGRRTRRGQEAPHHRLPQTKKGPKRPTKRLTRGP

SEQ ID NO: 347068 - protein, 59 aa, Zea mays
  Clone ID: MRT4577_79691C.1.pep
ARADSMQLAENQSSRFLNEIRLAYIRLIRELEEREERRGSDAAGRVDPVAPKATDFFST

SEQ ID NO: 347069 - protein, 86 aa, Zea mays
  unsure (1)..(86): unsure at all Xaa locations
  Clone ID: MRT4577_79692C.1.pep
IRFLLQRIHGRCSRRALLHCSSRRLNAVEEPVFLKPAEPVDAMDIGASLPSPQLLLWSTRNLPRGSILXDSAWRWSCCITSAASTP

SEQ ID NO: 347070 - protein, 126 aa, Zea mays
  Clone ID: MRT4577_79693C.1.pep
GADHTRPNLVLGLRGGMLIFLKTLTGRTITLEVGGSATIDNVKAKIQDREGFPPDQKRLIFAGKQLKDGRTLVDSNIQKGSTFHLGLRLRGGLQIFVKTLTGKTITLEVESFRTINNGKAKIQARE

SEQ ID NO: 347071 - protein, 99 aa, Zea mays
  Clone ID: MRT4577_79694C.1.pep
PPYPPSSGTYNGVTSLILLSFKEHLGRTPRQVRPTSAGSGPAEEWSSYICHALFEIKSFVFPWLPPVGGLAPRSPVCFPTRVPCPNPNIFLCTPPGFFQ

SEQ ID NO: 347072 - protein, 329 aa, Zea mays
  unsure (1)..(329): unsure at all Xaa locations
  Clone ID: MRT4577_79695C.1.pep
MVGRGAATALVWAAVVAVATVVSRAQQLQVGFYDTLCPAAEIIVQEEVSKAASGNPGVAAGLLRLHFHDCFVRGCDASVLLDSSAGNQAEKDAAPNASLRGFEVIDSAKTRLEQACFGVVSCADVLAFAARDALALVGGDAYQVPAGRRDGNVSSAQEAGANLPPPTASASQLTQAFGAKGLSQAEMVALSGAHTVGAARCSSFAPRLYSYGPSGAGQDPSMDPAYLAALXSKCPPQGTGAADPPLPMDPVTPTAFDTNYYANLVARRGLLASDQALLADPATAAQVLAYTNSPATFQTDFVAAIIKMGAIQVLTGTAGTVRTNCRVAS

SEQ ID NO: 347073 - protein, 148 aa, Zea mays
  Clone ID: MRT4577_79696C.1.pep
GGKKKKAPGLSGFKKNPFPWANQKRLYGRDPQFPRGGIPPFPGSENRPPKRNPSPLGNKGPSPLFFPGGKTPPRGLTPPGPIIEQRPPGGKARPLKTTPPFLKPLNPGFLPLGQIRGPPEKARRGPKNRENRGRGPGAGPKRGGEKTP

SEQ ID NO: 347074 - protein, 338 aa, Zea mays
  Clone ID: MRT4577_79697C.1.pep
MVGRRTGGGGGAATALVWAVVAVAAAVSRAQQQQQLLQVGFYDTLCPAAEIIVQEEVSKAASGNPGVAAGLLRLHFHDCFVRGCDASVLLDSSAGNQAEKDAAPNASLRGFEVIDSAKTRLEQACFGVVSCADVLAFAARDALALVGGDAYQVPAGRRDGNVSSAQEAGANLPPPTASASQLTQAFGAKGLSQAEMVALSGAHTVGAARCSSFAPRLYSYGPSGAGQDPSMDPAYLAALAQQCPPQGTGAADPPLPMDPVTPTAFDTNYYANLVARRGLLASDQALLADPATAAQVLAYTNSPATFQTDFVAAMIKMGAIQVLTGTAGTVRTNCRVAS

SEQ ID NO: 347075 - protein, 97 aa, Zea mays
  Clone ID: MRT4577_79698C.1.pep
PGKISSRVPGKNSPGRYIKKLKGKGGERTILEHTPALFGILGEAFPFRSMSGQNHNNGGGSQFPWGTTGENTRGIYFGPQIQQPKKKPPGGTPTGGN

SEQ ID NO: 347076 - protein, 175 aa, Zea mays
  Clone ID: MRT4577_79699C.1.pep
MSGGRAPAVLLGGVASLLLSFVWMPALLPVASRLLLLPRVLLTMASGSPPTQPSPASDSGSGYVPGSVSAAFVTCPNEKVAKEIARAVVEKRLAACVNLIPQITSIYEWKGKIEEDSEVLMMIKTQSSLVPALTDFVRSVHPYEVAEVIALPVEQGNFPYLQWVRQVTESVSDSI

SEQ ID NO: 347077 - protein, 129 aa, Zea mays
  Clone ID: MRT4577_7969C.1.pep
SRATTRGAAPQQKQLRHSVRGYIYPKSERGKGPERKKNRKFNESIGRGGLALLLPSFHRRLPFRFCPLPPLNKKGDTSNPGWMDGCMDGRAPATTINCKLGGSHAWIGIGWDDHRPCSRRRPELQRLRT

SEQ ID NO: 347078 - protein, 97 aa, Zea mays
  unsure (1)..(97): unsure at all Xaa locations
  Clone ID: MRT4577_796C.1.pep
MIPLNRRTSLPRAGMDYFDARRKPHNVGKIIAALVLTTLCIFVLKQSPGFGGNSVFSRHEHGVTHVLVTGGAGYIGSHAALKLLKDNYRVTIXDNLS

SEQ ID NO: 347079 - protein, 48 aa, Zea mays
  Clone ID: MRT4577_79700C.1.pep
WRNRSVRSFFSRSRFLVLLAFSLSKKTHFLKPVHVVHGPRRLFSSYFI

SEQ ID NO: 347080 - protein, 208 aa, Zea mays
  unsure (1)..(208): unsure at all Xaa locations
  Clone ID: MRT4577_79701C.1.pep
RPGVARLNPGQSISVYELPRMNLLDKTSIKIDGVVDFDWAPATPKRDGVKEYEQLFCYWTPEIGSNPAKVGLMSVPSKEVVRSLNLFSVSDAKLHWQSDAAYICVKVDRHSKSKKSQATTLEIFRVKEKGVPXVEVVDTIKDTVINFAWEPKGDRFAIISTTEPVGVTAVAPKTAVSFFCPEKXKKGQQVGNFKHLRTLDKKNSNAIY

SEQ ID NO: 347081 - protein, 136 aa, Zea mays
  Clone ID: MRT4577_79702C.1.pep
GHPVKGHQLFPLSLVKKKTPLGPNTQTPPPRALAVFFIQLAPRVFSLKTGQCLHPNLCWLAPPLGPPGFSLFYSGCYFLLNFYRLPIFPRNPPFPCFPQPLIFLPIGKGGTPPGPGPEFPGPHLFFLKTGEKPLFF

SEQ ID NO: 347082 - protein, 69 aa, Zea mays
  Clone ID: MRT4577_79703C.1.pep
KWKAQGSGAYKKVVGGDRVYHTKLVVEVGPMGIGTFMVVVDHISVKGQVSSSASRSLGRNLVVARIFMR

SEQ ID NO: 347083 - protein, 116 aa, Zea mays
  Clone ID: MRT4577_79704C.1.pep
MAFLQKVGNALKRSAGSGSAMLQAVRSMSSAKVFVGGISYGTDDQSLADAFSNYGQVVESKVIMDRESGRSRGFGFVTYTSAEEAGAAITGMDGKDLQGRIVRVSYAHDRGSRPSF

SEQ ID NO: 347084 - protein, 87 aa, Zea mays
  Clone ID: MRT4577_79705C.1.pep
VTVRVLRVIFASFSRRVEGAGEMVRPPEVRLCLCASPHELVVLVLAVNLPQYSGICDLGTPYRPGRGAIMISSFYGGTGVVVVFSPP

SEQ ID NO: 347085 - protein, 82 aa, Zea mays
  Clone ID: MRT4577_79706C.1.pep
KTNSGNPPEVGKKPVCWQMNGKDPQLLGTFIKHYFFLFLAAFWGGGLSNLNLPPWGTQTKKNLCFNFKGKKKSSPLVWFKQG

SEQ ID NO: 347086 - protein, 62 aa, Zea mays
  Clone ID: MRT4577_79707C.1.pep
QSSQGPCKLGAPLAHPPGMTTIPTLLIYYGARPPQNHNPTLSHYNTACSGLATLRTLRAYPN

SEQ ID NO: 347087 - protein, 74 aa, Zea mays
  Clone ID: MRT4577_79708C.1.pep
QPDRKGTKVNAATQRIAKNHQRRDRVITACATIRVRARWQAGSEITRRMIRRQASQGVGTMNRGICSDPSSPLA

SEQ ID NO: 347088 - protein, 63 aa, Zea mays
  Clone ID: MRT4577_79709C.1.pep
FSTGGKKKTRTKKRPGKTAFFETKLVFGLIRYLFPLHLYLFPNLFLPVLHQEPYLLLLDREVL

SEQ ID NO: 347089 - protein, 340 aa, Zea mays
  Clone ID: MRT4577_7970C.1.pep
MSSSSAHQKASPPIEEEATEHGPFPIEQLQASGIAALDVKKLKDAGLCTVESVAYSPRKDLLQIKGISEAKVDKIIEAASKLVPLGFTSASQLHAQRLEIIQLTTGSRELDQILDGGIETGSITEMYGEFRSGKTQLCHTLCVTCQLPLDQGGGEGKALYIDAEGTFRPQRILQIADRFGLNGADVLENVAYARAYNTDHQSRLLLEAASMMVETRFALMVVDSATALYRTDFSGRGELSARQMHLAKFLRSLQKLADEFGVAVVITNQVVAQVDGAAMFAGPQIKPIGGNIMAHASTTRLFLRKGRGEERICKVISSPCLAEAEARFQISSEGVTDVKD

SEQ ID NO: 347090 - protein, 79 aa, Zea mays
  Clone ID: MRT4577_79710C.1.pep
KKKKKKKKKKKKKKKKKKKKKKKKKKKKKKKKKKKKKKGRPFWGTQFYLGGRARCSLFFWWPPYLPFPGLFVWPPFFPG

SEQ ID NO: 347091 - protein, 89 aa, Zea mays
  Clone ID: MRT4577_79711C.1.pep
VAEDLPPEQAGEVPVGRICNVPPAAAPGAGSLGLSAADPPATAGFFGPAPADFLALHCAGGCPHVKPLSAVSKPLCCYRVCSFSRQYSV

SEQ ID NO: 347092 - protein, 124 aa, Zea mays
  unsure (1)..(124): unsure at all Xaa locations
  Clone ID: MRT4577_79712C.1.pep
MGSAVLFYCICIAVVVALSSSMVAVGAAAPGETPKFISGLCPVRFDHTRGISAVASSCKDRPLPSPERCCGALKTYACPYSELINEXPNNGCASEMFYVIMTRGRLRPGLFSQLCVEGPLGLQC

SEQ ID NO: 347093 - protein, 57 aa, Zea mays
  Clone ID: MRT4577_79713C.1.pep
GSISSMLLTYAASSIVAPQLLPRTRLSCSPGVYRHTLFRWDLQELRPVQVITELLVL

SEQ ID NO: 347094 - protein, 69 aa, Zea mays
  Clone ID: MRT4577_79714C.1.pep
MSDPKYAYPYPAQGYYQGPYQGPPVMAPPQYAAPPPRREPSFLEGCLAALCCCCLIDECCCDPSIIFVS

SEQ ID NO: 347095 - protein, 229 aa, Zea mays
  Clone ID: MRT4577_79715C.1.pep
SLGRLGSSRPAGIIYSFTDRFAGGWSASHYPPPRRSGLISPRPASAILCLDRSVVRQVSKLYIYIYIYIYRRFFERASSEMGSAVLFYCICIAAVVALSSSMVAVGSAAPGETPKFISASALECSANVTEIAKARKLIDVHGHGLCPVRFDHTRGISAVASSCKDRPLPSPERCCGALKAYACPYSELINDNANNGCASEMFYVIMTRGRLRPGLFSQLCVEGPLGLQC

SEQ ID NO: 347096 - protein, 178 aa, Zea mays
  Clone ID: MRT4577_79716C.1.pep
MSMLDTFFSKGGGGGFRGAKCKTLLKLSIPRIKLLRNRRELQLRQMRRDIAKLLEAGQEATARIRVEHIIREENMMAAQEILELFCELIADRLPIIEAQKFAPLTEFDFTTRNCGRYLFVNMPTDVAIETSCRFTARLDMANCAGPAARLGFPVACWHLLLLDKNSRDVFLLLLLCCA

SEQ ID NO: 347097 - protein, 69 aa, Zea mays; identical to SEQ ID NO: 347094
  Clone ID: MRT4577_79717C.1.pep

SEQ ID NO: 347098 - protein, 76 aa, Zea mays
  Clone ID: MRT4577_79718C.1.pep
MGSGVLFYCICIAAAFALSSDMVAARSAVPGETPKFISASALECSGNVTEIAKARKLIDVHGHRLCPLRLDHTRSI

SEQ ID NO: 347099 - protein, 69 aa, Zea mays; identical to SEQ ID NO: 347094
  Clone ID: MRT4577_79719C.1.pep

SEQ ID NO: 347100 - protein, 240 aa, Zea mays
  Clone ID: MRT4577_7971C.1.pep
DFHVYADAGTVFSMKSTFDKSPRSGPKAFVSEYAVWKTDAGRGTLLAALAEAAFLTGLEGNSDAVEMACHAPLFVNDDIEKKWNPDVIVFNTWQHYGTPSYWMQKLFRESSGAMVHPTTTISSGSSADSLAASAITWKDSENNDSFLRVKIVNFGSDAIRVAISTAGLQATSSRSRSTATVLTSTAVMDENSFSNPNKVKPVKSQLFDAGAHMQVTLSPHSLTTFDLALATSKLVTLSDA

SEQ ID NO: 347101 - protein, 185 aa, Zea mays
  Clone ID: MRT4577_79720C.1.pep
FLLDRPAQFCGSIDRSVIRQVSKLYIYRRLFERASEMGSAVLFYCICIAVVVALSSSMVAVGSAAPGEPPKFISASALECSANVTEIAKARKLIDVHGHGLCPVRFDHTRGISAVASSCKDRPLPSPERCCGALKTYACPYSELINDNANNGCASEMFYVIMTRGRLRPGLFSQLCVEGPLGLQC

SEQ ID NO: 347102 - protein, 72 aa, Zea mays
  Clone ID: MRT4577_79721C.1.pep
VGDTVVQTGGGVLATTTGTGGIERWGPLRPSYLVRFCTRVPPSLKGVYLRLWSSRVRMFRFVFVVVVAHLCF

SEQ ID NO: 347103 - protein, 84 aa, Zea mays
  unsure (1)..(84): unsure at all Xaa locations
  Clone ID: MRT4577_79722C.1.pep
MLLVCPSXKKKKKKKKKKKKKKKKKKKKKKKKKKKKKKKKKKKKKGKKKKKKKKKGGAVFGGPQLFRPRGLGGVIAFFFGGPLN

SEQ ID NO: 347104 - protein, 412 aa, Zea mays
  Clone ID: MRT4577_79723C.1.pep
MASEMSKNVKALDEQEVTSQHSRAQTSDAAEEQQQQQQAVDPLARQSSIMSLTLEELQNSLCEPGRNFGSMNMDEFMANIWNAEEFQAATAGCNKEGAEREPVPVATTTGTGENGGGGGSGRGLVRQGSFALPPPLSRKTVEEVWAEISQGPADFQASAAPQPVAQPQAASGGGVAASGRQATLGEMTLEDFLVKAGVVRGAFAGHGHGVGMVPAGPMGMQHNAAPPMMYQVAAAAAPPPGAVYPVMGDGMGYHGGGYPGGVAVVPPPPPSQCVAAAASPGSSDGMSAMTQAEMMNCIGNGGVVRNGGGGARKRDFPEDGCTEKTVERRQRRMIKNRESAARSRARKQAYTVELEAELNHLKEENERLRAEERTILLSKKKMLVEKMMEQARENVSAKKVGPGLRRWGSAMW

SEQ ID NO: 347105 - protein, 45 aa, Zea mays
  Clone ID: MRT4577_79724C.1.pep
SVSFQHFEHLLGSFSLPFVAHGWEEKVHASFLHSSLFPAPPSLRT

SEQ ID NO: 347106 - protein, 428 aa, Zea mays
  Clone ID: MRT4577_79725C.1.pep
MASEMTKNVKALDEQEVTSQHSRAQTSDAAEEQQQQQQAVDPLARQSSIMSLTLEELQNSLCEPGRNFGSMNMDEFMANIWNAEEFQAATAGCNKEGAEREPVPVATTTGTGENGGGGGSGRGLVRQGSFALPPPLSRKTVEEVWAEISQGPADFQASAAPQPVAQPQAASGGGGVAASGRQATLGEMTLEDFLVKAGVVRGAFAGHGHGVGMVPAGPMGMQHNAAPPMMYQVAAAAAPPPGAVYPVMGDGMGYHGGGYPGGVAVVPPPPPSQCVAAAASPGSSDGMSAMTQAEMMNCIGNGGVVRNGGGGARKRDFPEDGCTEKTVERRQRRMIKNRESAARSRARKQTRSRSAPGMMPMLVQAYTVELEAELNHLKEENERLRAEERTILLSKKKMLVEKMMEQARENVSAKKVGPGLRRWGSAMW

SEQ ID NO: 347107 - protein, 42 aa, Zea mays
  Clone ID: MRT4577_79726C.1.pep
TAPITAQLHKHDHDQCYGSLPAYIQIRCPRRPPSENLPGGRP

SEQ ID NO: 347108 - protein, 90 aa, Zea mays
  unsure (1)..(90): unsure at all Xaa locations
  Clone ID: MRT4577_79727C.1.pep
KPQKLGPWPGGAPFFFLKKNFFQKRGHKNFGQKKKGSGKITGFFPPQTNINLSQETPALLGKPKNKGPRERNFFPQTTKNXGRLGGCWGF

SEQ ID NO: 347109 - protein, 217 aa, Zea mays
  unsure (1)..(217): unsure at all Xaa locations
  Clone ID: MRT4577_79728C.1.pep
ATAPYKEAQSYEQRAARATRTIGLLVLHAICTCGASGXVALDAXQGRIGPLRPPYLAXRIAPIWENASLTPCRRGQALAGSXVPLSGSLREQSAALXLDAPSAHAIRAQXQVQQLALPLINQAASGKSVSLVSATTXLLYSLLYTVHPAAYXRSQYXRLSQLASGYCQRXQHLSLNRWDVLNHAGXLQEYMLLACTTIAAAYRASFLTQQQLLSFYQ

SEQ ID NO: 347110 - protein, 127 aa, Zea mays
  unsure (1)..(127): unsure at all Xaa locations
  Clone ID: MRT4577_79729C.1.pep
AVSPAAGSSPGKPPRLVGGPMAASVEEAGVRRALDFAVXEYNKASNDMYHSRALQVVRARKQIVAGVNYFLDVELGRTTCTKTQPNLDNCPFHDQPHLKRKAFCSFQIYAVPWQGTMTLSKSTCQDA

SEQ ID NO: 347111 - protein, 72 aa, Zea mays
  Clone ID: MRT4577_7972C.1.pep
NIMSIIRVFGLTKTIADSPTCIDSPHAPADFLPIIMNNAGAAVINELSPTEYKSCHVREKTKHRYTHAWPWG

SEQ ID NO: 347112 - protein, 87 aa, Zea mays
  unsure (1)..(87): unsure at all Xaa locations
  Clone ID: MRT4577_79730C.1.pep
QIQLEVNMPARAEQISKGRRKQIIXEVYDVVLYLGIIDILQEYNKSKKIEHAVKSMQYDSVSISAVNPRFYSERFLKFIQTVFPENS

SEQ ID NO: 347113 - protein, 78 aa, Zea mays
  Clone ID: MRT4577_79731C.1.pep
LGLMFCFFFFFILYFGIPKARGLPFWAKEKGRVITYLHTPLNIGSVPGRKKKDLPGEKNNPPGTKRKWAGCGTKKTPR

SEQ ID NO: 347114 - protein, 42 aa, Zea mays
  Clone ID: MRT4577_79732C.1.pep
LPPVLSHMKQPSSMFSHTSLSLSLTLLFPTIKLLIILFNRHL

SEQ ID NO: 347115 - protein, 103 aa, Zea mays
  unsure (1)..(103): unsure at all Xaa locations
  Clone ID: MRT4577_79733C.1.pep
SEPIHWPRASSCSGGDLFSXGMLVAGAXXXXXXXXXXNIXXXQEVAGAAAELLHXXXVYGKLDXKPAGQYVXKAEGXXKXFHLGTRHPAXQPAAAPGDDSAPN

SEQ ID NO: 347116 - protein, 104 aa, Zea mays
  unsure (1)..(104): unsure at all Xaa locations
  Clone ID: MRT4577_79734C.1.pep
ELDQIAXTKPFAKLAVKATTIADIPRLCFQXVVVKGRNSXSVPDQACELGNQGFHTSVSEAGVFIAAAAADSAAFDPSPXNDKFFDRGIAKAADLSRCAERLWL

SEQ ID NO: 347117 - protein, 98 aa, Zea mays
  Clone ID: MRT4577_79735C.1.pep
YDTTHISLFLLKFGPKKIPQIPYLGTTYTPLHTNACTFNAPSYIFYWANPNQNYSCKIQITTPCMQSLFPPITGKKGLGRCSCPHRHGSSFPGGFWYP

SEQ ID NO: 347118 - protein, 135 aa, Zea mays
  Clone ID: MRT4577_79736C.1.pep
PGRPSLHLSRTRVHKPQPAHSRTKNPTHGFSQAAPPARHLVPELRPPGGRRLRPSELQLRSPAGSVLACKSGCEAFRTDELCCRNMYNSPHTCRASKYSEFFKRECPQAFTYAHDSPSLTHECAAPRELKVIFCH

SEQ ID NO: 347119 - protein, 248 aa, Zea mays
  Clone ID: MRT4577_79737C.1.pep
MASPKPLLLLATSFLSCGLLVAADYAPMTLTVVNNCPYPVWPGIQANSGHDVLEGGGFFLPPLSHKSFPAPAHPWSGRIWARTGCAGAGAQLHCATGDCGGRLQCGGLGGAAPATLAQVNLHHGNDQTSYGVSVVDGFNVGLSVTPHEGRGNCPVLACRKNLTETCPGELQLRSPAGSVLACKSGCEAFRTDELCCRNMYNSPHTCRASKYSEFFKRECPQAFTYAHDSPSLTHECAAPRELKVIFCH

SEQ ID NO: 347120 - protein, 57 aa, Zea mays
  Clone ID: MRT4577_79738C.1.pep
VRMGPLWVPKDHRRTGCPPMYSRPPVGLNNMGEHEVLGVSSRKKKRTIKKKKKKKAC

SEQ ID NO: 347121 - protein, 278 aa, Zea mays
  Clone ID: MRT4577_79739C.1.pep
MHAYVSSEFGSSGLASTNHNQLTQEQRTQPMASPKPLLLLATSFLSCGLLVAADYAPMTLTVVNNCPYPVWPGIQANSGHDVLEGGGFFLPPLSHKSFPAPAHPWSGRIWARTGCAGAGAQLHCATGDCGGRLQCGGLGGAAPATLAQVNLHHGNDQTSYGVSVVDGFNVGLSVTPHEGRGNCPVLACRKNLTETCPGELQLRSPAGSVLACKSGCEAFRTDELCCRNMYNSPHTCRASKYSEFFKRECPQAFTYAHDSPSLTHECAAPRELKVIFCH

SEQ ID NO: 347122 - protein, 75 aa, Zea mays
  Clone ID: MRT4577_7973C.1.pep
PLLQRRWHGCPRPNIVGAIPRSYSSSPMVQGAAHVSPPSTSSIDYSIMFTSSLTPLSRGSTSSSSHLPGLILSLL

SEQ ID NO: 347123 - protein, 217 aa, Zea mays
  unsure (1)..(217): unsure at all Xaa locations
  Clone ID: MRT4577_79740C.1.pep
MAVSDAPESKCDVLIIGAGPAGLMLATWMARCGIDARIVDKRGTKIYSGQADGLQLRSLEIFDSFGFADRAWKEANHLIEFCMWNPGEDGVIRRSDQIPDVVPGISRFKEIVLHXGRIERFFLDHIKKHSKDTLRVEXRGVLPESLHIDQDQVNDHSPDNYPITVQLRYLTEEEAMPAQSKGSSINDGLFRSXLANDDTQDLIANSRQKDGSTETGG

SEQ ID NO: 347124 - protein, 215 aa, Zea mays
  Clone ID: MRT4577_79741C.1.pep
AGRLGKTKKPTPSVARLLLVRRGGGGEGKRRRNSPARLEPTCCRARTPTRRGGAPAWARSSAPQRPRSCCSSPSPSSTRASPHRPPPASPHPHPAPAPPRPRPTPTPPLSSPTRRTRTWPPRSTRCSPSPPPPPRAILSPTPTTTASMSSTCWTRTPRAPTRLTPPPPLRWGPPRPSYGTTSPAPLACRSASPPPSNPCPRGLPRSDSPEPDRRR

SEQ ID NO: 347125 - protein, 106 aa, Zea mays
  Clone ID: MRT4577_79742C.1.pep
FPFDPSSLKPPSNLYFNHNILGRIFLALPFLSTLSYFLIYIFLLSILPFTTNFYNFYYILLYNILYNLIIIFFKKIKLFYLFIDPTYYLSFTYIFLYFTYLIYALF

SEQ ID NO: 347126 - protein, 180 aa, Zea mays
  unsure (1)..(180): unsure at all Xaa locations
  Clone ID: MRT4577_79743C.1.pep
PGQKKKKKKKKKKKKKKKKKKKKKKKKKKKKKKKKKKKPAPPSPGPGPGPLAGVLGVAPLRDPGLLGAKAEIGGLSLFYLTPLXLKGPGGLGIPRGINRQGGVAXPVELKTGLFSPSVKQPFLPRLLGFQPGWGGFPAHGQSPGGGRAPITPVSYLLGEGFPYGAPLTHPFFGATWTWGG

SEQ ID NO: 347127 - protein, 228 aa, Zea mays
  Clone ID: MRT4577_79744C.1.pep
MPDEWRSTLVPIFKNKGDIQSCTNYRGIKPMSHTMKLWERVIEHRLREMTTMNQFGFMHGRSTMEAIFLMRQVMERYKEQKKDLHRVFIDLENAYDNDKVPRNLMWWALDKHKVPTKYVTLIKDMYDKAVTSVQTTDGDTNVFPINIGLHQGSALSPYLFALVIDEVTRDIQGDIPWCMLFADDIVLVDESREGVNRKLELWCQTLESKGFIISRTKTKYMICDWYYN

SEQ ID NO: 347128 - protein, 96 aa, Zea mays
  Clone ID: MRT4577_79745C.1.pep
IQSVTRAIDLLRFIKVHLGNFAVLFMHWTGESLRFSCPCFYFGRCKTSVALVETSVVLEFCRHCVVRLLLILIVFFVDHIYNIISLQFFLSKKKKK

SEQ ID NO: 347129 - protein, 82 aa, Zea mays
  Clone ID: MRT4577_79746C.1.pep
APASRSPILQSLQYPIGDEVQRASPITYSAWNLWKERCWRIFDNRLCFVLDEKAEHLPGSNPASAFLPPWLPAVYSSPRIML

SEQ ID NO: 347130 - protein, 60 aa, Zea mays
  Clone ID: MRT4577_79747C.1.pep
KKEKLRIKIYNRIILKIKNDNHIRNRDRKFKTLQSITHRFRLTSGGRWKKGIGTLSYFSP

SEQ ID NO: 347131 - protein, 115 aa, Zea mays
  unsure (1)..(115): unsure at all Xaa locations
  Clone ID: MRT4577_79748C.1.pep
MPLDKMIEGGYDRSSAFVRMREAAGLSPTFGSIGKEVFFFLDPTTRANPERXMTGLAGAESKEIPVMDTITEIVLTPSGTKILFRTPDGTGRAFPDTDFQLEPEGDHEVEDAAVR

SEQ ID NO: 347132 - protein, 129 aa, Zea mays
  unsure (1)..(129): unsure at all Xaa locations
  Clone ID: MRT4577_79749C.1.pep
MSCTNISXLAFXLLVLSIMIHFQKEXSNVIDAKASVPGTSFYITKLVASGNVKTYSTNAVHEACASACGCSGKHTILIPKGDFLVGQLNFTGPCKVYVTIQVDGNLLATTDLIHYNDHGNWIXILLVDN

SEQ ID NO: 347133 - protein, 89 aa, Zea mays
  Clone ID: MRT4577_7974C.1.pep
APYFFFCWLSIFFFFFFFFFFFFFFFFFFRRNRVFQNVSGTAHDIQNMLTCLAIHKFGSRGSIMFEKAPQQNHSSSRIPSLRRCSSSKL

SEQ ID NO: 347134 - protein, 46 aa, Zea mays
  unsure (1)..(46): unsure at all Xaa locations
  Clone ID: MRT4577_79750C.1.pep
VICGNALPSSGILHLAGVNANVPLKFPPKKKIKGGRRXVSSFDPEI

SEQ ID NO: 347135 - protein, 69 aa, Zea mays
  Clone ID: MRT4577_79751C.1.pep
EYQIKLFAKQKKLRCLRVETDIIGNPLTKIVTASFSATFAQNVQISLSRTEPLLFDEQLHYHLEVTLTS

SEQ ID NO: 347136 - protein, 64 aa, Zea mays
  unsure (1)..(64): unsure at all Xaa locations
  Clone ID: MRT4577_79752C.1.pep
KDIAHEDLSFXYFPKLGITGTTCLXRTLAQNYPPTEHRGSQWLACLLATTQTNMIQGKLTSHQT

SEQ ID NO: 347137 - protein, 80 aa, Zea mays
  Clone ID: MRT4577_79753C.1.pep
PSPPSQIICRWTYQFPLLLSLLLNKKLFRWENKGPWKFPWKRFPLFFSPPPIGLTPLGFRLKVYNLVKCSYRSTNVFFFF

SEQ ID NO: 347138 - protein, 69 aa, Zea mays
  Clone ID: MRT4577_79754C.1.pep
GSHCAWWAHCGPQGGLAGARCCQMICRDSLLCSTARMRLVLTESNMSTRTNVMLARPAFEALAKPGMAH

SEQ ID NO: 347139 - protein, 62 aa, Zea mays
  Clone ID: MRT4577_79755C.1.pep
PPGRFYINNPTGPINLIRIGFAIHRFTYTLTPNGGVHLTILVYLVGINNKLFCGGHKPQWAS

SEQ ID NO: 347140 - protein, 130 aa, Zea mays
  unsure (1)..(130): unsure at all Xaa locations
  Clone ID: MRT4577_79756C.1.pep
TDGSTITQPTFFLNYPIHISACSIPHRSRLILTXPFQLYISYPYIYNAYSDLTYTIYHKIPLYNQIKHHNSNPTPITNDVKSTDLESYYYYLYESSLNHHLLTSFEYXMPPTSXIDLSIYLLLMIFTNSS

SEQ ID NO: 347141 - protein, 89 aa, Zea mays
  unsure (1)..(89): unsure at all Xaa locations
  Clone ID: MRT4577_79757C.1.pep
HASGTRGLPGSYWAEPLNAATHLLNRLPSKAASHLTXHFALYGTTLSYDHICVFGWAYYPNTCATAPHKPSPRSARLLLIGYSPDHKGY

SEQ ID NO: 347142 - protein, 90 aa, Zea mays
  Clone ID: MRT4577_79758C.1.pep
RRRLDSRRRAAGVSNVPRHTQLSTGSRVVFSLSGIVMSRCLAVLRVDAGTILLDRWYYALAEAFKLRYNARSPPDEINYGQYASEAPSFN

SEQ ID NO: 347143 - protein, 254 aa, Zea mays
  unsure (1)..(254): unsure at all Xaa locations
  Clone ID: MRT4577_79759C.1.pep
MASGIGSGQQQPPGSAVRLDALAAPAADADPGAVGDKLVFEAPPQPVREDYVQNAVKFLSHPKVRGSPVVYRRSFLEKKGLSTEEIDEAFRRVPDPQPSTTATTSPQQQVNSQNQSVGVQAYAPAQPVHPANAGPVVLPTQPRFSWYQAFLAAGLLLGFGASAAVFIKKLFLPRLKSWIRNVVAEGNGTEGNQLKPRIDDETADAVKASASAVSAIAKXNQQLLASKDEXREILVTLTQALDSQAKELKSLTPI

SEQ ID NO: 347144 - protein, 337 aa, Zea mays
  unsure (1)..(337): unsure at all Xaa locations
  Clone ID: MRT4577_7975C.1.pep
TAHQAGSAPSSLRLSPRDHAAELDSAISGPPPTASLSLACFRLPTPTVPRRLPLPFALAGGLSVYRRPAWSPPPSRTHXQVQGYPGKFYCPRMNSMNKPAYAAICTHSPNKPVLIFVSSRRQTRLTALDIIQLAASDEKTRQFLSIEDNSLDMVLSQVSDSNLRHTLQFGIGLHHAGLNDRDRSLVEELFSNNKIQLEGSLLVESRHRMINSQGDLRKVLMCIYGWGIYVFFDRTDEVRTFKCSRAMVRALACSAASLMAALSCVEEFINARLRDASITHPCLPNVSALMGNGELATMLSTADLCECATWKYPLLIAKKRCESHELDMPECRDMSMW

SEQ ID NO: 347145 - protein, 255 aa, Zea mays
  Clone ID: MRT4577_79760C.1.pep
MASGIGSGQQQPPVRLDALAAPAADADPGAVGDKLVFEAPPQPVREDYVQNAVKFLSHPKVRGSPVVYRRSFLEKKGLSTEEIDEAFRRVPDPQPSTTATTSPQQQVNSQNQSVGVQAYAPAQPVHPANAGPVVLPTQPRFSWYQAFLAAGLLLGFGASAAVFIKKLFLPRLKSWIRNVVAEGNGTEGNQLKPRIDDETADAVKASASAVSAIAKTNQQLLASKDEEKKILVTLTQALDSPAKELKSLDPYHRSY

SEQ ID NO: 347146 - protein, 484 aa, Zea mays
  Clone ID: MRT4577_79761C.1.pep
MASGIGSGQQQPPAPAADADPGAVGDKLVFEAPPQPVREDYVQNAVKFLSHPKVRGSPVVYRRSFLEKKGLSTEEIDEAFRRVPDPQPSTTATTSPQQQVNSQNQSVGVQAYAPAQPVHPANAGPVVLPTQPRFSWYQAFLAAGLLLGFGASAAVFIKKLFLPRLKSWIRNVVAEGNGTEGNQLKPRIDDETADAVKASASAVSAIAKTNQQLLASKDEEKKILVTLTQALDSQAKELKSLTDSIGHTREPINITRDDRFSQYRPLEDHAPTVIRNGAINSSWRASQQTNMYGVSNGDFGSVRSSFAPAPAEPTAGSFSRSYGEQPMSTAQRSDRSSGSKPWEMQQYSQQRPGYGSNSQLSDDGSYSDAQDSYAPSYHQNGKAPDFQADEPRPLTYNTGVEERPPPQRRWVPPQPPGVAMPEAAAAIRQPKALPKQPSSDASEAAGEMQVNGSSASDAVTEVPVNGATASDAGRSEIQEQSVAA

SEQ ID NO: 347147 - protein, 195 aa, Zea mays
  Clone ID: MRT4577_79762C.1.pep
MAAITAGLLVLLAAAVAAPAHATDYTVGDSSGWSSGVDYATWASGKTFAAGDNLVFQYSAMHTVVEVSSADYGACSASNSIQSYSDQNTKIALTAPGTRYFICGTPGHCGNGMKLAVTVAAGTATTTPASSPPAADSPPETATPSGSTPTATTSPSAPTTKPTSSSTGAACGGEARLAMGVLAWAAGLAGLALMG

SEQ ID NO: 347148 - protein, 486 aa, Zea mays
  Clone ID: MRT4577_79763C.1.pep
VGSAVRGDALAAPAADADPGAVGDKLVFEAPPQPVREDYVQNAVKFLSHPKVRGSPVVYRRSFLEKKGLSTEEIDEAFRRVPDPQPSTTATTSPQQQVNSQNQSVGVQAYAPAQPVHPANAGPVVLPTQPRFSWYQAFLAAGLLLGFGASAAVFIKKLFLPRLKSWIRNVVAEGNGTEGNQLKPRIDDETADAVKASASAVSAIAKTNQQLLASKDEEKKILVTLTQALDSQAKELKSLTESIGHTREPINITRDDRFSQHRPLEDHVPPVTRNGAINSSWRSSQQTNMYGVSHGDFGSAARSASFVPAPAEPTAGSFSRSCAETSTAAQRADRSSGGKPWEMQQYSQQRPGYGSNSQLNDDGSYSDAQDSYAPSYYQNGKAPDFQSDEPRSLTYNTGIEERPPPPQRRWVPPQPPGVAMPEAAAAIRQPKVPPKQPSSDASRAAGEMQVNGASSASPDAVTEVPVNSATTSDAGHSEIEEQPVAV

SEQ ID NO: 347149 - protein, 71 aa, Zea mays
  Clone ID: MRT4577_79764C.1.pep
FFFFFFFFFFFFFFFFFFFFFFFWAQKKSSFAQNTYKRFTGLHKKKNIFQGKKKCPPPPTKDHIKQTLMLF

SEQ ID NO: 347150 - protein, 163 aa, Zea mays
  Clone ID: MRT4577_79765C.1.pep
MAAIMAAGLVVLALLAAVAAPAHATDYVVGDSSGWASGVDYATWASGKTFAAGDNLVFQYSAMHTVAEVSSADYSACSASNSIQSYSDQNTKVALTAPGTRYFICGAPGHCGNGMKLAVTVAAEAAPTTPETSTSTPAATTTPTTTNADTPNGQNGTRTKTSW

SEQ ID NO: 347151 - protein, 91 aa, Zea mays
  Clone ID: MRT4577_79766C.1.pep
HYSVNIKFFISSAHVAICKICTAFLATVVAHALPVTACCPYSHKTRHCLHTWYMSVSSHCLNLAKAYCPMLLPAPCSILTHPLYAARVESG

SEQ ID NO: 347152 - protein, 126 aa, Zea mays
  unsure (1)..(126): unsure at all Xaa locations
  Clone ID: MRT4577_79767C.1.pep
IPGIRSDNGSECKNLQVXEYLEEEDIKYEFSAPYTPQQNGLVERKNRTLIDMARTMLGEYKTLECFWSEAMNTTCHAINXDYLHRLLKKTVYELLMGNKPNVSYFLVFGSICYILIKKCIHSKFAT

SEQ ID NO: 347153 - protein, 111 aa, Zea mays
  unsure (1)..(111): unsure at all Xaa locations
  Clone ID: MRT4577_79768C.1.pep
IPAPCRRHGQARHQVSNNLKYPEMGARDNGEGRDEKRGTGSDYVPARDSFSSQGESRVPKRLGKKESKDNSPRTTKSSASRQAQNKLQHKGLNNVQNKPQKQKKTXSAAKA

SEQ ID NO: 347154 - protein, 76 aa, Zea mays
  Clone ID: MRT4577_79769C.1.pep
PPRAVHCKYEHATHYNGPGSCGINNQAWLIYRVSRGRNFGSALSSTTLAHTCPLHIFGWSHAPDNLTREHQYLTHS

SEQ ID NO: 347155 - protein, 131 aa, Zea mays
  Clone ID: MRT4577_7976C.1.pep
IIDGSSLGDLWTLSVVILVNIHLAMDVIRWNWITHAAIWGSIAATWICVMIIDSIPIMPGFWAIYKVMGTGLFWALLLAVTVVGMIPHFAAKAFSEYFIPSDIQIAREMEKSQDFHDVTHPEVQMSTVSRA

SEQ ID NO: 347156 - protein, 86 aa, Zea mays
  Clone ID: MRT4577_79770C.1.pep
TPNFFFEPYLMGHPKQGTGGDGSGFYPFLGGGGGLGEFPQFVELVRGANGRRNPPGDRAQLWPFEHGPGDPTTWLAVWPHFLVLWV

SEQ ID NO: 347157 - protein, 48 aa, Zea mays
  unsure (1)..(48): unsure at all Xaa locations
  Clone ID: MRT4577_79771C.1.pep
EYVFSILCWVIDGYHHCHLLIFSCGGRICHCQERIRRGLMKGVKXXSF

SEQ ID NO: 347158 - protein, 101 aa, Zea mays
  unsure (1)..(101): unsure at all Xaa locations
  Clone ID: MRT4577_79772C.1.pep
MYSTGSGARGKDRNVADGCTVIEDTYNLVANPVKVGLLFPSVRIEDFLDIVRYAQRDSTFAPVYLLPVLXYLACACLXLGGCAVCGNHRSHVIPHHVLLGI

SEQ ID NO: 347159 - protein, 389 aa, Zea mays
  unsure (1)..(389): unsure at all Xaa locations
  Clone ID: MRT4577_79773C.1.pep
MLTKSNSSLSRQALNVIGDKKEAVKSKVKPAITRSTPSSPTSVYSLPASFDRFSNDLKQRNRVKGAEKASSSRLSLLEKAASVLKATSXPGESPLLPXISSSVLSIGSGPKALRRSWEGNTDIKGKGNSESKTAKPDKKSDNKMPMTPRRKSPVDQKVPPKDDSQKAARKSTPSAPSDDADKAAKKHIPTVKRTSGVLGNSNVTNLVKIPPSSRKLADISTSWTSLPPSLAKLGKELLRYRESAQIAAVEAMQEASAAESLLRCLSSYAEVSSTAEEQNPQPAVEQFLTLHAALSRATVITDTLAKSATSAASPDCSPASDAGTVCSATDEEAAAITAERRRRATSWVSAALATDLPPXGIYSLKPAPATVSSPLAVVVVDEPAKLAIC

SEQ ID NO: 347160 - protein, 68 aa, Zea mays
  Clone ID: MRT4577_79774C.1.pep
SVHGDYFSLLSGVRPYASLSIRKVAQKLIYSFLANIIGWPNAWNNGTIANFFFKKKKKKKKKKKKKKK

SEQ ID NO: 347161 - protein, 60 aa, Zea mays
  Clone ID: MRT4577_79775C.1.pep
DAWADAWADAWADAWGKYGQGSRSCRACANGHGLIRKYGLNLCRQCFREYASEIGFKKLD

SEQ ID NO: 347162 - protein, 70 aa, Zea mays
  Clone ID: MRT4577_79776C.1.pep
RGGLASPPPSGSGLGVQGRSPGRLLRRWIGSEMSCVGWGVATASGAHHSGDPDHHSLHSRVPHLRPRPLR

SEQ ID NO: 347163 - protein, 71 aa, Zea mays
  Clone ID: MRT4577_79777C.1.pep
HRGGEDLPPPACGAGAGAVATMSFNGKPTPQSAAASAAGVGGPPKMYQRPIYRPQQAPAKWRRGGRPCPVS

SEQ ID NO: 347164 - protein, 218 aa, Zea mays
  Clone ID: MRT4577_79778C.1.pep
MEASLLVAPKPSMPRTIFSARRAGRSWRCLVVAATIKQQLGTRSESVDVDAPVEHLAPPSKATTGARGGLLAAVATTTSSCTAVLPCHALSGAGAVESGPWWWTSPLDTLYRAAAVLGDLDPATARAVAGVAGPVLSAFGFLFILRIVMSWYPRLPVTEFPYVVAYAPTEPFLAVTRRVIPPLGGVDVTPVVWFGLVSFASEILVGPQGLLVLLSQQR

SEQ ID NO: 347165 - protein, 122 aa, Zea mays
  unsure (1)..(122): unsure at all Xaa locations
  Clone ID: MRT4577_79779C.1.pep
LLPKDELCLSRHKQPVSMTNKRTQKVGRFERRKAAPTXPIXIRERKGRRGRSLRAPALSAPIVAGEEDCLENDGEEERQAWLASLSLALCMAFVLLXKKKKKKKKYSALLPLLKGDQHTGGR

SEQ ID NO: 347166 - protein, 62 aa, Zea mays
  Clone ID: MRT4577_7977C.1.pep
SPNMYTYSPSHYVTNVSKNCLLTDCSIVVTTIGQFKSSYTRVLYYSFKFLNFKPLFNKIIIN

SEQ ID NO: 347167 - protein, 131 aa, Zea mays
  Clone ID: MRT4577_79780C.1.pep
PAGPAIIGTSLTPIDPIARPTSSHGLLPASAAAYPAKPDSLLLHFNSQYVNLFCRFFSVLDDYFLAIHRLQKGATTANDCSRALLLDRTFMPHISPVQFHRANRKSLASIIYITTLQLLQTSLLYRHRSPL

SEQ ID NO: 347168 - protein, 158 aa, Zea mays
  Clone ID: MRT4577_79781C.1.pep
FAKPFFKQMFLKFLVDTSSLDSSMVPDPGGAPEWGSQLWSIFFAPAKVQAPYGPPSLVALTTNLEGEVSFFEGSLETSFLKEIFFQFHLEKAQLDLGQFLFQSPRLVDCLLFCCPFFFKVFILAFSSPVYTMAVFNFPFVQMPSVVFPNTPSTIGCLC

SEQ ID NO: 347169 - protein, 93 aa, Zea mays
  unsure (1)..(93): unsure at all Xaa locations
  Clone ID: MRT4577_79782C.1.pep
XXXXFFFFFFFFGVGKKTKNSDRTRYRVHFHLQVLHMPKCLPEFFFGTRFGGRAPREEWFGWFTFPTRWTGPGSFWSPPGGGGGSGGKRGGVF

SEQ ID NO: 347170 - protein, 75 aa, Zea mays
  Clone ID: MRT4577_79783C.1.pep
WPSLCRYLVPADLTVGQFVCVVRKIIKLSAEKAIFIFVKNTLPPTGLESQCRNHMILTLILLPIRTHGETGVLYE

SEQ ID NO: 347171 - protein, 134 aa, Zea mays
  Clone ID: MRT4577_79784C.1.pep
EVHLPVEKVDSIISEWMGYFLLFESMLDSVLYAKNKYLAKGGSVYPDICTISLVAVSDVNKHADRIAFWDDVYGFKMSCMKKAVIPEAVVEVLDPKTLISEPCGIKHIDCHTTSISDLEFSSDFTLKITRTSMC

SEQ ID NO: 347172 - protein, 76 aa, Zea mays
  Clone ID: MRT4577_79785C.1.pep
RPSPQFDFLGPPFFFRISPSTSLRYRFRAFPMSKVFLWWPSDLAPQFFLKFNIFPFFFVKVAFGSIFSQVKKKLSM

SEQ ID NO: 347173 - protein, 97 aa, Zea mays
  Clone ID: MRT4577_79786C.1.pep
PHTGGERDPIVKRYHSSIESSKFKQPSEYNRTIVSFIPCLRSTFYGFHALWHLSNTTASAAALWWQKQNWWLRRRRRQQQQQRRRALKLRKQAVPIC

SEQ ID NO: 347174 - protein, 51 aa, Zea mays
  Clone ID: MRT4577_79787C.1.pep
HPRRPPTTVSDGGRARAWRGRSVLAQFVPLPCEGLRSGPVLRNKSMRPFLF

SEQ ID NO: 347175 - protein, 70 aa, Zea mays
  Clone ID: MRT4577_79788C.1.pep
GGPGGVVAGMGGWGYGVRGFLCGAFRAWAELFIRSIGWGYRCFRSRFLGPFPLLIRCGSPWCSLCLPPFF

SEQ ID NO: 347176 - protein, 509 aa, Zea mays
  Clone ID: MRT4577_7978C.1.pep
MTLLCVPLVGRTVEEMITDAAAAAATGGDMVEIRLDFIQGFRPREHLPPLLRGCPLPALVTYRPVWEGGQYEGDDTTRFETLRLAMELGVDYVDIELKVADKFMSFIAGHKPEKCKLIVSSHNYEYTPSCEEITNLVASIQAVGADIVKVATTAKDIVDVSRMFQVMVHCQVPMIGLVMSEKGLMSRVLAPKFGGYLTFGILNATKTSASGQPTVEDLLDIYNIKCIGPDTKILGLIANPVKQSKSPILHNKCLQSIGYNAVYLPLLGDNLASFLETYSSPDFSGFSCSLPFKVDAVQCCDEHDPVAKSIGAINTIIRRPDGKLVGYNTDYIGAISAIEDGIGGPGSKDAVISPLAGRLIVVVGAGGAGKAIAYGAKEKGARVVIANRTYEKAVRLANAIGGQALRLEDLETFRPEEGMILANATSLGMYPNVDGTPIPKKALGFYDVVFDAVYAPKVTRLLREAEECGVKVVSGVEMFIRQAMGQFEHFTGGIEAPESLMREIAAKYT

SEQ ID NO: 347177 - protein, 48 aa, Zea mays
  Clone ID: MRT4577_79790C.1.pep
TRRAARAICAAGASASAPPGAGHAQGGTQAAPRHPSLVLPPLRCRADL

SEQ ID NO: 347178 - protein, 77 aa, Zea mays
  Clone ID: MRT4577_79791C.1.pep
SMGALRYARLNKSKQSGAASSCLTNQPNKAGLIGEERRDARTSEEGSVACYLVWWRWRWGKQSEQWEWKPPAGSSGR

SEQ ID NO: 347179 - protein, 64 aa, Zea mays
  Clone ID: MRT4577_79792C.1.pep
VATSYGSDPTAADATIIDKTVPSDAAAAHRPTADKGNVAATAAMPPTTMVKTATVAIVARKIKA

SEQ ID NO: 347180 - protein, 59 aa, Zea mays
  Clone ID: MRT4577_79793C.1.pep
LIRSARFARGEAGDITSLTGCSSVTPQNYVTTQNISCERKANKRPPTIKRPLCCRFIIG

SEQ ID NO: 347181 - protein, 74 aa, Zea mays
  Clone ID: MRT4577_79794C.1.pep
AHMTAAALGFSGGALIRKRADYPVSYCTTRGAAASPSNCSSCSSPQVPDGFSNLAQPARDTHFTRQSLPILHLT

SEQ ID NO: 347182 - protein, 250 aa, Zea mays
  Clone ID: MRT4577_79795C.1.pep
MAYSGQRHAGVGSSSRPANGFKGAANSVEFLGREMLGMRLRDAKPDTDDEREMWSSSDVTDSSSNEAGHVIATTVHGRNGLPKQSVTYIAEHVVGTGSFGVVYQAKCRETGEIVAIKKVLQDKRYKNRELQIMHMLDHPNIIGLKHYFFSTTERDELYLNLVLEFVPETVNRIARQYNRMNQRMPLIYVKLYTYQICRALAYIHNCIGICHRDIKPQNVLVRYDSLSFLYCDFGSAKVLVRGEPNISYIC

SEQ ID NO: 347183 - protein, 61 aa, Zea mays
  Clone ID: MRT4577_79796C.1.pep
GLEVADLPAFKGGAFEEPGPKNLLFPAHFGMGPPGFDSALLMPNIYPGALSLLAQVATKSP

SEQ ID NO: 347184 - protein, 233 aa, Zea mays
  unsure (1)..(233): unsure at all Xaa locations
  Clone ID: MRT4577_79797C.1.pep
MAYSGQRHAGVGSSSRPANGFKGAANSVEFLGREMLGMRLRDAKPDTDDEREMWSSSDVTDSSSNEAGHVIATTVHGRNGLPKQSVTYIAEHVVGTGSFGVVYQAKCRETGEIVAIKKVLQDKRYKNRELQIMHMLDHPNIIGLKHYFFSTTERDELYLNLVLEFVPETVNRIARQYNRMNQRMPLIYVKLYTYQXALXICRALAYIHNCIGICHRDIKPQNVLVRYDFFSFL

SEQ ID NO: 347185 - protein, 85 aa, Zea mays
  Clone ID: MRT4577_79798C.1.pep
LKPFESWPTKMERGAFSQIPVFCKRNLLQINFRANNSFLSFKNKAFLGLYLLFGKLTTICFGVKLGHLAPPRKDLPPYKRSSPWV

SEQ ID NO: 347186 - protein, 117 aa, Zea mays
  unsure (1)..(117): unsure at all Xaa locations
  Clone ID: MRT4577_79799C.1.pep
LFFVPTLAAKLFYLRKLLDLSENAVKATIFPKXSXARIAXLMPPYLTPAVSAEXENPIFQPYRIQQEVAAVISPLSXLXLQQSSGLXNDRCLRRIXLAQNIRXQQLQQLSAXNRAAY

SEQ ID NO: 347187 - protein, 116 aa, Zea mays
  Clone ID: MRT4577_7979C.1.pep
LGEVGKVILDIFEVCGTCGVDTWTHFSQLEHRLLQRQPSAHRCSELVLSWHQTELDRWCSSSGSRCLEHKNRITLSLRQSSDHHSYIVRRQCRCCAGEFTSRASSGMERRGDSSGR

SEQ ID NO: 347188 - protein, 67 aa, Zea mays
  Clone ID: MRT4577_797C.1.pep
KVVQKLPLPAGLGISHALLKDLPTEVKVSSNYLFSGLQLHTLDGSSINRLGMCPCVVTRWETVGSDA

SEQ ID NO: 347189 - protein, 135 aa, Zea mays
  Clone ID: MRT4577_79800C.1.pep
GLFKVPQEVLGAKIKKGGGFDPVGASPGSLVSGEYGWPPPLEGFLKAPALRGSSMGGSMSGKKPMGVPPETPFLVEPPKRAEAAKNAKPPKGLVMLLFENAFLPPGFSLDGPPPFGNRVPPMLKLGFSLHKGHPF

SEQ ID NO: 347190 - protein, 198 aa, Zea mays
  unsure (1)..(198): unsure at all Xaa locations
  Clone ID: MRT4577_79801C.1.pep
MASSSDPWMKEYNEASRLADDISSMIADRGSLPQSGPEIMRHTSAIRRKITILGTRLDSLESLLGRIPPKSITDKEMHKRQDMLSSLKSKAKQMATSFNMSNFANREDLLGQSKKPDDMSRVAGLDNQGIVGLQRQIMKXDDLEDHVDVTNSRLQRVQKRLAILNKRTKGGCSCTCLLLSVVAIVILAVIVWLLVKYL

SEQ ID NO: 347191 - protein, 315 aa, Zea mays
  Clone ID: MRT4577_79802C.1.pep
MWVPLRGLGRKKKKKKKKKKKKKWGPRDAAGREKNYSPLFLARHRQWPEAQSFVKDTPKRGGGDSAEVRFRTPVLRFARPDLPAMASSSDPWMKEYNEASRLADDISSMIADRGSLPQSGPEIMRHTSAIRRKITILGTRLDSLESLLGRIPPKSITDKEMHKRQDMFSSLKSKAKQMATSFNMSNFANREDLLGQSKKADDMSRVAGLDNQGIVVLQRQIMKEQDEGLEKLEETVLSTKHIALAVNEELTLHTRLIDDLEDHVDVTNSRLQRVQKRLAILSKRTKGGCSCMCLLLSVVAIVILAVIVWLLVKYL

SEQ ID NO: 347192 - protein, 70 aa, Zea mays
  Clone ID: MRT4577_79803C.1.pep
LVVIICSVFFMMGSLVFHGVIRVYAVIFMFSACLFDLEKKPKSGGHHGTHHEPPRRTARVHGSGSLGWVR

SEQ ID NO: 347193 - protein, 231 aa, Zea mays
  Clone ID: MRT4577_79804C.1.pep
MASSSDPWMKEYNEASRLADDISSMIADRGSLPQSGPEIMRHTSAIRRKITILGTRLDSLESLLGRIPPKSITDKEMHKRQDMFSSLKSKAKQMATSFNMSNFANREDLLGQSKKADDMSRVAGLDNQGIVVLQRQIMKEQDEGLEKLEETVLSTKHIALAVNEELTLHTRLIDDLEDHVDVTNSRLQRVQKRLAILNKRTKGGCSCTCLLLSVVAIVILAVIVWLLVKYL

SEQ ID NO: 347194 - protein, 231 aa, Zea mays
  Clone ID: MRT4577_79805C.1.pep
MASSSDPWMKEYNEASRLADDISSMIADRGSLPQSGPEIMRHTSAIRRKITILGTRLDSLESLLGRIPPKSITDKEMHKRQDMLSSLKSKAKQMATSFNMSNFTNREDLLGQSKKPDDMSRVAGLDNQGIVGLQRQIMKEQDEGLEKLEETVLSTKHIALAVNEELTLHTRLIDDLEDHVDVTNSRLQRVQKRLAILNKRTKGGCSCTCLLLSVVAIVILAVIVWLLVKYL

SEQ ID NO: 347195 - protein, 44 aa, Zea mays
  Clone ID: MRT4577_79806C.1.pep
LNYLRPNIRRGNISYDEEDLMIIRLHRLLGNRWSLIAGRLPGRT

SEQ ID NO: 347196 - protein, 203 aa, Zea mays
  Clone ID: MRT4577_79807C.1.pep
APLEAERALLLPRTRMSLRTTPETRFDSLNVYTTSYKKIGDHEIEVNILVPKGISPGKYPLMVKWHGGGLTTGTALYPQWFSAYMIPLIIRNKAIAVVPNYRLTPDHTGDEILEDIASLGDWLTASLPTYLASKDSSIEPDFSRILVTGDSAGGWMALQSVLSLPEKTFRACFIQYPVVNAIPYSPNDTILGGPFPPKKNLDD

SEQ ID NO: 347197 - protein, 137 aa, Zea mays
  Clone ID: MRT4577_79808C.1.pep
MGRPRGGKAKRPTSQANHSEDADAGSGGEEEAVTVTPAYKRRGRPQKHHTADDTDDEEDDAAKAEPMEDAKPAVVSPESGGKKKRRRRRQQQPKRGCDPATEEEKDDEAAKRSGFRHHGSRRKSTPRRAAEAGVECR

SEQ ID NO: 347198 - protein, 75 aa, Zea mays
  Clone ID: MRT4577_79809C.1.pep
IRTPYGISARLLWQAAVLTKGNARLPPEVNRVLYVRNLSLNISCDEMYYIFGKHSAIQWIRLGNAKDTHRTAYVV

SEQ ID NO: 347199 - protein, 112 aa, Zea mays
  Clone ID: MRT4577_7980C.1.pep
MQSMLILFSHKLGPCLFFLPYSKIDTNITTLVQLDAEVCLIIQKALGFYDVVFDAVYAPKVTRLLREAEECGVKVVSGVEMFIRQAMGQFEHFTGGIEAPESLMREIAAKYT

SEQ ID NO: 347200 - protein, 82 aa, Zea mays
  unsure (1)..(82): unsure at all Xaa locations
  Clone ID: MRT4577_79810C.1.pep
ADAWAHRTLNPDHRPSPEVRRFVWDSRRRLSXLQGYPPMKSETLYPFPSLSRGRGKLSEDANHVRVGHDEDHDQGRPVEEHG

SEQ ID NO: 347201 - protein, 98 aa, Zea mays
  Clone ID: MRT4577_79811C.1.pep
NNPILLYETYSISSLVRYTKNYRWQNSIIQKKKKKKRKKKKKKKKKKKTTPPKKKKKKKKKKKKKKKKKKKKKKKKKKKKKKKKKNKKKKKKKKKKKL

SEQ ID NO: 347202 - protein, 360 aa, Zea mays
  Clone ID: MRT4577_79812C.1.pep
MITGTDFYHVMTAMVPLYVAMILAYGSVRWWRIFTPDQCSGINRFVALFAVPLLSFHFISTNNPYTMNIRFIAADTLQKLIVLALLTAWSYLSRRGCLEWTITLFSLSTLPNTLVMGIPLLKGMYGDFSGSLMVQIVVLQCIIWYTLMLFMFEYRGARILITEQFPDTAGAIASIVVDPDVVSLDGRNDAIETEAEVKEDGKIHVTVRRSNASRSDIYSRRSMGFSSTTPRPSNLTNAEIYSLQSSRNPTPRGSSFNHTDFYSMVGRSSNFAAGDAFGLRTGATPRPSNYEEDPQGKANKYGQYPAPNPAMAAQPAKGLKKAANGQAKGEDGKDLHMFVWSSSASPVSDVFGNGAAEYND

SEQ ID NO: 347203 - protein, 67 aa, Zea mays
  Clone ID: MRT4577_79813C.1.pep
CAVVVLYVHDAAHIALGWSVFISSLTGLLLFLYCRPQNTSTGERDTVHPEKNCSRLTNRDAQHRPSN

SEQ ID NO: 347204 - protein, 111 aa, Zea mays
  Clone ID: MRT4577_79814C.1.pep
PSSLTRELPCDISVVNSRAEYVSSETYYMTYKTGTWTTTCLSYTTYMSGTTSSALVITTARSTKTCEEMTRYLAQQLATAHIHLAWDALPNNTLHFAEQLVQHRDLAHSQL

SEQ ID NO: 347205 - protein, 76 aa, Zea mays
  Clone ID: MRT4577_79815C.1.pep
PAGRDSLAACRLMIFVQGGTPTWLADDTTTFNCDCLVRRLPKYHYNIDVMETRAYCKQNIDGSCDSTSGDSRGWAT

SEQ ID NO: 347206 - protein, 195 aa, Zea mays
  unsure (1)..(195): unsure at all Xaa locations
  Clone ID: MRT4577_79816C.1.pep
PVPVPYMDAPTASSPSSSFPGTSFVVLSVSIVGILATSLLLLAYYLVLTRCGLLFFWXGHARRRRRRRRRAGPPPPXVVTVHDEPPRRSGMEEAAIRRIPTFRYRHGSTRLVLAAEAKQAACAVCLADFRDGERLRVLPPCLHAFHIDCIDAWLQSAASCPLCRAAVSDPAALALXLPXPPRRPASARRHGRRRR

SEQ ID NO: 347207 - protein, 171 aa, Zea mays
  Clone ID: MRT4577_79817C.1.pep
MSNPRVFFDVSIGGQPAGRIVMELYADKVPKTAENFRALCTGEKGTGKSGKPLHYEGSVFHRVIPQFMLQGGDFTRGNGTGGESIYGEKFEDENFNLRHTGPGVLSMANAGPGTNGSQFFICTVKTSWLDGKHVVFGQVVEGMDVVQAVEKVGSQTGKTSKEVKIEKSGQL

SEQ ID NO: 347208 - protein, 92 aa, Zea mays
  Clone ID: MRT4577_79818C.1.pep
ERDLNPMMAQMPMSSLQTPGMNTAPPEQINQPALRRTGLYCNQLSSTDLLKTEADGTQQLQQVQASADGQGTVNLAGGDPYLNQPGPLGTQK

SEQ ID NO: 347209 - protein, 87 aa, Zea mays
  Clone ID: MRT4577_79819C.1.pep
KKKTQFCITMTSIPEVEGNKPGYAILLVFLKFPIHMRGFQMDPPSSFVTPKTPKNTLFMELGVIYPPLPPVIKNILNFGANLLHPKF

SEQ ID NO: 347210 - protein, 66 aa, Zea mays
  unsure (1)..(66): unsure at all Xaa locations
  Clone ID: MRT4577_7981C.1.pep
RXPYKVAIPLRKVRXVRPSENKHRPEQKYVRLATTDGFEFWFMGFVSYDKSLQHLERAVAYAQQAQ

SEQ ID NO: 347211 - protein, 62 aa, Zea mays
  Clone ID: MRT4577_79820C.1.pep
SPIPITGPGVNPVRSLGAAFIFNRGHAWSGPWFFWVGPFIGAALVAIFPQVVIRALPFKSRF

SEQ ID NO: 347212 - protein, 48 aa, Zea mays
  Clone ID: MRT4577_79821C.1.pep
SASERGSGRPGTIPSESAAPTLTTPTHDSQHLPCQHYDIVTNPDELQG

SEQ ID NO: 347213 - protein, 160 aa, Zea mays
  Clone ID: MRT4577_79822C.1.pep
DAWVEESLCAVEKRGRVHVITLTGAGEHRLSPALLSALRSAVAAARRASPGALVLAGEGKFFSNGYDLAWARAGPAPAPEHRLSTMRAAFRGLVADLLALPVPTVAAVTGHAAGAGCALALAHDAVAMRASRGFLYMSEVDAGIKIVDFVGELVRQKVPD

SEQ ID NO: 347214 - protein, 79 aa, Zea mays
  Clone ID: MRT4577_79823C.1.pep
TRQITLRAVSFYKHCCGHLPRTVLQAITAVAVVPISLGPDPNKYGLPNLHINRKKCGIRKPKAKNQVGLIGSNRCITCK

SEQ ID NO: 347215 - protein, 218 aa, Zea mays
  Clone ID: MRT4577_79824C.1.pep
MASRNLSKALRGPARQLASAPRVQQRTFVSAARAAVRAGAVARPVASGPIQQQIRGVKTMDFAGHKEDVYERADWPQEKLLEYFKNDTLALIGYGSQGHGQGLNLRDNGLNVIVGVRKNGKSWKDAEQDGWVAGKNLFDVDEAIGRGTIVMNLLSDAAQSETWPAIKPQLVKGKTLYFSHGFSPVFKDLTKVEVPTDIDVILCAPKGSGRTVRSLFRG

SEQ ID NO: 347216 - protein, 47 aa, Zea mays
  Clone ID: MRT4577_79825C.1.pep
RSPPPPLTKDAGGDWLSLKPMLCTSISELLKVHLYMSTKNHLFSSPI

SEQ ID NO: 347217 - protein, 128 aa, Zea mays
  unsure (1)..(128): unsure at all Xaa locations
  Clone ID: MRT4577_79826C.1.pep
MSAVRFTRAATRATAQLRAPAQRRFASTQNEFIKERQHIKEHAAGTTELWKKXSLYGVAPCLIAAGANAYWLWSEHWEHWSHMPPLEERTEYPYQNIRTKNYQWGNGDKTLFWNDEVNYHNKDKTSEV

SEQ ID NO: 347218 - protein, 88 aa, Zea mays
  Clone ID: MRT4577_79827C.1.pep
NYMRVHIKPVNIQGIRTSIWNPDSGWSCTSMVSIPSNLLEMSFVCLTSLLSFARPETFTVVVYPQCLTITTPSVEESWMHIKRGMQYP

SEQ ID NO: 347219 - protein, 157 aa, Zea mays
  unsure (1)..(157): unsure at all Xaa locations
  Clone ID: MRT4577_79828C.1.pep
PRPPPPFFLKTIPPIPPFFPFFGPFGSVLFSVYGPKLGLPFACPPPPFCGLGPWKGFFLPPPPKXKPPXNYYYKRPLLPXPRXPPPFFFAPRPPFTVGERIKQSFLLPAFFFPSRPFYFLGGSPHFFSPPRFFSPPFYGFSPFLGVNPFLIWAHFPG

SEQ ID NO: 347220 - protein, 183 aa, Zea mays
  unsure (1)..(183): unsure at all Xaa locations
  Clone ID: MRT4577_79829C.1.pep
MASMKLYGAVMTWNXLTRCSTPLSEAGXDXYNSGPMSYSAVEENITPLLTQIXFVPRALITSSTRTVLGSRELTSVAHKRXRSMIMAESSMPRASTTEGSVPSGSPSPSVTRYSMVLHVLMIATVVLTIVQRVVPENLKRLKKVLXVYKARLTXCKYLAGDSLRLADLNHAXVTLWLFATPYA

SEQ ID NO: 347221 - protein, 93 aa, Zea mays
  unsure (1)..(93): unsure at all Xaa locations
  Clone ID: MRT4577_7982C.1.pep
LDSEXAKDDGQSVTVTPPFKEGPACRIKLKRGRGMRNFQREIVPGLLLGRQEICEDLKAIGYEAKKARSRKPRKGPGASSARPRPRKRGAAKH

SEQ ID NO: 347222 - protein, 73 aa, Zea mays
  Clone ID: MRT4577_79830C.1.pep
LCNQSRFHGITDRRSCDLPFCCFHIHAISCSSWLTQMLLASPGSYEKKQQLTQRPNVHGKLKSYSIFNQIILF

SEQ ID NO: 347223 - protein, 203 aa, Zea mays
  Clone ID: MRT4577_79831C.1.pep
HSLAAIGMDHGKPPERSHPDYVRLNYGNHASDPDPGCLIWSRDPHHLPPRRLIIPTASHKTEPQHTRTIRIRKPKKHATSRPRHGGTQEQRRWRTAAVGRCIAAPAPIHLMQGGIRPVGRAAGPDLHQASPRRRGGGGCLLPGKRERERGVARTATAAAWWVTLLVPPGMRVDRYPSTKQHYKDQKLGNYNASPFTAGLNVFV

SEQ ID NO: 347224 - protein, 101 aa, Zea mays
  Clone ID: MRT4577_79832C.1.pep
GPFFFFFLSNITTPHMVIFVHQESITVQTPFQTRQSCSQQTTCTFPIHIQTWSRSTRIQKKGEAQISSLIDPGLGLRILVIRCGVMPLVEKKLVYLTQTYN

SEQ ID NO: 347225 - protein, 540 aa, Zea mays
  Clone ID: MRT4577_79833C.1.pep
QQQKAKEESAAQRLNKIKLDQENRVHTLWKEVDHCVKMAELIEYNLEDVDAAILAVRVSLANEMSWEALTRMIKEERKAGNPVAGLIDKLNFERNCITLLLSNNLDDMDEDEKTAPVEKVEVDIALSAHANARRWYEMKKKQESKQEKTITAHDKAFKAAEKKTRLQLAQEKTVAAITHMRKVHWFEKFNWFISSENYLIISGRDAQQNELIVKRYMSKGDLYVHAELHGASSTIIKNHKPDTPIPPLTLNQAGCFTVCHSKAWDSKIVTSAWWVYPHQVSKTAPTGEYLTVGSFMIRGKKNFLPPHPLVMGFGILFRLDESSLASHLNERRVRGEDEALHEMEAESRKKQSNPESDEDIGSEGANKETHEDESNGQTTNIQQNNDLELPDLSSNIGTANSSELLPEIQAEETLDNGSSILKEETIEASVSSQLDDLLDKTLCLGPAKVSGKSSLLTSIPSSLAEDDDDLEVKRPTIRDKPYISKAERRKLKKGQVNDETATDSQNGEAVETPGTSKQEKGKAETKATDSKASQPDTSQQ

SEQ ID NO: 347226 - protein, 104 aa, Zea mays
  Clone ID: MRT4577_79834C.1.pep
GHGWRLGAGVGRRHAAPAPPNMMQGGKRPEGRAAGPDQHQANTRRRGGGGSLLPGKRERERGEVDNRAELVVAHIIPVLSSVSLKIGLEERDVSILTVPQPNAP

SEQ ID NO: 347227 - protein, 70 aa, Zea mays
  Clone ID: MRT4577_79835C.1.pep
PTVSDVEPSFYTSVSSFTGVLRRHDQLLSAARQTGRQLTGPSGTGPPRRPRSVLSVATPGLPRTLIRLTI

SEQ ID NO: 347228 - protein, 67 aa, Zea mays
  Clone ID: MRT4577_79836C.1.pep
ENGNKPRQKFMITNVCHALTCVPLIYSKSCNIQNHRKRGGTRSNHVLSHERPSALLTPYTEFPRVRG

SEQ ID NO: 347229 - protein, 97 aa, Zea mays
  Clone ID: MRT4577_79837C.1.pep
LLYSGRPPLFFFLSHKGHWGRWFLRCRAKTAHGAADHFSTRSNWLDIDHSKNLNFNNIIMLVRFSISSTLLLLNILYPNCLIKIMPSKPYGIEITCF

SEQ ID NO: 347230 - protein, 40 aa, Zea mays
  Clone ID: MRT4577_79838C.1.pep
FLALWNRTNPRKMDSIYIGDGIGLIKNSDFRDENVVSVSP

SEQ ID NO: 347231 - protein, 88 aa, Zea mays
  Clone ID: MRT4577_79839C.1.pep
ERFEAASAEGKLLLPFGMGRRKCLGETMALRTLGLVLGTLIQCFDWATVGGDPKVDMTEASGLTLPRAVPLEAMCKPRQAMLDVLQNL

SEQ ID NO: 347232 - protein, 519 aa, Zea mays
  unsure (1)..(519): unsure at all Xaa locations
  Clone ID: MRT4577_7983C.1.pep
MEDLKKFYPSFWKQSSSSRSSLHSICEHKLMDLGSRRNQTQEVSTNFNKRKQFSESVELTSDVRTSVWRKSDAYHGVIDLEKPSISGDAIEAIGCSGFGNPANQNGKSQDGSCCISPENTSLAESLQSCRDWNISRVSVVGSSDTPDCQSPIKTSNNEARHSLFDLNVPQEESLFMSSTLVPSSSTYCGIFSDNRRETSEKEHIAGIRSMKGSSITVVTPNSVADSSRDVVTESPVQPKFLFDLNVSLENTDMPSEICDYRDKDVNNGVSKGTAPRHSFSNKNGLHAETSTKHVVLGHDSVLAHKQXTVTCFSQSXANGIDKAHSPQPGTINKEFLDPGSPLLDNNFHPRLGTSHNGASDIQELSMLQCKVDDGGTTADTAARTLLSMFQHSSECVAHRPGSSNQTAAQKVDDEPQPSLDSFEKTVLDSEETKDDGQSVSVTPPFKEGPACRIKLKRGRGMRNFQREIVPGLLLGRQEICEDLKAIGYEAKKARSRKPRKGPGASSARPRPRKRGAAKH

SEQ ID NO: 347233 - protein, 36 aa, Zea mays
  Clone ID: MRT4577_79840C.1.pep
HLRRYKAYVENNDGTRRLDLTDEVDFGNSESLRGRV

SEQ ID NO: 347234 - protein, 58 aa, Zea mays
  unsure (1)..(58): unsure at all Xaa locations
  Clone ID: MRT4577_79841C.1.pep
MAKPTRPSRQDVAAATAPKTMPSSVFAAALLLLAAAACQASPYYPXXXGSYRXXCPLA

SEQ ID NO: 347235 - protein, 116 aa, Zea mays
  unsure (1)..(116): unsure at all Xaa locations
  Clone ID: MRT4577_79842C.1.pep
RQQTCCKAYPTVNXDYLKAPDXAKRKLRGVISENNCAPLLLRLAWYSAATFDATTTNVRPCITLMNPPEHLHGCNTEMKLDVLMCSTILENIAILYDTDANHVSDMEIHKMLSAPE

SEQ ID NO: 347236 - protein, 98 aa, Zea mays
  Clone ID: MRT4577_79843C.1.pep
LRASVASLLAVSSTVHSSTHTSSCTAPMVAVEFQSRLSLPPTRLLLVLHLAVEAAQLTAVETPNQDSAAPAVHTYVCPANDARTPPGPDFIIVSPPPP

SEQ ID NO: 347237 - protein, 134 aa, Zea mays
  unsure (1)..(134): unsure at all Xaa locations
  Clone ID: MRT4577_79844C.1.pep
SHRQFVPLIRYWIGSLPGQSPGAIASSLXRHIQHSIXRHSCDTAVYRCNVPDLRVVTLDSLLVLNDDPPKSIVLVEGVPHKIPGQTRGPXRCLGTLRGTLTGAGVTGVSYLDRFVSNLGDFPTLSPLKEMDGSM

SEQ ID NO: 347238 - protein, 138 aa, Zea mays
  unsure (1)..(138): unsure at all Xaa locations
  Clone ID: MRT4577_79845C.1.pep
GTKGRGLVVTSWAPQXDVLNHPATGVFVTHCGWNSTLEAIAAGVPMLCWPLAGXQRMNKVFITEDMGVGMEMEGYMTGLIKAEEIEGKLRLALESEEGTRLKKRALQLKKETEEAMEDGGSSEAAFLRXLSDVANVRS

SEQ ID NO: 347239 - protein, 60 aa, Zea mays
  unsure (1)..(60): unsure at all Xaa locations
  Clone ID: MRT4577_79846C.1.pep
LSEACSAPAAVHRWPAGLAGGGGLQERLVYGPVLPGLARXYPITPGRXGXIYEDVWLRAE

SEQ ID NO: 347240 - protein, 76 aa, Zea mays
  Clone ID: MRT4577_79847C.1.pep
RLTRTHPNLVSAFVYTDFQMSSVHTGVLGLLKFQKKKLMLTPFCYPQCSSGPEVLSTMCSGFDHLFFSLSHYFPSF

SEQ ID NO: 347241 - protein, 135 aa, Zea mays
  Clone ID: MRT4577_79848C.1.pep
ETPYPERRSRCFHVAPRPCSCCGFHLWRFLEKAYVLEAVFCTPFIMGPLLYPGKEAEGPPFHAGSPGAFFSLPFFMRKRLYGSSLPPCPLLGKNDDLLGLYPTPLEVDLPPPPPRWALFGGGFVPKGIVSKKIGG

SEQ ID NO: 347242 - protein, 48 aa, Zea mays
  Clone ID: MRT4577_79849C.1.pep
KKHTEMFLGRVTIRMYAYHRHQVYCGTTYLTYKKIFKIHTSAFEAKKL

SEQ ID NO: 347243 - protein, 132 aa, Zea mays
  Clone ID: MRT4577_7984C.1.pep
YGDLVACPIKMEDLKKFYPSFWKQSSSSRSSLHSICEHKLMDLGSRRNQTQEVSTNFNKRKQFSESVELTSDVRTSVWRKSDAYHGVIDLEKPSISGDAIEAIGCSGFGNPANQNGKSQDGSCCISPETPHL

SEQ ID NO: 347244 - protein, 58 aa, Zea mays
  Clone ID: MRT4577_79850C.1.pep
LCRSDRYENRLVRAFEAERAHAMIVFKTYMWENIITGECVLETGMDSIAKYYKRTIAP

SEQ ID NO: 347245 - protein, 41 aa, Zea mays
  Clone ID: MRT4577_79851C.1.pep
HPSIGYKKNEVYFWIYAPHIPIGSYRKRMCSISKYNHSIPA

SEQ ID NO: 347246 - protein, 45 aa, Zea mays
  Clone ID: MRT4577_79852C.1.pep
QGKHCHSYQHTTSLHIHRTESTKDANLSHPLIQGRSALSPIQIIA

SEQ ID NO: 347247 - protein, 82 aa, Zea mays
  Clone ID: MRT4577_79853C.1.pep
RWFLVLPHPCLPPGHRGHTHPTHRAQAHPCPRGHLRHHHQVTRRASASMHPWRLVRCSTQPCPFLVHTLVRPSRARGTKKEI

SEQ ID NO: 347248 - protein, 210 aa, Zea mays
  unsure (1)..(210): unsure at all Xaa locations
  Clone ID: MRT4577_79854C.1.pep
IGYLEAGRGDCSILYLLLEYILQRCTLHSRAATYRRTGRLEGRRKATYRTITCQRISLECKSTQNKINRQSFFSXPRRPDRERYDLSPIXETKPPLILISSRWXLREPKSPSLATVTEGPLCSSHHVQQSNAAFSETHTXLXQMSELMPKFQXLXRTLMHLLENELVPLSENSLQQLKKCITCALXRYTKNETXVIMKQEDDFRRTEPLL

SEQ ID NO: 347249 - protein, 33 aa, Zea mays
  Clone ID: MRT4577_79855C.1.pep
RQRTIYFFCTHAHVSLLSFRSAALFFFFYFIFI

SEQ ID NO: 347250 - protein, 198 aa, Zea mays
  unsure (1)..(198): unsure at all Xaa locations
  Clone ID: MRT4577_79856C.1.pep
PLCSLNIQHGCKLTPLLCLRERLGATFSSHPNELIPLFSRDARQCKXMIDRHQLIAYCEVLLDSVKEKYXAPFEDILRAXAQEAXIVLPPCVRLAIXRPRPXGYWDHIHMNVXSDLAVEELMVSEDLAFMEHLXDVQSNSNFELDLDFETINDSFPRPXSMINPIKNGVQIPNRHLISKXVPLQGEIVPLLNFLKDHN

SEQ ID NO: 347251 - protein, 41 aa, Zea mays
  Clone ID: MRT4577_79857C.1.pep
THASPSMDSGSMGAVPPVRLYCKLNPKEKKTPPGRPCERSQ

SEQ ID NO: 347252 - protein, 133 aa, Zea mays
  unsure (1)..(133): unsure at all Xaa locations
  Clone ID: MRT4577_79858C.1.pep
ETRNRRQCFSLCIGIVDMLISNDVXELYWLKHAIPSDGQMPADISVAHRNDAFLTFISQTAAVRHTPRAIFSYLEPTAIKEWRTVTKRQLFHTEQIISVKVDATNKFTRALYTIAKERGDLGPDRIRQIADNM

SEQ ID NO: 347253 - protein, 72 aa, Zea mays
  Clone ID: MRT4577_79859C.1.pep
AERCCCFIRKKETRLGLIRGGAEKAKHGLCGCQLVNEAEKLGKGKRRARKQSMRSGGEAHLILIYAKEVELG

SEQ ID NO: 347254 - protein, 42 aa, Zea mays
  Clone ID: MRT4577_7985C.1.pep
QNTNFLIVGVLTVVIVQGIMDGEVLQMRIECYSLTQMRLQIM

SEQ ID NO: 347255 - protein, 50 aa, Zea mays
  Clone ID: MRT4577_79860C.1.pep
EAKAGFHLYIVLKHSFYTLSRSDPFQIHTDRSFHTSSHSSRTHGSNFVHA

SEQ ID NO: 347256 - protein, 93 aa, Zea mays
  Clone ID: MRT4577_79861C.1.pep
PRHGEGDHAAMWGFRPHRRPALGVWFGVFVRDTRTRARHSPVDWASHGRRIPRRSAASPQSRHPPSSELCSARLWEMIRWFKRRPHNEEFDLI

SEQ ID NO: 347257 - protein, 115 aa, Zea mays
  Clone ID: MRT4577_79862C.1.pep
NFAMNIQKPFSMENNVGWQKSPERSYFEINNSHKISSVTVPLPLPGNLLVISQEMDVQCLGALPINNTTYRKTIHGKITDYCGKCSIPYKGHFNCTIYILLRTNRNKSISKSSLE

SEQ ID NO: 347258 - protein, 193 aa, Zea mays
  unsure (1)..(193): unsure at all Xaa locations
  Clone ID: MRT4577_79863C.1.pep
NSARGTVPPRPRALPMTSSLPPTTLSPTSPTCPPDEVPSAFDFVGLCPTPVSXPRPPVWPHPRSPXPIRGAPPTSPLPRPCRPPRCCPSHRRRPSSTRPGPPPRPXPPCPRPPAWPHPLSPPQSGRAPSTSPPPRHCWPPXSVAPXRRHRPPSTRPGPGQVEESXKPMRVTRNPDPPKPMPRAGPTDTKGEGE

SEQ ID NO: 347259 - protein, 93 aa, Zea mays
  Clone ID: MRT4577_79864C.1.pep
KLEGRFFPCRIPLSNFFWNLFFWVPPLYPFYDFCPKNLGAPRKGFCLARPWFPPFFLGWGLETRFGWVGKPFKVLSLAFSLFPPFFLWGVLFP

SEQ ID NO: 347260 - protein, 76 aa, Zea mays
  Clone ID: MRT4577_79865C.1.pep
SVLHGDLRIGVIRSDCNGDTSLYNPAGHYGHNEAQHAMSRTTAYTLDFDSPYSNDTPMHHVRQKLMHAYQIYDQNP

SEQ ID NO: 347261 - protein, 225 aa, Zea mays
  unsure (1)..(225): unsure at all Xaa locations
  Clone ID: MRT4577_79866C.1.pep
SQASSRRDGFFRRRRWAEAKAXVFRRRMRTPVKLLGGRKVSDVLLWRNRNLSAGILAGATLVWFLFDVAEYNVVTLLCHVALLGMVLLFVWSNAAPLLDRPPPQIPEVIVSEHAFREAARTTHYRLAHFVSVLYDVACGKDLKKFLMVIGSLWILAILGDTCSFTTLLYGGLLCALTLPALYERYEAEVDHLVAKGREDLKKFYRKVDSNVLNKIPRGPVKTKAL

SEQ ID NO: 347262 - protein, 86 aa, Zea mays
  Clone ID: MRT4577_79867C.1.pep
AFIRFKEDAENPWTVCTRIFLTVCHGFPGWLGLLCALTLPALYERYEAEVDHLVAKGREDLKKFYRKVDSNVLNKIPRGPVKTKAL

SEQ ID NO: 347263 - protein, 73 aa, Zea mays
  Clone ID: MRT4577_79868C.1.pep
FFLKEADPNLDGHAPNPLGHGTFAVVPSPVHPIALCPVFLLKKKKKKKKKKKKNQKKKKKKKKKKVLCVVTPA

SEQ ID NO: 347264 - protein, 468 aa, Zea mays
  Clone ID: MRT4577_79869C.1.pep
MGWGTVVYEGAVVGSSLVGLGWAGLWFLNRRLYKEYEERRVLVQILFGLVFAFSCNLFELVLFEILPVLSKHARFLNWHLDLFCLILLLVFVLPYYHCYLLLRNSGMRRDRAWLVAALFLLVFLYGFWRMGIHFPMPSPEKGFFTMPQLVSRIGVIGVSVMAVLSGFGAVNLPYSYLSLFIREIDETDIKTLERQLMQSIETCTAKKKKIILSQMEMERIQGSEEKLKARSFLKRIVGTVVRSVQEDQTEQDIKNLEAEVQALEELSKQLFLEIYELRQAKIAAAYSRTWRGHLQNLLGYALSVYCVYKMLKSLQSVVFKESGSVDPVTMSITIFLRHFDIGIDVALLSQYISLMFIGMLVVISVRGFLANVMKFFFAVSRVGSGSTTNVVLFLSEIMGMYFISSILLIRKSLANEYRVIITDVLGGDIQFDFYHRWFDAIFVASAFLSLLLISAQYTTRQTDKHPID

SEQ ID NO: 347265 - protein, 87 aa, Zea mays
  Clone ID: MRT4577_7986C.1.pep
TIHRDEIGDLLRRQFEQANLEAMDESAEWRMKYDKEIEKNRQLHDELSKVKASLAGAARHLELLQKDNELQKRQTESLRQQCNCTLH

SEQ ID NO: 347266 - protein, 108 aa, Zea mays
  Clone ID: MRT4577_79870C.1.pep
RTRRPSHFFVYSASAPTRRFSLWCWFFVSSFHFISSHLDSLHIDIISHTLLVLLLFCFGDSVNPSSVLETRCWIYQTFSRSPFPLRLSSYGVEAIGVWGIELGVALKW

SEQ ID NO: 347267 - protein, 68 aa, Zea mays
  Clone ID: MRT4577_79871C.1.pep
LDTRALRTEHKLFNKILKHNYYIKIYNTCIISISVSVSATVLILFLSSHDYGASCGKARLVNPFKTHV

SEQ ID NO: 347268 - protein, 56 aa, Zea mays
  Clone ID: MRT4577_79872C.1.pep
CRSTVARYVGVSYIFFWLFHKKKKKKKKKKKKKKKKKKKKKKKKKKKKKKKGRPVL

SEQ ID NO: 347269 - protein, 126 aa, Zea mays
  unsure (1)..(126): unsure at all Xaa locations
  Clone ID: MRT4577_79873C.1.pep
INAILGWLVFSSLTSSSCIFIEVXDLCPTSALYLKYISLMFIGMLVVISVRGFLANVMKFFFAVSRVGSGSTTNVVLFLSEIMGMYFISSILLIRKSLANEYRVIITDVLGGDIQFDFYHRWVDAI

SEQ ID NO: 347270 - protein, 469 aa, Zea mays
  Clone ID: MRT4577_79874C.1.pep
MLGAALRLRVRVLRRRRSHRGRRRGRRSLGRVGDDDDDEGGREPVLLVSGMGGSVLHARRRSNSKFDLRVWVRILFANLDFKKYLWSLYNADTGYVEPLDDDVEIVVPEDDHGLFAIDILDPSWFVELLHLSMVYHFHDMIDMLINCGYEKGTTLFGYGYDFRQSNRIDKAMAGLRAKLETAHKTSGGKKVNLISHSMGGLLVRCFMSMNHDVFTKYVNKWICIACPFQGAPGCINDSLLTGLQFVYGFESFFFVSRWAMHQLLVECPSIYEMLPNPEFKWKEKPIIQVWRKNPEKDGTVELVQYEATDCVSLFEEALRNNELTYNGKKVALPFNMSVFKWATKTRQILDNAELPDTVSFYNIYGTSYETPYDVCYGSESSPIGDLSEVCHTVPSYTYVDGDCTVPIESARADGFSAKERVGVKADHRGLLSDENVFKLLKKWLGVSEKKSEWRCVSKSYSKVGNWVAL

SEQ ID NO: 347271 - protein, 109 aa, Zea mays
  unsure (1)..(109): unsure at all Xaa locations
  Clone ID: MRT4577_79875C.1.pep
LLAAGXCPPRAVPPRLLXXLGSXVLSVASGVXCXGSFAAASSFPLVVLVLALPPLXXFXXARALRRFRRPXWLPLXXALAAXXXXXXRXRCPGSAVPALFXXPVPXAAL

SEQ ID NO: 347272 - protein, 288 aa, Zea mays
  unsure (1)..(288): unsure at all Xaa locations
  Clone ID: MRT4577_79876C.1.pep
MTKSSGALDLARSTGGSLSKDQVKSAVDQYVKYHDLHGGEQESRKSNYADLANKYYDLVTGFYEYGWGDSFHFAGGYPGETSREAIKRHQHFMALQLGLKKGMKVLDVGCGIGGPLIEIARFSSTSITGLTNNDYHVSRGKEHIFSAGLSEQCCSLKGDFMNMPIADNTFDAAYAIQATCYAPEAQGVYSEVYRVLKPGQYFALDEWCLTDRXDPNNTXHLSTKPEIELGDGLPDIRTTRQCVQAMKDAGFEVVFAKDLAQDFPCPWYRAMDPTYFSWAASLSRKLIW

SEQ ID NO: 347273 - protein, 92 aa, Zea mays
  unsure (1)..(92): unsure at all Xaa locations
  Clone ID: MRT4577_79877C.1.pep
KKKSYIPYLQYSVPPPMETKKFVNQGPFSPPLIICPKKLWVKKNVVTKTVSTMVNQNRMXGFGXXXXKKKNKNPXKKKKKKKKXSPLRCYHC

SEQ ID NO: 347274 - protein, 108 aa, Zea mays
  Clone ID: MRT4577_79878C.1.pep
AGFEVVFAKKKAQVFPCPWYRVMDPTYFSWAHFQCTRPGRIVTRAIVNTLEFLRIAPAGSMGAYNVLMSASDGLLKGGREGIFTATFFVLGRKPLKEVDIVSLSRKLI

SEQ ID NO: 347275 - protein, 67 aa, Zea mays
  Clone ID: MRT4577_79879C.1.pep
RIVTRAIVNTLEFLRIAPAGSMGAYNVLMSASDGLLKGGREGIFTATFFVLGRKPIKEADMVNGGVL

SEQ ID NO: 347276 - protein, 161 aa, Zea mays
  Clone ID: MRT4577_7987C.1.pep
LGPSRPAGASYQVDDGGTTADIAARTLLSMFQHSSECVAHRPGSSNQTAAQKVDDEPQPSLDSFEKTVLDSEETKDDGRSFSVAPPFKEGPACRIKLKRGRGMRNFQREIVPGLLLGRQEICEDLKAIGYEAKKARSRKPRKGPGASSARPRPRKRGAAKH

SEQ ID NO: 347277 - protein, 354 aa, Zea mays
  Clone ID: MRT4577_79880C.1.pep
MTKSSGALELARSTGGSLSKDQVKSAVDQYVKYHDLHGGEQESRKSNYADLANKYYDLVTGFYEYGWGDSFHFAGGYPGETSREAIKRHQHFMALQLGLKKGMKVLDVGCGIGGPLIEIARFSSTSITGLTNNDYHISRGKEHIFSAGLSEQCCSLKGDFMNMPISDNTFDAAYAIQATCHAPEAQGVYSEVYRVLKPGQYFALDEWCLTDRFDPNNAKHLTTKAEIELGDGLPDIRTTRQCVQAMKDAGFEVVFAKDLAQDFPCPWYQTMDPNYFSWTNFQCTRPGRIITRAIVNTLEFLRIAPAGSVGAYNVLTSASDGLLKGGREGIFTASFFVLGRKPLKETEIVNGGNL

SEQ ID NO: 347278 - protein, 91 aa, Zea mays
  Clone ID: MRT4577_79881C.1.pep
MVGQDHGPAIGIDLGTTYSCVGVWQDDRVEIIVNDQGNRTTPSGGGVTDSERLIGDAGKSQDGMNAINTVFYAKGLIDTYVLWCVLYRVIY

SEQ ID NO: 347279 - protein, 96 aa, Zea mays
  Clone ID: MRT4577_79882C.1.pep
TLNEMETCEMNRFSCCSKQTKKRQDKKATILINRDELGHTLQQGHLQQGLRRAAPRVPSERPHQGHHQGSSDAPQVDPPGRALSTSKWEKPGPTPT

SEQ ID NO: 347280 - protein, 218 aa, Zea mays
  Clone ID: MRT4577_79883C.1.pep
MAKSGALELARSTGGSLSKDQVKSAVDQYVKYHDLHGGKQESRKSNYTDLANKYYDLVTGFYEYGWGDSFHLAGGYPGETSREAIKRHQHFLALQLGLKKGMKVLDVGCGIGGPLIEIARFSSTSITGLNNNDYHISRGKELIFSAGLSEQCCFLKGDFMDMPISDNTFDAAYAIQATCHAPDAQGVYSEVYRVLKPGQYFALDGWCLTDRFDPHNAK

SEQ ID NO: 347281 - protein, 69 aa, Zea mays
  unsure (1)..(69): unsure at all Xaa locations
  Clone ID: MRT4577_79884C.1.pep
KSKTSDGTCTCIDIVLAIMLPPVARMFKACCLVEFWIXLMLTLFGYLPGIIYARWAITKLSVGALALNA

SEQ ID NO: 347282 - protein, 59 aa, Zea mays
  Clone ID: MRT4577_79885C.1.pep
MRLVIHRVALLDPGRETTHDLVHVLHCLRYAGYALEELDDAYLVIIDKDTNLYAIHAPG

SEQ ID NO: 347283 - protein, 58 aa, Zea mays
  Clone ID: MRT4577_79886C.1.pep
FVQADKFSWMQCQLAIARCCSHQVVNPSMDAPMCVGCVGASSKGPMEPLVRDVLSGPF

SEQ ID NO: 347284 - protein, 77 aa, Zea mays
  unsure (1)..(77): unsure at all Xaa locations
  Clone ID: MRT4577_79887C.1.pep
MTTGSTPGXDPSQRKRNFTKDYVALDAVQCYKXYXWSTXVSKEEFETLCDYLTKDPCYCKKRPERCCYMFFLTLTTA

SEQ ID NO: 347285 - protein, 59 aa, Zea mays
  Clone ID: MRT4577_79888C.1.pep
HASEFFNLHGAWFKMKSLLRMWASVGMWFCRDPLFHYYTNRWTLRMYRSSRGFIYSIPI

SEQ ID NO: 347286 - protein, 87 aa, Zea mays
  unsure (1)..(87): unsure at all Xaa locations
  Clone ID: MRT4577_79889C.1.pep
FQPELHSNLGRRYNLFINFNQXKHNLPLHISNYQSSKHTPSFSTPPDKHLYSPSPSYKHKLKHTLIYLPLNSNLHTFQIAFSEPPFN

SEQ ID NO: 347287 - protein, 122 aa, Zea mays
  Clone ID: MRT4577_7988C.1.pep
MGRRQKRQALMAAFALALLMGTAVYFRIWARQSSDPYFTADDREELRRQFEQANLEAMDESAEWRMQYDKEVEKNRQLHDELSKVKASLAGTARRLELLQKDNELQKRQTESLRQQCNCTLH

SEQ ID NO: 347288 - protein, 72 aa, Zea mays
  Clone ID: MRT4577_79890C.1.pep
TPFLVVVGPDRFRPASYQHRVRSMSRPQCGASTPPAVHWSIIYTLCCGSKRPQPVLLAEKAGSQPVSSRVWA

SEQ ID NO: 347289 - protein, 141 aa, Zea mays
  unsure (1)..(141): unsure at all Xaa locations
  Clone ID: MRT4577_79891C.1.pep
SGRRELLLGWLLLVEASPATVDDNSGFYYQLVLMWPEPYWRQTSAGGXRPTTGFWPGRDFYITGLTVLNATTDPELTDCRTKVLYNLNLITGFKGLNKSWSNIRCPSTNGQSSWKNAWRKAGACSGLSKKDYLRTALSFRS

SEQ ID NO: 347290 - protein, 405 aa, Zea mays
  Clone ID: MRT4577_79892C.1.pep
MKGRPSAPGNLQRIDQSPNLPIPTMHSEGTKGNAVKSSSKKKSDKMQKPWHGIDGDFGSCYSHGVDHHANFDGSDDSSTRKRSRHENPLIDDKMLKHSKDTNANINSMNLTKSSREIVVPDEVTAFPESNESNGEPSNSQRDNVEKSPYGKKKLQRELSDLELGELRETSLENDDGRIRKQFERNSSSKSLDAKLTGVNNFYPSINDRKTPVTVFHDKRKPSPQEYGNRGHVNQEGFQRKAAVYAFDDNRPQQRENFPESLHLPKIDNSDSENIMYPDRSGEKTSKRETRMTHGGMLEYADIQKKKTTSRLPQNGTNNVRVSRMQKSISPSDNDERSRNDSLIETKTGRKRRGSSSDDDNLFFSKYDKDAPELKDPIKDFLQYMDYVQEFNEKYGAYSYLNSQID

SEQ ID NO: 347291 - protein, 221 aa, Zea mays
  unsure (1)..(221): unsure at all Xaa locations
  Clone ID: MRT4577_79893C.1.pep
LLPAAFLLSWKGIQQRRSSXQDGAYGTTXCPIPPGGNFAYNMQVKDQIGSYYYFPSLAFHKAAGVYSGIRVLTRPRYPXVPFNPAGGDFTILAGDWFKLHHTDLIGILDSGNDLPLPDVLLMNVHGSNGKRFTVDQGKTYRXFRVTNVGISTSVNVRIXGHSLLLGEVEGSLSMQNTYSMLDIQLGQSYSVLVRADPAPQEYTIDASTRLTNPESPETAML

SEQ ID NO: 347292 - protein, 104 aa, Zea mays
  unsure (1)..(104): unsure at all Xaa locations
  Clone ID: MRT4577_79894C.1.pep
PSGNSSTGAPSSPTHFYFXEHKEHHWRVGGHQKTAQEPVPQRTRADGALQAPARSVEERAMLSSHATWPSSAFTETDTAESPPHHRSMHPKSPPLTRGLRDGTH

SEQ ID NO: 347293 - protein, 110 aa, Zea mays
  Clone ID: MRT4577_79895C.1.pep
FLVFFFFCFFFFYPHGTGGSGSLGGALGGCKHFFGFMTSGPSGKKPRTFGRNDAFLPRLPSLMNLGVVLQSCLFFRSGKKASRPIGFKPQTVAQNEHKMVLCREQKLLLA

SEQ ID NO: 347294 - protein, 63 aa, Zea mays
  unsure (1)..(63): unsure at all Xaa locations
  Clone ID: MRT4577_79896C.1.pep
LEVESSNTVINVKPKIQVKKGIPPVQQRVIFPGKQLXDDRTLADYNTQEESTLHLVLRLNGGQ

SEQ ID NO: 347295 - protein, 99 aa, Zea mays
  Clone ID: MRT4577_79897C.1.pep
KAPKNRQQKLLQQIAPAQTQQAGANPVAHWQQLLPFNQLTKANSGGDQQQRQQLLNPLAGANPWGAAFPQQQQLLPNNRFSLKNPALARQQPTVGGAIF

SEQ ID NO: 347296 - protein, 100 aa, Zea mays
  Clone ID: MRT4577_79898C.1.pep
PPPPAHTHTHASPALAPQATSARNFHAFMGSSSPSLGGSKATDGAHCPTGLPCSRPNRSHSRAVEYFTHWCNGHKARRTWSNHAMQPKGIKEALGAVFDD

SEQ ID NO: 347297 - protein, 76 aa, Zea mays
  Clone ID: MRT4577_79899C.1.pep
GPAILIYSKQDTTAFKGNLKKRLGNHKGAGKRSTIHFNVQREPGIQSHSGPANLERGHSFGHFLPPRDLDQVRDAL

SEQ ID NO: 347298 - protein, 121 aa, Zea mays
  Clone ID: MRT4577_7989C.1.pep
LLSDDFRRIPTRHADVSSACVLRGEAAVSSARGREIIRERRSLSAGAVEAPVAQDAPAGARTQTCGIARTSRCRDMSASSLCVRVSVCTSDSLYGWQSSFVRFGVGDNIFFLISSARVCLD

SEQ ID NO: 347299 - protein, 138 aa, Zea mays
  Clone ID: MRT4577_798C.1.pep
PLLILQLSPFIRSKVWSLSPLLIVQLTTPKLSRRSKGFSPCRPLIPLFAPKSIVKLFVRCRVPRKKKKAETFLYLSCKGMKKGLIIQSGGLVETVPVFPPEKKNTQKEKKHPKKKKKKKKKKRQRAADREHAAYAAAT

SEQ ID NO: 347300 - protein, 87 aa, Zea mays
  Clone ID: MRT4577_79900C.1.pep
KRAVHTQLNFQLSKSKKVGDISIIPYSQQLKCWDLMFSISGLTSLICEPFLLELILTIHLTVTINISDIFMFTEFVFLEYKYQRLYF

SEQ ID NO: 347301 - protein, 87 aa, Zea mays
  Clone ID: MRT4577_79901C.1.pep
FITEVDKAVRWARNHYLSSTTLPSIKGDKLVIPHESLDISIERLKEHGITTKKSSQNLKGGQVAVRSTTGYPNGHRVKEPRRAAPHR

SEQ ID NO: 347302 - protein, 78 aa, Zea mays
  Clone ID: MRT4577_79902C.1.pep
DGYFLGCQKSELCRGLVLKDLDGSLNCLLTVAGGLHLFLLPLGTNPLEKSVGDDLVCLDSPRQGYYIDLRSGDIESKR

SEQ ID NO: 347303 - protein, 373 aa, Zea mays
  unsure (1)..(373): unsure at all Xaa locations
  Clone ID: MRT4577_79903C.1.pep
QPYLSFVRTVSAKPSANRNHPRAERDDGDDGPGRGGGGVVHDYRQALFPHYERWRKEYGPIFTYSIGSMVFLHASRSDVVRDLCLSVSSLDLGKSSYMKVTHRPLFGDGILKSSGEAWAHQRRLIAPEFFPDKVKGMVDLMVGSATALVASWGDRTGGGGVELKIDDDIRAYSADVISRTCFGSSYVKGKRIFAAIRELQKAVSKPNLLAEMTGLSFLPTRTNREAWRLNRVVRDLVLDVVREGGDDDRNLLNAMLRSASSSGGCSGDRVAVEEFVVDNCKNIYFAGYXTTAVTAAWCMMLLALHPEWQDLVRDEVRQACGGGDFASLHKMKKLTMVIQETLRLYPXGAVVSRQALRDVTLGGVRVPAGVNIY

SEQ ID NO: 347304 - protein, 201 aa, Zea mays
  unsure (1)..(201): unsure at all Xaa locations
  Clone ID: MRT4577_79904C.1.pep
QLFFFFIFLFYFFFFFFFSFPVFLFLGLFSFPWGAFLVDSRPPPRGGEGGAPPAPGGKWGPPTTPPNLPGQKPKRENPGGLKGQPTHNXAGGPPAAFQAKNPAGPPQKRIRPPPGRGRLPKGTPSAPXKQTTAPRPLGGGSRIPPPKGGKTGLPXPGNTQEKTGEPNGQRRAPTPKRPGGXFNQGPPPPARNTKNPQKAPG

SEQ ID NO: 347305 - protein, 111 aa, Zea mays
  unsure (1)..(111): unsure at all Xaa locations
  Clone ID: MRT4577_79905C.1.pep
MVFIVPYLAVLGVSRAAVLFRPRARNNTPVIEPGFKLRVDYEVMARLCCLRTRCSYCTKKGSITFGKGKGCKGQVKIXYGYNLVRGMTNYPMEDYYFAXLCVVKRNQLDLF

SEQ ID NO: 347306 - protein, 116 aa, Zea mays
  Clone ID: MRT4577_79906C.1.pep
RKPRRHNLPALANSWSGLPVSYKCKGKSRNLKARRNFRFLGFRIDDLDLEIKGDRLGKPNQGYGNFTDSLPANKCRYAFYDLNLTTVEICQKSKIFFFSWSPDTARTRIKMLYATS

SEQ ID NO: 347307 - protein, 180 aa, Zea mays
  Clone ID: MRT4577_79907C.1.pep
MKPAGIRHPDRVSTLHSSIRFTRPSRREMANGGAEASPLRPRRRAGSRDPFLIVCRFFGVVTAAAALLCVAANVLSAVYSFRGGADIIGGVFRCYAVVFSVFVAVLETEWAPVIRLWKIFEYLPARGMLQIFVAIMTKAYPNVERSELILIQEIATYMLLVCGAVYIIAGILWSWCFKTF

SEQ ID NO: 347308 - protein, 212 aa, Zea mays
  Clone ID: MRT4577_79908C.1.pep
EIEKCEKLSSELSTCREMIDNLRNENASLNAKVDSHVCNVSTSNPRDDNVDLLARIDELNASLASLRIENEKLLAKAKDFDVCNVSISNLRNENVMLHAKIDELNVCKPSTSSIDHVTICTRCRDINVDAIHDHLTLIEQQNDHIAQLSAKINEHEIENENFKFVRSILYSGRRPGIKESIGFQKGDNVELNAHKSLSNFIEGKAHIAQDNR

SEQ ID NO: 347309 - protein, 63 aa, Zea mays
  Clone ID: MRT4577_79909C.1.pep
RWLLLNISAWSLSHACMKDKSIPFTTVRTACTACASIFNRFPETLCTMVMVSLLSTQRYSRAE

SEQ ID NO: 347310 - protein, 47 aa, Zea mays
  Clone ID: MRT4577_7990C.1.pep
RRVFIHLIHTFNMCTCLSVQRNSFDACSMLAPVFLTCILQHGSKLSL

SEQ ID NO: 347311 - protein, 373 aa, Zea mays
  Clone ID: MRT4577_79910C.1.pep
MADDQQPPAQRYWFPYWTAPAPRPVARPQLSRRETRPAPSPPATASPSRRPSHPQQAATPASRSAGSGVPDPPAQPQPTRLSSRPSPSPSRAQPLSPIREPNARAPVPSPAPVAKEHKQPSPLHHTEHGVPKQKDITVPQEKTIHEPLVASKTQTKTPEKEKDKEKGKEKEKEGSQLHKEKDKEKKDKEKEKEKDKEKEDHKDKKDKDHKEKKEKNKEKEGSQLHKELKAGVADMVHTLSSSAPSSGGGHERAGSAAAGTTIITLAGENKGTSMKVDSSAVAYGTADAAGSKERRGHKLDGSVIVSGKEQAGAGKGLTAFVNSNVQVINNSLLLQSSCHGGDLGVHLKLSTKAKKKDGKEAGGNSGSAAAPKK

SEQ ID NO: 347312 - protein, 86 aa, Zea mays
  unsure (1)..(86): unsure at all Xaa locations
  Clone ID: MRT4577_79911C.1.pep
ELKLRIRAPVNDALIRYDALHLVLRSHLVLLNNESFSRNDLSSSYRQSHNIRRTLSFTIPSARVLHQNVDQMXSPSKIPPRDWIPS

SEQ ID NO: 347313 - protein, 50 aa, Zea mays
  Clone ID: MRT4577_79912C.1.pep
YKSPPPQQCRPRMFPLLHFKTCYHQVLVSSCHELKHLMQVMHIHFLSLWP

SEQ ID NO: 347314 - protein, 72 aa, Zea mays
  unsure (1)..(72): unsure at all Xaa locations
  Clone ID: MRT4577_79913C.1.pep
MTCNNASVGSARIHPPDIYQLTNMTGSENLSSAVMETHLSGTRXQTRESPXKQRRMLAYDILDRSTYQAHTI

SEQ ID NO: 347315 - protein, 104 aa, Zea mays
  Clone ID: MRT4577_79914C.1.pep
TQQLGSELLQTKPFTAPVWCYKIPNKTFLSYGPGILACPLSTGQKFNGLTNSYQRRDHFTPAPNAHTLLKKKSPWYTNIFFKATIAFFSSHNITSRDPMNSKAQ

SEQ ID NO: 347316 - protein, 62 aa, Zea mays
  Clone ID: MRT4577_79915C.1.pep
MQILKDRPHSTHSLRASMFIIDSAPSALSVIDYKASSGIPALSCRHKPPLLGQLITCPLDHV

SEQ ID NO: 347317 - protein, 106 aa, Zea mays
  Clone ID: MRT4577_79916C.1.pep
GASKDTVLYLLQIGGQNSPSHIVICVKEKRHKHNGQEQLPEGQWPDRLRKIPTCGGVQSHGLEQAERLQVLQRYASLQGPDHSTDARQHQRNLMRTTYYMSMRRQA

SEQ ID NO: 347318 - protein, 64 aa, Zea mays
  Clone ID: MRT4577_79917C.1.pep
LDDMCLMRSAYCSPRLPPRALLAASSVLCCVVWVQHGSRLAMCPAVMCHHPSIIILYLYPTFWV

SEQ ID NO: 347319 - protein, 112 aa, Zea mays
  unsure (1)..(112): unsure at all Xaa locations
  Clone ID: MRT4577_79918C.1.pep
MATTTDLGFEATDLLLGLHRRGHEEGSRHCSARGGALPPPPARGLRRDLDLILNLEPGAEDQAEEEEDDHGVAAALEIEEEAGNMKQSPSQNSDSAAGPCELADLVEKPCAX

SEQ ID NO: 347320 - protein, 106 aa, Zea mays
  unsure (1)..(106): unsure at all Xaa locations
  Clone ID: MRT4577_79919C.1.pep
QGGTQRRKGGKPRGVKGPKKXRGKRNTGGSTRKRQRKGITRRRPAEGNTAETPGGKEGGGTVPVGASHRQGKQSRDPGRRGKGNTKRSRQKTPSSWHQLAQKQSKK

SEQ ID NO: 347321 - protein, 71 aa, Zea mays
  Clone ID: MRT4577_7991C.1.pep
ENIRGIGTTGSYEAVRKLKSHRTKQRGHSTLIQDESYLPERGQQLSLRSTTGNAITSDKIRMDRQPALLAL

SEQ ID NO: 347322 - protein, 71 aa, Zea mays
  Clone ID: MRT4577_79920C.1.pep
PPPAGVGARVCGFLARPAGAVVAFCGRCRRWRSWCRLVAPAPAWACRRACAACASPPRARVRGGLPRFRRA

SEQ ID NO: 347323 - protein, 106 aa, Zea mays
  Clone ID: MRT4577_79921C.1.pep
RSIKVPAISLKVADIPPDEFSWRKYGPKPIKGSPFPRGYYKCSPVRGCPARKPVERAPDDPAILVVTYEGEPPPPPGPVQGPSPLATAFPGARSRFPRQRGRCLVF

SEQ ID NO: 347324 - protein, 62 aa, Zea mays
  Clone ID: MRT4577_79922C.1.pep
STPQHKLVSSCSLVNRCLELFCLVVAIGGVKRSRHPVILRTTWAVATERSRGLYPHRLLLRI

SEQ ID NO: 347325 - protein, 386 aa, Zea mays
  Clone ID: MRT4577_79923C.1.pep
MDASPTPPLPLRAPTPSIDLPAGKDRADAAANKAAAVFDLRREPKIPEPFLWPHEEARPTSAAELEVPVVDVGVLRNGDGAGLRRAAAQVAAACATHGFFQVCGHGVDAALGRAALDGASDFFRLPLAEKQRARRVPGTVSGYTSAHADRFASKLPWKETLSFGFHDGAAAPVVVDYFTGTLGQDFEPVGRVYQRYCEEMKELSLTIMELLELSLGVERGYYREFFEDSRSIMRCNYYPPCPVPERTLGTGPHCDPTALTILLQDDVGGLEVLVDGEWRPVRPVPGAMVINIGDTFMALSNGRYKSCLHRAVVNRRQERQSLAFFLCPREDRVVRPPASAAPRQYPDFTWADLMRFTQRHYRADTRTLDAFTRWLSHGPAAAAPCT

SEQ ID NO: 347326 - protein, 142 aa, Zea mays
  unsure (1)..(142): unsure at all Xaa locations
  Clone ID: MRT4577_79925C.1.pep
RLWSSGTLPHTKHHEGREPWKEKGRRHLEANDTSGRPPRQEGHTAWRETGRQARSQEERKELQTDPDTTSRAXTEGEDMPHWQATQRGPEESQDHGGACPETIHEPAEKPNQRPKAAKRARELQPNINTNGSEGHDLRKDHG

SEQ ID NO: 347327 - protein, 193 aa, Zea mays
  unsure (1)..(193): unsure at all Xaa locations
  Clone ID: MRT4577_79926C.1.pep
LGTSRPAGSASFHFRAQKREGRSSRSPGDPAAGRPHTSSSLPSFLFPTIKMSRGGSAGGGQSSLGYLFGSGEPPKPAVAPAVSGPPGGGGGPPGXKHLVERLVGPIKMVVGVPGQTINTTGAKGRKTGNFFXERPFNKGHAGPGGGSFLXNWLVGNGGAHQGITPHWRRMAFLNRGQAVAFHVEPKLPSRVGP

SEQ ID NO: 347328 - protein, 70 aa, Zea mays
  Clone ID: MRT4577_79927C.1.pep
RIVYIKNSYSCRPNQPTPRALTNRLLIQMDVTPILARQSRDLRVSTRTSSNLEQSIIELVQKTPCLCKPS

SEQ ID NO: 347329 - protein, 73 aa, Zea mays
  unsure (1)..(73): unsure at all Xaa locations
  Clone ID: MRT4577_79928C.1.pep
GRPGHRPPRGGRGTPXATDRPRRSTTESEAGAHRRRPQPTQRRPRHRTPRRRPEGAPARPQXGAEPKQPGGTP

SEQ ID NO: 347330 - protein, 45 aa, Zea mays
  Clone ID: MRT4577_79929C.1.pep
FGTRHGCQSIILRSSLSWSAASGVSPWTGTHPNRYWIRYHVSPVA

SEQ ID NO: 347331 - protein, 123 aa, Zea mays
  Clone ID: MRT4577_7992C.1.pep
MPWTWFCLGLPTWLIFQGPFSRYLGPTSLVFFPGQSVKKYLLIKAALKTQSLDLILNAIPIFLLVCFQGSTWNSGKNQGGGTTYFLGRWNNFAGTGATHVWFPPPSNSWAPKGYLPGRFYNLN

SEQ ID NO: 347332 - protein, 60 aa, Zea mays
  Clone ID: MRT4577_79930C.1.pep
GVRHSLAGFSEADLRRNNLTLCVICSGPAPPQHQPQSSKSNEQPDRGSATPVGETVAAGS

SEQ ID NO: 347333 - protein, 79 aa, Zea mays
  Clone ID: MRT4577_79931C.1.pep
GAPIIIIPRGPWDSYPKLAVTELPCAQRGPATIRFRSPPQWDDPTRNTGPSGAGAFPETGPTLSKIVRISVDTISFAND

SEQ ID NO: 347334 - protein, 221 aa, Zea mays
  unsure (1)..(221): unsure at all Xaa locations
  Clone ID: MRT4577_79932C.1.pep
MVEPCLISNVFIIIIGVVYSRHTVQIYSCNDGDDIRQHLEFAPIDTRRALYKVLSSNSAWASKMGSDICEYYMVALHLSCAPQSGYQRSDGCSPNYRSPSWKCSKEKGFEADGETYHVLVQGFGRHRKRKGWEVVLDEMLDLEFIPNTAFYNRLLGGLPLAYSSEYWNKXCFLHTNLKNQRKFLSLLLSKRKWHQLKILFLYHLLMKLFHLLPRLRCPDTG

SEQ ID NO: 347335 - protein, 343 aa, Zea mays
  Clone ID: MRT4577_79933C.1.pep
MTIDMSIPGSSGLLNAAGKRDMKFFSNPYVLALTGAAGIGGFLFGYDTGVISGALLYIRDDFPAVKDNYFLQETIVSMALVGAMIGAAGGGWINDAYGRKKSTLLADLMFALGSLVMCAAAGPYILIIGRLLVGLGVGVASVTAPVYIAEAAPSEIRGGLVSTNVLMITGGQFFSYLINLGFTEVPGTWRWMLGVAAVPAIIQFVLMLFLPESPRWLYWKDEKAKAIAVLERIYESDRLEEEVELLATSSMHEFQSNNTGSYLDVFKSKELRLAFFAGAGLQAFQQFTGINTVMYYSPTIVQMAGFSSNRLALLLSLIVAAMNAAGTIVGIYLIDRCGRRLES

SEQ ID NO: 347336 - protein, 58 aa, Zea mays
  unsure (1)..(58): unsure at all Xaa locations
  Clone ID: MRT4577_79934C.1.pep
GGDGKVWFAGKRVRGKLAMWEEXHGEQWQXWDWVDGLPGYGDGVYRGFVFDGGFTAIP

SEQ ID NO: 347337 - protein, 38 aa, Zea mays
  Clone ID: MRT4577_79935C.1.pep
CRGRRRGKGVIHSNPAFGRRTMAGRVRSQDRAVNEDAA

SEQ ID NO: 347338 - protein, 731 aa, Zea mays
  Clone ID: MRT4577_79936C.1.pep
MARVRSTTRVTHEGEETEATKTTPISEVMRQSGLVMTEGTIDEGTPAAEAEQVDIEEENADEEEEDYSILIPSKPNHLDFEKSTMSEADVPMMMKLGYFGEAERKLVRFVREETTPAPKDDELTPNAIVRLGIFIWALRSQGMDPDAEAFCRVHELHYQTKARADGLHEIFGCYNFAYHKDTKAPVLSYRTKWPTSWKSEWFYIKADEKKRGKLMTMVMSPLTLSFGMTIPLCNMQLGSPCQLAAVEFRVVAEQISTRDLVQEYLANRTSLTSSDWAAFGTRPKRRLNRVMDALKFEYPDYERLNKGAEGAKRKRIVSVLSRQATRMVKEDEKVLKKRKSTPEPKVTALKKRKAKSPEPKVTEEEEETPSTPPAAEVAEILKVMTESLPIKLLSPLGPELTKLFQKKEEPSATQKEDGLKKRRIGSVMQAIEKTPPPASASKITPTASAEATAEANTSAEAAAATEAANLEATLSGIDKLILVPDKGKDIAEAASEEEGFDLRNLVRQELSKAEMKELQEYGISCGYQPGAMLFGGIDEEALGCVRDRTRANVIGTLSKSVGFLKLEADISSYRRQHIVSSLFYSNFKSMLLSKALQMQQDLEDKKNEIIIEGSENKIKEYEASLEKKDFLLQAMEGEVEALDEVIAGHDDFCALLASRGTAAAFLKAGCTHAKIVNRPAFSLSSTDLVDIPDEAQSIGSRSIMQIWAKGGQDLAGDEARSLLKPDDDVED

SEQ ID NO: 347339 - protein, 98 aa, Zea mays
  Clone ID: MRT4577_79937C.1.pep
FLSSTADDVLIIVWNRRPNVRVHDPHTGSTAAALNSENNPQAMERERKKHAESLGKNNQLRWYQHMQHRPKELAAPPGVSHTHQRRALVLGHILVGLL

SEQ ID NO: 347340 - protein, 50 aa, Zea mays
  Clone ID: MRT4577_79938C.1.pep
QSRAWCVCTMFCFLFISLPPQIAPPLPEGGQGMTLPRLGFLCDAWAAGNS

SEQ ID NO: 347341 - protein, 95 aa, Zea mays
  Clone ID: MRT4577_79939C.1.pep
IITENNRNFGGPQSLIFYPQKSIPLQKHLGGPVGDKSWGERGLQTTGNNAPIFKLWDWGLTTGQNPFEDGAPTPRDPPLCGMGIPGGLSPPFSGH

SEQ ID NO: 347342 - protein, 113 aa, Zea mays
  unsure (1)..(113): unsure at all Xaa locations
  Clone ID: MRT4577_7993C.1.pep
HLTKGHILIGDXTGIGCRVNYGLCFYCNPTAFRTGQGPGLGPFFNLPNMELSRKATICNRVFQRTDKDVGIDLGSTLATVLVDTQPAVFRMHEILHELHQHPAGIKGGRRIIC

SEQ ID NO: 347343 - protein, 450 aa, Zea mays
  unsure (1)..(450): unsure at all Xaa locations
  Clone ID: MRT4577_79940C.1.pep
MAAVFMRLPFLPPDRHTGRSQSGNGYLRRSTSSPAKVSTQHQLGDKLLVMGRECHQCQGRWTSGEVQEPEEGKKPEYGVMKARVLDAVEGLEGQILAMANASKHLQPSSKSGNDRKYQGTLVASPAKDISPKCANRIVPSKQLILGGDSIGHLASILIKVVALEAVRRVSKARYPFIWNSVQALQILVYPPFSWIQRWAPLKFLVQGIQKLSMPLLFLSVTTTVSELSSKRDDEPDNNTEHSETNELASTSGTSDAADGTKEIVQENWLVLLFRELEKQGITLPERFPMQMMRSFVTVAQENYPNRLGVLFVVRLPPVVRVIAQTFLQVLKPSTKQKLRFEGDSYKKTLAEFLQAVPAFLGGKCSCPRCEKPRNSSVVQXQGKGARTRLAWSALMADHLSWTXDFDEEEIPSPYSCENAIRAAIICLLMVCIFIAFLAGMNDPASVPPSA

SEQ ID NO: 347344 - protein, 80 aa, Zea mays
  Clone ID: MRT4577_79941C.1.pep
HQQKVGCDRPTDAMIDAYTRIAKLYLHGDTSEAWYACAIHRLNQAFSDANTGCHTKRKGDYHRHSIEHSTATKKKAASRL

SEQ ID NO: 347345 - protein, 474 aa, Zea mays
  unsure (1)..(474): unsure at all Xaa locations
  Clone ID: MRT4577_79942C.1.pep
MANASKHLQPSSKSGNDRKYQGTRVPSRVKDSVRKCANHIVPSKQLILGGDSIGHLASILIKVVALEAVRRVSKARYPFIWNSVQALQILVYPPFSWIQRWAPLKFLVQGIQKLSMPLLFLSVTTTVSELSSKRDDEPDNNTEHSETPSETNELTSTSGTSDAADGTKEIVQENWLVLLFRELEKQGITLPERFTEDELRRFYIAANGDFSSLLSSVKKTIRWREMFHILTLQELDKWSHLVFWHGFDTMLRPCLVIRLGLACSSIPPCDRPHFGQAVVSQIDHGVVNLTNGEDSRITVLLDCHGISPFRFPMQMMRSFVTVAQENYPNRLGLLFVVRLRPVVRVIAQTFLQVLKPSTKQKLRFEGDSYKKTLAEFLQAVPAFLGGKCSCPRCEKPRNSSVVQXQGKGARTSLAWSALIPDHLSWTXDFDEEEIPSPYSCENAIRAAIIGLLMVCIFIAFLAGMNDPASVPPSA

SEQ ID NO: 347346 - protein, 507 aa, Zea mays
  unsure (1)..(507): unsure at all Xaa locations
  Clone ID: MRT4577_79943C.1.pep
MANASKHLQPSSKSGNDRKYQGTLVASPAKDISPKCANRIVPSKQLILGGDSIGHLASILIKVVALEAVRRVSKARYPFIWNSVQALQILVYPPFSWIQRWAPLKFLVQGIQKLSMPLLFLSVTTTVSELSSKRDDEPDNNTEHSETNELASTSGTSDAADGTKEIVHRDWLVLLLXRLXEKQGITLPERFTEDELRRFYVAANGDFSSLLSSVKKTIRWRETFHILTLQELDKWSHLVFWHGFDTMLRPCLVIRLGLACSSIPPCDRPRFGQAVGNCQHSNQFPVTQFTXIGDSNMTLLCPPSLVCLLLXVSQIDHGVVNLTNKEDSRITVLLDCHGISPFRFPMQMMRSFVTVAQENYPNRLGVLFVVRLPPVVRVIAQTFLQVLKPSTKQKLRFEGDSYKKTLAEFLQAVPAFLGGKCSCPRCEKPRNSSVVQXQGKGARTRLAWSALMADHLSWTXDFDEEEIPSPYSCENAIRAAIICLLMVCIFIAFLAGMNDPASVPPSA

SEQ ID NO: 347347 - protein, 68 aa, Zea mays
  Clone ID: MRT4577_79944C.1.pep
HNRTRPYLITLTRPYLITVDWLTQRHHGYWNLICTTIHSTNDFWHKGIATGIAWLLPINPGMSFGQWG

SEQ ID NO: 347348 - protein, 82 aa, Zea mays
  unsure (1)..(82): unsure at all Xaa locations
  Clone ID: MRT4577_79945C.1.pep
HASAIIFAFIDRSEAGFVSPIIRLLPVALRLLYLSKQGSMAATAEVSSTFAENHRGXCDVXLMSLAYAVSGHLLKVQDLPGI

SEQ ID NO: 347349 - protein, 50 aa, Zea mays
  unsure (1)..(50): unsure at all Xaa locations
  Clone ID: MRT4577_79946C.1.pep
RKCAXLVFFDDIMVYNKTWEDHLHHLELVLTLLSNDHWQIKLSKXCTFAQ

SEQ ID NO: 347350 - protein, 76 aa, Zea mays
  Clone ID: MRT4577_79947C.1.pep
SYFPSRLVALRSSPPRSLCGPSSHRYNKITRTDGLELARLILHRPLPQQQTHRHHRLEDHHHHDGDHHHGDDLLDR

SEQ ID NO: 347351 - protein, 220 aa, Zea mays
  unsure (1)..(220): unsure at all Xaa locations
  Clone ID: MRT4577_79948C.1.pep
MSPLLAAGMIHAGCXPGLKSQLPGPIKGSFSRXHLPSSSPHSSWQKSNLRFTTRSARLFNLNGDQMMSPSDILLRDCVPSDFTFADATSAYHIEGAWNAHAKEESNWDHFXHDPPQRILDGSKSDIGANSDHMYKTXDVRLXSEMXMDAYRXFSISCSRILTNATKEXGINPDGIKYYRNLINLLLENAIEPYVTIFHXDVPQALDREYSGFLDKSHKSI

SEQ ID NO: 347352 - protein, 57 aa, Zea mays
  unsure (1)..(57): unsure at all Xaa locations
  Clone ID: MRT4577_79949C.1.pep
TVTDDKRIQEVPAMKVTALGFTETARARVVNAXAYCLREPXGENTVLLRGPKNAREA

SEQ ID NO: 347353 - protein, 52 aa, Zea mays
  Clone ID: MRT4577_7994C.1.pep
TMARHLVCSSPMTVCSFAKRGEIHRLGRPLSGATRANFADFFFLQGRNLLAK

SEQ ID NO: 347354 - protein, 56 aa, Zea mays
  Clone ID: MRT4577_79950C.1.pep
VVGGHHSHHPLPHLPPHIPRCHQTPSSKIVPINLFNLSTKLLGVANSSRDEFRAYA

SEQ ID NO: 347355 - protein, 57 aa, Zea mays
  unsure (1)..(57): unsure at all Xaa locations
  Clone ID: MRT4577_79951C.1.pep
HTSVQRDLYGYDARSAYNRVQSQTFRRLXAPVTKRGLLSKLLLLGGRSLLAYVRASA

SEQ ID NO: 347356 - protein, 99 aa, Zea mays
  unsure (1)..(99): unsure at all Xaa locations
  Clone ID: MRT4577_79952C.1.pep
MASTIMAVXSEXVWVKTPLLGQGRADDVGVNASPLRDVFDAAADGRITMGNDLWNXPDRVKYLHPFCDQTPSYLTVEFLGDYRWDTVGLSADREAFARN

SEQ ID NO: 347357 - protein, 136 aa, Zea mays
  unsure (1)..(136): unsure at all Xaa locations
  Clone ID: MRT4577_79953C.1.pep
LTLLALSGSATXTHTSXRCGWHPPAAGHLPTTGHLPPTVNVPPTVQGPPADHRPWSVHLAPAAHEPSLDTQEASPGDXPTEPSRTETNFXAHACACQQTNTRPCQLQGTCGDGINPIHRLRVEFLKHXCSPTGTAY

SEQ ID NO: 347358 - protein, 62 aa, Zea mays
  Clone ID: MRT4577_79954C.1.pep
RPRSSEGAHREVDSRIAARKVTLVCEQKFVDLLKQLRQEFNSSSVVSSCYIRKGRSFEIHGC

SEQ ID NO: 347359 - protein, 52 aa, Zea mays
  Clone ID: MRT4577_79955C.1.pep
AHYRTKHEAGINGALPILYAFSAASWGCNHILRICNETILYTLFTSSTTRVP

SEQ ID NO: 347360 - protein, 65 aa, Zea mays
  Clone ID: MRT4577_79956C.1.pep
SSSPLVGPRAPPWGKGNFNYPAQALIIFAPCIAGFFTPADKPILRNARQTPLGNLAKSPLCKNVA

SEQ ID NO: 347361 - protein, 66 aa, Zea mays
  Clone ID: MRT4577_79957C.1.pep
SGPVLPRGSSICFSFHFLWFVPSSFRKFMQKMILPHYNPTSSCSFWLKKKKKKRKAARCKAMLAYA

SEQ ID NO: 347362 - protein, 59 aa, Zea mays
  unsure (1)..(59): unsure at all Xaa locations
  Clone ID: MRT4577_79958C.1.pep
RDRTIAESVGVPRGGLHAHLHGGYSAPRLCEXAXVGFCSVVQGRSDEARSCADAWVDPG

SEQ ID NO: 347363 - protein, 106 aa, Zea mays
  Clone ID: MRT4577_79959C.1.pep
AVAETRGGGQRYLSDLFASGELIKPIEAPTTVSAPPDAASAAPAYKPSAAKPDGTKHIDAVVTYQTNNYDKCDKNNTVYFLTDRASTNVQTGTGSGSSLRYLSGGY

SEQ ID NO: 347364 - protein, 259 aa, Zea mays
  Clone ID: MRT4577_7995C.1.pep
MSLLRQLFSSQLRYTLRASSRVQRSQFTPISHFHTSRPFQSILPDMVDDQPKGLIANKGIELLTWGTPNGWKASILLEELKEAYGKEYTWQGINISKNTQKEPWFTKLGPNGRIPVIVDHDQGGFAVQEGLAILSYLTRHYDPEHKFSFSDPLDISRAEQWMAWQHGGLGPMQGQANHFNRFTKERIPYAMQRYTGETERLLGILDSHLANTDYLVGNKFSIADIASFGWCHMARFSGIDLEMFPNLKEWLDRILARPA

SEQ ID NO: 347365 - protein, 78 aa, Zea mays
  unsure (1)..(78): unsure at all Xaa locations
  Clone ID: MRT4577_79960C.1.pep
NNSAGPXNQXXTXNXXXXXQQQQXXPXSQXXTAXXQQQQXXPXNQXAAXNPXXXXQQQXPXPXGQXXTTSPXXXXKQQ

SEQ ID NO: 347366 - protein, 80 aa, Zea mays
  unsure (1)..(80): unsure at all Xaa locations
  Clone ID: MRT4577_79961C.1.pep
VAFIATNILDLQEGLPLLVISTNTFIIPQYLLPPSAIIPHLLLPLTLIGYXHQTLQSYKLQLSLAASALXQPIAQFQHQF

SEQ ID NO: 347367 - protein, 335 aa, Zea mays
  Clone ID: MRT4577_79962C.1.pep
RPGQVREHDAQTSTKMFPAKVEDPMIRGDILVQTLKDINRESTYSSQVNHGNTFLQELESEFQLMSQIGDIRNKGWIYMDDEQFQFLSRLCGSTHTSWNGISDLPVSSHGGELQQKDEETAMVESKISQIRDLFPDYGKGFLSACLEAYNLNPEEVIQRILEGTLHQDLLALDTSLEEMPHEKPAPTAVKDKGKGILVETVPQITKKPHKVAETHYFVQDGLSSATSSASQGPSSAISPASLGPSSAISSAFQGPSSAISSASLGPSSSISSVPKGRFTRKANDDLPDTAILDSKNAKNAARSVILDSQYEYEDEYDDSFDDLGPCDEASASEDR

SEQ ID NO: 347368 - protein, 83 aa, Zea mays
  unsure (1)..(83): unsure at all Xaa locations
  Clone ID: MRT4577_79963C.1.pep
DAWAKHYMTLLXTLRSDXIRIVMDMNTVYGXFSGSLVKDPYCFMIILSYYGRNYLXVLYDRRIIDVNHYWSEAFXTYPRTYDL

SEQ ID NO: 347369 - protein, 110 aa, Zea mays
  unsure (1)..(110): unsure at all Xaa locations
  Clone ID: MRT4577_79964C.1.pep
PICQDPGLGRGAKTKAATFDVTYSIYFLTALKELHSKIWISAKCMTIMNSLINDFFEKLMAVYNMLSRINXMLIMTYLQIHTXKHLVFPGKLAEHAVCDGTNGATNLIYC

SEQ ID NO: 347370 - protein, 125 aa, Zea mays
  Clone ID: MRT4577_79965C.1.pep
LDGSVCSRPRAEADVLASGHANSIGRQRSRAAGSVLQGPRACTLAEGRAPVSTLAGSVDRVRDAELGRAPVSRRAVAPGPGVAPARLPGAAPPHCCGRAVAVEPASPPRPRAWPRPHPTRPPTRP

SEQ ID NO: 347371 - protein, 68 aa, Zea mays
  Clone ID: MRT4577_79966C.1.pep
SETKLEYYKLTHIHTTCSKRLNTHMDSKYKAKLTTMSLLKKKQIDYTMSRKMKQIMLQHGRLHENSNH

SEQ ID NO: 347372 - protein, 34 aa, Zea mays
  Clone ID: MRT4577_79967C.1.pep
LQYSGNRTTSRYVHKSHQDSCLLEGCRVVVVVVV

SEQ ID NO: 347373 - protein, 101 aa, Zea mays
  unsure (1)..(101): unsure at all Xaa locations
  Clone ID: MRT4577_79968C.1.pep
TRSKAAARNPETGDSTIVFXCPFSLASELPALYTEFDLLPDLPLDFLPDAPEVEALSLXPFSACTPQXEEECPSDTGGNNAEYAGFQDITDLFQIDPLPVA

SEQ ID NO: 347374 - protein, 263 aa, Zea mays
  Clone ID: MRT4577_79969C.1.pep
MDGFPKSVGGGGPNIPAGSHPAGGSQAAAGGGATQRTQYPYVTGNSVIALKYKDGVIMACDTGASYGSTLRYKSVERIKAVGKHSIIGASGEFSDFQEILRYLDELTLSDHMWDDGNSLGPKEIHSYLTRVMYNRRNKFDPLWNSLVLGGVKKGPKGDEKYLGMVNMIGTHFEENHVATGFGNHMAIPILRAEWRDDMTFEEAVKLGEKCLVVLLYRDRSSINKFQIAKITSEGSTIYPPYSLKTYWGFTHFENPAQGAVGSW

SEQ ID NO: 347375 - protein, 107 aa, Zea mays
  Clone ID: MRT4577_7996C.1.pep
PVATRPTTVPTEAASSWRWTCRAPLPGHGRPIHRSLTRPASGLLAAQPSGAARGRRYFCGGKEHRASRAGRPGRLKARRRARPESRRRGSRSRRTGRGGWCCWAPIR

SEQ ID NO: 347376 - protein, 263 aa, Zea mays
  Clone ID: MRT4577_79970C.1.pep
MDGFPKSVGGGGPNIPAGSHPAGGSQAAAGGGATQRTQYPYVTGNSVIALKYKDGVIMACDTGASYGSTLRYKSVERIKAVGKHSIIGASGEFSDFQEILRYLDELTLSDHMWDDGNSLGPKEIHSYLTRVMYNRRNKFDPLWNSLVLGGVKKGPKGDEKYLGMVNMIGTHFEENHVATGFGNHMAIPILRAEWRDDMTFEEAVKLVEKCLVVLLYRDRSSINKFQIAKITTEGSTIYPPYSLKTYWGFSHFENPAQGAVGSW

SEQ ID NO: 347377 - protein, 263 aa, Zea mays
  Clone ID: MRT4577_79971C.1.pep
MDGFSKTIGGGGPNVPAGSHPAGGSQAAAGGGATQRTQYPYVTGTSVIALKYKDGVIMACDTGASYGSTLRYKSVERIKAVGKHSIIGASGEFSDFQEILRYLDELTLSDHMWDDGNSLGPKEIHSYLTRVMYNRRNKFDPLWNSLVLGGVKKGPKGDEKYLGMVNMIGTHFEENHVATGFGNHMAIPILRAEWREDMTFEEAVKLVEKCLVVLLYRDRSSINKFQIAKITSEGSTIYPPYSLKTYWGFTHFENPAQGAVGSW

SEQ ID NO: 347378 - protein, 61 aa, Zea mays
  Clone ID: MRT4577_79972C.1.pep
PFDSPLFLSRAGSSTSLGGTSNSYVLEIAPSIPNWDAAQVGTIYMCIDKESTASFATIYID

SEQ ID NO: 347379 - protein, 259 aa, Zea mays
  Clone ID: MRT4577_79973C.1.pep
DPRAGRRYLLTPAAAIAAPFVRFSAGGGATQRTQYPYVTGTSVIALKYKDGVIMACDTGASYGSTLRYKSVERIKAVGKHSIIGASGEFSDFQEILRYLDELTLSDHMWDDGNSLGPKEIHSYLTRVMYNRRNKFDPLWNSLVLGGVKKGPKGDEKYLGMVNMIGTHFEENHVATGFANHLAIPILRAEWREDMTFEEAVKLVEKCLLVLLYRDRSSINKFQIAKIPTEGSTIYPPYSLKTYWGFSHFENPAQGAVGSW

SEQ ID NO: 347380 - protein, 74 aa, Zea mays
  Clone ID: MRT4577_79975C.1.pep
PLWPGAVRLRSLGPCRRSGLPIRSLRSQKIRCGARGRSFKKGGRRPEPVAEGQCVVGRFPSPAPRFRWSVSIKA

SEQ ID NO: 347381 - protein, 58 aa, Zea mays
  Clone ID: MRT4577_79976C.1.pep
PHRDPECVCRNKLEIHDDHKLPASFDRRISKEGSGDALGEEFNVYVLKIMGGCDKQGL

SEQ ID NO: 347382 - protein, 75 aa, Zea mays
  Clone ID: MRT4577_79977C.1.pep
GRQSLTSYDASYLCLLNQPSHSACNLPGLHLRLGYYDGREHVITSCVLECHNPECYCHNICDTCVWNINELHDNT

SEQ ID NO: 347383 - protein, 68 aa, Zea mays
  Clone ID: MRT4577_79978C.1.pep
NSALPRWLGPPSLVVSLSTNSSYQGTNLLHLFQELHLTRHHAILASLFPLPQPPLLSCIILDEIVMFN

SEQ ID NO: 347384 - protein, 428 aa, Zea mays
  unsure (1)..(428): unsure at all Xaa locations
  Clone ID: MRT4577_79979C.1.pep
VAVEEKGKGSFAYAWAMDESSDERERGITMTVAVAYFNSEKYRVVLLDSPGHKDFVPNMISGATQADAAILVVDASIGSFEAGMGVNGIGQTKEHSQLVRSFGVENLIPAVHKMDGVEYSKERFQSVKSQLGVFLRSCGYKDSSVTWVPLSAMANENLVTACSDTRLLSWYNGGCLLQAIDSLPPPRRDVSSPLRLPICDVIASHTLGQVAVCGKVESGGIRTGCKVLVMPSGDIATVKTMERDSSTCSLARAGDNVAVGLHGVDPGHIAAGGVLCHPDFPVRVACHLELKILVLEITVPILVGXGQWETARRIALFLFVWCDLLYLFVSMRIHYFQFELHIRHAKSSARLVRILSSLDQKTGRALKKAPRLLTARQAALVELRLDREACVEEFSTLKALARVFLRSQGSTVAVGVVTRVLDRALDMG

SEQ ID NO: 347385 - protein, 71 aa, Zea mays
  Clone ID: MRT4577_7997C.1.pep
SALQKFRCLASQSNAWYPVNAADRSCMCVERQVHPQRWISNLSKRFSMRERKNRWRPLYRIRAYGRVQVTS

SEQ ID NO: 347386 - protein, 75 aa, Zea mays
  Clone ID: MRT4577_79980C.1.pep
GHTDTQPATRHQANAPRRQPPPTPQGRVAGSKGATLSKTGTKSTGAPKPTEGASLGDDSHTSAYRVFNKSPPQRT

SEQ ID NO: 347387 - protein, 97 aa, Zea mays
  unsure (1)..(97): unsure at all Xaa locations
  Clone ID: MRT4577_79981C.1.pep
GGATRPDGRTLADYNXXNESTLHLVRGLICGMQGFFKTLTGKTITLEVESSDTIDNVKAKIHDKVGIPPNQHRLIFAVKQLKDGLTLADYNIQKEST

SEQ ID NO: 347388 - protein, 40 aa, Zea mays
  Clone ID: MRT4577_79982C.1.pep
KKKRKKKKKKKKKKKKKKKKKKKKKKKKKKKKFFFFGRPF

SEQ ID NO: 347389 - protein, 394 aa, Zea mays
  Clone ID: MRT4577_79983C.1.pep
MAPLLLLPLPLRPIPAENSISRLAPRPRFPRPFSRRRLRLPALLQVQCLAATGPAAPAPRWHAALSAAAGLYPAYVAAGASVAFTRPEAFRWFVALAPGSYTATLGFIMLAMGLTLQLSDFAALLRDRPLAILFGCAAQYTIMPVFGAIISHALGLPPSLSAGLILLGCCPGGTASNVVTLVAQGDVPLSVVMTVCSTLAAVFLTPLLTKILAGAYIPVDAVKLSLSTLQVVVAPILLGSLIQTAFPSVAQFLSPFAPLMAVLASSLLASSVFSENFVRLRSTIADASPVNGMFFGDVGTVIFSVFLLHFAGFFVGYAAAAIGGFKEKQRRAISIEVGMQNSSLGVVLATAHFSSPLVALPPAVSAVVMNMMGSTLGLVWQYTSTSVSENETSA

SEQ ID NO: 347390 - protein, 55 aa, Zea mays
  Clone ID: MRT4577_79984C.1.pep
AGVRPKSLTWTDNPETHQTPHAICLIPPLSMHRYQCNYAYKQEIPIGTFCWIGTT

SEQ ID NO: 347391 - protein, 104 aa, Zea mays
  unsure (1)..(104): unsure at all Xaa locations
  Clone ID: MRT4577_79985C.1.pep
MAAASTAASHSASFPAASLRHDARRPSCVAPAAAAATTAAETGLTAVPAPTPTPMLRVVPESLQRDSGCLVAGFRERGAGAADGEGFXDAVGEGGGPGAMECLT

SEQ ID NO: 347392 - protein, 41 aa, Zea mays
  Clone ID: MRT4577_79986C.1.pep
AEVTKDGPTHKHALLANTHALKLKITCCNKMGATTPKYSKA

SEQ ID NO: 347393 - protein, 61 aa, Zea mays
  Clone ID: MRT4577_79987C.1.pep
RAGSSSIDPSPHSLVPNQRTHPPSFISHIHIYPRRPWATPGSTSREGSRSERPRRMTTSRS

SEQ ID NO: 347394 - protein, 80 aa, Zea mays
  Clone ID: MRT4577_79988C.1.pep
RRCLNPLACSRTSNTNSETPDYLSRTKSNQPAKVTLHWQVGPPNPSPAHQSVRDHTKLQIRHACTHASISPHNSVRTSNF

SEQ ID NO: 347395 - protein, 118 aa, Zea mays
  Clone ID: MRT4577_79989C.1.pep
SNFIRSPFTIQSDDPPTAVMYGICDPNNGQPCSVSSPLTITASSAAQFMTITFRAMDMSSAATETTEMIVPPRPSDYLSRTLMTYTTAYDPSATNPSVAARIQTVYGPAFLTQISCSP

SEQ ID NO: 347396 - protein, 72 aa, Zea mays
  unsure (1)..(72): unsure at all Xaa locations
  Clone ID: MRT4577_7998C.1.pep
LGYLRPDPHVAGEQCGXRSFELDEDDXXXTGXGLTEPTQPLRRPLTLSSVRHANPSPVPRLFRPPQGILDAF

SEQ ID NO: 347397 - protein, 152 aa, Zea mays
  unsure (1)..(152): unsure at all Xaa locations
  Clone ID: MRT4577_79990C.1.pep
WCLSSLTRRGGGFDXXGQAXWKEDWTGLAAGRRRXERKSAVGGPLLKRRARRRPIITRQGPRRAERFFAKAQYIGDQVXPHPRQKRYSTQPVSXXRSPGLERAASGPPISPXXKVRTDCLAVVALDYWYSRVVGXDTLRRSADGVGPDPXXS

SEQ ID NO: 347398 - protein, 69 aa, Zea mays
  Clone ID: MRT4577_79991C.1.pep
ERPPFIKFAYYTCGIYTASGASINVSKPPHGCTMSLFAYRNTLVLPLPKVSCFLDRQGSLDHTLPRRFI

SEQ ID NO: 347399 - protein, 188 aa, Zea mays
  unsure (1)..(188): unsure at all Xaa locations
  Clone ID: MRT4577_79992C.1.pep
GSRAALPGATHAAERFPPAGTGATSREQQGPPAQKPDTDEDETTGHEGDKGPGQEKAGGGGDDAPRAESPSSGGRPRHQGARGGRGQKDPDGGDEAQSERGXXTLKGPSEQGSDTNGDDREKTXDHTGXNEPRGAPEEHPTPRTEAAANPKANREKRTQTRGETGNGPARXGARQAGPAXXAXGRTTG

SEQ ID NO: 347400 - protein, 41 aa, Zea mays
  Clone ID: MRT4577_79993C.1.pep
MAKILCIMSGHTPWFSELLLVIVHRPLHPRGCLNELDLIVI

SEQ ID NO: 347401 - protein, 41 aa, Zea mays
  Clone ID: MRT4577_79994C.1.pep
FPQGPLYPIILPGFNIPLFKKKLVSPKVPVPKFRVPPPVPA

SEQ ID NO: 347402 - protein, 78 aa, Zea mays
  Clone ID: MRT4577_79995C.1.pep
GKKPLFFLKKPPKKKGQNPCNLNHFHGFSSPQMCALKKPLFWLGVPSSKRYPLFSPLIKTPSPPTNLAPSPMYLNFSP

SEQ ID NO: 347403 - protein, 109 aa, Zea mays
  Clone ID: MRT4577_79996C.1.pep
KIYSSYEALSTPTSFFSCTRSDRHIVITPTNYITESGFSTLLPPRLFYARALRREQGQRTNLIDLKLTVAGNHLLHPMNTVHPAHGLDRHFVRCRYRTPACSTSVSSKL

SEQ ID NO: 347404 - protein, 74 aa, Zea mays
  Clone ID: MRT4577_79997C.1.pep
GRRAIFLASSGAHTPPPVYFFTARASFLCVHTFFSLSAPWGRLRVFPPTVPLRQNRWWAFGYLNMALSCLLVLA

SEQ ID NO: 347405 - protein, 59 aa, Zea mays
  Clone ID: MRT4577_79998C.1.pep
VVEAAVVGTVVVIYAFDTCVADAVMASCYILLWHMLQCLLLLLWWWQKLLHWQPFLLLL

SEQ ID NO: 347406 - protein, 61 aa, Zea mays
  Clone ID: MRT4577_79999C.1.pep
KKPATWPRLKRNTGRFLRRFRLPENAKTEQFPPPMKKGVFTVLVPKENPKNPKVKPFQISG

SEQ ID NO: 347407 - protein, 82 aa, Zea mays
  Clone ID: MRT4577_7999C.1.pep
SAITMNSLLSISPTPRKERSMASEQGIVITCHSTADFDAHMTNGHQHDELHVIDFTAGWYHPFSASAALLGQHPHEGTQVGI

SEQ ID NO: 347408 - protein, 208 aa, Zea mays
  Clone ID: MRT4577_799C.1.pep
MTAQAAEELAAQIEQQKLEEQKTEAEEVVVEEDDEDDEDDDDDDKDDDELDGQEGDGSGKSKQSRSEKKSRKAMLKLGMKPITGVSRVTVKKSKNMLFVISKPDVFKSPNSDTYVIFGEAKIEDLSSQLQTQAAEQFKAPDLSQMIPKPETSGLGLEDNEEEEVDETGVEAKDVELVMTQASVSRPRAVKALKASNGDIVTAIMELTT

SEQ ID NO: 347409 - protein, 70 aa, Zea mays
  Clone ID: MRT4577_79C.1.pep
KEKGGDIYSGVFFFFFGTLNITVLTPQKKKTTFWAPLRFAGQFFLYLGQKAFFFAGALWAGGVSLPRCFP

SEQ ID NO: 347410 - protein, 323 aa, Zea mays
  unsure (1)..(323): unsure at all Xaa locations
  Clone ID: MRT4577_7C.1.pep
MPPNAQDVHGSSGGLAMTAPAASKMDCFLTAVCTPLNLQFIDVSYRVKQTERSSKAAPGGRISHSGSGAAAPEERTILKGITGEARPGEVLAVLGPSGSGKSTLLSILGGRLAGHHGGTVLAGGRPPCRAVQRRTGFVAQDDVLHPHLTVRETLAFCAMLRLPRSAPAAAKAAAAEAVIGELGLGACADTIVGNAFVRGVSGGERKRVSIGHELLVNPSLLVLDEPTSGLDSTAAARLVATLSALARKGRSVVLSVHQPSSRVYRMFDSVLLLAEGSCLYFGAGRDAMDYFASVGFAPGFHVNPAXDFMLDLANGESSYYVRV

SEQ ID NO: 347411 - protein, 53 aa, Zea mays
  unsure (1)..(53): unsure at all Xaa locations
  Clone ID: MRT4577_80000C.1.pep
YGXFVYLVVRISLIQCLQLMVDCCKHDCAIIYLASYSRMMLRIRVRDPPIRGR

SEQ ID NO: 347412 - protein, 169 aa, Zea mays
  unsure (1)..(169): unsure at all Xaa locations
  Clone ID: MRT4577_80001C.1.pep
PYSKEELVAKYFYASNYGMMKVLAKMGISTLASYKGAQIFEALGLSSEVVGKCFEGTPSRIEGATFEMLARDALRLHELAFPSRALPAGSADAKALPNPGDYHWRKNGEIHLNDPLAMGKLQEAARVNSRAAYKEYSKRIQELNKACNLRGMLKFKHVSXKISLDEVEP

SEQ ID NO: 347413 - protein, 124 aa, Zea mays
  unsure (1)..(124): unsure at all Xaa locations
  Clone ID: MRT4577_80002C.1.pep
GRHTSNPRAQKNPTDTRHGARAHQAXAASATTTXTSGGSGSQPPPPGQQPPPEQXPPPEHQPPPAQXPPPDHRPPPDHRPPPDQEPPPEXPPPPPGHDPTQPPRAQPQPQAHPGPSQQPQPSPS

SEQ ID NO: 347414 - protein, 105 aa, Zea mays
  Clone ID: MRT4577_80003C.1.pep
PSIIPSSHPSVDDCAQILAVGGSLNSAQGPVPSLLAASDGIAHDEHLTCSLPPPSQIEDQWNSSIKLMIAIWKPRAMAIYYTQNDVTQDMTANTAVKPILRAKLT

SEQ ID NO: 347415 - protein, 66 aa, Zea mays
  Clone ID: MRT4577_80004C.1.pep
GALRPPHWEKKVWEKRVGLCQRCNSPSFETWQVESFWAVTFFVQKPLCSFWGGPFFFLKTPPILGF

SEQ ID NO: 347416 - protein, 98 aa, Zea mays
  Clone ID: MRT4577_80005C.1.pep
CISVPPVRQRESWGRFPASIYVLISTTTATTSTVAKQSEPCGGEPPQEVPRRVPYLRRRYRVIDGPLHRYLAQVMLKAALCAQVLPRRQACARTRSYR

SEQ ID NO: 347417 - protein, 244 aa, Zea mays
  Clone ID: MRT4577_80006C.1.pep
MAEQLVLRGTLEGHSGWVTSLATSLENPNMLLSGSRDKTLIIWNLTRDETSYGYPKRSLHGHSHIVSDCVISSDGAYALSSSWDKTLRLWELSTGVTTRRFVGHTNDVLSVSFSADNRQIVSGSRDRTIKLWNTLGDCKYTITDKGHTEWVSCVRFSPNPQNPVIVSAGWDKLVKVWELASCRIQTDHIGHTGYINTVTISPDGSLCASGGKDGTTMLWDLNESKHLYSLSAGDEIHALAFSPN

SEQ ID NO: 347418 - protein, 122 aa, Zea mays
  Clone ID: MRT4577_80007C.1.pep
LYQFEGYISGSTEGGAGGENFSQFGADLSRRMTYCHRAKDDSRESWGRFPASIYVLISTTTATTSTVAKQSEPCGGEPPQEVPRRVPYLRRRYRVIDGPLHRYLAQGATPPSLAPSLFLAPI

SEQ ID NO: 347419 - protein, 151 aa, Zea mays
  Clone ID: MRT4577_80008C.1.pep
SGFPGRPTRPVYCVCQIPGKRKSFEGGGDVCELCFTESGCKDRDFIVDSRKPLVQLGKNMPAQAERRSKRVLDKFLLNERHLFITTSSGGFQDVYLFFGIIDILQDYDITKKLEHAYKSFQVNPGCISAVDPKLYSRRFQDFSRRVFIREH

SEQ ID NO: 347420 - protein, 204 aa, Zea mays
  Clone ID: MRT4577_80009C.1.pep
MTGEKRMFSFYEKNDDPQRAITFGDGNQGCLEEEGIKHEFSSPYTPQQNGVVERKNRTLLDMATNGSQVKQVDLDELDNEEALCITLRNMSIGDVCPKESEEPTQARDQPSSSMQVSPPTQDEDQTQIDEDQENEPPQEEDIDQGGDDNEDKEDEQEIRYQRPPHPRVHQAIQRDHPVNSILGDIHNTTGNWLKNVGEKPSNLM

SEQ ID NO: 347421 - protein, 85 aa, Zea mays
  unsure (1)..(85): unsure at all Xaa locations
  Clone ID: MRT4577_8000C.1.pep
XFFFFFFFFRTFFFFFFFFFFFSFFFFYPSKFPPQLKKLEVYPKHHYYNWKGVKSHKRAQQGRGEKKPSWSKKKKWGKSHQLSKC

SEQ ID NO: 347422 - protein, 91 aa, Zea mays
  Clone ID: MRT4577_80010C.1.pep
LVTNDDDARDRKCSEGRRNTYHTTGKQAVASSRDRSASAHLSQLSAQVHACCLLGARHGCYLLLARQPLVECRMEMARCLDLEGNLRCVFI

SEQ ID NO: 347423 - protein, 98 aa, Zea mays
  Clone ID: MRT4577_80011C.1.pep
ENITEIASAAGRPMTRWQRTLMTSRSRRSMTSEQYPHTPARYMSKPYLGSHGQRVKLLTWCAGELDNCGTTSCPTRFTNRSSFLSLRESTCYLCRETA

SEQ ID NO: 347424 - protein, 237 aa, Zea mays
  Clone ID: MRT4577_80012C.1.pep
REQQGRSAMGWKQGHHGGCKGELDGVAGTAGMVLCCALLAAGRKAGHRPWATAASPARAWIRGCAAPWLEQRGGRAPCTGMDGGRAGHVTEVRRRSSTPWGGDSRGAGLEMGPRWIFFWAGSGETGSSASEQRGPADRACRAQMGAALRSSGWSRREGAQGEEPWTTLELKRHAMGGKAPAGSACSKGTQPRRLLPRAPREKERFGGWGASHGVEKSPCWRAASRGEWREMQGACVG

SEQ ID NO: 347425 - protein, 125 aa, Zea mays
  unsure (1)..(125): unsure at all Xaa locations
  Clone ID: MRT4577_80013C.1.pep
QVRSRSVPSRSALSRRPSPGSERCPFLRPSWSTSPLRFLEGRRGPKTRPLPKGEPPQXERTRIVPRHVLXAIRTQELGSVXVLARGVLPNINPVLLPKKTAEKASSGGSKEAKSPKKAAKSPKKA

SEQ ID NO: 347426 - protein, 71 aa, Zea mays
  Clone ID: MRT4577_80014C.1.pep
HQQLICAKRIIHTRYISRMVSTISNVPCVIFALIVLAKAFCQGLSKTESTVPAHIPYDTCSRKKITHAPLE

SEQ ID NO: 347427 - protein, 119 aa, Zea mays
  unsure (1)..(119): unsure at all Xaa locations
  Clone ID: MRT4577_80015C.1.pep
TTILYRLHMGEVLSTVPTVGFNVEKVQYKNVAFTVWDVGGQEKLRSLWKMYLSNSDALXGLLQIYVVDSLDRERIRDARQEFQDLRGTMSTDEVSEGLGLHDLRNRIWHIQGTCALRGE

SEQ ID NO: 347428 - protein, 80 aa, Zea mays
  unsure (1)..(80): unsure at all Xaa locations
  Clone ID: MRT4577_80016C.1.pep
DSPSVVRDCEGCSRVSHASLGGAFRIPXGGXXXYHLXXXELPXAYHGHHGRAXAPTCLSNPHSYVELXLGLXLCLEQFGL

SEQ ID NO: 347429 - protein, 194 aa, Zea mays
  Clone ID: MRT4577_80017C.1.pep
MGQALRRLFDSFFSTREMRVVMLGLDAAGKTTILYRLHMGEVLSTVPTVGFNVEKVQYKNVAFTVWDVGGQEKLRSLWKMYLSNSDALIYVVDSLDRERIRDARQEFQTIIKDPLMANSIILVFANKQDLRGTMSTDEVSEGLGLHDLRNRIWHIQGTCALRGEGLYDGLDWLASTLKQLQESGHATSVAGPSI

SEQ ID NO: 347430 - protein, 35 aa, Zea mays
  Clone ID: MRT4577_80018C.1.pep
WFKSVDQLPMNVGDKHYDPLFPLGYGLTTKGTKQY

SEQ ID NO: 347431 - protein, 46 aa, Zea mays
  Clone ID: MRT4577_80019C.1.pep
PKWWLVPRLRRSDEVDLLEGSNPMGGAPPNMGISSRVGKFCKPQKP

SEQ ID NO: 347432 - protein, 85 aa, Zea mays
  Clone ID: MRT4577_8001C.1.pep
VPLNIRCNPDNKMSRNVSKYVKKNLACVRVCPDGTVVCFWFLIFGCIDRSRMFSCVCGFPFFFFVKMCHATDTWFVFTLFLGSFF

SEQ ID NO: 347433 - protein, 67 aa, Zea mays
  Clone ID: MRT4577_80020C.1.pep
GSEPTSTLKSPLRSGSLTLSAPTVGSTLWTGETLSPQPSSWACDGAAGKHFILLTQIKSLRFFYFRT

SEQ ID NO: 347434 - protein, 96 aa, Zea mays
  Clone ID: MRT4577_80021C.1.pep
AVEMRARKGGYALEYSGGPVAGIIADETDDQRDAKRLSHFGSYDAALLSDYSRFAVGPLIVESGLAGELLPDKDLRYNVIGVEMLEKPSTKSAQRS

SEQ ID NO: 347435 - protein, 85 aa, Zea mays
  unsure (1)..(85): unsure at all Xaa locations
  Clone ID: MRT4577_80022C.1.pep
DGHPEILQACPNHQLRLLQPFXETSDSCAAEVQCRRRCRYRPAELKGVRAKRGRGWGQGDKSASCPSACSRRRSVAWEFRGGREP

SEQ ID NO: 347436 - protein, 213 aa, Zea mays
  Clone ID: MRT4577_80023C.1.pep
MRLSCNGCRVLRKGCSEDCSIRPCLQWIKSPEAQANATVFLAKFYGRAGLMNLINAGTDDSLRPGIFRSLLYEACGRIVNPIYGSVGLLWSNNWQMCQAAVEAVLSGKPIVQVSSEDAAADRTPPLKAYDIRHVSTSSAADGRLHKVAKPGRTRFKRASSASSHHNPSSDSNNKPKPQPQPRAPTAEEELDRQHRKRCRRARSSVLRATNPST

SEQ ID NO: 347437 - protein, 381 aa, Zea mays
  Clone ID: MRT4577_80024C.1.pep
MASSSKAPSSRRSVFDAVHIRSEFSAAGISAHFIPLIWKYVLQNPRCSDLDGVPSLPAAAYALLRQKFRPTTSTLTAAADSKDRTTTKLLICLQNGESVEAVVMRYDTRLGKYDGKPRPGGVRSTLCVSSQVGCKMGCRFCATGTMGFKSNLSSGEIVEQLVHASRYSQIRNVVFMGMGEPMNNYNALVEAIGVFTGSPFQLSPKRITVSTVGIIHGINKFNGDLPKVNLAVSLHAPDQDIRCQIMPAARAFPLGKLMNALQSYQNESKQTIFIEYIMLDGVNDQEEHAHQLGKLLETFKAVVNLIPFNPIGSSSNFKTSSDQNVKNFQKVLKGIYRIRTTIRQQMGQDIAGACGQLVVSLPDERSAGGATLLSDIEDLRI

SEQ ID NO: 347438 - protein, 35 aa, Zea mays
  Clone ID: MRT4577_80025C.1.pep
ARQFGYVILTTSAGIMDHEEARRKHVYKKIIGFFY

SEQ ID NO: 347439 - protein, 72 aa, Zea mays
  unsure (1)..(72): unsure at all Xaa locations
  Clone ID: MRT4577_80026C.1.pep
TDRGNDTLAIIDSEIAMTXXDLVNQLATIARSGTTDVMEELGAAADEYMIGQFDDCYTADRLSRDILAPETP

SEQ ID NO: 347440 - protein, 78 aa, Zea mays
  Clone ID: MRT4577_80027C.1.pep
DQEKDTHILANHTVPLRQQVTFLVLKHEQNRHNLRVKKATHIKYLQTKACRHTADPYKLMKTAKDLAAQNQHEWPLGC

SEQ ID NO: 347441 - protein, 110 aa, Zea mays
  unsure (1)..(110): unsure at all Xaa locations
  Clone ID: MRT4577_80028C.1.pep
PCSCFLSRCAPAGFWCPPSACMWRSCLFRSAFVLSSVPARSRPIVLCAAPLFFPSPSVVCCLLPPLFSFSPSSGGDLWSSFNRXAXRCVLRLGLLKDIGRVRPLSRMHPS

SEQ ID NO: 347442 - protein, 103 aa, Zea mays
  Clone ID: MRT4577_80029C.1.pep
RRVRQKARVSIDTTDSTGERLRRTGRLTNLHDKYEHRQEVPTLCKKNSTTYRSRRKHLKNLIYATDQARSYAIYNAEQQNQELDSNLHVFIKPMTQIQVTGSL

SEQ ID NO: 347443 - protein, 75 aa, Zea mays
  unsure (1)..(75): unsure at all Xaa locations
  Clone ID: MRT4577_8002C.1.pep
TKFKTLPSGLLDCQAAKPAQPLGGATRLAPLPCYRASSTISASGAGWVKKKDNLFGXSFLWPAFPRPXFLFPGGP

SEQ ID NO: 347444 - protein, 143 aa, Zea mays
  unsure (1)..(143): unsure at all Xaa locations
  Clone ID: MRT4577_80030C.1.pep
MSIESGGSSQAPISSQPEAESRHESINESEAIEIEDEECVEEDGXEVGSKRKLTSVXXWKEFKRVRWNGNIKAKCNYCFTKLGGETRAGTKHLLDHLKSCTLRKIKLAXTRIVQTSFEVSAXDAGTVSVEXYTFDQXIARRDL

SEQ ID NO: 347445 - protein, 73 aa, Zea mays
  Clone ID: MRT4577_80031C.1.pep
FIELVVRCSMRAGIDLINDSRYLFLTMTPHSCRRNQDTVGIPAARRGGTRWLPVSCSAWGGAPGYSFSYLRHY

SEQ ID NO: 347446 - protein, 58 aa, Zea mays
  Clone ID: MRT4577_80032C.1.pep
HRSSHTLYTHTYLLHHHVNDHPLYYILCYLHLNHFQSCSIRTFKFHLNKLRSFLDLPS

SEQ ID NO: 347447 - protein, 101 aa, Zea mays
  Clone ID: MRT4577_80033C.1.pep
LRVMEKANPKTGPTLRKELILSSNIGQHDLDTKTKQIQQWIKKKHLVQITIKKGKNVDVSENEMEEIFHQILQTMPGIATFSSRPQAVQGGKALMCVLRAL

SEQ ID NO: 347448 - protein, 144 aa, Zea mays
  unsure (1)..(144): unsure at all Xaa locations
  Clone ID: MRT4577_80034C.1.pep
AGXRVXVXAWALARXPPCWAXAXXFFPGRFLXPGRAAGVALSGRASRFVPFGAGRRXCAGAPFAXAPVGXXLAXLFSLFXWGXPPXXGRPGARVALSXPFGXPLPRPPXLSLVPXXPPPPPPSSWPAPFCFWGLLLPPPRWPAC

SEQ ID NO: 347449 - protein, 119 aa, Zea mays
  Clone ID: MRT4577_80035C.1.pep
VRPKGSSTYRASEGRTQAREAEGEAKQAASCSLLALCWSFALCWSRSVCRNSLPGDGQAHLQALLSGGFTTGARWAGTCAPTSWPASSAAARSPLPRQQSPPLFPASTSSTEMGDGPAR

SEQ ID NO: 347450 - protein, 63 aa, Zea mays
  Clone ID: MRT4577_80036C.1.pep
RTAPRSPPRGQPRQQNVYVRQSQRLLRHVFSVTLWLLTNGVCVWVCARQLVGVKQNRSQWMDK

SEQ ID NO: 347451 - protein, 64 aa, Zea mays
  Clone ID: MRT4577_80037C.1.pep
VRLSLMARTFKAVVVCSNEVLSIQVDTSHGVRYEPPVSLGFQVYPPFNLFHDVFLLNQQLLFRC

SEQ ID NO: 347452 - protein, 57 aa, Zea mays
  Clone ID: MRT4577_80038C.1.pep
AWLCFRHCYKVLQYLPFEITVAVGEVGFSLMLLVRACLSVYNSETELVPLIRVLYDS

SEQ ID NO: 347453 - protein, 33 aa, Zea mays
  Clone ID: MRT4577_80039C.1.pep
TSYPHKATNSTYKRIDQVSHRFALTSPKLATPV

SEQ ID NO: 347454 - protein, 187 aa, Zea mays
  unsure (1)..(187): unsure at all Xaa locations
  Clone ID: MRT4577_8003C.1.pep
LQGASAVGTPKRLTYDKIQRITYMEVKGTGTXNQSPTIXGSQESIPYKGGKYHMKKVCLEPTNFIGKEEGIFKNDAAEIHKTKLMTRLTXYTLNKIEGHTLDESDGTLKVEENDTLNYADNDGQLYAGERVQFLFSENQLVLTSKHESFGSPLLESSYRGFFLLRSRGCCFFNGYDNGGSLPYDSTR

SEQ ID NO: 347455 - protein, 41 aa, Zea mays
  Clone ID: MRT4577_80040C.1.pep
INYICALLITCDPYYQVPILLSLFLHCISFHIDRTLKLFMI

SEQ ID NO: 347456 - protein, 174 aa, Zea mays
  Clone ID: MRT4577_80041C.1.pep
MGGCCCCCCSARASDSDRAPVRIYHRQNPEEHAPLSSAFDGPSPTSAIVAVDTNLDTSSLDTYRAPPAPLPYDVCFTVSENPDVEKSGIKIKTDGQQSPKVDEFESCEKGAPEDKADEEEDVCPICLEEYDKENPRSVTKCEHHFHLCCILEWMERSETCPVCDQITLIDGMYE

SEQ ID NO: 347457 - protein, 126 aa, Zea mays
  unsure (1)..(126): unsure at all Xaa locations
  Clone ID: MRT4577_80042C.1.pep
PTSPPPLLKLHNPPXVKKKTPPPLKKEILLLVVXPLNPFKNPPPPGLGVFMGKXNPPPPPLFNTAVIKKKGSSPFPTIRASFFPPPKKKKKKKKKKKTKKKKKKKPPPPPPKKKKKKKKNAGQPGV

SEQ ID NO: 347458 - protein, 86 aa, Zea mays
  unsure (1)..(86): unsure at all Xaa locations
  Clone ID: MRT4577_80043C.1.pep
LHSLRALYEEASQHSSXLVLREDQVPVSQYLQDLDPLGPKLSSSSITIPLYRRKSRKIDAAYLALHGPCVPRKTRYQLTLQKVLPW

SEQ ID NO: 347459 - protein, 118 aa, Zea mays
  Clone ID: MRT4577_80044C.1.pep
GAPFSHDSHSSTFGDCCPSVLILMPDFSTSVLYLNQMPLQNSSSSSSHPLYLQNEMLTPGYPLAAVKNQSPVVHIPTKRNPVWETNRDSVDRLWTRERPPGLRPRVASRSAAWWLLFR

SEQ ID NO: 347460 - protein, 36 aa, Zea mays
  Clone ID: MRT4577_80045C.1.pep
RGSLLVRAWPWSRDGVMGNGLISGLGAWGHVGRNEA

SEQ ID NO: 347461 - protein, 174 aa, Zea mays
  Clone ID: MRT4577_80046C.1.pep
MGGCCCCCCSARASDSDRAPVRIYHRQNPEEHAPLSSAFDGPSPTSAIVAVDTNLDTPSLDTYRAPPAPLPYDVCFTVSENPDVEKSGIKIKTDGQQSPKVDEFESCEKGAPEDKADEEEDVCPICLEEYDKENPRSVTKCEHHFHLCCILEWMERSETCPVCDQITLIDGMYE

SEQ ID NO: 347462 - protein, 120 aa, Zea mays
  Clone ID: MRT4577_80048C.1.pep
RRLRAHRRERGVVFVPTTSLPWAAPAAMTAAAGARCALCNGGPTDCCRPGWPLALAEGDARLVVHVAYRCRQALSWRRNRAMATMGNKSVGELTEAVLEGKRVFERADHNVPLDENHNVI

SEQ ID NO: 347463 - protein, 128 aa, Zea mays
  Clone ID: MRT4577_80049C.1.pep
TSRRIAGVSFYRCSLSMRMDESHEPSNRACEVALVDAHRYGYCLLTQTRIPQVPRHRGAAERAPARLSFRQSRQGPATEHRRRSGRDGDTAPSSCHHCCRGNHGGCQPPCHLSSPLRRSSSSGRLSGV

SEQ ID NO: 347464 - protein, 77 aa, Zea mays
  Clone ID: MRT4577_8004C.1.pep
SLVGVRPFFFNFFFLFFIIYNCFWGLFALITVYVTHHKKEGDPFYINHYPLTRLLTPHKVLHIPIFRCPPILKFNMI

SEQ ID NO: 347465 - protein, 176 aa, Zea mays
  Clone ID: MRT4577_80050C.1.pep
KKKKKKKKKKKKKKPHPQIPRFTDASISVCCVALPCPAIISYVSPAERERGKGLVAPKFATLGLAVLLGATGGAPPAAGRAAMSCSTGYSTLMPGLPFVQMGGALPPQPGCGGIRSLLKKANNTPDRRTIWGCLKNVANGANGRGTYFSRAAALPRKGGVPLPYKISTNVNCNTIN

SEQ ID NO: 347466 - protein, 76 aa, Zea mays
  Clone ID: MRT4577_80051C.1.pep
TALLPSSTEAILSLLSSTGGLATGGGAFGPVMLLACNSWKLIIYLVTLALITTKTSLTCYDTHALPTLRCILGMTL

SEQ ID NO: 347467 - protein, 727 aa, Zea mays
  Clone ID: MRT4577_80052C.1.pep
VISRLARDPTTRRIWFGIAAPNVFESHDDITEERLYQNIFASHFGQLAIIFLWTSGNLFHVAWQGNFESWIQDPLHVRPIAHAIWDPHFGQPAVEAFTRGGAAGPVNIAYSGVYQWWYTIGLRTNEDLYTGALFLLFLSTLSLIGGWLHLQPKWKPSLSWFKNAESRLNHHLSGLFGVSSLAWTGHLVHVAIPGSRGEYVRWNNFLDVLPYPQGLGPLLTGQWNLYAQNPDSSNHLFGTTQGAGTAILTLLGGFHPQTQSLWLTDIAHHHLAIAFIFLIAGHMYRTNFGIGHSIKDLLEAHTPPGGRLGRGHKGLYDTINNSIHFQLGLALASLGVITSLVAQHMYSLPAYAFIAQDFTTQAALYTHHQYIAGFIMTGAFAHGAIFFIRDYNPEQNEDNVLARMLDHKEAIISHLSWASLFLGFHTLGLYVHNDVMLAFGTPEKQILIEPIFAQWIQSAHGKTTYGFDILLSSTNGPAFNAGRNIWLPGWLNAVNENSNSLFLTIGPGDFLVHHAIALGLHTTTLILVKGALDARGSKLMPDKKDFGYSFPCDGPGRGGTCDISAWDAFYLAVFWMLNTIGWVTFYWHWKHITLWQGNVSQFNESSTYLMGWLRDYLWLNSSQLINGYNPFGMNSLSVWAWMFLFGHLVWATGFMFLISWRGYWQELIETLAWAHERTPLANLIRWRDKPVALSIVQARLVGLAHFSVGYIFTYAAFLIASTSGKFG

SEQ ID NO: 347468 - protein, 105 aa, Zea mays
  unsure (1)..(105): unsure at all Xaa locations
  Clone ID: MRT4577_80053C.1.pep
NFGTRSSVEGACTGLIIKTAAVPTARTATYQTIILITGARGGTRYDQWQQPARQVLTLQHPFWFDGGTLFFFYLXHXXQRRGQRLCRLHHPGQXNXITITSGYGP

SEQ ID NO: 347469 - protein, 83 aa, Zea mays
  Clone ID: MRT4577_80054C.1.pep
NGRFFFFFFDGGFFFFFFFFFFFFFFFLKGNACTHCIRGKGVLQYINRKNIDSIQEPERTLNSLYICKALQIMQMEKSRTRGR

SEQ ID NO: 347470 - protein, 95 aa, Zea mays
  Clone ID: MRT4577_80055C.1.pep
NGCAPSGQPWGVSKLAYGEPFGVGFFPKFFGFAGAMNFLVFGGGGFHQFPPPPPWAGFWAPCLFPCLYIKKNGGAHVFCWGFCPPEKVLTGGLLL

SEQ ID NO: 347471 - protein, 140 aa, Zea mays
  Clone ID: MRT4577_80056C.1.pep
VGNNLLELIYALGLSFIRSKRTDKVHWIWENSGLLGAHDTPSTLRLTDYGSTLNGGMAARRIKCGVQQGEVRILVFDADCCATSGHQNSCMEQQLLFHRLSDHFGRSNHPVLHQSHLCHGIYDCSALDQSSALCWTALEL

SEQ ID NO: 347472 - protein, 137 aa, Zea mays
  Clone ID: MRT4577_80057C.1.pep
LFGEFFPLFPGPPLRFPGFIMGRFVPIEGPIGPPGQMRGAPPPYTSGGRWLPPTMFPPSTYLGAGGTLWCLFPRCLMLPVETKPLPVPACQWFVEIMGETFPRVISWNFFLSSPFSVASPSYVWIYDPFPGVKKPGS

SEQ ID NO: 347473 - protein, 124 aa, Zea mays
  unsure (1)..(124): unsure at all Xaa locations
  Clone ID: MRT4577_80058C.1.pep
GGEEVLFGLGFEDQKGGGGGALLLAPRGGQKIQRPHPPPVSQFGGAIGVYPPPSQKERYLCPPGGKQFFFWKGRGHASWQTILFVWLVAKKEKVFFVAYFEKSLVLKKREGCGVAKKKLFFFXA

SEQ ID NO: 347474 - protein, 55 aa, Zea mays
  Clone ID: MRT4577_80059C.1.pep
SLFLIGPLLPVEGRSVGSHVINLFVSVAPLPPCVLCPFRLDRSIPFFPGCRGENK

SEQ ID NO: 347475 - protein, 53 aa, Zea mays
  Clone ID: MRT4577_8005C.1.pep
NSNHVLQGSPLPSSLRNDIPQETGSSCWRPSRFGSAMGNIPLIIIDQELQFLL

SEQ ID NO: 347476 - protein, 75 aa, Zea mays
  Clone ID: MRT4577_80060C.1.pep
FMTIMMTFLSLSLDRHFTGPFKRKWSPHYYATCLLALNHSITRDLLRTLTYLICPCGTWCCHDRYFCMASSWDYT

SEQ ID NO: 347477 - protein, 71 aa, Zea mays
  Clone ID: MRT4577_80061C.1.pep
QVVPWSWTPGHVLRSRVEAAKMAPFCPHMKDFHSFCYQFKTYSFSLIGAKQKCISKRTKKKKACTCPGARY

SEQ ID NO: 347478 - protein, 98 aa, Zea mays
  Clone ID: MRT4577_80062C.1.pep
AYCPIIYRQNITCQTGRRHKPTGSNNRHERHLKSQIKRKKKRKSRNNRHTGHESNNISDLKSQTKQQISSELALTTLSISLQLLTRSMPSSTCFNSPA

SEQ ID NO: 347479 - protein, 137 aa, Zea mays
  unsure (1)..(137): unsure at all Xaa locations
  Clone ID: MRT4577_80063C.1.pep
SINYANYIILLVKKKKKKKKKKKKKKKKKKKKKKKKKKKKKKKKKKKKKKKKKKKKKKKKKRGALFKKKKNNPPAPQKKNFFNRGPKKKKPARXKKRGREKTRGYPKKKPLKKNPFFKRGKKEKRPPPNPFPKSGPT

SEQ ID NO: 347480 - protein, 37 aa, Zea mays
  Clone ID: MRT4577_80064C.1.pep
IAKSGTVFALGHCAKLGVQEPVRKRGEQDYRKTYVGS

SEQ ID NO: 347481 - protein, 238 aa, Zea mays
  Clone ID: MRT4577_80065C.1.pep
HGNAQTNEPDVLSSGSGRGTVAEEKNSSTSNDCAHECTLPLLSKRILAAKNKEPKLGRARKFLSSVCETVDLKKLLAPSTIAVIVGFIIGGTPLIRNAIIGDSAPLRVLQESTELIGGGAIPSVTLIMGANLLNGVRSGARVPPSVIAGVVAVRYILLPLLGTALVKGAVRLGLIQPDPLYQFILHLQYAVPPAMNIGTIMQLFGVGESECSVIFVWVYALASVAVTVWSAFFMWTLS

SEQ ID NO: 347482 - protein, 128 aa, Zea mays
  Clone ID: MRT4577_80066C.1.pep
HASGAPLPGTGRWDESERVVAWIRPPTPYVPSPSSGWRQPLPQPTPASRTPTRSVLSPSARPLRSSTVFVALGRTRDALRFAILDTPGAGLGVATCRWGVLVDSLARLPSDARPISHQSFNSVVCRTV

SEQ ID NO: 347483 - protein, 97 aa, Zea mays
  Clone ID: MRT4577_80067C.1.pep
SSQNALFFPARTRAFANIDTPTVAGTRPLTISIPLEETVTGIRQEFWALGIVLGLCSRTKISLAQWDGNGVSVSLLIEVPLAVITSDRQEKEDKRKG

SEQ ID NO: 347484 - protein, 116 aa, Zea mays
  Clone ID: MRT4577_80068C.1.pep
LPDYLRDNEFIHAHYRCEWSVRDALRSAFAWHNETLNVWSHLGGFFLFLYLAVAEPTGTVAGAGAGVGAGAAPSIVTFVLASANTSWSSWEASSNSSLTASKGLMAVFGSSDGDAH

SEQ ID NO: 347485 - protein, 113 aa, Zea mays
  unsure (1)..(113): unsure at all Xaa locations
  Clone ID: MRT4577_80069C.1.pep
PALAASANGSPKLSSSLFPRENGPPPPPLPRGPXPRPGPRALPGDGGPPPGPVPGPGPGGKGGRGXSGTSAPGPPRRGWGAPGLTSPPTCPRPPKWSCSVGNSNSTKKGLCGK

SEQ ID NO: 347486 - protein, 91 aa, Zea mays
  Clone ID: MRT4577_8006C.1.pep
KQVPPLSVLSFGTDSHCRSFYQILMLSHEDCKKKNLSSLFVFLFSTLACLKGPCHWSSLIGVPVLTFCLALFIAKPLSPRGATPSAYDPLS

SEQ ID NO: 347487 - protein, 105 aa, Zea mays
  unsure (1)..(105): unsure at all Xaa locations
  Clone ID: MRT4577_80070C.1.pep
SQGCFFGVMWVIKLISSELNFGVNIVEICIGILLDRKPPPLIASCPFFFFYSSSIHNGWVRMFEASLDRITYVECYPVXWYDICYRSARRPVGVITSPLHVRLHP

SEQ ID NO: 347488 - protein, 140 aa, Zea mays
  Clone ID: MRT4577_80071C.1.pep
GPGLAGRGPRPRPQDPERLSVRASTTRWVTALAALVPPPSYYTCEAFIATRIRDNYHPVRTLRWRRLGPRLTRPRGVSPVPSRTRLLSGSPARLPSRSLQLASGKIGAASSAFVPMLPQAFRQPALWLMERKCRGSTMML

SEQ ID NO: 347489 - protein, 52 aa, Zea mays
  Clone ID: MRT4577_80072C.1.pep
MSTEEAVVAEVPVTEVPAEVPAAHVADAPNAKKASKENNAPKDNKPSAAKKP

SEQ ID NO: 347490 - protein, 78 aa, Zea mays
  Clone ID: MRT4577_80073C.1.pep
CILGTENYIHGVVHIAGGFAWGTGLVCCLGAMDSSIYRLCINALRFMETFQFSMMDIGLHFCKGGPNKKGFTKPEVYK

SEQ ID NO: 347491 - protein, 246 aa, Zea mays
  unsure (1)..(246): unsure at all Xaa locations
  Clone ID: MRT4577_80074C.1.pep
MDATANSDVQRAEEFKLKANDAFKANKFSQAIELYSQAIELNSSNAVYWANRAFAHTKLEEYGSAVQDATKAIEIDSRYSKGYYRRGAAYLAMGKFKEALKDFQQVKKICPNDPDATRKLKECEKAVQKIRFEEAISAGDDERRSVADSIDYHIIEVEPHYAGPRIDGEEITIEFVKAMLDEFKKQKCIHKRYAYQIVLKTLDLLRSMPSLVDVXVPNGGHFTVCGDVHGQYFDLLNIFDPHXLPS

SEQ ID NO: 347492 - protein, 483 aa, Zea mays
  Clone ID: MRT4577_80075C.1.pep
MDATANSDVQRAEEFKLKANDAFKANKFSQAIELYSQAIELNSSNAVYWANRAFAHTKLEEYGSAVQDATKAIEIDSRYSKGYYRRGAAYLAMGKFKEALKDFQQVKKICPNDPDATRKLKECEKAVQKIRFEEAISAGDDERRSVADSIDYHIIEVEPHYAGPRIDGEEITIEFVKAMLDEFKKQKCIHKRYAYQIVLKTLDLLRSMPSLVDVDVPNGGHFTVCGDVHGQYFDLLNIFDLNGLPSEENPYLFNGDFVDRGSFSVEVILTLFAFKCLYPKAMYLARGNHESKSMNKIYGFEGEVRSKLGEKFVELFAEVFCWLPLAHVINNKVFVVHGGLFSVDGVKLSDIRSIDRFCEPPEEGLMCELLWSDPQPQLGRGPSKRGVALSFGADVTKKFLQENNLDLIVRSHEVKDEGHEIEHDGKLITVFSAPNYCDQMGNKGAFIRFTAPEMKPDIVTFSAVPHPDVKPMAYANNFLRMFQ

SEQ ID NO: 347493 - protein, 247 aa, Zea mays
  Clone ID: MRT4577_80076C.1.pep
MASSRTAAMLVLVAAVLCPAALSKPSAAFISMPTDHVGGRIPPVSPADGLAFDFHADSCPQLQDVVRSAMETALHSEIALAAGLLRIFFHDCFPQGCDASVLLTGDGSELQLPPNLTLQPRALQLIESIRAQVHAACGPVVSCADITALATRDAVAFSGGQGYDVPLGRLDSLAPAPSSAVFDLPQASSNASTLIDVFDTRNLDNVDLVALSGGHTIGKGHCSSFSNRFSEDSDFVRSLASNCLSDF

SEQ ID NO: 347494 - protein, 39 aa, Zea mays
  Clone ID: MRT4577_80077C.1.pep
AGVSRPAVFLVTAGYYKISYNVLHFKKIPERTFALLVTY

SEQ ID NO: 347495 - protein, 257 aa, Zea mays
  unsure (1)..(257): unsure at all Xaa locations
  Clone ID: MRT4577_80078C.1.pep
MEHYDSYLCSGSMHSYGGVGGATDAALDAGGDDMQRLLNALMDDMAAESDSFSDDMEAASSESSSSACSANSQQEATRRPQQQPDGGHSNGSNKSSKKQHQQQPPAPYIGVRKRPWGKFAAEIRDSTRKGARVWLGTFDSPEAAAMAYDQAAFSVRGAAAVLNFPVERVQESLRALALSSASSAAGSPVLALKCRHSIRKRSPNKNKXRRSRSGSNRXVAAAAPQQPPCPTSVVELEDLGADYLDELLRVSSEFHWQ

SEQ ID NO: 347496 - protein, 100 aa, Zea mays
  Clone ID: MRT4577_80079C.1.pep
PRVRSNPSSDCPYKEPTMLPEHKSDVPATSLEGHEASEVQFLQSDTAVELSPSEHSEYKVQHVVGSAEDTISKQVNCEQPLDQTTLSIHLRPFEVEISQG

SEQ ID NO: 347497 - protein, 121 aa, Zea mays
  unsure (1)..(121): unsure at all Xaa locations
  Clone ID: MRT4577_8007C.1.pep
YYKRHLDSVFCIALRSGKEDFLSWALGRTILLWHHRSXKPHGLLHAHRMPTLSYDAHGMVFAVSYGSRINIVDILKFXEXPFATFSVCTYDSEAHVVHFQXDCRLILLTTKSSPVHVLDSF

SEQ ID NO: 347498 - protein, 84 aa, Zea mays
  Clone ID: MRT4577_80080C.1.pep
MGAEEAEGTPPPLPATGEPATTARAQPISAAQFLSWKQRKDAEVAARKAEAAEKRADDIASGAAQMNGRELFQHEPWVFDNNIY

SEQ ID NO: 347499 - protein, 98 aa, Zea mays
  Clone ID: MRT4577_80081C.1.pep
IIGVHRLLQLLKGQQSSQAITRSQATATTANPFFCSFFSGVFLFLEVLFFLGTSSVNSSTSWLYSHVSICLRARSVLGDWPPRTIPSRITYLIYIMFD

SEQ ID NO: 347500 - protein, 66 aa, Zea mays
  unsure (1)..(66): unsure at all Xaa locations
  Clone ID: MRT4577_80082C.1.pep
MSRQTYIYEQFMXRARVTHLTSAAIADQDGTVWAQSTAFPQFKIEEMTIIMKDFDDPATAGXTGLF

SEQ ID NO: 347501 - protein, 45 aa, Zea mays
  Clone ID: MRT4577_80083C.1.pep
EEYGGDMIKAWCIAIRYYIGICGDFGVVKCLVDLCGRNGLSNLGR

SEQ ID NO: 347502 - protein, 54 aa, Zea mays
  Clone ID: MRT4577_80084C.1.pep
MGSTAGYVAAVVDEEACMYAMQVASSSILGMTLNNAIELGVVEVVQNEAGSGKA

SEQ ID NO: 347503 - protein, 72 aa, Zea mays
  Clone ID: MRT4577_80085C.1.pep
TGGRPLPLRVGTTTLMTSHPTNHDYFLAVTIPKQVSTGSFANTVRFRAMHRLLNRKSLPYNKILILFHVPHS

SEQ ID NO: 347504 - protein, 80 aa, Zea mays
  Clone ID: MRT4577_80086C.1.pep
TSAASRSSIFIGLIIVFVLLFIVTSSGGISIIITVSSDASHLSSSRQALYHVVHVAAFFGALCYNNLVHPPPIGCNHNQV

SEQ ID NO: 347505 - protein, 388 aa, Zea mays
  unsure (1)..(388): unsure at all Xaa locations
  Clone ID: MRT4577_80087C.1.pep
MAKLGPGQGLGCEAAEGSLVPSRKREYKPCGKHTEGKRPLYAIGFNFMDARYYDVFATVGGNRVTTYRCLENGSFALLQAYVDEDKDESFYTLSWARDHVDGSPLLVAAGSNGIIRVINCATEKLAKSFVGHGDSINEIRTQPLKPSLIISASKDESVRLWNVHTGICILIFAGAGGHRNEVLSVDFHPSDIERFASCGMDNTVKIWSMKEFWLYVDKSYSWTDLPSKFPTKYVQFPVLIAAVHSNYVDCTRWLGDFILSKXNEGRFYLQSVDNEIVLWEPKTKEQSPGEGSIDILQKYPVPECDIWFIKFSCDFHFNQLAIGNREGKIYVWEVQSSPPVLIARLYNQQCKSPIRQTAVSFDGSTILGAGEDGTIWRWDEVDHPSSRN

SEQ ID NO: 347506 - protein, 42 aa, Zea mays
  Clone ID: MRT4577_80088C.1.pep
DEFRTFGVLRSVWVARKPPGFAFIDFDDKRDAEDAIRDLDGM

SEQ ID NO: 347507 - protein, 57 aa, Zea mays
  Clone ID: MRT4577_80089C.1.pep
EWAGMLEISAVTPGSRLARYSSLDMEKVRVEELPRVWDSPLRHGEIKRRWVTKGSSY

SEQ ID NO: 347508 - protein, 39 aa, Zea mays
  unsure (1)..(39): unsure at all Xaa locations
  Clone ID: MRT4577_8008C.1.pep
LKEQQRAILVIDAHLPYDAAPSXPRLMCYEERERACSRI

SEQ ID NO: 347509 - protein, 132 aa, Zea mays
  Clone ID: MRT4577_80090C.1.pep
QRPDNHGQGSGRTNCCFAHHARRIPMLRSCTTGLYYYSCPGVNGADKQGMQRPITRQKRGGTSIATPFLEGMLRPGLRRKRAAGRHAQLPWNRIRTTLTTAPLGDSRISKPESATDEKLGPGVWYCSDILGI

SEQ ID NO: 347510 - protein, 128 aa, Zea mays
  Clone ID: MRT4577_80091C.1.pep
MDRLPESTRSMRKYASDAGGLRAARQSPGWRRAERTTHSMSTTAPRTKTKSDASLLRRVPFKPIRPSLTNLQEALLETKLAELFPAVPLAIAVQSAHFDQAGVLTLSLLGLIHLAEQVSYLTEQSETY

SEQ ID NO: 347511 - protein, 253 aa, Zea mays
  Clone ID: MRT4577_80092C.1.pep
IRLEYSPRGSLVRFQRKKLLILDLNGLLADINQDYHNAHLAHAKVRTKLVFRRPYCDDFLRFCFQNFELGIWSSRKRENVESVVDILMRGLKQCLLFCWDMSYCTVTGCKTIDNKDKPLVLKELKRVWNKDEPDLPWGQGEFSPSNTLLVDDSPYKALCNPPNTAIFPEPYNYMNQRDDYSLGPGGDLRVYLQRIAAADNVQNFVRDNPFGQKSITESDPNWNFYVKIVDKMEKQIVDQVETKIVDEVERSLG

SEQ ID NO: 347512 - protein, 62 aa, Zea mays
  Clone ID: MRT4577_80093C.1.pep
RQGLSPHVFTFSISYSECIMCAGPFSPLQLVLCRTFIEEAIGLFGLYLTQEYSLCVKPLVMQ

SEQ ID NO: 347513 - protein, 71 aa, Zea mays
  Clone ID: MRT4577_80094C.1.pep
RNLRMGDRLRSLLGRGVINGIRTVPRGFTDVCGLRIQVYVAWRMWAQRRFRLRVDRRGRRSSKGVDCHILA

SEQ ID NO: 347514 - protein, 80 aa, Zea mays
  Clone ID: MRT4577_80095C.1.pep
ARAGRARLSTRVRCPPVSGNRPLSHQGLEGGPWGPNHPRMGRPLGTPWAWRGSLNLAPPLPQLVARVVCVGWVMFGVSNG

SEQ ID NO: 347515 - protein, 86 aa, Zea mays
  Clone ID: MRT4577_80096C.1.pep
ILSNRPRRYLIGLPGRYMITVDGLKQRRHGFGNFLCEQGTNTSKSPQKGYNTGQGMLLTISKGITFGPLGHTNGEILRTKWGRGAH

SEQ ID NO: 347516 - protein, 71 aa, Zea mays
  Clone ID: MRT4577_80097C.1.pep
PIIDIGIILFKIKFFAVIRIIKQASHDLFSNHSNLGLLCSIIVLHMGEFITLSLSAISKSLKLTMNKELSK

SEQ ID NO: 347517 - protein, 129 aa, Zea mays
  Clone ID: MRT4577_80098C.1.pep
LGPSRAGRDQTHFPHSIPSRPLILQVPPDPVRPRTTSHVTIPPLPPYWSSSRIDKRVSTTRRWSPTRSAQLLLRYLLVFPDPYGLRDEHREYHRDHEPGGRRLRSKQRQEDATVLTSLSMKHWRRSSTT

SEQ ID NO: 347518 - protein, 77 aa, Zea mays
  Clone ID: MRT4577_80099C.1.pep
MGCDDKGGCAVPCPGGKDWRCTSGSGGQREDTTCGWGEDCEGRPCTCGRATMPSGRENRRANWSWGAAWNWGSWASG

SEQ ID NO: 347519 - protein, 28 aa, Zea mays
  Clone ID: MRT4577_8009C.1.pep
CHHGILGVYLQRVSAASTSSHECWLRDL

SEQ ID NO: 347520 - protein, 155 aa, Zea mays
  unsure (1)..(155): unsure at all Xaa locations
  Clone ID: MRT4577_800C.1.pep
GGGIRPRTLGTHAGASQEPKEPAQGGATKRTPPEPPRKGGRRSEEPARRRRRPRPEHQRRRQGRGRDQRTRSPRGRRRERXPEPGPRAPTEPXRQARTDSPTQTKGRQGTKQGQQNKGATRAKLKGRGDTPKRRTPDKRQKRATDRPGQGKGDTR

SEQ ID NO: 347521 - protein, 63 aa, Zea mays
  Clone ID: MRT4577_80100C.1.pep
IRLEGSSIANFLKRGAQHDGPGSRMESPEDIRRCRRNHPMDPCGAPVVRALRPNRGQLRHLRT

SEQ ID NO: 347522 - protein, 45 aa, Zea mays
  Clone ID: MRT4577_80101C.1.pep
HGIALLRMKISSVVIKRDVCRFYNPVNVGISPPDEVDGRVGVKMG

SEQ ID NO: 347523 - protein, 133 aa, Zea mays
  unsure (1)..(133): unsure at all Xaa locations
  Clone ID: MRT4577_80102C.1.pep
QTDKTNRLGTWQCEYVCFGGKSTLIESCLSIIPMYTMGVYHLHEGNFQMLDSIRSRFFWHGTSXERRCHMXRWEALNRPKESXACLLVKWIDKLXEGNDRLCWNLLRRKYLGNQNIFKTKLGXGSQFWRSLLD

SEQ ID NO: 347524 - protein, 57 aa, Zea mays
  Clone ID: MRT4577_80103C.1.pep
IISTKLFCHCSLVFLFVSCLLRMISGSTVLNKKLDQREGCPLILVLSSLCQPSNLDG

SEQ ID NO: 347525 - protein, 215 aa, Zea mays
  Clone ID: MRT4577_80104C.1.pep
SAHAALLCSPSPPPQLASPSPGNATARQSMPRPEPALGFPARASKPPPQRRRKRQPPTRRRRPAGAAPVGPRGAADPDPAHSSALLPLPSGGSGFASRGTVAPDEEDGRDGASSAESEEVAEATNHSFSHSVRECQKQRRLKSERSALARPTALHELNSAGGVELLVLSPRCLIGNPGGMSKSSTTSSRSRSGTGTFPSPGTPNYNRHCAGSMQY

SEQ ID NO: 347526 - protein, 81 aa, Zea mays
  unsure (1)..(81): unsure at all Xaa locations
  Clone ID: MRT4577_80105C.1.pep
PSLSDACTICLEAYCYRYPSKMTTXCYEYHLQCILXMXQKSCQCPTMCKAERMKDHSSYELREALQEERNYSQDDDARTTT

SEQ ID NO: 347527 - protein, 102 aa, Zea mays
  unsure (1)..(102): unsure at all Xaa locations
  Clone ID: MRT4577_80106C.1.pep
GAASREAGRRRKAKEEPTKKAAXTGTPGKGSRXADEPTGTRGKSPPSNNGENAEENRRARREHQNSGPGXXQDSSGEQXGEETQDQKTKDGKGAGEDXKEGG

SEQ ID NO: 347528 - protein, 99 aa, Zea mays
  Clone ID: MRT4577_80107C.1.pep
PLPLVPTAQGTFHPTLWRVICTWPACDLYSGRVAVVTGGNKGIGLEVCRQLASNGITVVLTARDEKRGAAAVEELADAGLSGVVFHQLEVTDAQSIAPA

SEQ ID NO: 347529 - protein, 103 aa, Zea mays
  unsure (1)..(103): unsure at all Xaa locations
  Clone ID: MRT4577_80108C.1.pep
MAGTRGLYCCFLAVLLERVGDDTVLXEADVAEFVLRHGAAVLRKHGRPGVKMLNPEPQPKSKTEPHMLALTQPEPKPLSMPHAETEAEPEPKPNHEPXPMPKP

SEQ ID NO: 347530 - protein, 362 aa, Zea mays
  unsure (1)..(362): unsure at all Xaa locations
  Clone ID: MRT4577_80109C.1.pep
MASAAGAALCPCSFSTVLSSSPSTPFRRARTTPRPSLRPLPRRARLPLRPGHSRVGSCLQVLRCLPKCDSGKPDGGGDAGLSGRKAARPAGQGGPRRPAQFGASSCGLAFTTVGGVIMLQASQQALAATQFAGLQPADVLGGLGDVSTGFASAFLLIFFSELGDRTFFIAALLAARSSGAVIFLGTFGALAVMTIISVVLGRAFHYVDGIIPFSFGGTDFPVDDIAAACLLVYYGVTTLLDAASGDDEKINEEQEEAELAVXHVGGNVAGVMSAAGTIASTFVLVFVAEWGDKSFFSTIALAAASSPLGVIAGSLAGHAIATLIAVLGGSLLGTFLSEKIIAYIGGSLFLAFAAITIVEIVT

SEQ ID NO: 347531 - protein, 68 aa, Zea mays
  Clone ID: MRT4577_8010C.1.pep
RRGPKNKRTTKTRGRCRPHLILSYFDIEPNRQVAILFSRHTMGPSAVTIAAINFLNGTWVNYNQSTQR

SEQ ID NO: 347532 - protein, 417 aa, Zea mays
  Clone ID: MRT4577_80110C.1.pep
MAQLKAARATDVPPAMPDPDPDVVAADLGACVRHGRVDGLAAGSGRAEATATATTTAAAADQGRRRPPLVVVGHRGKGMNALASPDPRLRGDIRENTLRAFNAAAASHPAVAYVEFDVQVTRDGCPVIFHDNFIYTQQDGQVSAKRVTELNLDEFLSYGPQRDQGKAGKPLLRKLKDGRILKWDVQSEDALCTLREVFEGVHRRVGFNVELKFDDDLFYTEERLTCILKSVLKVVFEHANDRPIIFSSFQPDAAQLIRKLQDKYPVLFLTNGGTQVYADPRRNSLEEAVKLCVAGGLQGIVSEVRAILRQPSAVAKIKEANKLSLMTYGQLNNVAEVVYVQHLMGVDGVIVDLVQEIAEAVSAFTVVTAVQASGSQDGGGIVVGERMETAAVAVAGTPSFSPREVSFLLRLIPELVQ

SEQ ID NO: 347533 - protein, 59 aa, Zea mays
  Clone ID: MRT4577_80111C.1.pep
LLPYICCGHLRSCWQLQLLEDTPTNQHSELGARRERERRERARNGAKEEDAIDRARRLE

SEQ ID NO: 347534 - protein, 121 aa, Zea mays
  unsure (1)..(121): unsure at all Xaa locations
  Clone ID: MRT4577_80112C.1.pep
MEGSIPATXATAPPPLALALCTRLASSTXVFGSESQCAKRLSRTPRRAGSPGAGTSGGSCRRSTCSGSALTCAAALRPAGASTIPYVFGLGTLSCGGDPLLRAIPRGGGEVPGWKRKARPS

SEQ ID NO: 347535 - protein, 64 aa, Zea mays
  Clone ID: MRT4577_80113C.1.pep
KNGENGPPPQTSPPVKLFERTPTFWPHRLKNASLIKKTCYLLLGWAQNFFFKQKLFPETISLLK

SEQ ID NO: 347536 - protein, 75 aa, Zea mays
  Clone ID: MRT4577_80114C.1.pep
TLLYFTTLQYDRIQAPALQLQRATLRINKHSQLDETLPAQMKDCIKSWNDLWVTDQPFQQKEHYLPLEGYRPQLT

SEQ ID NO: 347537 - protein, 54 aa, Zea mays
  Clone ID: MRT4577_80115C.1.pep
VDTPVRPRVRLHVCLLIDLNFIFLTLQDPTVKLLCIFTFINLLTPTIIIPSYST

SEQ ID NO: 347538 - protein, 231 aa, Zea mays
  Clone ID: MRT4577_80116C.1.pep
LLFLDEPTSGLDSAASYHVMSHIARVAARDGMTVVAAVHQPSGDVLELFHGLCLLAAGRTVFFGTISDATEFFSLNGFPCPRLRSPSDHFLRTINKDFDEETVVESSDKAKRKTAADEAIEILATAYRSSIYLDKTTDQIVEMKSMDGASFRRREHASFGTKLLVLTRRSFLNMHRDVGYYWMRLAIYMGIGVCLGTIFYQLGYSTYSSIQSRCEVIMYTIALLTFMSTGG

SEQ ID NO: 347539 - protein, 379 aa, Zea mays
  unsure (1)..(379): unsure at all Xaa locations
  Clone ID: MRT4577_80117C.1.pep
MQFFSLNGFPGRRLRSPSDHFLRTINKDFDEVTVVESFDKAKRKTAADEAIEILATAYSYYNNXTKNNKNENYPYCRMELHLGGXQASFGTKLLVLTRRSFLNMHRDVGYYWMRLAIYMGIGVCLGTIFYQLGYSSYSSIQSRCEVIMYTIALLTFMSIGGFPSFVEDVKVFRKERLSGHYGVSEFVISNTISATPYLSVVSLLPGAMLYYLTGLSKGADHFVYFVMVLCVCCLLVESMMMVIAAVVPDFLMGIIVGAGVQGVMMLNGGFFRLPNELPKPVWKYPCYYLSFHKYAVQGLYKNEFVGLSFPSDQLVDSNVTVSGLQVLEYKLQVEMGYSKWVNLAILCGMMLVYRMIFFAIVKISEEVRQKRGGKRGCVR

SEQ ID NO: 347540 - protein, 539 aa, Zea mays
  Clone ID: MRT4577_80118C.1.pep
MWAVHGRESTAAALRLLLIAIACGLVFALLHLPLPDDRARTADPGGQRGAAGGGGARLSVQQGRVREARRLSVVTEETDGQTDETAAEEDERISKSPPDTKEKIWMMQDQLILAKAYLHFASPQGSVHLVRELRLKIKEIERAISHSSGGTHVPGSVLQKIKAMELTLSKAQRTYPHCSQMTSKLRAMMHNSEELVRAHQSESSFLEQVAVRTLPKGHHCLAMQLTAEYFSLDPTKREFPKRDNIQLGGYYHYAMFSDNVLASAVVVNSTIAASKDPGRILLHIVTDALNYPAMMMWFLTNPPTPSVIQIQSLDDLKWLPGDFSSRFKLKGVRDPRYTSALNHLRFYLPEVFPSLSKVLLLDHDVVVQNDLSGLWDLDMKGKVTGAVDTCTSSEGFRQLDSLIDFSNPSVFNELDPKACAFAFGMNIFDLNEWRKQGLSTTYHRWFQLGKSEKLWKAGSLPLGQVVFYNRTLPLDHRWHVLGLGHDSSIGRDELESASVIHYSGKLKPWLEISIPKYRGYWNRYLNYDNPHLQQCNIHG

SEQ ID NO: 347541 - protein, 163 aa, Zea mays
  Clone ID: MRT4577_80119C.1.pep
GLNCFPDDVLLAGGSNCAIILSIEHRDLRVEVVHGVLGGAPRPRLARVCGAFESTRATGKPPVPQETRRADTTKCLPGRRRIQMACRVRTGTPETCGEAHTSEPMTEIADGVETAGTREGGARTAMEAARGIGGRCGGRPAALGHGPPLGRPAAWGSQRSKGD

SEQ ID NO: 347542 - protein, 72 aa, Zea mays
  Clone ID: MRT4577_8011C.1.pep
EDFKVVKSKITVSPMTYTLLLFNRLSSIAMRQDIKVSYVALYIINNVLMSISRWNTQCIVTLDIVHFIQLVD

SEQ ID NO: 347543 - protein, 58 aa, Zea mays
  Clone ID: MRT4577_80120C.1.pep
CSILVNSLDWSKLRPNLPWLVESGGCVLLDSCIILQFLYFHYRKRREPSDEHDNADKA

SEQ ID NO: 347544 - protein, 153 aa, Zea mays
  unsure (1)..(153): unsure at all Xaa locations
  Clone ID: MRT4577_80121C.1.pep
MSSRPPASPPAQGSRLLLLSLLLLGTVPGPRPGSAFYLPGLAPVNFCAEEKSNECKADIELFVNRLDSVESVLPYEYTAFDFCQASEGKRPSENLGQVLFXERIEPSPYKFTFNKKETCKLVCTKTYNTEKAEDKXKLDFLKKXMLLNYQHHW

SEQ ID NO: 347545 - protein, 138 aa, Zea mays
  Clone ID: MRT4577_80123C.1.pep
NYSLHVSDEFLLKILESHQIIIVLQKKQLPAFQPLLGTQYHTTDSKPMLATAILGDYRRPWAEPGSTPAGFSLPLPCLAVIGALCRVARAGTRMAAAGNSSALLSPLILALAQPCPRPAPSVVGHVLACRSCERRALF

SEQ ID NO: 347546 - protein, 269 aa, Zea mays
  Clone ID: MRT4577_80124C.1.pep
MSPNKSGHASGRDAVFWSDRMNEYLIDSLLHQQAIGNRSESKFSSVAYDSIITGVGERFGVVIDRNNIKNRLKHIKESFNECRNLLGEDNRFRWCPESRRFNADPNVWRELIERKPEAKKWMMKTIDHYDSLMDLFGKNREKRQDVENSKGTSKKKARTEPPKEILQRTPLNRKGSALAESSDKTVDKCEIHDEIKTNVELDLSESCRTDNGIVAIPVRAYSYGKGLPYAPENWPRHGDIWHWKVGSRASGAGHWADRYIMPPSRFRGA

SEQ ID NO: 347547 - protein, 61 aa, Zea mays
  unsure (1)..(61): unsure at all Xaa locations
  Clone ID: MRT4577_80125C.1.pep
SEPIHREGRSRLLFQRNVNTSTRYSCPQYPHVAIHFMVRCXQELFISDTSXXXTAKCVCGN

SEQ ID NO: 347548 - protein, 173 aa, Zea mays
  Clone ID: MRT4577_80126C.1.pep
TCDLIFSGASSPSRLASPAPCQAPAPFPWPQSSSELPLLISLAPSSACALRQRRPPARPPSCCSPWSWRPCSHQPAWTARSGIRWPSSSLTPRPWSSSSPWRLSHGVPWPPASARASSPVTARPTIPATQRRPLTFHGRRSPLTPALGPRPRCRCSPTAAVLLPAPTKLAQVR

SEQ ID NO: 347549 - protein, 77 aa, Zea mays
  unsure (1)..(77): unsure at all Xaa locations
  Clone ID: MRT4577_80127C.1.pep
MILLMTMLMMLTAVAPPLKASHHERWRSQNVVVHFNAMGNSIAIFCYHIRDAIATSFCGMRQKKYFAMNSPMXLXLA

SEQ ID NO: 347550 - protein, 55 aa, Zea mays
  unsure (1)..(55): unsure at all Xaa locations
  Clone ID: MRT4577_80128C.1.pep
WCTRQPAAVGLEAPLRRRRRSLAPPKQPRKQPIGXXEATARGSPKPVGGERGAVV

SEQ ID NO: 347551 - protein, 53 aa, Zea mays
  Clone ID: MRT4577_80129C.1.pep
TVSSYFSWRRTPLVTTQVKLTRSLAFGVLLLTSAIRSFFQLYNACTPENISPT

SEQ ID NO: 347552 - protein, 54 aa, Zea mays
  Clone ID: MRT4577_8012C.1.pep
DPLILPLLLPHVLRFHSKPPFFDLCPLQTSFPPITTTYTLANKTPYLLSSNRHP

SEQ ID NO: 347553 - protein, 66 aa, Zea mays
  unsure (1)..(66): unsure at all Xaa locations
  Clone ID: MRT4577_80130C.1.pep
ARSARVCVWCARRAVRFAFRALVVLCFVWLFXVXRCPWARPXGFCSGLXAXGVWCGLSSFVXCSFL

SEQ ID NO: 347554 - protein, 121 aa, Zea mays
  Clone ID: MRT4577_80131C.1.pep
FAGLPGFLIKIGRDPRVGGPRSFFPIEGGLFDPSPKFPRGLEPPLGELLENKGSKAGAPKHANSGSEKGSPLFPASPFQYKNAFLALKPPNTGFGVKFPKTKGPNTGSKKGAPLIFPPPFQ

SEQ ID NO: 347555 - protein, 87 aa, Zea mays
  Clone ID: MRT4577_80132C.1.pep
MSAAVLTRTAAKTVARRPVSFIMQIRSMGRAFEHAPYERVPVTVKPATPDYVKEVSFVVGKIVTYVPTFGLLLGWPALAKWAVDGHV

SEQ ID NO: 347556 - protein, 83 aa, Zea mays
  Clone ID: MRT4577_80133C.1.pep
RCAIERVELLVQVQVDLMPQLRTVASVVSTSPPAWPTSITLKPVRIYATREATAAGPTSSGCLRVWERVVPDPSHIPKKELVA

SEQ ID NO: 347557 - protein, 82 aa, Zea mays
  Clone ID: MRT4577_80134C.1.pep
PTWRQNLLLCLDFEVLSHHFRCYSLCFFSRLTTVSWKTILPTDHSTSAFTLYPVSHIAIRVLGLMANIATLTLAATVLLERV

SEQ ID NO: 347558 - protein, 94 aa, Zea mays
  unsure (1)..(94): unsure at all Xaa locations
  Clone ID: MRT4577_80135C.1.pep
MSHTQHTHILYHHHGFSQHRPSSSXQQPHSMCLPYPSQDHITPILNVSNLLHTRSFHVTFVNTDYNXARLVRTRYTAALANLPDFRFATIPDVL

SEQ ID NO: 347559 - protein, 100 aa, Zea mays
  Clone ID: MRT4577_80136C.1.pep
YRLTIQSILSLPNMSNKSSRTGKCGHNEGNKSVVVHNRDTFTQTRVMCEYVVVVLTFLWWTDNLDNAYNCVDERGWSSDPLDLFFLQRFCMRILHHESMI

SEQ ID NO: 347560 - protein, 214 aa, Zea mays
  unsure (1)..(214): unsure at all Xaa locations
  Clone ID: MRT4577_80137C.1.pep
MFVPLTCSSAVFLSSKFGPLTSSSTNSDSSFNLWLLVSSLTASNSTILLFMASTDSDSLKVLLLESSLTASISSILLSMASGSTSTASDSSKLLVLASSLTISISSILLSMACGSTSTSSDSFKLMLLESSLTACISSILLSMASGSTSTVSDSXSSFSSLSXSLTVFISSILLSMASGSTSTDSYSSNLLLLASSSPPLVPLYCCSCHPYPLN

SEQ ID NO: 347561 - protein, 141 aa, Zea mays
  Clone ID: MRT4577_80138C.1.pep
HGHKLTAATPICFLASSSHAPWSSYEENSPYVRESRSPPLDRDFIAVGVRESGQEASSYHRVCARAAGENHPHTDDNFSSKLRDRANPHFTADRSPVRAISEEPMAEDPGVQQIEVAEQELIEGEEQVVQEEPHNEEFDLI

SEQ ID NO: 347562 - protein, 64 aa, Zea mays
  Clone ID: MRT4577_80139C.1.pep
RYERVLVWTHSIRRQGAKHMSGASFVRHEFFFLQIDKESFSLKMESKGLFRPAFVLEMKIRVEW

SEQ ID NO: 347563 - protein, 81 aa, Zea mays
  Clone ID: MRT4577_8013C.1.pep
TPGGLCHSSELLAVIGVSPGALGKGQIGSRPVLNGLDAHHFCPLSPSRAPYSKNLPCTRKMVPGCNKNIRFRKKKKKGGAP

SEQ ID NO: 347564 - protein, 41 aa, Zea mays
  Clone ID: MRT4577_80140C.1.pep
SIHFCEDICLSFRPPRTLIMLTPRFNCPHLVLAPVPNPAFG

SEQ ID NO: 347565 - protein, 258 aa, Zea mays
  unsure (1)..(258): unsure at all Xaa locations
  Clone ID: MRT4577_80141C.1.pep
DISHLTKLPNXKIGLSLSVDNSQSMKADEFIAKRAMEAVGAAETRHGEWSVTRLRSAAHGTAYIESLSLGVGPRGGLGEQGDSVSCLLVLTSTSLVERRPENYEAVIVRPLSAVSALVRFVEEPQIFAFEFNDGCPIHVYASTSRDNLLATVLDVLETQRQCAIPVLPRLTMSGHRIDPPCGVAHLEMPYHGSVDMESASMHTKHLAAIAKEAVVSSDTVPGAKIRLWRRIREFNACVPYTGVPVNIEVPEVVVLALI

SEQ ID NO: 347566 - protein, 58 aa, Zea mays
  Clone ID: MRT4577_80142C.1.pep
SHAGLVLTKLLTSEELALLCSRLLVLGSFLLLFCGLLCCVTAMCFLPRREFHWSRTRL

SEQ ID NO: 347567 - protein, 202 aa, Zea mays
  Clone ID: MRT4577_80143C.1.pep
MSSSSVQQTAFPEQEADAEGETNPELYQHFANLVSSLPSSKGLSNNKFYRHGQGWHCSEVGIVGAMVTDACFSARPSDVIIATLPKSGTTWMKSLLYATVHRRERPVVGAAAADQHPLNSWGPHDLIKFFEYQLYTRDRVPDLDRLPDPRLFATHVPFVSLPSSVVATPGCKIVYVCRDPKDHLVSLWDFVNKYFRVKDGLE

SEQ ID NO: 347568 - protein, 161 aa, Zea mays
  Clone ID: MRT4577_80144C.1.pep
MGKFRKLGRNYSQRLCMLRTMVSQLVKHERIETTVAKAKEVRRKADQMVQLGKEGTQHAARRAAAFVRGDDVVHKLFTELAFRYRDRAGGYTRMLRTRIRVGDAAPMAYIEFVDRENELREAKPATPPPPQRAPLDPWAKSRASQQWAGPKITKTSESDGL

SEQ ID NO: 347569 - protein, 132 aa, Zea mays
  Clone ID: MRT4577_80145C.1.pep
IAFTSALLLWFFGHGASEYQSLETSLNLMQRGSICQAESHGDLEYAMLDGETLVVLVLLLRKVVRHEAHHFRMMTGGHLKSWMLISGSWALIGCRSGCGEQCEAGAVEEVSVGVGGGRRRSDRRGTWCRRGD

SEQ ID NO: 347570 - protein, 56 aa, Zea mays
  Clone ID: MRT4577_80146C.1.pep
YQQPPVGKGSFKRPAVARKLGRSEPRYGPWGANPYVGRSGRLAEAPIASLDSDLER

SEQ ID NO: 347571 - protein, 192 aa, Zea mays
  Clone ID: MRT4577_80147C.1.pep
AGRVWVTRTAVEPKPSDLAESAPGPRTAPARKLLHNPRRRRLLHPRHRHGTMVSQLVKHERIETTVAKAKEVRRKADQMVQLGKEGTQHAARRAAAFVRGDDVVHKLFTELAFRYRDRAGGYTRMLRTRIRVGDAAPMAYIEFVDRENELREAKPATPPPPQRVPLDPWAKSRASQQWAGPKITKTSESDGL

SEQ ID NO: 347572 - protein, 201 aa, Zea mays
  unsure (1)..(201): unsure at all Xaa locations
  Clone ID: MRT4577_80148C.1.pep
MGKFRKLGRDYSQRICMLRXLFGVMMSTMVSQLVKHERIETTVAKAKEVRRKADQMVQLGKEGTQHAARRAAAHKLFTELAFRYRDRAGGYTRMLRTRIRVGDAAPMAYIEFVDRENELREAKPQTFFFFKRVPLPSCFTPRAGQLWAWPRVTGPRGSPFLPPLLNQPKKKLPRFKKKKKKKKKKKKKKKLFHLYCPFVCF

SEQ ID NO: 347573 - protein, 161 aa, Zea mays
  Clone ID: MRT4577_80149C.1.pep
MGKFRKLGRDYSQRLCMLRTMVSQLVKHERIETTVAKAKEVRRKADQMVQLGKEGTQHAARRAAAFVRGDDVVHKLFTELAFRYRDRAGGYTRMLRTRIRVGDAAPMAYIEFVDRENELREAKPATPPPPQRVPLDPWAKSRASQQWAGPKITKTSESDGL

SEQ ID NO: 347574 - protein, 54 aa, Zea mays
  Clone ID: MRT4577_8014C.1.pep
LPDLKKEFCYNGTVVQDPALGRVIPLQLDQRNKFYIFLVQVDIVYNPLIAILGL

SEQ ID NO: 347575 - protein, 44 aa, Zea mays
  Clone ID: MRT4577_80150C.1.pep
PLVRPRFRVPVLVNIYASSSIDSHIDNNSQLYYFSLISCTYALS

SEQ ID NO: 347576 - protein, 78 aa, Zea mays
  Clone ID: MRT4577_80151C.1.pep
LLILSRPHTEPVVSLGFRRRRRHASPYLRKVCPTSSSQRCFIGEPPTCSTTGSSSSTCPTPGWVHGRRNCDYNCSKSD

SEQ ID NO: 347577 - protein, 819 aa, Zea mays
  Clone ID: MRT4577_80152C.1.pep
MIVLKGQDIDVILGMNWLAQHKAILNTDLRTIRLSYGQEEILLSIPVAIPARPTGRVYEAIIPEIQDIPVVCEFPDVFPEDLQGLPPERDVEFVIELKPAIFDKKKDQTLRMCVDYRPLNEVTIKNKYPLPWIDILFDQLTGARVFSKIDLRSGYHQIRIRPEDIPKTAFTTRYGLFEYLVMSFGLMNAPAHFTYLMNSIFMPELDKFVVVFIDDILIYSKNEEEHAQHLRIVLTRLREHQLYAKFSKCTFWLEEIQFLGHVLSAKGIAPDIEKPFDVYCDASGSGLGCVLMQEGRVEAYASRQLRRHEEHYPTHDLELDAVVHALKIWRHYLLGNVCHIYTDHKSLKYIFTQSELNMRQRRWLELIKDYELEIHYHPGKANVVADALSRNAFCHCLTMKTSDKMLCQEMEKLNLGMIQHGTSNHLKLESVILQQIIDAQKKRVKAIHMKVAGPLQSLPIPTWKWEDISMDFTVGLPRTAKGYDSIWVIVDRLTKIAHFIPVKTDHPVTTYAQLYIARILSLHGVPKTIVLDRGPQFVAKFWEALHKSLGTKLLHSSAYHPQTSGQTERVNQILEDMLRACVLEFPQKWDDCLPLAEFSYNNSYQESIKMAPFEALYGRRCCTPLNWSEPGERYFFRPDMVKETEEKVQRIIHNLKKAQARQKSYADTHRIPLYFPVGDYVYLKVSPMKGISRFGVKGKLAPWYIGPFPILERYGPVAYRLQLPETLSAVHNVFRVSQLKKCLRVPDRTIEVTNVALEPNLTYSEHPIRVLDQNDRTTRRKTLKFYKIQWNQHSEDEATWETQDFLEENFPGFLASCNL

SEQ ID NO: 347578 - protein, 68 aa, Zea mays
  Clone ID: MRT4577_80153C.1.pep
DVWSSQCAQQWFMAALRCSAVWLIICIAAFEGSCGFLYTTHACRLSRSENGLLKQQLSVLQVEWTAKE

SEQ ID NO: 347579 - protein, 106 aa, Zea mays
  Clone ID: MRT4577_80154C.1.pep
SGTIHSISPQTPPVLHLMGHHQNCDHINIKSPRILIDTIHLFFHTHGHHIKLELYRFKQIQSPRHTKGCLTLYLHAHSISHFHVTYLRFTTVAMKQTVELAWRFTA

SEQ ID NO: 347580 - protein, 96 aa, Zea mays
  unsure (1)..(96): unsure at all Xaa locations
  Clone ID: MRT4577_80155C.1.pep
AEPEILARSRRRXPIQARPESEPWGRPKRCSSSSGPEPECXPWVGRSGVRRLPGLSLNPSLGSGGAEFTIFRGLDRVRALGRPHPRFASSGPEPDP

SEQ ID NO: 347581 - protein, 199 aa, Zea mays
  Clone ID: MRT4577_80156C.1.pep
MAAPQPVAPASEAPPSAQMVGNAFVQQYYLVLHQSPDLVYRFYQEASRLARPASAAGAAGMDSVTTMEAISEKIMEMDVSKAEIRTVDSQESLGGGVAVLVTGHLTGRDGVRREFSQSFFLAPQEMGYFVLNDIFRFVGDIPASTAVEAQPEAVAVVPPVAAPLANGTATPAVEPATPDDHGAVPQQEHHVVDRSLPQP

SEQ ID NO: 347582 - protein, 184 aa, Zea mays
  Clone ID: MRT4577_80157C.1.pep
ACVPFVRVPGSQPWWPASTPAPSVFSLPARTVPARLLPAGHLQFAGARPARSSSSSHGGARLFLSADRAAHLPTSLAPLARGASPRQRPVSSWPERPLLGVPRCSPGKLFPFLLAATSSRAALDSPAEPQLPVLLARACAPRSDSVSLALACLVVEFQKSRRRLLACARFQSPAPCSSSSDFPP

SEQ ID NO: 347583 - protein, 115 aa, Zea mays
  Clone ID: MRT4577_80158C.1.pep
MVGVHGAGLTNMVFLPHNGTIVQIIPWGNLKYPCRFDFGDPAPDMGLRYVEYEANAEETTLKYKYPRDHPVFTDPISIERSGKLWETFLEGQNVTLDIDRFREAMQQVYNSITTE

SEQ ID NO: 347584 - protein, 42 aa, Zea mays
  Clone ID: MRT4577_80159C.1.pep
IFMAVFLINLMHTSWKAHIIKSYHMSWMASQPNVSHYAQAQT

SEQ ID NO: 347585 - protein, 449 aa, Zea mays
  Clone ID: MRT4577_8015C.1.pep
MADADAAAVPVDGPARTTVLDSLGEDITRIVYPVSACMLLVVLLVSLLSSPSSPSPFSASIAAATGGVSGGDDIPTALITALTFVVAVTAATFLLALLFYLRCTPCLRAYLGFSALSVLLVLGGQVALLLLSRLRLPLDAVSFALLLPNAAGALALAALVPASVPIALHQAALVAVAVLTAFWFTLLPEWTTWALLVAMAIYDLAAVLLPGGPLRVLLELAIQRNEEIPALVYEARPVDPRHGRNWRLWREGRQPGADLDASSTVEVIGEVLQPDSGNSSASQVHEPATLAGDISNSRPRVTLAAALSSSDSSTVAQVGEVSALQEHRVAVAELMVALIQPRPQRSEEEVEDEDGIGLSSSGAIKLGLGDFIFYSVLVGRAAMYDYMTVYACYLAIIAGLGITLLLLAFFRKALPALPVSIALGVLFYVLTRTLLEEFVVQCSTNLVMF

SEQ ID NO: 347586 - protein, 103 aa, Zea mays
  Clone ID: MRT4577_80160C.1.pep
HLDPLELINTYFIYSYIVSKLTSRNNGTVKTAIWHKKTTIQCYQGNASSKHLAMATITMNTIHPKETVEKMQPYMTNTHHGEQHTHSTHQDSKHDNQTHRTSP

SEQ ID NO: 347587 - protein, 436 aa, Zea mays
  Clone ID: MRT4577_80161C.1.pep
MVGDLSLLAVASASPVVLPPSKELHGVLPLQGKRPQDAGVQLCAPLQQHPPHHLEAVPYHQGQPGQMVVPGTHQGQALPAAYQAITMPDTAMLIDVQDSHPDSVQLSLGIAEQCARQEKLLKFLVSGSDVKELDESLLAEFTGQQTLAINMGTHPYLPDDKLSIPEFVLNEPQHYLPEKELVIPDPLLHFIQSHGAALTIDQSGRVLLAGNGDEMRDLLSIFLAFNMSRRETGGCKAAFLVPYFERKRRSRANSQVSNLKLAGTTADVSKSTDFNSKSLSKKKHKVKNIKERDSYQRNYIHASEVILSILLDKDRSSSTILSLKKAGPEITELLTQCSIGIAGTGLAILLSVMCKMSNGMRTPFASARLLSTSVGFGLFWLSWAVNGLRDTIASIFRSRSGMNIEDDEVAVKIEKSVNEILFRALTLLAITALKFA

SEQ ID NO: 347588 - protein, 108 aa, Zea mays
  unsure (1)..(108): unsure at all Xaa locations
  Clone ID: MRT4577_80162C.1.pep
GQGAIHLVAALGLXRNHNQVRLLNEWAIKPIAAARVNINFRDIRGWTALHWAECCGRERTVGALIASGATSGALTDPTQQYPSGRTPADLALXNGDKGIAGSLAKTAL

SEQ ID NO: 347589 - protein, 96 aa, Zea mays
  Clone ID: MRT4577_80163C.1.pep
AGQKIRQPTASGKILRVVRGDNNHSLSSGIQLLKTKNLFQCETESARDKLPLIINISFPSLRHSCNKYDNIRVFRCLLMVARRVILPAAARTLSPS

SEQ ID NO: 347590 - protein, 129 aa, Zea mays
  unsure (1)..(129): unsure at all Xaa locations
  Clone ID: MRT4577_80164C.1.pep
GLPWGASALVPVGFGLRWVAVLFPVVGGLVSXVPLLAGPLGLGPVFGSVRGCALVAFPRFLGSVSLFGPRXRLGSXCLCWVAGXSLLVFSPLVVRCCVCPXPLGLRLLLGGPGFFSTPPGGGGGGXSXF

SEQ ID NO: 347591 - protein, 56 aa, Zea mays
  Clone ID: MRT4577_80165C.1.pep
GNRLWHRLLIQSWIGVNEQDLGGRSFLTVWLVLVLVRGGTNRPGLEFSVLHYICSF

SEQ ID NO: 347592 - protein, 315 aa, Zea mays
  unsure (1)..(315): unsure at all Xaa locations
  Clone ID: MRT4577_80166C.1.pep
VXILVRKAXNRYTWIGFGGVSISLRELKERALREKSGLAPLQTEQQSAATISEDEDDDTLANPGAYIETERLSQTVDKPSGKPGASGCRLRSDHRKEKSLGLLTQNFVKLFLTMEVDTISLDEAAKLLLGEGHEETNMRTKVRRLYDIANVLSSLNLIEKIHQGDSRKPAFRWLGXGNPTXAHASELLXPPGKIASKKRAFGTELTNIDMHTSNLDSKNKKKAKLVQSGGDVLTNCKLAVRSRLGQGKQSGFVYGPFHPSGARKHGLDGGNKPGQRERAEDWESLSASFRPQYQNQALSDLFVHYVDAWKTWYSE

SEQ ID NO: 347593 - protein, 171 aa, Zea mays
  unsure (1)..(171): unsure at all Xaa locations
  Clone ID: MRT4577_80167C.1.pep
MPLYLDSPNPDAMAPKADNNSRHEKPAAEEKGEKTTAGKMPKSEKRLTASKSSGKEGAENNVKKKAQKSVXETYEIYLFXVLKQVHPXIVISSXVMSIMNSFMNDIFQKVAGXDAKLGRHLWKPSINSRWIQTSVXIILPRISSAKDFVCEVYSCRRQCLQPWITLHRPRD

SEQ ID NO: 347594 - protein, 96 aa, Zea mays
  unsure (1)..(96): unsure at all Xaa locations
  Clone ID: MRT4577_80168C.1.pep
PFCSALETRKRPVVQAPRLRRPILRYSLISAGHVAMAPGAPREYALEGGEAAQDEAPESPQEREEASQREEDGGXKEAXXYXEAPTYLPVGPSSEL

SEQ ID NO: 347595 - protein, 56 aa, Zea mays
  Clone ID: MRT4577_80169C.1.pep
NFGAGGFPPWGKKRPWCFYIYPHLKGCWYSACTHIHIYMRVPPIQGGNGFCVITKP

SEQ ID NO: 347596 - protein, 94 aa, Zea mays
  Clone ID: MRT4577_8016C.1.pep
CELVRWIGWRSENIKKGGKEMGEAAKGKRAAGGGGGQEYPGADARSRNQTLTRQRQRQGKSGMLPMSNPSASPTQLTIFYGGSVCVCDSVTPGK

SEQ ID NO: 347597 - protein, 149 aa, Zea mays
  unsure (1)..(149): unsure at all Xaa locations
  Clone ID: MRT4577_80170C.1.pep
MFGDCQVLSSMAAMAAGSSSADALFASPLMPNPGALAGFMSNSSAMPFHHHFSTNLIPVSASPSSSSCLLHISIYMHMRKINXVFLFAAGLFFQKEEGVMGGLHMAEDEELDLDMEMELSGGSGSGHLDGLLSFADVDDDRDQKPQHSE

SEQ ID NO: 347598 - protein, 53 aa, Zea mays
  unsure (1)..(53): unsure at all Xaa locations
  Clone ID: MRT4577_80171C.1.pep
LIREDLTFGHCGANRPVHVMAHKCPDPNRVTHSEDSEIQSCNDQNSKKKKKNX

SEQ ID NO: 347599 - protein, 77 aa, Zea mays
  Clone ID: MRT4577_80172C.1.pep
YILAISSLSTILQTACGKQSRMLTTPSFDVTTTNYLLRIVPSYCRTPPFMMPLSKSTYALYCNHKVLILICANCQQL

SEQ ID NO: 347600 - protein, 174 aa, Zea mays
  unsure (1)..(174): unsure at all Xaa locations
  Clone ID: MRT4577_80173C.1.pep
PPRVFFFFFFFFFFFFFFFFFFFFFFFFFFFFFGKNPPHWFPKFWYRGPSPQPKPKGTDPSPLGXKKNRGKGGGPGPPETGPXGGGRKKMEPGPPPGRVGGGGRPKFRGGPGRPRXGGPAPKNLRGEGGGKGPPNKGPPQKNPWAPPRGQIPGAGGTPFXKGAPPGGDPQFLSP

SEQ ID NO: 347601 - protein, 51 aa, Zea mays
  Clone ID: MRT4577_80174C.1.pep
LGEPQESNPIHFYELQGSLLDYTCMALILSSTDHYQGHRLTTRWRAHTGQI

SEQ ID NO: 347602 - protein, 138 aa, Zea mays
  unsure (1)..(138): unsure at all Xaa locations
  Clone ID: MRT4577_80175C.1.pep
GPPGTFYGGPPPPPPPLGPPPXRPGRVPPGTGPPPPGFSFPPKGAPPPPKKPPLPPGVPRPGXSPGPPRPLXPGGGGGLKTPIPGQGNGGPPKPALGXPPGPLKGGXFPPPPGWGALGLFFTGSPGFLPPGGPPSGWF

SEQ ID NO: 347603 - protein, 110 aa, Zea mays
  Clone ID: MRT4577_80176C.1.pep
KGFLIGGPGWLFSFKKFGFFGVPLADYKLFNRFMWGFVRQTKAQVFFAVPFKLPLVLKAGKLSFWGLGMLGTMVFFCPGMKSRGLKNFGVRNLLKRAWNLFRGALYNKVF

SEQ ID NO: 347604 - protein, 85 aa, Zea mays
  Clone ID: MRT4577_80177C.1.pep
DQLQPRTRTGWAPGTRHYGSCNLLKSPLLAANTRVARTHTPFVPHCHLTPLPHDPEATSTRRRTRQQRRLGSRRSRKASSQRLID

SEQ ID NO: 347605 - protein, 209 aa, Zea mays
  Clone ID: MRT4577_80178C.1.pep
FGTREKFERAQYSCAFQDEGDGGRDFAPPELVWGKVRSHPWWPGQVFDAADASEIALQHRKAGAPLIAYFWDRTFAWSDSSALLPFCANFTRLSTQSTMSSFVSAIDSALLEVERRVEAGLSCGCFSSNIATKQEVQNSGIRQGAYGAAIDSVYTRDAFHGKTFLDYISALGKKPLAGADLLDLATAKAQLRAFNRSRGSRDLPEFVMF

SEQ ID NO: 347606 - protein, 104 aa, Zea mays
  Clone ID: MRT4577_80179C.1.pep
LESWHSPSCEEFPQQELEFRTKFIHHNIFSLGLIIDHQRQATVKIKLFCIPRVRCHPIAIAFQPYCDDINGPRTQLLPPIKHATASVPTRVPKKNLMKPVPSSR

SEQ ID NO: 347607 - protein, 60 aa, Zea mays
  unsure (1)..(60): unsure at all Xaa locations
  Clone ID: MRT4577_8017C.1.pep
FRAERGPPFLAGVGPLGLNLTVPYFYTDTLCVDLALWGVYRKQPSKCYMFFAMXGVVRPP

SEQ ID NO: 347608 - protein, 82 aa, Zea mays
  Clone ID: MRT4577_80180C.1.pep
MATAAASSLLKSSFAGSRLPAATRTTPASLVVATGPRGAGAGPICASMSMSSSNPPYDLTSFRFSPIKELMIAYKDDEVVDA

SEQ ID NO: 347609 - protein, 252 aa, Zea mays
  unsure (1)..(252): unsure at all Xaa locations
  Clone ID: MRT4577_80181C.1.pep
NPRLEAGAPPSLAHPAPPRSTKEFQRAPRHAPRDVVSWTSTISRAARQGDLHAAAASLCAMLSSPAAPAPNDVTLLTVLSACADSPSSPLASPLALTLHARALKLFPSHLLLSTCLARFYLASRLPHLALQLFDSMPVRSVVTYNTMISGLMRNGLVDAAFEVFDGMPGPDKVSWTALIDGFVKNGRHDEAIDCFRAMLLDGVETDYITLVAVVSACAEVGALGXGMWVHRLVLRQRLERNVRVANSLIDLY

SEQ ID NO: 347610 - protein, 216 aa, Zea mays
  unsure (1)..(216): unsure at all Xaa locations
  Clone ID: MRT4577_80182C.1.pep
PPQVLLRGLPAPGRHADHTGAWLGGQLFSAMVVRKPAHLFLDELGVAYDEAEDYVVIKHAALFTSTVMSLLLARPNVKLFNAVAVEDLIVRGGRVGGVVTNWALVSMNHDTQSCMDPNVMEAKVVVSSCGHDGPFGATGVKRLQDIGMISAVPGMKALDMNTAEDEIVRLTREVVPGMIVTRMEVAEIDGAPXXMXPTFGAMMISXQKAAHLALKA

SEQ ID NO: 347611 - protein, 171 aa, Zea mays
  unsure (1)..(171): unsure at all Xaa locations
  Clone ID: MRT4577_80183C.1.pep
MAMTVAAAWLPSTASRRRILSSPLPPFAAPISIHMPRRAPPPSPIHRKPRLFVASAQLDFSRAVQTAWRVSNDAVEAGSNLVPGSVPRPIARIGVAFAAVSVAFFLVKSIVSTALFVLVSSXTFAAMMGLIYLSFLAMNPKEASGSRLDEAMGNPSEDPVEEARRIMDKYK

SEQ ID NO: 347612 - protein, 54 aa, Zea mays
  Clone ID: MRT4577_80184C.1.pep
MYHQRRGGEQPGRDQFKCNNLKVDKHLENYLGHMAMDPPAVRNIRKYLYCFTAD

SEQ ID NO: 347613 - protein, 383 aa, Zea mays
  unsure (1)..(383): unsure at all Xaa locations
  Clone ID: MRT4577_80185C.1.pep
MATAAASSLLKSSFAGSRLPAATRTTPASLVVATGPRGAGAGPICASMSMSSSNPPYDLTSFRFSPIKESIVSREMTRRYMTDMITYADTDVVIVGAGSAGLSCAYELSKDPAVSIAIVEQSVSPGGGAWLGGQLFSAMVVRKPAHLFLDELGVAYDEAEDYVVIKHAALFTSTVMSLLLARPNVKLFNAVAVEDLIVRGGRVGGVVTNWALVSMNHDTQSCMDPNVMEAKVVVSSCGHDGPSGATGVKRLQDIGMISAVPGMKALDMNTAEDEIVRLTREVVPGMIVTGMEVAEIDGAPRMVSSEEDNTHVIAILTEXEEYVXLSVGLLQGPTFGAMMISGQKAAHLALKALGRPNAVDGTMSPPLREELMIAYKDDEVVDA

SEQ ID NO: 347614 - protein, 76 aa, Zea mays
  Clone ID: MRT4577_80186C.1.pep
GRFTLSSSQLACFWIACISCLKIFRDTYSVRSRSLGDLTRVESLVAVLAAPPIQSQPGCFFVKQHMSQQVSPRLQN

SEQ ID NO: 347615 - protein, 220 aa, Zea mays
  Clone ID: MRT4577_80187C.1.pep
VLLRGLPAHPSLDELNVGHYKPEDYVVVKHAALFTSTVMSRLLARPNVKLFNAVAVEDLIVRRGRVGGVVTNWALVSMNHDTQSCMDPNVMEAKVVVSSCGHDGPFGATGVKRLQDIGMISAVPGMKALDMNAAEDEIVRLTREVVPGMIVTGMEVAEIDGAPRMGPTFGAMMISGQKAAHLALKALGRPNAVDGTIPEVSPALREEFVIASKDDEVVDA

SEQ ID NO: 347616 - protein, 392 aa, Zea mays
  unsure (1)..(392): unsure at all Xaa locations
  Clone ID: MRT4577_80188C.1.pep
MDLHSEHRSQQPHPLAHFYSPSAAARRKEASAYSLSAMATAAASSLLKSSFAGSRLPAATRTTPASLVVATGPRGAGAGPICASMSISSSTPPYDLNAFKFSPIKESIVSREMTRRYMTDMITYADTDVVIVGAGSAGLSCAYELSKDPSISIAIIEQSVSPGGGAWLGGQLFSAMVVRKPAHLFLDELNIEYDEQEDYVVIKHAALFTSTVMSLLLARPNVKLFNAVAVEDLIVRGGXRVGGVVTNWALVSMNHDTQSCMDPNVMEAKVVVSSCGHDGPFGATGVKRLQDIGMISAVPGMKALDMNTAEDEIVRLTREVVPGMIVTGMEVAEIDGAPRMGPTFGAMMISGQKAAHLALKALGRPNAVDGTMSPPLREELMIAYKDDEVVDA

SEQ ID NO: 347617 - protein, 183 aa, Zea mays
  unsure (1)..(183): unsure at all Xaa locations
  Clone ID: MRT4577_80189C.1.pep
NKVKKKKKKKKKKKKKKKKKKKKKKIRGFSKGGWVLLPHRFGVRVWFGGEKEKKGGSEVEKRWFLGGLPWANEEQSLKKGFKNXGEGPEAKNILEREKQKSRGFGFVTFSKEEAKGNAIQGMKGKKFEGRKITGKEGQSPGGPGRGGGGKRGGRPEGSGXAGGGGANEGVREAXGGGGGKRGG

SEQ ID NO: 347618 - protein, 327 aa, Zea mays
  unsure (1)..(327): unsure at all Xaa locations
  Clone ID: MRT4577_8018C.1.pep
MVRVRVREEAEAAALFPIPISIPMPIPMTTGGKKIREEAEAEAEAAALFPTRITIGMASRGGGAPWADGAFPDWVMLDRLGRTKSYDGICAVREAVNQNKTAAAVHMASGRSCYVSFALADPPEGVSYFDLHWPEKEASATRPACPYVRATDEDLVLFHISIPSQTRYDNIASDLFVYTAAGPSPSVQQLPRYTKDRKRPFLMDKFATGILQLAPDCYIVADLXLPQKKRHWQSSHAXELCIFNSEKGHWGTICNRPAPRPHDQSNVRFPFLWSTDDVLALDGRFLCWVDYFSGVLISDFSDTCSPVLHFVPFPGGKEYRNDVRVER

SEQ ID NO: 347619 - protein, 86 aa, Zea mays
  unsure (1)..(86): unsure at all Xaa locations
  Clone ID: MRT4577_80190C.1.pep
LPLFGARVCLRLPARRCCSPLLPPPVWPSWRVXSCCAGCAPPRXPLGLRPCCACAAAWRAVGCSSAGPRXLPGRSGSSFFAPAXXR

SEQ ID NO: 347620 - protein, 598 aa, Zea mays
  Clone ID: MRT4577_80191C.1.pep
MALSCMRCPAGAGAASARRAAAQPLAAEAAVSFARCRGFGRSATAATSAWFWRNHAVASQGVKAPMDADVKNAVIPPTSPKVESGSPSEITLDEFEDLSALCKNDDSTVSITVVGASGDLAKKKIFPALFALYYEDCLPKHFTIFGYARSKMTDAELRNMVSKTLTCRIDKRENCSEKMEEFLKRCFYHSGQYDSEEHFIDLDKKLKQHEGSRVSNRLFYLSIPPNIFLDVVKCASKSASSVNGWTRVIVEKPFGRDSESSAALTSGLKQYLVEDQIFRIDHYLGKELVENLSVLRFSNLVFEPLWSRQYIRNVQLIFSEDFGTEGRGGYFDGYGIIRDIMQNHLIQILALFAMETPISLEAEDIRNEKVKVLRSMKPLQLEDVVVGQYKSHTKGGTTYPGYTDDKTVPKDSVTPTFAAAALFINNARWDGVPFLMKAGKALHTKRAEIRVQFRHVPGNLYKGSFGTDLDRATNELVIRVQPDEAIYLKINNKIPGLGMRLDRSNLNLHYAARYSKEIPDAYERLLLDAIEGERRLFIRSDELDAAWSLFTPLLKELEEKRIAPELYPYGSRGPVGAHYLAAKYNVRWGDLSAEHYKA

SEQ ID NO: 347621 - protein, 98 aa, Zea mays
  Clone ID: MRT4577_80192C.1.pep
AAFFFFFLVANKHIYLFLCLCESKQQQLHIDPVTTKLTCGTISKGSIKWWPTCRTLKKKRKWHPYSTSKSRLAKSPSELKKKKDGAIFSTIEAFLGAV

SEQ ID NO: 347622 - protein, 121 aa, Zea mays
  Clone ID: MRT4577_80193C.1.pep
GARTTGDPHAFLAGYKKAHMAGDHPVIYPGFLNPTGPGPGFQNFKTGACNPVAGGVGGHRQPERGVWCFQSKKGGHTNNRGNPGIFPHTQLKGPGNPGFYKGGPKPQGPREGKGSFSTPWG

SEQ ID NO: 347623 - protein, 46 aa, Zea mays
  Clone ID: MRT4577_80194C.1.pep
HTKDLKVILQITTNKNLDTRHLTCLDIHVSILVYVCWTVGLVPCDI

SEQ ID NO: 347624 - protein, 124 aa, Zea mays
  Clone ID: MRT4577_80195C.1.pep
ALSVGSPVFTLYPSGFYVASCAERIAVSHFWHLCPSLPIDTVPEPFLDRRVQREGFSASARSPIFWVSTHVPAFDFIVFQCSPLTLLASLISSCPSSGVFFAFRVHCMYVKETTPTMKKSPPTT

SEQ ID NO: 347625 - protein, 141 aa, Zea mays
  unsure (1)..(141): unsure at all Xaa locations
  Clone ID: MRT4577_80196C.1.pep
ASELALAVHPPFDEAFIQPRXSXTRTEATAQPPGSPSCPPGCTRGCACNPPGNPPLPVCPTVCRPGCQLESKAQVRASRTPSRLRAGVEQEINQESHRATPPAARWPCPFPCTRPGHMCAAICRVRVRRPVRIPGSTGSVA

SEQ ID NO: 347626 - protein, 116 aa, Zea mays
  Clone ID: MRT4577_80197C.1.pep
PPPPGGGGCLSPPPGGNPKRGPLFPPPPRGLFFFPPPPPLTIQTGGVPPRPQKNPPFFPPPNFAPVLGFLFPGPFLVSPPLLPGPLVESEHGCPFLPARRQKCKITKIQLYKENNP

SEQ ID NO: 347627 - protein, 59 aa, Zea mays
  Clone ID: MRT4577_80198C.1.pep
LPNYPDDRIEHASYHSSEPAHSKITPHYTTTSPSSPKPHGTTLGYCSTRYQFYQSTSQH

SEQ ID NO: 347628 - protein, 149 aa, Zea mays
  Clone ID: MRT4577_80199C.1.pep
IFRIQIGIGRHHPFFFIIPPNGHNRVFFLSSRLGYREGFSSENFFNQAPSLFFITPRLGPRGPPKVTPPRLRYSALGRYSPPALFCSQVRPPVKTLFWGPFLVFPGGFSNNFYFLSLQTTFILSDKTHIIFNVHRVCCTISSNHANVII

SEQ ID NO: 347629 - protein, 444 aa, Zea mays
  unsure (1)..(444): unsure at all Xaa locations
  Clone ID: MRT4577_8019C.1.pep
MYARWLFFPAVFGLATQLIDFGSLQWLVLPGFFIFVISWAVLFLQFWKRKNSALLARWGIHXHYLNKNLDNVSFLSDSLTVEEKEFCVVSAEKSKLQRNEWFGVLLRIRNNAIIVLAIICLQLPFELAYAHLYEITETEAMKYLLTAVYLVAIQYYTRIGGKVSVNLIKYENNQGEESSSASLVYKVFGLYFMQSYIGLFYHASLHRDILALRRVLIQRLIVYQVLENLIENSIPYLKYSYKKYIAVHKKKRGKESTVGRSVRLSTRVEKEYLKPSYTASIGAELEDGLFDDFLELALQFGMIMMFACAFPLIFCFAALNNVTELRADALKLLVMLKRPVPRAAATIGAWLNIFQFLVVMAICTNCLLLVCLYDEEGKWRIEPGLAAILIMEHALLLIKFGFSHFVPEEPAWVRANRVRYVAQAQNVCSKQLLRSISKFQGKLD

SEQ ID NO: 347630 - protein, 108 aa, Zea mays
  Clone ID: MRT4577_801C.1.pep
GLTQIGVFKTYSPLGGPQRAGFFKPLPFFKRALGPRGLFFLKYLEQKVPTRATKRLGVFGLITRGFWSPERNLERRKASQRKSLKEHKQNFFFNRLGVVGNLGGIRPF

SEQ ID NO: 347631 - protein, 64 aa, Zea mays
  Clone ID: MRT4577_80200C.1.pep
LRLGHMSDSCRVMTSSVNYGIKGLFLQVHELQGQIILNPLSRPGSWMTTFRFETQVRDLARKYL

SEQ ID NO: 347632 - protein, 124 aa, Zea mays
  Clone ID: MRT4577_80201C.1.pep
PPIPPRSRTDHAPAAVPEKGVAIADSLSLHRCQKHNFSPAVLQDTQQAAQDEEANNNNGQLATGRLRGSVDPMATNCSSPASSSSPSLASLEQQTADDMCAPRQRRSPSGGGTGARRSVRKELA

SEQ ID NO: 347633 - protein, 86 aa, Zea mays
  Clone ID: MRT4577_80202C.1.pep
GFIFLWQRKLVAGWYWPFYGRSNCGFWWGLFPVKGLLLLVAAAGNNPLFPRIGLRLGDRTGKDTQGSAQGSSEGVVDPEFRPYCSV

SEQ ID NO: 347634 - protein, 59 aa, Zea mays
  Clone ID: MRT4577_80203C.1.pep
KRSHNASSTLTAPELDLRYYLRCPSHALVLPCTTNHKGVRLTNDQLTHATVNLAYWNTS

SEQ ID NO: 347635 - protein, 76 aa, Zea mays
  Clone ID: MRT4577_80204C.1.pep
LSDGSNTNMYSTLFEGSTMDSKFEYGSAISMVCTNELLPQCWQFVSPLSKLLLLVGQMIKSSNLPCHHYGLHSPHW

SEQ ID NO: 347636 - protein, 97 aa, Zea mays
  Clone ID: MRT4577_80205C.1.pep
SSALVLSLATGVSLFLERFVFFNSHREYVSKQVPSHKGNVHFVAAVERPKQLPALEHFFSRPLAFSLGIVFSCASMGQIVPHGFLSASIFGYDACFF

SEQ ID NO: 347637 - protein, 77 aa, Zea mays
  Clone ID: MRT4577_80206C.1.pep
MMSRSYTNLLDLAEGNFAALGPAAGAGGGGRQRQGSFGLRRMSRVMTVPGTLSELDGDDESEPAATSSVAFDAPSFV

SEQ ID NO: 347638 - protein, 64 aa, Zea mays
  Clone ID: MRT4577_80207C.1.pep
APPPPGSACPPPVPCPSWLLCPPVFVLPALFLFCSARFRLSSFACSSGWGLPFLFLLKKKKNSA

SEQ ID NO: 347639 - protein, 99 aa, Zea mays
  unsure (1)..(99): unsure at all Xaa locations
  Clone ID: MRT4577_80208C.1.pep
MHAHAHAHAHEDSDGYAEKMLIELTAVLLMLLLNVLPLLEPNYLLSCAYAYXHKCQYPHEDAYYAKMCDSYEQKTHHSTERATLERTVQRNHYCIVTQN

SEQ ID NO: 347640 - protein, 54 aa, Zea mays
  Clone ID: MRT4577_80209C.1.pep
KLGKLLGGVTIAPGGVVPNKNPVLLPKKTAEKGSSGGSKEAKSPKKAAKSPKKA

SEQ ID NO: 347641 - protein, 141 aa, Zea mays
  unsure (1)..(141): unsure at all Xaa locations
  Clone ID: MRT4577_8020C.1.pep
ELGAELEDGLFDDFLELXLQFGMIMMFACAFPLIFCFAALNNVTEIRADALKLLVMLKRPEPRAAATIGAWLNIFQXIEPGLAAILIMEHALLLIKFGFSHFVPEEPAWVKANRVRYVAQAQNVCSKQLLRSISKFDGKLD

SEQ ID NO: 347642 - protein, 72 aa, Zea mays
  Clone ID: MRT4577_80210C.1.pep
IQWHLSPLTILHPLCDCSSILPAYQINKDNLAHTAKKIKTTQPGSTDPQNLNHYIITTLMNGLYITASTLLY

SEQ ID NO: 347643 - protein, 67 aa, Zea mays
  Clone ID: MRT4577_80211C.1.pep
NADVNEFGKFVATSTGPRDTCPSAPTTTTTSRSLSLVFTSTYTYISIYRTSGMQIHHHLLVVSYIMI

SEQ ID NO: 347644 - protein, 100 aa, Zea mays
  unsure (1)..(100): unsure at all Xaa locations
  Clone ID: MRT4577_80212C.1.pep
GDGHNTQDQSSSFIVATGRIMEMVVKTLRVXTQNAISLLDAALPDRVLSQSTAIHQVCCHHTIGEWHRDHFSFLRDDFLWAQCAXYNAYYKAPKQQGLLS

SEQ ID NO: 347645 - protein, 145 aa, Zea mays
  unsure (1)..(145): unsure at all Xaa locations
  Clone ID: MRT4577_80213C.1.pep
NDGIEYWIVRNSCGEPWGERGWMRIVTSTYKGGTGSSYNLAIEEACXFGDPIVXVDVPGSNTVNHDEEGXIIDTGYVHSARNSGPHADTRTRXVGCTPRGGRKGWATTTLEPSTSRPASLHSQTCFLLHRALQAYLQPPERTAMV

SEQ ID NO: 347646 - protein, 69 aa, Zea mays
  Clone ID: MRT4577_80214C.1.pep
LLCPIGQSMTALRGRTSRYDIDREGRAEGVGRGAVGRLLQHLVHHLELVFRSSEQVGADRNPRRARVSE

SEQ ID NO: 347647 - protein, 241 aa, Zea mays
  Clone ID: MRT4577_80215C.1.pep
MGRKRAVLVGINYAGTKAELKGCHNDVARMRRCLVDRFGFDDDGAAIRVLSDADRAAPQQQPTGANIRRELARLVADARPGDSLFFHYSGHGTRLPAETGQDDDTGYDECIDPSDMNLITDQDFTELVQKVPDGCLFTIVSDSCHSGGLLDKAKEQIGHSTKQNKAQQGKREERSESGSGGFRSFLKQTVRDAFESQGVHLPRRGGQQGSYDDAESEEPSLDFGTDGHVKNRSLPLSTFIE

SEQ ID NO: 347648 - protein, 68 aa, Zea mays
  Clone ID: MRT4577_80216C.1.pep
SSFVVNTLSNLNVFLVVPPFAFRPDDTSSLLKCRHRQKKPDKFLLSLEQYYKVSSSYPSLHSTSILNR

SEQ ID NO: 347649 - protein, 210 aa, Zea mays
  Clone ID: MRT4577_80217C.1.pep
MATTAFLPPAKLPLQGRRFASPKTAGRISVRVPPARAQQEQQVKEEEAEAASVPPPQAAEKEARKGDAQSLPRQPLAESKNMSREYGGQWLSSTTRHVRIYAAYIDPVTNAFDQTQMDKLTLMLDPQDEFAWTDEACQMVFNEFQDLVDHYEGAELSEYTLRLIGSDLEHYIRKLLYDGVIKYNMRSRVLNFSMGKPRIKFNSNQIPEKI

SEQ ID NO: 347650 - protein, 63 aa, Zea mays
  unsure (1)..(63): unsure at all Xaa locations
  Clone ID: MRT4577_80218C.1.pep
RRLRGMDFSKYRGGLVMGDDTSVGPHIHSTLNTXTRKYGTLYKPLSHLEQPIKSGIPFTAPGT

SEQ ID NO: 347651 - protein, 129 aa, Zea mays
  Clone ID: MRT4577_80219C.1.pep
LNACLHTVSVLHGASLRSAAGYSPHVDADDYDSRLRHPLLNWRLQTKGKDDYTLTLPPDSTTTDAPERHAVLAGPRGRLTTGPSAPRGMQALTHNVTGGCFTHLTRSRAGRLMPHAQGPRPPLPTCDRG

SEQ ID NO: 347652 - protein, 381 aa, Zea mays
  unsure (1)..(381): unsure at all Xaa locations
  Clone ID: MRT4577_8021C.1.pep
AEKSKLQRNEWFGVLLRIRNNAIIVLAIICLQLPFELAYAHLYEITETEAMKYLLTAVYLVAIQYYTRIGGKVSVNLIKYENNQGEESSSASLVYKVFGLYFMQSYIGLFYHASLYRDILALRQVLIQRLIVSQVLENLIENSIPYLKYSYKKYIAVHKKKHEKESPVGRSVRLSTRVEKEYLKPSYTASIGAELEDGLFDDFLELALQFGMIMMFACAFPLIFCFAALNNVTEIRADALKLLVMLKRPEPRAAATIGAWLNIFQXLAELFNFTTCELWEYACPDSLXVCFQFLVVMAICTNCLLLVCLYDEEGKWRIEPGLAAILIMEHALLLIKFGFSHFVPEEPAWVKANRVRYVAQAQNVCSKQLLRSISKFDGKLD

SEQ ID NO: 347653 - protein, 69 aa, Zea mays
  Clone ID: MRT4577_80220C.1.pep
FMGTANAIGSTNMQVDTPSYMSTKTDPKHAEGDSKLKNFVFFFFTHTTKYLCLGASSASLIIGQPPPQA

SEQ ID NO: 347654 - protein, 47 aa, Zea mays
  Clone ID: MRT4577_80221C.1.pep
GCKYTNCCYGCDAFSLQLMVYVTCKVVQIFVFIKSLFLLEGLVLLSF

SEQ ID NO: 347655 - protein, 199 aa, Zea mays
  unsure (1)..(199): unsure at all Xaa locations
  Clone ID: MRT4577_80222C.1.pep
GAKRKPQARLFDATIYASRQEDHXRQKKKNKKKKKHEFKDDDLLDHRPYRNDRRVPERHRALKRSSPAPVVGYASSAKRRRGGEVELSNILEKVVDHLRGLSGSLLFLKPVTKKEASDYLDIIRYPMDLGTIRDKVRKMVYRNRDEFRHDVAQIQLNAHIYNDTRYPHIPPLADELMEVCDHLLYENADLLTEAEDAIE

SEQ ID NO: 347656 - protein, 618 aa, Zea mays
  unsure (1)..(618): unsure at all Xaa locations
  Clone ID: MRT4577_80223C.1.pep
MSAPLDRLARPCFEGFVHNDERKESRSDADNSEGDKKTKIGSFKKKAINAGNKFRHSLRRRSXRRPKGGDSIKDIRDIKELQDVETFRQCLIDEDLLPPQHDDYHMMLRFLKARKFDVEKAKNMWSDMLKWRKEFGVDKIEEFEYAELDEVKKYYPQFYHGVDKEGRPVYIELIGKVDANKLVQVTTLDRYVKYHVKEFERCFQIRFPACSIAAKKHIDSSTTIFDVQGVGFKNFSKSARELITRLQKIDNDNYPETLCQMYIINAGQGFKMLWSTIKSFLDPKTASKIHVLGNKYQHKLLEIIDECELPEFLGGKCKCIEGCERSDKGPWKDPNIIKRVLNGEANYGRQIVTISSTDGRIVSYAWPVHPNRKGSDASAESGSEVEDVTSPTASRNLITHPILTPVHEESKLSAHGSSSVVHASIGENIPVVDKIVDDGWGSPRSSPQAASSGSLSLRNLHGTFQGLRAQTITWLTFLMMTLFAMLCSVPSKMARRISNQSGKHDDYHVKYPQEQECKEEFRPPSPAPSYTENDVISSMLRRLGELEDKVQVLETKPSEMPFEKEELLNAAVRRVDALEAELISTKKALYDALMRQDELLAYIDRQELIKFRKKKFCF

SEQ ID NO: 347657 - protein, 152 aa, Zea mays
  Clone ID: MRT4577_80224C.1.pep
LLYACQSGSDERTIPGNTIAVQADMPFSGLTTFGTAFLSKFECSQMRHPLLEHITFVDTPGVLSGEKQRTQRSYDFTGVTSWFAAKCDLILLLFDPHKLDISDEFKRVIGSLRGHDEQIRVVLKQADQVDTQQLMRVYGALMWSLGKVLNTP

SEQ ID NO: 347658 - protein, 61 aa, Zea mays
  Clone ID: MRT4577_80225C.1.pep
GAPQKKAFFFSPLIRLFWGPPPPFLVGPILNPGDPPIVGHFLSKLSIFWVPPAQQGWGALI

SEQ ID NO: 347659 - protein, 29 aa, Zea mays
  Clone ID: MRT4577_80226C.1.pep
HIRSTTSSYVSLKSNITNRTIQTPTYSYT

SEQ ID NO: 347660 - protein, 61 aa, Zea mays
  Clone ID: MRT4577_80227C.1.pep
PFLCLLRWPYPFLDLSSSGAPLWYLGMAIAHVPCFFLYWLIVKAKHTYFQRMFPHAYVRAT

SEQ ID NO: 347661 - protein, 64 aa, Zea mays
  Clone ID: MRT4577_80228C.1.pep
WVDPRVRSMAAMRIHSSFVYDRSDEPMLQENTVRSGPSVWWRQSTWCCGAGNSGGRGHGQQEVL

SEQ ID NO: 347662 - protein, 225 aa, Zea mays
  unsure (1)..(225): unsure at all Xaa locations
  Clone ID: MRT4577_80229C.1.pep
MRRFLTHLHHHSHRLRPSPPLSRIPTTKNNLPFLVSRRLLSDDASPPAAAPSPPPPPPPAAAPPPPPPPSAIDVPNEELKRRLEAYYKVEDESELSSVAVAVLERNLADAHSETDDELIEELRDRPLPQVHDRDFEADFDEMYETDEELTDLYNARQHVENKMKDDKSSNNMNDTKWDEEIKKAAEKGQLSNMKECEDILEDMLHWEQXLLPDDIKQKAEGQSNR

SEQ ID NO: 347663 - protein, 85 aa, Zea mays
  Clone ID: MRT4577_8022C.1.pep
SNSARADGILDILRGHSCVAMFQLLLSSIAVSPFAGAALVDLKLGRYMTCRDAPYAADDTPAPSPDSASSLDSTSEEHYINNAYD

SEQ ID NO: 347664 - protein, 78 aa, Zea mays
  Clone ID: MRT4577_80230C.1.pep
RTRHLGVLHIFKGLRKITTQTPASDLTHEPTPDINSFFTNRDIVFVLRTGQKQMCYIILSRIYQICCPWKILLLLLPT

SEQ ID NO: 347665 - protein, 79 aa, Zea mays
  unsure (1)..(79): unsure at all Xaa locations
  Clone ID: MRT4577_80231C.1.pep
VCNRRGNDGIVAIGTFLNILLVNNFSNGEVXPKTIHVPSTVTLATIDLAMKXQLSXHVTIILSGTLYLCASSRDCAAMP

SEQ ID NO: 347666 - protein, 78 aa, Zea mays
  Clone ID: MRT4577_80232C.1.pep
SFFSSRLARGLPAASSWGGADSVMVCFVGILLMRWIFSTDSAAPTTVVIGMELRIYMRYHFGCRLMRGSFGEIYHDNG

SEQ ID NO: 347667 - protein, 73 aa, Zea mays
  Clone ID: MRT4577_80233C.1.pep
NFRSKSIPRWAPSMSSRRFASILLLSTWVTGPFYSICFLQLTRHHTCASHKKSNSLAHRKTALESRMIIFSRT

SEQ ID NO: 347668 - protein, 138 aa, Zea mays
  Clone ID: MRT4577_80234C.1.pep
PTRPLFPSPLSLPLHPAATMSGLYSQGFSPARTLSPQIRSNPDADSQYLAELLAEHQKLGPFMQVLPICSRLLNQGEIDFFFYPSLAHCGWAKYLQCCTRNVAPTLHGEPDEAAMAKESAYSEDEVAPRNTMGDVPLE

SEQ ID NO: 347669 - protein, 73 aa, Zea mays
  Clone ID: MRT4577_80235C.1.pep
QSVCKKMERIIRVNMVYTRILLRLAMYLITGSNIGKLSIHFHQLVGLTFCGLRKVLVVSAAHHRARRVHAVSS

SEQ ID NO: 347670 - protein, 99 aa, Zea mays
  Clone ID: MRT4577_80236C.1.pep
MDGLIKCQDKEDHQDDRRLTNTDLVLFQVLLCAAADGGKCRWARPSYKSKIIDERRRRLKSDVDAMLTCIKDCEDDEARMQHMVYDTELEETFENLYID

SEQ ID NO: 347671 - protein, 129 aa, Zea mays
  unsure (1)..(129): unsure at all Xaa locations
  Clone ID: MRT4577_80237C.1.pep
ARSWRLPAWWPCPRTTASRLHQSSGFAGGGVGDHPFINPLALPAEEWARLGCRRALVTVAELDTMRDRGRRYVDALRPEGERVGRGGGCSVREPGRGEGHVYFIDKISGDGDKAKAEMAXVVSFIQQSG

SEQ ID NO: 347672 - protein, 92 aa, Zea mays
  Clone ID: MRT4577_80238C.1.pep
PAGMAPFPLRLLRTATLPRRREASGQASRLQCPPASPLGWEEDPVAMEGAQDLPRLVASRILPAYHYHFQVQPAIRCDVIVSDLSPCRITSA

SEQ ID NO: 347673 - protein, 212 aa, Zea mays
  unsure (1)..(212): unsure at all Xaa locations
  Clone ID: MRT4577_80239C.1.pep
RLLRRHQPTAGLEALFYDKWHETELERWLSDHGIPHPSPSDRKSLQSTVKANWNDKTVSPYTSWDAPTLQKYLSLKGQQAKKGTEKXRKEPRRAGQAILDXTEDSANQAYGNVKDWIFDTWSDSQLKAFADKHGIPVPQPRQRDSLLAAVRDNYQSAAEKAKETANYPGDWLYASWSDSDLKAWFDERGYSVPQPNTRDSMIAALRRQSRPC

SEQ ID NO: 347674 - protein, 93 aa, Zea mays
  Clone ID: MRT4577_8023C.1.pep
TLFSSGFFRRAMCAWLGESLCQVFGAHAGMLNPRRRMVKWIGRTRFFSWGFLLTVRIVFNVQRMMSLATHILVYPAWIYKCDPIVWPLIKRKR

SEQ ID NO: 347675 - protein, 54 aa, Zea mays
  Clone ID: MRT4577_80240C.1.pep
VIESKIISFVKDNLPFSSVPQPRSWAYSFSRVSVKFNVHANDSSQFSKKNPTRL

SEQ ID NO: 347676 - protein, 79 aa, Zea mays
  unsure (1)..(79): unsure at all Xaa locations
  Clone ID: MRT4577_80241C.1.pep
TNRTLAPISSLTTIAPPXYNTRAPHVVAVLVVVALLASSASAAITCGQVGSLLAPCIPYATGRASALPASCCSGVKSLN

SEQ ID NO: 347677 - protein, 44 aa, Zea mays
  Clone ID: MRT4577_80242C.1.pep
ETHCLGNAFFVLKFDSFFSYEKRTQFKSIFSSYDLFSFINNNLK

SEQ ID NO: 347678 - protein, 43 aa, Zea mays
  Clone ID: MRT4577_80243C.1.pep
WRRPCGGRTMSRSFVAKSFRTAVGRHIAQCSSVQHNVEPSHEK

SEQ ID NO: 347679 - protein, 145 aa, Zea mays
  unsure (1)..(145): unsure at all Xaa locations
  Clone ID: MRT4577_80244C.1.pep
PDIFGSAARQMQSXKCVVVGDGAVGKTCLLISYTTNAFPGEYIPTVFDNYSANVMVDGKPINLGLWDTAGQEEXDRLRPLSYPQTDVFLCAFSIISPASFENVSAKWHPEISHHCPNTLVILVGTXLDLRDHKVTFDRLREKNQP

SEQ ID NO: 347680 - protein, 90 aa, Zea mays
  Clone ID: MRT4577_80245C.1.pep
ISSGLAVCWGVPEGLVNVLGPGEVPKLLPLKFAVVSPGPLPGSMGVKKMGSPLGVREHLKTAKQPPPPEVVVVVVTPKIKRMGPGVFGFF

SEQ ID NO: 347681 - protein, 67 aa, Zea mays
  unsure (1)..(67): unsure at all Xaa locations
  Clone ID: MRT4577_80246C.1.pep
YTSVYYSNAYGKPQWDGTGSGTTVDYKLWATCSDRGTGVTMKRKMKTYCSEMHVDXENYPPGDSKRA

SEQ ID NO: 347682 - protein, 106 aa, Zea mays
  Clone ID: MRT4577_80247C.1.pep
YTIPFWGGIFRHPLGNDHWAEKFRGVLKRWVPRFCRRGNFFCQLEGFLKTFLEMGVSEPPHYLFKWGESKFMGLKGSGPFLKLNPTPQVLKNYILPPIISPQIYTT

SEQ ID NO: 347683 - protein, 95 aa, Zea mays
  unsure (1)..(95): unsure at all Xaa locations
  Clone ID: MRT4577_80248C.1.pep
FXFFFXFFFFFWESTVIFLSGAPYTHMASKQYAHPHYASTTIRSILRYKCAHNLQTTHTRCQIMLLLYVHEQPGYLCSPGTAISPYPPSNSKHSG

SEQ ID NO: 347684 - protein, 99 aa, Zea mays
  unsure (1)..(99): unsure at all Xaa locations
  Clone ID: MRT4577_80249C.1.pep
NTLFQILLQIIQGPSPPNQLLPFFKKTXGGGGGGSFTXLLLTXIQXXLNFTXHTIPXKPXNHIPXPXNXKTSXSPSISLXTPSPPTFIXXXYXSKPPSP

SEQ ID NO: 347685 - protein, 116 aa, Zea mays
  unsure (1)..(116): unsure at all Xaa locations
  Clone ID: MRT4577_8024C.1.pep
FFDKAIGINVPRSRFLPVKATSDLLLGQVFLDASQCFVXDIVISLVLSSILLMAQCYAHFCFQSDLYTLVDGFVIRNPSRTNPANPSIELGPEFKKVKQFVSKIMKIPFIIEFHQH

SEQ ID NO: 347686 - protein, 46 aa, Zea mays
  Clone ID: MRT4577_80250C.1.pep
SPFFSPFFLFMLFFPPATSIFKLSPRSHLQPAVHLAYFKHVLIKSC

SEQ ID NO: 347687 - protein, 51 aa, Zea mays
  Clone ID: MRT4577_80251C.1.pep
DPLEVVGEHLPVGFGSAIEQALPALFVHRHLPFRRLEGIGRFSLAVVGSAC

SEQ ID NO: 347688 - protein, 79 aa, Zea mays
  Clone ID: MRT4577_80252C.1.pep
KKILFFLIRGGKLIPFCLVANKKGSTLPKENGFLGTNINQTGAERAPLTGRVFGTPGQGFPKKFKKPGTLQLLSQRQAS

SEQ ID NO: 347689 - protein, 142 aa, Zea mays
  unsure (1)..(142): unsure at all Xaa locations
  Clone ID: MRT4577_80253C.1.pep
EXEEAVAMESQTLRHXXEDDGADNGXPXPNXNXRXXXKXXEXRNXHXHAAAKPXDXXAXEGGEDPKSXDAKXXKVDQATLXDXXXXANXXNXKGXXDXTXQTXXDXXKGKXPEENRKTXSXKNDXTQEEEXEXRXENQXAXE

SEQ ID NO: 347690 - protein, 62 aa, Zea mays
  unsure (1)..(62): unsure at all Xaa locations
  Clone ID: MRT4577_80254C.1.pep
TRVAYSVIIRNQQKDTERKQTKSSHVMEREMTLYTQGKRPXTGYCTYNHLEREGYLLLELVG

SEQ ID NO: 347691 - protein, 110 aa, Zea mays
  unsure (1)..(110): unsure at all Xaa locations
  Clone ID: MRT4577_80255C.1.pep
SVDYPPVKVVDIVDPFRLQEHPPFDKKSFXSSIKKSLKNLPFVLEPKKTDEFKKGVEGAPKFFLSKLKALQFFVGESIKDKAPVVFPYSKDGAPNPPFPYFSQGLKEIKC

SEQ ID NO: 347692 - protein, 109 aa, Zea mays
  Clone ID: MRT4577_80256C.1.pep
RGFPFGGPKLKKTPPAYNLQTDNLGEGPIRGIFLVIKTFPLLRSGGHTFGYPAQEPGGGTGLSQPPGPLGGPVGGPGGGPVGHPGNSGPAPGGNQFSLKGVIKGGEKRE

SEQ ID NO: 347693 - protein, 108 aa, Zea mays
  unsure (1)..(108): unsure at all Xaa locations
  Clone ID: MRT4577_80257C.1.pep
YLTRPTDELKGDVKDVGTDPVEQMDLCSKFIDDAIRGIPVTADVEIALDCDILVCXRSTKFLDTHXRTRVSPSCSLSQKLSRVIVTNTARQASLTDMPVTAEMAQKCG

SEQ ID NO: 347694 - protein, 404 aa, Zea mays
  unsure (1)..(404): unsure at all Xaa locations
  Clone ID: MRT4577_80258C.1.pep
FYFYFGIAAAPGASDCQLPQEVAAAGSVVQRAMAAAPTVRGYGPATPSSSSVALPRPRSRVPAPLVPVTTRRGAPSVRLRAAGADTPPRGGLQLQRREEDEGLPGTVLGRGEDDEVSEKVGEEKVERWMRESIAEIVRHVGEAPFLVHLFSSGEGERVTVRREPAAPESWPDVRRRWGPGGARRPDGIILVEQVASDGGGASAASEAARQVWGLVVQARGMERASCYVLSTCRVRSSAGFCTHFCLARAQCFGDPVELXPQRLAQPPGGAGARHGARVVLRAFHLPRALLGRVLHALLPRAGAVLRRPCRAPAPQRLAQPPGRPPVAARRQLLLLILLIXDSMLQGPNAMMPPLRWQERGREACRLXEAGEANISFRSPRIGYQLYRLLIVNLLIQSRSSSSSQ

SEQ ID NO: 347695 - protein, 283 aa, Zea mays
  Clone ID: MRT4577_80259C.1.pep
MEVKTVKVSNLSLNALKRELTEFFSFSGDIEYVEMQSESEWSQLAYVTFKDSQGADTAVLLSGATIVDRAVIITPAENYQLPPEAHKQLSGANVPTESAVRKAEDVVSSMLGKGFVLSKDALNLARSFDERHNILSNATATVASLDRQYGLSEKINLGRAIVGSKVKEVDERYQVSELTKSALAAAEQKASFAGSAILSNQYVSFGASWLTSAFTLVTKAAGDMTSMAKDKVERAEEERKAIMWEERNGLVSDYAKIHLDEPSSWEPAVLPLESVDEQKLQAV

SEQ ID NO: 347696 - protein, 95 aa, Zea mays
  Clone ID: MRT4577_8025C.1.pep
LGADPHELLKAWRRSSKANGLLPARGPGRRRKLWLPAVGRPGRSAPGHCCGAFRIGFIRSAASSSAFITPVICPQSVSPTGPRIVMVVSSWSDSS

SEQ ID NO: 347697 - protein, 39 aa, Zea mays
  Clone ID: MRT4577_80260C.1.pep
NDSHTARLIIHLTTRTSTLTCYKPITSHVSFVPWPCLSC

SEQ ID NO: 347698 - protein, 283 aa, Zea mays
  Clone ID: MRT4577_80261C.1.pep
MEVKTIKVSNLSLNALKRELTEFFSFSGDIEYVEMQSESEWSQLAYVTFKDSQGADTAVLLSGATIVDRAVIITPAENYQLPPEAHKQLSGANVSTESAVRKAEDVVSSMLAKGFVLSKDGPGLARSFDERHNILSSATATVASLDRQYGLSEKINLGRAIVGSKVKEVDDRYQVSELTKSALAAAEQKASFAGSAILSNQYVSVGASWLTSAFTLVTKAAGDMTSMAKDKVERAEEERKAIMWEERNGLVSDYAKIHLDEPSSWEPAVLPLESVDEQKLQAV

SEQ ID NO: 347699 - protein, 283 aa, Zea mays
  Clone ID: MRT4577_80262C.1.pep
MEVKTVKVSNLSLNALKREITEFFSFSGDIEYVEMQSESEWSQLAYVTFKDSQGADTAVLLSGATIVDRAVIITPAENYQLPPEAHKQLSGANVSTESAVRKAEDVVSSMLAKGFVLSKDALNLARSFDERHNILSNATATVASLDRQYGLSEKISLGRAIVGSKVKEVDERYQVSELTKSALAAAEQKASVAGSAILSNQYVSAGASWLTSAFDMVTKAAGDMTSMAKDKVERAEEERKAIMWEERSGLVSEYAKIHLDEPSSWEPAVLPLESVDEQKLQAV

SEQ ID NO: 347700 - protein, 228 aa, Zea mays
  Clone ID: MRT4577_80263C.1.pep
MKLNISYPNNGTQKLIEIEDERKLRVFVDRRMGQEVPGDSVGDEFKGYIFRITGGNDKQGFPMKQGVMHPTRVRLLLGEGHSCYRPRRDGERKRKSVRGCIVALDLSVLALSIVKKGDAEIPGVTDVVHPKRLGPKRATKLRRFFGLSKEDDVRKFVIRREVQPKKEGAKPYTKAPKIQRLVTPQRLQHKRHRVALKRRRAEAFKDAANEYAQILPQRINEGKSAHDE

SEQ ID NO: 347701 - protein, 30 aa, Zea mays
  Clone ID: MRT4577_80264C.1.pep
LASSKASRFSPVINYEYVYERLVRRMPTCL

SEQ ID NO: 347702 - protein, 98 aa, Zea mays
  Clone ID: MRT4577_80265C.1.pep
REARLPTKVLWMRRMRVLRRLLRKYREAKKIDKHMYHDMYMKVKGNAFKNKRVLMESIHKSKAEKAREVGPGSTRNNTTCLIHSSSYWGTEESKEVKY

SEQ ID NO: 347703 - protein, 68 aa, Zea mays
  Clone ID: MRT4577_80266C.1.pep
SRGDDAGGGGLADWARHCKHRRWEFFKEKGTSTDSGYACRCCLMIVRFFVLICEFARELCASLFWCKL

SEQ ID NO: 347704 - protein, 139 aa, Zea mays
  unsure (1)..(139): unsure at all Xaa locations
  Clone ID: MRT4577_80267C.1.pep
MVSLKLQKRLAASYLKCGKGKVWLDPNEVSEISMANSRXGFIIKKPHKIHSRSRARRAHDAKQKGRHSGYGKRRGTREARLPTKVLWMRRMRVLRRLLRKYREAKKIDKHMYHDMYMKVKGNAFKNKRVLMESIHKSKA

SEQ ID NO: 347705 - protein, 133 aa, Zea mays
  unsure (1)..(133): unsure at all Xaa locations
  Clone ID: MRT4577_80268C.1.pep
GGIQFFVKSFTGKTIFVGFXSSVPLNNFKANFPANKGLPPVPQGFFFTGKQLEVARPLPEFTFHKVGPFPLVFPLHKGQLTLGLLIFCRTWVFALSGALWCPSIWMLSFNKPPRFVCHESALWLRWFNGPVVS

SEQ ID NO: 347706 - protein, 240 aa, Zea mays
  unsure (1)..(240): unsure at all Xaa locations
  Clone ID: MRT4577_80269C.1.pep
MVSLKLQKRLAASYLKCGKGKVWLDPNEVSEISMANSRVYVFAILTGQNIRKLVKDGFIIKKPHKIHSRSRARRAHDAKQKGRHSGYGMLLQLIYVTVLKGEXLVVIRCLYXKRRGTREARLPTKVLWMRRMRVLRRLLRKYREAKKIDKHMYHDMYMKVKGNAFKNKRVLTESIHKSKAEKAREKTLSDQFEAKRAKSKASRERKIARREERLAQGPREITPPVSSTAPATGAPKKAKK

SEQ ID NO: 347707 - protein, 74 aa, Zea mays
  Clone ID: MRT4577_8026C.1.pep
VGLTILDDSAFVPLLLNYMNYSITAEILVSVLISSFCYLKAAHGFLPSGKADCYPPLKSLLVLRCFERYWIRFW

SEQ ID NO: 347708 - protein, 123 aa, Zea mays
  Clone ID: MRT4577_80270C.1.pep
YATSASIAQHYAGRFSRTKRSTSTSASTGPEPTPTAAAVSSGTTAITHISRILPVISRHGVLPTSAGATFSVCPTPMTQRWHGIHRAIMAALCANFCTLTNNHLASSLYVADPAREAQDRCHG

SEQ ID NO: 347709 - protein, 69 aa, Zea mays
  Clone ID: MRT4577_80271C.1.pep
MWPEKMYAWASMAEDPLKRAGSASAHPSSPLRRYSPTTLAVGGLIVVGGLSYVMFGSKKNGRDQQASRA

SEQ ID NO: 347710 - protein, 91 aa, Zea mays
  unsure (1)..(91): unsure at all Xaa locations
  Clone ID: MRT4577_80272C.1.pep
NVKFIFTNTTTTTARILTLLKLLTISAXNTNATIFPKCXQAPIASIIPTYLPSIISTVYENPALQPYTLQHAIAPSNIHLSPLFQQLPDLS

SEQ ID NO: 347711 - protein, 39 aa, Zea mays
  Clone ID: MRT4577_80273C.1.pep
KKKKKKKKKKKKKKKKKIKKKKGEKKKKKKKKKNKIKFK

SEQ ID NO: 347712 - protein, 114 aa, Zea mays
  unsure (1)..(114): unsure at all Xaa locations
  Clone ID: MRT4577_80274C.1.pep
MARLHCLEAVLTLGIITGMLCIMDNAQHFIHKVGHSRPNHISTDLWDVXMERXDKKLEKQPYGNYGMEQPQTFLDVVEPGSKAHNDCSFVCCTTGTNTCKRGSEISTDMKIIRI

SEQ ID NO: 347713 - protein, 56 aa, Zea mays
  Clone ID: MRT4577_80275C.1.pep
PTLHVIHTIQVLLSIIPGNTSNTNGTYISYILQQTSHFSVRRNLELTPYILTLLLT

SEQ ID NO: 347714 - protein, 62 aa, Zea mays
  Clone ID: MRT4577_80276C.1.pep
VKEKTSGSLNVEGCFCNQMFFRLCFLFREIIFPFRVYLFFFYLLLLILFFFLSILYIWLCRF

SEQ ID NO: 347715 - protein, 80 aa, Zea mays
  unsure (1)..(80): unsure at all Xaa locations
  Clone ID: MRT4577_80277C.1.pep
PNQDHHKWSSIHKDAKTDSKAFEYIHSPNPNPNVTTGALVXGSFQNDTFXDSPDNTWQTESSTYNSVTLVCLLFSLNTTF

SEQ ID NO: 347716 - protein, 89 aa, Zea mays
  Clone ID: MRT4577_80278C.1.pep
GFSENPRAPLGLMRGLTFLRSPLHTIVTEDEVGRRKAGPVHCRRTDTAVTSPDAVKAELGLDQAAMFSLGSFSLYHQMEIWRTATIGRR

SEQ ID NO: 347717 - protein, 206 aa, Zea mays
  Clone ID: MRT4577_80279C.1.pep
MALLTAPPAALVVLAVAAALLALLPRGSAQISAPPAGAPAPSSSLDCAGALLNLTPCLTYVERRSALTRPEKGCCGALAAVVGGDDAACLCALLAGNGARGVRVDTVRALALPTICRVDAPPPRLCAALGMPVAEPPGGAAADAPMDSGVANKNYIILAGLYLYVVKPCDTVHCCTVGLAGGWILAVELEANELATFVGLPSAPTD

SEQ ID NO: 347718 - protein, 48 aa, Zea mays
  Clone ID: MRT4577_8027C.1.pep
EESTCPRESFSWSRRTKTCYKNCGLCLTLFSPILVIHFSILRNGLSHH

SEQ ID NO: 347719 - protein, 232 aa, Zea mays
  unsure (1)..(232): unsure at all Xaa locations
  Clone ID: MRT4577_80280C.1.pep
MGHEDAVYLAKLAEQAERYEEMVENMKIVAGEDRDLTVEERNLLSVAYKNVIGARRASWRIVTSIEQKEESKGNSSQVTLIKEYRQKIEAELAKICEDILEVLDQHLIPSAKSGESKVFYHKMKGDYHRYLAEFAIGDRRKDSADKSLEAYKAATELPXXTKLPPTHPXIRLGLALNFSVFYYEILDAPXPACHLAKQAFDDAIAELDTLSEESYKDSTLIMQLLRDHLTLW

SEQ ID NO: 347720 - protein, 144 aa, Zea mays
  Clone ID: MRT4577_80281C.1.pep
IGYLEAGRERHRAPSPGALVPNAGNAAAAAPERQCRPPSPIVQSSRSSSCQGAIAELALPQPWTPSGHPSPISSRPHPLAAAPSYSWWLSLLPWMLAVLPSLVLTSAPCVGWPVAPALGMLDDYVNWRAWIRMDHKVALMNPSR

SEQ ID NO: 347721 - protein, 71 aa, Zea mays
  Clone ID: MRT4577_80282C.1.pep
PVLEGDSPNFLLCGPWGDLVKGKQADGFCLKGTPGREGFQKGTNFVRPPGITPIERKFPTGPKNFTLWPPP

SEQ ID NO: 347722 - protein, 103 aa, Zea mays
  Clone ID: MRT4577_80283C.1.pep
DPAGPRYCRYGIGVGSIVDCVGCGAEDVASVVLSAVADYFPVVVDDAAELHRGLSIAVTASSSTSVSLSARPSCRKPSGDSEFAERVVGWCDWGGGAVSGSHI

SEQ ID NO: 347723 - protein, 49 aa, Zea mays
  Clone ID: MRT4577_80284C.1.pep
PSYSSIRDYSKDRSRRPGRLPLRLPATTHNSLTSREWRTRLTNGLHSIS

SEQ ID NO: 347724 - protein, 61 aa, Zea mays
  Clone ID: MRT4577_80285C.1.pep
NNGGLKFLSSLWMAFSSKKERDRSLAPRPLHPPCGGAPQDINHFHPQKTGPPLKGSFVSFS

SEQ ID NO: 347725 - protein, 101 aa, Zea mays
  Clone ID: MRT4577_80286C.1.pep
SEPPKLILERRRSGFRRRRPIGRSAHSAAGPEERPAPRPDCAERDAEEKRENMALAPGSSEWIIAVGRLAACLAGHPDFSMLSCRRQQTPTVLMIYACGQF

SEQ ID NO: 347726 - protein, 98 aa, Zea mays
  Clone ID: MRT4577_80287C.1.pep
AWNLWADLCACLCACLCACLLAETNIRRRGRRLQKPLEHKPCKERLLLKITLILLNGQITKKYLSPTPDRTTPKVPLQLQHSSYISERGPIRHDTDLR

SEQ ID NO: 347727 - protein, 173 aa, Zea mays
  Clone ID: MRT4577_80288C.1.pep
MCRCWAAAKGTRMEAGPPYEPAPTVADGRDWSELSLDALVLVFGRLGPVEILMGSGLVCRSWLQAAKEPELWASLDMASHRAVEEMGGDVLRGMARVAVGRSRGRLEVFSGKHFVTDDLLNYISGRSACLRSLSLVSCPEVTNKGFTDLVTNAPKLEDLSLELCPNEGGRRLA

SEQ ID NO: 347728 - protein, 69 aa, Zea mays
  unsure (1)..(69): unsure at all Xaa locations
  Clone ID: MRT4577_80289C.1.pep
EEGPVPASMVCSYALLFRPAGXRIAAASRPGLGMLPRYAXFAAPVRLVLQSSQCSTGTCGSRSASRYDH

SEQ ID NO: 347729 - protein, 45 aa, Zea mays
  Clone ID: MRT4577_8028C.1.pep
QLAGTDFRAQLGFKQTGIAGIQAPGSIEQDRLFTCESEKTPSNGA

SEQ ID NO: 347730 - protein, 99 aa, Zea mays
  unsure (1)..(99): unsure at all Xaa locations
  Clone ID: MRT4577_80290C.1.pep
MLEPRSVNGDLIFASILLTGTLTGYPGGLCADPFVYGIGSPKKITELSTKVINNGRLDMLVVMLAWIHAXYTGTCTIDNLFDHLFDHVHDTIFHTFSHK

SEQ ID NO: 347731 - protein, 75 aa, Zea mays
  Clone ID: MRT4577_80291C.1.pep
RTTGGLEAGIYKDGQTREHTGGALTLGGGEIICCCNKMDATTPKYSKGRYEEIVKEESFYLKKGGCNPDKNAFFP

SEQ ID NO: 347732 - protein, 55 aa, Zea mays
  Clone ID: MRT4577_80292C.1.pep
VHLHENYCVSLNGMVMDTDCSKQIHCHVCGSVSIEDTISPLPFLRRIIFEYITVN

SEQ ID NO: 347733 - protein, 99 aa, Zea mays
  unsure (1)..(99): unsure at all Xaa locations
  Clone ID: MRT4577_80293C.1.pep
DQVGVRRQVFKVWMHNNKHIGSGGRRQPPPHLPPPEXSNSPSSPSSXWEARLSSQQHHHHHHHLLNPPPHFFMGSERGCGIKQGKSGGVPILSSLPFLG

SEQ ID NO: 347734 - protein, 118 aa, Zea mays
  Clone ID: MRT4577_80294C.1.pep
LWGTKILGCCTPTAVAWLGGGLEVFAVVAAVCPAAAMCRAAGQACRAGEWQRIVASAIQKKGGVAASGGHRSRSFLVVATTIIIWAGSHMFLRVCCVDARSEPRRLALQGSGHCGEGL

SEQ ID NO: 347735 - protein, 212 aa, Zea mays
  Clone ID: MRT4577_80295C.1.pep
MHRSRRRARIVAAALLSAFAAAAAALTVYLVFRPLKPQASVVRVAVYRMATAAGNSSEGRAPPPYTLAASARFTALLHNPSDRAVVFYDGLFAYVTYRGEMVAPPAPLPGVAQGRGADVALSPHFGLGGAVPVPVSADAAQALEGDCAAGRVELRLVVMGRVKYMSGPFRTGWRGLYLRCDVTVGLWVDATAGDDGAGDVPLLEYPKCSVDA

SEQ ID NO: 347736 - protein, 70 aa, Zea mays
  Clone ID: MRT4577_80296C.1.pep
MARLSATAALPLLVLSLLADAHCGALADAAKHDTEPESTAAVDAEEDHVLSDPTDHAEAGSGSASEKEAI

SEQ ID NO: 347737 - protein, 106 aa, Zea mays
  Clone ID: MRT4577_80297C.1.pep
TPKGLEVMDRADRNTANNNITHQEHCEKRTRFGKALTSFSRSKEFDAVGIRRSLTQSLLQNNGQRRKLLDKVLAMLHLLRPNRGQYYVALTLLTQKRTEIRIKSAI

SEQ ID NO: 347738 - protein, 618 aa, Zea mays
  Clone ID: MRT4577_80298C.1.pep
MAMATTSPATVQPSSYKHTSRGAARCCPPPLLSWKTRSFGQQVTTRATAASSRGQPAGVALAGGEEGDSIRRLQNGSDVRGVALEGEKGRAVDLTPLAVEAIAESFGEWLREEELRLRGQEPEQLRVSVGRDPRLSGPRLSAALFAGLARAGCSVFDMGLATTPACFMSTILPRFNYDGSIMMTASHLPYTRNGLKFFTKRGGLTSGDVENICDRAAHKYVARKTGVGGGGRGTPPVVMRVDLMSAYAQHLRDIIKQRVAHPTHYDTPLRGFKVVVNAGNGCGGFFTWDVLEKLGADTTGSLHLEPDGRFPNHIPNPEDATAMSLTRGAVLAQGADLGVVFDTDVDRSGVVDAGGAAINGDRLIALMSAIVLGEHPGTMVVTDARASDGLTRFVESRGGRHCLYRVGYRNVIDKGVQLNADGVETHLMMETTGHGALKENYFLDDGAYMVVKIIIEMVRMKLAGVEGGVGSLIRDLQEPAESVLLRMDVMGEPKDAKERATHAVEAFKNYIQEDKLFGWVLDDCGDCSVAEGCLTDTNNDPIDVDAHMYRAKLYDENQRAVGMVHIRQSVHNPNIALNMQSYAPGGCKSMAKDLLERFLLASGLNEFVDISQVEKFVQ

SEQ ID NO: 347739 - protein, 65 aa, Zea mays
  Clone ID: MRT4577_80299C.1.pep
RPAPRSSEFGSREDKLFGWVLDDCGDCSVAEGCLMDTNNDPIDVDAHMYRYHLHVLQYIFFRSYF

SEQ ID NO: 347740 - protein, 96 aa, Zea mays
  unsure (1)..(96): unsure at all Xaa locations
  Clone ID: MRT4577_8029C.1.pep
MAVANXIAGYIDQQQVQQIMPELTEVAMAYRVEYLHLLSFSALEVGNAPTYVQQQVLQQIVPAVTHLAVANPAAYLQQLLSFNQLAVSNSAAYLQQ

SEQ ID NO: 347741 - protein, 103 aa, Zea mays
  Clone ID: MRT4577_802C.1.pep
AGRAGATLPQPSASLWASAVALVQPTGVELRLERLDGCGRNLCDLPHSLVNRALTLDVSRSYDVCRLRVGQQSDTGTLLDHASAKRPIIPHLMRLRMELGLYA

SEQ ID NO: 347742 - protein, 115 aa, Zea mays
  Clone ID: MRT4577_80300C.1.pep
MAARARDPGEAAQAAMHTRDPQPSPGGGAVHSHGPPDGCADAAPSSDACAGGSSQPRRARVRDTLGVTPRRLVGVAPGGAGAEVPGGRLARGCAALEARWQTAPPRHTSATPRMG

SEQ ID NO: 347743 - protein, 97 aa, Zea mays
  Clone ID: MRT4577_80302C.1.pep
RAMGSPFPCPPCKSERSKKPLATFKRFSLGTLLSFGKKPKHGPKRRIFGRHGGSPCRAMKLLGAPFGFLFGNVAGALVTFCDESFNFFGRRPLCFRD

SEQ ID NO: 347744 - protein, 156 aa, Zea mays
  Clone ID: MRT4577_80304C.1.pep
KLGIRLETGRGTGVSDVPLFGRGWGLIRARSQLWHTMVERGSDRLAFITGQTRTRLLRSRWQMSPLGPQVDGGTREDGSSERNQLPKNEPAVVVPGLPDPGALQGVMARALRYDALVPVSERAGGQQENNASTPSYDDELFRLYKMGTACPESETV

SEQ ID NO: 347745 - protein, 124 aa, Zea mays
  Clone ID: MRT4577_80305C.1.pep
ALTILLMDQQVAGLQVLKDGRWIAVNPRPGALVVNIGDQLQALSNGRYRSVWHRAVVNADRPRMSVASFLCPCNDARIGPAARLLTDGTPAVYRDYTYAEYYAKFWSRNLDQEHCLELFRTPTS

SEQ ID NO: 347746 - protein, 292 aa, Zea mays
  Clone ID: MRT4577_80306C.1.pep
AMMSVAYEFFRLPAEERAKLYSDDPAKKMRLSTSFNVRKETVHNWRDYLRLHCHPLEQYVPDWPDNPPSFRRTVSAYCSAVRELGFRLYVAISEGLGLDGAYIKEALGEQEQHMAVNFYPRCPAPELTYGLPAHTDPNALTILLMDQQVAGLQVLKDGRWIAVNPRPGALVVNIGDQLQVTCSCLALPLFPPSHLLSAPGLHYCTAPAQALSNGRYRSVWHRAVVNADRPRMSVASFLCPCNDARIGPAARLLTDGTPAVYRDYTYAEYYAKFWSRNLDQEHCLELFRTPTS

SEQ ID NO: 347747 - protein, 108 aa, Zea mays
  Clone ID: MRT4577_80307C.1.pep
LWLFFPHIPLLVATSDLYLEFEEFIYLQTRSRNKVRVRSVREGEGPWDEAGQSAAPRSVPHGGSLAGTTTSPTTRPFSRWRPHRAEMLSSRYLDAAASSSPRRSSGDA

SEQ ID NO: 347748 - protein, 140 aa, Zea mays
  Clone ID: MRT4577_80308C.1.pep
VRVRILVSDAAATPRACAGIDSIAVDMKESKLTVVGLADPVDVVGRLRKVGSAAIVSVGPATEEKKKDGDKKEGGGDKKDADKKGDDKKPPPPPVYPYPYPWHAYAAAAAAAQYQYHPRPYPPQYVVHSAEEDPNSCVIC

SEQ ID NO: 347749 - protein, 67 aa, Zea mays
  Clone ID: MRT4577_80309C.1.pep
EDPGFPTEDASRGMAKLPRDDVQSSPAGGIRFQVVGPCPSSELTPAGEVSSDNYTPCCLLYASLHSS

SEQ ID NO: 347750 - protein, 124 aa, Zea mays
  Clone ID: MRT4577_8030C.1.pep
PGPLYLGLAFGRGFFFIFKKTFFCGFPQVGPFPFKKIFFALWGPLSKGGGSHLGWSFFSGNWPSLTSFWLCQGNPFWPWNPPPPPVFFFFWFWLPVFRVFLPPLFLCPPPFFFFKKVPLGSLPP

SEQ ID NO: 347751 - protein, 174 aa, Zea mays
  Clone ID: MRT4577_80310C.1.pep
IDYYCNTCTARVNGEPPPTWFTGASAVCTVSVAVSVVGFASPRLARCCFADESTSQFLLFLDTDQLSRLRECVRRRQCVIDCTPRSNSEKERKKERKARTPGPINRTDGRTAVSLCLLLSDCWTRCTASCGNDEVTRSMSIRARCSRRRRGRGRRGRGPCPSSASSSRTPPERA

SEQ ID NO: 347752 - protein, 336 aa, Zea mays
  unsure (1)..(336): unsure at all Xaa locations
  Clone ID: MRT4577_80311C.1.pep
MAICSAHTTTSLRSPCTTVSNAGLRQKQVIFVTSNRRSGGGRRHGGARSFQVSCSVDKPVVIGLAADSGCGKSTFMRRLTSVFGGAAEPPKGGNPDSNTLISDTTTVICLDDYHSLDRNGRKEKGVTALDPRANNFDLMYEQVKAIKEGQAVEKPIYNHVTGLLDPPELIAPPKIFVIEGLHPMFDERVRDLLXEGKVLRVKLIMKEGVKNFNPVYLFDEGSTISWVPCGRKLTCSYPGIKFSYGPDTYFGNEVSVLEMDGQFDRLDELIYVESHLSNLSTKFYGEVTQQMLKHADFPGSNNGTGLFQTIIGLKIRDLYEQIVAERAGVPAEAAKV

SEQ ID NO: 347753 - protein, 145 aa, Zea mays
  Clone ID: MRT4577_80312C.1.pep
PRVRPRVRGRVGIMKEGVKNFNPVYLFDEGSTISWVPCGRKLTCSYPGIKFSYGPDTYFGNEVSVLEMDGQFDRLDELIYVESHLSNLSTKFYGEVTQQMLKHADFPGSNNGTGLFQTIVGLKIRDLYEQIVAERAGAPVEAAKV

SEQ ID NO: 347754 - protein, 405 aa, Zea mays
  Clone ID: MRT4577_80313C.1.pep
MAICSAHTTTSLRSPCTTVSNAGLRQKQVIFVTSNRRSGGGRRHGGARSFQVSCSVDKPVVIGLAADSGCGKSTFMRRLTSVFGGAAEPPKGGNPDSNTLISDTTTVICLDDYHSLDRNGRKEKGVTALDPRANNFDLMYEQVKAIKEGQAVEKPIYNHVTGLLDPPELIAPPKIFVIEGLHPMFDERVRDLLDFSIYLDISDEVKFAWKIQRDMAERGHSLESIKASIEARKPDFDAFIDPQKQYADAVIEVLPTQLIPDDNEGKVLRVKLIMKEGVKNFNPVYLFDEGSTISWVPCGRKLTCSYPGIKFSYGPDTYFGNEVSVLEMDGQFDRLDELIYVESHLSNLSTKFYGEVTQQMLKHADFPGSNNGTGLFQTIIGLKIRDLYEQIVAERAGVPAEAAKV

SEQ ID NO: 347755 - protein, 105 aa, Zea mays
  unsure (1)..(105): unsure at all Xaa locations
  Clone ID: MRT4577_80314C.1.pep
MASVAAAGVAAAALLSVLXRARGGAARAGRAPGSLRLVAVCKTQPVPVFRGVFVSGLRCFGVNFVLVLIVLAPLLPSALAWRFIGNLPCLXSVAXLAGVXLLVLV

SEQ ID NO: 347756 - protein, 55 aa, Zea mays
  Clone ID: MRT4577_80315C.1.pep
YNIYSLKQFHIYLEYIVYVTLLELFKHRRWITLCRHLPSNLIADHTLNEVPVGGE

SEQ ID NO: 347757 - protein, 58 aa, Zea mays
  Clone ID: MRT4577_80316C.1.pep
AADAELKRTALYELHVAHGGKMVPLAVWSMPIEYRDCMVDSIVNGRANSSLLHVCDMS

SEQ ID NO: 347758 - protein, 93 aa, Zea mays
  Clone ID: MRT4577_80317C.1.pep
PRAGAGTEVTVLGRRYSSRRPPFLCVVFFGEVMGVYGDMHAFQVLLNTYSMVLMQDKIRARSHDGRMNGGGLYKKRQHAQTHCEIEACYKELN

SEQ ID NO: 347759 - protein, 63 aa, Zea mays
  Clone ID: MRT4577_80318C.1.pep
LSHPNNQGFLGNPGKKITRLSQAPPWFKNQKKTPQPWVGKWCWFPLKKKTCYLVKPFFFPLNK

SEQ ID NO: 347760 - protein, 148 aa, Zea mays
  Clone ID: MRT4577_80319C.1.pep
RLQVSVRNSRVDPRVRDAPPAYSELYRPSFVHPGAATVPTMSAAFPGASLYLPMAQSVAVGPLGSTIPMAYYPVGPIYPPGSAVLVEGGYDAGARFGAGATAGNIPPPPPGCPPNAAQLAVMQGANVLVTQRKGNFFMGGSDGGYTIW

SEQ ID NO: 347761 - protein, 135 aa, Zea mays
  unsure (1)..(135): unsure at all Xaa locations
  Clone ID: MRT4577_8031C.1.pep
IQEVGPTNNAFFGINSDGPLGFPMETEGLLVSAINPERCQPNMSXTDVEINYRIQNDAQQEISASMVSQAFGQSDIAFNSIDSAFNDGVMLSRNSCPPAPPQRMRTFTXRFSGYEEMNHAVASMXFGIVGQLEDR

SEQ ID NO: 347762 - protein, 64 aa, Zea mays
  unsure (1)..(64): unsure at all Xaa locations
  Clone ID: MRT4577_80320C.1.pep
ETKFSGSVDEKQKGFEDVXKERTYGIDGSIVRIMQRXKVIGHXXVVAECVEQMSRMFKPDLRAI

SEQ ID NO: 347763 - protein, 50 aa, Zea mays
  Clone ID: MRT4577_80321C.1.pep
YLIITNLFYSCVQSLALFGISVYFPRVCLEALSIKLLQTCLREKKTGCRY

SEQ ID NO: 347764 - protein, 68 aa, Zea mays
  Clone ID: MRT4577_80322C.1.pep
AGGNCAQHEHLFILSWAPLTGSHGALVLKRLCCRVFLRTTVLVGPFALDPYSQLPAFRHVCYPLGLPI

SEQ ID NO: 347765 - protein, 217 aa, Zea mays
  unsure (1)..(217): unsure at all Xaa locations
  Clone ID: MRT4577_80323C.1.pep
TNSNPHLPSWPSSARPPPPAWGRRPTPPTARRARPATATAAESPRPAPDPSPLGPTSALAPPLPTPTVSVPPATTSTPMRTPTPTPAPAPAAAPVPRGFSAXSPSFHSNSDADVAGRSPSPRXTASAPFTSTLTPTPTTPPRPRPPPPMTPATPRLWLLRTVPRTSGPPTSNPSARARWMCPRAPPRDLPNVVPSAAPAPTPRSTRSGRPGFGVLKT

SEQ ID NO: 347766 - protein, 62 aa, Zea mays
  Clone ID: MRT4577_80324C.1.pep
MCYTPCKSYTDMNRQFLEKKEHFFKYLGNTALSDQQGVYLRTSVTFGVAMYNEIYNHDTLRW

SEQ ID NO: 347767 - protein, 56 aa, Zea mays
  Clone ID: MRT4577_80325C.1.pep
RGHVNQGPYFFFPCCGRAFVPYCPGMHAALYCAPLVVNQGYPFFFCLKKNAPGVYQ

SEQ ID NO: 347768 - protein, 108 aa, Zea mays
  Clone ID: MRT4577_80326C.1.pep
RSRRCVHAPPTHRTARPRAARKPKHKMKNGSIASLFRKHEEKTASRAPPNPPPNIDEELSTLVDVVDDGPTALSEEPIEDEEPTEDEEELSPVYDVDSLENDLGLRVT

SEQ ID NO: 347769 - protein, 62 aa, Zea mays
  Clone ID: MRT4577_80327C.1.pep
SIIVLLILAKPRARPLHHQPASTTTDPHDFFKPFIVTRSDILLYVKRAPKWFYVCLKSTYLN

SEQ ID NO: 347770 - protein, 41 aa, Zea mays
  Clone ID: MRT4577_80328C.1.pep
KATHYIFLKKKTERNNLLLLENQFPFLETCTPYFMGWREYT

SEQ ID NO: 347771 - protein, 119 aa, Zea mays
  Clone ID: MRT4577_80329C.1.pep
MLTCIACSKQLPGDAPPLREPSDDDDRANAGGGGESAATPGTRQAIRVLTAQIKDMALKASGAYRHCKPCAGSSSPAASRRQQPYYHGAYAESGSDRFHCAYQRAGSSAASTPGCATGG

SEQ ID NO: 347772 - protein, 129 aa, Zea mays
  Clone ID: MRT4577_8032C.1.pep
CMSPASPQAVGRNSQVPAFNEEMVRLKWSPNHPQHLKGLQVQDVTSWKKYVCLYVLASVDHPLTMSQWQEVRAGWSGSCQCGRCYHNLQEFERTCSFSHSQRWVLCVHFNLFVWILELFKLPVVYFRKR

SEQ ID NO: 347773 - protein, 64 aa, Zea mays
  Clone ID: MRT4577_80330C.1.pep
VVLLLLKETYLEVAEPGVPVPSFPLLRAGKPCLWGKGCTVLHIPTWRSLLFTWGLRTFFPHSIT

SEQ ID NO: 347774 - protein, 151 aa, Zea mays
  unsure (1)..(151): unsure at all Xaa locations
  Clone ID: MRT4577_80331C.1.pep
FRCLETGLFCASNYHSLLISFGAXYGVILTHNSYLKYXTQKCLTLCFITFSTEEAMRNAIDGMNGKELDGRNITVNEAQSRGGRGGGGCGGYGCGRGGGGYSGVWRRDDGKCYGGGCSYGGGENPYGAGVSGYGGGNLCGGYGNSDGNWRN

SEQ ID NO: 347775 - protein, 96 aa, Zea mays
  unsure (1)..(96): unsure at all Xaa locations
  Clone ID: MRT4577_80332C.1.pep
ARXDGTARGQGRGPSQFLSILPISSQKIKDCPHATLEQGQIWVPGHLGRGPSRGPNIHLYLGFFSPTIYPSSPLEAWAYGGCNPDRPSLNLALAAT

SEQ ID NO: 347776 - protein, 95 aa, Zea mays
  Clone ID: MRT4577_80333C.1.pep
MWLLPVGVTTARRRRSPRPRTDFSRHGRRGPASRRQATSSRKVDTGARGDGNHHHHHGHHGVQIFPRCEHMVHVDIDTCTAKVHESRESFLARGN

SEQ ID NO: 347777 - protein, 496 aa, Zea mays
  unsure (1)..(496): unsure at all Xaa locations
  Clone ID: MRT4577_80334C.1.pep
MPPKELPGFYYDPEKNRYFPIRGPIPGAAARRGTPAAPPAVDTTGCSRKRARRPELLNAREMYGGGVMFSNKAARSTFKQQCHYAQAYQPMVWKYQATTSVADKALEQLDAMVQTPQGLKESRLLVSGSMNGSIRLYGLGTALSNFENEAEXAPTCLYSCGKAQARTTPQHLVXPGTGFIAFSSSISCIKKLGRHVPDASNTNSSVQRALWLLLDLENLMPLYILWIFLKLLTWQSDHGXYRVHSLDRTMWTADCSSDGTHAAFGSDLGAGLIDLETRGSSWVCRSKSDILSLKFVHSGKVVLCGLRNGSIAPVDVRQKQHNQPTGVASSSNARRTVPMLPTRHRGKQRNQASKDKFSRVISMSSAVCSLVSLSSDENYFLGSSMDGSIKLFDLRLIQKGGIQSYGGHVNSHTHLPLAVDPSETLLMSGGEDCTVRIWSIKTGELIFARSMGDSPFTSSCWPESSHGLCSPWLFDVNHSWGAWLGSRAGLFYMHGT

SEQ ID NO: 347778 - protein, 53 aa, Zea mays
  Clone ID: MRT4577_80335C.1.pep
QPFFPNNAWVYAPNLAPGFLIRYRAAGGREIGLCPLGFGGGRAQGRKQKFLGP

SEQ ID NO: 347779 - protein, 163 aa, Zea mays
  Clone ID: MRT4577_80336C.1.pep
LQAQARKLKKDQKAKEKEEKKLKAKQKEADRLQAQARKLKKDQKAKEKEEKKLKAKQKEAARLQAQARKLKKDQKAKEKEEKKLKAKQKEAARLQAQARKLKKDQKAKEKEEKKLKAKQKEAARLQAQARKLKKDPKAKEKEEKKLKAKQKEAARLQAQARKL

SEQ ID NO: 347780 - protein, 130 aa, Zea mays
  Clone ID: MRT4577_80337C.1.pep
SSLTSSVLVSSACLPSGQLQPPAIFPHLYTVRTRMLFAPSRLPLPRLPTRRLRLAPGSPMASMLAILRPSAPAPLAGRRARAAAPATARVALSTRSRYSSARVSLGSEVAVGADALLADYKPTTGFLFPG

SEQ ID NO: 347781 - protein, 188 aa, Zea mays
  Clone ID: MRT4577_80338C.1.pep
APRSRPGQIPFLASHAVLLVVPLFNLFFLSISESPLHGAVLASLLATSVRSDLQRLQLARLHYINMVWHLLSQIPNMLRRRLPHWNSCAPLAFLLPFNPQAFPGSIAQLGDVRRYLHIGNDRFRFSGDAWSGSRINQNKCEISVKFERLLNFQIRYQPKKVTLLTAYCVGKACQCDNRETNGELCSFC

SEQ ID NO: 347782 - protein, 476 aa, Zea mays
  Clone ID: MRT4577_80339C.1.pep
MCIGLFLSITIYLQACQLSAMFCLLNMFFMQARIPGRCGAVVLAHLVRPRELRLPSIWTAPASSHLPPPVHSYKAWHFAVRTRMLFAPSRLPLPRLPTRRLRLAPGSPMASMLAILRPSAPAPLAGRRARAAAPATARVALSTRSRYSSARVSLGSEVAVGADALFADYKPTTAFLFPGQGAQTVGMGAEAQSVPAATKLFNQANEILGYDLLDLCTNGPKEKLDSTMISQPAIYVTSLAAVEVLRARDGGQDVINSVDVTCGLSLGEYTALAFAGAFSFEDGLKLVKLRGEAMQDASDAANSAMVSVIGLDSEKVQELCDAANDEVDENDRVQIANFLCPGNYAVSGGVKGIEVVEAKAKSFKARMTVRLAVAGAFHTSFMQPAVSRLESALAATEIRTPRIPVISNVDAQPHSDPNTIKQILAQQVTSPVQWETTVKNLMGKGLEKSYELGPGKVIAGILKRINKGTSIENIGA

SEQ ID NO: 347783 - protein, 99 aa, Zea mays
  Clone ID: MRT4577_8033C.1.pep
IPKLFITAKRIFRVQFTLFLGQGTNFLLLYLSLLSIHYYKHSLIKTKLICFVNYFTNFLTFVQQSMGYIFIPSSYLFSIKIKYLLLPIINLLLQFTYLP

SEQ ID NO: 347784 - protein, 93 aa, Zea mays
  Clone ID: MRT4577_80340C.1.pep
SNHDWSSFPIGAWDDRAQNPHARGDGHAHRHTQACDAWQVGKTSVSLHKSGMPSLMSMGYTRLVVCCSRWSAHTADRRMLSSIFLRLLLEHLK

SEQ ID NO: 347785 - protein, 41 aa, Zea mays
  Clone ID: MRT4577_80341C.1.pep
DQSVHGMNHQPMGIIYNDGTMSFNDDALLEPRNVIMCELVI

SEQ ID NO: 347786 - protein, 145 aa, Zea mays
  Clone ID: MRT4577_80342C.1.pep
MTTRFKKNRKKRGHVSAGHGRIGKHRKHPGGRGNAGGMHHHRILFDKYHPGYFGKVGMRYFHKLRNKFYCPAVNIERLWSMVPADKAAEAGGDKAPQIDVTQFGYFKVLGKGVLPPKPIVVKAKLISKVAEKKIKAAGGAVVLTA

SEQ ID NO: 347787 - protein, 110 aa, Zea mays
  Clone ID: MRT4577_80343C.1.pep
VGKPQPHKQPGVGQSTRGARNASQRNNATAPTPYKRSEGTPPTNGNGPASSLPSLATPRARTPATQSGGDRQGANLETGHAANGPEPTEPLHANKQRGRRNHSTLAKGRQ

SEQ ID NO: 347788 - protein, 421 aa, Zea mays
  Clone ID: MRT4577_80344C.1.pep
MENNYACPPPSKGNLITVLSIDGGGVKGVIPATFLAFLESKLQELDGSSARIANYFDVIAGTSTGGLIAAMLAAPSLSNAKQPCYEAKDIVPFYLEHSPRIFPCRTGILGWFFKILQTVKVMIRPKYDGKYLHKVTSDLLGGTRVEETLTNVVIPTFDVKCVKPTIFSTFKARSSALMNARLADVCIGTSAAPTVLPAHYFETVDHRTGASRSFNVIDGGLAANNPTLVAMGEITEQMRQKSKEFPETKPLDYHRYLVVSLGTGLPEQDIKFDACRVAKWGIFGWLGRRENTVPLLQMFMHASSDMTDSYVADLFKAIGCSDQLLLRVQDRNIPIAAVAADLSTEKNLRGLVKIAENLLHKPLGEDDYKTDDRVETTPRDGRAILTYAGMLARFAKLLSDERKLRLQNMGHCMPVIANREA

SEQ ID NO: 347789 - protein, 145 aa, Zea mays
  Clone ID: MRT4577_80345C.1.pep
MTTRFKKNRKKRGHVSAGHGRIGKHRKHPGGRGNAGGMHHHRILFDKYHPGYFGKVGMRYFHKLRNKFYCPAVNIERLWSMVPADKAAEAGLDKAPQIDVTQFGYFKVLGKGVLPPKPIVVKAKLISKVAEKKIKAAGGAVVLTA

SEQ ID NO: 347790 - protein, 93 aa, Zea mays
  Clone ID: MRT4577_80346C.1.pep
PTRPDRNIPIAAVAADLSTEKNLRGLVKIAENLLHKPLGDDDYKTDDCVETTPRDGRALLTYAGMLARFAKILSDERKLRLHNMGLYAGHSKS

SEQ ID NO: 347791 - protein, 145 aa, Zea mays
  Clone ID: MRT4577_80347C.1.pep
MTTRFKKNRKKRGHVSAGHGRIGKHRKHPGGRGNAGGMHHHRILFDKYHPGYFGKVGMRYFHKLRNKFYCPAVNIERLWSMVPAEKAAEAVGDKAPQIDVTQFGYFKVLGKGVLPPKPIVVKAKLISKVAEKKIKAAGGAVVLTA

SEQ ID NO: 347792 - protein, 49 aa, Zea mays
  Clone ID: MRT4577_80348C.1.pep
ACPIHVISTIKTIFLYTLLFTKLPYYYRSYRHLLHSSLPLKIFHSQSSY

SEQ ID NO: 347793 - protein, 565 aa, Zea mays
  unsure (1)..(565): unsure at all Xaa locations
  Clone ID: MRT4577_80349C.1.pep
MENNYACPPPSKGNLITVLSIDGGGVKGVIPATFLAFLESKLQVNSTRLLFLEPKCIYTCKFECHLFVGVLLHFXELDGSSARIANYFDVIAGTSTGGLIAAMLAAPSLSNAKQPCYEAKDIVPFYLEHSPRIFPXVCMASCLTNICTISHXDCSVLSISKLFMYKVTRISRFVSVCMYYYIYKTTWKKKYFTLLFVLMLQXRTGILGWFFKILQTVKVMIRPKYDGKYLHKVTSDLLGGTRVEETLTNVVIPTFDVKCVKPTIFSTFKARSSALMNARLADVCIGTSAAPTVLPAHYFETVDHRTGASRSFNVIDGGLAANNPXLFIACLVIVVVFFLSSGWVLTTSMKSCAYFVMIFLSLSLSCPLXXTLVAMGEITEQMRQKSKEFPETKPLDYHRYLVVSLGTGLPEQDIKFDACRVAKWGIFGWLGRRENTVPLLQMFMHASSDMTDSYVADLFKAIGCSDQLLLRVQDRNIPIAAVAADLSTEKNLRGLVKIAENLLHKPLGEDDYKTDDRVETTPRDGRAILTYAGMLARFAKLLSDERKLRLQNMGHCMPVIANREA

SEQ ID NO: 347794 - protein, 89 aa, Zea mays
  unsure (1)..(89): unsure at all Xaa locations
  Clone ID: MRT4577_8034C.1.pep
MGIPSDGDDVVQIRHADAAGEPTVVTVSCPDKTGLGCDLCXAVLLFGLSVVKGDMSTDGRWCYIVFWLLPRGRRPVAVPWDXLKDRLLQ

SEQ ID NO: 347795 - protein, 664 aa, Zea mays
  Clone ID: MRT4577_80351C.1.pep
MSMPETFTLKVGEATPAAAGRPSAGPVYRSIYAKDGLMDLPQDIQSPWDLFSGAVKKYPTNRMVGQRQVTDGKAGEYVWQTYEEVCQKVMRIGSAIRSLGVEPGAHCGIYGSNCPEWVMAMQACNSQGICYVPLYDTLGAKAVEFIMYHAEISIAFVQESKIKSILAVLPKCTAHLRAIVSFGDFASEMKAEAERLGVSCFSWEEFSSMGKQDYQLPNKRKEDICTIMYTSGTTGDPKGVIITNKAIVAGVMTTEHLLKETDKVITEEDSYFSYLPLAHIFDQVIENYCISKGASIGFWQGDIRYLMEDVQVMKPTIFCGVPRVYDRIYTGINMKIQSGGMIARHLFQYAYNYKLANMRKGLKQHEASPFFDKIVFSKIKEGLGGRIRLMIAGAAPLPGQIEEFMRVTTCSVVVQGYGLTESCAGCFTSIANIFSMIGTVGPPVTTIEARLESVPEMGYDALSDTPRGEICLRGHTMFSGYYKRPSLTEEVFSDGWFHTGDIGEWQSNGTMKIIDRKKNIFKLSQGEYVAVEVLERAYLQSPLVASVWVYGNSFESFLVAVAVPERQALEEWAAANSKAGDFAELCADPKARTYVRDQLNQTGKKLGLRGFEMLKAVYLEPVPFSIEKDLVTPTFKLKRPQLLKYYKDRVDQMYKDAKEGRAAP

SEQ ID NO: 347796 - protein, 72 aa, Zea mays
  Clone ID: MRT4577_80352C.1.pep
HYRVHVTSLAAYIYLILLPIRLLAQLAIYSGSVTMYPSFVIRTFSSRMIVSACFEQGRTYITQVKSWITCWQ

SEQ ID NO: 347797 - protein, 50 aa, Zea mays
  Clone ID: MRT4577_80353C.1.pep
RSLSISQSPPPLSHLLNNWGARLIGLANYGFTCRDFQQEQGRAGLASGLV

SEQ ID NO: 347798 - protein, 182 aa, Zea mays
  Clone ID: MRT4577_80354C.1.pep
MGDWDPRGRAGEFPPPLPPPRLHYPTPRRRTGTSPAAMTTRFKKNRKKRGHVSAGHGRIGKHRKHPGGRGNAGGMHHHRILFDKYHPGYFGKVGMRYFHKLRNKFYCPAVNIERLWSMVPAEKAAEAGGDKAPQIDVTQFGYFKVLGKGVLPPKPIVVKAKLISKVAEKKIKAAGGAVVLTA

SEQ ID NO: 347799 - protein, 145 aa, Zea mays; identical to SEQ ID NO: 347786
  Clone ID: MRT4577_80355C.1.pep

SEQ ID NO: 347800 - protein, 145 aa, Zea mays
  Clone ID: MRT4577_80356C.1.pep
MTTRFKKNRKKRGHVSAGHGRIGKHRKHPGGRGNAGGMHHHRILFDKYHPGYFGKVGMRYFHKLRNKFYCPAVNIERLWSMVPTDKAAEAGGDKAPQIDVTQFGYFKVLGKGVLPPKPIVVKAKLISKVAEKKIKAAGGAVVLTA

SEQ ID NO: 347801 - protein, 146 aa, Zea mays
  unsure (1)..(146): unsure at all Xaa locations
  Clone ID: MRT4577_80357C.1.pep
MTTRFKKNRKKRGHVSAGHGRIGKHRKHPGGRGNAGGMHHHRILFDKYHPGYFGKVGMRYFHKLRNKFYCPAVNIERLWSMVPADKAAEAGGDKAPQIDVTQFGYFKVLGKGVLPPKPIVVKAKLISKVAEKKIKAAGGXAVVLTA

SEQ ID NO: 347802 - protein, 49 aa, Zea mays
  Clone ID: MRT4577_80358C.1.pep
NRPCFLGQKFKFGGDHRQQYDSPAWSLWRCPRQVLIMRLFLGLINHLLV

SEQ ID NO: 347803 - protein, 86 aa, Zea mays
  Clone ID: MRT4577_80359C.1.pep
GVQDIAITKPKQGPVQAEQDPTLWPQTQYTNKPHTYPATTRSHSNRPTEQQFPRNPIITQKKGQKKNETIIIIIPDPPKTDTTGPP

SEQ ID NO: 347804 - protein, 110 aa, Zea mays
  Clone ID: MRT4577_8035C.1.pep
PSARVTVGLEIVVLVDYNMWLPEAAPMVGPCPFCHAAPAGTAEVCPRIAPVVSWWAGAASGGCWVEPVGLGSSRLADPAPRTEIFQGPGCSPAAAAPRHPLVTRRFVFGS

SEQ ID NO: 347805 - protein, 103 aa, Zea mays
  unsure (1)..(103): unsure at all Xaa locations
  Clone ID: MRT4577_80360C.1.pep
SRGRGTRVAPGTRTGLVRVGRGEEGLMHXQWLDRGQNIHEDEQGIFPDEVAIEKVTESPGRGYIKQFKQEQQNILTXMQEPNADGDSQTCMQVNACGGRSLGC

SEQ ID NO: 347806 - protein, 71 aa, Zea mays
  Clone ID: MRT4577_80361C.1.pep
MLTRQPAFYPGCVLRVCPFKKKNRGFFFWAKLHNRVGYVTPNFFNFSKNFSFQALFPFSVPIQCPGSNFQL

SEQ ID NO: 347807 - protein, 132 aa, Zea mays
  Clone ID: MRT4577_80362C.1.pep
MAASTMALSSSTFAGKTVKLAPSSSEISGNGRITMRKTAAKPKPASSGSPWYGPDRVKYLGPFSGESPSYLTGEFPGDYGWDTAGLSADPETFAKNRELEVIHCRWAMLGALGCVFPELLARNGVKFGEAVW

SEQ ID NO: 347808 - protein, 37 aa, Zea mays
  Clone ID: MRT4577_80363C.1.pep
ISAQFPGRFGPVMEQHVDLANKSVLLQLCAAYNANIV

SEQ ID NO: 347809 - protein, 95 aa, Zea mays
  Clone ID: MRT4577_80364C.1.pep
ELCFVYNPSTRGIFLLYPVSFGKHFFWCQAYSCPVCCVWNEFVVQKRNLWGPCCLSSPALRFSLIHRDTKVVPGGGGGGGGGGGGGGSRGGARLP

SEQ ID NO: 347810 - protein, 89 aa, Zea mays
  Clone ID: MRT4577_80365C.1.pep
DVTACVLRNRAPADYTQINLEIVGNGGTAQTTFAKRHVTGELEKKYEPTIGVEVHAQDFTTDCGKIRVYWWDTARQEKLGDLKDGCCMH

SEQ ID NO: 347811 - protein, 52 aa, Zea mays
  Clone ID: MRT4577_80366C.1.pep
LLKNSTHTIFLVLLTTYTQRTMGLAHLACPYITIPASKFSFYSALSTYSFIY

SEQ ID NO: 347812 - protein, 93 aa, Zea mays
  Clone ID: MRT4577_80367C.1.pep
IGLKGYTSWAIGYSVANLVSSLLRDQRRIHPVSVLAAGFHGIPDDQEVFLSLPARLGRAGILGVADMELPEEEARRLRRSAKTLWENTQLLGL

SEQ ID NO: 347813 - protein, 43 aa, Zea mays
  Clone ID: MRT4577_80368C.1.pep
LNRTALIKGMVTSDLEVAKVEGADIQTVSGILSQAKMAALIVP

SEQ ID NO: 347814 - protein, 142 aa, Zea mays
  Clone ID: MRT4577_80369C.1.pep
VIYKKKKKKKKKKKKKKKKKKKKKKKRKKKKKIKKKKKKKKNKKKKIKKRGGPPRGSNFASPSMQLNAPSMVSPIFISGAFFLNLVTGKTPGFPNFTPFEKNPLFQIGVIRKRAPTFSLSKNLPPLKVNGTPPFSGLLTPGV

SEQ ID NO: 347815 - protein, 72 aa, Zea mays
  Clone ID: MRT4577_8036C.1.pep
MGILPSDGDDVVQIRHADAAGEPTVVTVSCPDKTGLGCDLCRAVLLFGLSVVKGDMSTDDRWCYIVFWLLPP

SEQ ID NO: 347816 - protein, 56 aa, Zea mays
  Clone ID: MRT4577_80370C.1.pep
HVFCTLRCTGLAQSTGCTVSYAVASRMRGTQPSGEVSRHSEVGLLSKAWLFNLEPN

SEQ ID NO: 347817 - protein, 68 aa, Zea mays
  Clone ID: MRT4577_80371C.1.pep
LSFFFFFFFLFLFFGQAKRGVYYNCICHPISPKTVFWELAYTMSQQNFIFKYYMPVELRVSFIKGRLR

SEQ ID NO: 347818 - protein, 77 aa, Zea mays
  Clone ID: MRT4577_80372C.1.pep
LLTYLPNFGLPGRVRTAQISAILYKQQKLNMIPYLTAAHLGAYDFFSLNNIYFIKRLLRECYTTSWKRHKDVLPLHA

SEQ ID NO: 347819 - protein, 108 aa, Zea mays
  Clone ID: MRT4577_80373C.1.pep
CVGIRRQPEELGAISLVLQSFTKQEKEEVCTTEHSAKLKQKDIFISHCKHLSLETDITKIMCIIETKHRLTGRLNYPKTQRKIRAVSSEQISYLIRHDGRRRGHWMVT

SEQ ID NO: 347820 - protein, 56 aa, Zea mays
  Clone ID: MRT4577_80374C.1.pep
ITQLLLLGAIESIQVSSFHFICMLLDLSPSMVFLTMWIWTHLVCYTVEDSQNSSSK

SEQ ID NO: 347821 - protein, 280 aa, Zea mays
  unsure (1)..(280): unsure at all Xaa locations
  Clone ID: MRT4577_80375C.1.pep
MGSLQQPFQPRTVLRFGSLEFMSLDGSYDMILLPPPCDSDNGGRQPAHRRRNRRRLPRVVEEQHSSSPHPLPRRRRRRRGNQGQAGGGTSSAVERVDGAGAPTGGMSGIDLAFETKTSAVSPQHANSKQTNDASTLAKGLLGVTLVPETTVQSVPDVTSSPPVDQEXPADGRLDXGPSGSEEDDVSDFCWDFSGLGNPSAMRDFMTACDYCLSDCSDGSHSLGDEDCGPSRECFHVDLGGPSKGNHLGMLKNGDLPRPVPRVDILWELAVVPVQAGGHDP

SEQ ID NO: 347822 - protein, 116 aa, Zea mays
  Clone ID: MRT4577_80376C.1.pep
MQGGRSMSAVEAAKEAATNVGASAWAGKEKTKAVVQEKAAKARAHDPAEKAVAEARMHERVHEVEAIKQDAMRKNATVKERATAAEHHPTPLDVWAASVTAPAAGAGVPVATTETG

SEQ ID NO: 347823 - protein, 435 aa, Zea mays
  Clone ID: MRT4577_80377C.1.pep
MGSLQQPFQPGTVLRFGNLEFMSLDGSYDMILLPPPCDSDNGGRQPAHRWRNRQRLPRVVEEQHSSSPRPLPRRRRKRRGNQGQAGGGTSSAVERVDGTGAPTGGTSGIDLAFETKTSAVSPQHANPKQTDDASTLVKGLLGVTLVPETTVQSVPDVTSSPPVDEEVPTDSHLTPFGFSLDPPSDFALADALVEASPNPLGFRTRSPWDRLTDVSTYGPSGSEEDDVSDFCWDFSRLGNPSAMRDFMTACDYCLSDCSDGSRSLGDEDCGPSRECFHVDLGGPSEGNHLGMPENGDLPRPVPHVDILRELAVVPVQAGDHDPQLEQIRGVQARLDEGAGTLEPIRRDIGQEWAGQPPAGEVRHLPQGIQHRIADDVRVRPPPASSGVGQNLAAAAMLLRAMPEPSTTEGRRIQGELKNLLEGAAVRRAESSVKGN

SEQ ID NO: 347824 - protein, 69 aa, Zea mays
  Clone ID: MRT4577_80378C.1.pep
MDATGTGTLLKANNVSAGRKAGRPMKKSVTRSVKAGLQFPVCRIGRYLKNGRYSQRVCSFAPVYLAVVL

SEQ ID NO: 347825 - protein, 284 aa, Zea mays
  Clone ID: MRT4577_80379C.1.pep
MGSLQQPFQPGTVLHFGSLEFMSLDGSYDMILLPPPRDSDNGGRQPVRRRRNRRRLPHVVEEQHSGLSRPLPRRWRRRRGNQGQEGGDTSSAVERVDGAGAPTGGTSGIDLASETKTSVISPQHANPKQTDDAITLAKDLLGVTLVPETTVQSAPDVTSSPLVDQEVPTDSHLVPFGFSLDPPSDFALVDALIEASSNPLRYRIRLPWDRLTVVSTYGPSGSEEDDEPDFSWDFSGLGNPSDMQDFMTACDYCLSDCSDGSRSLGDEDCGPSRECFHMQRSASV

SEQ ID NO: 347826 - protein, 212 aa, Zea mays
  unsure (1)..(212): unsure at all Xaa locations
  Clone ID: MRT4577_8037C.1.pep
MDAWEATKVVFDRVRALDPENASKMMGLLLIQDNSDKELIRLAFGPEHLLHSFVATARAELAAKPASXRRPCSARCSPARPGASRAPALEPAAAAAATTTTTRPSPPLTSSGTTAAPTRSTPTSTTAGSPAGAAGAHRRSFSLSDAEAAASWRPCMYYARGYCKNGSSCRFLHGVPEDDAAEREMVMRAKALAAAPPTQQQQLMASAYPFSP

SEQ ID NO: 347827 - protein, 82 aa, Zea mays
  Clone ID: MRT4577_80380C.1.pep
SRPAGLARSRSSTLPPRFRSPEHAATFAHLESPDVAASARLPSLEHAPAPLAWRLESPEHVAFSGLESLSMSSPQSLRLLRC

SEQ ID NO: 347828 - protein, 58 aa, Zea mays
  Clone ID: MRT4577_80381C.1.pep
KRVVLILNVGTLGVLHLFVIAVEGGIKNRCEKRNIANPFVPPIPPCIPEMAVITPPLI

SEQ ID NO: 347829 - protein, 95 aa, Zea mays
  Clone ID: MRT4577_80382C.1.pep
SLLSRNTPHRSATRLGLNSQWAGLTHVAMWWFLEYVQRCFGPIVWDAFLSFVPTPSGGHHFASWRSSCCSVVVALHTPRCFNHSALERQLAACNH

SEQ ID NO: 347830 - protein, 46 aa, Zea mays
  Clone ID: MRT4577_80383C.1.pep
RGSLPKLVRPIIRLMIVPHCALAVVSRCPAHVRRISSSADRWLRVT

SEQ ID NO: 347831 - protein, 58 aa, Zea mays
  Clone ID: MRT4577_80384C.1.pep
IGPLSTIAVYVSALRKSCSAHFPVTLLCGAGQGKSGFVRLRGVERIQLVGRTVNLPAA

SEQ ID NO: 347832 - protein, 158 aa, Zea mays
  unsure (1)..(158): unsure at all Xaa locations
  Clone ID: MRT4577_80385C.1.pep
MGFVSFAGRVLFASVFLLSAYQEFTEFGTDGGPAAKNLQPKFXNSFTKNISVHLGVVVPHVELKHVIAATIGLKGLGGLLFIVSSSFGAYLLALYLAFITPVVYDFYNYDMEKAEFVQIFMKFTQNLALFGALLFFLGMKNSVPKRQAKKKAAKSKTT

SEQ ID NO: 347833 - protein, 155 aa, Zea mays
  Clone ID: MRT4577_80386C.1.pep
ELACTGKATPLTDVFAFGVFVLEVACGRRPIKHSEAQQNRLVLFDWVFQHLQNGSLTDAIDGRLKGDYDVDEACLALKLGLLCSHPFASARPSMRQVMQYLHGDVSPPELAPTHQSFEALALMQEDGFDPYIMSYPSSTATASIGTVSATMSQGR

SEQ ID NO: 347834 - protein, 90 aa, Zea mays
  unsure (1)..(90): unsure at all Xaa locations
  Clone ID: MRT4577_80387C.1.pep
DGYDLLWTCIWSACLHIPVPMSCRGSIVLSGSRMHLFLCSFSITVLYLELYSFLFLSSLSSVGDNRSYPGGSAVDIFNSSTFXXLXXXEY

SEQ ID NO: 347835 - protein, 77 aa, Zea mays
  Clone ID: MRT4577_80388C.1.pep
REGHFHVGCHVNFPLYLPEGEPMVGEKILRGLLNPGPAWTKSGGGPTYDPMPYRSFFFLFKAPHQANSHNSCLHTWR

SEQ ID NO: 347836 - protein, 81 aa, Zea mays
  Clone ID: MRT4577_80389C.1.pep
PGVHPPNWVGKGAQKSPRKRGGVVQLQRVLGFVSKGQEGLWGVSGFQRDAIERTVFFQMTFWSLIAPQTPLNKKDFSIFFR

SEQ ID NO: 347837 - protein, 51 aa, Zea mays
  Clone ID: MRT4577_8038C.1.pep
PGFLLKKRGLSRGPPPPVGAGGQFFLGRNFFFRPGTPVGEICPLFFKPPPP

SEQ ID NO: 347838 - protein, 192 aa, Zea mays
  Clone ID: MRT4577_80390C.1.pep
MASVAPEVEKKEEEEQVVNPWEVSAGKGGIDYDKLVDQFGCQRLDAPLIDRIARLTGRPPHRFLRRGLFFAHRDLNEILDIYEKGDKFYLYTGRGPSSEALHLGHLVPFMFTKYLQDAFKVPLVIQLTDDEKFLWKNLTVEESKRLARENAKDIIACGFDVERTFIFSDFNFVGGAFFQNLFKVARCVTFIK

SEQ ID NO: 347839 - protein, 519 aa, Zea mays
  unsure (1)..(519): unsure at all Xaa locations
  Clone ID: MRT4577_80391C.1.pep
MASVAPEVEKKEEEEHVVNPWEASAGKGGIDYDKLDDQIGCQRLDAPLIDRITRLTGRPPHRFLRRGLFFAHRDSNEILDIYEKGDKYYLYTGKGPSSEALHLGHLVXLVHTANQLMVGDDMCCKCPQLXCLGHIDINMFLEVNGVLFYFEEIYTTLKFCLITCTSLSXSGLVSDVSLTIRIFXRYLQEAFKVPLVIQLTDDEKYLWKNLTIQESKRLARENAKDIIACGFDIERTFIFSDFSFVGGXLLFLILIDILIFDXFWSIPKEVNTMLXLGFDCYLQTNKPSGLVSXAFYENMMQVARCVTMNKAIGIFGFNLEDHIGKVSFPPVQAVPSFPSSFPHLFAGKDQLRCLIPCAIDQDPYFRMTRDVAPRIGYQKPSLIESRFFPALQGENTKMSASDANSAIYVTDSAKEIKTKVNKYAFSGGQDSIELHRKLNSARGVDVPIKYLNFFLEDDDELAHIKKEYKEGRMLTGEVKQRLIAVLSEIVARHQRARAQVTEEMVDAFMAVRPLPNMFG

SEQ ID NO: 347840 - protein, 92 aa, Zea mays
  unsure (1)..(92): unsure at all Xaa locations
  Clone ID: MRT4577_80392C.1.pep
EAEANKAXXKYDNTSIDYQIECYKREGLTHYSSXKLPIXSAAVXGXXIIXEHIPITNXFTCLWVNEGDRFTSRDQLSFSTGRDKIRGQGNWT

SEQ ID NO: 347841 - protein, 236 aa, Zea mays
  Clone ID: MRT4577_80393C.1.pep
MSRPLSSFCLHRIRSGGTASTAAPPSICANKDDGGGGGGGESRSLKDGKQKDEWEEANEKGSAEAVVVGRKVMVAAADGGGEEARTALQWALSHAVRPCDTVVLLDVASGKNRRDPRGSPHLEALRSICQAKRPEVCVELSLAEGGKDRGPAIVEAARKQGVSLLVVGQKKRSVTWRLLSMWIAGVKGGGGGGYTSAADYCVQHAACMALAVRRKSRRGGGYLITTRRQRDFWLLA

SEQ ID NO: 347842 - protein, 62 aa, Zea mays
  Clone ID: MRT4577_80394C.1.pep
ALTADKGACGANHTDAAVTNGFDHTWGYGGYGMLQHREHSDEGGPFVVELFQRHNVTICAWP

SEQ ID NO: 347843 - protein, 91 aa, Zea mays
  Clone ID: MRT4577_80395C.1.pep
TELSSPSRIPCIDQRASQAKSLGGSSGGRRRVLLLLVGAVGADDAGLVAVELGDVDGGLVVDVPLAAVVVAGPHPPPLVAAGRVATATEFE

SEQ ID NO: 347844 - protein, 67 aa, Zea mays
  Clone ID: MRT4577_80396C.1.pep
STASGRSASSADHYSKFWRRIPNWIRGDTDHTSTDNRDTLTEAAYLGDYTDTAHRLLNLRITILCTG

SEQ ID NO: 347845 - protein, 143 aa, Zea mays
  Clone ID: MRT4577_80397C.1.pep
SPLLLVRGPRGRLGLLAQSVHGVRQRAPKIPPILAPSPKNFGPQIDSSFFGLNPPRPFLHGRGRPRPPPLFYQKRNSGRNTAPPRCNLDRSCFPSCCKNTKTPPSLWVLKPKPPFFVHPNSHVCPVPPAPPKTKMDPALFQFP

SEQ ID NO: 347846 - protein, 70 aa, Zea mays
  Clone ID: MRT4577_80398C.1.pep
NIVARTITAQANTVIRKDYTSVLLLLNTKMKPLTFSTCIKKKGAVLTSPTRAGGVPTIPPPKNTDRDLSL

SEQ ID NO: 347847 - protein, 60 aa, Zea mays
  Clone ID: MRT4577_80399C.1.pep
PVWGKGTICQRDERVLFLGQFSISVSYFGQFFYLCPCDPGTWGASYPSGLLASLKETRHE

SEQ ID NO: 347848 - protein, 59 aa, Zea mays
  Clone ID: MRT4577_8039C.1.pep
KNHSIVANIKDFYTSIGSTHLKYQTGTLTKQCFPKVSSIVHFFIHISSNGQVFFHTSSL

SEQ ID NO: 347849 - protein, 198 aa, Zea mays
  unsure (1)..(198): unsure at all Xaa locations
  Clone ID: MRT4577_803C.1.pep
MTKLTSELLRPVVPAAALDEAALLRYLVANVPGFPGHAPALSLTQFGHGQSNPTYCIHASAPGGGPPRRYVLRKKPPGAILQSAHAVEREYQVLKALGDHTDVPVPKVYCLCTDASVIGTPFYIMEYLEGIIYPDSALPXVTPSKRRAIYLSTAKTLAAIHKVDINAIGLQKYGRKRHYCKRQVERWERAYLASAGEG

SEQ ID NO: 347850 - protein, 78 aa, Zea mays
  Clone ID: MRT4577_80400C.1.pep
KIFGLELRFLIKSDWRNVILVRKKKMMRPERSNRRLQLVLDACMGKREGIHWPARGKGKVYARGPWVVRLDGPFSSRL

SEQ ID NO: 347851 - protein, 96 aa, Zea mays
  unsure (1)..(96): unsure at all Xaa locations
  Clone ID: MRT4577_80401C.1.pep
NMGNPIKDEKIAFKLPADXKKKIEGAIYPALNWVGANQLSQAGEFXDKIKELENLFNPIIAKMFQGAGXNMGGAGGMDKDAPSGNGGPGPKIEEVG

SEQ ID NO: 347852 - protein, 109 aa, Zea mays
  unsure (1)..(109): unsure at all Xaa locations
  Clone ID: MRT4577_80402C.1.pep
ESSSLAIRHLHLSSPPTPPTAGPARRAPEIRPDPPQRTPAGQPVRLADAXTSPSLHPSALAVGSSYPASSDAGEPPFAXPLPSRLSRRLPNRAHARSSSPRPSPWRTPA

SEQ ID NO: 347853 - protein, 83 aa, Zea mays
  unsure (1)..(83): unsure at all Xaa locations
  Clone ID: MRT4577_80403C.1.pep
IGNSLLGYVIKVVIEWFRALLKTGGGSIQPPEELGPLNFKCPFQCIRPKFFLNEKKFLLVCAMYLSMYSEFILKKKKKKKKXR

SEQ ID NO: 347854 - protein, 41 aa, Zea mays
  unsure (1)..(41): unsure at all Xaa locations
  Clone ID: MRT4577_80404C.1.pep
XVRSCLYSNSPKYSEMYXXIAGAGGTVLYMRTSLSTLEFMG

SEQ ID NO: 347855 - protein, 94 aa, Zea mays
  Clone ID: MRT4577_80405C.1.pep
MEGLIPLVYRAIVEYRKARHQVAIGSRLLYGGDHHHQPCGSSALFCVVDSGSSSGSWHAAPSSMSPATSPAASRASSSLASPLLRSASRRQLAG

SEQ ID NO: 347856 - protein, 74 aa, Zea mays
  Clone ID: MRT4577_80406C.1.pep
ESLDAFHCGLEELGSVIVVRRPRRVRWWPARRCSSPSGSGYFFAARLASTTIYSMIHRYQDVRVPLGAKNATGP

SEQ ID NO: 347857 - protein, 67 aa, Zea mays
  Clone ID: MRT4577_80407C.1.pep
MKVMLAVKKKKKKKKKKKKKKKKKKKKKKKKKKKKKKKKKRGRAVLKEPKFTSPVLANVISFFLGAP

SEQ ID NO: 347858 - protein, 217 aa, Zea mays
  unsure (1)..(217): unsure at all Xaa locations
  Clone ID: MRT4577_80408C.1.pep
MGKLLCDPSAAAVAEALPPSPAPAPPPPLLAWXPRPRPPPPXSISPTGWDAVWALEDQQRRRLHRIWERGVAWKPSSPGAGEAALPPVVFRLDHGGEVDADGNCLFTAARTAAAAKADARELRHRAVRRFAEVYAAAGEDDKNAVDAAVRHLYAPDLKAGWGVHVVQEIKVLVPKAQRHALDSAIQELVDLGIQRYRARETALARCSSSIFCFLAIQ

SEQ ID NO: 347859 - protein, 76 aa, Zea mays
  Clone ID: MRT4577_80409C.1.pep
GNKQAWALGLPFCEKIAGYWEIFHYNRGGEPFSPLKHIFFLTTGADHCHHWGNLHDPPPKMKPGGGQKKIALGESP

SEQ ID NO: 347860 - protein, 215 aa, Zea mays
  Clone ID: MRT4577_8040C.1.pep
MPTQIINATTIFASLMGINFLVVSMIAWSHYSMKGLNDNYNKFPSDSIQIPYNDTPIENITYRFQDPFIAYHLMDKLDTASILDKSTITSPTLYHRPFHGLKINDNYCKEHRAHFANFPEIVFDRINLVSDFWTNHQLKMTSLRQLGGKDVQPEISFNIIGKPENRKDAFLFKYTPSLEANMYFFNNPFHQYRLIGTEHSCLSQVYNHIPGSETC

SEQ ID NO: 347861 - protein, 130 aa, Zea mays
  Clone ID: MRT4577_80410C.1.pep
MHKTTAKMSSTATVTRAHLDNKLALAKRCSREATLAGAKAAAVATVASAVPTLASVRMLPWAKANLNPTGQALIVCTVAGMAYFVAADKAILSLARRHSYESAPDHLKDTSFHGGAAAAARPRPPAFFRP

SEQ ID NO: 347862 - protein, 78 aa, Zea mays
  Clone ID: MRT4577_80411C.1.pep
PLRGIWKPKKKRGGGKLWVQKNGEKKRVIFKGAIKGTIQKKGVFLVGILKTRPQKTLGPDAGLNPEIPNSTLGGPKFS

SEQ ID NO: 347863 - protein, 125 aa, Zea mays
  Clone ID: MRT4577_80412C.1.pep
MAKMSSTATVTRAHLENKLALAKRCSREATLAGAKAAAIATVASAVPTLASVRMLPWAKAHLNPTGQALVVCTVAGMAYFVAADKAILSLARRHSYESAPDHLKDTSFAGAAAAVRPRPPAFFRP

SEQ ID NO: 347864 - protein, 59 aa, Zea mays
  Clone ID: MRT4577_80413C.1.pep
MMRARFPLLLLGLVYLASVSVSFGIAYWEKETPKHNKCLQSCNSERDSYRNQACHARCN

SEQ ID NO: 347865 - protein, 77 aa, Zea mays
  Clone ID: MRT4577_80414C.1.pep
GGNGDPNFLPKFTPPGRAESPPWMVSIQKPYRGCFTWLTLKPTPGYWLRPNRARNHFGWTGLAFPGGKSFTRGFFWK

SEQ ID NO: 347866 - protein, 51 aa, Zea mays
  Clone ID: MRT4577_80415C.1.pep
QGVDPGLAHSASAPSSVSQARWTSLWPRYQLVPRRLSVSGCSPLRPQKIPP

SEQ ID NO: 347867 - protein, 104 aa, Zea mays
  Clone ID: MRT4577_80416C.1.pep
TLLPACTMDPTIALKRCLRIDTYASHWRRSRSPRVDARPRLCLGLARYITTTSHRLAVREKEKGGKVCSPESLVVASEPASRCPSQIATAYHHCLLQVFDYEEL

SEQ ID NO: 347868 - protein, 90 aa, Zea mays
  unsure (1)..(90): unsure at all Xaa locations
  Clone ID: MRT4577_80417C.1.pep
FIYAEALAGRGPRAVRCGGGGRVVAAAALRAQPRPGPKPRALSSSDCWPSAHVFFRDXGEAVAGGGLWECRALRASLARYTSAVRSTGFP

SEQ ID NO: 347869 - protein, 90 aa, Zea mays
  Clone ID: MRT4577_80418C.1.pep
MERKQADYSNLDERYTIQGERYQGQQYSHIYYTRLHHMRTLLHALVPSRKPHLPVTTVLGLEEGKDCVLVGTLYKHMKLKPSILDEYSKE

SEQ ID NO: 347870 - protein, 106 aa, Zea mays
  Clone ID: MRT4577_80419C.1.pep
RTVTADPTTMLPPPRNTRTCPSHAGDRTTLPMPPPAPSPDPYRDWADLPELPLAEVLRRLLPCIRSLYAFAGTCRPWRHLLRASAADLVRPRVPPLLLLCADFRLV

SEQ ID NO: 347871 - protein, 70 aa, Zea mays
  Clone ID: MRT4577_8041C.1.pep
LRKHGVPTPLKIGQDSIMFNMGIAIKRCPCFIRFGSCRSRPCMTIFPTDTHLSINSILVSGSGWVTRLPR

SEQ ID NO: 347872 - protein, 73 aa, Zea mays
  unsure (1)..(73): unsure at all Xaa locations
  Clone ID: MRT4577_80420C.1.pep
SVLRAQVGELSHRLESLNEIVDVLNATTVAGFGAAATSSTFVEPINNNSFFNPLNMGYLNQPXIMASADILQY

SEQ ID NO: 347873 - protein, 108 aa, Zea mays
  Clone ID: MRT4577_80421C.1.pep
DQFIEKRLVTNVLGIGERVWSGARSTRYKKREVVPAETVARAVERFLEPGGPGEAARGRARDLAVKAHAAVAEGGSSSRDLQRLIDDLVKGRAAAGVPTSPSVASVGT

SEQ ID NO: 347874 - protein, 247 aa, Zea mays
  unsure (1)..(247): unsure at all Xaa locations
  Clone ID: MRT4577_80422C.1.pep
MPPKLLTHLILALVAVSGAAAARRHPAPANFTASGNPVYIWPLPKNFTSGTQTLAVDPDLALDPQGPGGGAAAVAEAFERYRHLIFSPWAHAARPASAGYDVARLTVAVASADETLELGVDESYTIYIAAAGGANSIVGGATIEANTIYGAIRGLETFSQLCVFNYDTKNVEVHGAPWYIQDEPRFAFRGLMLDTSRHYLXVDVIKQVIDSLSFSKLNVLHLHIIDEQSFPLXIPSYPNLWKGTIQN

SEQ ID NO: 347875 - protein, 64 aa, Zea mays
  unsure (1)..(64): unsure at all Xaa locations
  Clone ID: MRT4577_80423C.1.pep
PRGPAGIKIXXXKKKKKKKKKKKKKKKKKKKKKKKKKKKKKFPGLFPARTHLFGPKNKPWLGKV

SEQ ID NO: 347876 - protein, 117 aa, Zea mays
  unsure (1)..(117): unsure at all Xaa locations
  Clone ID: MRT4577_80425C.1.pep
LGAMLSELMSNWSIYTNRFAAMLDLIMIGGINLSLGILPHVDNFGHIGWFATGLLLGFVLLIQPQFGWLEQPFGALTKYQFKAYHSILXLLTIDCCLQGALVRSDMVSSRENGDDHC

SEQ ID NO: 347877 - protein, 157 aa, Zea mays
  unsure (1)..(157): unsure at all Xaa locations
  Clone ID: MRT4577_80426C.1.pep
ARVSGHNQGLEATTGPNSAHTHSPIHETTSHTXPRSSGDGRARRXRATEMEAAAAAAGVELGSSKPQIATQAEMAEARVPLAYRDQCAHLLIPLNKCRVAEFYLPWKCEPERHAYEKCQYELVMERMLQMQKIREAQETKVKGGASIGLIPATAKLA

SEQ ID NO: 347878 - protein, 93 aa, Zea mays
  Clone ID: MRT4577_80427C.1.pep
TPRLWRGGSTYTVKRLAWKFRGNQTILVDGLPVEVFWDVHSWLFGSTASNAVFMFQTCQAPEKSLPWSYSQIFRESQLQGLGFSLILHAWKLE

SEQ ID NO: 347879 - protein, 77 aa, Zea mays
  Clone ID: MRT4577_80428C.1.pep
LRSRPRLSHYTSPSKSGYSVVCIHTLLLVLFELSLKRESEAEVSSLLVAFLKGASADVPAAPHVFSSTRDVVGVGVG

SEQ ID NO: 347880 - protein, 92 aa, Zea mays
  unsure (1)..(92): unsure at all Xaa locations
  Clone ID: MRT4577_80429C.1.pep
WVPPGFSPSPRCXPPARXLXPRPLWGXLGPXGACSGGPPCGGFLPXSPXAAARAGXXFPPFXLSSXCFGLVWCVGGVCLGPLCXRPLWSSAL

SEQ ID NO: 347881 - protein, 188 aa, Zea mays
  unsure (1)..(188): unsure at all Xaa locations
  Clone ID: MRT4577_8042C.1.pep
HQSIHIVLTLALSRAWLVHQLDVKNVFLHGTLTETVYCTXTQSFGFVDPTHHDMVCKLNRSLYDLKQSPQVWYICFATFVLSXRFVEAKVESSMFVFRHGLDMAYLLYIDDIVLTASSPMLLRSIISSLQQEFAMKDMGELHHFLGSPLTMERHPQALFLHQRQYIVNDPTGFRSLVGHCSTSSSPGP

SEQ ID NO: 347882 - protein, 123 aa, Zea mays
  Clone ID: MRT4577_80430C.1.pep
GQRRHCRGSRIHYTAPPRPFPPRKPPSWPRNRGDGAIFPPPGLRPSTAQPSTFIPQQRQRRNRNASRQEKRAITVDVCLHTHGYGGVDREEQVGRTLVTTPTGVQARDEGSKQPQQGAHNSEV

SEQ ID NO: 347883 - protein, 291 aa, Zea mays
  Clone ID: MRT4577_80431C.1.pep
MRDFPSCFGESGVQIADASSSSSSAGKGAAQNLVTCLYQTQFSGRPCVISLTWSRSLMGQGLSVGVDDLSGHCLCKADIKPWLFSKKKGSKSLDVEDGKIDIFWDLSGAKFGAGPEPVEGFYVAVVFDLELVLLLGDMKKDAYRKTGANRSMLNAAFVARREHIYGKKTYSAKAQFCDNGQFHDIAIECDTVGLKDPCLEIRVDKKPVMQVKRLAWKFRGNQTILVDGLPVEVFWDVHSWLFGSTASNAVFMFQTCQAPEKSLPWSYSQIFRESQLQGLGFSLILHAWKLE

SEQ ID NO: 347884 - protein, 353 aa, Zea mays
  Clone ID: MRT4577_80432C.1.pep
MMKILEAKRLLKSADPHEVVLLQQQQEEGNTGAPHLEAREMERRDECEKSKGMATARGVDPFLKADLPTRTPWSHGQSPRRRAPGFPPYDTGARSHMSYKLIQNAEKGGPPRKKHATAPRLCTLSASLQPAVQHGAPSPHVMDRERGYVERILLSEGNEPRALLLIRGSKVAPCGVRQPPQSTRASSPLLIRGSKAGPSEGFDSRPKARRVRDDPGYVRYMAKARATLPRYPRTFPRPAGTICNGIPPEGGTEPSDPIKWVRVQKITCRVTWRVPPSSLRKGDEGAYNKKPRQSSIVVSLYAEARRLLSHQATAKLLAMSTNQLKSSELDHAPRLRPGRMREQQGRPRNHKKN

SEQ ID NO: 347885 - protein, 119 aa, Zea mays
  Clone ID: MRT4577_80433C.1.pep
PGNEFVLRGEKSLEYHESTCTISSIQFIYLKTYLVLLINIAGGISYSASEKPRSLVFVSMRAFISIVFTTLHLLLKHSPKLKLWRIHDSSVILDISNKQDRVRCMICKTNDKFDSSDGT

SEQ ID NO: 347886 - protein, 105 aa, Zea mays
  unsure (1)..(105): unsure at all Xaa locations
  Clone ID: MRT4577_80434C.1.pep
MAVANQETGDYASFQVVSEGDAVTVKTTFEKRHLTAQFERKYQPSIGAEDHPWHFTAECGKIRFYCWDTAGEEKVGGLKHXYYIHGQGAIMXMLHETSRLNHENG

SEQ ID NO: 347887 - protein, 35 aa, Zea mays
  Clone ID: MRT4577_80435C.1.pep
PSTPPSGAEVTPTSAAAWRLDRCRARSSDSSSDRI

SEQ ID NO: 347888 - protein, 99 aa, Zea mays
  Clone ID: MRT4577_80436C.1.pep
IIIICMVVDRRDQQSQGSHSYQVMQGHRWASWLECRAALMMSGRGVFIVGTLRAGRTVDVASVLVFFRSGYYSCCSVSRNGQLDHLSARHPGRCGQKEA

SEQ ID NO: 347889 - protein, 130 aa, Zea mays
  Clone ID: MRT4577_80437C.1.pep
PPRGGGVPPTAPPQGGGASFFLWGGSPKRGGGVPCPPGWAPGRLCGRGRRKKVPKVVKGGPPPGGGTRPFPRLVCPGVPEKGKTRSLGGPRGFSGEDRGCFFKTWEDRQGWGGFFKTWGNKGEFTLCLCS

SEQ ID NO: 347890 - protein, 120 aa, Zea mays
  Clone ID: MRT4577_80438C.1.pep
TCRVPFTPRSLHPGVGYRRSRRPTSGDQAFIELCRRRPRTRYMPVRCHEVGEQVERHLDYKYNYCLSLNTKLRVIWWSRYMPMRCHEVGEQVERHLDYKYNYCLSLNIKLRVIWWLAPNF

SEQ ID NO: 347891 - protein, 61 aa, Zea mays
  Clone ID: MRT4577_80439C.1.pep
HPKLTGGRECTYPIDVSGTHTRAETYWPASEIQPSTLHSVAHIPRPCPNLQSTPHTTHKIP

SEQ ID NO: 347892 - protein, 82 aa, Zea mays
  Clone ID: MRT4577_8043C.1.pep
MGPPLFNGVKSRGTPGVWGHFLKPIGVFPFPGLKRDQVAFLGRESPFYLPFYGGISMAGLGIRTGPPFADAKPAAVSPLKWG

SEQ ID NO: 347893 - protein, 110 aa, Zea mays
  Clone ID: MRT4577_80440C.1.pep
SLWPTDWRTSQFPKLRFNAKRCALFKTKSSPSTLLLRSLWLSIEGLSFRSSLSTISHADVLLVQCSKTKTLLQDQDQDLATPEDLLARRRPRRRRALLGALLPCEGCVRL

SEQ ID NO: 347894 - protein, 66 aa, Zea mays
  unsure (1)..(66): unsure at all Xaa locations
  Clone ID: MRT4577_80441C.1.pep
RPAEXXEECHXXRRSHSQXVVQSRYXSPGHRRRYQRXKNXTTSWDCSTSAXTEIERAMCCFXGDGG

SEQ ID NO: 347895 - protein, 35 aa, Zea mays
  Clone ID: MRT4577_80442C.1.pep
IGLWCYHTAACQPPPLHCYLKFHNDIIHHLLDTKG

SEQ ID NO: 347896 - protein, 120 aa, Zea mays
  Clone ID: MRT4577_80443C.1.pep
TTKIPLRENKKGTTGGGNTNGGRWGHPHVSSSKKQHIGGPNSSLNELGLSYYLVGALQKNIKISGPGLGDSQVKLQPPIVGGRHKNRFFKHPQPFEGPHYLQQLGGDHLQNFQGLGLQTP

SEQ ID NO: 347897 - protein, 159 aa, Zea mays
  Clone ID: MRT4577_80444C.1.pep
ESKLVSYAKLGLLAGGDVFCLLLFSAIGRFSHGLPVLDAETFKTADPFIAGWLLSAYLLGGFGDDAKGRNGVGSAVITAAKSWAVGIPLGLAIRAVTSGHLPPTPFILVTMGSTGVLLTAWRALVSQLFSNQQKQQDDVYRRGSPFELFELLTSLVRRW

SEQ ID NO: 347898 - protein, 102 aa, Zea mays
  Clone ID: MRT4577_80445C.1.pep
SQHDSRGSARTALYAKARRPSPSSPRKTGWLVSAIVLDETAAAGMGSAGDCLAGCRMVAGGRGQPGHREPGPRASRWDALPHVGHVRRLRTRVVPLEPLVRR

SEQ ID NO: 347899 - protein, 91 aa, Zea mays
  Clone ID: MRT4577_80446C.1.pep
YRIRALGRLTVVANAVTGRHRYSVGPVETELLRRFVAMFDDGNYADNAEGTFSSRNGTSRRIIKDERRIRKAALSATTTYNLTGRLDRSEA

SEQ ID NO: 347900 - protein, 205 aa, Zea mays
  unsure (1)..(205): unsure at all Xaa locations
  Clone ID: MRT4577_80447C.1.pep
XRSXXSXFXXGCSXLXXRXIXXAXCRLLALLXVLSXXLXTVTXPXXXNXLAPFXSVRLSSHFLXVXLXLGSGPCXCDLSGIXGXCYSSXSSXXYRVRVVTPXRSGXRXYVXXALXSXSXPXLWGGSLXXXHGXXXRXXXXXXXGRXLXXXXRRXXPPXMCDXXAXPXRXGRGRXXGHVSWXVGHVXLVPXRRAVGXLXLSRVSXC

SEQ ID NO: 347901 - protein, 68 aa, Zea mays
  Clone ID: MRT4577_80448C.1.pep
RPEITDHHFVLPLVCCNLRSCKQKWLIVLFLFAAVMHVIHRIAKNKKDQISKKDQQIWSFSQAIYKCW

SEQ ID NO: 347902 - protein, 237 aa, Zea mays
  Clone ID: MRT4577_80449C.1.pep
MDSLRSLVLSSSPDESDDEIDNLLLWHHVEHHVIGDTSMRRRRSSLPRRVIHRDHAAGENLIKHHYFGPNPVYPSHVFRRRFRMQRTLFLRILRAVQREDDYFTVRCDATGLAGLGPLQKVCAALRILAYGLPSDAVDEYIQIGQTTARDCLIRFCRAIISSFSERYLRIPNHDDITRILSVNADRGFPGTNNDLNVLHRSPVFDPLRNGSMPPVHFTINGTTYNFGYYLADGIYPN

SEQ ID NO: 347903 - protein, 282 aa, Zea mays
  unsure (1)..(282): unsure at all Xaa locations
  Clone ID: MRT4577_8044C.1.pep
YDWPFNGHGDVKXAIACLLFGGSKKRLPDGVRLRGDIHALLLGDPSTAKSQFLKFVEKTAPIAVYTSGKGSSAAGLTASVTRDSNSREFYLEGGAMVLADGGVVCIDEFDKMRPEDRVAIHEAMEQQTISIAKAGITTVLNSRTSVLAAANPISGRYDDLKTAQDNIDLQTTILSRFDLIFIVKDVRMYEQDKRIANHIIKVHASGAATQANKNTNANEGENWLKRYVEYCRNTCRPRLSEXAAEMLQNKYGEIRQKMRXQSHETGRAAAIPITVRQLEAII

SEQ ID NO: 347904 - protein, 50 aa, Zea mays
  Clone ID: MRT4577_80450C.1.pep
DHEERPPESRNSARGISTHLIHRSEEGSLFSYICKHAALNYEFSVISAPI

SEQ ID NO: 347905 - protein, 108 aa, Zea mays
  unsure (1)..(108): unsure at all Xaa locations
  Clone ID: MRT4577_80451C.1.pep
RSVVLSGSLQGGLYDSFALGGLITNGAGHASYPMDAVRRRMRTTSVEAAXSIAXLDALNRMLTMEGPMFLFTGAGANNGGAIAWARVLXGYDQLQMLLVGKKNGYRGA

SEQ ID NO: 347906 - protein, 259 aa, Zea mays
  Clone ID: MRT4577_80452C.1.pep
TALRAHSYGFNSAPSMDKLKLKARTARSRLTGASSSAPDTPEQTAPQQSPVPQQNSSTHALHEGTYARDFGVPADQQPQQPAVEPPTSLQSSIDAGSHVPKPSRVSDPSSHVTYQTLAAQRARSNSAPNRGTPPFQQYPRRPQAARQTSIGIRRMPPLSPLRQTVQPPASSTPRAGTPLPALDEEQELGQLPSNSSQSTLTHTNSAPDQTRLRKIKSAVQLRIPFWGKKDEGKSPATGPSVTTAQDDGATNYSSGMVDV

SEQ ID NO: 347907 - protein, 49 aa, Zea mays
  Clone ID: MRT4577_80453C.1.pep
FILFLFLKHSRDDFFFSVGRGGNKVVQKLNFVEIKKYGGQAQRRLGCPP

SEQ ID NO: 347908 - protein, 60 aa, Zea mays
  Clone ID: MRT4577_80454C.1.pep
KGAQLACMNFKGGPTKKGLKSLQWLSLQGGGGTVPTNFPKREKIPKKGKSWTKMGGPGGP

SEQ ID NO: 347909 - protein, 370 aa, Zea mays
  unsure (1)..(370): unsure at all Xaa locations
  Clone ID: MRT4577_80455C.1.pep
FGTRKEYSKLDNCPICGLSRWVDVEGKKIPQKVLRHFPLIPRLQRMFVNKETAEQAQWHKLKRNPKENEMSHPADGEAWQDFDRKYPNFAKDARNLRLGLATDGFNPFSVXNTKYSMWPVLVVPYNFXPWACMEESNFMMALLIPGPTSPGKDFDIFLEPLIEYLLELWTGVPTYDALTGQKFNLRAAVLWCIHDYPALGTLSGRKTKGFFACIHCDKQSLSYSLRSKIGYFGHFRFLPVGHRLRKNNEFVGLHESNDPPGKFSMEELMAELERVKHVRPRKQQGSRKRKRSNLDKDHVVIWSWMVSLWKLPYWKNLKLRHNLDIMHIEKNICENLIGTILNIPGKTKDTIKARLDLKDMGIRKELHFRG

SEQ ID NO: 347910 - protein, 110 aa, Zea mays
  unsure (1)..(110): unsure at all Xaa locations
  Clone ID: MRT4577_80456C.1.pep
PSFFFFFFFFFFFFLCFFFLFYLSCLGTTTDFPGTAXKNKLNSCTSMGNTPPIFMPPPQPGTLLLTMAPNLQPPPEGPMPFLTDHNLSKPTLPPVSNPTPSAFPSHAALK

SEQ ID NO: 347911 - protein, 102 aa, Zea mays
  Clone ID: MRT4577_80457C.1.pep
GLGSARHQHSTPQLGSAPTAAVGTHAMIVAAAAPAPAVPASAGKPPLLSPPPAPPSPSAAAPSACGLKRLPHGRDSAPHHEQQATRGGVADPGAAVDSALSL

SEQ ID NO: 347912 - protein, 87 aa, Zea mays
  Clone ID: MRT4577_80458C.1.pep
VSPKGPRPSLNLGETVKTPGGENFYFGGGKSWGKGFRGPGFPKKGAMRPRCPKGKKPLGGNIRAHPFLFMGNFSKGKCFGPNGLQKL

SEQ ID NO: 347913 - protein, 61 aa, Zea mays
  Clone ID: MRT4577_80459C.1.pep
PAVTGVLFLGSEVPKPKIPNPCYPLILLLRKLITWCSFMFDYTLYPIVNNLLSLALFLFMI

SEQ ID NO: 347914 - protein, 103 aa, Zea mays
  Clone ID: MRT4577_8045C.1.pep
DELPAAPAMAIRGVASTREEDMTLEEFKEWLKQFDADGDGRISRNDLRRALRRRRGRGWLTACRSDRALRHADKDSSGFLDDSEIENLVAFAQKDLGMKISTW

SEQ ID NO: 347915 - protein, 104 aa, Zea mays
  Clone ID: MRT4577_80460C.1.pep
STYDIPPCHQLMILHDQQPAQHSHRSTVQHAKGERPPACGQSPWWSIIMHSFTNPCTCVVWRPLPTMEVVKVSAARVISRVSVGLIMDRLCCVCVLPRTMTNHE

SEQ ID NO: 347916 - protein, 180 aa, Zea mays
  unsure (1)..(180): unsure at all Xaa locations
  Clone ID: MRT4577_80461C.1.pep
GLIKLKQPSPKLLILIRANGDDATHFQGILDLYEACSGQVINKDKSXLFTKNTRSETKMAVMQALNLTQGTFNDRYLGLPVRFGQSRTKXFXYLNDNVXQRIQGWKEKLLSKASKXVLIKAVAQGIPTYAMGCFDLXEDLSAQISNAIFRYWWSQQDMGNKVHWVNWAKMKTLRACSFHG

SEQ ID NO: 347917 - protein, 193 aa, Zea mays
  Clone ID: MRT4577_80462C.1.pep
PAYCRSRLLHADTQTASRNLPKRAAAHAPASAAAATDGVIEENVMAILDSFGIKDSRELHDDRSAFLEAVRSTCLTSDNPSAPSGRMYDGVSQILQNSSSLEPAAASIHMLTELGKQYSRTYVAHSGGHQSLVVVKESCVPCLFGKGACRREIGGNVRSSEHLLDPSRFSMMEEAYCRTRQMARMIIMEIKAI

SEQ ID NO: 347918 - protein, 50 aa, Zea mays
  Clone ID: MRT4577_80463C.1.pep
PFSPKTNFFRHFFFSNITFQIRMKFFICSPYCPTQGNAHIKPPDYFYNFS

SEQ ID NO: 347919 - protein, 337 aa, Zea mays
  unsure (1)..(337): unsure at all Xaa locations
  Clone ID: MRT4577_80464C.1.pep
GLIKLKQPSPKLLILIRANGDDATHFQGILDLYEACSGQVINKDKSXLFTKNTRSEAKMAVMQALNLTQGTFNDRYLGLPVRFGQSRTKXFXYLNDNVXQRIQGWKEKLLSKAGKEVLIKAVAQGIPTYAMGCFDLXEDLSAQISNAIFRYWSQQDKGNKVHWVNWAKMKMLKSCXCDGMDFRDIYAFNMVLXLSKQGWILAQNPDSSCAILLKAKHFHSTDILHAKPSEGMSYTWRSILKGMDLLKKGDGQWFPRGLLRGPCTPRGPNMLTFVNDLTDPVTGQWDKDLIEXTFWTEDLLSCMYQFNPKVVNGELHWTIHWKAGWVRRHRRWLYVLL

SEQ ID NO: 347920 - protein, 44 aa, Zea mays
  Clone ID: MRT4577_80465C.1.pep
THSSAGTLADTFSPYSTDANRRRFANINRSSGLPMHDFFLLLTF

SEQ ID NO: 347921 - protein, 74 aa, Zea mays
  Clone ID: MRT4577_80466C.1.pep
GPSPLKNFGGGLFNPHFFGIRGWAWVAPKVPVFFGFGVSAGGRPPPRFLVALNPPGPLFLFYIFSLVLDLPPPK

SEQ ID NO: 347922 - protein, 88 aa, Zea mays
  unsure (1)..(88): unsure at all Xaa locations
  Clone ID: MRT4577_80467C.1.pep
GDRSMVDXNGQMQVLVFLIVGIMTLHSFGEGSGVGCSVAGSXGVAHGLLVTIAISVHNIPEXRAVSMVLASRGVSPQXAMMLSIYTSL

SEQ ID NO: 347923 - protein, 222 aa, Zea mays
  Clone ID: MRT4577_80468C.1.pep
NSARGADQRVVAIKKSKLVESTEIEQFINEVAILSQINHRNVVKLHGCCLESEVPLLVYEFISNGTLYDLLHHRDREQDGRRRTLLQQLPWEARLRIAAEVAGALTYLHSAASVSILHRDVKSMNVLLNDSYTAKVSDFGASRSIPIDQTHLVTAVQGTFGYLDPEYFHTGQLNEKSDVYSFGVILLELLTRKIPIVDGDSGYKVNLSSYFLWEMERRPLER

SEQ ID NO: 347924 - protein, 159 aa, Zea mays
  Clone ID: MRT4577_80469C.1.pep
MSALLDLLMGIFRQQTLGAAALELAALAAPLWLAALVGLLIGWAWRPRWAGVVVGDHNAQQAAQLPPPPAAAAVVSRNEAPAVVPRTVVAPAAPEDEQLAVTTRDLMHLWRLVQEKDGGPSWIHMMDRTLPTMRYQAWRRDPPNGPPQYRSSTIFGDAS

SEQ ID NO: 347925 - protein, 93 aa, Zea mays
  Clone ID: MRT4577_8046C.1.pep
MQQRVAQLEEELRREREEKARTVRDLEDLRRDGGAKGVADKVHLLEREVSKFKQSERKMLESLIYQTKQLEQTKISLEEAKLEMATLAQQASK

SEQ ID NO: 347926 - protein, 123 aa, Zea mays
  unsure (1)..(123): unsure at all Xaa locations
  Clone ID: MRT4577_80470C.1.pep
PTRPKDTKNVLSSTSYQPCLGPPNNLMXKKHSRTVTIKASSKEDIVRLHLPCSGGSYCIXKEEVANRLXMDAGTSYIKSLDDDPAWVKTACYAHFKECMEISHLSVRHVITLLVSDITPHSSS

SEQ ID NO: 347927 - protein, 146 aa, Zea mays
  unsure (1)..(146): unsure at all Xaa locations
  Clone ID: MRT4577_80471C.1.pep
MSALLDLLMGIFRQQTLGGAALELAALAAPLSLAALVGLLIGWAWRPRWAXGRRRRQRPTDGAAPRGGGASGPXTATTTXVVSRNEAAAVVPRTVVAHAAAEDEQQQLAVNTGDLMHLWRLVDEKDGGPSWIHMMDRTLPTMRYQA

SEQ ID NO: 347928 - protein, 349 aa, Zea mays
  unsure (1)..(349): unsure at all Xaa locations
  Clone ID: MRT4577_80472C.1.pep
ARCSTRTWSSCWAAAWRGPRACSSTSTSATPASTTTSSTRSRRTRWTGSGGSRSCWARRRASPTCTAPRRSGSYTATSRATSCCPFFWDDEFRVKNSWDDMLLQYETLEQCAKTGTMXVRWVRKFPFFCSDREYIIGRRIWASGKTFYCVTKGVPRPSVPRQNKPRRVDLYYSSWCIRPVESRKGDGAMSACEVLLFHHEDESRKGDGAMTACEVLLFHHEDMGIPWEIAKLGVRQGMWGCVKRIEPGLRAYQVARTAGEPISKHAAMAHVTTRFDADELVTEDSAEASSSSDNNKTTEVEKPKHWTNNIPKVLMIGGAVALACTFDGGLMTKAAIFGTARRFAGPGRR

SEQ ID NO: 347929 - protein, 183 aa, Zea mays
  Clone ID: MRT4577_80473C.1.pep
LFEWIELEPLHFWHSLLFMDQYNYGGIQAKTQNVDSSDGDNDIDIVSSWNMAEDLPKDTQDHFVLIVSEFLYIPWKFMKEQVAAQATIRDDTSCTPSVTIMAAENLEGQVIEHLRDKISNYFADKLLRTVSDILHHFKGKSKHESDEPAKSDPHTHKGDAALEFIKHICAVLALDQNVQHDIL

SEQ ID NO: 347930 - protein, 517 aa, Zea mays
  unsure (1)..(517): unsure at all Xaa locations
  Clone ID: MRT4577_80474C.1.pep
MTGRRGARTGDHRVRPPQGKHEDLATRLHPHAQLHACPRGRLSIRPEESYIYSARHHHHPRPAQPTTPSSLPSPPATARPCLLLPPDSCFFPFFFAAAKYRRFLSLIPHASPASPPPHVPRLHTSLDLARLDFSDPIFSPRISCLLLAPGQAASPSSLRLRLTTHHCYCYFVREGYGYPIAGPLRERDFGATTESQSYTPAPKLFSATSNRSFRRNRFCEGASSATVGVSISANARVLAAKNNAFCEDSVVKDRGLFSADSSCQTEMSALLDLLMGIFRQQTLGGAALELAALAAPLWLAALVGLLIGWAWRPRWAGVXSATTMPSRRRSSLRRPPLPRWSLATRRPPSYRXVVAPAAPEDEQLAVTTRDLMHLWRLVQEKDGGPSWIXMMDRTLPTMRYQAWRRDPPNGPXQYRSSTIFESTGASQEPDQAAGLQRGGAREPALLRVPLQHQPRPLPLRRAQEERAGLSGEDRRRGCFQVCCHGTGHHQVQCRRARHRRAGQHGGQFFFVRRRRRG

SEQ ID NO: 347931 - protein, 84 aa, Zea mays
  unsure (1)..(84): unsure at all Xaa locations
  Clone ID: MRT4577_80475C.1.pep
MQRAVHAVRPHGNVLKYAVLHHISAHKPAMLAADFTSVMSVTSARLXGSRIGTGTVADVSNPKGNMADDSSLWCTTNVTVYDAV

SEQ ID NO: 347932 - protein, 105 aa, Zea mays
  Clone ID: MRT4577_80476C.1.pep
SVTPTDSFAADPQAALLHFVPHAYLPITRGYGLNIQGDLPAPRRTMLFLGRSCSPITHRCSKRYLHKVDEHIVYHDRQKLSEEDQCIFCTAHTGIPPMQTCEHIR

SEQ ID NO: 347933 - protein, 73 aa, Zea mays
  Clone ID: MRT4577_80477C.1.pep
KRFPPSLHLRNPTPDRARTTPTISRRYPAYLPKLTPHRPCPPTRPTRTYLSPPTIYPTLQYQDDSTPPYYPIY

SEQ ID NO: 347934 - protein, 157 aa, Zea mays
  unsure (1)..(157): unsure at all Xaa locations
  Clone ID: MRT4577_80478C.1.pep
MDAIGAGTMGNKGAPGSKADVPRKKSETRSDKVGLQFHAGRIGCYLKKARYWQRGGTGAPVYLAADMEYLAAEVLXLLVNAVRDYKRTRIIPRHWLLMIRKDLVSSSYCCAKTTWGTVGVLCKILLRPPVQEGVEEGEHRGETGHPAMQEGRQCPLK

SEQ ID NO: 347935 - protein, 75 aa, Zea mays
  Clone ID: MRT4577_80479C.1.pep
HAHTGIIRSAGRELQWHDPQGVPDNQQDYTCSPPPCRLQAPYCVPTHTYTSSPCVLPCTTLSLYACQLYRVCAHT

SEQ ID NO: 347936 - protein, 104 aa, Zea mays
  Clone ID: MRT4577_8047C.1.pep
DELPAAPAMAIRGVASTREEDMTLEEFKEWLKQFDADGDGRISRNELREALRRRGRGRGWLTAWRSDRALRHADKDSSGFLDDSEIENLVAFAQKDLGMKISTW

SEQ ID NO: 347937 - protein, 30 aa, Zea mays
  Clone ID: MRT4577_80480C.1.pep
LVLPFPQVLKSLNWLKADHQGIIVIFKTKV

SEQ ID NO: 347938 - protein, 128 aa, Zea mays
  unsure (1)..(128): unsure at all Xaa locations
  Clone ID: MRT4577_80481C.1.pep
FRGDPPVRSRLCLAWPGQLAFTFSLKNNRKRRGQLSTEHGRIYMLRKQPVGRWNSGGMHYHLILFDKYHLSYLGNEGMHYSNTLRNKXYHCPIINQERNTGTMVPLAKDYKRDRRGPVLVRQRDANRI

SEQ ID NO: 347939 - protein, 88 aa, Zea mays
  Clone ID: MRT4577_80482C.1.pep
QAQARSGGQGKKDLGSAQKPLPYIAQGGQKKRKPAPPGTKKADLTGPAFFLPPNPGFKKAPPPRKPTPPRRAGKPPASPKRSRAPGEE

SEQ ID NO: 347940 - protein, 162 aa, Zea mays
  Clone ID: MRT4577_80483C.1.pep
ARALPRTCVLGEAPELPRARLPPLLRASTGSSSSSLRKALDLPSLLFSGELFLEPGREDPAGRWRGARVPARLVGRESRAGEVPPLYTTGGPIARQPQPARGELIYCRHGCSHSTSEKSQLHGSWRTLDMFILLPLLLQIWHSFILSVAWSKKEGCLFEWHE

SEQ ID NO: 347941 - protein, 95 aa, Zea mays
  Clone ID: MRT4577_80484C.1.pep
KEVSLVDQGLNGKQRILQLEHEISLLSRLEHENIVQYIVSHLPYVFQNIELYFGTHKEGGKLYIELYFHAPQDSEDISCTRQLQNALHSIESGSH

SEQ ID NO: 347942 - protein, 95 aa, Zea mays
  Clone ID: MRT4577_80485C.1.pep
PLRRTSRATHWPSRRSPLLYRVDILSRARTTFAANAPTYRGALEACQHTDESMNGVRYHQERPLLQGSATCGKYITERNRLAQRHDTSLLQKLDS

SEQ ID NO: 347943 - protein, 156 aa, Zea mays
  Clone ID: MRT4577_80486C.1.pep
MSIEERKISLISRTTSLNPNAVEFVPSCLRSVSDASNRSDTTKIPVSESSKEISADQPESVPSNPDEEAHRYWQQQLPDDITPDFNVLGQDETPGPDSLSLTGLSVNDGFGASLFFPNQKSRMQHHASPFVRDMRSTRGKFGFLGQEQPQASIMSP

SEQ ID NO: 347944 - protein, 90 aa, Zea mays
  Clone ID: MRT4577_80487C.1.pep
DMPLDTKSGRESHTYLTRWVSFYSIWATKNYDSGRPLPPRLPTMHTHTQATTLLDAESSCFYDWPCCLLFGFTWPLERLLGGGPFLQHAV

SEQ ID NO: 347945 - protein, 52 aa, Zea mays
  Clone ID: MRT4577_80488C.1.pep
PRVRPRVRPRFRPRVRKKKKEKSKKKKKKKKKKKKKKKNKKNEKKNKKEQPF

SEQ ID NO: 347946 - protein, 84 aa, Zea mays
  Clone ID: MRT4577_80489C.1.pep
AYSVMSHLPAQPLSALSPFSAPGRFSVGPRLAFGVRLLCFLLRAVSLVACLSAVAALSIASATLLAHGVVQLLCSPVEFFATRA

SEQ ID NO: 347947 - protein, 111 aa, Zea mays
  unsure (1)..(111): unsure at all Xaa locations
  Clone ID: MRT4577_8048C.1.pep
CDYSSRYGIPLFSQLATAISYNQQFVPYNLLGAXLNPSAYFHHQTVRPFGRLAATISASFLIDRHVPLFLYQSVDNPATVSDRHQKLPFVLHALSNASAFHPVXVIAGALF

SEQ ID NO: 347948 - protein, 100 aa, Zea mays
  Clone ID: MRT4577_80490C.1.pep
SQVQEKKTKKPFASFLSRCGSRHNFASVADIQPTEEVRLSVPRREPTAAALADESVSALRLWYVIDVHHLDCPLLFGCEKKNNRERKDREIKPFVGLKQD

SEQ ID NO: 347949 - protein, 123 aa, Zea mays
  unsure (1)..(123): unsure at all Xaa locations
  Clone ID: MRT4577_80491C.1.pep
HAAPPPPNDMTVRQVADKLASFVAKNGRQFENITRQRNPGDTPFKFLFDKHCPDYKYYEFQLAEEERALAQSKEAEASKANSGTASFKAQGGTYRSSFXQKSNYQTPASALYGAYKGWFFPRK

SEQ ID NO: 347950 - protein, 65 aa, Zea mays
  unsure (1)..(65): unsure at all Xaa locations
  Clone ID: MRT4577_80492C.1.pep
KKNVFFGWVVRPPIKKRAKRGNKVQFHHKKVGLVTKKGXFIGNRVFGPFPPKFRKKKPPKILALG

SEQ ID NO: 347951 - protein, 313 aa, Zea mays
  unsure (1)..(313): unsure at all Xaa locations
  Clone ID: MRT4577_80493C.1.pep
PRGFWXRGPSGFSWSSTADQVTQGISAAGLTAIVTGASSGIGAETARTLALRGAHVIMAVRSLPAAQAVKDAVLAQAPGAKLDVMELDLSSMASVRAFASQFIDRGLPLNILINNAGVMAIPFALSKDGIEMQFATNHVGHFLLTHLLLDTMKRTSHESNLEGRIVNVSSEGHRLAYREGIRFDKINDESVYSSIGAYGQSKLANILHANELARRFEEDNVNITANSLHPGSIITNLLRYHSILDVLHRTLGKLVLKNAEQGAATTCYLALHPHVKGVSGKYFCDCNLYEPSANAKDMELAKRLWDFGVELIT

SEQ ID NO: 347952 - protein, 115 aa, Zea mays
  Clone ID: MRT4577_80494C.1.pep
PPPVFLFYSVKFLPPKGVPPPEIFYFFPPLSFYINPPLGRGEKTKKKNGGELFQKTKIFFGFKPPFFPPPKGIGFWAIPFLPFFFFPPPLFFDFVPKTTHPLFLHFFHDLVALTL

SEQ ID NO: 347953 - protein, 94 aa, Zea mays
  Clone ID: MRT4577_80495C.1.pep
GRGFFFFFFVSVQLLLLIFFFKKRKTDLGCKTFFGIACLSLVLQFERLNLDKMWRVSRELNMPSIRTRSGRETPTDLVTSSCIFLCIVCTFPGR

SEQ ID NO: 347954 - protein, 72 aa, Zea mays
  Clone ID: MRT4577_80496C.1.pep
LHKGVFETSGPTLKLKLKRSACAAMDVKCLRLDGNVAIVTASTMGIGLAIAERLGLESVAVVISSRKQTNVN

SEQ ID NO: 347955 - protein, 97 aa, Zea mays
  unsure (1)..(97): unsure at all Xaa locations
  Clone ID: MRT4577_80497C.1.pep
LLSHLXLWWCVEQIIKRGPKLAANTIEYCXWWWCEKREEHRGSFTFRYSSLLAMFRRSSLWVLHGTSRCGLTVQCVGLIHDVQSRVYTHNINVRSHR

SEQ ID NO: 347956 - protein, 56 aa, Zea mays
  Clone ID: MRT4577_80498C.1.pep
FSFYLFIFFYDLNSLLIFTLVFVHTQLYILMYMYYLFFKIRLYFEFVIKNCVHFMR

SEQ ID NO: 347957 - protein, 350 aa, Zea mays
  Clone ID: MRT4577_80499C.1.pep
MSLPFAGADERQTLFSSASAATGQESSIWVGCCCRCDRWGANDGRRRVTATNGDSRLSVAATTYQSTSPAAATYEASLPVVDDYSTMQSGYYTSLLNQDPENVFIFEENMDNANEVMASPASNCLNSQSKSRGRSKNFNEPEDILLISAYLNISKDAITGRDQKDGRFWERVEKYFHVNKTFETDHNWSSLKHRWSIIQKEVSIFQGFHDSIERRNQSGKTSSDKWTEDKVSKEGLGCNNATGGAQPNAQRPTGRKVEKENMKEKKRRDDEADPFIEEVKKMRESREQIAMGRKDRDDKLIELENKKLQLEQDQHDEKIMTTDTSNMDDQAKKYFKLMKDEILARRFGSG

SEQ ID NO: 347958 - protein, 71 aa, Zea mays
  Clone ID: MRT4577_8049C.1.pep
GRADGDGRISRNDLRRALRRRRRGRRWLTASRSDRALRHADKDSSGFLDDSEIENLIASAQKDLGMKISTW

SEQ ID NO: 347959 - protein, 75 aa, Zea mays
  Clone ID: MRT4577_804C.1.pep
MRPNWWTCSLTETTPGDIPKPQEGELERGPPVPHGDDPRRVLACGSVERGPVRLEVSLDSRGGGGERGEVGGAIR

SEQ ID NO: 347960 - protein, 61 aa, Zea mays
  Clone ID: MRT4577_80500C.1.pep
YYTGAVCDITELLENWYYFYYMGRGHQHQLRGLRLHATGGDIPNRVDVPAAVVWAGADATQ

SEQ ID NO: 347961 - protein, 563 aa, Zea mays
  unsure (1)..(563): unsure at all Xaa locations
  Clone ID: MRT4577_80501C.1.pep
PVPHAHRTAPGGRGEVSAEKGVKPDQPGLVCFDVFCSYLPACEFILWQLDACNRPKALLLECERHSGCRSKNWRSSIKLKGSLMPFGKWIDRHQPGVCPTNPPKRSSRLMXLQKLIDLLNDPYDPVHVTLLTGYYAVCXWLFQKTANGRVCFGRSXIPVEQECYGXRGKQDFTSWVCRACEKPEQKRECCLCPVKGGALKPTNVDNLWVHVTCAWFQSQVAFASDELMEPAIGILNIQPLLFMKMCVVCKQIHGSCTQCYRCSTYYHAICASRAGYRMELHCLEKNGRQTTKKISYCAQHRSPNPDNVLIIQTPAGTFSSKKLVHSNGKVAASRLIRKDIPLDLPSEVKISENLSAARCRVYVRKDLKRSREGTIVHHVRGPCQHRWEEIDNLNPPREERDPESFCTFKERLCYLQKTEHGRVCFGRSGIHRWGLFARRDIQEGEMVLEYRGEQVRRSVADLREEKYRVQGKDCYLFKISEEVVVDATDKGNVARLINHSCTPNCYARIMSVGHDESRIVLIAKKKVCAGDELTYDYLFDPDEADERKVPCLCQTANCRKFMN

SEQ ID NO: 347962 - protein, 456 aa, Zea mays
  Clone ID: MRT4577_80502C.1.pep
MAWRCNDRAKAHASSLNEHIQDVRNFWSVLDKGPSPSVLSLGLQPTGPIPSSHVDRLAGNFQSSDPFHAAATILLLYSLPFAGADERQTLFSSASAATGQESSIWVGCCCRCDRWGANDGRRRVTATNGDSRLSVAATTYQSTSPAAATYEASLPVVDDYSTMQSGYYTSLLNQDPENVFIFEENMDNANEVMASPASNCLNSQSKSRGRSKNFNEPEDILLISAYLNISKDAITGRDQKDGRFWERVEKYFHVNKTFETDRNWSSLKHRWSIIQKEVSIFQGFHDSIERRNQSGKTSSDKLAEANAMFHEMKGKAFSLFHAWNILRHEPKWTEDKVSKEGLGCNNAIGGAQPNAQRPTGRKAEKENMKEKKRRDDEADPFIEEVKKMRESREQIAMGRKDRDDKLIELENKKLQLEQDQHDEKIMTTDTSNMDDQAKKYFKLMKDEILARRFGSG

SEQ ID NO: 347963 - protein, 75 aa, Zea mays
  Clone ID: MRT4577_80503C.1.pep
SDTTTSALNIFISDINPLLLCSNIFLGPVTWIWEAMHGSIHLHYSSRFQRVAFFCETSFEVLRNSRFGALKRLQL

SEQ ID NO: 347964 - protein, 133 aa, Zea mays
  unsure (1)..(133): unsure at all Xaa locations
  Clone ID: MRT4577_80504C.1.pep
FYFDGHLLLQQITRKQQQHQQRPQQLMARRTLKISAALPGQVFDCLNQHRQSMNQQLSDVEILLXVQLELEQQYHHQLQQEQYQRKLQLEPLAQLFXNHSHTITGITMTLEQSMQXXLPCSNFGPTTMVDQGL

SEQ ID NO: 347965 - protein, 56 aa, Zea mays
  Clone ID: MRT4577_80505C.1.pep
SQCLSIACSGAPSSIAFLDSSSCEHASHPSCAPLRTCWLLIRDTCKVDRMGTLVKA

SEQ ID NO: 347966 - protein, 527 aa, Zea mays
  unsure (1)..(527): unsure at all Xaa locations
  Clone ID: MRT4577_80506C.1.pep
MELTWDEWDVIILAACSFLIPLVFLCNATKRRRRRAPPGPATVPIIGNLAWLTLRDGLGELDILRRLHSRFGPLLSVRLGSSEQVNVADRRLAHALLVERGAAVADRSPLLVSTERFGAFGSFSIHVSSYGPRWXVLRRNFAAEVVSPARFRQMAASRELALADLIRKLKLQEGVVVCRDAFQHAMSSLFIAMCFGKVLDDSSVDSIGVALRDFVLHGGASGMGMALFLFLPALTTRLFRGLLRSKEAKRQKLENVYCLPLIHERRERRKTKQLTQEHPHCYVDTLLDLRLDEEQDGGRLLTDHEIASLCIEILIVGSELPATALEWIMAELVKNPGVQDKLYEEMMVKAKATTDASAGVLPFSEDDLPKIPYLRAVVLEGLRRHPPGHQMPPRRVREDVEVGDYVVPKGSAINFMLYDLGMDDATWDRPAVFMPERFLPGGEAEALDITGTKEMKMIPFGAGRRICPGLRIALLLLEYFVANLVATFHWKEVEEGDVDVTTEDAQLTVLMGKPLRARLLPRLPAAP

SEQ ID NO: 347967 - protein, 128 aa, Zea mays
  unsure (1)..(128): unsure at all Xaa locations
  Clone ID: MRT4577_80507C.1.pep
LQTFGGKNTLVGKTIEGPPLEALQPCIKGKNAWLFVPPEEVPTGVKPFRAFQKKEGVEEANXDFVGAVFXGKFFGPGDFKALENFPNPPQVFPPLFGALQGTVLLFFAPLQGPTKDVVSVLFAFVPKL

SEQ ID NO: 347968 - protein, 65 aa, Zea mays
  unsure (1)..(65): unsure at all Xaa locations
  Clone ID: MRT4577_80508C.1.pep
PSSSDRDXLYHKDEVAATGVGLLLRGAGDIRMAIAIAPNVMAVRRSAPLNPAPIPSSLEGTVEIS

SEQ ID NO: 347969 - protein, 117 aa, Zea mays
  Clone ID: MRT4577_80509C.1.pep
AAGQGARPHELVSQPEPRRGGACARPAPPAVGGAVVLRPSYPHPRRHSVARMPYPDRPPAANGMGPTVRPGVHPATAPCAFFRVVSVLKPNGMFCSVACSGVSSSRMNNGLCLEEEN

SEQ ID NO: 347970 - protein, 147 aa, Zea mays
  Clone ID: MRT4577_8050C.1.pep
QKQDTFSHPLLASRTKIWSPISRCTQASVGWDHGTLRPTCFTRFGECQVTLQLSLILPLRGKLRLCQVAGSYEHWAASVPLEPGLPHQPTLVGFCTMITTCFGFSRAELNMGVGRAKFLIPKFLSGNWRRGNMFCWKKLFACSYCAA

SEQ ID NO: 347971 - protein, 43 aa, Zea mays
  Clone ID: MRT4577_80510C.1.pep
TGAFVGGRPRPRLGRWGPKGPCHWFSPPGQRTAPARLEAPFPT

SEQ ID NO: 347972 - protein, 78 aa, Zea mays
  Clone ID: MRT4577_80511C.1.pep
LIHFYTSFNVLSGRYLLSPYKPCYSSSLVVGAAGANLETETHPMWIRTALPLWASWRGGNYGPRKRCGQTPRRLGPGP

SEQ ID NO: 347973 - protein, 68 aa, Zea mays
  Clone ID: MRT4577_80512C.1.pep
EVQKNYEHLFKVNDKSVGGSFYLQSKVVRAQERLDEQLKIQAQEDREKGQMPIRDCSAPTVPHAASNL

SEQ ID NO: 347974 - protein, 56 aa, Zea mays
  Clone ID: MRT4577_80513C.1.pep
PASVPVNSYQLARLTASFCERQIPFVICFSHNQPLILFQPLSCMGGTDLSFNGLEE

SEQ ID NO: 347975 - protein, 111 aa, Zea mays
  Clone ID: MRT4577_80514C.1.pep
LRIRAIGEEKAMMCSTDRRGESSNGTIKVHYAYDRVPRSGVTLAVQHSLILCPVHKLWRRRRERNRKVAAWSLVPGVVDADAGDARPLRVLRAPFGRRRHGDIHVLRPGRP

SEQ ID NO: 347976 - protein, 113 aa, Zea mays
  Clone ID: MRT4577_80515C.1.pep
KRDKKRGLADSPQGPQIFNLEARKQNLFKMGGLFKGGGETLGPLPPFLGTGKLGPGKFKSPQSNPLGPPPPGPPLSRVRKTWAPGGPGGPCQNPVFYGPGGGCGAPPGTGRRG

SEQ ID NO: 347977 - protein, 112 aa, Zea mays
  Clone ID: MRT4577_80516C.1.pep
GKKGPKYKNQPPPRQPRRGLLDQRKLVLPGPWKKASQHYLIAHKKGPASPITKKLLNLGRLQPKGFKTLDQEKKVGDRHRLLHQASKKGVPNGPGGTPPPFREAVSPKPSFK

SEQ ID NO: 347978 - protein, 74 aa, Zea mays
  Clone ID: MRT4577_80517C.1.pep
NRSALGWLTSMDCVDLSCMRSVQQAPFCACLRFQSLRPSLSIVSSWSAMDKASCYSKRQLRYHCFSYQTQSKIS

SEQ ID NO: 347979 - protein, 436 aa, Zea mays
  unsure (1)..(436): unsure at all Xaa locations
  Clone ID: MRT4577_80518C.1.pep
MARAALRLGVRALALLVLVSVALLPLVSSDDGYRHCEGVVRGWADASSGRVKDGDTLSLKDLLFFLHIPRTGGRTYFHCFLKKLYTNAQECPRSYDKLRFDPSTLDIWPWKYLVPWMREDLFARRDARGVYKVHSSKKVNAYDVDDMVMPLHRYINDPVAHEIIHNGATFQITGLTNNSYFDGAHEVRHCVRNHPDLGRIVLEVAKNRLDQMLYVGLTEDHEESARLFAHMVGAQVLSQSGTLTLDLKXICSLRLILTHPWSLRTKKQTXHLNSTHGWQNNEAMNSTNDEHGKGNMTVGKLMEAYETCIAKLWKSQSGRRKISLKKVQEANFSKEARKLVPEAILNQIISLNRLDMELYDHAKKIFTQEHLMLKAQQSMVGQHRQFGEQKGWIGVMCSDGICPPWMVVLVVLGISTIIVLVTLAVTTRKRTSKLKV

SEQ ID NO: 347980 - protein, 44 aa, Zea mays
  unsure (1)..(44): unsure at all Xaa locations
  Clone ID: MRT4577_80519C.1.pep
KVQHSICMIYNSTSVVEVFYLIGLXFHLMFAXSSFVHWFLGQGM

SEQ ID NO: 347981 - protein, 143 aa, Zea mays
  Clone ID: MRT4577_80520C.1.pep
DGEGSLLSAVAVPVGPCTRSPGTEPDVSRTPVAPAAVARTHPPRSKADRRKRLRRPRHCSLKRSSQPPFAFAVTLFSNYAGIIQERHNIVFQYETFTCRYIYMDVRTRQFPVFSGASRLKNWLDGMLLFNVDGFFLLACLFRR

SEQ ID NO: 347982 - protein, 104 aa, Zea mays
  Clone ID: MRT4577_80521C.1.pep
SGQKKKNWGEKKKTQAGGPPWFPHPTKLQAGPFKKMNMGPNGIPHKPSEKKIPGGKSKLHAQGKKNPWGLAPLLKLGREKLVLNQKLGGPPLGKKEKRGNLAVL

SEQ ID NO: 347983 - protein, 70 aa, Zea mays
  Clone ID: MRT4577_80522C.1.pep
ARYHPIVTLRAIANDCIMYRVAGPWEISGWPNLKPSSNVHHARLQSKKRGKARQQMMMSQPNSLRTDPYS

SEQ ID NO: 347984 - protein, 56 aa, Zea mays
  Clone ID: MRT4577_80523C.1.pep
HFSEAQPESGHQTYTWDGIACKFTGLMMERWTSRVDRRPLHSQSTKQTPLHHCSCN

SEQ ID NO: 347985 - protein, 56 aa, Zea mays
  Clone ID: MRT4577_80524C.1.pep
YQGIITSFAAQRDPCYYYINILPLCLAQYPTRFFHIMVCVGDTVFFTELSILSLSS

SEQ ID NO: 347986 - protein, 147 aa, Zea mays
  unsure (1)..(147): unsure at all Xaa locations
  Clone ID: MRT4577_80525C.1.pep
AGGRERQPAPPAEGRGTRRAAAXRGAPRRNRAAAHGNTPGPRGRXRPRPPTRRPSRQRRTXRRGGEGRATRRKTTRPAQRTSKTRTPRREGGSKEEQPHREGEKQPRTRHQPQGAGTGRTPPQRXQEEGRSQSRKTQATRARASPAT

SEQ ID NO: 347987 - protein, 72 aa, Zea mays
  Clone ID: MRT4577_80526C.1.pep
DQAIARLLNPSVLDRFSLSHECNYVVKLSAGLRTPSIEAKPVLFILDRRSTAGTLKPVPGFVSCKEKLRALG

SEQ ID NO: 347988 - protein, 35 aa, Zea mays
  Clone ID: MRT4577_80527C.1.pep
RNTILKKKQVMPLIRQSFNRLHKRKTWKASRTRSE

SEQ ID NO: 347989 - protein, 92 aa, Zea mays
  Clone ID: MRT4577_80528C.1.pep
GDRFTKTTCDIFGGGGGARKPPPFGAPTPLERRALQHLKPGNPKPGVDPPHLGGHGNGPRPGGSLLNLLTVPERGPRPQVSTGACPKNPRLA

SEQ ID NO: 347990 - protein, 265 aa, Zea mays
  unsure (1)..(265): unsure at all Xaa locations
  Clone ID: MRT4577_80529C.1.pep
XALQLSXSRNPVPQFEAAELSVQPNAGDEKXKKKKTKNVALAEGEMGDAKDLKREKKVSSEFGVKKEKKKKRKVEVVDEGNTTDKSTDAPVDDQQIGDGADGITFDETLKSNLQKQFEMAAAEAGMVKGGSSSSASPVTPVSGKVATKRKRSKSADKLSEASDGGDGSEGNLLAQDGEKSGKKVRFSMKNNLVWKPHNPLPPQCLRLPPSATPRGSALKKGVKPGPITPAPLKKAKPKAKSAKKVLKKQPSSAVKRLRKLQSFSA

SEQ ID NO: 347991 - protein, 169 aa, Zea mays
  unsure (1)..(169): unsure at all Xaa locations
  Clone ID: MRT4577_8052C.1.pep
MEIEKGHIIIVFIGHVESGKTTTTGHLXYEIEGIRLXVIQRSXKEAAEMNKCSFRXRGRSHKLIAERERGIAIDXIDLWEDDTTKYYXTGIDAPGHRDFDNLITVTSIDDCAAPIIDSTNVGXGCDXSKDGQTHIHALLEFTLGVKNXMCCCNNVYATAPRYSNARHDE

SEQ ID NO: 347992 - protein, 64 aa, Zea mays
  Clone ID: MRT4577_80530C.1.pep
SRFMNVDRRRSQHVHHMRGLLGNQYCWRVKFCRASEAGDVSLESYGSVWEHDPFLSIRKMSGYG

SEQ ID NO: 347993 - protein, 151 aa, Zea mays
  unsure (1)..(151): unsure at all Xaa locations
  Clone ID: MRT4577_80531C.1.pep
MDATATGAGGNANKGAVGRKAGXGRRNDLRGPMSRAMPNFQFPVGRIDRYLEMGRYPQHVSSAVPGYLACLLYHLAAEVLELPGNAAKDYEKTRIVSRHVLLAIHDHEDLGXLLTALTVAHGGXVLPNIRPVLLLKKTAVRASSSRDSGCQ

SEQ ID NO: 347994 - protein, 94 aa, Zea mays
  Clone ID: MRT4577_80532C.1.pep
MASATGVSSSEMAVDHATGPGAVEKPRFDALTEMSGGRPQFRKVPVPQHRFAPLKRCWMEIYKPVYEHMKIDIRMNLKVLDWSLPILGFLALCE

SEQ ID NO: 347995 - protein, 64 aa, Zea mays
  Clone ID: MRT4577_80533C.1.pep
SWQILQKQGTNQGDSCVSIYCPGSPIRGSKYAQLVKCLVDTGTLPYNAIRDHGRQLMTLGSLHD

SEQ ID NO: 347996 - protein, 64 aa, Zea mays
  Clone ID: MRT4577_80534C.1.pep
TPVPYDFYLKNSQGKHGRNQGLIYHQSTARLGAQANKQPNLKLLHDMRKCNLSYHVKIRLDSGN

SEQ ID NO: 347997 - protein, 113 aa, Zea mays
  Clone ID: MRT4577_80535C.1.pep
IGYLEAGREKHHKLSCREVAFPISTDDDFEEIHEGEPLLSCRGWTAYVYLRLYADVHDGEDQPTLLGSYPAMFALLVGQERRKTAYTAYQGGHHHLNRWDAHLRAHTGAEGED

SEQ ID NO: 347998 - protein, 88 aa, Zea mays
  Clone ID: MRT4577_80536C.1.pep
VALYSRAQQDYRLETQLAADQYASCSAYTFPDLRQSMVLNRQSSPPISTSRQVVPRSSQCLRISNSQRRFNQMGDEGTTIISQALNSP

SEQ ID NO: 347999 - protein, 717 aa, Zea mays
  Clone ID: MRT4577_80537C.1.pep
TVLVAGLTAPGTPYGGWEGPGIQLRGHFVGHYLSATAKMWASTHNDTLNAKMSSVVDALYDCQKKMGTGYLSAFPSDFFDCLGAIKSVWAPYYTIHKIMQGLLDQYTVAGNSMALDMVIKMANYFSDRVKNVIQNYSIERHWESLNEETGGMNDVLYQLYTITHDMKHLTLAHLFDKPCFLGLLAVQADSISGFHSNTHIPVVIGAQMRYEVTGDPLYKQIASFFMDTINSSHSYATGGTSAGEFWTDPKRLAGTLSTENEESCTTYNMLKVSRNLFRWTKEIAYADYYERALINGVLSIQRGTDPGVMIYMLPQAPGHSKAVSYHGWGTKYDSFWCCYGTGIESFSKLGDSIYFEEKGDPPALNIIQYIPSTYNWKAAGLTVTQQIKTLSSSDQYLQISFSISANTRGQTANINFRIPSWTFADGAGATLNDKDLGSISPGSFLSITKQWNSDDHLALHFPIRLRTEAIKDDRLEYASLQAILFGPFVLAGLSTGDWDAKAGNGSAISDWITAVPPAHNSQLVTFTQVSNGKAFVLSSANGTLTMQERPEVDGTDAAIHATFRAHPQEDSTELHDIYSTTLTGTSILLEPFDLPGTVITNNLTLSAQKSSDSLFNIVPGLDGNPNSVSLELGTKPGCFLVTGTNYSAGTRIEVNCKSSLESIGGILEQAASFSRTDPLRQYHPISFVAKGMARNFLLEPLYSLRDEFYTVYFNVRA

SEQ ID NO: 348000 - protein, 180 aa, Zea mays
  Clone ID: MRT4577_80538C.1.pep
LALLSLSVSTTTAFIIPQCSLAPNAIIPQFLPSVTSMGIEHPIVQAYRLQQALAASVLQQPFAQLQQQSLAHLTIQTIATQQQQQFVPALSQLAAVNPASYLQQQLLASNPLALANTAAYQQQLQLQQFLSALSQLAMVNPATYLQQQQLLSSSPLAVGNVATYLQQQLLQQIVPARAAA

SEQ ID NO: 348001 - protein, 59 aa, Zea mays
  Clone ID: MRT4577_80539C.1.pep
RLLFFFIGIFLFFIQARPSPILVHPVLKKQGTKHCHTIICYINITQYHSCAHCEIISYY

SEQ ID NO: 348002 - protein, 268 aa, Zea mays
  unsure (1)..(268): unsure at all Xaa locations
  Clone ID: MRT4577_8053C.1.pep
MAATIQSVKARQIFDSRGNPTVEVDVCCSDGTFARAAVPSGASTGVYEALELRDGGSDYLGKGVSKAVNNVNSIIAPALVGKDPTAQTELDNFMVQQLDGTKNEWGWCKQKLGANAILAVSLAVCKAGASVKKIPLYQHIANLAGNKQLVLPVPAFNVINGGSHAGNKLAMQXCSELRFPHLSSCCFCTCVIYAYACICXEFMILPTGAASFKEAMKMGVEVYHNLKSVIKKKYGQDATNVGDEGGFAPNIQENKEGLELLKTAIEKA

SEQ ID NO: 348003 - protein, 266 aa, Zea mays
  Clone ID: MRT4577_80540C.1.pep
MATKILALLALLSLSVSATTAFIIPQCSLAPNAIIPQFLPSVTSMGIEHPIVQAYRLQQALAASVLQQPFAQLQQQSLAHLTIQTIATQLEQQFVPALSQLAAVNPVSYLQQQLLASNPLALANTAAYQQQLQLQQFLPALSQLAMVNPATYLQQQQLLSSSPLAVGNAATYLQQQLLQQIVPALSQLVVANPTAYLQQLLPFNQLDVANSAAYLQQRQQLLNPLAAANPLVAAFLQQQQFLPYNQISLMNLALSRQQPIVGGAIF

SEQ ID NO: 348004 - protein, 257 aa, Zea mays
  Clone ID: MRT4577_80541C.1.pep
MATKILALLALLSLSVSATTAFITPQCSLAPNAIIPQFLPSVTSMGIEHPIVQAYRLQQALAQLQQQSLAHLTIQTIATQQQQQFVPALSQLAAVNPASYLQQQLLASNPLALANTAAYQQQLQLQQFLPALSQLAMVNPATYLQQQQLLSSSPLAVGNVATYLQQQLLQQIVPALSQLAVVNPAAYLQQLLPFNQLDAANSAAYLQQRQQLLNPLAATNPLVAAFLQQQQFLPYNQISLMNPALSRQQPIVGGAIF

SEQ ID NO: 348005 - protein, 59 aa, Zea mays
  Clone ID: MRT4577_80542C.1.pep
AASSCTSAADHAHTHVMFVQAVVTSLRNIYSPPFTTTYCAAPVPVVLSRTYLHHARSDH

SEQ ID NO: 348006 - protein, 70 aa, Zea mays
  Clone ID: MRT4577_80543C.1.pep
SINVTRPSQGCGLGYRTGVSFLFSSPVVFLPAHLSWGPVWSCCCSHRPCKCCCQSVVMVFHPTKGRVCLS

SEQ ID NO: 348007 - protein, 70 aa, Zea mays
  Clone ID: MRT4577_80544C.1.pep
DMPEAADPVQMILRGHLHCGGHQHHHGGEVGSAGKRRISSLRYMESTSVHVVLAPPAPPAHSVGYHGFSN

SEQ ID NO: 348008 - protein, 134 aa, Zea mays
  Clone ID: MRT4577_80545C.1.pep
LSDRPKEGDPPMKNQPHLSSPPCLYLPTQLSLKKEILSNQVIANPTLPYQPGRSLLFGRPQFPGNLDWGAEWATTPEGPSQKKTSSPNQTNARHQTYAFEASMIYPYPNLMEGRMEQMSGWEKEGGLSSLHLPN

SEQ ID NO: 348009 - protein, 71 aa, Zea mays
  unsure (1)..(71): unsure at all Xaa locations
  Clone ID: MRT4577_80546C.1.pep
FLXPHAYYSXNTLEPILPTLISDTLSLGVTVITAXADECIAAVSVMDVNTALQYVLMTALIHDGLSRCIRE

SEQ ID NO: 348010 - protein, 48 aa, Zea mays
  Clone ID: MRT4577_80547C.1.pep
MLYILHWEGVISGSKTTNCAKNRCLGADTTPYFVYAYTHPIYTKTVAI

SEQ ID NO: 348011 - protein, 55 aa, Zea mays
  Clone ID: MRT4577_80548C.1.pep
RVLAKPRIYTRAPAHGFATDHTVILKMPRPDHTSLHNARRGALYLSEQPTNLANA

SEQ ID NO: 348012 - protein, 64 aa, Zea mays
  unsure (1)..(64): unsure at all Xaa locations
  Clone ID: MRT4577_80549C.1.pep
RPSTSSIFHAKAGIALIDHFVKLVTWXDNYWGYSNCVIDLMRHMFKTQYRGVFPMLLHDGSCRC

SEQ ID NO: 348013 - protein, 96 aa, Zea mays
  Clone ID: MRT4577_80550C.1.pep
RTKVYYPGLARKNFFNGDPKIKLMARVLKPWEWEKPGGPQIKCLGKKPPFPQWGKKEKGPNHRPFQKFANPKGKRDPPLNRPIKPGGGGGSPQWTP

SEQ ID NO: 348014 - protein, 135 aa, Zea mays
  unsure (1)..(135): unsure at all Xaa locations
  Clone ID: MRT4577_80552C.1.pep
DAWVESRWFKKGFRPGRVYVVXTQVHSLADGEDEVPELGPSEPPTPPPPPPPQKEDDGDDSGWESDSSVASCPATLSSEERRRPAGSLPRPVSLNAFDIISFSRGFNLSGLFEERGNEVRFVSAHPMQTIITKLE

SEQ ID NO: 348015 - protein, 113 aa, Zea mays
  Clone ID: MRT4577_80553C.1.pep
SNREGRPFFFFFFFFFFFFHMRFFLLKLFFFNLFLIFFYFFKIYFFFFRKKLKTPKLNVPFPKIRKKYHLMQIDNNLPNLEKILPPSKKKKPSPNQIELFSLFPNLLLGAHNL

SEQ ID NO: 348016 - protein, 92 aa, Zea mays
  unsure (1)..(92): unsure at all Xaa locations
  Clone ID: MRT4577_80554C.1.pep
MGKEKTHINIVVIGHVDSGKSTTTGHLNYKXGGMTRRVNERFEKEAWEMNKRSFKYAWGLDKLKGQREKSITIEIGLGKFETTKYYWTGNDA

SEQ ID NO: 348017 - protein, 66 aa, Zea mays
  unsure (1)..(66): unsure at all Xaa locations
  Clone ID: MRT4577_80555C.1.pep
PPPNFGKNLTXIKNNVXTMVLPLLGVELPHGRGAFLPLFXRYGVATSERPDDAGGGGRWREVGDPG

SEQ ID NO: 348018 - protein, 62 aa, Zea mays
  Clone ID: MRT4577_80556C.1.pep
PRVRPRVLPLVRPRVRLGLGLCEFRIGQISNHSANLIILTINLNSSNNSMKSSYSNDHVIIS

SEQ ID NO: 348019 - protein, 34 aa, Zea mays
  unsure (1)..(34): unsure at all Xaa locations
  Clone ID: MRT4577_80557C.1.pep
VKSKYHFPFKTGRTTIYRRAGNARINNSGLPXQL

SEQ ID NO: 348020 - protein, 92 aa, Zea mays
  Clone ID: MRT4577_80558C.1.pep
PEKKCIPQGLPPGPSPGFSWLLLKRARGFWGWAPPDFSLPPPPLWALVFYAFMSLPLLGLITHKLVWEKKKKKKKKKKKKKKKKKKKKNPPT

SEQ ID NO: 348021 - protein, 74 aa, Zea mays
  Clone ID: MRT4577_80559C.1.pep
GGDALGFVEVALVPFKSWFLAYDRFGGVRVEKECPRLAAWAKRWAEGPRVAKNLYPAEKVFDFVWGIKKRLGIK

SEQ ID NO: 348022 - protein, 256 aa, Zea mays
  unsure (1)..(256): unsure at all Xaa locations
  Clone ID: MRT4577_8055C.1.pep
MAATIQSVKARQIFDSRGNPTVEVDVCCSDGTFARAAVPSGASTGVYEALELRDGGSDYLGKGVSKAVDNVNLIIAPALIGKDPTAQTELDNFMVQQLDGTKNEWGWCKQKLGANAILAVSLAICKAGASIKKIPLYQHIANLAGNKQLVLPVPAFNVINGGSHAGNKLAMQEFMILPTGAASFKEAMKMGXVEVYHNLKSVIKKKYGQDATNVXNXEGGFAPNIQENKEGLELLKTAIEKAGYTGKLXIGMGCAA

SEQ ID NO: 348023 - protein, 179 aa, Zea mays
  unsure (1)..(179): unsure at all Xaa locations
  Clone ID: MRT4577_80560C.1.pep
MNLDHRTRALRRPDSLPLPDEENNADAEKFQIVEDMTSIVHAVQDGVLSHILALKDVIENLALVGLADATTDRATFRDMVPMETDNDLEAHFRRFANEDRSYYPVLALAAPSNMPRTITYLKRLFIELFIQEGFQRDYVFDWIIMNDQQAAMTTDAPREIAPVSRQRXSGWIPVGNTNR

SEQ ID NO: 348024 - protein, 36 aa, Zea mays
  Clone ID: MRT4577_80561C.1.pep
EQGSPSLNSQQYMGTMQKGMVKPPFIYMVYTFWECS

SEQ ID NO: 348025 - protein, 196 aa, Zea mays
  unsure (1)..(196): unsure at all Xaa locations
  Clone ID: MRT4577_80562C.1.pep
PQPPNPASPRSPRAYSSDGGRRATNGDSDAEHATSTRDVRRLPTRLLRAPSHDSRAHDTERNDXSAGDTLKDDPDERIKVXDYKLPTKXNKKIGAKDSKRLSHMHAAYIFTHRFLLNTANRTLTPETDHRSYTAAYTTRDLTPRGHPXAFKPPPIMRSAIQXMNNRWPYPNRTXGADHYFVAPHHFEACIHYQEEK

SEQ ID NO: 348026 - protein, 260 aa, Zea mays
  unsure (1)..(260): unsure at all Xaa locations
  Clone ID: MRT4577_80563C.1.pep
MPSSYAAAAAGSSSRKPNRTSSAAAPTLRPPAPSPSPAPAPLAVNPSVISDSDPSSYSSSSADEADFAASDSATASVVSAYLSVAGEGADLSKVGIFLSSAARRRSPPCLICFDPIRPSDPVWSCSSSCFAILHLPCIQSWAHQSASGPAVPCPTWGCPKCRFAYPKSEIPSSYVCFCSKTIDPAPDPWILPHSCGDVCGRRLDANLDSGCEHTCLLLCHPGPCPPCPXVVPKATCFCGAHRXPRRCAHQRYSLXXKCTN

SEQ ID NO: 348027 - protein, 196 aa, Zea mays
  unsure (1)..(196): unsure at all Xaa locations
  Clone ID: MRT4577_80564C.1.pep
PRVTLISKLMGTEVVDGCIHPTWXKLIDGICRESLAFQTARREGMPDLIITRAEELYLSMSTNNKQGASVAHNEPPNGSPSVNXWFRSLNXKNRLEMLPGTFEPLRKEVESAVTTMCKKILSDLYNKSSIPELVEVVCVAVGAREQPPPSTVGRSSIYVIIRSDNRLYVGQTDDLLGRLNAHRSKEGMRDATVLYV

SEQ ID NO: 348028 - protein, 113 aa, Zea mays
  Clone ID: MRT4577_80565C.1.pep
GIGGPRSAWPAPPGRGGPPPRRWCHPRFGVGPRRSPACPPSRGVPCRGKGFRSCPFRVLCVPGRLVRPGVFRNRGGLWEIGFPSPPPRASVGGLLFYLGCPGCSWWAWPLVKF

SEQ ID NO: 348029 - protein, 124 aa, Zea mays
  Clone ID: MRT4577_80566C.1.pep
PVGFFRARSCGFPSGPPRGPGSGGPWPGRLPLCFCLPRRSCGLGSSVPARPRSVSSSGSRFCALLFGLVSLRAAPCPVRRAGLRRSPPRRQRCYAFVARPPSVLLPLGPAVPSRPQTRGSVRVF

SEQ ID NO: 348030 - protein, 93 aa, Zea mays
  unsure (1)..(93): unsure at all Xaa locations
  Clone ID: MRT4577_80567C.1.pep
EVAGLXACLSSLTSVVXRLSXLCAVWXEAXDSLAKNWRKIDEFDARPTXLECVYRALPRACLGASSLWEPLPFSAXEXASXSIFPACLTAXDM

SEQ ID NO: 348031 - protein, 168 aa, Zea mays
  unsure (1)..(168): unsure at all Xaa locations
  Clone ID: MRT4577_80568C.1.pep
KPXKENPSKCGPQKKGKKNGTYRALPPLAKGNGKRCPLTTPPHRAKKRQKQGAIPIPHSTQFHPLGKGEKEPAPLTYYPQPAQKREFFPKAINGGKKPRFPPLPHPVKLRPSQLKLKLPPKKNPPPSHCPLFFNSLILYYSSSLFFPLFFFFFFFFFPPPLFFFXDAG

SEQ ID NO: 348032 - protein, 61 aa, Zea mays
  Clone ID: MRT4577_80569C.1.pep
WECLFLLIFLHVRTLRPSFFNAYMLDILLLAFLEHQPTMIATCENAQVQPYRIQDASALRK

SEQ ID NO: 348033 - protein, 241 aa, Zea mays
  unsure (1)..(241): unsure at all Xaa locations
  Clone ID: MRT4577_8056C.1.pep
MNEEYDVIVLGTGLTECILSGIMSVNGKKVLHMDQNPYYGGESASITPLEDLYKRFKLPGQPPASMGRGRDWNVDLIPKFLMANGQLVKMLLFTEVTRYMDFKVIEGSFVYKGGKIYKVPSTEAEALASSLMGLFEKRRFRKFLVYVANFDEKDPRTLXGVDPKKTSMRDVXKKFDXGQDVIDFTGHSLALYRTDDYLDQPXCCETINRIKLYSESLARYGKSPYLYPLYGXLGELPQGFA

SEQ ID NO: 348034 - protein, 45 aa, Zea mays
  Clone ID: MRT4577_80570C.1.pep
ENPTLRVHRGNKLASSQIQFIRELTFYYGPPYKTKCTTNNLSAYA

SEQ ID NO: 348035 - protein, 124 aa, Zea mays
  Clone ID: MRT4577_80571C.1.pep
MAGADDARGLIPPAEERLTELMSMILLRLAGLTGAIKDWMAVLNSLKMVIVYNTNEYSVVPEILVRMRSLDSLDLSSNQLTCGMPASFAELAILRVVDLGHKQMTASIPAALAQGQLRSLNLGA

SEQ ID NO: 348036 - protein, 563 aa, Zea mays
  Clone ID: MRT4577_80572C.1.pep
MAPLLAAAMNHAAHPVLRSHLGPNNESFSRHHLSSSPQSSKRRFNLSFTPRSARVGNQNGVQLLSPSEIPRRDWFPSDFIFGAATSAYQIEGAWNEDGKGESNWDHFCHNFPERIMDGSNADIGANSYHMYKTDVRLLKEMGMDAYRFSISWPRILPKGTVEGGINQDGIDYYKRLINLLLENGIEPYVTIFHWDVPQALEEKYGGFLDKTHKRIVNDYKNFAKVCFDNFGDKVKNWLTFNEPQTFTSFSYGTGVFAPGRCSPGLDCAIPTGNSLVEPYIAGHNILLAHAEAVDLYNKYYKGENGRIGLAFDVMGRVPYGTSFLDEQAKERSMDINLGWFLEPVVRGDYPFSMRSLARERLPFFSDKQQEKLVGSYNMLGINYYTSIFSKHIDISPKYSPVLNTDDAYASQETYGPDGKPIGPPMGNPWIYLYPEGLKDILMIMKNKYGNPPIYITENGIGDVDTKEKPLPMEAALNDYKRLDYIQRHISTLKESIDLGANVHGYFAWSLLDNFEWYAGYTERYGIVYVDRKNNYTRYMKESAKWLKEFNTAKKPSKKIITPA

SEQ ID NO: 348037 - protein, 105 aa, Zea mays
  unsure (1)..(105): unsure at all Xaa locations
  Clone ID: MRT4577_80573C.1.pep
NLPNRIFGLGNSGTGVVQKNQLLLPKLAPNPKTLVQLGGPPGFSAKAGKPVKPIPVRCAVGGLVRPESANPAGKDWGGAGPSVFLAXKGVYAKLKPGFRSGLRKG

SEQ ID NO: 348038 - protein, 36 aa, Zea mays
  Clone ID: MRT4577_80574C.1.pep
CTHVCDRQKATKYQIDLACACHRMLEDQETVMGQTT

SEQ ID NO: 348039 - protein, 97 aa, Zea mays
  Clone ID: MRT4577_80575C.1.pep
VQRFFPFMAPFFNQAKEVIRELEDYKPRVLGPVRGIPEFFPGDVGKKETNPLWFFVFVRDFFAILDRVSQKVRGTRGFPGSNPTLPLTAFCRYFKNG

SEQ ID NO: 348040 - protein, 272 aa, Zea mays
  Clone ID: MRT4577_80576C.1.pep
MVPAETKVQDVPEKTAGTSPSSSISVSEILKVMTEPFPFAMLSPLGSDLTSLLQSKEKGIEQSSGGKETASATETDRLIADVTPEKDIAKASTDKASALKMEELKKASLEDTELDLWHLGGQELFDEDISELKEFTIACGYKSGSMLFGGVDEEILGCIPNRARAKFVNTLSKSIGFPKLEQDLSNYRRQHITASLFYSNFMSLLLSKALKLQQEDEDIKNELVVNNLENRVKELESFLAEKDSKVKNVEADLTEAHLRIKDQAAHISNRDK

SEQ ID NO: 348041 - protein, 99 aa, Zea mays
  Clone ID: MRT4577_80577C.1.pep
WPGIPTPFPRKTLWGPGPFRLRFLPFSRPDWLLYGPFPGPFSPMGAPFTGNLTSPFGGFIPPGPVGFSRSFLSIFWGFSPQFFNRVPPFCRPFLAFWPL

SEQ ID NO: 348042 - protein, 382 aa, Zea mays
  Clone ID: MRT4577_80578C.1.pep
MTSRDKVGCSSIPLPLDRVLAALVASTQQLGRGWEAAFRVRCGKAAGAAVGEAEGKGEVIEMHTPLFYATCALGGVLSTGLTHLAVTPLDLVKCNMQVDPSKYRDIPSAFGVMLHEQGPRGLFRGWMATLVGYSCQGACKFGFYEFFKKCYSDIAGPENAERLRTLIYLAASASAEVIADVALCPMEAVKIRVQTQPGFARCLVDGLPKIVQSEGAFGLYKGLLPLWGRQVPYTMMKFACFETIVEMVYKHAVPKPKDQCSKPLQLAVSFAGGYIAGVFCAAISHPADNLVSFLNNANGATVADAVRTLGIWGLFTRGLPLRIIMVGTLTGAQWAAYDAFKVFVGLPTSGGVVRSCAAVPPIRAKRVHREDVLNQRRVDVPH

SEQ ID NO: 348043 - protein, 40 aa, Zea mays
  Clone ID: MRT4577_80579C.1.pep
QFSRLKAHRYMPEITGAQMDLPLLRTIQGLYTTMYKRASI

SEQ ID NO: 348044 - protein, 101 aa, Zea mays
  unsure (1)..(101): unsure at all Xaa locations
  Clone ID: MRT4577_8057C.1.pep
AFLLLPVPWVVACCLXLRPXLVLFRRRGRVFXLLXSGGPPPPGVVLRGPPRRGAVRRLRGGGGRWXGPARRRRAGXXXLRSXPGPSFAPXGRRPRLVGRLL

SEQ ID NO: 348045 - protein, 61 aa, Zea mays
  Clone ID: MRT4577_80581C.1.pep
WIWHSYYLTNVEYLIHACSMINPLHGDALAGGRRCGALSFEWPKPTVLNFFELMELPAATC

SEQ ID NO: 348046 - protein, 146 aa, Zea mays
  Clone ID: MRT4577_80582C.1.pep
WYLEPAGGISPKHIVSSFLIHISFHPSYLVPRLRYIILQRVLTLISHRSLPQAVNIHSYIYVHLPLHRRHEHPRDLEWNCAQARPLCNDYSYQDLLYMTRDRTTSLDTVRVYTVDVPDVPVAQSAGSACVNNADDFSSWRRHGDTT

SEQ ID NO: 348047 - protein, 94 aa, Zea mays
  Clone ID: MRT4577_80583C.1.pep
QRRGMHQKGGIPNVEGAAKLLWSEWTGSSLAYYCHPPTSWTPPPYFNESIVVDMKSGFNLEELEKNNAQSIRAIKGPHLANSILFQSSGLTNGI

SEQ ID NO: 348048 - protein, 69 aa, Zea mays
  Clone ID: MRT4577_80584C.1.pep
MTARKSLSPKQKADCKDVKFMSFSVAVDVYISNKLVRAYRAWLSMIIPSFGAVIIYSDPGLQGKKDWYC

SEQ ID NO: 348049 - protein, 72 aa, Zea mays
  Clone ID: MRT4577_80585C.1.pep
LQTRDELERPYVCLNSQALTLPLDYIGKSMGLGPHKPYGIKQQEPSFHLQGRKGPTQGHQAKHLEGTPQYHT

SEQ ID NO: 348050 - protein, 59 aa, Zea mays
  Clone ID: MRT4577_80586C.1.pep
KYCDVHCSLTLDRYSSGAPVLFFFFFFFFYRRDFFIFLTFFCFWGQTVQTLKKFVIHII

SEQ ID NO: 348051 - protein, 144 aa, Zea mays
  unsure (1)..(144): unsure at all Xaa locations
  Clone ID: MRT4577_80587C.1.pep
MSMSMSMLYMWLFTLTLVGGMLSMLSDAVDDKCAACKAVAEELEIGLSTERPRDHLDMRHRLDSNGQREGKLIDYRVSELRVVELLDGLCEKMQDYYTQXIDTNTYEWFRADSWDNLTTYKQEARAYSKDISSYXGRLLEETEA

SEQ ID NO: 348052 - protein, 43 aa, Zea mays
  Clone ID: MRT4577_80588C.1.pep
SNSHSSLRMTPSIAYDWLHCRLINLLHRRTRNLPVWKICGYPG

SEQ ID NO: 348053 - protein, 161 aa, Zea mays
  unsure (1)..(161): unsure at all Xaa locations
  Clone ID: MRT4577_80589C.1.pep
YLGTRCKPNSLSGTYCFIRMPEGLKNAGSTFFRLTXKVLESQVGRNIFIYVDDIVVASKDKEDHLADLAETFANMRDAXLRLNPEKCVFGARQGKILDYXALNRFISKSVERSLPFLKTLRGAKDFTWGPEQTAAFESLKQHLSDLATLASPDPSLPLLLY

SEQ ID NO: 348054 - protein, 352 aa, Zea mays
  unsure (1)..(352): unsure at all Xaa locations
  Clone ID: MRT4577_8058C.1.pep
HGVAAGSKGSXCGKDCGCFSRDDSETPSEHVEQYDLVALDQHVRFDLDELLKASAFVLGKSGIGIVYKVVLEDGLTMAVRRLGEGGLQRFKEFQTEVEAIGKVRHSNIVTLRAYYWSFDEKLLIYDYIPNGSLSAAIHGKPGLMTFIPLPWEARIKIMKGVAKGMSVLHEFSPKKYVHGDLRPNNVLLGTNMEPFISDFGLGRLANIAGASPFLQSDQVELEKEQIQQIDASVSPLMSKGSCYQAPEALKTLKPSQKWDVYSYGVVLLEMITGRSPSVLLETMQMDLVQWVQFCIEDKKPSADVLDPFLAQDSEQEGEMIAVLKVALACVQANPERRPSMRHVAETLERLNG

SEQ ID NO: 348055 - protein, 42 aa, Zea mays
  Clone ID: MRT4577_80590C.1.pep
KKGVAPLSKKIVKLAKHTKQKVSMGEKGYGRVKKMFMEPHMI

SEQ ID NO: 348056 - protein, 54 aa, Zea mays
  Clone ID: MRT4577_80591C.1.pep
PSRVEYMAGGATQNFIRVAQGMLKSSGATSYMGCIGKDKFGEEMKKNAQAGRVT

SEQ ID NO: 348057 - protein, 75 aa, Zea mays
  Clone ID: MRT4577_80592C.1.pep
GIGGQTGDGHCCTGSLTASELRHARRQTQRLIHSSEESYISTLAFVIDDQALEGLGGPMQVMVLMMGKSNDNYTA

SEQ ID NO: 348058 - protein, 149 aa, Zea mays
  Clone ID: MRT4577_80593C.1.pep
PSLGPGGDLAQVHPPFCIFPPPPRVWGCFPPSPPSLPSFSPRGPFCPCISVRVLKKANFFRPLRVFPPPKRTSKRLVFSFFRVRKVIIVFSPKRFLILSLSGFFSAFFPPLVFPPPCCKPFRLCPPPFSPGVLKTAFWMVFSHIAFPFW

SEQ ID NO: 348059 - protein, 75 aa, Zea mays
  Clone ID: MRT4577_80594C.1.pep
LGTAVSNYNIHGRRHALNNANIRAYRTNIRIHHFIYNIMRGHGLPAIKTRLMRFLCLYIVPVSANMIPAINCLTY

SEQ ID NO: 348060 - protein, 42 aa, Zea mays
  Clone ID: MRT4577_80595C.1.pep
PVHRFSPAVTCGSVGVLIRLLRTIAGHPRAQQRFLARNPTLP

SEQ ID NO: 348061 - protein, 80 aa, Zea mays
  Clone ID: MRT4577_80597C.1.pep
NPVQIFCRMFLTFNGPLVCKGSMNALVPAPFLFIGHCIYLSSSKKEALNPLVLLKKKKKKKKKKKKKKKKKKKKKKKKTT

SEQ ID NO: 348062 - protein, 80 aa, Zea mays
  unsure (1)..(80): unsure at all Xaa locations
  Clone ID: MRT4577_80598C.1.pep
MARTQSAVAXIAVEAAELMLAAAATTMEADMTCGQMSSAIAPCHNYARGTGSAPYKTCCSGVRNLKSADSTDVDRRAVCN

SEQ ID NO: 348063 - protein, 80 aa, Zea mays
  Clone ID: MRT4577_80599C.1.pep
ESLLRAASSAVTMATVQGSQSRLHPVQSTGAGARSHLRRRQGQRRSGPCRRAGGRGSVLRSRLTGRTGVASRGQPGGPER

SEQ ID NO: 348064 - protein, 80 aa, Zea mays
  Clone ID: MRT4577_8059C.1.pep
LILWLVLSIHRILLKIYQESNQPFMNLVAKFSQRKRCYQANATSLVDKKMKSKHWIHLTWSIHILMDTLILKNKLTMIQR

SEQ ID NO: 348065 - protein, 116 aa, Zea mays
  Clone ID: MRT4577_805C.1.pep
MTECSIPSSDGATHLPPLSSAAAAVEAHFQAHWSALDAAARQDPARVIAVGDWRSPLELPFLWLGDVPWCRLRQRSPARTASETTTYASPSWPINSGVAYQVPLHPLSQRLCGPSH

SEQ ID NO: 348066 - protein, 121 aa, Zea mays
  Clone ID: MRT4577_80600C.1.pep
HLYLSPVLAARFEYPSILFYGLQEAITGRILQTLALTKPQPYPLLQHPSLLNFYLQGITAQKPQQRVLPKINQVLAANLAAHLQQQQFLALGELPGVNPAAYLQAQQPLPFNQLVGIPAAI

SEQ ID NO: 348067 - protein, 74 aa, Zea mays
  Clone ID: MRT4577_80601C.1.pep
LRSVGTGWLGPVAGAGLHPQWSCSCWRGPSCPFVVLGCGAFMCFSLPSILARLALLAVAGRAKACLVGAPLVRK

SEQ ID NO: 348068 - protein, 79 aa, Zea mays
  Clone ID: MRT4577_80602C.1.pep
TYINYKNKYPGLLYIYYMFGTNNVPFRSFCKNEVGIIIKDVKTSYKVRTHLIRSCLCLTILEIKHLFFSPSLLDISSNT

SEQ ID NO: 348069 - protein, 106 aa, Zea mays
  Clone ID: MRT4577_80603C.1.pep
SYIFTILSASPLNGFLQSCLLMFISHCSVKSLHLSLYLTPPSIQQHYPALYPPTSPGSCRAKRGVSLHVVSELQRFKQSKHEDPLSLRGGAAESRRRLRRSGSSGS

SEQ ID NO: 348070 - protein, 99 aa, Zea mays
  Clone ID: MRT4577_80604C.1.pep
MGQQRTLVYSFVARGTIVLADHAEVSGNFASVAAQCLQKLPANNNRFNYNCDGHTFNYHIYDGFSNAPCSCFALSLPHAYKSTNVILLPMQVLLDDTSN

SEQ ID NO: 348071 - protein, 74 aa, Zea mays
  Clone ID: MRT4577_80605C.1.pep
PADRRRRTYVPEDKQISQCNPFGILHLAPPSPRRPPAVQTNMATNYIDLEDSYGPTCQVLHCLYYHSSCQTITN

SEQ ID NO: 348072 - protein, 149 aa, Zea mays
  Clone ID: MRT4577_80606C.1.pep
QEASGGLQRDRIDLTCRSTPTYVRARGQADQSVQSLWNSPLSASIPAPPSRFRFDPSMFPSFKLVRLFFFYYLFDSPPPVYLLCLQRLSIHRLLLYAIIKGFFTLVRCMRGAVQTNMATNYIDLEDSYGPTCQVLHCLYYHSSCQTITN

SEQ ID NO: 348073 - protein, 90 aa, Zea mays
  Clone ID: MRT4577_80607C.1.pep
KSVVSPEKREMLCPLSIQKFATSLQTRAPIIIKPMKLRMLMMILISCIKITHLRGIKNLAVKNFPHICQGLVKIMFYLKGVKFIMFQNHC

SEQ ID NO: 348074 - protein, 92 aa, Zea mays
  Clone ID: MRT4577_80608C.1.pep
ASQSLNLRGLHSHKRLIPSTPLSAHPSTSLITSWPTYTTHRNTMNSPRSISTLTFYTLSTTSSSYFYIPRTIYEPHSTTLNTDHFTNCFTWH

SEQ ID NO: 348075 - protein, 81 aa, Zea mays
  Clone ID: MRT4577_80609C.1.pep
FSVMKHPNPVGGGFAMKAVLESAGPECVVPGQVTPFRLLGVKVWPVEVVFKFLEPVGKELKMLGKFMDNAVELMNKSFIDR

SEQ ID NO: 348076 - protein, 63 aa, Zea mays
  Clone ID: MRT4577_8060C.1.pep
HYTNVTNTKPYILGGMHISHLSIFPYIREIKTKNKTLHKMVKTNCYIYNIGEALGVSLSLPET

SEQ ID NO: 348077 - protein, 52 aa, Zea mays
  Clone ID: MRT4577_80610C.1.pep
ASWLYESVMPATLPDGEYHFQIRPRVQSSGLPGLTRYKHNHPRDRPRERGRV

SEQ ID NO: 348078 - protein, 127 aa, Zea mays
  unsure (1)..(127): unsure at all Xaa locations
  Clone ID: MRT4577_80611C.1.pep
TGFVGNGFLQFCNPHPFRAKFTPGFSVFMGPFVPQNFKGDPPIAGXGPVPPHSKWFPEKMNVIFLSKGFVSGFVANFLGPPFFRDXTSVRKDPGSPWWGKFRLVRAETKKEGFFFPPINLKKFFPPV

SEQ ID NO: 348079 - protein, 87 aa, Zea mays
  Clone ID: MRT4577_80612C.1.pep
AVVPCGRLGAWDQPSNTHRPGSLHRPCTYIIDLRAHGRLSRDLYTTNACLYTDKLHLSARLCSIKKIYFVRWKKIYSTRVLCVVTTA

SEQ ID NO: 348080 - protein, 32 aa, Zea mays
  Clone ID: MRT4577_80613C.1.pep
NQIDASFNISSNTFCSTQTFSELACKTQTSQD

SEQ ID NO: 348081 - protein, 223 aa, Zea mays
  unsure (1)..(223): unsure at all Xaa locations
  Clone ID: MRT4577_80614C.1.pep
MSAAMPPAMDPAAAGEMAREAAAWCSLHGLVVGDRADQRSATVPGVGLVHAPFSLLPAHFPESFWRQACELAPVFNELVDRVSMDGNFLQNALSKTRQVDDFTSRLLEIHRKMMEINKEENIRLGLHRSDYMLDSETSSLLQIELNTISASFPGLGSLVSDLHRSLIKQYGTSLSLEHKRVPANAASTQFSEALAQAWSEFXIDSAVIMMIGQPEERNMYDQY

SEQ ID NO: 348082 - protein, 53 aa, Zea mays
  Clone ID: MRT4577_80615C.1.pep
VCVGADLSRVLMATFIRSLVTKFSCRAVKEGNIVRTPGLGFLDGFHIQLFLIN

SEQ ID NO: 348083 - protein, 44 aa, Zea mays
  Clone ID: MRT4577_80616C.1.pep
GFGSRSQVFFGRYISVFLATESRKSPEDIRAESRVRRYSGHEGR

SEQ ID NO: 348084 - protein, 72 aa, Zea mays
  Clone ID: MRT4577_80617C.1.pep
LPQSWVIDGCMCVSMLVVQACRRCPSTICTYLGVLLLFVARLVGLISSGVVVGFAFLFGCQVVRELERLVPG

SEQ ID NO: 348085 - protein, 140 aa, Zea mays
  unsure (1)..(140): unsure at all Xaa locations
  Clone ID: MRT4577_80618C.1.pep
SRLPSTLNVPEYVLDLHSHGTYTITWLRSKSKSPTEHALPCWYATHYAESSMVNAADKDDTSSIISRPXPVLYCDYGSNSHYXPKCDNRHNCEPQTXIEILTPHENIELGARLTELVPTLHERWTVLTXPYLGALVSNHS

SEQ ID NO: 348086 - protein, 129 aa, Zea mays
  Clone ID: MRT4577_80619C.1.pep
KKIRAKSKSQILAQSFTSQTGGPPFFYGGLGREQKPAGPLFGVMVMDRGYSSPTKGKHTGYSLPGKILVFYFGALGTGETLFFIIETILRFPPPLIGGKRPFGPPGCVWVQGAPGPRLKEANRGGRVQT

SEQ ID NO: 348087 - protein, 69 aa, Zea mays
  Clone ID: MRT4577_8061C.1.pep
NHKFNHTLQPPPPPPPLNRLATIFSQGPDSLLTTTVIPIPGSDFERGENKGGGKALTLFPFFLEGGQLP

SEQ ID NO: 348088 - protein, 64 aa, Zea mays
  Clone ID: MRT4577_80620C.1.pep
CCLIHTPPVPVQFLKVLLDSESFFSRSKFRPKIFNTPASYYDSPGPLTTTPYTTPSSPTARSSN

SEQ ID NO: 348089 - protein, 47 aa, Zea mays
  Clone ID: MRT4577_80621C.1.pep
FRVSLQLSHFLQLVVLMLGLVGTFVGQLHPLPRSGAQSGVSLHKSKN

SEQ ID NO: 348090 - protein, 91 aa, Zea mays
  Clone ID: MRT4577_80622C.1.pep
FVDWSPTGFKCGINQQKPTVVPGGELAQTNRSVCMLANTTAISEVFSRIDKKFDLMFGKRAFVHWYVGEGMAEGEFIEARADLAALEKDTL

SEQ ID NO: 348091 - protein, 418 aa, Zea mays
  Clone ID: MRT4577_80623C.1.pep
HWVPRGPAGKEEACKRNNSSDVQAAANPNNRAAQQQQEIGSNKPVDSTLQQQPFAFDPSAVDDANGRPLGMLQFDEDDNGSKDAGTGAQATLERLVSKHRHRRDPDGPPFEGRFSDESSSLLERTLEIRDRSYRLKIGVMSEAHPPVYGDDESAASAADSDGEEFSRNVKEAAEILRKARASMADEETADALLYKSARLLSTAVALRPTSLVAVGQLGNTYLLHGELKLKVSRELRTLLASSGAFLNGRERAPRSRKVDRRMVSRESISSALVDVCEECESLLVEAGRSYRMALSIDSGDAKALYNWGLALIFRAQLLADIGPEAAADADRVYLAAIDKFDAMLSRSNTYAPEALYRWGTALQQRSHLRPRSNGEKIRLLEQAKSLFEDVLYVEADNKMVREALSSCISELNYHGRWL

SEQ ID NO: 348092 - protein, 105 aa, Zea mays
  Clone ID: MRT4577_80624C.1.pep
LAICVVGARRARVEDRPVLTGRTVEVRQKADTYTVHVQCAETESTQGGCPRCNAVASLGTAMKQAQQHTEIPGYHWRPRHNMATTSRYRALVCWFTDLAPRTTWG

SEQ ID NO: 348093 - protein, 42 aa, Zea mays
  Clone ID: MRT4577_80625C.1.pep
VRVGSSSIILMRSVGMICATTLFPRPVVWSCRESQSRRGSFV

SEQ ID NO: 348094 - protein, 49 aa, Zea mays
  Clone ID: MRT4577_80626C.1.pep
MDVSGACGKAKKGAAGRKAGGPTKKSVSRSSRVGLQFPVSRVGRYLIKG

SEQ ID NO: 348095 - protein, 63 aa, Zea mays
  Clone ID: MRT4577_80627C.1.pep
VKPAAPKNRAPDPKVAPQVLKAGTLFHLTKNNFFFPPCQGKCYPSCKIIPKIDLDPGSRFFGK

SEQ ID NO: 348096 - protein, 43 aa, Zea mays
  Clone ID: MRT4577_80628C.1.pep
LNAVVFLKLLVQGGPLWAPFPAQGKQLDVGLKCLFLKGHAPFC

SEQ ID NO: 348097 - protein, 100 aa, Zea mays
  Clone ID: MRT4577_80629C.1.pep
MQKNTPDHKKQKAQTKRNTPGRKHKEKIIMNKIHNNLKRKEKEKEKKIQMKTPEPKKQKIKRNTEDNYKKENEKIKHKTVSAAPTVVVPQTEADSAIVRE

SEQ ID NO: 348098 - protein, 79 aa, Zea mays
  Clone ID: MRT4577_8062C.1.pep
DLVFFYECQRSSQEEVPEMRFQDVMYGNVKAVGKFKALGWRSQIPPYYSYVISCQIIGQETARATKRKRSVRNRTNSFA

SEQ ID NO: 348099 - protein, 112 aa, Zea mays
  Clone ID: MRT4577_80630C.1.pep
SPQASELVLRFLALGDRVTEVQDGAVIRVGVVSGSTRDDAHISVSASWRPSAGRSLSARCLYLWLRMTDPRTLASRVGALIAEQWKHEAPLRPGSAKCQANYRYSKWRKGGR

SEQ ID NO: 348100 - protein, 70 aa, Zea mays
  Clone ID: MRT4577_80631C.1.pep
ERLLAQTLRSADTHSLRSIGERPGTATLARVPIIASRLVTGTLSLLIRAANGTDAVHGADVEAIRNQHGQ

SEQ ID NO: 348101 - protein, 74 aa, Zea mays
  unsure (1)..(74): unsure at all Xaa locations
  Clone ID: MRT4577_80632C.1.pep
LKLVTMSSAPAAGSALGFLMGTERXCWRWCRPGCRRRRSWXGRRRTARRRWSCCTRRRQRCSPRCRPVSSGRVG

SEQ ID NO: 348102 - protein, 48 aa, Zea mays
  Clone ID: MRT4577_80633C.1.pep
MKRNPLVTSSRRKCRKAHFTVPFSVRRVLMSAELSTERTHKYNVRFIL

SEQ ID NO: 348103 - protein, 123 aa, Zea mays
  Clone ID: MRT4577_80634C.1.pep
NQKKFIPYLLKTQGSPPGVRAPLCKPIYWGSKKGALPPRGNIFEKKQLFWGTFCVGKDCAPPGRKHKKGFNNGGGFKKVSPFLKKKKNFEKLFVGKGKHILNGSQGFPNLNNFKVVYFLLKFF

SEQ ID NO: 348104 - protein, 40 aa, Zea mays
  Clone ID: MRT4577_80635C.1.pep
NRQGFNYLLCHKLISDMICFILLSIKKKKKNRPPEPDFFL

SEQ ID NO: 348105 - protein, 118 aa, Zea mays
  Clone ID: MRT4577_80636C.1.pep
KKIKKLKAQKGELFSQKQKLKLEKKSFKPPKKLMGLGPTYKPPPTLIRGPFSQGPLIPFHFQGQNSRQKMIKPFFGYPGGPNWQFIPPSKGDPPKKKKGGPPFAKSPLRGGSCSPHVG

SEQ ID NO: 348106 - protein, 59 aa, Zea mays
  Clone ID: MRT4577_80637C.1.pep
KSIIAAPLFLQKITKQKKGKNRYFFWKREKLQLYPVKKNKMDGQTSKGLVPFSLKQQPS

SEQ ID NO: 348107 - protein, 109 aa, Zea mays
  unsure (1)..(109): unsure at all Xaa locations
  Clone ID: MRT4577_80638C.1.pep
LVILQHLLPFFGFTEFYPLLKKTVIYVWFXLICWLFVIDFIDYGIGFVFYFLXEFVLLIVXFLFYFIFVLFYFYFYFMIFSFIXFLFFFIFFFILYFIFVYYFYFYFFF

SEQ ID NO: 348108 - protein, 498 aa, Zea mays
  Clone ID: MRT4577_80639C.1.pep
MASLFAPARRLLSLGRRRHRRGGQLPVPPSSRSNSAEERPPPARSLSLDSTLFPLGHPSTLLVPEIELWAARPRNLLRAVELQRIVKELRKRRRHRQALEVSEWMSLKGHVKFLPKDHAIHLDLIGQIHGVEAAETYFNNLSDKDKTEKPYGALLNCYTRELLVDKALAHFRNMKELGFVFSTLPYNDLMGLYTRIGQHERVPSVMAEMKSNGIVPDNFSYRICINSYGTRADFFGLENTLEEMECEPQIVVDWNTYAVVASNYIKGDLREKAYSALSKAEAKLDKQDPDAYRHLISLYGNLGDKSEAKRLWAVQMSNCKRYINRDYMNMLSVLVKLDEITEAEDLLKEWESSQNSFDFRVPNVLLTGYRQKALLDRAEMLLDGFLKKGKTPPSTSWGIVAIGYAEKGDVAKAYEMTKNALSVHAPNTGWIPRPSMLEMILKYLGDEGEVKDVEAFVSLLKAAVPVDSDMTEALSRARAREEMKAEEATEAPRGDVIA

SEQ ID NO: 348109 - protein, 55 aa, Zea mays
  Clone ID: MRT4577_8063C.1.pep
GIIIMPLIRNYNGDSNIYGLKGHSTFMSVYKFRSFTKRNFGHLIRTASAENCSCR

SEQ ID NO: 348110 - protein, 705 aa, Zea mays
  Clone ID: MRT4577_80640C.1.pep
VHDLPAESRTLLSYTSLRGGYARNALHEEARALLDQMKATGVAPTAATYNTVLAACARATDPPVPFDMLLGLFAEMRHDASPSVRPDLTTYNTLLAAAAVRSLADQSEMLLHTMLEAGVSPDTVSYRHIVDAFASAGNLSRAAELFSEMAATGHTADASAYLGLMEAHTRVGATADAVAVLRQMQADGCAPTAATYRVLLDLYGRQGRFDGVRQLFREMRTAVPPDTATYNVLFRVFGDGGFFKEVVELFHDMLKTGVQPDMVTCENVMAACGHGGLHGDAREVLEYMTREGMVPTADAYTGLVEALGHAAMYEEAYVAFNMMTEIGSLPTLETYNALAFAYARGGLFQEAEAIFSRMSNNAGIQKSKDSFDALIEAYCQGSRLDDAVKAYMEMRKSRFNPDERSLEGVLNAYCIAGVIDESKEQFEELQSSVTMPSVIAYCMMLSLYARNDRWSDAYDLLEEMKTNRASSTHQVIASLIKGEYDDSSNWQMVEYVLENSTMEGCDYSFRFFNALLGVLWWFGQKGRAARVLDQAVKFGLFPELYRDTKLVWSLDVHRMSMGGALVAVSVWLNKLYDRLVEDEDLPQLASVVVLRGEMEKSTVTRGLPIAKVVYSFLNDTLSASFHFPKWNKGRIICLKSQLKRLQSAVDSSNGSLAAGFVDMTNSRLPAPGSKIYTSEDQLDNGSRHLPDEPLAEEKESELLAL

SEQ ID NO: 348111 - protein, 68 aa, Zea mays
  Clone ID: MRT4577_80641C.1.pep
PPAQAPLVLGVAPKKKPPPHFFKPPAKSGKPPPGCNWGGNCKCAPCNCCSHRSPPMDMIFIYLACGGG

SEQ ID NO: 348112 - protein, 140 aa, Zea mays
  unsure (1)..(140): unsure at all Xaa locations
  Clone ID: MRT4577_80642C.1.pep
RVDPVFRDNKECMVADPIAVIPCSVMATGHRAPAPGSLPLPWSPALCRTCHVRCRSSIFYSPWSSCRLSLSELAQLTSRRALFARWAVRCRVHLVVSSWTCWRAAVVSESRSPQLGRVVMPSSSSNENCCADTLMPSIAX

SEQ ID NO: 348113 - protein, 151 aa, Zea mays
  Clone ID: MRT4577_80643C.1.pep
LLAQCFFRGFPLILGKTVFPPFNKVKPPPPTERPRPRSYLTRKGKRPPNPNPPSPGVGRFIKASGPTGFPAGKGAVGPTQFIWVRPPLRAPRLYPFFFRVVFLGEFLRENHFPQGTTFPLFSPNLGPNPDPLRTAPSWVEFPLFKKPPGGV

SEQ ID NO: 348114 - protein, 95 aa, Zea mays
  Clone ID: MRT4577_80644C.1.pep
KLVFFPPPPPFGGPNLKKTPTKQGLSGPPLLKVPVKLGPPHPVLSFSPPPKAQGVKVLIWPPKKTLKCLTCPRPSPCGFFFSPQAGPEIYLFSFG

SEQ ID NO: 348115 - protein, 68 aa, Zea mays
  Clone ID: MRT4577_80645C.1.pep
PGLYPRRNVTRSQSPRTALNADSLDHQTGQRGLQLTALKQRVLGLPNGPQRALPEHPPAIGLQEPSHL

SEQ ID NO: 348116 - protein, 109 aa, Zea mays
  Clone ID: MRT4577_80646C.1.pep
LCRSYPNLTAPRLGRAARLLQEHLNLDSSCFNGAADWRRPLLLAAWTLLPRALPLVYRPSRDAMIAQSVGYCHEDYSCSLCSELDGGVYYLCAAERCGFVSRPGRPRGS

SEQ ID NO: 348117 - protein, 151 aa, Zea mays
  unsure (1)..(151): unsure at all Xaa locations
  Clone ID: MRT4577_80647C.1.pep
QRRGLXFFFFFFXXEGGGGXXXXXXXXXQGHAGPERTRKKXTRGGENREARSQGGHTHRKRGGGXTPTGKKTGGGTPQPDRTQPPTFFFKXDKXLRGEEDREAHRAGTTTTRGHGFWITTREPAKRGRLGETRRRALNFYPPIPPDWGVRI

SEQ ID NO: 348118 - protein, 101 aa, Zea mays
  Clone ID: MRT4577_80648C.1.pep
LGNAIVEVLGVAMQAIPEPDRAAPRLRRASPPGGPQPQQQLLQRRRRLAAATPERRQWGESSSGLCAAAVLVASSRRRTVASSRLRSRGYDRRFPAGLEVP

SEQ ID NO: 348119 - protein, 165 aa, Zea mays
  Clone ID: MRT4577_80649C.1.pep
LRDNNQPFVLSWRLCSVCTPAAAPGAGGSTPPGAPSLRAESLEAGREPFCRTLWIEAWTTRPCGGDSTQPARRRRTAPTTTLPTAFSPVRICSLPSLSYPLLSLPPNSRPQSRSSTLSHRGALFKVWPPPVACVVEAVAVEVEVLLGETRDAAEAQRGQVRVWPA

SEQ ID NO: 348120 - protein, 49 aa, Zea mays
  Clone ID: MRT4577_8064C.1.pep
SSIAALHLSIPLDTRLKNPKHFSECVSTYMPRTVVKFYVSTSLKTVLPA

SEQ ID NO: 348121 - protein, 94 aa, Zea mays
  Clone ID: MRT4577_80650C.1.pep
LCGARGGRVLYPCVVPSGLKPGRRDRAAAARRNQHGGGAQPRRRLSLLPSLRDALFKVWPPPVACVVEAVAVEVEVLLGETRGAAEAQRGQVRV

SEQ ID NO: 348122 - protein, 118 aa, Zea mays
  Clone ID: MRT4577_80651C.1.pep
GGVVPSAALLPSPAGSLPRHALRTRFLGAPAPRGGAGGVPPGVAEGRARQEFHVPPTKGPIREQRRSRPRGGGTGAWTFSAMLPRGFVPPSGSSDCHNDMPANAADPQFFACSGAGTP

SEQ ID NO: 348123 - protein, 50 aa, Zea mays
  Clone ID: MRT4577_80652C.1.pep
CLVTHQGRRGSARLKSRSGEAIGRISHSGREIREVEVTLESRLRSVVPLT

SEQ ID NO: 348124 - protein, 122 aa, Zea mays
  Clone ID: MRT4577_80653C.1.pep
LADGYDHETTQIVRCSAARGCWIGSIQFRSIGITYLVFKCKYCKEQWKEGGATRFRQYLTSRGRNVQGCRNVPSDVCNYFRRELDKGQYRRESKNTGGGMKVSIGGFTSMMTMLSCRSHYML

SEQ ID NO: 348125 - protein, 44 aa, Zea mays
  Clone ID: MRT4577_80654C.1.pep
LTFPKLKSVSKYFKTPRRGWMPGPGLDKPTLVFVRRRPLDDHLL

SEQ ID NO: 348126 - protein, 169 aa, Zea mays
  Clone ID: MRT4577_80655C.1.pep
PAGASPPTEPDVSRLHLSGRNYDPETRGPKLGFEQDPSLSLETPTLEEQAAEVEAEIKQKAAEEAQDDKGVDLFKLQPKKPNWDLKRELDTKMEVLNVRTDNAIARLVRDRITGAQKAAKKDRAVDDAQGTGEATGMDGVALVEGLRVREKEDEDEERREREEEAALGA

SEQ ID NO: 348127 - protein, 120 aa, Zea mays
  Clone ID: MRT4577_80656C.1.pep
MVFVPLVIVVFERSQADVVAYALCLANIIVMVVWLSPDTGSTVSAAKSLLRLSDDEDEGSGGSSGAEDKCCVCLAGMREDQALRALPRCGHSFHDKCIGKWLKAHPTCPVCRATAVPNSS

SEQ ID NO: 348128 - protein, 46 aa, Zea mays
  unsure (1)..(46): unsure at all Xaa locations
  Clone ID: MRT4577_80657C.1.pep
QVLXTQVVPHHLLVLDQWFFKQAIDGSSRLASSTLKRLSSCCLALS

SEQ ID NO: 348129 - protein, 122 aa, Zea mays
  Clone ID: MRT4577_80658C.1.pep
LNRDNNNGLGEKIVGALFIVTLILGAPCVLAGEIAEKVSTVVAKADDCNKQCEGKGTPADIDHCKEKCSLTEHFSYATIGVGACRQNCDKLKNDQSSFNSCEEKCREKYEGRLSQIKQGQNL

SEQ ID NO: 348130 - protein, 68 aa, Zea mays
  Clone ID: MRT4577_80659C.1.pep
AASVFIPIRARVYIYLLAGVCSRKRCLSSKRFHLVITYCSAASVLSSRFSSDCCTSWSFMHRSCLVYS

SEQ ID NO: 348131 - protein, 47 aa, Zea mays
  Clone ID: MRT4577_8065C.1.pep
TGGCKLWFALICVIGCTVTAYLQCDHRTISPLGALCMWSIWIHIAAP

SEQ ID NO: 348132 - protein, 105 aa, Zea mays
  Clone ID: MRT4577_80660C.1.pep
MSTVHEILCKLSLEGDHSTPPSAYGSVKAYTNFDAERDALNIETAIKTKGVDEVTIVNILTNRSNAQRQDIAFAYHRRTKKELSSTLKSALSGHLETVILGLLKT

SEQ ID NO: 348133 - protein, 273 aa, Zea mays
  Clone ID: MRT4577_80661C.1.pep
MSRVWYSRFASYLASIGFVEAKSDTSLFIYRRGDDTVYLLLYVDNIVLTTSTANLLQRTIVALQREFAMKDLGPLHHFVGITAERRSQGFFLHQRQPDIAYTVQQVCLHMHTPREPHIIALKRILRYLLDSLNYGLLLRPSPTSELMVYIDADWASCLDTRRSTSGYAVFLGANLVSWAAKRQPVVSCSSAEAEYRALVNGVAEASWMRQLFHELHSPIQRATLIYYDNVSAVYLSTNLVQHQRTEHVEIDLHFVCERVAAGDVRVLSVSTTL

SEQ ID NO: 348134 - protein, 52 aa, Zea mays
  Clone ID: MRT4577_80662C.1.pep
TDSGTNSSPSATDLQITIPPTDRHSRQSRSLPKASRAVVLEARRKIRECIFV

SEQ ID NO: 348135 - protein, 176 aa, Zea mays
  unsure (1)..(176): unsure at all Xaa locations
  Clone ID: MRT4577_80663C.1.pep
NSVGSSPGSQEFRHEGFDPSXSPKEDGPVSIHPPSIRTKRWLXXXSTXQHPPTLLXXSXSRSPLALRFPNPTPLSTSRSVIHRRRAILGRRLSPLXEXPLCLSAQLSRSLGEIXXSLXQKXSHLSPKXXLYLSISXSXLXXSXTXXLKLTLGXSLSISRYKKXXFEISXGXYLXRV

SEQ ID NO: 348136 - protein, 94 aa, Zea mays
  unsure (1)..(94): unsure at all Xaa locations
  Clone ID: MRT4577_80664C.1.pep
XSIKXQKGHPXGSAGGKPAXQPXQQXXGDAPXXHGGNQPEGQXEQRGXXNKRXXADPADKRGGPTKPTQHEXGXXKXQQHXXXQXEPHQXPKEA

SEQ ID NO: 348137 - protein, 52 aa, Zea mays
  Clone ID: MRT4577_80665C.1.pep
MGTIRSSALILACLALASAASEGAFKVSDQREMKPEHLFQHLHEVGYAAPPS

SEQ ID NO: 348138 - protein, 58 aa, Zea mays
  Clone ID: MRT4577_80666C.1.pep
SKRPNQAVSSVYKEEQKKASRAELIAPYLITVKSYMYMAASHLDKKQPKNSNHPARLI

SEQ ID NO: 348139 - protein, 29 aa, Zea mays
  Clone ID: MRT4577_80667C.1.pep
RVPIAWQSALNDTIAPEFIYLLVDFIKKW

SEQ ID NO: 348140 - protein, 56 aa, Zea mays
  Clone ID: MRT4577_80668C.1.pep
WMRKIMTRSNSFAPCRSVDRRPVKLLTQYGSGTLARAGRVVVATAGGSRAFMALEK

SEQ ID NO: 348141 - protein, 49 aa, Zea mays
  Clone ID: MRT4577_80669C.1.pep
MIHSCFISHNCGWGSPIAKIAQTVRPPKQVSNIIQNLYASRKKGPHLRL

SEQ ID NO: 348142 - protein, 270 aa, Zea mays
  unsure (1)..(270): unsure at all Xaa locations
  Clone ID: MRT4577_8066C.1.pep
RPGQGKPAPPGLSLLPPLSSKPAPPGAQPPRPDALPSXVRPPEPRXPTPGPLEPRPRAPTPQPRRPAPXPSPMPSLXTRPSRPEPPATVLPXLMELHCFHFSSPLLSSMKPTPSMAPXKPTGRLSLPSPTVSSSPLPPSIKTEPXVLSPCPSSPKSLTLSLSLAPLPTVEPPPPTAGARRRASPLAVRSPETHPSPVRATPTAVPSLHLDARPSSSAVRRKVEDGPNYFYVFLKSFLIQSGDSIIIGLKYEHVVIRNSYACALWEFGEIY

SEQ ID NO: 348143 - protein, 110 aa, Zea mays
  unsure (1)..(110): unsure at all Xaa locations
  Clone ID: MRT4577_80670C.1.pep
IPRRPILPLLXTITXNYXSXXXXXLTXXXXGCNXXXXXXQXXVXXXAFPFLXVKAGKVNYYSGKSVNTISSSQLHINPDLAEAHSLXQWFDCGRKNSSTQSISKDFTPST

SEQ ID NO: 348144 - protein, 1061 aa, Zea mays
  Clone ID: MRT4577_80671C.1.pep
MDRRWVYGKQFTPAYVKGVEEFMNFVTERYPEDTDIRCPCVNCLNQRLRPQSEVETHIHIYGMLATYTRWIHHGESADTEVEGIEEDVEGYDNDFGIHMDVDDDVYDDDHGVPEMIGELFAAAEADGEEPIFAGVLGDSKKALSPGSSHSKFSFMVRMLYMKSRYRISNTTFSAMMKLMSDGYPNSELPKSYNEAMKYLKELGLGYENIHVCKNNCVLFRNVNAKLNECPVCTESRWKDETGLKRVPHKVLRHFPLLPRLKRIFASKQTSEETQWHKKVRKPVANVMSHPADGEAWKDFDRKYPGFANDPRNLRLALATDGFNPFGNMSTQYSMWPVLVTPLNLPPWECVNPTNCFMSLLIPGPRCPGKDFDLFLEPLIEELLKLWKGVKTYDACTGRKFDLRAVVLWCIHDYPALATLSGRTTKGYYACIYCDKNPLSMAIRNKLCYIGHRRYLKRTHSWRNSLDFNGKRENKVVPGRFTVDEVLQELEKVKDVRPGKQADITGNKRKRSSDGPKIYSRKSGLWQLPYWKDLMLPHNLDVMHIEKNVCENILCTLLNIPGKSKDTHNARLNLYDMGIRPELHLQQDGNSAFRAPPAPYVLGKDQKVEFCKFLKGIKFPDGFADNLARYISEDGSKVVGKLKTHSCHILLQRIIVVGLRGLLEKIFPPAFFDVMVHLSVHLPDEAMLRGPVQYGWMYPIERYMKDVDTRFNQDDDSGTEMPLPNDMSVFKHGATPVGATKTEYIDDAIMNKLVWYVLHNADEVQEYLTLYREELSQQGARPNDVDRMVQQGFAKWFMSHVEKKRNENPELVSEGLWALSCGPARRVKTSTACKINGVRFSTVDREKFMQTQNSGVMTEGEHNGENIDFYGVLKEVIELQYNSNYQVCRSVVVFRCDWYNQVGKTVGIRDDSHFKSINVQSFWYKSDPFILADQAKKIFYLQDTTPQCKDFRVVQKFELRNIYDVAEKYEGSNDAHQDDYCSDTEHIVQEGDDNQVLHNVEGGEASLIEGNLEELIRKKKEVAIILEDSEDEEEDDTMFQYFNDGGDDNNDDMSIEDEDEDF

SEQ ID NO: 348145 - protein, 189 aa, Zea mays
  unsure (1)..(189): unsure at all Xaa locations
  Clone ID: MRT4577_80672C.1.pep
GVISTSSSRRRSXRPRLKPALEMEDLISLLHGSDPVRVELTRLENDLHYKEKELGDAQAEIKALRLSERAREKAVEDLTEELAKVDGKLKLTESLLESKNLEAKKINDEKKAALAAQFAAEATLRRVHAAQKDDDMPPIEAILAPLEAELKLARQEIAKLQDDNRALDRLTKSKEAALLEAERTVQIAL

SEQ ID NO: 348146 - protein, 65 aa, Zea mays
  unsure (1)..(65): unsure at all Xaa locations
  Clone ID: MRT4577_80673C.1.pep
AFGGKGNPXAFKEVSFFLKALFDGNILGEETLLDWYNNSFPPGKDSPVVKNSHPFVEWLQSAEFY

SEQ ID NO: 348147 - protein, 898 aa, Zea mays
  unsure (1)..(898): unsure at all Xaa locations
  Clone ID: MRT4577_80674C.1.pep
MALIIKSFHQILKQRRGKITNPTPRGGNDKRGKKKEKKRYYKKKGYDAHVCREWDSDESSTDSSSDEDAANIAVNKGLLFPNVGHKCFMAKDGKKKKEVEKCENLTKELSMCHDSITNLRTENTSLISKVFPAAILRSAWFACSDFFPAAICASAIDRQMDRRWVYGKQFTPAYVKGVEEFMNFVTERYPEDTDIRCPCVNCLNQRLRPQSEVETHIHIYGMSATYTRWIHHGESADTEVAGIEEDVEGYDNDFGIHMDVDDDVYDDDHGVPEMIGELFAAAEADGEEPRFAGVLGDSKKALSPGSSHSKFSFMVRMLYMKSRYRISNTAFSAMMKLMSDGYPNSELPKSYNEAMKYLKELGLGYENIHVCKNNCVLFRNVNAKLNECPVCTESRWKDETGSKRVPHKVLRHFPLLPRLKRIFASKQTSEETQWHKKXDGEAWKDFDRXYPGFANDPRNLRLALATDGFNPFGNMSTQYSMWPVLVTPLNLPPWECVNPTNCFMSLLIPGPRCPGKDFDLFLEPLIEELLKLWKGVKTYDACTGRKFDLRAAVLWCIHDYPALATLSGRTTKGYYACIYCDKNPLSMAIRNKLCYIGHRRYLKRTHSWRNSLDFNGKRENKVVPGRFTVDEVLQELEKVKDVRPGKQADITGNKRKRSSDGPKIYSRKSGLWQLPYWKDLMLPHNLDVMHIEKNVCENILCTLLSIPGKSKDTHNARLDLYDMGIRPELHLQQDGNSACRAPPAPYVLGKDQKVEFCKFLKGIKFPDGFADNLARYISEDGSKVVGKLKTHSCHILLQRIIAAGLRGLVRKDVYEAIAELGTFFRELCSRNLQIDVVQRLKGDIPLILCKLEKIFPPAFFDVMVHLSVHLPDEAMLRGPVQYGWMYPIERRLGTLKNF

SEQ ID NO: 348148 - protein, 1113 aa, Zea mays
  unsure (1)..(1113): unsure at all Xaa locations
  Clone ID: MRT4577_80675C.1.pep
MAAVFWDTAPAWRRGPGPPTGSGVPICRSINRFSQPPFCDLHGCSPVLILPSAICASEIGPQLEERRRHENSEAEKLRARQSSGVVRRATASVDRTAAGRGEKTRLRPQSEVETHIHIYGMSATYTRWIHHGESADTEVEGIEEDVEGYDHDFGIHMIVDDDVYDDDHGVPEMIGELFAAAEADGEEPRFAGVFGDSKKALSPGSSHSKFSFMVRMLYMKSRYRISNTTFLAMMKLMSDGYPNSELPKSYNEAMKYLKELGLGYENIHXCKESRWKDXRVPHKVLRHFPLLPRLKRIFASKQTSEETQWHKKVRKPVANVMSHPADGEAWKDFDRKYPGFANDPRNLRLALATDGFNPFGNMSTQYSMWPVLVTPLNLPPWECMNPTNGFMSLLVPGPRCPGKDFDLFLEPLIEELLKLWKFDLRAAVLWCIHDYPALATLSGRTTKGTHSWRNSLDFNGKRENKVEPGRFTVDEVLQQLEKVKDDRPWKQADITGNKRKRSDGPKIYSRKSGLWQLPYWKDLMLPHNLDVMHIEKNVCENILCTLLSIPGKSKDTHNARLDLYDMGIRPELHLQQDGNSVCRAPPAPYVLGKDQKVKFCKFLKGIKFPDGFADNLARYISEDGSKVVGKLKTHSCHILLQRIIAAGLRGLVRKDVYEAIAELGNFFKELCSRNLRIDVVQRLKGDIPLILCKLEKIFPPAFFDVMVHLSVHLPDEAMLRGPVQYGWMYPIERRLGTLKNFVRNRARPEGSIAEAYMASDTLTFCSRYMKDVDTRFNQDDDSGTEMPLPNDMSVFKHGATLVGATKTEYIDDAIMNKLVCLYREELSQQGARPNDVDRMVQQGFAKWFMSHIEKKRNENPELVSEGLWALSCGPARRVKTSTACKINGVRFSTVDREKFMQTQNSGVMTEGEHNGENIDFYGVLKEVIKLQYNSNYQVRRSVVVFRCDWYNQVGKTVGIRDDRHFKSINVQSFWYKSDPFILADQAKKIFYLQDTTPQCKDFRVVQKFEHRNIYDVAEKYEGSNDMHQDDYCSDTEHIVQEGDDNQVLHNVDGGEASLIEGNLEELIRKKKEAAIILEDSEDEEEDDTMLQYFNDGGDDNNDDMSIEDEDEDF

SEQ ID NO: 348149 - protein, 142 aa, Zea mays
  Clone ID: MRT4577_80676C.1.pep
KRKILGDPLSGTTYYRWTTSSRSRPTNWPQSNRQEHRCPLLTTHIPINLPPFRPFHTDRMGALTFHPAAFFPRPREAAVTARQPLHHYCSPPFRTLVPRTTRPCLLRARSSNGLPQIGGASFGSSNGIASRASPAVGICERA

SEQ ID NO: 348150 - protein, 522 aa, Zea mays
  Clone ID: MRT4577_80677C.1.pep
ATFSYLDDVDPNGCNLDDPDPNGCTICNIDEDEEEEEIPLIRKNSRRYIASGESSGIPSLALSALVGLQELSLANFDQTLEDMVPEDLLSKPADGGTMEVCADVPAVGLELSQAASRASSTLERGFKSQTADLDCSVPMEVVENPSALEVADIDNSVPKDGACVYPAPEGVAGDDPARVGSASYDLAPKDVRAGSPSHISMDVHVGSSPLHSGCMAAARASGQEVALEAGAPDDRVLISAGDAELVPTDALQIASVGNPSSSHQLNSHDLGVHSFFSNLQALVDEMAGQLRSQGVSVPERALSLTHWNPVLLHQRVSELEMANADMARQYSDLEEKYSQGQTDLARVSASLNDANMLNSTLNAQLGSEKEEKRALATSRDNLDRLYRDASNSLTILERSHRFTMEDLDNHCYKLQESLDDMIRLRQLVSSKDSIIKDLRASKRSVVQELEAARLAIKAAEDASAILRAQRDRAMDKAIRTGRILMRRPGVIVPNDIVADVNAAPDSSNRPSSSVAPEKNITK

SEQ ID NO: 348151 - protein, 211 aa, Zea mays
  unsure (1)..(211): unsure at all Xaa locations
  Clone ID: MRT4577_80678C.1.pep
MAALTFHPAACFFPRPREAAATTKQPLHHYCSPLRTLVPRTTRPCLLRARSSNGLPQTGGASFGSSNEVLDGTPTGDGAPGQGQRGGSTVSITVVGASGDXLAKKKIFPALFALFYEGWLPEHFTVFGYARSEMNDQELRNMISMTLTCRIDKRENCGDKMEQFLKRCFYQSGQYNSEEGFAELDRKLKEKEVKYLFRLVCQDKRIGLVPK

SEQ ID NO: 348152 - protein, 123 aa, Zea mays
  unsure (1)..(123): unsure at all Xaa locations
  Clone ID: MRT4577_80679C.1.pep
SGXPLVXXXLVLLLPAXXRXXGXXRRXAPGGXXLEXXLLLRXXRRAXXKKKNGSTPPHHGHGRGCHGPQEVGAHGADSDDGRGSSDGVPGGHVFRLFLEATELRAEGLTDFGFREKGGLLFWV

SEQ ID NO: 348153 - protein, 45 aa, Zea mays
  Clone ID: MRT4577_8067C.1.pep
VTLAIGDGANDVGMLQEADIGVGISGAEGMQVTNSMLYNFCCLCP

SEQ ID NO: 348154 - protein, 89 aa, Zea mays
  Clone ID: MRT4577_80680C.1.pep
EQPHHMRHFDFHFQMHNTILYIAESDARGFIYRAVVVSPEQLNLNRGAGTPPRSPQSQLLAQGAPPPVPCVHHPEDDGQHDAGGDPRVR

SEQ ID NO: 348155 - protein, 67 aa, Zea mays
  Clone ID: MRT4577_80681C.1.pep
MSAYMISTKALAGRSNGLTNLGRRTSSFRAICSNKKIKTEKPYGIESGQTDHDDINNTKGKGQGRVL

SEQ ID NO: 348156 - protein, 129 aa, Zea mays
  unsure (1)..(129): unsure at all Xaa locations
  Clone ID: MRT4577_80682C.1.pep
YDFFXSSRRLFVNVILSFKERRLSQAFFVRDTDTEETTTTTSIREAFEVIEVELNFIYDMVYTKAPVAYTTCGWVLRCICSCCLVAALLIFFFLDKPAHQILPVDVGITYALLLGGLALDAVALLMIFF

SEQ ID NO: 348157 - protein, 189 aa, Zea mays
  unsure (1)..(189): unsure at all Xaa locations
  Clone ID: MRT4577_80683C.1.pep
TNWNRXKVRYCDGSSFTGDVEEVDPATKLHYRGARIWQAVMDDLLAKGMDKAENXFHDLLPPAARVKCLSDAGFFINEKDVAGVGYIAAFFNDVVTTHGSAKNLPPSCTSTLPPGTCFFPQNEVKQIQTPLFILNAAYDSWQVRNILVPGVADPHGKWHSCKHDIDQCSASQLRXFRGDXLKEVAELGN

SEQ ID NO: 348158 - protein, 398 aa, Zea mays
  Clone ID: MRT4577_80684C.1.pep
MADGSLYAWWCCALGWALALVAADGFLVDITYVESAVAKGAVCLDGSAPAYHLARGSGSGENSWLVHFEGGGWCNNVTTCLQRKRTRLGSSKEMATQIAFSGILSDTPDDNPDFYNWNKVKVRYCDGSSFTGDVEEVDPATKLHYRGARIWQAVMGDLLAKGMDKAENALISGCSAGGLTSILHCDRFHDLLPPAARVKCLSDAGFFINEKDVAGVGYIAAFFNDVVTTHGSAKNLPPSCTSTLPPGTCFFPQNEVKQIQTPLFILNAAYDSWQVRNILVPGVADPHGKWHSCKHDIDQCSASQLRVLQGFRGDFLKEVAELGNSDSRGLFINSCFVHCQSEIQELWFSSDSPVLGNTTVANAVGDWFFDRSSFQKIDCPYPCDSTCHNRIYDDSSQA

SEQ ID NO: 348159 - protein, 66 aa, Zea mays
  Clone ID: MRT4577_80685C.1.pep
KTVELKVSMHCYGCAKKVQKHIFKMDCVTLFEVDLEKKNVVVIGDFFSYEVLASSSKENSLNCGWS

SEQ ID NO: 348160 - protein, 59 aa, Zea mays
  unsure (1)..(59): unsure at all Xaa locations
  Clone ID: MRT4577_80686C.1.pep
FGTTKYYCTGIDGPGHRYCIMNMITDTSQGECAVLIIDSTTGGFEVDISXDVHTREHAL

SEQ ID NO: 348161 - protein, 47 aa, Zea mays
  Clone ID: MRT4577_80687C.1.pep
PHQWHDGKLWTLNMFRTYVIQALGGVKGILKHILFKGTSLPTWKGMF

SEQ ID NO: 348162 - protein, 72 aa, Zea mays
  Clone ID: MRT4577_80688C.1.pep
EKIHNLDDSARHFSCYAMPSQTHIPVEPHKTLHLSAPQTRARRRLYTLARRCIGNPAGRHATSHDRTSVLHH

SEQ ID NO: 348163 - protein, 55 aa, Zea mays
  Clone ID: MRT4577_80689C.1.pep
WCEARPVCIASQVFSRRFHSKNVIVRAIIESNYVVVSRFTIHVIGSMLILVLDIS

SEQ ID NO: 348164 - protein, 41 aa, Zea mays
  unsure (1)..(41): unsure at all Xaa locations
  Clone ID: MRT4577_8068C.1.pep
ENHSSEAAHMGPAPTPILGVRQXRRQRWRPRPLRRSRPRRS

SEQ ID NO: 348165 - protein, 26 aa, Zea mays
  Clone ID: MRT4577_80690C.1.pep
FEQQFDPIVNFFVYTALFLQHNHPYH

SEQ ID NO: 348166 - protein, 33 aa, Zea mays
  Clone ID: MRT4577_80691C.1.pep
FLSPYSLIFCTISILLSNPVSRVPLTPLDVTRS

SEQ ID NO: 348167 - protein, 131 aa, Zea mays
  unsure (1)..(131): unsure at all Xaa locations
  Clone ID: MRT4577_80692C.1.pep
NRKFVAVGVFFAELXRMLTRELAEDGYYGARVRVTPMRTEFSVQATRPHNVLCEKGLMITELACVVQKRYKLPDGGVELYAWNAIFRGLCIVDETQSLRYKLLAGRCRXLACCGACRFVVMSAATVCEAIG

SEQ ID NO: 348168 - protein, 59 aa, Zea mays
  Clone ID: MRT4577_80693C.1.pep
MRVSLAAFALLALGVSARVTHTSGGCRCQPPSPAHLPSPVHLSPSAQVPPAGHIPHAGT

SEQ ID NO: 348169 - protein, 74 aa, Zea mays
  unsure (1)..(74): unsure at all Xaa locations
  Clone ID: MRT4577_80694C.1.pep
AQPLXFFLILXQXPRRLFISAAWVHLTFTNGRHVCSQNNDILALHLHVNIDIFQSHTLPGFTHKLTKDKLKIKP

SEQ ID NO: 348170 - protein, 63 aa, Zea mays
  Clone ID: MRT4577_80695C.1.pep
MEARMETERQAHLTDQHRMTEMFQYMQSLGAAQGFAPPPPLFPTVDHVLFHTPMSIKIVVRCW

SEQ ID NO: 348171 - protein, 105 aa, Zea mays
  Clone ID: MRT4577_80696C.1.pep
VHPGISGLACEHILPGTPLHRNRGPSRPRLGLVGGPTTPHARAASAASSRVYYRTQAPILDRGPAGGAVAHQWLNASRLFDAMMAGDKVAQTPTAWLCPARIQHG

SEQ ID NO: 348172 - protein, 58 aa, Zea mays
  Clone ID: MRT4577_80697C.1.pep
VEWYPPLAVVMVSVGLMFPPSFFIYEATSSRRNRTLSKEIPTPVVASVFLGFGSLFVL

SEQ ID NO: 348173 - protein, 243 aa, Zea mays
  Clone ID: MRT4577_80698C.1.pep
LLMKVKLRARMLWDVIEHGGADIHEEMMALDALCSAVPPELVSSIADKLTAKEAWKTIADLRVGDDRMKKTAAVLLRRKFDLATFNDGESVEDFALRLNGMAAELSTLGAGVEEEKIVEKIARSFPPRFKQIVLSITTLLDLSTLSVSDMVGRLRAAEDAFEEAPGSLQHSGRLYLTEEEWNARRKKEVEHHPGSSSSGGAGRHGGGYRGRGRGRGRGRGRGGRSPGGPSSGRTIFFFKFFFF

SEQ ID NO: 348174 - protein, 78 aa, Zea mays
  Clone ID: MRT4577_80699C.1.pep
PLSAKHRGRKSGTDGDHRRRPNSLPPRLPFSPRRCFWLDADGETNDELKMQQLDTYIARRRGKKEARKRGRTRGRTRG

SEQ ID NO: 348175 - protein, 98 aa, Zea mays
  Clone ID: MRT4577_8069C.1.pep
FYPPIMMKGGSKNVVGAVAVAILLVLQLMAAPPTAMACRSPRGAVPDGSLATTPKVTMLSATLCYTGETCKYITCLTPACSCNYDERRCYIIITTGCC

SEQ ID NO: 348176 - protein, 136 aa, Zea mays
  Clone ID: MRT4577_806C.1.pep
LAVPKLLNTVFLGFPFVHEVFIGIYNLSCIITIFPSRTSGSDVMHYRLMFVKMQVVFVGGRTQPGTVKPEEGDRHPYSMLDCVAQRETILPFVLYIQKTLRRRPFLLGILENVMSTFLHALEFFKDHGKRRLSKLM

SEQ ID NO: 348177 - protein, 105 aa, Zea mays
  Clone ID: MRT4577_80700C.1.pep
PIARTEPRCLFGGGHPTDIQRSLYRKLIKRPHIQSFADIIQSHSSQNKCAQSITMRWGHIFDLDYPTSAAHTDDESSERAASTSSTTANLAQLRISYTDEELPGL

SEQ ID NO: 348178 - protein, 88 aa, Zea mays
  unsure (1)..(88): unsure at all Xaa locations
  Clone ID: MRT4577_80701C.1.pep
PSLSGQVSITLIATGFKRQDEPEGRXEGTSCQAXLLLGPXSYSFLLALQPKGGQQGENGRRPSPAEGSSTVEIPEFLRRRGPSGFPRV

SEQ ID NO: 348179 - protein, 53 aa, Zea mays
  Clone ID: MRT4577_80702C.1.pep
NYHQSPVLLLVYTENNRKKIVHVYAKLSNKSSGCVAATLSSENHLKLCSRRRG

SEQ ID NO: 348180 - protein, 44 aa, Zea mays
  Clone ID: MRT4577_80703C.1.pep
CCGAVCTNNFPIEHREGPQETTREFLTLEIGLSSPTNWGLGPKP

SEQ ID NO: 348181 - protein, 222 aa, Zea mays
  unsure (1)..(222): unsure at all Xaa locations
  Clone ID: MRT4577_80704C.1.pep
KIKDQTXCSEKKDFELXTMEGLMPEVEAKXAKLDKELLSKSESFEQXKQKFDTKFAAEVXKNSNLQKSLRELQDKCLEFSNRCVLRLRQIFNSVGVSSEEFNPSVEDLPETFEHIEGEVDALDEVIAGHGDFCALLASRGTAVAFMKSGCTHGKXVNRQNFSLSPADLIDIPSLARSIGNKFIKQIWTKGGRSLAGDEARSHLKPVKSFLVLTFSLKLEFSL

SEQ ID NO: 348182 - protein, 118 aa, Zea mays
  Clone ID: MRT4577_80705C.1.pep
MAGGKEPIEVKFRLFDGTDIGPNKYDPATTVTALKEFVLARWPQDKDIIPKTLNDVKLINAGRILENNKTLAESRVPVGEVPGGVITMHVVVRPPQSDKSDKHLSNSPKQNRCGCTIL

SEQ ID NO: 348183 - protein, 204 aa, Zea mays
  unsure (1)..(204): unsure at all Xaa locations
  Clone ID: MRT4577_80706C.1.pep
MKRRKVVEHIILLRAKPNISDAEEKDMLDYLYTSQYQMRGILAVSLGRIEDPNSDNFTHAVFMRFQQKQDIAEFQSNAYYSKVVDEHVKPVSYXESEVEDDIIPLFRRGETASREATEDALASLDKLISQCSASIVQATXAAVWIVRITGTVXAAVIRFPSSDELKLFRESEEYKDMWASKFRPIVERSLHLHFTVDPVGNQLM

SEQ ID NO: 348184 - protein, 320 aa, Zea mays
  unsure (1)..(320): unsure at all Xaa locations
  Clone ID: MRT4577_80707C.1.pep
MSVPASAQVPHTIRSAGSCCFRSSHQLSAQNLGRHRRWRGTGKKKILSTRGVLESRNGAHPGGLTKRRKVVEHIILLRAKPNISDAEEKDMLDYLYTSQYKRRGILADSPGXIEDPNSDNLTHAMFMRFQQTQDNMGSKSAVSLSQVDDEHVNPFXLXELVEDRVSXQTRKSPFPITGQKYENGLNXDTVLSFFXLFFFWQQKEEEKMWQDIDYRDEIMVLVSFLDTASREATEDALAAHDKLISQCSASIVQATRGCCLDPPDNGYSHAAVXRFPSSDELKLFRDSEEYKDMWASKFRPIVERSLHLHFTVDPVGNQLM

SEQ ID NO: 348185 - protein, 295 aa, Zea mays
  Clone ID: MRT4577_80708C.1.pep
MSVPASAQVPHTIRSAGSCCFRSSHQLSAQNLGRHRRWRGTGKKKILSTRGVLESRNGAHPGGLMKRRKVVEHIILLRAKPNISDAEEKDMLDYLYTSQYQMRGILAVSLGRIEDPNSDNFTHAVFMRFQQKQDIAEFQSNAYYSKVVDEHVKPVSYGSVSVDFESEVEDDIIPLFRRGEDFNYGVEFMLLVSFLKTASREATEDALASLDKLISQCSASIVQATCGCCLDRPDNGYSHAAVIRFPSSDELKLFRESEEYKDMWASKFRPIVERSLHLHFTVDPVGNPRSLTSFL

SEQ ID NO: 348186 - protein, 51 aa, Zea mays
  Clone ID: MRT4577_80709C.1.pep
SRIDVCPDGLVCRVDLVNPESAFKNDMSGQWERWLDFYRRSGKILGLVRIG

SEQ ID NO: 348187 - protein, 98 aa, Zea mays
  Clone ID: MRT4577_8070C.1.pep
NTASCSASEQRRRALYQSWKQQDQSLIKLEARQQLWGCSSSTPWSSSGPASLINDESIVLFRGAWPRAREHLPSTSSLASCLQQNQDRRSRSRRSNQN

SEQ ID NO: 348188 - protein, 52 aa, Zea mays
  Clone ID: MRT4577_80710C.1.pep
LTEFHVALFTSLLYLTMAYCTHRVKLRCVSLAKVYFARTSGSSCVKCLCKVP

SEQ ID NO: 348189 - protein, 167 aa, Zea mays
  unsure (1)..(167): unsure at all Xaa locations
  Clone ID: MRT4577_80711C.1.pep
MVRSLCCSSSSDTRSETMSSHVAGGKMALLNDSLPVSSHQDGVGKLTTKEXIATVMPPLASNPMXADLHDMIXEGDADTPGPIEFPQFVKLMSRKMKDDNSDSEXINDXFRVIDTEPKAVISAAXLRHLXTTLCKKLSEPEXRDVTXSVDNDVHMQICYDEYLTVMM

SEQ ID NO: 348190 - protein, 275 aa, Zea mays
  Clone ID: MRT4577_80712C.1.pep
VAFFLKVSTGSSKARCVRVDRRWRGTGKKKILSTRGVLESRNGAHPGGLTKKRKVVEHIILLRAKPNISDAEEKDMLDYLYTSQYQMRGILAVSLGRIEDPNSDNFTHAVFMRFQQKQDIAEFQSNAYYSKVVDEHVKPVSYGSVSVDFESEVEDDIIPLFRRGEDFNYGVEFMLLVSFLKTASREATEDALASLDKLISQCSASIVQATCGCCLDRPDNGYSHAAVIRFPSSDELKLFRESEEYKDMWASKFRPIVERSLHLHFTVDPVGNQLM

SEQ ID NO: 348191 - protein, 235 aa, Zea mays
  unsure (1)..(235): unsure at all Xaa locations
  Clone ID: MRT4577_80713C.1.pep
MKRRKVVEHIILLRAKPNISDAEEKDMLDYLYTSQYQMRGILAVSLGRIEDPNSDNFTHAVFMRFQQKQDIAEFQSNAYYSKVVDEHVKPXLCFESEVEDDXYXLLSSFXXXXXXXXXHRDGHCGVEFMLLVSFLKTASREATEDALASLDKLISQCSASIVQATCGCCLDRPDNEYSHAAVIRFPSSDELKLFRESEEYKDMWASKFRPIVERSLHLHFTVDPVGNPRSLTSFL

SEQ ID NO: 348192 - protein, 90 aa, Zea mays
  Clone ID: MRT4577_80714C.1.pep
GVILSVLARGMNPSHQFFPFSEQVVGLVKWLHRVMKPGEHAQAIDSAIAGAGYDEQILLLLRIALFCTKNDPKERPTAKDVRCMLSQIKT

SEQ ID NO: 348193 - protein, 96 aa, Zea mays
  unsure (1)..(96): unsure at all Xaa locations
  Clone ID: MRT4577_80715C.1.pep
PSRGYRIGGDPLGEVVDSLYPGGRFFSIGVADDPEAFAELKVKEIKXGRLAMFSMLELFVQAIVAGKGPVENLADHLAGPVSKNKWACAINFVGGK

SEQ ID NO: 348194 - protein, 94 aa, Zea mays
  Clone ID: MRT4577_80716C.1.pep
IHPILIQLVVVKEKNRAAQMASNSSCGENARKPHTPSAIVIGGGFAGLAAADALRNASFQVILLESRDRIGGRVHTDYSFWFPVDLGASWLHGV

SEQ ID NO: 348195 - protein, 112 aa, Zea mays
  Clone ID: MRT4577_80717C.1.pep
IIPKIATQPGEPKRNRAREANQSMEAGSKKVPSFHVSPQSGLQSRDAEGEFMHGGKKITRPTSKTWQRPKELGIYFAQEGTQWMRRRRRPPACCCLLPFGGGLGAGVGLVPN

SEQ ID NO: 348196 - protein, 110 aa, Zea mays
  unsure (1)..(110): unsure at all Xaa locations
  Clone ID: MRT4577_80718C.1.pep
PALTHLTEAGHVAYLQQLLPFGRLTLSKYDGPLHQRQQXVXPLVVATPGVAAFLQQQPLFPYNQFSLINPVLSRQQPIVAGAIFKIPYEMCSIMVPSYPRVFPSSSQYID

SEQ ID NO: 348197 - protein, 128 aa, Zea mays
  Clone ID: MRT4577_80719C.1.pep
RATPRSWRPPLCQPSPSVRLFPDLRPRILLSLTTYLFEDPFAVFPLRPPRHRRAPPPRRRSASASGSATGSTQTTSRKMQRRIQGKRAGTGGAAETAAVWERGANCGSCSYSSEGGGASGDSQITINT

SEQ ID NO: 348198 - protein, 80 aa, Zea mays
  Clone ID: MRT4577_80720C.1.pep
VSSFTVFILFSFVVFFIERLVFHGLFWWPSCLVIQNILPLTWSQTSKLYNWTQWRGSDVTTQGGRSHKNYLQHPKVKLHG

SEQ ID NO: 348199 - protein, 159 aa, Zea mays
  Clone ID: MRT4577_80721C.1.pep
MTWAATLDYGRKTKNEDIRPGPLRPANIIRNKFPTYKNGSNGIVIKLADGPEVPPLKEVVAKETEELLDRRQRFSVRELAMKFEKGLNTATLLSKEVKWRQVALLERDILLKNLKSVLESLRGQVTGKTKDEIEESISMVEILAGQLSQREAELIQQKT

SEQ ID NO: 348200 - protein, 124 aa, Zea mays
  unsure (1)..(124): unsure at all Xaa locations
  Clone ID: MRT4577_80722C.1.pep
GAVRSSALLSGLEVLHPVRPGRLGGGPPGVAVLGLLCSLLASGGVFRAXSFRCRPSALQRLPSCCAFXCFSSGSLLRPVLWCARGGFGALXXRFCPCALFVXLGWGRFLFSLXLPPPAAPVPLL

SEQ ID NO: 348201 - protein, 85 aa, Zea mays
  Clone ID: MRT4577_80723C.1.pep
RGLKPGKIFVLTPKLEADPQHTRCCQFNVKGPPGAIRFVLESQGFWLQSYRQPPSKPVPESPRLRALQSLFCFPTPSSRGLGRFL

SEQ ID NO: 348202 - protein, 168 aa, Zea mays
  unsure (1)..(168): unsure at all Xaa locations
  Clone ID: MRT4577_80724C.1.pep
MAVSFANLNTEVGLKKVDEHLTXASYITVYQASKDDLSVYTSMSVAPSSKYINVGRWLNHIDALEGLMGITAKALGVIVXSSAVSSNPTPDVAEPQGPVAEEXTHDDVELFGEETXXESRLAEYGAADAKASEDKIESGKSSLLLEVKPCHHDTDMDKLDESAMSVQM

SEQ ID NO: 348203 - protein, 55 aa, Zea mays
  Clone ID: MRT4577_80725C.1.pep
LSRANDSRHASDAFKAVRAICQSLNSAKEVRILSAPVFKSSPIVRPVNRLALFSG

SEQ ID NO: 348204 - protein, 117 aa, Zea mays
  unsure (1)..(117): unsure at all Xaa locations
  Clone ID: MRT4577_80726C.1.pep
MGFMRSRSNASXSGMRVAPNIMETIDQLPMKKAYXRYAIFTIEENEEQVXIAEKTAATTESYDDFLASLPENDCRYALHDFDSVTEDNVNRRKIFCIACSPSTCRMHDMMLCSTSKD

SEQ ID NO: 348205 - protein, 99 aa, Zea mays
  Clone ID: MRT4577_80727C.1.pep
GFSSFWGPRLRWGFQRNKAPPKPSTCTPIRSWTGNHLLWASFPVIQFVKMCVLSPHTYPGNKRNRGQLKKTLFFFPFFPRMGGPAPKKLCPISKRPGGP

SEQ ID NO: 348206 - protein, 41 aa, Zea mays
  Clone ID: MRT4577_80728C.1.pep
MIGEVVSYKSCPTASDTITIGIFKCEIKLKFVISSSKFSQK

SEQ ID NO: 348207 - protein, 96 aa, Zea mays
  Clone ID: MRT4577_80729C.1.pep
HSLYKMAQNLTSSEQEVMKLFDLFQNYHVRRTDKLDVQETKRVLREFCPNFMKALNASGIKILNDLEKEITLDEIWDMIGRMAMAYNKKNSNALKD

SEQ ID NO: 348208 - protein, 117 aa, Zea mays
  Clone ID: MRT4577_8072C.1.pep
RPGFFSPRSPIYGGSAPPPPPWTSTRRQQRRPQRPAFPDVLRVRCSLRHPTPVRARARSTPIRTADLRPRPPYGGGGDAYWHSGQGYASSPAYCAGGDYGKVTHVALDVRRPEALLL

SEQ ID NO: 348209 - protein, 181 aa, Zea mays
  Clone ID: MRT4577_80730C.1.pep
EVLQRLVNCLDHCASRTGSLPVQTVGLLPLHCSRFSLSCLQMMFSLCSCIGNATLCAAASETSKVSISILMKRCEVILGQFLADENDLGEHPLPSVRVEETICVLQELARLIIDIDAANTLNIPPYLKQALGENKSHGRAHLLSLLPTFSELVVSREARVRELVQVLLRLISSELGLHQLT

SEQ ID NO: 348210 - protein, 47 aa, Zea mays
  Clone ID: MRT4577_80731C.1.pep
IQGPMLCKTCYDPWLLRHHSEVSRQSGAWTPRCPFVQQQVCNIYDIL

SEQ ID NO: 348211 - protein, 54 aa, Zea mays
  Clone ID: MRT4577_80732C.1.pep
RTLSVISPPSPASTQWRLCRIVTAPTPLSHAAHALWTMMWTSPTTFFTYTYLYH

SEQ ID NO: 348212 - protein, 32 aa, Zea mays
  Clone ID: MRT4577_80733C.1.pep
FWNRLCTSLIRGLSRGPVHQKLAISLPVEDCQ

SEQ ID NO: 348213 - protein, 99 aa, Zea mays
  unsure (1)..(99): unsure at all Xaa locations
  Clone ID: MRT4577_80734C.1.pep
KRGRRGXDKATGETTRTQTTRAAPEPDRHQRARRQTRQCSKTAGQKKKQASRTPTRKMPPVHKPKITMEDANARTKRGSGRTLKDIKHHYACPLLEMKG

SEQ ID NO: 348214 - protein, 236 aa, Zea mays
  unsure (1)..(236): unsure at all Xaa locations
  Clone ID: MRT4577_80735C.1.pep
MMPGSAPPAAGSGMFVPTQTAGTVLCCICGVSMQPNPANMCARCLRARVDITEGVPRNAAVVYCPDCFSYLQPPRSWLRAGPESPELLQILLRRLKHPLARLKVSLSGAEFVFSEPHSKRLRLKLRLRREVLNGIVLEQTHPVEFVVHDRLCDSCARAQANPDQWVAVVQLRQHVPHRRTFLYLEQLLIKHGQAALAIRVASAPGGLXDFFFGSRSHAARLVEFLGTVAPIQTNTA

SEQ ID NO: 348215 - protein, 48 aa, Zea mays
  Clone ID: MRT4577_80736C.1.pep
VDYLKVPLDKSLVHLDVVGSLSVPLLPAPLKKSMHSVSGPCCENVSYF

SEQ ID NO: 348216 - protein, 53 aa, Zea mays
  Clone ID: MRT4577_80737C.1.pep
IKKEQKKYIVAHIKNIVAFKPYKFIMNKQNKLHQSTTNQTRSISDSSVPCQNT

SEQ ID NO: 348217 - protein, 87 aa, Zea mays
  unsure (1)..(87): unsure at all Xaa locations
  Clone ID: MRT4577_80738C.1.pep
FFFFFXFFXLVFXFVCFFFFEATQLGTPFTKLFLTKHSWFKVGFRKGGRERPXSLRGGPGIGAPFFFGSRLYGSFLFFWAGTWVLVK

SEQ ID NO: 348218 - protein, 102 aa, Zea mays
  Clone ID: MRT4577_80739C.1.pep
ASTRQETGNAPEWQSRSSLPGHLLPSALCSTYIQNLTADPHITTSDDGHRTRTTSTHAPPPRGDEPHLGYRRPLTRRPGRDVHPRSHLYATTETDDPPTCLS

SEQ ID NO: 348219 - protein, 93 aa, Zea mays
  unsure (1)..(93): unsure at all Xaa locations
  Clone ID: MRT4577_8073C.1.pep
FLFXYXGKSFXFXDXFXFGLXDRSIXLGWLGTXNXXYXCXXLDWXDVXNXPXEGXFYKXXXSXRPRSGRSXRTXTPGELGKKLXIXXKKTXSD

SEQ ID NO: 348220 - protein, 80 aa, Zea mays
  Clone ID: MRT4577_80740C.1.pep
GEEVHNRGAPFFFFFFFFENRFDKNHPKAHVDTKLSESLDNKKSSFSRSKPHGLIYFPHHVILTILTLSSHPDSQNKPVL

SEQ ID NO: 348221 - protein, 106 aa, Zea mays
  Clone ID: MRT4577_80741C.1.pep
SPVRLAPLEQSHSVLRCMTTPVGMVGSWPIGSGCRWCGGSPPQGMLAAPGVCLIGRPRVRGRRRQPVLGVDNSGNGRGRAVDGYGSGSGVGSTPARVGATPGVSGP

SEQ ID NO: 348222 - protein, 39 aa, Zea mays
  Clone ID: MRT4577_80742C.1.pep
VKSGNSEFPKTDLIQFIKDFLPTLGRGAYPFFRTLRPED

SEQ ID NO: 348223 - protein, 150 aa, Zea mays
  Clone ID: MRT4577_80743C.1.pep
GTLEAGRRAKLRSFRPLAALSSRGARARVVAASPGARARARVLSQQPLSSPGARARVPLAVVAVEVRLCLLLSPSSSLSLPSPLALQLSLSRFLSSLRTLARPVLAPPPHAWFAFWLKTSRRDVWRKGGCGDGAFSFGWSDLAITCDCLF

SEQ ID NO: 348224 - protein, 144 aa, Zea mays
  Clone ID: MRT4577_80744C.1.pep
NLRSWRARLRSFRPLAALSSRGAHARVATASPGARLAASPGARARARVLSQQPLSSPRARARVPLAVVAVDRPRLELALGFLSQSSLLRSDSAFSSRPLALSLPSPLALQLSLSRLLSSLRTLAHPVPICPCWRCRLMPGSLSG

SEQ ID NO: 348225 - protein, 507 aa, Zea mays
  Clone ID: MRT4577_80745C.1.pep
MATRASKNCLCAGSSSFDDPDVVEVSPATAAAAGWASGHHKRKRSQVVPQEVIEIDDDDPDGVILIGDKAQVEKNKQTAVCPMDCSKHAKSGWVQDIPGPSTYASKYTSSWVDLKVFQDEAVYNYSDGYPFDGFEEDYAYDEDEFEDDGYDTPLIESEFQFGLSAKFDNFNVLHGLEASLPWKQKTAIEIANKTKPSKAVDDKIEEKYKAFKRFDTVDDHSDHYYSKPESRKVQVVKKPSKDWVKRIQHEWKVLERDLPDTIFVRAYEDRMDLLRAVIMGPAGTPYHDGLFFFDIYFPPRYPNVPPMVNYRAGGLRLNPNLYACGKVCLSLLNTWTGSGCEKWNPANSTMLQVLVSIQALVLNAKPYFNEPGYAMHANTAHGEKKSLTYNEDTFLHSCRTMLYSLRNPPKNFEDFVAGHFRKYGRNILVACRAYLEGAQVGCLSGDGVQDVDEGDKSCSVRFKQSLKRLHEELLAEFTAKGADCGKFLSEKARSGASTSAADTTLRL

SEQ ID NO: 348226 - protein, 196 aa, Zea mays
  Clone ID: MRT4577_80746C.1.pep
SVAVPSLLLLLLLSVALLLPPAAARFSFTYNFTAASDSAPSGISFQGDAFFSKFIRLTRDERVGPLTSSAGRAFFSRPIPLLDPVSRRPASFASAFSFSISAPEPSAASGDGLAFFLSPFPSVIPNRSAGGLLGLFNSSARNGGRSLVAVEFDTYRNDWDPSDDHVGIDLGGIASVAIADWPTSMKDGRTAHARVA

SEQ ID NO: 348227 - protein, 77 aa, Zea mays
  Clone ID: MRT4577_80747C.1.pep
GYKKCVVRVKGEKKPFVPPPARKGPRRRWVSYQPKWKPKGPVDEALSKISPQFFCKVKKKKLLRNLLGGSPGLGCIP

SEQ ID NO: 348228 - protein, 202 aa, Zea mays
  unsure (1)..(202): unsure at all Xaa locations
  Clone ID: MRT4577_80748C.1.pep
MVNYRAGGLRLNPNLYACGKVCLSLLNTWTGSGCEKWNPANSTMLQVLVSIQALVLNAKPYFNEPGYAMHANTXPTGEKKSLTYNEDTFLHSCRTMLYSLRNPPKNFEDFVAGHFRKYGRNILVACRAYLEGAQVGCLSGDGVQDVDEGDKSCSVRFKQSLKRLHEELLAEFTAKGADCGKFLSEKARSGASTSAADTTLRL

SEQ ID NO: 348229 - protein, 157 aa, Zea mays
  Clone ID: MRT4577_80749C.1.pep
RGLGPGPLARVPGAGEALSHAQRPMRGSGHGHTAQVARTRPAWPPSSAPQPQRPSRRWRRVETILLQFRNRLLTERVAQEQVRPSDASMLPLRGLSTPIVILLVRLGLRWRASCHQRSPTMSDLFSSYQQPLLSVLSSKSADNVLKYTQWQMRIERD

SEQ ID NO: 348230 - protein, 59 aa, Zea mays
  Clone ID: MRT4577_8074C.1.pep
DLVKLTLIDYYLGDWEGDQELESERDQYLLGLLLLLWLLVSSPSTPGNDDIYNNRSSSD

SEQ ID NO: 348231 - protein, 95 aa, Zea mays
  Clone ID: MRT4577_80750C.1.pep
AVENWGATYFFLHNNSSWLVFLIRSIFFSVFFFPGETVPLFRRKWVCIPVGRFMCVVPGGQSWGSDLPGISDGGKSVQSVFQMLVAHRESFINSV

SEQ ID NO: 348232 - protein, 61 aa, Zea mays
  Clone ID: MRT4577_80751C.1.pep
LGKVSKRSRVTCVKNQMWLESGVICIGPTSNIYTKDLTLKKKKKKKKKKKKKNKKKKKKAA

SEQ ID NO: 348233 - protein, 38 aa, Zea mays
  Clone ID: MRT4577_80752C.1.pep
GNGEGILRFLPGHLEALHVSVLVIHIQRRAQIRSDHAR

SEQ ID NO: 348234 - protein, 208 aa, Zea mays
  unsure (1)..(208): unsure at all Xaa locations
  Clone ID: MRT4577_80754C.1.pep
MRRRLHLDWPTHFQIIKGIAEGLLYLHKLSGLHIIHGDLKPSNILLDTNMKPKISDFGLSRTYNPGVDEEFADCRRIVGSIGFTAPECRERNVFSIKSDVYGFGALLLEIISGQRCFSLANGGSGDDHGFLNKRAWKLWRAGRLIKLVDXTLGDESEKMEIXRCIQIALLCVEEKPANRPTMQEVVLMLSCRILALPTPQHPAYLSIE

SEQ ID NO: 348235 - protein, 55 aa, Zea mays
  Clone ID: MRT4577_80755C.1.pep
SDRERRPFFFFFFFDLLRKLRALGKMRERHRFLSVYSNKIVAHEIYNINNKYDDE

SEQ ID NO: 348236 - protein, 2159 aa, Zea mays
  Clone ID: MRT4577_80756C.1.pep
MEGEGHHGVVLACSICGFLFAVLSPFSFWVLWAVNWRPWRLYSWIYARKWPTYVQGPQLSTLCSLLTLCAWLVVISPIAVLLAWGSVLIALLERNIIGLAVIMTGVALLLSFYSIMLWWRTQWQSSKAVAYLLLLAVGLLCAYDFCAIYVTAGASASELNSPSGFFFGVSVISLAINMLFICKILFNVSGFDVDEYVRRSYKFAYSDCVEVAPVSCSPEPPDPSELYMTKSSRVKHLGLLYISSLLVLVGYSILYGLTSKEARWLGALTSVAVVILDWNLGLCSFRFELLKSRMIVLFVAGTSRAFLVSFGVHYWYLGHCISYAFVASVLLSAAVSSWLSISNPSVARIDALRSTVIKLREGFRRKGQNSSSNSSEGCGSSVKRSSGSVEAGQNGNATDSMYRSNSQSDGVNWSSIPFDRSNSCQEGRSSDKNIDSARASLAHRSNSCLSAVQDSETAVVSVDRHGDPTTSLVCSSSGLESHGCEPSGSATTSGNQQLLDLNLAAIFQDRLNDPRISSMLKKNGGLGDVELANLLQDKGLDPNFSYMLKDKVMDPRILALLQRSSLDADREHQDDVDVTATDSDRLDTTIANQISLSEELRRSGLEKWLNISRLIFHHLAGSPIRAFIVFTVMFIIETATVAIYRPETIKVINATHEQFEFGFSILLLSPVVCSIMAFIWSLRAEEMLMTSKPQKYGFIAWLLSTCVGLFLSFLSKSSVILGLSLTVPLMVACLSFAVPIWIRNGYSFWIPGREFANRENVSQAPGEKERALFVITIAVFTASIIGLGAIVSAKPLDALGYKGWDADKNSSYSPYATSMYLGWALSSTIAVITTGLIPIVAWFATYRFSPSSAICVGLFATVLVSFCGASYWGVVNSREDGAPLKADFLAALLPLLCIPAFFSLFTGLYKWKDDDWKISRGVYLFVGMGMLLLFGAVAAVIVTIRPWTVGVACLVAILFLVFVIGVIHYWTSNNFYLTRTQMLLVCSIAFLLALAAFLMGLFHGKPFVGASIGYFSFIFLLTGRALTVLLSPPIVVYSPRVLPVYVYDAHADSAKNVSYAFLILYGIALATEVWGVIASLIMNPPFVGAGVSATTLVIAFSFAVSRPCLTLKMMEDAVHFLSKDTVVQAMSRSANKTRNAISGTYSAPQRSASSAALLVGDPALTLDRAGNFVLPRADVMKLRDRLRNEEIAAGSFLCGVKDCLLICPQSLSNIDYRRNMCAHARILALEEAIDTEWVYMWDKFGGYLLLLLGLTAKAEQIQDEVRLRLFLDSIGLSDLSAKEIKKWMPEDRRQFELIQESYIREKEMEEEALMQRREEEGKGRERRRALLEREERKWKELEISLLSSIPNTGSRDAAAMAAAVRAVGGDSALEDSFARDRVSSIANHIRKAQLARRAEQTGIPGTICILDDEPRSTGRHCGELDLCLCQSQKVTLSIAVMVQPVSGPVCLFGSEFQKVCWEILVAGSEQGMEAGQVGLRLVTKGERMTTVAKEWNIGASSIADGRWHLVTVTLDADLGEATSFIDGVYDGYQNGLPLPTDNGIWEPGTDIWVGARPPMDLDAFGRSDSEGSDSKMQIMDAFLWGRCLSEDEVTVLHTAMSPAEYGFFDLAPGDAWHGSYSARVDDWESEEAYELYDQGDVEWDGQYSSGRKRPVHDAVAIDLDSFARRPRKPRFETRDEVNQRMLSVERAVRDALIAKGERNFTDQEFPPEDRSLFVDPMNPPLKLQVVSEWMRPSDIAKEISISCQPCLFSGSVNSSDVCQGRLGDCWFLSAVAVLTEMSRISEVIITPEYNDEGIYTVRFCIQGEWVAVVVDDWIPCESPGKPAFATSRKQNELWVSILEKAYAKLHGSYEALEGGLVQDALVDLTGGAGEEIDMRSPQAQLDLASGRLWSQLLHFKQEGFLLGAGSPSGSDAHISSSGIVQGHAYSILQVREVDGHKLIQIRNPWANEVEWNGPWSDSSPEWTERMKHKLMHVPQSKNGVFWMSWQDFQIHFRSIYVCRVYPPEMRYSVHGQWRGYNAGGCQDYDSWHQNPQYRLRVTGRDALYPVHVFITLTQGVGFSRKTNGFRNYQSSHDSSMFYIGMRILKTQGCRAAYNIYMHESAGGTDYVNSREISCELVLDPYPKGYTIVPTTIHPGEEAPFVLSVFSKASIRLEAV

SEQ ID NO: 348237 - protein, 518 aa, Zea mays
  Clone ID: MRT4577_80757C.1.pep
MAGVALLLSFYSIMLWWRTQWQSSKAVAYLLLLAVCLLCAYDFCAIYVTAGASASELNSPSGFFFGVSVISLAINMLFICKILFNVSGFDVDEYVRRSYKFAYSDCVEVAPVSCSPEPPDPSELYMTKSSRCYIRYLGHCISYAFVASVLLSAAVSSWLSISNPSVARIDALRSTVIKLREGFRRKGQNSSSNSSEGCGSSVKRSSGSVEAGQNGNAMDSMYRSNSQSDGVNWSSIPFDRSNSCQEGRSSDKNIDSARASLAHRSNSCLSAVQDSETAVVSVDRHGDPITSLVCSSSGLESHGCEPSGSATTSGNQQLLDLNLAAIFQDRLNDPRISSMLKKNGGLGDVELANLLQDKGLDPNFSYMLKDKVMDPRILALLQRSSLDADREHQDDVDVTATDSDRLDTTIANQISLSEELRRSGLEKWLNISRLIFHHLAGSPIRAFIVFTVMFIIETATVAIYRPETIKVINATHEQFEFGFSILLLSPVVCSIMAFIWSLRAEEMLMTSKPQKVMH

SEQ ID NO: 348238 - protein, 1382 aa, Zea mays
  Clone ID: MRT4577_80758C.1.pep
MATFLLSNVVIALVMVRRAVPCVVTSAGLDPVDKVSVYDVFWLPGSGTVVNDRQWRGCLVACRQTIEKANVEDIMEPCLMYSAQGSRLATDGDDSQRSGAVWRQSAHEAHELPPGCGGEDGVKVGDHQLGHAMQADHVGEESRRHRLTCRVVGALKPSWLSSWTIATNLASRGGVGTIRGGLEGQPQEDVLVKEHGEGCREVVDALHRSNNMMRNSENLFKSSVILGLSLTVPLMVACLSFAVPIWIRNGYSFWIPGREFANRENVSQAPGEKERALFVITIAVFTASIIGLGAIVSAKPLDALGYKGWDADKNSSYSPYATSMYLGWALSSTIAVITTGLIPIVAWFATYRFSPSSAICVGLFATVLVSFCGASYWGVVNSREDGVPLKADFLAALLPLLCIPAFFSLFTGLYKWKDDDWKISRGVYLFVGMGMLLLFGAVAAVIVTIRPWTVGVACLVAILFLVFVIGVIHYWTSNNFYLTRTQMLLVCSIAFLLALAAFLMGLFHGKPFVGASIGYFSFIFLLTGRALTVLLSPPIVVYSPRVLPVYVYDAHADSAKNVSYAFLILYGIALATEVWGVIASLIMNPPFVGAGVSATTLVIAFSFAVSRPCLTLKMMEDAVHFLSKDTVVQAMSRSANKTRNAISGTYSAPQRSASSAALLVGDPALTLDRAGNFVLPRADVMKLRDRLRNEEIAAGSFLCGVKDCLLICPQSLSNIDYRRNMCAHARILALEEAIDTEWVYMWDKFGGYLLLLLGLTAKAEQIQDEVRLRLFLDSIGLSDLSAKEIKKWMPEDRRQFELIQESYIREKEMEEEALMQRREEEGKGRERRRALLEREERKWKELEISLLSSIPNTGSRDAAAMAAAVRAVGGDSALEDSFARDRVSSIANHIRKAQLARRAEQMELIPVAASTTTLHRWCGLAVHRLPPGTRQSGTPNEVLSTDMRPGARTYCEVLRVGTGTNRVEIKSTYLCLARVVDLDTDGHFDEGFICLYATYATLLDLDWHDTKGGYPTGIPGTICILDDEPRSTGRHCGELDLCLCQSQKVTLSIAVMVQPVSGPVCLFGSEFQKVCWEILVAGSEQGMEAGQVGLRLVTKGERMTTVAKEWNIGASSIADGRWHLVTVTLDADLGEATSFIDGVYDGYQNGLPLPTDNGIWEPGTDIWVGARPPMDLDAFGRSDSEGSDSKMQIMDAFLWGRCLSEDEVTVLHTAMSPAEYGFFDLAPGDAWHGSYSARVDDWESEEAYELYDQGDVEWDGQYSSGRKRPVHDAVAIDLDSFARRPRKPRFETRDEVNQRMLSVERAVRDALIAKGERNFTDQEFPPEDRSLFVDPMNPPLKLQVVSEWMRPSDIAKDISISCQPCLFSGSVNSSDVCQPELW

SEQ ID NO: 348239 - protein, 366 aa, Zea mays
  Clone ID: MRT4577_80759C.1.pep
GEWVAVVVDDWIPCESPGKPAFATSRKQNELWVSILEKAYAKLHGSYEALEGGLVQDALVDLTGGAGEEIDMRSPQAQLDLASGRLWSQLLHFKQEGFLLGAGSPSGSDAHISSSGIVQGHAYSILQVREVDGHKLIQIRNPWANEVEWNGPWSDSSPEWTERMKHKLMHVPQILTSIPLVSPSLQSKNGVFWMSWPDFQIHFRSIYVCRVYPPEMRYSVHGQWRGYNAGGCQDYDSWHQNPQYRLRVTGRDALYPVHVFITLTQGVGFSRKTNGFRNYQSSHDSSMFYIGMRILKTQGCRAAYNIYMHESAGGTDYVNSREISCELVLDPYPKGYTIVPTTIHPGEEAPFVLSVFSKASIRLEAV

SEQ ID NO: 348240 - protein, 212 aa, Zea mays
  unsure (1)..(212): unsure at all Xaa locations
  Clone ID: MRT4577_8075C.1.pep
MEDNLPVNVREYQELAKKALPKMHYDYINGGAEDEYTLRENIAAYGRILLRPRVLIDVSKIDMSTSLLGYNMPSPIIVAPTGAHKLANPEGEVATARAAAACNTIMMLSFSSSCRIEEVASSCDAIRFYQLYVXALPLIFFSKFHFLVLPDFWKFSSCTLXYKRRDVSATLVRRAESLGFRAIVLTVDTPVLGRREADIRNKYSACIVNEIS

SEQ ID NO: 348241 - protein, 118 aa, Zea mays
  Clone ID: MRT4577_80760C.1.pep
GGSPPRLKNVRTPFPRFTQSPGFSKGKKSWAQFSFPLLHQVGGSPLFFISSGGWFFQPHFFPGFKLWVPPPGPNFVVWVLAPLVFLKHFSLRGVGAPRVPNFFFFGARILFAPPPPFF

SEQ ID NO: 348242 - protein, 78 aa, Zea mays
  unsure (1)..(78): unsure at all Xaa locations
  Clone ID: MRT4577_80761C.1.pep
MPGANSXGRLLIQSLGNAYAAGRRRAXIIELXVGFAVATGLTHVAXMGLAGSFRFNSFLSGVLSGRGTAVLAVCLGIR

SEQ ID NO: 348243 - protein, 367 aa, Zea mays
  Clone ID: MRT4577_80762C.1.pep
MDSDYGVPRELSEVQQNRTLYQPELPPCLQGTTVRVEYGDVAIAADPAGAHVISHAYPHTYGQPLAHFLRKAANVPDAKVISEHPAVRVGIVFCGRQSPGGHNVIWGLHEAIKAHNVNSKLIGFLGGTDGLLAQKTLEITNEVLSSNKNQGGYDMLGRTKDQIRTTEQVNGAMATCQALKLDALVIIGGVTSNTDAAQLAETFAEAKCATKVVGVPVTLNGDLKNQFVETTVGFDTICKVNSQLISNMCTDALSAEKYYYFIRMMGRKASHVALECALQSHPNMVILGEEVAASKLTIFDITKQICDAVQARAEKDKNHGVILIPEGLVESIPELYALLQEINGLHGKGVSVENISSQLSPWASALF

SEQ ID NO: 348244 - protein, 37 aa, Zea mays
  Clone ID: MRT4577_80763C.1.pep
GAVTTNHPLFKPTFVVSACVSDPLNLRARHSLWKIQN

SEQ ID NO: 348245 - protein, 108 aa, Zea mays
  Clone ID: MRT4577_80764C.1.pep
SVTPGFTLLFQALLEASRILNLNNNPYFFGPYREDVGVFLNDWHTGPFSCYLKSNYQYHRIYRDAKTPFFIHNIFYQGRVGLFHYPELNLPERFKGFFDIKVLYLKPL

SEQ ID NO: 348246 - protein, 105 aa, Zea mays
  unsure (1)..(105): unsure at all Xaa locations
  Clone ID: MRT4577_80765C.1.pep
ILNNRKTIVAFSTKRCPLTKHPSTLTTRSKHAMFFYFAMFFSGATDEEGRLEESGAAFTLALMSSGTTTPGLLIRIRLARIAXSIALSRWALRVAEVSSATLTAN

SEQ ID NO: 348247 - protein, 169 aa, Zea mays
  unsure (1)..(169): unsure at all Xaa locations
  Clone ID: MRT4577_80766C.1.pep
ALPTRAACSQQQQFLPCGQLAPLRSASXLRPPKGPFTHLSGGXKQVFLPPLQGAALNSPPYLQQQQLLPFIQLAGVTPPTFLTQPQLXPINQHPAPTSGXLLTXQPPPPFNLLFFSNPTTLKQQTKQKKKIKKKKKKKKKKKKKKKKKKKKKKKKKKKKQKEKKKKKAA

SEQ ID NO: 348248 - protein, 111 aa, Zea mays
  Clone ID: MRT4577_80767C.1.pep
AIRCRTRSIACSFSEDSATLGDGVVNDQEFIATTNDPGLTLMAAKFDGILVLSFEEIFVGNATPDWYNMVKKSLISDPAFSFWYNRHADEGEGGENAFGGMDYSHYIEDHT

SEQ ID NO: 348249 - protein, 65 aa, Zea mays
  Clone ID: MRT4577_80768C.1.pep
MERERERERERNKEADEVTVELRAVGFGKEVVLKQRRRMRRRRRLGEEERAAILLMALSSGVVYA

SEQ ID NO: 348250 - protein, 91 aa, Zea mays
  Clone ID: MRT4577_80769C.1.pep
VVSLGSRAVVELSYASFVVVVTLDCLSAFCFVERIKVGLSCFSLFCLMMSCTCLVSCLCIQSFVFVFTIVVLTNPKMFFPPPFLFFFMKGT

SEQ ID NO: 348251 - protein, 248 aa, Zea mays
  unsure (1)..(248): unsure at all Xaa locations
  Clone ID: MRT4577_8076C.1.pep
MEDNLPVNVREYQELAKKALPKMHYDYINGGAEDEYTLRENIAAYRRILLRPRVLIDVSKIDMSTSLLGYNMPSPIIVAPTGAHKLANPEGEVATARAAAACNTIMVTXIFMCVLRGCLLVSGDVLNFRPSVDCYTCSYMSXMLSFSSSCRIEEVASSCDAIRFYQLYVXALPLIFFSKFHFLVLPDFWKFSSCTLXYKRRDVSATLVRRAESLGFRAIVLTVDTPVLGRREADIRNKYSACIVNEIS

SEQ ID NO: 348252 - protein, 91 aa, Zea mays
  Clone ID: MRT4577_80770C.1.pep
NQHCELYCLPIFLINYPFYDSTGPFSPLPYNYSSSSLFCFIVCSALHFYSLHSSSVIVLVQFVGHVFYHFRQKSFLKPSTFLLFCYLRTSF

SEQ ID NO: 348253 - protein, 69 aa, Zea mays
  Clone ID: MRT4577_80771C.1.pep
NQHCELYCLPIFLINYPFYDSTGPFSPLPYNYSSSSLFCFIVCSALHFYSLHSSSVIVLVQFDGHVFYH

SEQ ID NO: 348254 - protein, 44 aa, Zea mays
  Clone ID: MRT4577_80772C.1.pep
HALYDLTVLWGPRGCGLCSAPTSQPADRAAWAQSHPTLPGSTCR

SEQ ID NO: 348255 - protein, 59 aa, Zea mays
  Clone ID: MRT4577_80773C.1.pep
FFLVFSPPFSNFCAEMIGRPLSFSLDMGSPSHLMTQKPPTALSAHSPFFLVFSPPFSNF

SEQ ID NO: 348256 - protein, 85 aa, Zea mays
  Clone ID: MRT4577_80774C.1.pep
LNRAKKIHSFHLTIAATSRVIWKPSVAFLMHRWYNVDRAVRNSLSATVCLAQPMAKAAWTIAVSRSAVSLMMVPQTEVSMRARIK

SEQ ID NO: 348257 - protein, 61 aa, Zea mays
  Clone ID: MRT4577_80775C.1.pep
TMVRTTVLFSLLQPEVACEIATQSVSVQKLCDHLYASKNWLQYSTRPSQARSSSLINAQWS

SEQ ID NO: 348258 - protein, 96 aa, Zea mays
  Clone ID: MRT4577_80776C.1.pep
FGPQSASSLVLGPPLFHGRARIPFPFAYRHFFYVPLRQKESLFAVNGHPAEATPWAAENFWKWHPRILAERRWRKNGSLIMGKRGTPTATELFSRL

SEQ ID NO: 348259 - protein, 59 aa, Zea mays
  Clone ID: MRT4577_80777C.1.pep
RRKKCPHSSNDTSGASSLSSREQVSFFLSVMLRPGLLDRTKRLLAPQPILTNQLQSAST

SEQ ID NO: 348260 - protein, 72 aa, Zea mays
  Clone ID: MRT4577_80778C.1.pep
KEKNGRFQSKLQVGALVLNPRIGPHLKGSGLLKIFFFPRAPNKGWVPTYGLKFCKRYWAFDSWETERAFKAG

SEQ ID NO: 348261 - protein, 56 aa, Zea mays
  Clone ID: MRT4577_80779C.1.pep
GRPSVGVRPWLPCLHSHTANAHPADGLLPVIESMHRTTTSSCLTNSTQTINNRTEG

SEQ ID NO: 348262 - protein, 234 aa, Zea mays
  Clone ID: MRT4577_8077C.1.pep
MIMLDAATNLECCPTASNKRMEDNLPVNVREYQELAKKALPKMHYDYINGGAEDEYTLRENIAAYGRILLRPRVLIDVSKIDMSTSLLGYNMPSPIIVAPTGAHKLANPEGEVATARAAAACNTIMMLSFSSSCRIEEVASSCDAIRFYQLYVYKRRDVSATLVRRAESLGFRAIVLTVDTPVLGRREADIRNKMIAPPLSNLESLMSLDDFDDAEGGSKLERFSRETLDHHCH

SEQ ID NO: 348263 - protein, 145 aa, Zea mays
  Clone ID: MRT4577_80780C.1.pep
MSTAAAQGGEKPALRKPVFVKVDQLKPGTNGHTLIVKVVSANPVPGRVRTGAPASSSARAPRIAECLVGDETGSIIFTARNDQVDLLKAGATAILRNAKIDMFKASMRLAVDKWGRVEATEPASFTVNEENNLSQVEYELVNVAE

SEQ ID NO: 348264 - protein, 58 aa, Zea mays
  Clone ID: MRT4577_80781C.1.pep
SAGLVSFIPMCCMVCLGFSYCRGRIVTCSIASAGFASKRCQVVLHLVWLVIHCVRLPA

SEQ ID NO: 348265 - protein, 72 aa, Zea mays
  Clone ID: MRT4577_80782C.1.pep
TITLYTHRAAVDSCDIKYTMILYMPRALIPVTTLELYMLHKIHNEVLLVPYYSTLLILLLCIGWMMVSTSNH

SEQ ID NO: 348266 - protein, 194 aa, Zea mays
  unsure (1)..(194): unsure at all Xaa locations
  Clone ID: MRT4577_80783C.1.pep
MPAMVEEGLVRRAAPEPHFLVVTFPAQGHINPARHLARRLLRATGARVTVCTAVSALRKMFPGAEADAEEGHRDGAGVRYVPYSDGYDDGFDGAVHDATRYMDQVKVVGSRTLGDVLARLRGAGRPATLVVYTLLLSWVXDVARAHAVPAALYWIQPATVLAVYLHFFRATGGVDAAVAAAGGDPWAGVRFPGL

SEQ ID NO: 348267 - protein, 344 aa, Zea mays
  Clone ID: MRT4577_80784C.1.pep
MASASHQSEPLDSAATSDTDAPSDNIPELPCPPYHIVTKPGQLPVEFLEPSAAQKLVIGFDCEGVDLCRNGALCIMQLAFPDAVYLVDAIEGGKELIQACKPALESDHITKVIHDCKRDSEALYFQFGIKLHNVMDTQIAYSLIQEQEQEGKKKTSDDYNYISFVSLLADKRYCGILYPEKEEVRTLLRQDPNFWTIRPLSDMMVRAATDDVRFLLSIYAKMMEKLSKVSLWRLAVRSELYCRCFCLSDNQFADWSPLPPVPDDIEADVYVPEADILSVLDVPPGKMGRVIGRKGSTIMAVKECCKVEIHIGGAKGPPDRVFIIGPEKEVRKAEAIFRGRMLEF

SEQ ID NO: 348268 - protein, 57 aa, Zea mays
  Clone ID: MRT4577_80785C.1.pep
RGRPFVKKRRPLPILHRKDPRTVSVEWELHPRFRLRASRMYKCNIYYVSLCQYVIWI

SEQ ID NO: 348269 - protein, 339 aa, Zea mays
  Clone ID: MRT4577_80786C.1.pep
MASHHSEPLDPADADDPSDNNPELPCPSYHIVTKPGQLPVEFLEPSAAQKLVIGFDCEGVDLCRNGALCIMQLAFPDAVYLVDAIEGGKELIQACKPALESDHITKVIHDCKRDSEALYFQFGIKLHNVMDTQIAYSLIEEQEQEGKKMTSDDYNYISFVSLLADKRYCGILYPEKEEVRTLLRQDPNFWTIRPLSDMMVRAATDDVRFLLSIYAKMMEKLSKVSLWRLAVRSELYCRCFCLSDNQFADWSPLPPVLIDIEADVYVPEVDILSVLDVPPGKMGRVIGKKGSPIMAVKKSCNVEIHIGGAKGPPDRVFFFGPVKEVRKPEAFFRGRMLEF

SEQ ID NO: 348270 - protein, 136 aa, Zea mays
  Clone ID: MRT4577_80787C.1.pep
PPLPPRPPPPPQREKQQCPPPPLLPPKKQQYPPPPLLPPKKQLYPPPLPLPPKKQQHHHPPPPLPTLPPKKRLASPPLLPGSEKQWVISSPSEPRFVPLPVWALMSGSGKRKKRSGCGGRVPALHTPAAAEETGRA

SEQ ID NO: 348271 - protein, 92 aa, Zea mays
  Clone ID: MRT4577_80788C.1.pep
IQRENPNFYNPFCLFWQTFTLLFGAYLGVPRPCLVRSVQKKPPTEGHLQACNPNRARALLSSLKTCLTLNNLHFHAHKMFIGSGKMFMKKKK

SEQ ID NO: 348272 - protein, 85 aa, Zea mays
  unsure (1)..(85): unsure at all Xaa locations
  Clone ID: MRT4577_80789C.1.pep
MDPTYCSPTENYRALCTGKKGVGKSGIALHYMGSMTHIIFPIFMLQGGDFTLGDGRGGESIYRXKFCDENYQIKLTGAGLMCMAN

SEQ ID NO: 348273 - protein, 145 aa, Zea mays
  Clone ID: MRT4577_8078C.1.pep
GPIQAPGGPYLGPPGKCQPWAIPRNIRSRGAKVLSLACPTSELTHINRGEPPGPFPGGKPALPAACMKPPSHGGKRLAHWALLRCPPPGRGGLGIGASSSGFSSVKGGYAVMLGGGDNARKTGEPGLPKAGDPQGQHAGKSHSCP

SEQ ID NO: 348274 - protein, 93 aa, Zea mays
  Clone ID: MRT4577_80790C.1.pep
FIRFHRSVHQLLRLQHQQHMYTNHQLLESERERLQAFHISIDRPSGHQIGMIKEQGMDTINREGVDYRLSLSGAPGLLGGGWGVEGGNTPAEA

SEQ ID NO: 348275 - protein, 96 aa, Zea mays
  Clone ID: MRT4577_80791C.1.pep
IRPFFYPCLIEGAASFRAFFSGKSRRPLRLSLPWGGKSWSFFFAWFPQNFWVKKFQWRNKKMSPPSPRVVGWGINFLYRGAFGRGLPLNLGFFFFF

SEQ ID NO: 348276 - protein, 104 aa, Zea mays
  Clone ID: MRT4577_80792C.1.pep
FVFFFVDSLLAQQIGKTCPFQNRPWGGGPTTGTSYYRKKLPAGGLNTPRNGTLTALKGGLELNTLALLAKEKSGRAHMVPRQINEAALIKRWPQIFVPARKNWG

SEQ ID NO: 348277 - protein, 90 aa, Zea mays
  unsure (1)..(90): unsure at all Xaa locations
  Clone ID: MRT4577_80793C.1.pep
PLLFFHPNXKLXSMVGFFKKACLPKQKLFYXXXNNIQQLSIFSLYPHYRFQFFFLNTFSIKQLHKSSSYYFILTFKYNSSITNSLFFLYI

SEQ ID NO: 348278 - protein, 46 aa, Zea mays
  Clone ID: MRT4577_80794C.1.pep
PSPYLCIGTVKLYTVLALVRPGPIVNPHKSIISMAKAPLFILIKKN

SEQ ID NO: 348279 - protein, 73 aa, Zea mays
  Clone ID: MRT4577_80795C.1.pep
MASKRTGVLCVHGSAGVLEDTDLSTISFVDEGEKAVANIAFLQQQQQLLPFSQLALTNPTTLLQQPIIDGAIF

SEQ ID NO: 348280 - protein, 119 aa, Zea mays
  Clone ID: MRT4577_80796C.1.pep
GLLLLCFILLCSFFLFYMFQEKNQGQLLIWWGPPFFLQRAHKFPKKKFAPILIDPTYGTGATAPKETFFKNAGGGISGNRWNRTKHFLGKDRNKRAPKTFFQRVRPLLTVKKRGGAPRK

SEQ ID NO: 348281 - protein, 101 aa, Zea mays
  unsure (1)..(101): unsure at all Xaa locations
  Clone ID: MRT4577_80797C.1.pep
GLIPRSASFCPWVIRAISARPWSPARRPTRRGRPPXYPSARRRLLRPGPGRPSPRRRRSPVAPRSPLLPVGAAPAHRRPAAASSTPPTVLPRVPPSGPRPR

SEQ ID NO: 348282 - protein, 89 aa, Zea mays
  unsure (1)..(89): unsure at all Xaa locations
  Clone ID: MRT4577_80798C.1.pep
PRVGTNDADFALKLVADANVYINDTIGSVYTAHAISDGVTKILKPCVTWFLLXKELDYLVEALICTARRYADIEVGSYMSSDIRGIESL

SEQ ID NO: 348283 - protein, 80 aa, Zea mays
  Clone ID: MRT4577_80799C.1.pep
MVSGAAPNPDGGGAQNTQRPPPLTQAGARTALATPPAVSGGAAHSASTSGGSAGSPPSSRSEQHAPDGAAKGPALGAAPA

SEQ ID NO: 348284 - protein, 367 aa, Zea mays
  Clone ID: MRT4577_8079C.1.pep
MEDNLPVNVREYQELAKKALPKMHYDYINGGAEDEYTLRENIAAYGRILLRPRVLIDVSKIDMSTSLLGYNMPSPIIVAPTGAHKLANPEGEVATARAAAACNTIMMLSFSSSCRIEEVASSCDAIRFYQLYVYKRRDVSATLVRRAESLGFRAIVLTVDTPVLGRREADIRNKMIAPPLSNLEGLMSLDDFDDAEGGSKLERFSRETLDPSLSWKDVEWLKSITSLPILLKGIVTAEDARKAVEAGAAGLIVSNHGARQLDYAPATISALEEVVKAVAGAVPVLVDGGVRRGTDVLKALALGAKAVMVGRPVFFGLAARGEAGARHVIEMLNKELELAMALCGCRSVAEVTRAHVQTEGDRIRALL

SEQ ID NO: 348285 - protein, 106 aa, Zea mays
  unsure (1)..(106): unsure at all Xaa locations
  Clone ID: MRT4577_807C.1.pep
PATIAPCRRRPHKWRRSPCSCFLVVCATLASGAASVRVGLTRIHSDPDTTAPQFVRDALRRDMHRQRSRSFGRDRDRELAESDGRHQHHGVRAHPQGPAQRXGSTS

SEQ ID NO: 348286 - protein, 120 aa, Zea mays
  unsure (1)..(120): unsure at all Xaa locations
  Clone ID: MRT4577_80800C.1.pep
PIHVNYRLSSICXNPMRQPYMIQHAIAASILPASXLFLQHSXSLLQQLPLAHLLXQNMMAQQLRQLVLANLAAYSQQQQFITFNQLAALNCASYXQHHQLPFSQLSAAYPQQSLSCNQLT

SEQ ID NO: 348287 - protein, 56 aa, Zea mays
  Clone ID: MRT4577_80801C.1.pep
MAFVARQPTARTVSTPGGSGPAKSPEVTAGGARTGRPAEGLAREPFAPTGTGRGQE

SEQ ID NO: 348288 - protein, 53 aa, Zea mays
  Clone ID: MRT4577_80802C.1.pep
NKYLEFSNRCVQRLKQVFYSVGASSEKFNPSSEDLPGAFEHIEGEIDDLDKVI

SEQ ID NO: 348289 - protein, 115 aa, Zea mays
  Clone ID: MRT4577_80803C.1.pep
RTRGARRAMRVPLAHVSAEARNKMGTNWGPEAAWIKTGTCMLDGNTLSYFGNSIPINLVEDEIAEVMLAVSAENYRITNRLDLDDKLHAGGPFDHVGLVSDNNQAAILKVKENNN

SEQ ID NO: 348290 - protein, 119 aa, Zea mays
  Clone ID: MRT4577_80804C.1.pep
HGIDVHLLVWLAACRLELLTSHAFVHISTSVHIYWILTSHASVHIPTSVGLYRAHSLFTYTGVHRAHSSATTSQYVSPCHTRIQRPSNEGAVDNVSNKQSSDEKNSKTKQRRSCRQCEQ

SEQ ID NO: 348291 - protein, 112 aa, Zea mays
  unsure (1)..(112): unsure at all Xaa locations
  Clone ID: MRT4577_80805C.1.pep
LGRLVKDMKIKSLEEIYLFSLPIKASEIIDFFLGASLKDEVFKIMPVQKQTRAGQRTRFKAFVAIADYNGHVGLGVKCSKEVATAIRGAIILAKLSIVRVRTGYWXGNKIGK

SEQ ID NO: 348292 - protein, 58 aa, Zea mays
  Clone ID: MRT4577_80806C.1.pep
CCVMHAHLLLPIMVKRRVPPHAFLEVETLLRILFLSSLCVLRCYRKNMCDSGIKKKEQ

SEQ ID NO: 348293 - protein, 25 aa, Zea mays
  Clone ID: MRT4577_80807C.1.pep
FERGTLAGARTVFYSSKWLLVEWIT

SEQ ID NO: 348294 - protein, 152 aa, Zea mays
  Clone ID: MRT4577_80808C.1.pep
MDAAVGRPSRAPIRCTSAETDSVDEVATSSHAAEANAGGTTEQEGNGSPVAAAAAYSPVVAGVDGIRIRRRPVTGPAVHYVGPFQFRLENEGNTPRNILEKIVWNKDVEVSQMKERRPLYMLKGPLEAAPPARDFVGALKASYDRTGLPALI

SEQ ID NO: 348295 - protein, 102 aa, Zea mays
  unsure (1)..(102): unsure at all Xaa locations
  Clone ID: MRT4577_80809C.1.pep
MMNVVKLSKRAGVVRTEGKGNLRMRTYACHMXTCTDDKLLQSTSKRVGVNNFYGFQDAIIFLDDVAIHFAXASALAMIGANTWVGRGTLQTKNMEEVLPSYC

SEQ ID NO: 348296 - protein, 251 aa, Zea mays
  unsure (1)..(251): unsure at all Xaa locations
  Clone ID: MRT4577_8080C.1.pep
MASRRCLLRLLSSRLVPQRSQPFAPGSIATRTLTTSSEALGPPAPGALPSPRLYYLSRCHFATRSSGDEDDEYEDEEEHYDEEDSEGEWGDDEEAVXEETEREXTEEEKVAEAAEIGYKVLAPLGADEKPFKPYEPVFAIVQIGSHQFKVSNGDSIFTERLKFCDVNDKLFLNRVLMLGSQTQTVIGRPILPDAAVHAVVEEHALDAKVIIFKKKRRKNYRRTKGHRQELTKLRITNIEGIDKPETAAVAA

SEQ ID NO: 348297 - protein, 227 aa, Zea mays
  Clone ID: MRT4577_80810C.1.pep
MPRLPGSQPALERQLAVLLSHFHPCCEPPRTIACVASAECLRTAAEEEAEMQLSLSTSPCAGGEKGGSSGGGHCVFCNIVAGTAQAFKLYEDDMCLCILDAKPLTSGHSLIIPKSHYPSVQTTPPTVLAAICSKLPLLGTAIMKATQCDAFNVLINNGEKAGQVIFHTHVHIIPRSKDDNLWSSETYSRSHISHGQETTHLVSSIKEIISSSPEDYSTVMSSTPKEL

SEQ ID NO: 348298 - protein, 88 aa, Zea mays
  unsure (1)..(88): unsure at all Xaa locations
  Clone ID: MRT4577_80811C.1.pep
MEAYAAMASPPTKGMGVDKLSYEIFSLLERTFLLGPGTPPRALLDGGRVRVLAIDGCGAGAEDALLAXXALARFEAGLRDRTGDPDAR

SEQ ID NO: 348299 - protein, 51 aa, Zea mays
  Clone ID: MRT4577_80812C.1.pep
MAPPRRALLVLAALLLSLSLEAASFHSDELLLNDDEEFEGVVDQPYIPSPT

SEQ ID NO: 348300 - protein, 70 aa, Zea mays
  Clone ID: MRT4577_80813C.1.pep
SIKHLILLFTRTDAADTHVTTAGSSPRANQHTTLIEGHYTVNFLLLHPPIHRCGLRHKDNVEVKITETDA

SEQ ID NO: 348301 - protein, 56 aa, Zea mays
  Clone ID: MRT4577_80814C.1.pep
FRPAARADAISAGREDVTPESQAYSPLKPRRGLLMVALETGGKSFSISAVLHSCSC

SEQ ID NO: 348302 - protein, 428 aa, Zea mays
  Clone ID: MRT4577_80815C.1.pep
MSGPPKRLHEENSHSTPAKRPLDDNSLYSSPSGKAIQSSSSDFHGSFEHDGRFAKIQRVEARDDKRPPLFHRMHGSSNFVDHTVLSDSRLEPKHNKDTRDNKADDRDTKADALDVYSDPSIEFQFNKIDSDVKIDNRADGNEIRADRRGHHDYKGDTKFDKDNHPIVASSLGWKDNKEHRGKRYFEQPSDNADWRFPRPGLQGTDETLKGLTSMEDRNSRDAHDSAVDNKAESKGEDKFRDKDRKKKDEKHRDFGSREGERNDRRTGIQLGGSGVERREMQREERDAEKWDRERKDSLRDKEGNDREKDSAKKDPSMVMEKDNTIVEKLLSDGPVKNAEHENTTTETKVLKDDAWKGHDRDPKDKKREKDLDAGDRHEQRSKYNDKESDDNGTEGDTEKDKVVFGSVQRRRMVRPKGGGSQTSQRDPR

SEQ ID NO: 348303 - protein, 103 aa, Zea mays
  Clone ID: MRT4577_80816C.1.pep
RGYFFLFIRGAPTPEKEIFAPPNPQKKKGFAVPGPKLPHFQKNKKRERRKCPRGGPASPNFTPEKTKKKTREPPPGASKKGKFWKYPYQGGRPDQRLKGPNSP

SEQ ID NO: 348304 - protein, 40 aa, Zea mays
  Clone ID: MRT4577_80817C.1.pep
SVVRMPESEATISLQGEVYVTFPSSPVDGQRKEGTILLLN

SEQ ID NO: 348305 - protein, 41 aa, Zea mays
  Clone ID: MRT4577_80818C.1.pep
CQLKQYAYWSPIITSMTLLLLTPVILYSTHHAGFLMQSRCF

SEQ ID NO: 348306 - protein, 261 aa, Zea mays
  unsure (1)..(261): unsure at all Xaa locations
  Clone ID: MRT4577_80819C.1.pep
MLAASTKVGSRLASPHASLSAGAAAAALASSPVLGSGMLPGAGFGETGSHHAADAPPPLPCSSSGDSREYYQWKRLVNQRQSMLDGGKVPAALGHHVFGAGCSSRNQHIYRYFSSSHQGSIWARSKILHDLPGYVKIVEVGPRDGLQNEKDIVPTPVKVELIRRLATSGLPVVEATSFVSPKWVPQLADAKDVMEAVRTIGGVRFPVLTPNLKGFEAAIAAGAKEIAIFASASEGFSKSNINCTIKESIAXYNDVALAAKE

SEQ ID NO: 348307 - protein, 67 aa, Zea mays
  Clone ID: MRT4577_8081C.1.pep
SEDGHSHQYEKGVVGSSGGGLAAGLHPPEIHGHTGRQSALALSERWASYTLLMTPEGGESRELKRSR

SEQ ID NO: 348308 - protein, 77 aa, Zea mays
  unsure (1)..(77): unsure at all Xaa locations
  Clone ID: MRT4577_80820C.1.pep
VFSPPSSAAASPAGAQRVLLYGRRAPFAGPLLEFSIGAVSAAVAVRTGCAIFHRRPLFLGARGLXSTRLESASTQGH

SEQ ID NO: 348309 - protein, 64 aa, Zea mays
  Clone ID: MRT4577_80821C.1.pep
PAGPGLPTGGHSLRLAGSYHCRQKRKHEDEDEGSFSSRPEEEEERRASGPVSYGGLPRPPLIVG

SEQ ID NO: 348310 - protein, 147 aa, Zea mays
  unsure (1)..(147): unsure at all Xaa locations
  Clone ID: MRT4577_80822C.1.pep
HIRSPTSPASSRIRRVGSGPDLASHGQDQDRIQRSLTDRQARGQGRPADARDKSSATTQTTEGIPPDQXHVICAEKQLEDGRTLADYYMQKESTLHLVLRLRGGMQIFVKTLTRKTITLEVXESLDTXIDNVKAKIQDREAIPPDQQ

SEQ ID NO: 348311 - protein, 53 aa, Zea mays
  Clone ID: MRT4577_80823C.1.pep
MAVLARVLVCDSTRLRAWLWRRPLAFRARCLLKARQHSPVLAAAGTDFSVCEA

SEQ ID NO: 348312 - protein, 36 aa, Zea mays
  Clone ID: MRT4577_80824C.1.pep
VFECASLGFYSSSYDHFHQNLNLDIRKLSLLKYKPL

SEQ ID NO: 348313 - protein, 53 aa, Zea mays
  unsure (1)..(53): unsure at all Xaa locations
  Clone ID: MRT4577_80825C.1.pep
KNGLLLLIFLNLLTPLYRFNFSSLAPPNYNFLGRXPQLISLANLLHNPTLITS

SEQ ID NO: 348314 - protein, 148 aa, Zea mays
  unsure (1)..(148): unsure at all Xaa locations
  Clone ID: MRT4577_80826C.1.pep
SVISTAEPAIAYYPLSTWLPNLGVVSLDFDATMVVADLAGVLEGAHGGYGMGHQFVRHSERCFVVVHVGDGFALQPVXESEAVGLGLELFRPSLVDXPYVVVYYNLDLTKGXDIWNTFKERVQSEGIEPXCISAIYRQGTLDVIHTGC

SEQ ID NO: 348315 - protein, 107 aa, Zea mays
  unsure (1)..(107): unsure at all Xaa locations
  Clone ID: MRT4577_80827C.1.pep
MCNSYEMVALLMITDYSARTPVVKXTTWRLADIAHDIVLFETIAHKCVESAKGYIHGEQYTSYCKTVDQQAYFYAKNSKIDPKDTFAFNIYGTGPSNISYYSSCNWK

SEQ ID NO: 348316 - protein, 227 aa, Zea mays
  Clone ID: MRT4577_80828C.1.pep
MAASTASRIFTPFLHRHQRRTKAVVVAAASPPDAEPTPATADGAGPGKKKTVDTRIHWSNPDEGWVGGKAKKEGDGRGSSKNEPLGGRFLGIAPEADIEEIKTAYRRLSKEYHPDTTTLPLKVASQKFIRLREVYNVLSKEETRRFYDWTLAQEAESRRLQQLRSRLEDPYEQDIINYKPVPDMVDRLGGKNMKLSDQAMTALTIDIVIIIISICCIIYAVFFKEQY

SEQ ID NO: 348317 - protein, 254 aa, Zea mays
  Clone ID: MRT4577_80829C.1.pep
MLLPAQTLTHTFPMAASTASRIFTPILHRHQRRTKAVVVAAASPPDAEPTPATADGAGPGKKKTVDTRIHWSNPDEGWVGGKAKKEGDGRGSSKNEPLGGRFADLINNAAESHYQFLGIAPEADIEEIKTAYRRLSKEYHPDTTTLPLKVASQKFIRLREVYNVLSKEETRRFYDWTLAQEAESRRLQQLRSRLEDPYEQDIINYKPVPDMVDRLGGKNMKLSDQAMTALTIDIVIIIISICCIIYAVFFKEQY

SEQ ID NO: 348318 - protein, 231 aa, Zea mays
  unsure (1)..(231): unsure at all Xaa locations
  Clone ID: MRT4577_8082C.1.pep
MASRRCLLRLLSSRLVPQRSQPFAPGSIATRTLTTSSEALAPPAPGALPSPRLYYLSRCHFATRSSGDEDDEYEDEEEHYDEEDSEGEWGDDEEAVXEETEREXTEEEKVAEAAEIGYKVLAPLGADEKPFKPYEPVFAIVQIGSHQFKLFLNRILMLGSQTQTVIGRPILPDAAVHAVVEEHALDAKVIIFKKKRRKNYRRTKGHRQELTKLRITNIEGIDKPEAAAVAT

SEQ ID NO: 348319 - protein, 159 aa, Zea mays
  Clone ID: MRT4577_80830C.1.pep
GVGGSGDGGGRGATACEVLLFHHEDMGIPYEIAKLGIRQGMWGCVKRIEPGLRAYQQARAAGAPPSRSALMARINTKVSADGFTRQSSSSSSGGDGPETADDAQETENKKPATRSHAAARLLVLGGAVALACCTLDQGLLTKALIFGVARRFVGQRKTL

SEQ ID NO: 348320 - protein, 86 aa, Zea mays
  Clone ID: MRT4577_80831C.1.pep
APLRKFYPLGGGTTLKGPPGGARNKWPMVKKGERLGNQKPGDPFNFKPGKKGQGGQGLFFLDLKPKPPRFFCQRVLNPHFFPRPNE

SEQ ID NO: 348321 - protein, 222 aa, Zea mays
  unsure (1)..(222): unsure at all Xaa locations
  Clone ID: MRT4577_80832C.1.pep
DEVHWVXEFPFVFDTREYIIARRIWKLGGAYYCVTKGIPCSSIPRRSRPRRVDLYYSSWCIRAVESRRGNGGGRGATACEVLLFHHEDMGVPFEIAXLGIRHGMWGCVKSPSPSLAPWVGSDGVRAVGGGQGAGAAHGVGGGLGDGTPRGASSSGGGDGLETADDAQETENKKPATRSHAAARLLVLGGAVALACCTLDQGLLTKALIFGVARRFVGQRKTL

SEQ ID NO: 348322 - protein, 179 aa, Zea mays
  Clone ID: MRT4577_80833C.1.pep
TMKVHWVRKFPFFCSDREYIIARRIWKLGVRYYCVTKGIPCSSIPRRSRPRRVDLYYSSWCIRAVESRRGNGGGRGATACEVLLFHHEDMGIPYEIAKLGIRQGMWGCVKRIEPGLRAYQQARAAGAPPSRSALMARINTKVSADGFTRQSSCSSSGGDGPETADDAQETENKKPATRS

SEQ ID NO: 348323 - protein, 300 aa, Zea mays
  Clone ID: MRT4577_80834C.1.pep
MQKDIWNDEEDSVLIQAHKEVGNRWAEIAKRLPGRTENSIKNHWNATKRRQFARRRSRASASTSTSKGPPKPGTLLQNYIKGLGIGPVSNRSAAPLPEPTTPPPPPPSSPETPGGARSAKQAGESTTLEVERRSPSCDVLVDSSQCTTILPPTSVHGYDEYSNCSGESHQSCEVLLAPIISCGDDAFSVGMCGGGGGLFDTDDADAFLQAYGVAADDVVDGIGMGYYVFNDGHVDHAATVDAEIDMETMMMMWDDDDDYAAALGLGCAAGPAGVESAVRVKEEMDLQVETMVAATHKCGD

SEQ ID NO: 348324 - protein, 80 aa, Zea mays
  Clone ID: MRT4577_80835C.1.pep
ITVAGTAAATSVRTQPARRSELVVPAADSMGGPAPAKEEKGLGETIFSFIFKKDQLAETDPLLNKVGAAPADYSRAKTTA

SEQ ID NO: 348325 - protein, 230 aa, Zea mays
  unsure (1)..(230): unsure at all Xaa locations
  Clone ID: MRT4577_80836C.1.pep
MPVSPRRHLRRIARRVRAMLPFAAEPEVSDGDAAAGADRRAWEPPFDASSPAPPMSYPITGLAALASRAYLSAEANFHLPFNRASVPAPASPLPQRRRVLVCHDMEGGYRNDAAPQGGDKPDAYALWHWHLVDVFVYFSHYLVTLPPPCWINAAHLHGVKVLGTFIAEWDEGVKICKEMLATEASAQMYAERLTELAHTLGFDGWLINIEXIFGVHFIDNLEXFVKHLTM

SEQ ID NO: 348326 - protein, 142 aa, Zea mays
  unsure (1)..(142): unsure at all Xaa locations
  Clone ID: MRT4577_80837C.1.pep
QPRACDGLPLYGAILFKLLSVVFHLFDWDNPXGFTHLICVAKXPGFPRWFXAKWPENTGPSQHFGILKETWFPPWVATLTAPSVAFSPSFAAPFARGLAPFSCPFFPFFLAVFSGFPLHFLNRGFPLGFRFFPVWPLSGAQF

SEQ ID NO: 348327 - protein, 54 aa, Zea mays
  Clone ID: MRT4577_80838C.1.pep
LSRLGNPIAITFVPTALLSTPGKQPRLISICRVAAQSNMFPKCPMAFKKKKKKI

SEQ ID NO: 348328 - protein, 88 aa, Zea mays
  unsure (1)..(88): unsure at all Xaa locations
  Clone ID: MRT4577_80839C.1.pep
TKPPPQITPFLFKPKGPAPGGAANDGGGGAHPPRSGGPXGGPKSGTXPPWGGSRGGGPPSRGPGQRPCPKQPGQKHGLAVKPRGRDGA

SEQ ID NO: 348329 - protein, 110 aa, Zea mays
  Clone ID: MRT4577_8083C.1.pep
PRVRLEDGHDSALQPCSMSERDSAMGLASLGADTQSCVDVHSDNWTSVSISGRDEVLTAAKIASRKRSNPGDRIEDLDASLVGSPNQDECSGGRCSVRPRLILEISSDSD

SEQ ID NO: 348330 - protein, 195 aa, Zea mays
  unsure (1)..(195): unsure at all Xaa locations
  Clone ID: MRT4577_80840C.1.pep
RGRKKGKQKAGGKGGQKRKPSRGQRARSXREGREQRTTRTRGKAATSRTAQPRQRXKRDXQATRRQKERXKAPGRASHXNSHQEXSKNRQDKSREKHAKATKGQKQXPRDRNSRHKDKQQHLGAKAPKKDTPPPPTTREEPQKHARTKRKTQDHPRSRTPDTRERSEQKRDKTKNGGDSSHPPPPHPSRKAARGN

SEQ ID NO: 348331 - protein, 65 aa, Zea mays
  Clone ID: MRT4577_80841C.1.pep
GAGINRRRSSSPWLPQSLPPMAGWMDGWMMGGERKGPKREWVPLCPIWDPALAWEVFYFFFFFFF

SEQ ID NO: 348332 - protein, 134 aa, Zea mays
  Clone ID: MRT4577_80842C.1.pep
GLFPQYKSEEQEDGWFGQWFGWCSLKGGLKTTLSCLLKGITKTKEAKRNNNKKACKNRQLNPGGKKRFSGSLFFLLARKEEDERFAIKAPVFFVHTSLLDQIAAARKASFFFLACILREGFREQTCCHRARGGS

SEQ ID NO: 348333 - protein, 49 aa, Zea mays
  unsure (1)..(49): unsure at all Xaa locations
  Clone ID: MRT4577_80843C.1.pep
TPVRKKKKXKKKKKKKKKKKKKKKKKGKKKKKRTKNKKQQTCNKNKPIL

SEQ ID NO: 348334 - protein, 158 aa, Zea mays
  unsure (1)..(158): unsure at all Xaa locations
  Clone ID: MRT4577_80844C.1.pep
MKRPQVVHDGQRVPTGTKIVFSLEALGRERDKTVWSDDPGEFKPERFRACGGGESTTAKEKLLSMAAGDETMKMMPFGAGRRMCPAISMSLLHIGYFMANLVREFEWGEAAEGEHAVELRXCQRPPVQLXMERPLRARLVPRRRPVVVADRRPRGKSL

SEQ ID NO: 348335 - protein, 53 aa, Zea mays
  Clone ID: MRT4577_80845C.1.pep
SKPFKKGGSLCWLSLAICIVELLICIKFGHGKCCSNFSAYATCKCCLHLLEAR

SEQ ID NO: 348336 - protein, 136 aa, Zea mays
  unsure (1)..(136): unsure at all Xaa locations
  Clone ID: MRT4577_80846C.1.pep
MAAIITTMSTPTRARVVMADVADLLVRPSSYVLPKRPAHRNITVTYGKDXLDAIATXYGKPTVAAPDHNGAGCRYKDVNKPAFNNMGACSNIRIFKDGLGCGSCFEIKCDKPVECSGKPVVVHITDMNYEPIAAYH

SEQ ID NO: 348337 - protein, 82 aa, Zea mays
  Clone ID: MRT4577_80847C.1.pep
LLTRTAPRARGEFYIETRIHQGREARCCTPARPAQSRGSCMEKRWSYRGTDPSEMSIDIAEPRAQRMSLAAEDLSTWAHRVI

SEQ ID NO: 348338 - protein, 57 aa, Zea mays
  Clone ID: MRT4577_80848C.1.pep
PTGAQPTGPQDKLEEKGKTKPEQQRTALLDTREMSPTSLPEQHTSMRTEKATASQAA

SEQ ID NO: 348339 - protein, 31 aa, Zea mays
  Clone ID: MRT4577_80849C.1.pep
SFEVFIKGRLSIPGLLDFHETRNTKIGIFIK

SEQ ID NO: 348340 - protein, 236 aa, Zea mays
  unsure (1)..(236): unsure at all Xaa locations
  Clone ID: MRT4577_8084C.1.pep
MASRRCLLRFLSIRLVPQRSQPLAPISTATRTLTSLSEALGSPAPRALASPRLYYPSRCHFATRSSGDEDDGEDEEEHYDDEGSDGEWGDDEEVVAEAAEIGYKVLGPLRPDDKPFKPYEPVFAVVQIGSHQFKVSNGDSIFTERLKFCDVNDKLVLNRVLMLGSQAQTVIGRPILPDAAVHAVVEEHALDAKVIIXRCKSXSXXRRTKGHRQELTKLRITNIEGIDKPESKVSVL

SEQ ID NO: 348341 - protein, 82 aa, Zea mays
  Clone ID: MRT4577_80850C.1.pep
CVYPIFLICQNGNTSKAKKGRRKQSIFFNAFLYTEDDDGLLHVWTISFNAFSLFFCPLDTPTALRVCRLIRQPPDVIHHYSQ

SEQ ID NO: 348342 - protein, 88 aa, Zea mays
  Clone ID: MRT4577_80851C.1.pep
GQKMHLQYIKSFKGSAYTLCLLQIQRMHMTRPLLLYTRIIDMEAWNRGLSQSQCDSEDRLKGMTASDYMIQTEFMVQKVSFATSDITV

SEQ ID NO: 348343 - protein, 125 aa, Zea mays
  unsure (1)..(125): unsure at all Xaa locations
  Clone ID: MRT4577_80852C.1.pep
DLQTLLVLXKRVPPKGKNLLVVGTTSEVGFLESVGMCDVFSVTYHVPKLKKEDAKKVLHHLDVFDDGDLDAAAEALDDMPIKKLYTLVEMAAQGPTGGSAEAIYAGEEKIDINHFFSILSDIIRY

SEQ ID NO: 348344 - protein, 741 aa, Zea mays
  Clone ID: MRT4577_80853C.1.pep
MAGRYYQGQGGGGGTSMEVVSTPNQELALTNCAYVCPADLRRFPNALAVVADSWVFTLREHNAVASGRIALNAIQRRQAKVSAGDSVTVSSFVPPDDFKLALLTLDLDYAKARANRNDELDAVVLAQQLRKRFLNQVMTLGQRVPFEFHGTNYVFTVNQALLEGQESSTPLDRGFLSSDTYIIFEAAPNSGIKVINQKEAASSKLFKHKEFNLEKLGIGGLSAEFTDIFRRAFASRVFPPQVVSKLGIKHVKGILLYGPPGTGKTLMARQIGKLLNGKDPKIVNGPEVLSKFVGETEKNVRDLFADAENEQRTRGDQSDLHVIIFDEIDAICKSRGSTRDGTGVHDSIVNQLLTKIDGVEALNNVLLIGMTNRKDLLDEALLRPGRLEVHIEINLPDENGRFQILQIHTNKMKENSFLSPDINLLELAARTKNYSGAELEGVVKSAVSFALNRQITMDDLTKPLDEESIKVTMDDFVNALHEITPAFGASTDDLERCRLRGIVDCGKAHKHIYQRAMLLVEQVKVSKGSPLVTCLLEGPAGSGKTAMAASVGIDSDFAYVKIISAETMIGFSESSKCAQICKVFEDAYKSQFSIIVLDDIERLLEYVAIGPRFSNLISQTLLVLLKRVPPKGKNLLVIGTTSEVGFLESVGMCDVFSVTYHVPKLKKEDAKKVLHHLDVFDDGDLDAAAEALDDMPIKKLYTLVEMAAQGPTGGSAEAIYAGEDKIDINHFFSILSDIIRY

SEQ ID NO: 348345 - protein, 82 aa, Zea mays
  Clone ID: MRT4577_80854C.1.pep
KKSTISPQIELNSQTPPGDLFLTTKSPETYLILPPPRSNFAKTPGGFIKIQKSFLKTPHKKIFSLNPTKILIPTPRVTFSIS

SEQ ID NO: 348346 - protein, 99 aa, Zea mays
  unsure (1)..(99): unsure at all Xaa locations
  Clone ID: MRT4577_80855C.1.pep
LSSPCRNYSCRTGTLSIFYYDTTNVIHLXLXHWIALVLGADVIYFAFKNHNESEIDHLDRLDSWIAIXTITLNGYXCRIGFITFFLPRGAPNGKNAALP

SEQ ID NO: 348347 - protein, 39 aa, Zea mays
  Clone ID: MRT4577_80856C.1.pep
KKIFKKQKMVKYKEIYHMTHTSYINNLYQSTQTLMLQLF

SEQ ID NO: 348348 - protein, 32 aa, Zea mays
  Clone ID: MRT4577_80857C.1.pep
RGRPWACFKWEGKDYIYFPVGKNAKMLILSQP

SEQ ID NO: 348349 - protein, 72 aa, Zea mays
  Clone ID: MRT4577_80858C.1.pep
MPDFIGQIDDWGVFGVTHFVVAGVEFGKRFIAQKKCQVCGGSGLVTKNDYYVRCQECGGFLPWQSWRRFFTG

SEQ ID NO: 348350 - protein, 80 aa, Zea mays
  Clone ID: MRT4577_80859C.1.pep
PWFPHFCLGPHFFLFLLAFPFFPPELFFFRFWSSVNLSPQEETIFPPGAPFRISRFSSSWSPKGGCWFAPGSRFEINSPT

SEQ ID NO: 348351 - protein, 101 aa, Zea mays
  unsure (1)..(101): unsure at all Xaa locations
  Clone ID: MRT4577_8085C.1.pep
CPLENGLLXWSNNCTAKAVTSCKASDFHYYKIEGVEHYMSKYTTGDRVSESTCGNKCTKDCKCVGYFYHKENSRCWVAYDLQTLTRGANSSHVGYIKVPNK

SEQ ID NO: 348352 - protein, 85 aa, Zea mays
  Clone ID: MRT4577_80860C.1.pep
MVVVSFLIVQIAQKKCQVCGGSGLVTKNDYYVRCQECGKKSPMMAYLWRIKCDNGLLSMFLPQVVFFHGSLGEDSSRGERGPLGP

SEQ ID NO: 348353 - protein, 102 aa, Zea mays
  Clone ID: MRT4577_80861C.1.pep
GGGIILSIGIRVDYYRSPLINSSSIASSTILSDFSVCHIRIFTMNALQRHFDSICCALEQRSSLMASGSLLTSVPEALSRFSGACILSSDRSLCHSCILHRR

SEQ ID NO: 348354 - protein, 48 aa, Zea mays
  Clone ID: MRT4577_80862C.1.pep
SKAQGNCALNILRRKVYSRPEVTTLNSLRRPVPHISERVQKKPDSKNY

SEQ ID NO: 348355 - protein, 80 aa, Zea mays
  Clone ID: MRT4577_80863C.1.pep
LGGLGVAYPKGARRGFGITRFFCYVGGSRLKNGFGACIFVLIGGNLSVSSGPTHMGCRPPFERNTPVYARVPLCFGVLFG

SEQ ID NO: 348356 - protein, 103 aa, Zea mays
  Clone ID: MRT4577_80864C.1.pep
RHQWNLSGKREMNAFVPNIFDSLCQWNRKPLLIFLEVGRHIYYSPMPCVFNSQFKGLSSPKNALCRAQRHKVLALKFPNLWAPPYLWHQKALCFCFAMCRFFS

SEQ ID NO: 348357 - protein, 38 aa, Zea mays
  Clone ID: MRT4577_80865C.1.pep
MHSIQSTHAFGFCSWRPHGGAKLKPYRHSFYRIRTWLT

SEQ ID NO: 348358 - protein, 30 aa, Zea mays
  unsure (1)..(30): unsure at all Xaa locations
  Clone ID: MRT4577_80866C.1.pep
FSXYSLNTYSVSVLAQSPVMYFIITTGTRN

SEQ ID NO: 348359 - protein, 103 aa, Zea mays
  Clone ID: MRT4577_80867C.1.pep
AGTPASAPADSPKARSPAAPAKDLESAATRTAPANAPQAASISSVAAAPSSSSSMKSGPPAAPISSASTPSSSTDEELSPSPSVSIDEVASPVSDGAAYGSGA

SEQ ID NO: 348360 - protein, 875 aa, Zea mays
  unsure (1)..(875): unsure at all Xaa locations
  Clone ID: MRT4577_80868C.1.pep
LHASGESSPEKQTSYQCRGSFLEVHNEQINDLLEPSQRDLQIRENASNGIHVENLTDEYVSTADDISQILMKGLSNRKVGTTSMNLKSSRSHVIFTCVIEAWSKGSSNGFSSSRTSRITFVDLAGPDTDELGAAKHSTKEERHLKKSLSRLGKLVNVLSETPESHKVDLPYEQSRLTHVLKDTLGGNSRVIFLCSISSEHRCRSGTLSTLRFGERAKLMPNKPVINEISEDDVNGLSDQIRQLKDELIKNKSGDTTTCKARYFSAQSARESLHTLRVSLNRSLIFPHIEVDSEEEMDVDEEDVQDLRDQISKIHSSSEDTLDDFMDAESGDESTPCSVGRSEDDQVIIDDFEGPQQEEQKEVSNNTNANEDLGSDRKSNLSIIASTRLSPIQDPTLCSSPKIHNKARMSITSLGLSPNRMTIGXSIXDYDLEMWSNSAYRTSIRSSKIVSMYTACMGTEFERVLIEYHQQNPAPRKSFIGLSFDHFARQSVAKISSAVQALPEDQGNNLCSFCKKPMNTNDNQTENVNLDKQIKDGNITKEIASKKETELEALCEEQRAKIQELSSLIDQYKNRSEELTSEGKVSVSLSVNEREVLLAEIQSLREQLKNQTTVSTTGSLLDQLRNGSTDQEYELDKERQKWMESESKWISLTEELRVDLESNRMHAEKTEMELCNEKKCTAELDDALQRAMYGHARMVEHYVELQELYNDLLEKHRRVMEAISEVKRAAARAGRKGCGTAFAAALAAELSTVRIDREKERAQLKEQNRRLRIQLRDTAEAVHAAGELLVRLRETEEASTLEKERTAALLQENEKLKKQLEKLRKKHEMELETMKVHLAESRLPESALGAFYHHENERTPDDDLSWRAAFASAYSD

SEQ ID NO: 348361 - protein, 318 aa, Zea mays
  unsure (1)..(318): unsure at all Xaa locations
  Clone ID: MRT4577_80869C.1.pep
DQVIIDDFEGPQQEEQKEVSNNTNANEDLGSDRKSNLSIIASTRLSPIQDPTLCSSPKIHNKARMSITSLGVSPSKIRVSDSPGDRNVEMCTNSAFRSSLQSSKLSPTDSLAASLQRGLHIIEYHQQNPAPRKSFIGLSFDHFARQSVAKISSAVQDQGNNLCSFEELRVDLESNRMHAEKTEMELCTDKKCTAELDDALQRAMNGHARMVEHYVELQELYNDLLEKHRRVMEAISEVKRAAARAGRKGCGTXLGAALAGELSTVRIDREKERAQLKEQNKRLRMQLRDTAEAVHAGGELFVRLRETEEASTLEKERT

SEQ ID NO: 348362 - protein, 46 aa, Zea mays
  unsure (1)..(46): unsure at all Xaa locations
  Clone ID: MRT4577_8086C.1.pep
GRALVTKIDRRSGKDLXEXEPKFLKNGDPGMVKMSPTNFMVEETFS

SEQ ID NO: 348363 - protein, 281 aa, Zea mays
  unsure (1)..(281): unsure at all Xaa locations
  Clone ID: MRT4577_80870C.1.pep
KKSKTPQEFFADFMMGGVSAAVAKTAAAPIERIKLLVQNQGEMLKSGRLATPYKGIADCATRTYADEGLVAFWRGNTANVIRYFPTQALNFAFKDYYKSLFSYSQAKDGYALWMAGNLASGGAAGATSLLFVYSLDYARTRLAADNKGAAKGGVAGERQFNGLLDVYKKTLATDGIAGLYRGFLPSVVGIVVYRGLYFGMYDSLKPVVMQGSLQGSFLASFLLGWGVTTGAGIASYPLDTIRRRMMMTSGEKVHYNGMLDAXSSIVKGEGVASLSGELTNI

SEQ ID NO: 348364 - protein, 119 aa, Zea mays
  Clone ID: MRT4577_80871C.1.pep
MARKFFVGGNWKCNGTAEEVKKIVNTLNEAQVPSQDVVEVVVSPPYVFLPLVKSTLRSDFFVAAQNCWVKKGGAFTGEVSAEMLVNLDIPWVILGHSERRAILNESSEFVGDKVAYALA

SEQ ID NO: 348365 - protein, 74 aa, Zea mays
  Clone ID: MRT4577_80872C.1.pep
ASKHWMPMPLPSSSSPSCRHPRFGPFLQELATGLHSDCTVRLTKHHLCSAERLLALSPTPPSTTNHRFFKKLTT

SEQ ID NO: 348366 - protein, 172 aa, Zea mays
  unsure (1)..(172): unsure at all Xaa locations
  Clone ID: MRT4577_80873C.1.pep
VVGTFSSIHDHQWRYLVLGQACFHLGLMEDALVLLQTDRRLASAMFRRESVCWSEDRFPPLSNLLAPANTRAESVSQLRAHVKLVLHRRXVAALDAGLPDEVVRHFNKVLDTCRSVLSHPFAMACLGELSIMMPLLRKKREGESSPEIGVAATALTAMQTKIVRTRPPRAPH

SEQ ID NO: 348367 - protein, 255 aa, Zea mays
  unsure (1)..(255): unsure at all Xaa locations
  Clone ID: MRT4577_80874C.1.pep
PAGSKYVNHVLXQALRLYNLINAKGRLAKLALALAVSVFTSAGLYLLPFAVPCTPCDPAFGDACPTVGKSGNFKQFNCPTGYYNDLASLLHATNVDATRNIFSTGTAGEFRLDSLLIFFGIYCVLGLFTFGIAVPSGLFLPIILMGSAYGRILALVLARFVRIDHGLYAVLGAAALMSGSMRMTVSLCVIFLELTNNLLLLPITMFVLLIAKTVGDAFNPSIYEIILDLKGLPFLEPKPETWMKDLAVGELAAAN

SEQ ID NO: 348368 - protein, 157 aa, Zea mays
  unsure (1)..(157): unsure at all Xaa locations
  Clone ID: MRT4577_80875C.1.pep
TLHAAARRKKAPAAARATTAAXSPXKXXXAGXRXXXATRTTTPXXXAXATPRAGGGPXRAXXXXXPTPPNDXTXXRXSPXKEXNXXREKTRRXXTDXXTHADTDXXNEGAGTAGPTGANEXTKDXXESDDTAEKTETPGGGARKGGQRNTDKEERRT

SEQ ID NO: 348369 - protein, 103 aa, Zea mays
  Clone ID: MRT4577_80876C.1.pep
PPWLNHVYDAIETSMIGLGASPSCIERERGVVGGGSTETPWILRRSLILTAEPLFAMESPPPTDPLCDEQVTEEPGALQVEDFKEELAEEHEEPSGKTVLPQG

SEQ ID NO: 348370 - protein, 98 aa, Zea mays
  Clone ID: MRT4577_80877C.1.pep
MKTILSNQTVDIPENVDITLKGRTVIVKGPRGTLRRDFNHINVELSLLGKKKKRLRVDKWWGNRKELATVRTICSHVQNMIKGVTLGFRYKMRSVYAH

SEQ ID NO: 348371 - protein, 31 aa, Zea mays
  Clone ID: MRT4577_80878C.1.pep
PIVNLFIQFTIPFLDPFFAIKLYGIPPYSFH

SEQ ID NO: 348372 - protein, 88 aa, Zea mays
  Clone ID: MRT4577_80879C.1.pep
DPVRLCHGEQRVRPCLPGVGATAATEAAKDRAAQEVPVSTTLPNSGGEIPSNMCCDCYVLPTPMSDFVRTSSAALLVSMGGLERFRPS

SEQ ID NO: 348373 - protein, 117 aa, Zea mays
  unsure (1)..(117): unsure at all Xaa locations
  Clone ID: MRT4577_8087C.1.pep
LVPGFGFEPDDAWTAHMNLFQEFLDLSRGVRRLGSAAADLSHLGLGIPEASWEYRLXPWDMAAGVLIVAEAGGVVTPWXGGEFXVFGRSVLVSXGLVPGXLLXRXAPPVVLCGCPSR

SEQ ID NO: 348374 - protein, 595 aa, Zea mays
  Clone ID: MRT4577_80880C.1.pep
PGPYLWKSYKEIYDEVLQAGSALQKLGVQPGSRVGIYGANCPQWIVAMQACNGYSLVCVPLYDTLGAGAVDYIIDHAEIDVVFIQDKKIKEILSPNCKSAKRLKALVAFTSATTEQNKEADQIGIKMYAWDDFLKVGKDNPRQPCPPQASDICTVMYTSGTSGQPKGVMLTHESHAMYVKGVDLFMDQFDDKMTTDDVFLSFLPLAHILDRMIEEYFFHKGASIGYYHGDLNALRDDIVELKPTLLVGVPRVYERIYEGILKAIAELRPLRRVIFNALYNRKLASMKAGYSHKTASPFADMLAFRKVKARLGGRLRLLISGGAPLSNEIEEFMRVTTCAYFIQGYGLTETLGPSTVCYIDDMALVGSAGVPATYTEIRLEEVPEMGYNPLGVPSRGEICIRGKSLFAGYYKSPELTNEAIVDGWFHTGDIGEMTPDGILKVIDRKKNIFKLSQGEYVAVEYLEKVYGFPPLVEDIWVYGDSFRSSLVAVVNPHQENTMKWAESNGYKGSFDEICKLEGLKEYILKELAAVAQKNKLRGFEYIKGVVLDPVPFDIERDLVTATMKKKRKNMLNYYQSEIDTIYKKLEAQKSAARAK

SEQ ID NO: 348375 - protein, 671 aa, Zea mays
  unsure (1)..(671): unsure at all Xaa locations
  Clone ID: MRT4577_80881C.1.pep
MEANPKNTFTIKVEDGKPGKDGRLAVGPVFRSVLAKDGFPQLEPDMKTSWDVFRVAAVKYADNRMLGWRPFKDGVPGPYLWKSYKEIYDEVLQAGSALQKLGVQPGSRVGIYGANCPQWIVAMQACNGYSLVCVPLYDTLGAGAVDYIIDHAEIDVVFIQDKKIKEILSPNCKSAKRLKAXLVAFTSATTEQNKEADQIGIKMYAWDDFLKVGKDNPRQPCPPQASDICTVMYTSGTSGQPKGVMLTHESHAMYVKGVDLFMDQFDDKMTTDDVFLSFLPLAHILDRMIEEYFFHKGASIGYYHGDLNALRDDIVELKPTLLVGVPRVYERIYEGILKAIAELRPLRRVIFNALYNRKLASMKAGYSHKTASPFADMLAFRKVKARLGGRLRLLISGGAPLSNEIEEFMRVTTCAYFIQGYGLTETLGPSTVCYIDDMALVGSAGVPATYTEIRLEEVPEMGYNPLGVPSRGEICIRGKSLFAGYYKSPELTNEAIVDGWFHTGDIGEMTPDGILKVIDRKKNIFKLSQGEYVAVEYLEKVYGFPPLVEDIWVYGDSFRSSLVAVVNPHQENTMKWAESNGYKGSFDEICKLEGLKEYILKELAAVAQKNKLRGFEYIKGVVLDPVPFDIERDLVTATMKKKRKNMLNYYQSEIDTIYKKLEAQKSAARAK

SEQ ID NO: 348376 - protein, 55 aa, Zea mays
  Clone ID: MRT4577_80882C.1.pep
RIRSLNPPIPTEDYYIEHVQTLPLPNKCFQTQPNQPHKTNLVNPRRLAATLLKLT

SEQ ID NO: 348377 - protein, 87 aa, Zea mays
  Clone ID: MRT4577_80883C.1.pep
GPEGNWQPKTSKKCGWWKTNQFLCPTPLEGRKSPQKVKFWSWNPCSNPRGMQMLTYFPAFKPESANNASCEHAALINRAEKKCVFPP

SEQ ID NO: 348378 - protein, 175 aa, Zea mays
  unsure (1)..(175): unsure at all Xaa locations
  Clone ID: MRT4577_80884C.1.pep
XKXALXTSXMXAQTVXXXXXTXLXXXXDXWSPIXXXRPXWDRXSXXRHXGSXIXVVKMXFKXAYYWLALXILXXLXLXNXTXXWGXCXPKVAXXXGMXXGXIXXWXGXPFXXXXSPXXRPFXXXXRXSXXLLLXXFXXFXXEQXFGXXXXLXLRWSXPXXXGNXXPXXXLKNXXX

SEQ ID NO: 348379 - protein, 108 aa, Zea mays
  Clone ID: MRT4577_80885C.1.pep
FGLARHELRAGPCFECWPVVLQGPARHCGPGSCRPVTKTGRSNRRSSHTLTQTVSLITADVVTQAPHPFSPTSLRRPPPSIRISLWISTSSVLASQGGRSMEVGLGPG

SEQ ID NO: 348380 - protein, 145 aa, Zea mays
  unsure (1)..(145): unsure at all Xaa locations
  Clone ID: MRT4577_80886C.1.pep
NPRARREEAGKGEGPASGXXXGTTHXGXGARQHDRGENXANDQXNRTTPXXXAXTDXERXXGAAAKNQGARNPSNTGXEAKXPXGRRXSDAXXQREXKPRPPKXXXGPXEKPTXXGQHKXEDKHFAAEENSSMGLTKKRENAEAY

SEQ ID NO: 348381 - protein, 65 aa, Zea mays
  Clone ID: MRT4577_80887C.1.pep
ERSPLHCPSAVLSQSHSPGLSGHGAPALPEGTPSSTPSHNHALLRCLSSRSLCIGWLFISFITHS

SEQ ID NO: 348382 - protein, 118 aa, Zea mays
  Clone ID: MRT4577_80888C.1.pep
PADSFLLVLLKVTMIFAGAIYLPGRGSRPDRMQRQLSVSSMPKLLPEEAALGGDDDDVEAKPEKAPAPRPSGKERSVHLVPLIVLLCFLLLFLCSHAPSPSDMSSFGKKDGSMKARLL

SEQ ID NO: 348383 - protein, 81 aa, Zea mays
  Clone ID: MRT4577_80889C.1.pep
MAVRGALQSTSLCVAGRFGRVVVIGSGYHDGDQTVYIRREEAGKGHVLDMRIATTGVLQTCASLLLVKSELLPQLCTPRVR

SEQ ID NO: 348384 - protein, 57 aa, Zea mays
  Clone ID: MRT4577_8088C.1.pep
RLRLTELQLIFSSSPQLQRGSYASVHRRVISPPPSAGQRACTRPAGRQPELPPFQAL

SEQ ID NO: 348385 - protein, 199 aa, Zea mays
  Clone ID: MRT4577_80890C.1.pep
VEMYDTEYYMWVKVSSMHFVGRAERWLQSVERRLRQFSWEGFCSLIHDRFGREQHETLIRQLFHISQSGSVSDYVEQFASLVDELGAYESRTDPLYYTMRFVDGLKYDIKSVVMVQRPQSLDAACALALVQEEALEPTRRRRAEPFIHRKAWPQATASEITKVERVGNQGQPTEKLIVDSTRHTSPMDRVATLKSYRRA

SEQ ID NO: 348386 - protein, 59 aa, Zea mays
  Clone ID: MRT4577_80891C.1.pep
QVLFASIIPAVAFERMLSRPYATLRLRFFYISWPGFYFCLKCRHLDFYNNQNAHVKTSN

SEQ ID NO: 348387 - protein, 70 aa, Zea mays
  unsure (1)..(70): unsure at all Xaa locations
  Clone ID: MRT4577_80892C.1.pep
MLVHQDLLSGDELLSDSFTYKELENGALWEVEGKCATQGPVDAHIGDDPSAEGGEDEXVDDTAXKVVDSC

SEQ ID NO: 348388 - protein, 175 aa, Zea mays
  Clone ID: MRT4577_80893C.1.pep
MGSTSSMLTQYDIEEVQDHCNHAFSQQEIVSLYHRFCQLDRNGGGFVSADEFMSVPEFAVNPLSQRLLRMLDGLNFKEFVAFLSAFSPRTSLQQKIEFIFRVYDTDCNGKVAFDDILSILRDLTGSFMTEQQRQKVLIHVLEEAGYTKDSHFTLPDFMKIIGNSELKMEVEVPID

SEQ ID NO: 348389 - protein, 202 aa, Zea mays
  Clone ID: MRT4577_80894C.1.pep
MGSTSSMLTQYDIEEVQDHCNHAFSQQEIVSLYHRFCQLDRNGGGFVSADEFMSVPEFAVNPLSQRLLRMLDGLNFKEFVAFLSAFSPRTSLQEKIEFIFRVYDTDCNGKVAFDDILSILRDLTGSFMTEQQRQKVLTHVLEEAGYTKNSHFTLPDFMKIIGNSELKIYKTVPPYTVLWQVGSLASIGTHVVLDDQIRYWKE

SEQ ID NO: 348390 - protein, 108 aa, Zea mays
  Clone ID: MRT4577_80895C.1.pep
MAPKKDKAPPPSSKPAKSGGGKQKKKKWSKGKLKEKVNNAVLFDQATYDKLLSEVPKYKQITPSILSERLRINGSLARRAIKDLMARGLIRMVSVHSSQQIYTRATNT

SEQ ID NO: 348391 - protein, 123 aa, Zea mays
  unsure (1)..(123): unsure at all Xaa locations
  Clone ID: MRT4577_80896C.1.pep
ERARLGGRTDRTTQLLASYRSGNVDRSINRHGQARPPPAPFFHAAAAAAAAAAALRADDGRPVVVLGGADGXGGGSGGGPSSSARGERKRRFTEEQIRSLESTFRARHXHAKLEPREKAELAR

SEQ ID NO: 348392 - protein, 110 aa, Zea mays
  unsure (1)..(110): unsure at all Xaa locations
  Clone ID: MRT4577_80897C.1.pep
SIVNRHGNNRELIGHSTIKQHVKSVPAPVRVVNDSVKCFSMPRASKVEIPWPAYSPAEDPLLDKSNTEVILELEDKVHDGDDKXTKTVVKKVVSPFPTKAXFSEESFEAR

SEQ ID NO: 348393 - protein, 68 aa, Zea mays
  unsure (1)..(68): unsure at all Xaa locations
  Clone ID: MRT4577_80898C.1.pep
YSESYYXHPLRASAFWPFSPRPTPPLRRSVRFLNSSPSGPFASLRASRLSSCMTPPFCRSPRGAQRPR

SEQ ID NO: 348394 - protein, 212 aa, Zea mays
  unsure (1)..(212): unsure at all Xaa locations
  Clone ID: MRT4577_80899C.1.pep
MNVVFAVKQYISKMIEDSGPGMKVLLMDKETTGIVSMVYTQSEILQKEVYLFERIDSQNREIMKHLKAICFLRPTKENVEYLIQELRRPKYSIYFIYFSNVISKSDVKSLAEADEQEVVAEVQEFYGDYIAVNPHLFSLNILGCCQGRNWDPAQLSRTTQGLTALLLSLKKCPMIRYQLSSEAAKRLXGECVKQVISKEYELFEIPXTEVPP

SEQ ID NO: 348395 - protein, 66 aa, Zea mays
  Clone ID: MRT4577_8089C.1.pep
LVEKLKHGAMDLSLFVLMLSLYCVLIWINADTDRSSHAASCILIWMNQCRQIIDEEGSIQPHVHVS

SEQ ID NO: 348396 - protein, 94 aa, Zea mays
  unsure (1)..(94): unsure at all Xaa locations
  Clone ID: MRT4577_808C.1.pep
HSLLEHTDVAILLDNEAIYDICXRSLDIERPTYTNXNRLVXQXISXLTAXLRXXGALNXDVNEFQTNLEPYPRIHFMLSFYASDISXAPKAYHQ

SEQ ID NO: 348397 - protein, 55 aa, Zea mays
  Clone ID: MRT4577_80900C.1.pep
TSSLSHSFMLKRKANTRSTRHEGSILYIDSPRAELHRSRTTGTRPDTEARRVVRR

SEQ ID NO: 348398 - protein, 640 aa, Zea mays
  unsure (1)..(640): unsure at all Xaa locations
  Clone ID: MRT4577_80901C.1.pep
MDREKWMYGIDRYTCWTNHGECSIGDNNGNTKGHLDTNGGPMDTNEANDHCVHIQDTKSHFADATIVHVPIDHLEYMIHDVTVTHNLSEAQASQVASGWSDKSFTDLLNFLADKLPKGNMVPRSTTKAKKILCPIELKYEKIHVCPNDCIIYWGKHKNNISCTTCDTSRYKKIDNLEELGTNEKKKIPTKVFWYFPVIPRLERLFANPASAKLLRWHADERKKDGKLRHPANASQWREIDNKYIIFAKESRNIRFALSTDVLIPGPKQPGNDIDVYLESLVQDLLKLWETGVAVWDAYIEALDNLQRELVQSLCQLEMYFPPSFFDIMVHMTVHLVEEAKICGPHFLHYMYPIERFMGILKSFVRNKARREGSIAESYVIESVIDFCVDYMDEVAPIGLPLSHHEGRLKGQGGLGLSTEIPDQELLHKAHFLILQSTEDVSKYIDKHKKRLRKKNPEMVDEDIVRLHNKEFCDWFQKRCENKVPKNDTVKRLAQGPSSIVATWQSYDINGYTFYTVQQDGKSTRQNSGVCNDAITEVFDRNKKLSYLRKDTYYGQLEHIWELDYTLFKQVVFLCKWFNPKGVVVDPKYGVTTIDFRRDAYKDDPFILAKHXKVFYIDDLANRHHRVVLRGKRRIVGVENN

SEQ ID NO: 348399 - protein, 162 aa, Zea mays
  Clone ID: MRT4577_80902C.1.pep
GTNVKIAAIPSSVVVLTSQTFDSIVLVEFYAPWCGHCKHLAPIYEKLASVFKQDDGVVIANIDADKHTDLAEKYGVSGFPTLKFFPKGNKAGEDYDGGRDLDDFVKFINEKCGTSRDPKGHLNQEAELSNILFYFREDFLPLVISSIEKLLHKRIQAWHKSL

SEQ ID NO: 348400 - protein, 367 aa, Zea mays
  unsure (1)..(367): unsure at all Xaa locations
  Clone ID: MRT4577_80903C.1.pep
MAFPQISRRALGLLLVIAAAAAIVSPATADEVVALTEADFEKEVGQDRGALVEFYAPWCGHCKKXLAPEYEKLGASFKKAKSVLIAKVDCDEHKSVCSKYGVSGYPTIQWFPKGSLEPKKYEGQRSVEALAEFVNSEAGTNVKIAAIPSSVVVLTSETFDSIVLDETKDVLVEFYAPWCGHCKHLAPIYEKLASVFKQDDGVVIANIDADKHTDLAEKYGVSGFPTLKFFPKGNKAGEDYDGGRDLDDFVKFINEKCGTSRDPKGHLNQEAGLVPSLNPLVKEFLNAADDKRKEVLSKIEEDVAKLSGSAAKHGKIYVTAAKKIIDKGSDYTKKETERLHRMLEKSISPSKADEFIVKKNILSIFSS

SEQ ID NO: 348401 - protein, 114 aa, Zea mays
  unsure (1)..(114): unsure at all Xaa locations
  Clone ID: MRT4577_80904C.1.pep
RGGGGGGKSQQTTTQRQQGTEATAGGESKQQGGKTQGAAAAAPQSTDAXNAPKPPQEQHKPHPREKGDKGKKPAATEGATKKGRRRRXXHHRTRHGEKTAQQNNRTDKHNPAPP

SEQ ID NO: 348402 - protein, 108 aa, Zea mays
  Clone ID: MRT4577_80905C.1.pep
MGPSPEAREDAACSTNLASIMDCDDTVVVYAQSYAAQRQGDCQLIHSGGPYGENLFWGSAGFFWSPPAAVGSWVSEKQYYDHDTNSCAEGQVCGHYTQVVRCDVSALV

SEQ ID NO: 348403 - protein, 254 aa, Zea mays
  Clone ID: MRT4577_80906C.1.pep
MGLKVFHWLNRRMHPNTEYCSIHGSKAMEDKDSVPHSVVEKDTEALLLHDVLLNGILAIGTLGHHVDSLCPVACIEEDDLFIMDDEKAIVEERDDEEPRNDQVKEDVALETEPCEPVWPIVEPAKMHSLSMKEDNFTCFVAEEILIREVEDGGGANIQERPLLMLEKVEKVRTTLADLFAAEVFSSSSPREYSCQDIIDVAVASTSKHASCMEKMHQKKPRKPTPKPLKATRKLSRGHEEDVGEEDPPRAAQWA

SEQ ID NO: 348404 - protein, 99 aa, Zea mays
  Clone ID: MRT4577_80907C.1.pep
GWVTYIWVSSKPPLERIPFNGPLFNSASNIPIVSSGKGKAEVVHITVFPMAEGLKAQALVPVKMVQPTRGKLVWVMGKGLASILGPKTLDPNACFERPE

SEQ ID NO: 348405 - protein, 92 aa, Zea mays
  Clone ID: MRT4577_80908C.1.pep
TDSQPGHTTTAKEKQNTAQGRNSPGTGKPRRRTRGTGQPANTSQEPRKHADPQRTPKPHSSTSRKTKAQRANRDKDGRSETEGAKASKCWTR

SEQ ID NO: 348406 - protein, 112 aa, Zea mays
  Clone ID: MRT4577_80909C.1.pep
MRVPELGGQAPAGCSWTRKDFLQQIGQAGRQFAGAAGTHYCTCETDQRKQMGLFTFKVYMLAGMPGHRCVPRTLALWLQLIVGRRVQGPICICSWGESSYHRDYLCYHGDYV

SEQ ID NO: 348407 - protein, 88 aa, Zea mays
  Clone ID: MRT4577_8090C.1.pep
VLFFSATKLTWRPHLDQLVLLIGWLLLDHLFFSFNELLLSKPAKHLDPWSLARRPPRRLWVSRHHPQWPDTEIPRRRRVSDQARTHHT

SEQ ID NO: 348408 - protein, 81 aa, Zea mays
  Clone ID: MRT4577_80910C.1.pep
CSVTPAPTCVQGFLSVTRHASCAPSPYELKPPGRSSTSAGPSALSLVEVFLPLDLDARPAFVSATCAMTDAGLSPQRGASK

SEQ ID NO: 348409 - protein, 69 aa, Zea mays
  Clone ID: MRT4577_80911C.1.pep
VGVTLRLKACHYAEAPSRVASALHQFLYCSCFSHCRSDPSLNIPCSYIHTPGNIVKSCLLGPSEDEGPQ

SEQ ID NO: 348410 - protein, 101 aa, Zea mays
  unsure (1)..(101): unsure at all Xaa locations
  Clone ID: MRT4577_80912C.1.pep
EGANTVAPDDAARASFQALXRXKPRRRAPRTTRHAVTLGSAWTRVSSTRTPAAASEASAAKTREMMRTAREAICAVDDIGMGKQAKLCRTRGGRGVDRDGG

SEQ ID NO: 348411 - protein, 72 aa, Zea mays
  Clone ID: MRT4577_80913C.1.pep
KYKCDARANASQREQYRGTIHLFIGMERSPCEITSMPFTFANDYKIIHRGLNSLFPFKSVPFHAVMPKLPRA

SEQ ID NO: 348412 - protein, 68 aa, Zea mays
  Clone ID: MRT4577_80914C.1.pep
IFWAKFCTSSFSTSQKFSNSMSAYVAFPSTNYLTKILIWGKTICSLVAFLRLFQFDDWATIPSIWYSN

SEQ ID NO: 348413 - protein, 49 aa, Zea mays
  unsure (1)..(49): unsure at all Xaa locations
  Clone ID: MRT4577_80915C.1.pep
VEDKLELRRRQFHVLLSTIHXLQQTLENDDKLSEVEDDQESVMEADPKP

SEQ ID NO: 348414 - protein, 124 aa, Zea mays
  Clone ID: MRT4577_80916C.1.pep
PRPGGGPGLFSWGPLLPLYMLRHTSPRPIAPAGLRGLVACGPGLSSPQFPPAVCLRGAPLVFPSVLSLCFLCFSPLWFLPRGPRTGGCFRCFSSPVLGPPVTFVLNHSFSILIYHKKFIKKPQK

SEQ ID NO: 348415 - protein, 104 aa, Zea mays
  unsure (1)..(104): unsure at all Xaa locations
  Clone ID: MRT4577_80917C.1.pep
DTNRAGLMGLLQXYLVLTLLGHXLHGPSTVAGTLGSFTLQAWQHQIITMHCMHSRMHGGMLTFVSRSIPTLPHEYPIKISNAFNMLTTEXCFFVHNDMCRLNYG

SEQ ID NO: 348416 - protein, 42 aa, Zea mays
  Clone ID: MRT4577_80918C.1.pep
FSLFGGITMLVGPIETHMVGGESCYMSGSMLNVIWIRGGGLS

SEQ ID NO: 348417 - protein, 64 aa, Zea mays
  Clone ID: MRT4577_80919C.1.pep
PPTLAKTCSARTVLPPTRPAISSLLLLLSRGSDRRLLRVAGLYPAPRPFACLLVSSQGRMRTRM

SEQ ID NO: 348418 - protein, 90 aa, Zea mays
  Clone ID: MRT4577_8091C.1.pep
PPPFFFLLPPFGAPRFFPFLVPVCFLGVFVTEPLFPPPSFLVFFPPPLNFLPYGQICVPLGPGSVFPGRSPVCWFFFALLILTRWPGVFL

SEQ ID NO: 348419 - protein, 89 aa, Zea mays
  unsure (1)..(89): unsure at all Xaa locations
  Clone ID: MRT4577_80920C.1.pep
PYXLNLTHIFSPCNSSFISRLIQNFTHTXHSYLLSPPFXLSSSPLIIIINLTPYTYLTHLISTSPLFSTFLIFYTPYSFTSPSSTPITT

SEQ ID NO: 348420 - protein, 105 aa, Zea mays
  Clone ID: MRT4577_80921C.1.pep
SNVKNSIFYGGSNVVLCSLHKAPPDDKFFRIWILTAHQLGRIYPSKSKTEHGFNQIHGNGSPASLDLCFNPNVPGNGKTFPERQCQPANLHHDAVLIILDAFFPL

SEQ ID NO: 348421 - protein, 46 aa, Zea mays
  Clone ID: MRT4577_80922C.1.pep
NPPHFFILFFKCPFIFKKKKKKKKKKKKKKKKKKKKKKKKKKKKKK

SEQ ID NO: 348422 - protein, 59 aa, Zea mays
  Clone ID: MRT4577_80923C.1.pep
GLQVNTNSELSLGDRRKIEPGEAPLFRCSQWLQITDEGIALRMGHNLVDHAGPHLKKQT

SEQ ID NO: 348423 - protein, 676 aa, Zea mays
  unsure (1)..(676): unsure at all Xaa locations
  Clone ID: MRT4577_80924C.1.pep
AEGKCFLLVLDDLWVTRENQEERAILLNVLDAGQSGSRVLVTAQKKDVAAAIGAEEQIPIPDMEEKQYFSMFMHYALEGKRVGDGRFIAIGRKIAKKLGRSPIAAVTVAARLRSNSSIDFWETTANLDMLDETMGALWNSARGIGVDVRRCFAYCSTFPRGYRLVRGELVHIWIVQGFINTRVNATEQPEDIGLHYINELRTFSFLQIERTVFGTETEAFTIHDLLHELAERVSGSECFRVVSNSSPKHIPQEVRHLFVXLGLTVEXIAKKILGLVNLRTLIIVEEYSENKRKTFAAEDDEERSGRTLVNEEVLGRMFRSLRKLRALVVTTKQYHEPALLVPASIDXMKHLRYLSFNLDCSHRSVELIFPSTFSKLYHMQSIYSEKISCAKDVTQNLTSLRHSSSSWMGFANVGRLTSLQSLRYFQVKREQGHELKQLKHLNNLRGTLAIDGLGVVRSKEEALEAHLASKEQLRKLELTFSXVRRGIRTPWQRYLTAFYRRRIQPTIGXWLDDGRXAPDVAAEVLEGLCPPKDLATLTINRYKGSRYPSWMLSSQSPGALKYLQELELHNCNRLASFPEEETELFSCLRELXLRVSLCDWDSMPENMEPLVSLQSVLIMRCDRMERLPTLPRSLAKVEIHGCRVLSRTCQSEGHENWQKILHIPEKNISPRRSMAQ

SEQ ID NO: 348424 - protein, 122 aa, Zea mays
  Clone ID: MRT4577_80925C.1.pep
YSALTSSSSKLACFDQQKLRFMNIAPSNLTTTPRETQLITHLTRKRRHTAVKCLRITNNVETNLTSTDDAAESYGGLGRRERGVETNFTSTDGVIEGGGGRWRRALEEERQAASPAGPAGLN

SEQ ID NO: 348425 - protein, 90 aa, Zea mays
  Clone ID: MRT4577_80926C.1.pep
VCIVPNLLFFTTSFVWILEEYVAPMSRFWFPPKIFALLLSPLLGWGEQFQSCSYVYECAPPVRTGEQILSPFWVQSFILGWARYFTSVSA

SEQ ID NO: 348426 - protein, 64 aa, Zea mays
  Clone ID: MRT4577_80927C.1.pep
YMGRRKPEQWCQTSSARAGDHNTEDAAVALLRATVGGRCLRRSAEMRPAFSSFFLGGGAAPRLL

SEQ ID NO: 348427 - protein, 65 aa, Zea mays
  unsure (1)..(65): unsure at all Xaa locations
  Clone ID: MRT4577_80928C.1.pep
VPMLATGGTMVAAIDLLXAARTALQKLNNKFPGLHVYTGMIDPEVNEKGFIVPGLGDAGDRSFAT

SEQ ID NO: 348428 - protein, 123 aa, Zea mays
  Clone ID: MRT4577_80929C.1.pep
AGRSEICRLYFDFFQTAPTVKSKKNAESINSRLQLVTKSGKYTLGYKTTLKTVRQGKAKLIIIAGNCPPLRKSEIEYYAMLSKTGVHHYNGNNIDLGTACGKLFRTSVLSITDAGDSDILSAQ

SEQ ID NO: 348429 - protein, 104 aa, Zea mays
  Clone ID: MRT4577_8092C.1.pep
NSHAETSRLSLYKVTIFCVRRLISHYARRVTPCLLVSKNSHYARRVTPCLVSKNLIGSWHASANLGLVRLIPLHMDWTGLEKIEKNFDLFGIETRPVGAGWAWV

SEQ ID NO: 348430 - protein, 173 aa, Zea mays
  Clone ID: MRT4577_80930C.1.pep
PAGFASPFPSPLQCHFLKKKPGHARSLHCCHHPHLRSHRPQRHHFLTKPPGLLRSLLSSVHSIPAPPDLARPVRRPFHGRRVAPGVAAASECRCRQARIKVRRPSLASLASSGHRRANCSHQLHLHSHRHFSVGSLTPCSRRCGACSCRLSLRSLRCQIPSRTSRPPCCPFLG

SEQ ID NO: 348431 - protein, 83 aa, Zea mays
  Clone ID: MRT4577_80931C.1.pep
IRLEPMLATGGTMVAAIDLLIECGVTSKQIKVISAIASPPALQKLNNKFPGLHVYTGMIDPEVNEKGYCSKLISSLQNSWRTY

SEQ ID NO: 348432 - protein, 98 aa, Zea mays
  unsure (1)..(98): unsure at all Xaa locations
  Clone ID: MRT4577_80932C.1.pep
SGQLPVANNKQFXLPFNQLGVVGTXASLQQAQLLPFSPVGGVSPAAFLAQPQLVAFFQHAAGGGGALFHLPQLLPFNQLALTNLAVFYLQPIIGGALF

SEQ ID NO: 348433 - protein, 77 aa, Zea mays
  unsure (1)..(77): unsure at all Xaa locations
  Clone ID: MRT4577_80933C.1.pep
PVXVEASREAEGXXWTXAAGSPPXXEXXAXXSGSRXRRQPAXRXXXXXXXXXXXTSRRPGAIMRWLFVAMLRXPGAS

SEQ ID NO: 348434 - protein, 81 aa, Zea mays
  Clone ID: MRT4577_80934C.1.pep
QFIICDVIEASFAVFSFLCVNNYMLRCSIISSMGLLSIVLHVLLQISRPYCQTYKCSSEYILHFFPINNYGVHINERYYCT

SEQ ID NO: 348435 - protein, 106 aa, Zea mays
  Clone ID: MRT4577_80935C.1.pep
AAMVKDSAYYDVLEISTDASMADIKKAYYLKAKLVHPDKNPGNPDAARKFQELGEAYQVLSDPVKKESYDKYGKEGLSHDYLEDYVGQLALASVASVEIEEESNTP

SEQ ID NO: 348436 - protein, 336 aa, Zea mays
  Clone ID: MRT4577_80936C.1.pep
MVKDSAYYDVLEISTDASMAEIKKAYYLKAKLVHPDKNPSNPDAARKFQELGEAYQVLSDPLKKESYDKYGKEGLPQDNMIDPTAVFGMLFGSDYFEDYVGQLALASVASVEIEEESNTPEARTRIQEKIKDVQTEREQILTQSLRDRLQPYVDGKQDEFGDWASAEAQRLSQAAFGEAMLHTIGYIYVRQAARELGKSKLYMGVPFIAEWVRDKGHHVKSQVNAAAGAISLIQLQEGIKKIEEGDKEEQLIKSIEEKKDAMLNSLWKINVVDIESTLSRVCQAVLRENDIPRDVLKLRARGLKKLGTIFQGAKSNYRRENSLRVEDDAAEATPSH

SEQ ID NO: 348437 - protein, 291 aa, Zea mays
  Clone ID: MRT4577_80937C.1.pep
MEAPPVALFDTLKAAKPFFLLAGPNVIESEEHVLKMAKHIKAITTKLGIPLVFKSSFDKANRTSSKSFRGPGLEEGLKILQKVKATYDLPIVTDVHESHQCEAVGRVADIIQIPAFLCRQTDLLVAAAKTGKIINIKKGQFCAPSVMVNSTEKVRLAGNPNVMVCERGTMFGYNDLFVDPRNLEWLRESNCPVVADVTHALQQPAGRKLDGGGVASGGLRELIPCIARTSVAVGVDGIFMEVHDDPLNAPCDGPTQWPLRNLEELLEELIAIARVTKGKKPFKIDLTPFQE

SEQ ID NO: 348438 - protein, 103 aa, Zea mays
  Clone ID: MRT4577_80938C.1.pep
QWRLSAKRLAGVSHTTRGRLLCARSSDWFDVRLSNSSGASFMQVILFVSFDLYGFSTCHILLCFFRTLFPLLERSFMLCQRELLVQRINVCYEAVAGQKDLVH

SEQ ID NO: 348439 - protein, 47 aa, Zea mays
  Clone ID: MRT4577_80939C.1.pep
VQSVLGSLVPMVGTIVKGSTQTSPEHDHIAPLFNCSLLDQMVRHILS

SEQ ID NO: 348440 - protein, 41 aa, Zea mays
  Clone ID: MRT4577_8093C.1.pep
FDEGHVAMARQTGVTAQGRYPLKREKGVLVASRQRVLRSEE

SEQ ID NO: 348441 - protein, 91 aa, Zea mays
  Clone ID: MRT4577_80940C.1.pep
TPGSRGSSRGGRFVPGRGNNFRSEGTRGRGNYGGGRGYGRGEFSYRSDYGGRSGGRGVSARGADVGYQRVDHAGYAGGRGGRTVAAGAPAK

SEQ ID NO: 348442 - protein, 243 aa, Zea mays
  Clone ID: MRT4577_80941C.1.pep
MVKFTIAAVPLALAAVAAAKPDFEKRQAASSSSSASRTASSASSSVTGGAAAVPTTSTFTGTLPASVSSILAGISSGFGDTTSTTSLFTTYAAGASNPQVTGAPGLPNLNTILPSNFPALDVVPPTDSPQVQQWMSQIDFSQVPNVTTTVDSASCSGNPTNLAQAGASGNCWWTCGQCTRSTDITTCPDTNTWGLSYDDGPSPYTPTLLQYLNQNNIKSTFFVVGSRVISRPQMLQTEFQQGH

SEQ ID NO: 348443 - protein, 127 aa, Zea mays
  unsure (1)..(127): unsure at all Xaa locations
  Clone ID: MRT4577_80942C.1.pep
LLFRPSPTSELDVYTNTDXASCVNMCRSTSDYIVFLGTRLIXWYSKRXPVVSHSNTEAKYRDMANDVVGTSLLCXLLHELHSPIARATLVSCDNLSKIYLSNLVHHQRTKYVDIELHFVREHVADGD

SEQ ID NO: 348444 - protein, 77 aa, Zea mays
  Clone ID: MRT4577_80943C.1.pep
PRKNAFSPKGKFCSFMAPPLGPGGGDLWGPYPSPGSGGNLKFGGRKGYKFPPVKTSPSRTTLNTCLVLALENAKIPP

SEQ ID NO: 348445 - protein, 91 aa, Zea mays
  unsure (1)..(91): unsure at all Xaa locations
  Clone ID: MRT4577_80944C.1.pep
MLHFMHHCHHGLNPAAHGGVHQPTFKIFCKDDDGYCLTVLYSHTVLDPDDRCDXHQYWFMDMRFSTYVKDXEGNPAFALVYKATGLGFKHS

SEQ ID NO: 348446 - protein, 39 aa, Zea mays
  Clone ID: MRT4577_80945C.1.pep
LSLYVRSALRHMFVQHILISSTPCGFIELNYNRSQRTRP

SEQ ID NO: 348447 - protein, 83 aa, Zea mays
  unsure (1)..(83): unsure at all Xaa locations
  Clone ID: MRT4577_80946C.1.pep
XXXXFFFFFFLVFFFFFFFFFFFFFFWEPDKTSFGSQVTFYTTRTLGFGFILKKTLGGGGKNSDPGNTPFFFLTGGNKKKKKL

SEQ ID NO: 348448 - protein, 26 aa, Zea mays
  Clone ID: MRT4577_80947C.1.pep
MAAEPEKQAAPAAQETAVHIGYVDRP

SEQ ID NO: 348449 - protein, 139 aa, Zea mays
  unsure (1)..(139): unsure at all Xaa locations
  Clone ID: MRT4577_80948C.1.pep
GYRGFVRHKYLYGSLGADYRVKPXGIGKPAEHLHVELYSLEQNVAQNXSDDIFAMRVECFDLXTTPFQLYGWEYRTLVESRECEXLMHERWALLATLVDLAVXWVSDDNWEDAAEVDVXRGSSYLVQPMXFTISTFTGI

SEQ ID NO: 348450 - protein, 117 aa, Zea mays
  Clone ID: MRT4577_80949C.1.pep
GTRAPPSSFFFFFFFFFFFFFFFFFFFFIVLIDHLHIYLPFFYLNETKKRSRTGRAAGSMNSTPNTRKNLATPTKDRDQGRLLWGSHIVRKRRDLLTNGSILAEDQNCSNPPTPAGC

SEQ ID NO: 348451 - protein, 93 aa, Zea mays
  unsure (1)..(93): unsure at all Xaa locations
  Clone ID: MRT4577_80950C.1.pep
IACKFAELKDKIDRRSGKXLEDGAKFLKSGXAAIVDMEPGKPMYVESFSDYPPLGRFAVRDMRQTVAVGVIKAVDKKAAVAGKVTKSAQKAQK

SEQ ID NO: 348452 - protein, 85 aa, Zea mays
  Clone ID: MRT4577_80951C.1.pep
CSRGAGRRLAHGAGHTAQESQEAHGYARPPHTPWYHGHGLGQTGGGHNPAPQSTARELLPATDRRGGSTPSAAAAYDVGLTGGRS

SEQ ID NO: 348453 - protein, 79 aa, Zea mays
  Clone ID: MRT4577_80952C.1.pep
EHLNISSLARSLIYSILMSYCYFDSDTQNRGVDCHVLMNNNNPNLIAKYEEAYKIEQIPDLSRGRKATATRPSLCHACV

SEQ ID NO: 348454 - protein, 55 aa, Zea mays
  Clone ID: MRT4577_80954C.1.pep
PTIAGKLYSLPTHAARSACACSDSNHPQCSHARIYSFLSSYVSLTICVVCESKLI

SEQ ID NO: 348455 - protein, 85 aa, Zea mays
  unsure (1)..(85): unsure at all Xaa locations
  Clone ID: MRT4577_80955C.1.pep
AGVALSSLSEVPPWTGEVXNPSQRDGGALGRGPWDPSDRSALLKSKLRALLAGPRSLRRSSXFGGRIDRIGAQSGLGCNSFRYRR

SEQ ID NO: 348456 - protein, 159 aa, Zea mays
  Clone ID: MRT4577_80956C.1.pep
PSHFWSRPSPIMHWNHPYCDMNRGRKSFQRDSSSSSSRNDLGLDSVSQATPSRLASCFDGSAYISSHPFCTASFVISAPTYLPSLTPWCAVNSPPVFRILFQLDRYQNPAPSFTSPLPSGRTLGLYHDLALTSTGSGTQGRSWLGFYRPGGDASSRFEE

SEQ ID NO: 348457 - protein, 265 aa, Zea mays
  Clone ID: MRT4577_80957C.1.pep
MEPGSPAPKKSRLVHSADCEMEEAQAPSSSNAAGGVNQSSHWTQWQILDSILPTGGFAHSYGLEAAMQSRVVNDQEDLRSFVVQVLDSAGSLLLPFVHCACAGKSPGDAAAWAKLDRLLDATLTNEVARKASAAQGSALLRVAASVFAEVPALQELRRTLLGSKSVSFHHAPVFGLVCGLVGFDGETAQRAYMFVTMRDVLSAATRLNLIGPLAASVLQHQLAPDAERMVRKWRDRDVSEASQTAPLLDAVQGCHAYMFSRLFCS

SEQ ID NO: 348458 - protein, 207 aa, Zea mays
  unsure (1)..(207): unsure at all Xaa locations
  Clone ID: MRT4577_80958C.1.pep
MRLLLTAAWPCAILLILASALQSATVASSGAAAARLEWQVLTRANFSSQIRLRPHVLLLVTMPWYGESRSLMADIERLVGSNEELSRLKLMVVYKNSEKLLTDAIGAAEGITVVYYQRSMQFKYQGKLRAHDILSAVRYIMSLDHEESPFEVXHTQEDVETFIESTDKSILLYESCGWFTRLAHGGGNQSYEAASSNNNTENVDISG

SEQ ID NO: 348459 - protein, 112 aa, Zea mays
  Clone ID: MRT4577_80959C.1.pep
TRGPDSWVGTRALPAPNLIKGRATSSWGLKNPSFNGRRLYNAGTKPAILIPKTKGHLGIKVTPFALENLSLWDSPQTILSHGESTKLTFGQQGKGQPLSEGINTLSIKNWVG

SEQ ID NO: 348460 - protein, 165 aa, Zea mays
  unsure (1)..(165): unsure at all Xaa locations
  Clone ID: MRT4577_80960C.1.pep
IRHEAPPFLSSSLVSHLIHSRPRISVHASSSPSCHPTKPRLNCHFPRFFPSRARRNRCVVGGSFGRGKRGAGPGAFQNSDRPAGRGEGAARSHCGGRGRVTAAFRSGGVRGCSRLLLVCLLPLALRRAAXLEVGGRPGAASXFRGRLSGAAAAAAGAWWGRASPF

SEQ ID NO: 348461 - protein, 50 aa, Zea mays
  Clone ID: MRT4577_80961C.1.pep
QGRGVFFFFFRFFLFFFFFFFFFFFFFFIFFSYSFIVAQAGIASIYIYRT

SEQ ID NO: 348462 - protein, 312 aa, Zea mays
  unsure (1)..(312): unsure at all Xaa locations
  Clone ID: MRT4577_80962C.1.pep
MEMRARESVSMSKDLTGEIAPFATALHDVFLHSHCSSCFTKLLPQAPCVMSCMTCCSLRYCCSECLRADSVVHVSSXMLLFYGSPQESLPFLXTEGTSDLRAALRLLCVLEIHGLVSPDSINHYSRIGGLSTSGIEEALKEGEVIAERILEGSLLMSSARKSRAQTSAIFSDRLKLEKMALWAVIINSVEVQLSEGVALGVAVYGPSFSWVNHRCFPSASYRFVLAPRNEDCASQKSKSSVVPASKGVAADVWHAWQYEDHSTHGTSLRSTXARHSDLWAKYKFIWSCRRCIASPEPYTDLILNWDGRDLDK

SEQ ID NO: 348463 - protein, 56 aa, Zea mays
  Clone ID: MRT4577_80963C.1.pep
VPPPFFFFYAPAFFWKGGVSKKKKKKEKKKKKKKKKKKKKKKKKKEKKKKKKAPRA

SEQ ID NO: 348464 - protein, 261 aa, Zea mays
  unsure (1)..(261): unsure at all Xaa locations
  Clone ID: MRT4577_80964C.1.pep
MEMRARESVSMSKDLTGEIAPFATALHDVFLHSHCSSCFTKLLPQAPCVMSCMTCCSLRYCCSECLRADSVVHVSSXMLFFCGSPQESLPFLXTEGTSDLRAALRLLCVLEIHGLVSPDSINHYSRIGGLSASGIEEALKEGEVIAERILEGSLLMSSARKSRAQTSAIFSDRLKLEKMALWAVIINSVEVQLSEGLALGVAVYGPSFSWFNHSCFPSASYRFVLAPRNEDCASQKSKSCVVPASKGVAADVVKENNDHFV

SEQ ID NO: 348465 - protein, 61 aa, Zea mays
  Clone ID: MRT4577_80965C.1.pep
SCLMTHIAQSLTQQHMSPKSSTPRTLPCRQVISGFHRIDKVPTAGQTVLHGQGLIKASVYA

SEQ ID NO: 348466 - protein, 64 aa, Zea mays
  Clone ID: MRT4577_80966C.1.pep
SPTMPCDVVDEGSIPFKQDRAIATVVSSVSATSNNTATVAVAPPVFLLLFMTYIFFPRVRPRVR

SEQ ID NO: 348467 - protein, 230 aa, Zea mays
  Clone ID: MRT4577_80967C.1.pep
CCTGPSGRWSFAKPRSSVSGSARRPSVAAGELSQVRPCSCGLEREVEAAAVIQKAFRGYLARKALRALKSLVKLQALVRGYLVRKQTAMTLRRLQALMRLQANTAASRRSTEQERIVARVRPLAVPAAAVHRRRLSDGGDAAGGFDRSPRIVEMDTCELRCRSSRITSRSAGGDPAGDSPLLLRCHEPAWCLQGRELEPPPPPPPPHPKTTHNTPRLGAFAGYLGSPAKR

SEQ ID NO: 348468 - protein, 67 aa, Zea mays
  Clone ID: MRT4577_80968C.1.pep
LCIWIAHKCRRWCLRTQRSKELRGRGVLPTGRRGLQKNDEQRCSGTGGQLKIKDRKWVHGQDGPCSS

SEQ ID NO: 348469 - protein, 100 aa, Zea mays
  Clone ID: MRT4577_80969C.1.pep
TSSIHRADPPSTRRGTARVPPQVFPHSSGFGVCKGKIAISHLFFFLRVARSSCTSEQSRSNPPRTSSQTNTSGPQYGKLAIQVSWNINSQTYQVFITSLI

SEQ ID NO: 348470 - protein, 441 aa, Zea mays
  Clone ID: MRT4577_80970C.1.pep
MSGTNVWLNLQGFDDLDVTPCLLAPAHGYFSSRDQDFSDSSREVWTLPYSLVLRHTTEEVHAACVEATEPERVEITKRLRDQVMNELGSALSKHDWFAGFDIAYEQPIKYSLQQWIDHVKETEAVVFIAVHGGIGEDGTIQTLLESAGVPYTGPGPIASRTCIDKVASSLAVDHLASYGIRIIPKDVRATEEVLKSSLVDIWNELKAKLETETVCVKPARDGCSTGVARLCCPKDLEVYTNALRRKFQHLPANCLSRAHGVIEMPVPSPESLIFEPFIETDEIIIANKLEDGSARHLVWKGENDWLEITVGVVGKRGEMHSLNPSITVKESGDILSLEEKFQGGTGINLTPPPATIMGEDALQRCKKSIETMANALGLEGFSRIDAFVNVRSGEVLLIEVNTVPGMTPSTVLIHQALAEEPPVYPHRFFRTLLDLVFARAK

SEQ ID NO: 348471 - protein, 165 aa, Zea mays
  unsure (1)..(165): unsure at all Xaa locations
  Clone ID: MRT4577_80971C.1.pep
IRHEVSHSAAHGGAPCSTFSAYAMAHKGKATSDVTYNPEEGXEAYSNPAVYNRLSEYTAMSQEVHGPDYDPRTEDIDVDVLTRVGGGKRHGXYWIADGXIDSSSTPTLSQVRARSTSASPAIRPREDNSHHRIQQLQAQLEEERREQKEMEARMTVERLARLVDQ

SEQ ID NO: 348472 - protein, 53 aa, Zea mays
  Clone ID: MRT4577_80972C.1.pep
PRVRKKKKKNKKTKKKKTKKGHKKKRTMKKKTHARFSVPILTYSCLQHSYLFF

SEQ ID NO: 348473 - protein, 56 aa, Zea mays
  Clone ID: MRT4577_80973C.1.pep
FSSWWFSAAKGASKEVKKGFDSLIILVAWELWKHQNACVFEGVRPRFEVVLQAIVY

SEQ ID NO: 348474 - protein, 116 aa, Zea mays
  Clone ID: MRT4577_80974C.1.pep
GFFSVGVSSFPRFRRVLKISFFPPPPPGNIFFLSSWRLPRIFWFFLPVYCRNFVIPLFNFMPPFFVPPFYRLRPFPRKIFLGLCIFVHPPPFFRVIWFFTPPPSKKKGFIWPVFIN

SEQ ID NO: 348475 - protein, 39 aa, Zea mays
  Clone ID: MRT4577_80975C.1.pep
QTIQRVPSARPDMVADPLMSHQNGDTIDPHNTLRLIMSL

SEQ ID NO: 348476 - protein, 35 aa, Zea mays
  unsure (1)..(35): unsure at all Xaa locations
  Clone ID: MRT4577_80976C.1.pep
KXMGGVVLQRNMTRDILEIVKLTMLCDQACTMDLD

SEQ ID NO: 348477 - protein, 654 aa, Zea mays
  Clone ID: MRT4577_80977C.1.pep
MAASAVSLAKGLITEGLGGHQARVLAASPPCRPGDPRGPHPAPRDPASPRLGLGHHSPVREEEGDLVVVESGSARFGQEDVIKEVVGSQRRADGSGEPGDSMEVDEQKAKEVGIELPHATDVLHKNGSDGLEMNDVSGLRTVGILNTSSAKESDVHSLSNKMKHPNISREQQTRTSNSNAAHHATNSITDQTTALPDATIRIIKNQLTTAKMYLGLFASRGNHGFTRELRARMRDIQRALGDARSDRQLPHNVHSKTRAMEQTLVKVRKIHDGCSSAVNRLHTVLHSTEQQLESNKRQANYLAQVAAKSLPKGLHCLTLRLTNEYYFTNSKNKDFPYVEKLEDPKLYHYALFSDNVLAAAVVVNSTLVHAKKPEKHVFHIVTDSLNYAAMKMWFLANPFGKAAIQVQNIEEFTWLNSSYSPVLKQLETRFMIDYYFRTGHARHDENPKFRNPKYLSILNHLRFYLPEIFPRLNKVLFLDDDTVVQRDLSALWLVDLKGKVNGAVETCRQDFHRFDKYLNFSNPLIAKNFDPHACGWAYGMNMFDLSDWRKQNITEVYHTWQKLNENRLLWKLGTLPAGLVTFWNRTFPLDRSWHQLGLGYNPNVNVKDIRRAAVIHYNGNLKPWLEIGLPKYRKYWSAHVNYDQVFLRECNINP

SEQ ID NO: 348478 - protein, 75 aa, Zea mays
  Clone ID: MRT4577_80978C.1.pep
EMKTESHDLDAVHGGRGTVLGYGFSFEEMKVTVIGTCWHPGLQRLSKPDFSLARARLTFQGNLENPRWRCFVPPG

SEQ ID NO: 348479 - protein, 271 aa, Zea mays
  unsure (1)..(271): unsure at all Xaa locations
  Clone ID: MRT4577_80979C.1.pep
XTEVNSSSLGWAMSAASSRAFRLHGEVPMLLPLIEMCNHSFNPNARIVQERSVNSLDMSVKVLAEKKIKQNEAITLNYGCYPNDFFLLDYGFVITQNPYDQVELSYDGALLDAASMAAGVSSPNFSAPAKWQQDILSQLNLHGEGAVLKVSLGGPDVVDGRLLAALRVLLADDPEAVHKHDLNTLMSLDVQVPLGPTVEASALRTVLALCAIALQHFHTKIMDDQAILGGGPPLITQLAVQFRLQKKFTIVDVMQNISRRIKMLSPQKSTG

SEQ ID NO: 348480 - protein, 57 aa, Zea mays
  Clone ID: MRT4577_8097C.1.pep
YVSSEFGSRVVSKQLVRTHRAGTARGGHMAAGGGSNPASVGHYFILARSVELLLLHQ

SEQ ID NO: 348481 - protein, 113 aa, Zea mays
  Clone ID: MRT4577_80980C.1.pep
PIPQGPSHPRPPPVRPTPSSDYAPGDWCHLRASCTQLIGTWGPLLHPISQRPTDPRYSPGIHPDLKGALLPAAPFLRQAQAQEQAPGPRRGEATCEERTPARYGRSLNRSEQA

SEQ ID NO: 348482 - protein, 75 aa, Zea mays
  unsure (1)..(75): unsure at all Xaa locations
  Clone ID: MRT4577_80981C.1.pep
RSLSPLNTTTLTPTVFSSLGNQTGNGASGVHCLFTPNNLXSLRRLTCGPKETXRWRPTTTIRALLSXXESTRTEE

SEQ ID NO: 348483 - protein, 124 aa, Zea mays
  unsure (1)..(124): unsure at all Xaa locations
  Clone ID: MRT4577_80982C.1.pep
MCGGGGERYKKQSHTFLFFLMLALFVLLALCACAASATHIPGHLFXFMPLCGGGGGXHYXXXHHFLGGGVASPSLMXXXLLALPLQTLPVLMPLVLTPFMLXPLXMPCGGVPWSCFFLCSPCCC

SEQ ID NO: 348484 - protein, 244 aa, Zea mays
  Clone ID: MRT4577_80983C.1.pep
RLIFLLRSVVAIPLPPDFSSRRSSGKILPPSRRYLRLPAAEPFFVAARSIFFPSCASSPAHAPSCARRSGLCFWRAPCSLVPRAASLLSPPVPSSLAPFLFSSSGALPSDSLSRHSIFPLRASSASPTPSSSFTLGFQFPVSRALFFCARSLRVGFPLPPARRPCSDPRPGRACSPLARRISSPRARPHGARPFAVNQDCRICSAVQVLQLAQDGVLLAPQLGPRGSLRRIPVPLWCMGEAPFL

SEQ ID NO: 348485 - protein, 53 aa, Zea mays
  Clone ID: MRT4577_80984C.1.pep
KLSAVPRWPSGIPSVRCLPIQIPRRVELKRIGRILCVRCVSTTPMGHELSLFL

SEQ ID NO: 348486 - protein, 211 aa, Zea mays
  Clone ID: MRT4577_80985C.1.pep
MGLFSSPAKVYKPAADVDLGPGSDELYISPNVKAPRVAGLLVKIFVWILEMPIVGQIVLYILKKDNLINKLVSDADIPEPPLFTASHSWEDTPEQSVRLTKPDLSAAERVQEAVGCLPARLEAALAADAPGIRRWTVRDFSDAYRSGEVTPVQVAARFLAAVRESSGPGVSNMAFFISCDPDDVMRQAEGSTLRYQRGAPLSALDGVLVGV

SEQ ID NO: 348487 - protein, 122 aa, Zea mays
  Clone ID: MRT4577_80986C.1.pep
GPESPGRPHPSEESQNREGIPQNQHRLIFAARRLKDGRTFPNYNIQKGSTLNLVFRLKGGLQIFVKTLTGKTITLEVESSATINIVKAKIQDREGFPPDQQRLILAGKQLKDGRTLADYTIQ

SEQ ID NO: 348488 - protein, 87 aa, Zea mays
  Clone ID: MRT4577_80987C.1.pep
PTTRMGQVLPNTTRATCCHAEDVCPAKLSVHLIRAVTNTHNPFALNTGTTGATTAVSKVRVPSTLETEDTGATRAPEIGCRSEASTR

SEQ ID NO: 348489 - protein, 104 aa, Zea mays
  Clone ID: MRT4577_80988C.1.pep
EREQASRRRGFSLPTRLELPRGCLGVAWPHRSCGRGQSKRKLAEASLIHRWSILTAMETRTSVGRTVRTVNRGENFPNMPVVIFAKCCTLFLRSWDSGGLVGQS

SEQ ID NO: 348490 - protein, 35 aa, Zea mays
  Clone ID: MRT4577_80989C.1.pep
FKGQYIKFLPLYALGKKFGYIKKDAPFYKFLSLYI

SEQ ID NO: 348491 - protein, 153 aa, Zea mays
  Clone ID: MRT4577_8098C.1.pep
MAGNNGGNIPKFGEWKTTDGGSPYTMYFDNARKRRNNSGITVAPEASPVRTNTVPGGKDGVKPLNQQDGANRSRNQAKAAQGSSVPTWGQWNESNSGAGAHQYTLFFDQLREERKSAPPTPSVEQLQKPHQTRPTHRDLYDHVPKGSKCCGLF

SEQ ID NO: 348492 - protein, 72 aa, Zea mays
  Clone ID: MRT4577_80990C.1.pep
ADASDSIPLHSCNIMHKSSMHMSMGALVPRRGAYTMATPKSMQPTTVLFMDLNPFHQKLRTVPYKHEQQPLL

SEQ ID NO: 348493 - protein, 46 aa, Zea mays
  Clone ID: MRT4577_80991C.1.pep
KTKAIRPKCLFFRTFFFKKFLIPKVGTTFKNTHRWKRATKCGGTYP

SEQ ID NO: 348494 - protein, 107 aa, Zea mays
  Clone ID: MRT4577_80992C.1.pep
QNKDLISAIKTSITVYVVVLADDLDMIVAHEHVVQHSIWIGNSRCGHGHSKRVKTSLYALCRVIEPRSMTTNNGTYHHDIDITSIAIPPMIPRVRPRDSGRVGGRVG

SEQ ID NO: 348495 - protein, 42 aa, Zea mays
  Clone ID: MRT4577_80993C.1.pep
FLYKENFFDAFCFSFCRICRRKNCSTLYYMIVRWLLNKKENS

SEQ ID NO: 348496 - protein, 48 aa, Zea mays
  Clone ID: MRT4577_80994C.1.pep
LGLELRMGRCAHGGTHQSTREGGYLGVSQGLCQCLQPSSRSLEFGEWG

SEQ ID NO: 348497 - protein, 52 aa, Zea mays
  unsure (1)..(52): unsure at all Xaa locations
  Clone ID: MRT4577_80995C.1.pep
TLKSSKLGDPNPKXQIXLXLLNHQTLHHLNQXLHFSPLNXXPSXHXXQITPS

SEQ ID NO: 348498 - protein, 123 aa, Zea mays
  Clone ID: MRT4577_80996C.1.pep
LRPPRCGGRLGLGLRVRRRGVRRAPVTRLRLATPEDAAAALVRRRSALPAARDEGDNDLHTGSTQYPEGWYSDDDDGQLSWFNAGVRVGVGIGLGVCVGVGIGVGLLLRSYQATTRSLKRRFF

SEQ ID NO: 348499 - protein, 86 aa, Zea mays
  unsure (1)..(86): unsure at all Xaa locations
  Clone ID: MRT4577_80997C.1.pep
QSLSLKCPLAPESARKKIEYPDPLVVNVDLKADXKKFQRAVKNMYFFLAKKVNTLVRPPGNKKAYVQLPPGCGSLYVGNKIGFLLR

SEQ ID NO: 348500 - protein, 92 aa, Zea mays
  unsure (1)..(92): unsure at all Xaa locations
  Clone ID: MRT4577_80998C.1.pep
ARARSARRRSVSAVRGAASPRGAHRHCADALLVATQPRRRGEPEPRRRPGRPPARSRAGAQQXAGRSGAXCLAAQHFSRRRWIKARERPRVR

SEQ ID NO: 348501 - protein, 182 aa, Zea mays
  unsure (1)..(182): unsure at all Xaa locations
  Clone ID: MRT4577_80999C.1.pep
YEALQQKRFDLLEIQVNXGGAIAVKEIYXYKFFVKEXPGGALFQNVEXLDILALTXGQGYDGVVTFLRATXKLAQETHRGLSIVACIXSWNTANLIYTGAHAGQNGYHXHRSDMNIKAYNIPKTXQYTHNASSEIYTTDKYITPMEGCHHYGIXKGDYLVITVCXFNPKNTVVTLHQSLLKQ

SEQ ID NO: 348502 - protein, 251 aa, Zea mays
  unsure (1)..(251): unsure at all Xaa locations
  Clone ID: MRT4577_8099C.1.pep
MSKRESKAAYFQKLNDYLNTYQSIFIVDVDNVSSNQMHQIRVSLRGEATVLMGKNTMVRRALKGLIGERPELEKLLNFVRGNIGFVFTNGDLKDXRNKIVSNRVAAPARAGAVAPADVIVPAGNTGMEPGKTSFFQALGIPTKIARGTIEIVSDVSLVQAGEKVGASEATLLNMLNISPFTYGMGVVQVFDKGTIFSPEVLDVEESALVAKLMSAIREIASISLAVGYPTLASVPHSVINGYKNLLAVSVA

SEQ ID NO: 348503 - protein, 124 aa, Zea mays
  Clone ID: MRT4577_809C.1.pep
FPAPSSSVWPPAWCELLFVTWQPGVGRWSSFSWSSVALIFQGLGVSLVRSWRVTLCVLPRMAPRFRRVSVRLCYDAVPWSWFRWAPRRCLSRVVAGGSLVAGSLRGNPTLLGGGEPYCSGWGLV

SEQ ID NO: 348504 - protein, 143 aa, Zea mays
  unsure (1)..(143): unsure at all Xaa locations
  Clone ID: MRT4577_80C.1.pep
RAAPRALFXXVXXCLGAXCGAGVVLGFLVGLLLGAGGGAFAVXPGFSYGRGLGAGGGGFFFFFLXXFSASGAVRGARVSLVPFLAPLPFGFAVFLVLLATVPFSGSGFFPACCLCASFFSSGAXAWCVPWVLWCGLLLGAALA

SEQ ID NO: 348505 - protein, 62 aa, Zea mays
  Clone ID: MRT4577_81000C.1.pep
PPFIRALLPPSPTPPLPSDPPPAPPRVCPPRLLLDPLSPPPVLVKKNANPDEPRFSHGEVDG

SEQ ID NO: 348506 - protein, 211 aa, Zea mays
  unsure (1)..(211): unsure at all Xaa locations
  Clone ID: MRT4577_81001C.1.pep
SANSVQNAGLETIGLRPANSPSLSTNSGVYEQFMQKYHXPQTQNSLRLQASSDPQQYKDQSQKSVQGTQAVLDPYSLLGLLSLIGMKEPGPTTLALGIDLTSLGLNLNSQDNLYKTFGSPWSSEPAVGEPDYQIPACFSTKPPPALQKFHPLTLFYIFYSMPKDATQLYAANELYNKGWFYHKDYRVWLTRAPNSAPLVKTPLHSKHLALM

SEQ ID NO: 348507 - protein, 132 aa, Zea mays
  unsure (1)..(132): unsure at all Xaa locations
  Clone ID: MRT4577_81002C.1.pep
CWYCSRMNLSGNSGSGAIXIQGSNRIGMLQQASXQFMNLLGSSYPTPGGSLSQNQVQSGSGSLGSSGMLYEGSSGDNAPFVLIQASGILFIRTTLFSITKQWRRDLSFLLLAKILGENYKVLLHLKLIWFDQ

SEQ ID NO: 348508 - protein, 232 aa, Zea mays
  unsure (1)..(232): unsure at all Xaa locations
  Clone ID: MRT4577_81003C.1.pep
MARPFGFSLGSSYPPRQHQXEXANSVQNAGLETIGLRPANSPSLSTNSGVYEQFMQKYHXPQTQNSLRLQASSDPQQYKDQSQKSVQGTQAVLDPYSLLGLLSLIGMKEPGPTTLALGIDLTSLGLNLNSQDNLYKTFGSPWSSEPAVGEPDYQIPACFSTKPPPALQKFHPLTLFYIFYSMPKDATQLYAANELYNKGWFYHKDYRVWLTRAPNSAPLVKTPLHSKHLALM

SEQ ID NO: 348509 - protein, 41 aa, Zea mays
  unsure (1)..(41): unsure at all Xaa locations
  Clone ID: MRT4577_81004C.1.pep
KTNTNERHFSKKHNITVVPLNSRGKNLIHGHDYMSGLKKXQ

SEQ ID NO: 348510 - protein, 243 aa, Zea mays
  unsure (1)..(243): unsure at all Xaa locations
  Clone ID: MRT4577_81005C.1.pep
RLQVSVRNSRVDPRVRYPWRYTYERIDGRVRGNLRQAAIDRFCKPDSDRFVFLLCTRAGGLGINLTAADTCIIFDSDWNPQNDLQAQARCHRIGQSKAVKVYRLITRNSYEREMFDKASLKLGLDKAILQDINRKGSTNGVQQLSKMEVEDLLRKGAYGALMDEEDEGSKFCEEDIDQILQRRTHTITIQSEGKGSTFAKASFVASGNRTDISLDDPNXWQKWAKIAELDTEAXNEKESLVID

SEQ ID NO: 348511 - protein, 74 aa, Zea mays
  Clone ID: MRT4577_81006C.1.pep
FGSSMSVLDEVFRISRAQTLIGLCGTDPGYWVTVALIDAVGRLAMQLLGFFMMTALMLGLGIPYNHWTTPGTHI

SEQ ID NO: 348512 - protein, 78 aa, Zea mays
  Clone ID: MRT4577_81007C.1.pep
FFVFWSCAYVTFQWVLHACGSLSWWPYPFLDLSSSGAPLWYLGMAIAHIPCFFLYWLVVKAKHTYFPRMFPHAYVRTV

SEQ ID NO: 348513 - protein, 241 aa, Zea mays
  Clone ID: MRT4577_81008C.1.pep
PPSARVWRLPRPRSPLCCPRPLLACLPATREQSLRPRIPRPRAELLSMPSDPLLPRKENLQILPPSPPTICARWPSTGYAHVTVVGSQVSPNSKRPRFERRPQQDVRIYASPSSRGRRRWIQGHQRRPSPSSPNGRRGDVLLVHTKCAVHTKLLANDFLLFSMAASSARHRCLRPCCANKCSKKMEIERQMATAKLFAEEQLAEDVALKRGIFVGAGCFAEKKIPIMEAGGRISILSKRHL

SEQ ID NO: 348514 - protein, 132 aa, Zea mays
  Clone ID: MRT4577_81009C.1.pep
PGFGDSVFGTTPSAPSTPSSWPTTSSSFPWPRAPLDTAVFDPAAPTSVRRRGKSSARWPRPSDSRRNSSPRMSPSREASSWGLVVLLRKKYRSWRCVHTFLGLGIFLSLLTCSRHIATEIANGHCLYCVSFS

SEQ ID NO: 348515 - protein, 107 aa, Zea mays
  Clone ID: MRT4577_8100C.1.pep
VLCFRGVFVISFILFILELFIPLLVVYWWPIRDKVSWGLRGPAVLLKKRTACQIRVREKMLAWGQVLFGKIFGVPIVKIHTWAVCCPCESDSASQRKVLFCACCRKC

SEQ ID NO: 348516 - protein, 40 aa, Zea mays
  unsure (1)..(40): unsure at all Xaa locations
  Clone ID: MRT4577_81010C.1.pep
SDVGTXAGMFEDKKIGDEFFSFIVDYKDLKACTILLRGAS

SEQ ID NO: 348517 - protein, 51 aa, Zea mays
  Clone ID: MRT4577_81011C.1.pep
KSCSMCPRTARVGYFASVVVSVITTASAYKTILLASFLSAPRVNTDERQWI

SEQ ID NO: 348518 - protein, 625 aa, Zea mays
  unsure (1)..(625): unsure at all Xaa locations
  Clone ID: MRT4577_81012C.1.pep
MSGPLNSNISGAPSNLRDSTGRPFTSSFSGQSGSLPGFHHSGSHNIHGNLNLANISGSLAPRNNSMAGIPSAGVQQPSGGISSGRFPPNNLQASLSQIPHGHSGISNRGGMNVGGNPGFGSSMNAIGGSIQGLSSNLANVGNRNSAPGLAASPVLGNLGPRIASSGNILGGSNIGRSISSGGLSMPGIASRMNLSGNSGSGAINIQGSNRIGMLQQASPQFMNLLGSSYPTPGGSLSQNQVQSGSGSLGSSGMLYEGSSGDNAPFDINDFPQLTGRPNSAGGGQGQYGSLRKHGVSVNAIVQQNQEFSIQNEDFPALPGNKGSSSDYPMDIHHKDHLQENINIMQAQHYPMARPSGFSLGSSYPPRQHQQSANSVQNAGLETIGLRPANSPSLSTNSGVYEQFMQKYHQPQTQNSLRLQXQLQILNSXKDQSQKSVQGTQAVPDPYSLLGLLSLIRMKEPGPTTLALGIDLTSLGLNLNSQDNLYKTFGSPWSSEPAVGEPDYQIPACFSAEPPPALQPFHFQKFHPLTLFYIFYSMPKDAAQLYAANELYNKGWFYHKDYRVWLTRAPNSAPLVKTPLHERGSYICFDPSIWDTVHKDNFVLHYEAVEKRPVLPSAGQNIRREL

SEQ ID NO: 348519 - protein, 164 aa, Zea mays
  unsure (1)..(164): unsure at all Xaa locations
  Clone ID: MRT4577_81013C.1.pep
SANSVQNAGLETIGLRPANSPSLSTNSGVYEQFMQKYHXHXQNSLRLQASSDPQQYKDQSQKSVQGTQAVLDPYSLLGLLSLIGMKEPGPTTLALGIDLTSLGLNLNSQDNLYKTFGSPWSSEPAVGEPDYQIPACFSTKPPPALQKFHPLTLFYIFYRYFRVH

SEQ ID NO: 348520 - protein, 186 aa, Zea mays
  unsure (1)..(186): unsure at all Xaa locations
  Clone ID: MRT4577_81014C.1.pep
PPTTHTQPPPYPPPPPPPPPPNYSSSPPPLSPPAPRSRSEPPVTEAAGRQAYDGRXPPPPPLARKSAPAQPWSHVETTHLIDAYEERWTALRRGQLKAHQWEEVAAEVAARCAATPGVVAQRKTGTQCRHKLEKLRKRYRTEGARPVTSLWPYFRRMDRLERGPLAVASSAYPAATGSPPAADGDE

SEQ ID NO: 348521 - protein, 67 aa, Zea mays
  unsure (1)..(67): unsure at all Xaa locations
  Clone ID: MRT4577_81015C.1.pep
MGRKFFVGGNWKCNGTVDQGEKIVKTLNEGNGPSSDVVEADVSPPYVLLPEVXSQLCRELPVAAENC

SEQ ID NO: 348522 - protein, 122 aa, Zea mays
  unsure (1)..(122): unsure at all Xaa locations
  Clone ID: MRT4577_81016C.1.pep
HYHXFDMRXLSRSLHTFDSHEAEVFQVEWNPNLATVLASSAADKRVMIWDINRIGDEQSEEDADDGPPELLFVHGGHTDKISELSWNPSEKWAIASVSEDNILQIWEMAESIYCDDLSMQVN

SEQ ID NO: 348523 - protein, 101 aa, Zea mays
  Clone ID: MRT4577_81017C.1.pep
MPKAAAPAKRATRTKRAKKDPNAPKRGLSAYMFFANEQRENVREENPGISFGQVGKLLGERWKALNEKQRAPYEAKAAADKKRYEDEKQAYNADQEEEESS

SEQ ID NO: 348524 - protein, 403 aa, Zea mays
  Clone ID: MRT4577_81018C.1.pep
MDGGSSTPASPPPTVSASAENMEEYRNWKKNAAVLYDLVISHPLEWPSLTVQWLPSESSARSHRLVVGTHTSDEAPNNLMVLDAVLPLPPRLAAAVAASGGAVPFPSVSVSRVAPHRGEVNRARCMPQRPYTVATKTCVDEVHVYHLGDDDGSGKSGAEVVLKGHEAEGYGLSWSPMKEGWLLSGSYDKKICLWDISSGSGAPVLDAQQVFVAHEDLVEDVAWHLKDEHIFGSVGDDCKLMMWDLRTNKPEQSILAHRKEVNSLSFNPFNEWILATASGDTTINLFDMRKLSRSLHTFDSHEAEVFQVEWNPNLATVLASSAADKRVMIWDINRIGDEQSEEDADDGPPELLFVHGGHTDKISELSWNPSEKWAIASVSEDNILQIWEMAESIYCDDLSMQVN

SEQ ID NO: 348525 - protein, 113 aa, Zea mays
  Clone ID: MRT4577_81019C.1.pep
MAESAATDGKADKVANGGGGGGDAAGEGKKRGDQAVAFHELFSFADKWDLMLMAAGSLGALAHGAAMPFFFLLFGDLINGFGKNQTDLRTMTDEVAKYALYFVYLGLVVCVSS

SEQ ID NO: 348526 - protein, 207 aa, Zea mays
  Clone ID: MRT4577_8101C.1.pep
MASDEFISLDAPCEADAKDEGGDVQVKAPDVSGMEPLVSDLQPEGKAGAVGSNPKTSAGNLDLEEGQVEDMDLADDDVVVGKDQLLDASIQPEISVAAVQTVIGFEVKLDKGDGTENEIIYESNSISIEESPSRGVKRARVESKEPSVRVIYSDLTRESKRKLMQLMQQWSEWQARRMHHLEEAVEVTLESGEETYYPALHVGSEKS

SEQ ID NO: 348527 - protein, 91 aa, Zea mays
  Clone ID: MRT4577_81020C.1.pep
QYFLGLEKFLAGSGDPSYPGGPLFNPFGFGKTKKEMNELKLKEIKNGRLAMLAILGYFIQGLVTGVGPFQNLLDHLADPVNNNVLTSLKFH

SEQ ID NO: 348528 - protein, 194 aa, Zea mays
  Clone ID: MRT4577_81021C.1.pep
SSEPSTRSRAQARTLSEAQVRRSTSAYAMLGAVGAIAPEIFGKMGIIPPETALPWFKTGVIPPAGTYNYWADSYTLFVFNMALMGFAEHRRLQDWYNPGSMGKQYFLGLEKFLAGSGDPSYPGGPLFNPLGFGKTEKEMNELKLKEIKNGRLAMLAILGYFIQGLVTGVGPFQNLLDHLADPVNNNVLTSLKFH

SEQ ID NO: 348529 - protein, 93 aa, Zea mays
  Clone ID: MRT4577_81022C.1.pep
KKQYFLGLEKFLAGSGDPSYPGGPLFNPLGFGKTEKEMNELKLKEIKNGRLAMLAILGYFIQGLVTGVGPFQNLLDHLADPVNNNVLTSLKFH

SEQ ID NO: 348530 - protein, 85 aa, Zea mays
  Clone ID: MRT4577_81023C.1.pep
PGSMGKQYFLGLEKFLAGSGDPSYPGGPLFNPLGFGKTKKEMNELKLKEIKNGRLAMLAILGYFIQGHQHTCCRRRHRQLFAVES

SEQ ID NO: 348531 - protein, 104 aa, Zea mays
  unsure (1)..(104): unsure at all Xaa locations
  Clone ID: MRT4577_81024C.1.pep
EKRXGTHASXMYSTFFKRICLRLAHGSHGGEGFNTQLGSKKNRDAGVMATVSAAVVTTIVARAAIARPNALGLPALRARSERVRCIYSKDAAPVSTKGAGSSLF

SEQ ID NO: 348532 - protein, 195 aa, Zea mays
  unsure (1)..(195): unsure at all Xaa locations
  Clone ID: MRT4577_81025C.1.pep
WAAPCSRPSLGRTARKAPFVVRASSSPPSKXGADRQLWFTSKQSLSYLDGTLPGDYGFDPLRLSDPEGTGGFIEPKWLGYGEVINGRYAMLXALGAIDPEIFCKMGIIPPETALPWFKTGVIPPAGTYNYWADSYALXFVFNMELMGFAEHRRLQDWYKPESMGKQYFLRLEKFLPGSADPTYPWRPXFQPLGFG

SEQ ID NO: 348533 - protein, 152 aa, Zea mays
  Clone ID: MRT4577_81026C.1.pep
SSEPSTRSRAQARTLSEAQVRRSTYNYWADSYTLFVFNMALMGFAEHRRLQDWYNPGSMGKQYFLGLEKFLAGSGDPSYPGGPLFNPLGFGKTEKEMNELKLKEIKNGRLAMLAILGYFIQGLVTGVGPFQNLLDHLADPVNNNVLTSLKFH

SEQ ID NO: 348534 - protein, 121 aa, Zea mays
  unsure (1)..(121): unsure at all Xaa locations
  Clone ID: MRT4577_81027C.1.pep
MAGQALLSGRELLGRPVESGVSRSSGRKEPFVVRASSSPPGKQGADRQVWFATKQALSYLDGTLAGDYGFXDPVGLSDPEGSVDFIELKRLGYVEGVSGRYAVVVGGDGIGPEIFGEMDII

SEQ ID NO: 348535 - protein, 227 aa, Zea mays
  Clone ID: MRT4577_81028C.1.pep
MAAQALLSGRQLLGRPVQSAVSRSSARKAPFVVRASSSPPAKQGADRQLWFASKQSLSYLDGTLPGDYGFDPLGLSDPEGTGGFIEPKWLAYGEVINGRYAMLGAVGAIAPEIFGKMGIIPPETALPWFKTGVIPPAGTYNYWADSYTLFVFNKKKKKKTLPLGFGKTEKEMNELKLKEIKNGRLAMLAILGYFIQGLVTGVGPFQNLLDHLADPVNNNVLTSLKFH

SEQ ID NO: 348536 - protein, 180 aa, Zea mays
  unsure (1)..(180): unsure at all Xaa locations
  Clone ID: MRT4577_81029C.1.pep
MHGVHYRSTSGGSLYITRNACCELDCLEHAIHADEQMPADKTIAGXSNVFHTPYXELTIWLHXIALSPPXPVLCVEPVELXCASDDVXTGTYRQLFQPEQIXSRYDDADNKFARGHYTIDKEIADLCLDNFWNACRHCTGLQSFLGFTSVXGGTGSGLGCLLLERLTXDYSEKSKCGFTA

SEQ ID NO: 348537 - protein, 144 aa, Zea mays
  unsure (1)..(144): unsure at all Xaa locations
  Clone ID: MRT4577_8102C.1.pep
MATADTAAGRGATRFTLLAGGGLRSRISRLRNAARVQRHRGLTTTGLLENADLQPNEHGKADMLDYRVFLRHDFFLNAPPRQDVPLLAGDGVLHFHREIPKESSAQMEGATXEALTSIKYDTNDVNRPYYPHNIKWNYGRLPRT

SEQ ID NO: 348538 - protein, 119 aa, Zea mays
  Clone ID: MRT4577_81030C.1.pep
VIPILGRGTTSPTGVRGGQQILKGAGPFLPENKGGLGPKNDFFLENKGGNGFFFFPQKGKGVFPLGPKRFLCPRVPRKLKKKGGGIFWKNFFCFKPGSPPFFFLLCLGVGWVWGPPQVF

SEQ ID NO: 348539 - protein, 487 aa, Zea mays
  Clone ID: MRT4577_81031C.1.pep
MAPTSMLPFAPSNTSLPYSSRATTAAAFAPRGLHHAAAGRSGGGQRLACAAPRRRRGGGLVVRASADYYATLGVPRAASNKDIKAAYRKLARQYHPDVNKEPGATEKFKEISAAYEVLSDEKKRALYDQYGEAGVKSAVGGSGGAYTTNPFDLFETFFGASMGGFSGMDQSAFRTSRRSTAIQGEDIRYDVILGFTEAIFGTEKDIILSHLETCDTCGGSGSKAGSKLRICSTCGGRGQVMRTEQTPFGLFSQVSICPTCAGEGEVISEYCRKCSGEGRIRVRKEIKVKIPPGVSKGSTLRVRGEGDAGPKGGPPGDLFVCLDIEEPSDIKRDGINLYSTVSISYLEAILGTVMQVRTVDGTSDLRIPPGIQPGDVIVLAKQGVPSLNKPTIRGDHLFTVKVAIPKRISGRERELLEELASLSNGGFARTDAKPKPAQPKRVHLEKEVGASQEDTDKSKAAGDWLKKLTDFAGSIANGAAKWLKENL

SEQ ID NO: 348540 - protein, 269 aa, Zea mays
  Clone ID: MRT4577_81032C.1.pep
MAAQALLSDRQLLGRPVQSGVSRASVRKAPFVDMASSSPPAKQGADRQLWIASKQSLSYLDGTLPGDYGFDPLGLSDPEGTGGFIEPKWLDYCEVINGRYAMLSAVGAIAPEIFSKMGIIPPETELPWFKTGVMPPAGTYDYWADSYTLFVFNMALMGFAEHRRLQDWYNPGSMGKQYFLGLEKFLAGSGDPSYPGGPLFDPLGFGKTEKEMNELKLKEFGSRNGRLAMLAILGYFIQGLVTGVGPFQNLLDHLADPVNNNVLTSLKFH

SEQ ID NO: 348541 - protein, 86 aa, Zea mays
  Clone ID: MRT4577_81033C.1.pep
SRRPLWALGLLVVLHKKEEGEHHKKDDGEHKEGILERYNDKITDEHGNKSGDHSERRDKKKKTDKPKHGEGHPHDGGHCTCSNDSN

SEQ ID NO: 348542 - protein, 108 aa, Zea mays
  Clone ID: MRT4577_81034C.1.pep
PPCFASRASPPRDWLRLAWVGFRSLTGLASLGTYAVAPRAGAIGSARGGVRCHACPGPSLVVVPPVRRLRPPLRLRGSVLSMVWVSHRFVSGPWPIIGFEPDCNVLYP

SEQ ID NO: 348543 - protein, 69 aa, Zea mays
  Clone ID: MRT4577_81035C.1.pep
EPVLLSSGSGCHVGGVVQLASPDGHISLSFVCALIHRVSRPVGQNMTRCTPTLFIKVKHQHQRSSLFSW

SEQ ID NO: 348544 - protein, 87 aa, Zea mays
  unsure (1)..(87): unsure at all Xaa locations
  Clone ID: MRT4577_81036C.1.pep
TSFFLPTLCTSLDQNAPPPPPGTPPPHAPVTNRMSGEGPXLLGMLDTLVCXTXDLLKSHSLKLFYTFCSSLSHHCTLPLXVHPLPHL

SEQ ID NO: 348545 - protein, 50 aa, Zea mays
  Clone ID: MRT4577_81037C.1.pep
WMALYRWHAGGINTFRRGQDTNFHRICEMPKGFGMQLNYGIVVTSTTGGC

SEQ ID NO: 348546 - protein, 57 aa, Zea mays
  Clone ID: MRT4577_81038C.1.pep
APRVPGLVLPPLGTFLLGGGPGPPNPLVVIGFPLRLSGGQFFLQPNPSFKYRMGCCA

SEQ ID NO: 348547 - protein, 72 aa, Zea mays
  Clone ID: MRT4577_81039C.1.pep
HTYQQARNPRFYYHAFIHGGALLAPSRGLQIPGPHSMTPSRFRALGAMVQPISDGPSPPMKISMSLRDIWRR

SEQ ID NO: 348548 - protein, 168 aa, Zea mays
  unsure (1)..(168): unsure at all Xaa locations
  Clone ID: MRT4577_8103C.1.pep
GRCLRGKVQLKRRENXINRQVTFSKRRSGLLKKANEISVLCDAEVALIIFSTKGKLYEYATDSCMDKILERYERYSYAEKVLISAESDTQGNWCHEYRKLKAKAETIQKCQKHLMGEDLEFLNXKELQQLELQLENSLKHFRSRKRPPMXLRSINELXREEKSLXEEN

SEQ ID NO: 348549 - protein, 44 aa, Zea mays
  Clone ID: MRT4577_81040C.1.pep
YILLYSRNLSVDYLYCQHTGDFQGKITATTGLYLNYISRSLHLL

SEQ ID NO: 348550 - protein, 50 aa, Zea mays
  Clone ID: MRT4577_81041C.1.pep
SFPCCIKELIVLLAQLGKIALRISSLVGSGFEFGNSCKSSYAHDGVLLFI

SEQ ID NO: 348551 - protein, 59 aa, Zea mays
  Clone ID: MRT4577_81042C.1.pep
TDPERLATYRWALHNDLSPAHRVFTGRLFLFKFRGGHLSAAEITRVLVTPLGGGQVVLR

SEQ ID NO: 348552 - protein, 68 aa, Zea mays
  Clone ID: MRT4577_81043C.1.pep
RKLMGVLANAMARRETEKSSLRPPKERGVSPGLPLLDHLNILECVTCQFFSKYVSFPKVLFNVIQEGP

SEQ ID NO: 348553 - protein, 109 aa, Zea mays
  Clone ID: MRT4577_81044C.1.pep
SMHRRLPTIVLGQFDAVEPPSLPATAYPASPRLCSTRLPLLAVVAVIAAASLDVAGAPHRRASSHSYTFFSAPAAAVAPSPHLTPSSSRERSVPAPSLAAPLKPAIRSM

SEQ ID NO: 348554 - protein, 66 aa, Zea mays
  Clone ID: MRT4577_81045C.1.pep
AMPTRKPFISEASGTDSVGFQKELQSIFDRKEFATPFLFFFYMTNNLQIRESLKIDTATVYKVQSE

SEQ ID NO: 348555 - protein, 73 aa, Zea mays
  Clone ID: MRT4577_81046C.1.pep
RPSVSVRFWVPVPNQCVMSNEGPPSWVQSVYQATGMEGVDTYKMEKIRFLPSKKKKKKKKKKKKKKKKKKKNK

SEQ ID NO: 348556 - protein, 151 aa, Zea mays
  Clone ID: MRT4577_81047C.1.pep
THHPLLITANYHTHDRLRLLPPPWPVWLHPASGRRTTTASRVPKICRGRIGSKTRIFSASPSMHSVFARRCLVRRRCLPQQRQCLHREELGCPQLLRGSHEPYSCGNDALHVRERRHPEDGLHSHDMWSSAHAGTLETEMTGALLDTLRVN

SEQ ID NO: 348557 - protein, 46 aa, Zea mays
  unsure (1)..(46): unsure at all Xaa locations
  Clone ID: MRT4577_81048C.1.pep
KNKETDVIEGIQHLEEESKKDEAALCLKPVLVXEQELRRWGRWGTR

SEQ ID NO: 348558 - protein, 45 aa, Zea mays
  Clone ID: MRT4577_81049C.1.pep
PVLLSSSLFIFAPKLVLLGDLLHFHLDSSRLYSHRHHLHSILPSY

SEQ ID NO: 348559 - protein, 406 aa, Zea mays
  Clone ID: MRT4577_8104C.1.pep
LLLFLDVAFLASRGVKRARVESKEPSVRVIYSDLTRESKRKLMQLMQQWSEWQARRMHHLEEAVEVTLESGEETYYPALHVGSEKSCAVSFWVDNQARESDTVDDGSVPLYDREFTLHSTPLGGSSNTERVDKDDSRCFNCGSYSHAMKDCPKPRDNVAISNARKQHNLKRNQSNVNRVQNRYYQKTPGKFDDLKAGVLGPETRQCLGIGENDPPPWLHRMRELGYPPGYLDVVDDEDRPSGITIFGDGEVKLEYEEGELSEQGEASPPKKKMTVEFPGINAPIPENGDQWLWGSTPPQSSGRHHSLDSRDFHDRGPPGADHYSPRYHSHDFGPLRPSIGRSHSDRGWRSPPRYDNPPADDGAWTPHSYPSRQHLGHYSSSSEMSSRHSRDKDRDRHDSRHYHHRR

SEQ ID NO: 348560 - protein, 709 aa, Zea mays
  unsure (1)..(709): unsure at all Xaa locations
  Clone ID: MRT4577_81050C.1.pep
MNLGIANNGNRMEATSTAERPMLSPTTAIAEGRELTTALSPFQHAQRARHFLTRPPRVGEGAAFDPTRDMFLHLRVARPPAEGRGRNQLLPRYWPRITDQELQQISGDSNSTIVPLFEKVLSASDAGRIGRLVLPKACAEAYFPPISQPEGRPLTIQDARGKEWHFQFRFWPNNNSRMYVLEGVTPCIQSLQLQAGDTVTFSRIDPGGKLVMGFRKATNTVSLPDSQISAIANGSLLSETLFSTANESIGVVSGYPXSSLNKGSCXFHPSSLYDHHINSADGDVSWNKADKFGSRPDEGSLQFLQKRSRNIGSKSRRFLIDAEDAMELKLTWEEAQELXRPAPTAXPTVVMIEDYEFEEYDEPPVFAKRSIFTIRATGEQDQWIQCDECSKWRRLPLNVIVASKWTCTDNSWDPKCCSCSAPEELTPKELQSVMQQYEEMKRRKGSYGLKTNVAEMDASSFDALATGAVFGEVGNQGTASVATTTRHPRHRPGCTCIVCIQPPSGKGPKHNPACTCNVCMTVRRRFKTLMMRKKQRQSEREEAEASKKIAWVNRDEPEGSSLSRSPQTLDTTRDSSDVTMFDKVAADVNKGHIDLNFHPAAPAVRGAGDQGQNGAQQPRAVSMMGLLEVASRPLDNYMKQNGLTSLAGEQGGGSSSTATVPPAPVESEDRTSDEGRVASAEREADAMAIDEAGENQQDKPADSAAAAAT

SEQ ID NO: 348561 - protein, 640 aa, Zea mays
  unsure (1)..(640): unsure at all Xaa locations
  Clone ID: MRT4577_81051C.1.pep
MFPHLRVARQPADGRGRNQLLPRYWPRITDQELQQISGDSNSTIVPLFEKVLSASDAGRIGRLVLPKACAEAYFPPISQPEGRPLTIQDARGKEWHFQFRFWPNNNSRMYVLEGVTPCIQSLQLQAGDTVTFSRIDPGGKLVMGFRKATNTVSLPDSQISAIANGSLLSETLFSTANESIGVVSGYPXSSLNKGSCXFHPSSLYDHHMNSADGDVSWNKADKFGSRPDEGSLQFLQKRSRNIGSKSRRFLIDAEDAMELKLTWEEAQELLRPAPTAKPTVVMIEDYEFEEYDEPPVFAKRSIFTIRATGEQDQWIQCDECSKWRRLPLNVIVASKWTCTDNSWDPKCCSCSAPEELTPKELQSVMQQYEEMRRRKGSXSEAEXAEMDASSFDALATGAVFGEVGNQGTASVATTTRHPRHRPGCTCIVCIQPPSGKGPKHNPACTCNVCMTVRRRFKTLMMRKKQRQSEREEAEASKKIAWVNRDEPEGSSLSRSPQTLDSTRDNSDVTMFDKVSDVNKQGHIDVDLNLHPAAPAVQAAQQQPRPVSMMGLLEVAGRPLDNYMKQNGLTSLVGEQGGGSSSTATVPPAPVESEERTSNEGLVPSASAEREPNAMAVDEAGENQQDKAADDDDDAVAAAAT

SEQ ID NO: 348562 - protein, 108 aa, Zea mays
  Clone ID: MRT4577_81052C.1.pep
LGDDDLDLSRTRHSILQAPHLVVPALDLKSRWGTHSLRRAMARQWRASGAADSGTRVHSSHQPQAREVPRERHQAPRIIAAQQLATTPQPLPHLFSLCPVSFVGSNAS

SEQ ID NO: 348563 - protein, 49 aa, Zea mays
  Clone ID: MRT4577_81053C.1.pep
KSYVLYLSKTLKVGLVAVRPHIKAWLEAILARHALHNSVAAIQLFVSAS

SEQ ID NO: 348564 - protein, 123 aa, Zea mays
  Clone ID: MRT4577_81054C.1.pep
LGDDDLDLSRTRHSILQAPHLVVPALDLGFEIPSTRMIFKMTRDLAAQISLGNALPATRDGQTMASFGCSRFRHSCPQFSPAAGTRSSQRALPSAQDNRRPAAGHDAAATSSLVLSLPCLFRR

SEQ ID NO: 348565 - protein, 49 aa, Zea mays
  Clone ID: MRT4577_81055C.1.pep
APAALITVISPPAQSHRRCIVVPGIKRGHASPRRFSAGFGDELLRIWCT

SEQ ID NO: 348566 - protein, 235 aa, Zea mays
  Clone ID: MRT4577_81056C.1.pep
VVYLSPVDFGIDKSIFIKPKTFHLTVLMLKLWNKDRIAKAADVLQSVSTKVNEALENRPISIQLRGLTCMKGSPAKARVVYAPVLEVGGEGRLARACKVITDAFVKSGLVFERDARELKLHATVMNVRHRKRKYGNEDWGEYPIHEVHLSQRFKFDKSGYYYCCPCLQRCTQSEICSCDHVLGLLHNNNNNNNKTAVHEAFNFVISGMPLGQVLLCINCFESPMSRCIYCLESPI

SEQ ID NO: 348567 - protein, 222 aa, Zea mays
  unsure (1)..(222): unsure at all Xaa locations
  Clone ID: MRT4577_81057C.1.pep
MSCGAPRLAYVAVSACGQARAVRQESLPWSRPASSPVGLPSPDRCHPRTALSRGAARRRRRGLGLARTSTRAQTPCLSRRPALQHITRQPYGPVWXRAIRXNLXLGGXSTPTRLXSXVRARRLALHGLVADLDRQRRASGSAVLAAESLRAAMFGLLATMCFGVGVDEGVVRAMADAQDDLVQCFLGLRVFATLPALTGLVYRDRWRKLLQLRRQQEEAYLP

SEQ ID NO: 348568 - protein, 158 aa, Zea mays
  Clone ID: MRT4577_81058C.1.pep
MARRNIGVAVDFSSCSKAALRWASTNLARNGDRLILIHVNSSCQNERGAVHLWEQSGSPLIPLAEFSDVARTYGVSPDKETIEILTQAANHRGIEVFAKVFYGDPAKKLYEAADLVPLSCMVVGSRGLSTLKRALMGSVSTYIVNHAACPVTVVKEMV

SEQ ID NO: 348569 - protein, 120 aa, Zea mays
  Clone ID: MRT4577_81059C.1.pep
QASHIRPYLARGAEPRVPGPIDGQLPGGGGGGRVEPPPRRQRRAAGRCGHRRARHGDGNRGHYGTARGAPKNEQAGRSRAADPDPYACPEPGGATDGTMITKATLLEPRDLLLLRQGYQL

SEQ ID NO: 348570 - protein, 205 aa, Zea mays
  Clone ID: MRT4577_8105C.1.pep
MHASARLLRRLSSSSSARSLRRLPRHPSPSPPPHPSRLPPLRTVTRALLPHLAAPRFSTISCASTPSLRLGECGAPGTPAIPSAEVSEGEEEVESAAARHDTDAFAAVELALDSVVKVFTVSSGPNYFLPWQNKAQRESMGSGFVISGKRIVTNAHVVADHTFVLVRKHGSPAKYKAEVQAIGHECDLALLTVESEEIWEGMKKP

SEQ ID NO: 348571 - protein, 91 aa, Zea mays
  Clone ID: MRT4577_81060C.1.pep
GLIIQGNEALEHREAGGQARDGPILCINNCGFFRRAPTINMCCKRHREKSTSPDLAKLAGFSIYRMVNGRHPLMVPVVAVRTTVPWCVPVV

SEQ ID NO: 348572 - protein, 71 aa, Zea mays
  Clone ID: MRT4577_81061C.1.pep
CWIFSGGVQHLLPGVKNKVRDGATCIAHHVFWARAHPVCRFSVVGSLYSGVFVTILMLTVRNIVGYAASAS

SEQ ID NO: 348573 - protein, 89 aa, Zea mays
  Clone ID: MRT4577_81062C.1.pep
SRFITCFKKGPSFNFFFFFCRKKGDFMPCLYKGRPSIFFFFLPNKVDLCHAYIKAVIQFFFFFFGEKSGFMPCLYRGRHSIFFFFFFDE

SEQ ID NO: 348574 - protein, 493 aa, Zea mays
  Clone ID: MRT4577_81063C.1.pep
EQVPSRKDIKKIIPRPICSRFGLRRLKVAIEGDVEACQKDFSNVCAFIGTRDIVQEHIAYKVWPLVDSWEMSKETTAESSEGGLVRLKYTFRFRERFDEPNDDWLKCIEATSDELLGTYSKAEDDALSAAFGGRGKKRLNRVFDAIGFVYPDYHYPLLRQGKKRKIVTSANTVVPKGKKMKTELPKVQNAPVATPKRRRMASVLDAVMETTKSLSPAPTKKVAKAIKVQAEADAGPSVPIETKAATPEDKAEQQTSDTGMAAGQDMIEKAKSPAPKALAEDVDYIIRHASGKKLSKEEILEARHYAQKLKYPKGALVFNGTDEDDFLYYLLDNKEIFVCREIAKSMGFPKIEDGLSAMSKDDLADSLAYNSIKGLILSNALRAQKSAEDESCTMALSNLRSEENFIRGDPEGVIEWISREAEAFEEIMNDPRDICAFSGARGIAAILEKAGCDHVKIAAQAEAAFSIGDTKDPSAEATLVGGKFCSDVWVNGG

SEQ ID NO: 348575 - protein, 58 aa, Zea mays
  Clone ID: MRT4577_81064C.1.pep
WPSLLASTWPAGGTDRRARAENLDWPARAHGPRRRVGGEKQAGTVREEAGDMHGGSFA

SEQ ID NO: 348576 - protein, 89 aa, Zea mays
  Clone ID: MRT4577_81065C.1.pep
KSKCDARANASQLEQYRGFVHFFLGLERTPWEITSMPFTFAKGYKKIHWGLKSLFPFKTVPFNAVMPNLPWAGIRGCNKLCIGGAFPNG

SEQ ID NO: 348577 - protein, 117 aa, Zea mays
  unsure (1)..(117): unsure at all Xaa locations
  Clone ID: MRT4577_81066C.1.pep
CNIYISYNNGWLNYKRLWGCSSIKPYWXRSYFTNTQAIIYVXDSSDTEKASXQKEEFHAILEGGELKGAHVLVYANKQDLPCALDDNAITGALDLHIIKSQPWAILKTSALKGEGLF

SEQ ID NO: 348578 - protein, 52 aa, Zea mays
  Clone ID: MRT4577_81067C.1.pep
SCPWFGHGVSLSMWRIVLKSSYYVLVFLFGLFSGYICNPMFCCYRLVSVLLF

SEQ ID NO: 348579 - protein, 120 aa, Zea mays
  Clone ID: MRT4577_81068C.1.pep
TETVAVIGRYISENYNGVALHPIDFIDTSSGKLLAEVMDPDIITISPVNKLHPQDDILATGSSRSIFIWKPKIEDELTEERAKHDNSSDDDSGGDSGGKNKKAKKTRFTHAVKGKGKSKV

SEQ ID NO: 348580 - protein, 95 aa, Zea mays
  Clone ID: MRT4577_81069C.1.pep
GRGTPCSCWGPPPGFFFSSKQVGFGWFYFYSPFGLWIFWLPFSCSPAFPTTRGVWCLDLCFTGGGSFWASKIGNAQKWSHKSTKRAAPHLVGRVG

SEQ ID NO: 348581 - protein, 41 aa, Zea mays
  Clone ID: MRT4577_8106C.1.pep
LVNLFKLYIQKPSFVFIQKNKELIFPYRPQFNPLLKSKRRV

SEQ ID NO: 348582 - protein, 69 aa, Zea mays
  Clone ID: MRT4577_81070C.1.pep
LQKQPILTRTFLDTFKKNAKHTTQILNYTNHSLVLLHLTHSPFLNKIRLGLLPPTLFRDPASSALLPLL

SEQ ID NO: 348583 - protein, 78 aa, Zea mays
  unsure (1)..(78): unsure at all Xaa locations
  Clone ID: MRT4577_81071C.1.pep
GRGASFLRHPGAISFSRRDVMARDCTATSVAELGPWIGDLLPLLVXVLLIAXHILALGYWIYRLDTDGPSQSARSNNH

SEQ ID NO: 348584 - protein, 194 aa, Zea mays
  unsure (1)..(194): unsure at all Xaa locations
  Clone ID: MRT4577_81072C.1.pep
YRSLKRNVDRVRRSMNEFDVSRLTEAQDYRIFASTWNVGGKCPSRGLDLDDWLHSSPPADIYVLGFQEIVPLNAGNVLGTEDNVPAKKWVSLIRRTLNKNPEPSSHGGYRTPSPVPDPDVELDADFEGSLRRQDSSSFFHRRSFQNLSRSLRVSGNDMFSQPRLDRXFSVCDPVNIGGRPSDFDGNFSVSDHQR

SEQ ID NO: 348585 - protein, 81 aa, Zea mays
  Clone ID: MRT4577_81073C.1.pep
KGKVPRGNGTQLLGGRTKPNHPPPGEKREFRPPPEGVFFWDQAAPRVFLEKPQQAGGTFKQKRKWVATLHQALGLLPPGPG

SEQ ID NO: 348586 - protein, 57 aa, Zea mays
  Clone ID: MRT4577_81074C.1.pep
SLLRSWPCVRPIPVTPSDVFTRTEVTTTLYRPYLRCTPSTCLIVYSWDVYPSCVAFR

SEQ ID NO: 348587 - protein, 92 aa, Zea mays
  Clone ID: MRT4577_81075C.1.pep
FLDRSTKPFSPSHPSFVRRFPQMMLLRLCNNQRGAPSSLSRAPSPAVTSPPMSASWTAPSFLENNDQFVEPKGATYEDPEHSFVEGWHLCNH

SEQ ID NO: 348588 - protein, 86 aa, Zea mays
  unsure (1)..(86): unsure at all Xaa locations
  Clone ID: MRT4577_81076C.1.pep
LIMGGGIEDTYSAPNLSLHAMGEKTXHCQGAGNATPVKICNSMSMSLPMLGSDMTSMYLCNNLGTKSTTLHIHLEQCKRCLLYLIY

SEQ ID NO: 348589 - protein, 45 aa, Zea mays
  Clone ID: MRT4577_81077C.1.pep
THINRFSLNIRFLICKPTLPFALINSPTLCLIRLTLTIHLRLLYH

SEQ ID NO: 348590 - protein, 111 aa, Zea mays
  unsure (1)..(111): unsure at all Xaa locations
  Clone ID: MRT4577_81078C.1.pep
KKNLVRIKCRXVEGTXAQYVRTLVFDMHSRXLLDMLGNDRSALLSFLXPEPWQACTYMLSTIISDKMTDEPLVLSNMQGYFDAAFDLASHVITRXRRYANICQTIVSHVGP

SEQ ID NO: 348591 - protein, 44 aa, Zea mays
  Clone ID: MRT4577_81079C.1.pep
HLHKNHEVLTTLSGYFKHTEIQLPKPALRFREKQHTDFEPLCYN

SEQ ID NO: 348592 - protein, 47 aa, Zea mays
  Clone ID: MRT4577_8107C.1.pep
IKFFYIKKSCPISFRHNKEGVIFGFGKNATAIYKTASTSHLTILLFN

SEQ ID NO: 348593 - protein, 108 aa, Zea mays
  unsure (1)..(108): unsure at all Xaa locations
  Clone ID: MRT4577_81080C.1.pep
CSXWCVVAXXRFXXXVRRCGVXCSSXCSAGLXGXXVGXXXLAVLLXSGWAVFFGXXSFWFVPXXLCFLLSWFPVXXXPAXXVLGVPLLXVPPPXLSSVPLWXXXCRSP

SEQ ID NO: 348594 - protein, 106 aa, Zea mays
  Clone ID: MRT4577_81081C.1.pep
VAGGAAAGLHQYAAGPAQLPPTRCSTSSTWDSWLLAVQAACRSGPPPLHLSRLVRSWLGWHALMVPVSPSGVVIGSRASAVVRGRAEITERWSKFPPLTVCGRGFK

SEQ ID NO: 348595 - protein, 72 aa, Zea mays
  Clone ID: MRT4577_81082C.1.pep
TASKQDYYKQEQTVIYERYQCIQEGPPISRMCADLKGNEAFDNNIHLYGGDKQMTTHYLSRRSDINNGHNTD

SEQ ID NO: 348596 - protein, 297 aa, Zea mays
  Clone ID: MRT4577_81083C.1.pep
MAGLISLRAGPRSSPSLARSSSAWASPSPASQVAVRLPSPLFRCAKLRRSRSLLAAALEISKDGSAAVLANSLPSQGAIETLRNADAVCFDVDSTVILDEGIDELADFCGAGKAVAEWTAKAMTGTVPFEEALAARLSLIKPSLSQVEECLEKRPPRISPGMADLVNKLKSNNIDVFLVSGGFRQMIKPVAFELGIPPENITANQLLFGTLGEYAGFDPTEPTSRSGGKAKAVQQIKQDHGYKTVVMIGDGATDLEARQPGGADLFICYAGVQMREPVAAQADWVVFDFQELITKLP

SEQ ID NO: 348597 - protein, 123 aa, Zea mays
  unsure (1)..(123): unsure at all Xaa locations
  Clone ID: MRT4577_81084C.1.pep
MHTHLVRACVACPCLLVAESRVKKGVFGRKGGALIKKSVTRXSVKAGLQLPVGRIGRYLKKGRYAQRVGTGAHVYLAVVLEYLAAEVLELAGNAAKDNMKTRIIPRHVLLAIRNDEELGKLLS

SEQ ID NO: 348598 - protein, 199 aa, Zea mays
  Clone ID: MRT4577_81085C.1.pep
FKKGYWAPERLKTLLKKTKSRFPKCLFESPLQKKPPFNPWKNFPGLIRGGFPRQKKFLTRFFSLGLGPKFKTQIFRGEKVGPKVRVYSPKIQPTKPVWVSGLLKTLFLGQEAQMEKGVSPGGGGVFFPPKIFKRFKSKAPKKGRFKPFPKKGGEILPKTLFFFFFKKKKKKKKKKKKKKKEKKKKKKRKKQTRGGGPGT

SEQ ID NO: 348599 - protein, 165 aa, Zea mays
  Clone ID: MRT4577_81086C.1.pep
PPELTVVHRALLYRVWGTDSVHQESIPCRCRGGTSFAHGRACLRPGILDCNLADGEYVLIPEQGAVHEEDQEPAPEPTTKNLPAAPAFEDCNLADGEYVLIPEQGPVQEEDQEQASEAAIEDLPAAPAIEGTMQDVVDGVTWPTTLPPGWTVEWDVAPAGEEHEE

SEQ ID NO: 348600 - protein, 176 aa, Zea mays
  unsure (1)..(176): unsure at all Xaa locations
  Clone ID: MRT4577_81087C.1.pep
PDTAHSYGNMALFYHGLXKTELALRHMSRTLLLLSLASGPDHPDVAATLINVAMMYQDASNMNTALRYLQEALMKNERLLGPDHVQTAHEKKTYDILVKQLGENDSRTKDSENWLNTFKLREEQVNAQKQKDQGANASDNAVKFLKANPAFLQAMKAAALQSGDRSAVNRSLNAAV

SEQ ID NO: 348601 - protein, 78 aa, Zea mays
  Clone ID: MRT4577_81088C.1.pep
MNQVRILANDCNNCIDKYVYRGNPDVHLRRSGLLRYLLWPPWFVRKMFAQHDAAGQLRVLKDRAREVGERRMRYDVKV

SEQ ID NO: 348602 - protein, 565 aa, Zea mays
  unsure (1)..(565): unsure at all Xaa locations
  Clone ID: MRT4577_81089C.1.pep
PRVRKDILRQSLDHDIGPAIAHFLNCFMGKVLGASTEGSLSDMQSKTLKGHENSQTQKSTKGHKLSNAAASRKSLSAYSHLTSDGIWFSIKEFAKSKYQFEVPDDARLSAKRVAVLRNLCQKVGITIAARKYDLDASTPFEASDILNLQPVVKHSVPTCTEAKNLMEAGKVRMAEGTXMRHMHCFLKPFHCFNXTGPMHKDAANCCRYLAMVLYHAGDTAGAVVQQHRELIINERCLGLDHPDTAHSYGNMALFYHGLNQTELALRHMSRTLLLLSLASGPDHPDVAATLINVAMMYQDASNMNTALRYLQEALMKNERLLGPVHVQTAVCYHALAIAFSCMSLYKLSIQHEKKTYDILVKQLGENDSRTEDSKNWLNTFKLREEQVNAQKQKGQEANASDNAVKFLKANPAVLQAMKAAAIQSGGVSANVNRSLNAAVVGEGVPRLRGVDERAARATAEARKKAAARGLNVRNGPVANHASDELAQILKLINAVSGSSTPGSAKTEVSASEGQATNGCIQNGTDTEPKAADTNGLSASVKSTVNAPFGLGTTLESKKQKSKQKS

SEQ ID NO: 348603 - protein, 270 aa, Zea mays
  Clone ID: MRT4577_8108C.1.pep
MPEILRPSTQSAGSNPPSALDPRTSEIRPSPLRGQEMLLLLFFSVLAAVAAFLLFKFATVVDGDLTLVSRGPPLRERVDGKVVWITGASRGIGEVLAMHFANLGAKLILSARNKDALARVKKNILTGEESLKEVVHVAESFFSNAGVDYMVHNAAFERPKRRALEESEEGLKATLNVNVFGTITLTRLLAPYMLDRGMGHFVVMSSAAGKVPAPGQAIYSASKHALNGYFASLRSELCTKGIKVTVICPGPIETLQSSAAASSSQTHSAE

SEQ ID NO: 348604 - protein, 173 aa, Zea mays
  unsure (1)..(173): unsure at all Xaa locations
  Clone ID: MRT4577_81090C.1.pep
AKATSVEGDDKSEESSVHTHEENDNSSSEILFNPNVFTXEIAADEELVKRAGTYLVDIVIPKFVQDLCSLDISPMDGQTLTDALHLHGINIRYLGKIAGMVKHLPHLWDLFSTEIIVRSAKHVIKDILRQSLDHDIAPAIAHFLNCFVGKVLGASTKSSLSNAQSKTLKGHEN

SEQ ID NO: 348605 - protein, 254 aa, Zea mays
  Clone ID: MRT4577_81091C.1.pep
EGKVPLWEALCEKHNAVIELLVESGAELSSGDTALYACIAVEENDAELLLEHGADVDKQDSNGWSPRDLADQQGHDDIQALFKSRKAHRKHASNGRVAPMLIGRFNSEPSMPDMSHENARVRSEVVPQKLLRKRVSFQNSLFGVISSSHAHQDTGRLLSKGLAGTEGPNCRHDSLIRVTISCPEKGGNAAGKLVRLPRSMAELLELGAKKFGIKPGKVLTVGGAEIDEVELIRDGDHILLVSDEWVPDVEQIRP

SEQ ID NO: 348606 - protein, 814 aa, Zea mays
  unsure (1)..(814): unsure at all Xaa locations
  Clone ID: MRT4577_81092C.1.pep
RPRVRGSVDNGKKISWNETFHSKVVEAAKRLHLKEHVVLDGSGNPIKLAATVECKGIVGSDDRHYILDLMRVTPRDSNYIGQGHRFCVLRPELIASFVEAESMKQSLKQKVPDAPVASTSDAKATSVEADDKSEESSVHTHKENDNSSSEILFNPNVFTEYKLDGSPEEIAADEELVKRAGTYLIDIAIPKIVQDLCSLDISPMDGQTLTDALHLHGINIRYLGKIAGMVKHLPHLWDLFSTEIIVRSAKHVIKDILRQSLDHDIAPAIAHFLNCFVGKVLGASTKSSLSNAQSKTLKGHENSQTQKSTKGPKLSHAAASRKSLSTYSHLTSDGIWFSIKEFAKSKYQFEVPDEARLSAKRVAVLRNLCRKVGITIAARKYDMDASSPFEASDMLNLQPVVKHSVPTCTDAKNLMEAGKVRMAEGTXMRHMHCFLKPFHCFNXTGPMHKDAANCCRYLAMVLYHAGDTAGAIVQQHRELIINERCLGLDHPDTAHSYGNMALFYHGLNQTELALRHMSRTLLLLSLASGPDHXPDVAATLCXALMMYHMNILXTSDGIWFSILXKNERKISVXNCQMKLXYHALAIAFRCMSLYKLSIQHEKKTYDILVKQLGENDSRTKDSKNWLNTFKLREEQVNAQKQKGQEANASDNAVKFLKANPAVLQAMKAAAIQSGGVSANVNRSLNAAVVGEGVPRLRGVDERAARATAEARKKAAARGLNVRNGPVANHASDELAQILKLINAVSGSSTPGSAKTEVSASEGQATNGCIQNGTDTEPKAADTNGLSASVKSTVNAPFGLGTTLESKKQKSKQKS

SEQ ID NO: 348607 - protein, 79 aa, Zea mays
  Clone ID: MRT4577_81093C.1.pep
LPSRIGCNPTSYPTSSSARVWVRGSTVSTAPSLAYRGPCAFLIVTSLYLSCFYSVHTRLLRTHSLTNMVYGSIDSVTSS

SEQ ID NO: 348608 - protein, 883 aa, Zea mays
  unsure (1)..(883): unsure at all Xaa locations
  Clone ID: MRT4577_81094C.1.pep
MAGWGPSRLPTCGPWGRGVALERELSRDGSHYSISSGILPSLGARSNRRAKLRPFIVSPYDRRYRCWETFLIILVIYSAWVSPFEFGFIRKPTGALAAVDNVVNAFFAVDIILTFFVAYLDRMTYLLEDDPKRIAWRYTTSWFVLDVASTIPSEFARKILPPNLRSYGFFNMLRLCRLRSNQLLLARGEQHRHFHYFWVVDVQPICVTLFEVHCSACFYYLLADRYPNSTDTWIGNSMPDFRQRGMCIRYVVSVYLSITTLTTVGYVHLHVENTRDAPVTLCASVXPPFKLXSVAYDGFEAVGCIQLGNEFVVSWSVCSFVISFHGKGFTKCNYMISFFSCLXIKLSLEVRNIREXMNFXPKAIRSSISQYLFFNLVQKVYLFEGVSNDLIFXLVSEMKAEYFPPREDVILQNEAPTDFYILVTGSAELIELRNGGEQMAGVAKAGDVVGEIGVLCYRPQLFTVRTKSLCQLLRMNRTAFLSLVQSNVADGTIIMNNLMQLLKQQKDNSVMVGVLKEIENMLARGRLDLPVTLCFAVNKGDDFMLHQLLKRGLDPNESDNNGHTALHIAASKGDEQCVKLLLEHGADPNARDSEGKVPLWEALCEKQNPVVELLVQSGAGLSSGDVALYSCVAVEENDPELLENIIRYGGNVNSSMKDGTTPLHRAVCDGNVQMVELLLEHGADVDKQDNNGWSARDLADQQGHDDIQALFKSRKAHRKHASNGRVAPMLIGRFNSEPSMPDMSHENARVRSEVVPQKLLRKRVSFQNSLFGVISSSHAHQDTGRLLSKGLAGTEGPNCRHDSLIRVTISCPEKGGNAAGKLVRLPRSMAELLELGAKKFGIKPGKVLTVGGAEIDEVELIRDGDHILLVSDEWVPDVEQIRP

SEQ ID NO: 348609 - protein, 99 aa, Zea mays
  Clone ID: MRT4577_81095C.1.pep
NMQHVSGRRHSTNTSSHGGDYRVGAIPDLIIYGVHFSVTLIAHFFLAKLMFAVPSLATVVIYGQASSLWTFLAWVFVKAATRMCSNGPECGIGPHKLLL

SEQ ID NO: 348610 - protein, 301 aa, Zea mays
  unsure (1)..(301): unsure at all Xaa locations
  Clone ID: MRT4577_81097C.1.pep
MGSGGANTAPLITPYKMGKFDVSHRVVLAPLTRQRSYGNVPQPHAILYYQQRATKGGLLIAEATGVSDTAQGXLSSARPSGYYGCLKSVWSCXFHHSVVXRCLNKDVFSVCAXYKDTPGIWTHEQVEAWKPIVDGVHQKGGIFFCQIWHVGRVSNSSXLRPLTQIGSQSYKFNGSLASQLARENWIQSYPXVFMATLAVFVIDQDVYESAHTICTTVFFCNKSAIIPTNVKCSNAAFQPNGQAPISSTDKPLKPQVRANGIDVATFAVPRRLETDEIPLVVNDFRVAARNAIEAGFDGVEI

SEQ ID NO: 348611 - protein, 100 aa, Zea mays
  Clone ID: MRT4577_81098C.1.pep
LQEISLTHANFLDSSTTVNCFIHNSQNMHPKIVNYDFLESLESPPQFWYYHHSEIRHIEMSNSTKRNFCPDLDRIRPLTLKFHNWSFRHPNQVILDFLES

SEQ ID NO: 348612 - protein, 228 aa, Zea mays
  Clone ID: MRT4577_81099C.1.pep
MASSMLSATTVPLQQGGGLSEFSGLRSSASLPMRRNATSDDFMSAVSFRTHAVGTSGGPRRAPTEAKLKVAINGFGRIGRNFLRCWHGRGDASPLDVIAINDTGGVKQASHLLKYDSTLGIFDADRVPTPNVSVVDLVVQVSKKTLAEEVNQAFRDAAANELTGILEVCDVPLVSVDFRCSDVSSTIDASLTMVMGDDMVKVISWYDNEWGYSQRVVDLADICANQWK

SEQ ID NO: 348613 - protein, 134 aa, Zea mays
  Clone ID: MRT4577_8109C.1.pep
LQRSTTPGRGKRAARGHPASHRPSRQSQETCHAEAHTPEEGAAAASIAGAPVRTARRTATRLADRSGHTDYDRQEDLNRAPSEELQPAEPLEQSEHTVGGRTELEETSQEEQTTKRPRTQMGWSRTLQHSQNSK

SEQ ID NO: 348614 - protein, 116 aa, Zea mays
  Clone ID: MRT4577_810C.1.pep
CTFLVFRSTFTPLYQRVCLPYPRLHDAFSPVHLSVNIGGRRLGLSGVVILAVVRVHHILQGGLPHDAATLVMTQNAYQEAVPSCHVRGKIQCSHAPGWVQFVGDEPRVRDQEPRAQ

SEQ ID NO: 348615 - protein, 187 aa, Zea mays
  unsure (1)..(187): unsure at all Xaa locations
  Clone ID: MRT4577_81101C.1.pep
MASSMLSATTVPLQQGGGLSEFSGLRSSASLPMRRNATSDDFMSAVSFRTHAVGTSGGSRRAPTEAKLKVAINGFGRIGRNFLRCWHGRGDAXPLDVIAINDTGGVKQASHLLKYDSTLGIFDADVKPVGDNAISVDGKVIKVVFDRNPSNLPWGELGIDLVIEGTGVFVDREGAGKHIQAGAKKVL

SEQ ID NO: 348616 - protein, 121 aa, Zea mays
  unsure (1)..(121): unsure at all Xaa locations
  Clone ID: MRT4577_81102C.1.pep
RVGPEFLFLPLLFVRIPSLNYGWLSMGLTWNHLLMNIGSLSTCLNNWIQFLSVSKPEAMVMAPCMQPVHHQCXVTCRSVKQIGTIXDLLXVAPCASCMACYSLHVHXSVLKKIYXQQNGQQ

SEQ ID NO: 348617 - protein, 372 aa, Zea mays
  Clone ID: MRT4577_81103C.1.pep
MRWNATSDEFMSAVSFRNHAIGTSGGRLRRAPTEAKLKVAINGFGRIRRNFLRCWHGRDDDSPLDVIAINDTGDVKQASHLLKYDSLLGIFDADAELVGDNAISVDDKVIKVVSDRNPSNLPWGELSVDLFIEGTGVFVDHEGAGKHIQVGAKKVLITAPDKGNIPTYVVGVNADQYNPDEPIISNTSCTTNCRVPFVKVLDQKFGIIKGTMTTTHFYTCDQRLLDASHRDLRRARAAALNIVPTSTSAAKAVVLVLPNLKGKLNGIALWVPTPNVSVLDLVVQVSRKTLAEEVNQAFRDAAANELQGILEVCDVPLVSVDFRCSDFSSTIDASLTMVMGDDMVKVISWYDKEWGYSQRVVDLDDICANQWK

SEQ ID NO: 348618 - protein, 38 aa, Zea mays
  Clone ID: MRT4577_81105C.1.pep
LIIATPKRIKYLVARHYNTQTIQDINIPLSTTLMFFLT

SEQ ID NO: 348619 - protein, 372 aa, Zea mays
  unsure (1)..(372): unsure at all Xaa locations
  Clone ID: MRT4577_81106C.1.pep
MSAPLLPLAAWLACLCLCIDQVGTSGGGPRRAPTEAKLKVAINGFGRIGRNFLRCWHGRGDDSPLDVIAINDTGGVKQASHLLKYDSTLGIFDADVEPVGDNAISVDGKVIKVVSDRNPSNLPWGELGVDLVIEGTGIFIDREGAXQAGAKKVLITAPGKGDIPTYVVGINADQYNPDEPIISNASCTTNCLTPFVKVLDQKFGIIKGTMTTTHSYTGGQRLLDASHRDLRRARAAALNIVPTSTGAAKAVVLVLPNLNGKLNGITLRVPTPNVSVVDLVVQVSRKTLAEEVNQAFRDAAANELQGILEVCDVPLVSVDFRCSDVSSTIDASLTIVMGDDMVKVISWYDNEWGYSXSQRVIDLADICANQWK

SEQ ID NO: 348620 - protein, 392 aa, Zea mays
  Clone ID: MRT4577_81107C.1.pep
CVLQGGGLSEFSGLRSSASLPMRRNATSDDFMSAVSFRTHAVGTSGGSRRAPTEAKLKVAINGFGRIGRNFLRCWHGRGDASPLDVIAINDTGGVKQASHLLKYDSTLGIFDADVKPVGDNAISVDGKVIKVVSDRNPSNLPWGELGIDLVIEGTGVFVDREGAGKHIQAGAKKVLITAPGKGDIPTYVVGVNADQYNPDEPIISNASCTTNCLAPFVKVLDQKFGIIKGTMTTTHSYTGDQRLLDASHRDLRRARAAALNIVPTSTGAAKAVSLVLPNLKGKLNGIALRVPTPNVSVVDLVVQVSKKTLAEEVNQAFRDAAANELTGILEVCDVPLVSVDFRCSDVSSTIDASLTMVMGDDMVKVISWYDNEWGYSQRVVDLADICANQWK

SEQ ID NO: 348621 - protein, 39 aa, Zea mays
  Clone ID: MRT4577_81108C.1.pep
GKVTRPHGNSGVVRAKFKSNLPPESMGRKVRVFMYPSSI

SEQ ID NO: 348622 - protein, 196 aa, Zea mays
  unsure (1)..(196): unsure at all Xaa locations
  Clone ID: MRT4577_81109C.1.pep
MASSMLSATTVPLQQGGGLSEFSGLRSSASLPMRRNATSDDFMSAVSFRTHAVGTSGGPRWAPTEAKLKVAINGFGRIGRNFLRCWHGRGDASPLDVIAMNDTGGGKQAFHLLKYDSTLGIIDADVKPVGDNAICDDGKDIKVXVGDRNPTNXAWGRXLGWDLGIEGTGDFVYREGAANHIQAGDKKVLITAPGKG

SEQ ID NO: 348623 - protein, 331 aa, Zea mays
  Clone ID: MRT4577_8110C.1.pep
MLLLLFFSVLAAVAAFLLFKFATVVDGDLTLVSRGPPLRERVDGKVVWITGASRGIGEVLAMHFANLGAKLILSARNKDALARVKKNILSKNPDSRVEMLPMDLSAGEESLKEVVHVAESFFSNAGVDYMVHNAAFERPKRRALEESEEGLKATLNVNVFGTITLTRLLAPYMLDRGMGHFVVMSSAAGKVPAPGQAIYSASKHALNGYFASLRSELCTKGIKVTVICPGPIETLQSSAAASSSQTHSAEKREKRVSVERCVELTIVAATHGLKEAWISYQPVLTVMYLVQYMPTIGYWLMDKVGAKRLDAAAKKGNTYSWSLIFSSKKSA

SEQ ID NO: 348624 - protein, 233 aa, Zea mays
  unsure (1)..(233): unsure at all Xaa locations
  Clone ID: MRT4577_81110C.1.pep
MASSMLSATTVPLQQGGGLSEFSGLRSSASLPMRRNATSDDFMSAVSFRTHAVGTSGGSRRAPTEAKLKVAINGFGRIGRNFLRCWHGRGDASPLDVIAINDTGGVKQASHLLKYDSTLGIFDADVKPVGDNAISVDGKVIKVVSDRNPSNLPWGELGIDLVIEGTGVFVDREGAGKHIQAGAKKVLITAPGKGDIPTYVVGVNAXDQYNPDEPIISNASCTTNCLAPFVKVL

SEQ ID NO: 348625 - protein, 71 aa, Zea mays
  Clone ID: MRT4577_81111C.1.pep
TKEDVAWYAGKRMAYIYKAKTKSSETRYRCIWGKVTRPHGNSGVVRAKFKSNLPPESMGRKVRVFMYPSSI

SEQ ID NO: 348626 - protein, 497 aa, Zea mays
  unsure (1)..(497): unsure at all Xaa locations
  Clone ID: MRT4577_81112C.1.pep
WFFDVVLQGGGLSEFSGLRSSASLPMRRNATSDDFMSAVSFRTHAVXPAPADRSTLMQPRRKVALYRIARTAGFGDSHVCVCAAAAWLARSLARASHQQPXGTSGGSRRAPTEAKLKVAINGFGRIGRNFLRCWHGRGDASPLDVIAINDTGGVKQASHLLKYDSTLGIFDADVKPXVGDNAISVDGKVIKVVSDRNPSNLPWGELGIDLVIEGTGVFVDREGAGKHIQAGAKKVLITAPGKGDIPTYVVGVNADQYNPDEPIISNASCTTNCLAPFVKVLDQKFGXSIFFTQLESSAANLMLPPCDYCKSDKPIITVYIYIYIYICMDQGIIKGTMTTTHSYTGDQRLLDASHRDLRRARAAALNIVPTSTGAAKAVSLVLPNLKGKLNGIALRVPTPNVSVVDLVVQVSKKTLAEEVNQAFRDAAANELTGILEVCDVPLVSVDFRCSDVSSTIDASLTMVMGDDMVKVISWYDNEWGYSQRVVDLADICANQWK

SEQ ID NO: 348627 - protein, 506 aa, Zea mays
  Clone ID: MRT4577_81113C.1.pep
PTRPPTRPEEEEDEVVRMRNTPDFFNKIVDSICPTVFGHQEIKRAVLLMLLGGVHKITHEGINLRGDINVCIVGDPSCAKSQFLKYTAGIVPRSVYTSGKSSSAAGLTATVAKEPETGEFCIEAGALMLADNGVCCIDEFDKMDIKDQVAIHEAMEQQTISITKAGIQATLNARTSILAAANPTGGRYDKSKPLKYNVALPPAILSRFDLVYIMIDEPDENTDYHIAHHIVRVHQKREEALAPAFSTAQLKRYISFAKSLKPQLSSEAKKVLVESYVTLRRGDSTPGTRVAYRMTVRQLEALIRLSEAIARSHLERVVLPAHVRLAVKLLKTSIISVESSEVDLSDFQDAEDGTNVPSESDAGQPAEEDAAPQQQGAENDQAADNGKKKLVITEEHFQRVTQALVMRLRQHEESVKKDGDGLAGMKQGDLIIWYVEQQNAKGAYSSTAEVKEEVKCIKAIIERLIQREGHLIVIDEGTAAAAEDGSGARRTSESRILAVNPNYVID

SEQ ID NO: 348628 - protein, 71 aa, Zea mays
  Clone ID: MRT4577_81114C.1.pep
PPSGKLFFPFGGGGPPTPFPKGLMGGRTRTPPPVVFWSIPVAPLFSLLWGGVGPFLFRPKGPAVRQGGPHS

SEQ ID NO: 348629 - protein, 105 aa, Zea mays
  Clone ID: MRT4577_81115C.1.pep
LGTSRPAGATILVPASPPLHATQPSPYPEPKSTPRRQPVPTAGAKLEEGEHELSIVDALLEVLSGRCELRRTSFDSWRLYQRFSFTSMGAPLWGRRVRSSSLSAK

SEQ ID NO: 348630 - protein, 136 aa, Zea mays
  unsure (1)..(136): unsure at all Xaa locations
  Clone ID: MRT4577_81116C.1.pep
MASPMLSATTVPLQQGGGLSEFSGLRSSASLPMRRNATSDDFMSAVSFRTHAVGTSGGSRRSPTEAKXLKVAINGFGRIGRNFLRCWHGRGDASPLDVIAINDFXCATHAPHLFKYDSTLGIFDLARQVRRATTSS

SEQ ID NO: 348631 - protein, 167 aa, Zea mays
  Clone ID: MRT4577_81117C.1.pep
MKNVAKCDTWCELQNPANHRVFERKLRPKPSGGGHVCLGVTPGGGRRSARKQAATMVKGRTGQRVRLYVRGTILGYKRSKSNQYETTSLVQIEGVNTKEDVAWYAGKRMAYIYKAKTKSSETRYRCIWGKVTRPHGNSGVVRAKFKSNLPPESMGRKVRVFMYPSSI

SEQ ID NO: 348632 - protein, 316 aa, Zea mays
  Clone ID: MRT4577_81118C.1.pep
MSRVRDRTEDFNEAVRVAALSHGYTEAQLAALMSSFIIRKPSPKSPFTNAAIKTLESIRELERFIVKHRRDYVDLHRITEQERDNIEHEIGVFVKACKEQIDILKNRIQEEEKNGSGKTWLGTRDGSSRLDLIAHQHGVVLILSERLHSVTAQFDRLRSMRFQDAINRAMPRKNQKRPEKKPAEPSKSSLVLKSDVSKIVDQEASTAPMRVQEQLLDDETKALQVELTSLLDAVQETETKMIEMSALNHLMSTHILQQAQQIQYLYDQAVEATNNVERGNKELSQAIQRNSSSRTFLLLFFFVLTFSVLFLDWYNN

SEQ ID NO: 348633 - protein, 112 aa, Zea mays; identical to SEQ ID NO: 337401
  Clone ID: MRT4577_81119C.1.pep

SEQ ID NO: 348634 - protein, 111 aa, Zea mays
  Clone ID: MRT4577_8111C.1.pep
KNPTYQKKKGHIYGHLNFFTLAGCSAPPFLEKPWWINRGGRPFLVPLFSPPPFSPLFFFFWAPFPFFPPPVCQPGPPLAPLLTPRFLVWGRCALSPPWAKSLWPPPSPPSL

SEQ ID NO: 348635 - protein, 58 aa, Zea mays
  Clone ID: MRT4577_81120C.1.pep
ISSIISNTSISGQRIFSGLKEHISNILFLLTPPLQLHCIITTINTIIFILPFQNNITL

SEQ ID NO: 348636 - protein, 65 aa, Zea mays
  Clone ID: MRT4577_81121C.1.pep
SIPPATIIIGTSKLPLDNRTVHVVVISLSLLTMIVHSSPCRRTKTAFEQHCHQNITNTLHGRIDR

SEQ ID NO: 348637 - protein, 70 aa, Zea mays
  Clone ID: MRT4577_81122C.1.pep
GNMGGRARGLANHILYIHNGHVIYCFLYRWIDGLNGHSTSNVTYNILSNGKVIFPHNTAAHQGCLLLQGG

SEQ ID NO: 348638 - protein, 60 aa, Zea mays
  Clone ID: MRT4577_81123C.1.pep
WSEPQPICVHWVLFETQIFLYLHIRERFTFHFTKKRYSSRSPQQITLTLPSHNILSTDGD

SEQ ID NO: 348639 - protein, 100 aa, Zea mays
  unsure (1)..(100): unsure at all Xaa locations
  Clone ID: MRT4577_81124C.1.pep
MATKILWVRSLLCLVVIPTNAVIISQXXLASNAIIPQILQPTTSMGXQKISVPTYKLQQALAANVLQQPIYQLQQQSLAHLTIQTIATQQLQQFLPALIQ

SEQ ID NO: 348640 - protein, 62 aa, Zea mays
  Clone ID: MRT4577_81125C.1.pep
MPEQDITMAIVDDERMDITTYHCIAVIGAYGQLDCVTNMMTWYALEHDCSCDIPRDSTTARL

SEQ ID NO: 348641 - protein, 87 aa, Zea mays
  Clone ID: MRT4577_81126C.1.pep
PHSWFLLGAEQAAAIILANWPVRRSTQNCNPHTSLAIASSLGPAPSLCTYLTLCLSLSHNCICNCARNEETGRPGEHKHVFRFGHAV

SEQ ID NO: 348642 - protein, 111 aa, Zea mays
  Clone ID: MRT4577_81127C.1.pep
GIQIWRSRRGRPCREKPPPPTRPGGPANTCSATRWTRSTPPSHPGPPPRRTKAPNEMRGSRNLAATFTGSRAGTLATISGGGGEGKRGGRPVRARVCRPRAAREERLESRG

SEQ ID NO: 348643 - protein, 67 aa, Zea mays
  Clone ID: MRT4577_81128C.1.pep
LGRWCLIVIVLSRLNSSSGQGIGRVVNFVFVMCKLSLNLLNLRVPKRYSNRVLPRASVNRPMGLQLG

SEQ ID NO: 348644 - protein, 34 aa, Zea mays
  Clone ID: MRT4577_81129C.1.pep
LIMGHLANGCDQIMRFITASLNKSFGTFIWFYTN

SEQ ID NO: 348645 - protein, 53 aa, Zea mays
  Clone ID: MRT4577_8112C.1.pep
YIVTNKQRKNYRWRPKLTVSFWRPNSHLPSFFFSGDADEHDESEGEGDNKPIE

SEQ ID NO: 348646 - protein, 60 aa, Zea mays
  Clone ID: MRT4577_81130C.1.pep
LYLSPPSLNPLLGSQPPYAVHNAAHGRSSNRPLVTLELGGVPRRAFSPRTGSPTAASSSP

SEQ ID NO: 348647 - protein, 169 aa, Zea mays
  Clone ID: MRT4577_81131C.1.pep
MSAQFASEHACYVNCNYCNTILVVNVPSSCSYNVVTVKCGHCTMVLSMDLSPFHQQARTVPDNQVVQNRGFQYNNFGSYEQASSRNLRTPPMYPVSNNLPQVPPIRPSEKRQRVPSAYNRFIKEEIQRIKTSNPEISHREAFSAAAKNWAHLPRLHFGLSVADGGGGSN

SEQ ID NO: 348648 - protein, 169 aa, Zea mays
  Clone ID: MRT4577_81132C.1.pep
MSAQFASEHACYVNCNYCNTILVVNVPSSCSYNVVTVKCGHCTMVLSMDLSPFHQQARTVPDNQVVQNRGFQYNNFGSYEQASSRNLRTPPMYPVSNNQPQVPPIRPSEKRQRVPSAYNRFIKEEIQRIKTSNPEISHREAFSAAAKNWAHLPRLHFGLSVADGGGGSN

SEQ ID NO: 348649 - protein, 131 aa, Zea mays
  unsure (1)..(131): unsure at all Xaa locations
  Clone ID: MRT4577_81133C.1.pep
HSSASLLPLYLPSIIASVCENPALQPYRLQQAIAASNIPLSTLLFQQSPALSLVQSLVQSIMAQQLQXLLLPVINHVTLANLSPYSKQHHXLPFNLLTTLNSDAXLVAXLSPFNQLATAYYQHQHLLPFNQ

SEQ ID NO: 348650 - protein, 169 aa, Zea mays
  Clone ID: MRT4577_81134C.1.pep
MSAQFASEHACYVNCNYCNTILVVNVPSSCSYNVVTVKCGHCTMVLSMDLSPFHQQARTVPDNQVVQNRGFQYNNFGSYEQASSRNLRTPAMYPVSNNQPQVPPIRPSEKRQRVPSAYNRFIKEEIQRIKTSNPEISHREAFSAAAKNWAHLPRLHFGLSVADGGGGSN

SEQ ID NO: 348651 - protein, 87 aa, Zea mays
  Clone ID: MRT4577_81135C.1.pep
HVLNKHVLAIYPYEDKCFSMIVINLSMHKVFNVLMFERDRHRITIRCNYRTVYFLVDARVLSNDFSITPPVVVYRSVFCVMLIIIYC

SEQ ID NO: 348652 - protein, 169 aa, Zea mays; identical to SEQ ID NO: 348647
  Clone ID: MRT4577_81136C.1.pep

SEQ ID NO: 348653 - protein, 115 aa, Zea mays
  Clone ID: MRT4577_81137C.1.pep
QKRSFLNLPFNGQNPIFMQMRNEQPTNYFCCASPLFWASNLFLSIFLLSITPSYSFIIKKYCFLLSITPSYNFIVLHNVDVDIDIHPDHLNASSYQSKLRFLFLIQSRLVSLKPI

SEQ ID NO: 348654 - protein, 106 aa, Zea mays
  unsure (1)..(106): unsure at all Xaa locations
  Clone ID: MRT4577_81138C.1.pep
MLAWAAVGRHHVTRSIHYFLFNHHKTDEEHPAGEYLYYHTFVDIATGEADFXRYNKDVNEHKHKLHLGEEGAIFGGALKLYQMHDANKDPEHSHTHNITDEVAAAA

SEQ ID NO: 348655 - protein, 270 aa, Zea mays
  unsure (1)..(270): unsure at all Xaa locations
  Clone ID: MRT4577_81139C.1.pep
MAASTNNTLRVLFTLMVVCAAVCTAKRTVAKTGDLAPAPAPLGAGGATAAPEGAARASRTFDISKFGATSDGKTDSTQVVQDTWTSACGAMGDATMLIPKGDYLVGPLYFRGPCMGDITIQLDGILLGSNDLAKYTASWIQVSHVNNIVINGSGTLDGQGTAVYTKSKTDVVKAMPNTLVLFYVTNGTISGIKLLNSKFFHINIDTSKDITVKDVNITAPADVENTDGVHVGGSSNVRITNSTIGTGDDCVSXGPGSDGVMVNNITCGPG

SEQ ID NO: 348656 - protein, 65 aa, Zea mays
  Clone ID: MRT4577_8113C.1.pep
CPRRRRAPTVTRAARAACAAYFRPRARPRGQRRTRSLARSGTTETMRTPPLPGAFVAGTTCSLST

SEQ ID NO: 348657 - protein, 96 aa, Zea mays
  unsure (1)..(96): unsure at all Xaa locations
  Clone ID: MRT4577_81140C.1.pep
CTSVTVYIGHKRGLGSKLSANRICMYMTNGPYCFKMFIHFGIILYNVYLLRFFCALPHPKYCERVFXRGMYGQWLLIIFVMLSASLGFVHAEVDKY

SEQ ID NO: 348658 - protein, 47 aa, Zea mays
  Clone ID: MRT4577_81141C.1.pep
ICRHDCFMIARLLPRCSMACTAECASWTCCSSLINTRETDRACVDAA

SEQ ID NO: 348659 - protein, 67 aa, Zea mays
  Clone ID: MRT4577_81142C.1.pep
NYYMFDANLGECTRLGGDITQDICLYITDDIYTHAGQGLRGCQMQRFGSNTSIHGGCNQQMRSSSAF

SEQ ID NO: 348660 - protein, 78 aa, Zea mays
  Clone ID: MRT4577_81143C.1.pep
LVSSVLSAYTQHACSFQLYCKFRAYILVTVTYTIYSSCSKFSCIYKRIFPGKMIENGKEQVSIYACASAGVVLVLYPR

SEQ ID NO: 348661 - protein, 145 aa, Zea mays
  Clone ID: MRT4577_81144C.1.pep
MYIYIYMLVLGHHIIISIISRRPSDWCGYVKRSRHDCNILVANVVDFRQITMEMLSRLELGTTGLKTLTREVMGLLIDKPKHVTLSRWTKRSFGPHRSSTSSLLMSMGSTRLVFCCSRRSARTTDGRSPPSICIKLLLEHLQYKF

SEQ ID NO: 348662 - protein, 149 aa, Zea mays
  unsure (1)..(149): unsure at all Xaa locations
  Clone ID: MRT4577_81145C.1.pep
TRSFHLHCHTPAPPPWPWPXTSSSPQPPSXSPPPPSPXNLPPPPPMPTPNLNPNPGPRRSPYSPTSASAATPPPSSTTPASHLTSRXRPPTRLPPSRRGPPXAPRATTPASRPASAPVSCRAASPPLSASADCPSCSSSSETPSACACR

SEQ ID NO: 348663 - protein, 97 aa, Zea mays
  Clone ID: MRT4577_81146C.1.pep
HLSGVLDRLWTFTYSESGETIRPWSPVLCQMVVCAAELSAAARTRFLALQSTAPCNAGPGTAKSSAKERRRGACAPPPLSVQPTAPRGRTWPARPAP

SEQ ID NO: 348664 - protein, 180 aa, Zea mays
  unsure (1)..(180): unsure at all Xaa locations
  Clone ID: MRT4577_81147C.1.pep
TISSKCLLLEIDACGEILQGWTASHSQINLRPTRRLSLQFCDLSFSRGDQLHFFSSLSSLKFLTVRSCEGLDTWGESIGTLTSLEVLELSLCDIPMFLGRIASLQSLSIEMCHLPCDFSHYLLQLPFLRQLQIVCCNAKLELPGEITRAILARIPNISIHNVXMCQAYRTGEWYMPKCFS

SEQ ID NO: 348665 - protein, 222 aa, Zea mays
  Clone ID: MRT4577_81148C.1.pep
HWVPRGRPGVPIPEQERGRTPPRVHSPTARSATRWPRSASPPSPSALSEVAVENGTLEQTVSDLEKLEKIFTDEAVAEFFDNPTVPREEKAELIGEIAKSSELQPHVVNFLNVVVDNFRASIVPQIVVEFENVYNSLTGTEVATVTSVVQLESQDLAQIAQHVQKMTGAKNVRLKTQLDPALIAGFTVQYGRDGSNLIDMSVRKQIEEIASEFELPAVPLEV

SEQ ID NO: 348666 - protein, 59 aa, Zea mays
  Clone ID: MRT4577_81149C.1.pep
PRGRPGECSSVVPCPRSSVSCSPSVLAASVPQRERPHIADFHADDHDAGDHDVVDVHRR

SEQ ID NO: 348667 - protein, 59 aa, Zea mays
  Clone ID: MRT4577_8114C.1.pep
QPAIHAATKLHASPYFVHPNSTIKKRRKGTSMNRRTKLNRKKRRKKEHTTIHMRTPFSL

SEQ ID NO: 348668 - protein, 50 aa, Zea mays
  Clone ID: MRT4577_81150C.1.pep
SIADEDDEDASSQIPLDDASPPDYSSIEVIQCLIEHHNAIFTDANETVWR

SEQ ID NO: 348669 - protein, 56 aa, Zea mays
  Clone ID: MRT4577_81151C.1.pep
RTRGRTRGRTRGRTGLIAGFTVQYGRDGSNLIDMSVRKQIEEIASEFELPAVPLEV

SEQ ID NO: 348670 - protein, 251 aa, Zea mays
  unsure (1)..(251): unsure at all Xaa locations
  Clone ID: MRT4577_81152C.1.pep
MRRDTMAALRLASFTLRPAAASSGATSSAPRSASFSSAARGLPSLCLAPPRRRRGDLAKPRAAVEAAAESYASALAEVAVENGTXLEQTVSDLQKLVKMFXNEAVAEFFDNPTVPREEKAELIGEIAKSSELQPHVVNFLNVVVDNFRASIVPQIVVEFENVYNSLTGTEVATVTSVVQLESQDLAQIAQHVQKMTGAKNVRLKTQLDPALIAGFTVQYGRDGSNLIDMSVRKQIEEIASEFELPAVPLEV

SEQ ID NO: 348671 - protein, 141 aa, Zea mays
  unsure (1)..(141): unsure at all Xaa locations
  Clone ID: MRT4577_81153C.1.pep
YAPSRRTRRRSQHHPPLRRVALQRPMEEQPSEIRGCDEVTTSAHSTPASSPPPTARTXWTRHRLFVVSHPPSQTRSRAKHTSARAFTHCTLYAYDISALHPRRGHCSAHDSQCYIVTTTRWTSIRRRLRARPKRSASTMTT

SEQ ID NO: 348672 - protein, 247 aa, Zea mays
  Clone ID: MRT4577_81154C.1.pep
MAALRLASFTLRPAAAAASSGATPSAPRSASFSSAARGLPSLRLAPPRRRRGDLARPRAAAEAAAESYASALSEVAVENGTLEQTVSDLEKLEKIFADEAVAEFFDNPTVPREEKAELIGEIAKSSELQPHVVNFLNVVVDNFRASIVPQIVVEFENVYNSLTGTEVATVTSVVQLESQDLAQIAQHVQKMTGAKNVRLKTQLDPALIAGFTVQYGRDGSNLIDMSVRKQIEEIASEFELPAVPLEV

SEQ ID NO: 348673 - protein, 98 aa, Zea mays
  Clone ID: MRT4577_81155C.1.pep
MKTVADFSYRPGDWLVFGSETKGLPQQALEDCCREGLGGGTLRIPMVETYVRCLNLSVSVGVALYEAARQLNYEQLQYQPDELPEEAQELFPAEDIYA

SEQ ID NO: 348674 - protein, 142 aa, Zea mays
  Clone ID: MRT4577_81156C.1.pep
TRADAWCVEDKRRLLVYEYICNGSLDSHLYDRNKETPEWAARQKIAAGAGGFRTSVARSRAAQLNVNVVRSHSVLRRPPEARGVEIGRTCLTDTSIGIPVQDRRGICIVPSLATPFCVVASSSSSLFLAPGLLMLVEAVCIV

SEQ ID NO: 348675 - protein, 80 aa, Zea mays
  Clone ID: MRT4577_81157C.1.pep
LKAFISCVMRWIFRGGFSFHLFLMLIGKSLPFHVCTFFLDLQDKFFFLSFQEGNLGSSNYMWLRGCEGFIGVFSEIYFPP

SEQ ID NO: 348676 - protein, 167 aa, Zea mays
  Clone ID: MRT4577_81158C.1.pep
HNNTKTSIFIPSFLLTADEAVAEFFDNPTVPREEKAELIGEIAKSSELQPHVVNFLNVVVDNFRASIVPQIVVEFENVYNSLTGTEVATVTSVVQLESQDLAQIAQHVQKMTGAQNVRLKTQLDPELIAGFTVQYGRDGSSLIDMSVRKQIEEIASEFELPAVPLEV

SEQ ID NO: 348677 - protein, 249 aa, Zea mays
  unsure (1)..(249): unsure at all Xaa locations
  Clone ID: MRT4577_81159C.1.pep
MAALRLASFTLRPAAAAASASSGATPAASGSVSXFARAARGLPSLRLAPPRRRGDLARPRAAAEAAAESYASALSEVAVENGTLEQTVSDLEKLEKVFADEAVAEFFDNPTVPREEKAELIDEIARSSELQPHVVNFLNVVVDNFRAAIVPQIVAEFENVYNSLTGTEVATVTSVVQLESQDLAQIAQHVQKMTGAQNVRIKTQLDPELIAGFTVQYGRDGSSLIDMSVRKQIEEIASEFELPAVPLEV

SEQ ID NO: 348678 - protein, 58 aa, Zea mays
  Clone ID: MRT4577_8115C.1.pep
STGLQDLKSYSTLNVNISLTKSILWAATLSKPNLLVPTMSMVGTRFLLCFHRPSLAWF

SEQ ID NO: 348679 - protein, 82 aa, Zea mays
  Clone ID: MRT4577_81160C.1.pep
SFPRAEDILQPIHLTRNQHSLLLRDLLLRVLAGWWWPVAPAVVHKSKLFLCAWVYACLLAQGRRRRPSSGKWGVQVPAFLGR

SEQ ID NO: 348680 - protein, 33 aa, Zea mays
  Clone ID: MRT4577_81161C.1.pep
TLRASLGTQFSQGISILPREISSFSFGNLMFPN

SEQ ID NO: 348681 - protein, 51 aa, Zea mays
  Clone ID: MRT4577_81162C.1.pep
LCCVFIKVGSNNVYVKKMAKQYKVKTYVSNHYLILYCLVFFKSAFPNITLC

SEQ ID NO: 348682 - protein, 72 aa, Zea mays
  Clone ID: MRT4577_81163C.1.pep
LLPFARQARPVRNSRPEEDKARQLLTVVRNGRYLKKGRYAQGVDTGAPDYLSPRLEDTPPDVMELGANAEKD

SEQ ID NO: 348683 - protein, 87 aa, Zea mays
  unsure (1)..(87): unsure at all Xaa locations
  Clone ID: MRT4577_81164C.1.pep
MGPLANNIMVLGXVLAMLVVRGSXGPPKAAPGLSITINYSGXWLPDRAARYAHPTXAGAPDNGRACXGIKNANLPPYSVMTPCGYVP

SEQ ID NO: 348684 - protein, 62 aa, Zea mays
  Clone ID: MRT4577_81165C.1.pep
YGLKLQVLVPGLSDREAENITLYEASAVVYGLPNVDVCRHVPVREILTRAPFPVTRVITLSA

SEQ ID NO: 348685 - protein, 78 aa, Zea mays
  unsure (1)..(78): unsure at all Xaa locations
  Clone ID: MRT4577_81166C.1.pep
SASCSRDSATTTQDDYVPHTLHTKQMTKHAGLHCSGHSGKLLITTAYLYHRITKAYXRFYVITYYTLIYWVFTDXPSK

SEQ ID NO: 348686 - protein, 180 aa, Zea mays
  unsure (1)..(180): unsure at all Xaa locations
  Clone ID: MRT4577_81167C.1.pep
HEGPRAQVPXXGVSPXALXPPLDSXRRXRPSSPTXAAGRPXXPAGGXGDTHPNXPNPSXXFPSXPPTPXXPXXPPLPXPPDXXPXPSSPSPPXXPPPXXXXPPPXXXXPRPTPTTTXXSLPLXPRXPPPXXLFHPXLXXPQSSPXSSNGRRSPSSXPXAXLXXXPPFXPPPXXXPHLNPP

SEQ ID NO: 348687 - protein, 175 aa, Zea mays
  Clone ID: MRT4577_81168C.1.pep
NKKKKKKKKKKKKKKKKKKKKKKKKKKKKKKKRKGSWGGPLSRFQVLAPGAAPFFVFFYGGLHWAGGGGPLFSGLGPGETPAVPLVLRPAPLPLFAGGGNSPGAPSFRFSNLFGKGNGPWPAPLTAPLGGGGFGVPAPLPVPFATALAPAFFAFFPSFAARPAVFPFEGYIGGSF

SEQ ID NO: 348688 - protein, 171 aa, Zea mays
  unsure (1)..(171): unsure at all Xaa locations
  Clone ID: MRT4577_81169C.1.pep
AFLLPMALSCVSPCHLGSAPHRQPVXGAGERRRRRLPCPQWSPGSIPCPCCPQIHRLVLLLLLILSSMSAAGSGVLPAPGPVPPPPRCGSWRATLGTRQSLPHRSLARLRLKQRLFIRNGPGRLPVAPASTRANSASHSPASSGATSSWSPRFNAYGNAWASPWWCSRPPS

SEQ ID NO: 348689 - protein, 112 aa, Zea mays
  unsure (1)..(112): unsure at all Xaa locations
  Clone ID: MRT4577_8116C.1.pep
VLTTSLIFAAPAEITMEGCMHRXXALYVDGPLRQAPMAHEEVTVPNALLEERSQANCVSQEIDYQKWVKRIXDNYTERRHCTVITSITEMXHKNDEKITMNFKMTYCPHXFN

SEQ ID NO: 348690 - protein, 63 aa, Zea mays
  Clone ID: MRT4577_81170C.1.pep
EGPGVLLYQSDFAGSSRITSAGACLAPATSREIFSWAPACGTKTSHTPFSDPLGEEATTRCGT

SEQ ID NO: 348691 - protein, 94 aa, Zea mays
  unsure (1)..(94): unsure at all Xaa locations
  Clone ID: MRT4577_81171C.1.pep
TQRSTTSTLSQVHSYLPFYPIHVXLVKGGLLTTHTXPHLLYMDVHLNLRLYAHLLSLHRRHIRVPFLHFHVHLTMVVLSTYSHLQSRLLHHPDS

SEQ ID NO: 348692 - protein, 178 aa, Zea mays
  unsure (1)..(178): unsure at all Xaa locations
  Clone ID: MRT4577_81172C.1.pep
LLGEVITGXKXHLAQLNLETGHPHLXEAEPLLLXLILFTLFSAIGALGDRVRFVDEEVTGLDXKAVIQPGKGFRGALGLSEGGNEEKAASSRHTLACTSVDLNILARWVALASSRGKSGGARPTVRALGEEAATSRVRTPARGPGGSRVVHAEATVVFLLLTAGAGAARGRDVRRRTR

SEQ ID NO: 348693 - protein, 57 aa, Zea mays
  Clone ID: MRT4577_81173C.1.pep
NLSVMVCKGLGPHFSLLVKNNDMQLSRIYQKQTIPLEALPGYWPNHAPDRPYQPTVL

SEQ ID NO: 348694 - protein, 71 aa, Zea mays
  unsure (1)..(71): unsure at all Xaa locations
  Clone ID: MRT4577_81174C.1.pep
RAGSXLRLLGRSACVASSSXFPYCSQAPISSLLPPYLSSMIASVCFNSAFXSCLLLQSISSCIIPLSPLLF

SEQ ID NO: 348695 - protein, 663 aa, Zea mays
  Clone ID: MRT4577_81175C.1.pep
FESAITAGGLHVTEGSKLWAAYREYEMAILITIADANDEEREKQVQRIRMLFHRQLSVPLADMESTLAEYKSWEAEQGNANDPGADFDGVPSNVVSAYKKANDMYNERKQYEDQLSNAGTFEGDKLQQFMKYIKFEEASGDPARVQVLYERAVSELPVSSDIWMGYTSYLDRTLKVPSVVRSVYYRATRNCTWVGELWVHYLLSLERIRASEEELQHVFERAIQCTFSTIQEYFNIYLTRVHGLRRRISDGLDFQLIRQTLTDAAEFLSSQLSTKELLRLYAYWAKLELSLGKDLSAARGVWENAIKKSGSVFEVWEQYILMEIKMDHVHEARSLYKRCYSKRFAGSGSEEICYSWIRFEEENGTLDDYDLAVKKVTPRLKELMTFKSQEEAKVEAYPNLNDNSNANDSSQKRKPSNNKQQPPAKKRKENPPKSTMPSDDQGSNVQSGHSGAVTDVEVGGASREKVMASIEMKVDSDSRTGKSSSNEPKPSFYNDNCTVFVSNIDLKANEDDLRRFFSDIGGATAIRLLRDRFTKKSRGLAYVDFLDNKHLEAAIKKNKQKLLGKKVSIARSDPSKGKKSREAGQTSQDNLPPSGGDDAKATGSSGPDNEVPKGDAKTIGKNTLFAPRALVKPLGWTNKDEKKPDVAGELKSNEEFRNLLLKK

SEQ ID NO: 348696 - protein, 64 aa, Zea mays
  Clone ID: MRT4577_81176C.1.pep
CYSFFCVCLLAIANYVKTVIDTTFSINHSLKECVNRFLCVVHDADALQKKKKKKKKKKKKGSQF

SEQ ID NO: 348697 - protein, 93 aa, Zea mays
  Clone ID: MRT4577_81177C.1.pep
ILVEDFGHTFVLPTSSVAAQLASSPRDVVLPVTPSLMMYDIEYGVVSGPLIRHRRIAHTRGGPPLVQRPSYLGVGKQQIRRLRYVVCPRPARG

SEQ ID NO: 348698 - protein, 216 aa, Zea mays
  Clone ID: MRT4577_81178C.1.pep
MSKLQSDALREAITNIINDCREKNRKFVETIELQIGLKNYDPQKDKRFSGSVKLPHIPRPKMRVCMLGDAQHVEEAGKMGLDCMDVESLKKMNKNKKLVKKLAKKYHAFLASEAIIKQIPRLLGPGLNKAGKFPTLVSHQESLESKVNETKATVKFQLKKVLCMGVAVGHLGMEEKQIFQNVQMSVNFLVSLLKKNWQNVRCLYLKSTMGKVYRLF

SEQ ID NO: 348699 - protein, 116 aa, Zea mays
  Clone ID: MRT4577_81179C.1.pep
VLVECLVFSSPVPHFLLSEHHKLVHDLSKYIGHVGLVIVEVHTHVLSSWLSLCHSCMLAEDGVFQQREMMFDVLRLAAQLPVDILALHVSTEQGWCSFPPTYCSPQLQWLRCTSPL

SEQ ID NO: 348700 - protein, 109 aa, Zea mays
  Clone ID: MRT4577_8117C.1.pep
FLRLAAPVVFFLFNAVVVAADAAADAGSAEFSDEENPYELLGMMPVDRSDDMKMDYKKKRKDTQETGDDKFLDKLDRAYDTVMMHEIQHQMKGVTYGSAQVSKDMKYAD

SEQ ID NO: 348701 - protein, 124 aa, Zea mays
  unsure (1)..(124): unsure at all Xaa locations
  Clone ID: MRT4577_81180C.1.pep
GVLFFFCPCRCFFALLLSACLSLSVLWALFWFLSSFPLVAVGPVPVPRVLPAPPRWRCSPVCWCCRPPRLSPPLPAAAPRPPRLPLRLXACVPSGRFVSWPLRPPARXSVGPGLGVVSXGAWLP

SEQ ID NO: 348702 - protein, 92 aa, Zea mays
  Clone ID: MRT4577_81181C.1.pep
PDCMSTNGSLTLGTVRRSQITRAAYPLRILASRAPPLRPLRRAHTRLSLFLTDRQVLSVACADDDRQSVSDSSDQTIKLIVHTRRLEVHNRS

SEQ ID NO: 348703 - protein, 70 aa, Zea mays
  Clone ID: MRT4577_81182C.1.pep
TRHGVRLTRDLIYFSTRVIMFMAGELAIPGGVFTVAVPTRLTAPAVDAVNRGYFSVTRACGRSGTVSLSS

SEQ ID NO: 348704 - protein, 252 aa, Zea mays
  unsure (1)..(252): unsure at all Xaa locations
  Clone ID: MRT4577_81183C.1.pep
CGIQRPEPGYDVHELEQIVPNDGRRDRELRQAEHGAQHREKRSSRWRARSGELSRELGELERTPGIRVGAGRWQRTKPSXGVGASAGYGGAPSEQKSGWASPAGKQASSVRRTEQGLGTTPWEKLGVRRHGERKKGNREAGRAGAAHTRHGRRKVEQRELTAGGGIQGTRAQGARDHAPVREQGKHPGIQTQHRERSAGWRWTPSAEGAGRLWRWRERTEGAPRWRARHGGKQWTRGYQSWGVCPGRPRGSQ

SEQ ID NO: 348705 - protein, 34 aa, Zea mays
  Clone ID: MRT4577_81184C.1.pep
QPEGLQHAQQQRDCREEFEARTVNSTVPESKHIY

SEQ ID NO: 348706 - protein, 57 aa, Zea mays
  Clone ID: MRT4577_81185C.1.pep
GLNIAHHEKNTPPFSNICPLVIFKLNRDKLKKTRESPSLTSDITAPPHSPLPSSPCS

SEQ ID NO: 348707 - protein, 188 aa, Zea mays
  unsure (1)..(188): unsure at all Xaa locations
  Clone ID: MRT4577_81186C.1.pep
GDTLRFSHCVPHYLFSLTEKEGIPGGSLELDPAALPSNLEEAFPSANPECSSVRSKEHNSKHAGLSSEDCKETMNVGQRQQTKSVXQGSLQKHQMKRXKHNTHLPEVTDVDDDNICQTEYVCAESEFYDFSRIRFLQKFSSGQIWALYSDIDXFPNYYAFIQKVDLKNGTVHVRLLGCLSSRRSGEKI

SEQ ID NO: 348708 - protein, 107 aa, Zea mays
  unsure (1)..(107): unsure at all Xaa locations
  Clone ID: MRT4577_81187C.1.pep
VGFRPFRVTLIPXFCAGHRLPVFVHPLPLRLALVRDDXLSARVXHLTAXVNSGRVLPSLPPEVPFPLLRSCNVLGCSALLCFLDPGRAQLSRCLRCCFCDFAESSPV

SEQ ID NO: 348709 - protein, 65 aa, Zea mays
  Clone ID: MRT4577_81188C.1.pep
ICTEYLTAQTLWKVDCSAVPLTTNLVQSRYKDTAPIHARHPEWSMRKWTPAHRSASIHGSLLRFP

SEQ ID NO: 348710 - protein, 198 aa, Zea mays
  unsure (1)..(198): unsure at all Xaa locations
  Clone ID: MRT4577_81189C.1.pep
TLQSIFSDKKFKGCLNSLMDADATTSNIQRFLXFQQLVGSFFITSIIKHQYVLSXYGQAIFFFSFRAVSYMDMESGFLSVESFLKALSSMQRQPKMDSLQDXESKEQTSYNFTSIMXRSIQDAYKTSDKYASTVCFRAFEHLSDRELISFGDNRWRNQALEYRPVKLLISSRELAESLKLNTTCPAVLQKLFDRERYM

SEQ ID NO: 348711 - protein, 143 aa, Zea mays
  unsure (1)..(143): unsure at all Xaa locations
  Clone ID: MRT4577_8118C.1.pep
KIQIKEVAKSGKIPRTTSWPLKEFQTATVEDDALKGKSTTNIKLVKDDQLERPKEKKQKDAKKRQRLGENFSDLLDPTKEKTASSTWDDSKQLFEESQKFRXLGHPPLSKXLFEEGVAPLKERLKKKKRLREEKKAKKEKERE

SEQ ID NO: 348712 - protein, 422 aa, Zea mays
  Clone ID: MRT4577_81190C.1.pep
MVAAVSLPSQAQAVLRSRLCDPVFIHSALSSSLDTNYSKLKYLVASSVSEACNNSVLLLGPRGCGKAAVVDMVLDDLKEEHPDAISVIRLNGMLHNDDNCAMKEIARQLCSEHQLSFSKMASSDDNTEFMIDMLRECGLAHKTILFILEEFDLFAQGKQRLLYSLLDAMQSLTSQAVVIGVSCRLDADQLLEKRVRSRFSHRKLLFISPSLDDMQRLVEHLLILAKDSGLPSKYIADYNSRLTSIFSDKKFKGCLNSLMDADATTSNIQRFLFRAVSYMDMESGFLSVESFLKALSSMQRQPKMDSLQDLSILELYILVCMHRLESKEQTSYNFTSIMKEYRSIQDAYKTSDKYASTVCFRAFEHLLDRELISFGDNRWRNQALEYRPVKLLISSRELAESLKLNTTCPAVLQKLFDRERYM

SEQ ID NO: 348713 - protein, 69 aa, Zea mays
  Clone ID: MRT4577_81191C.1.pep
NPFPLMGGGGYKTSHGIHSYCFPTHRACMVLLGRLPGFAKLTQNGGLGGDCAHIMGCICLSGGGGTNHS

SEQ ID NO: 348714 - protein, 158 aa, Zea mays
  unsure (1)..(158): unsure at all Xaa locations
  Clone ID: MRT4577_81192C.1.pep
MSRRKTREPKEENVTLGPTVREGEYVFGVAHIFASFNDTFIXRETLVRITGAMKVKADRDESLPYAAMLAAQDAAQRCKELGITALNIKLRAIGGNKIKTPGPGAQSALRALARSGMKIGRIENVTPVPTDSIRRKGGRKGKEAVGVFDISWRWPSSS

SEQ ID NO: 348715 - protein, 106 aa, Zea mays
  Clone ID: MRT4577_81193C.1.pep
VGGGGGPFHFWKGVKKPFPLLGNRPSPKEGPPPRIFLGDLPKFRGWGGPKRTPGFCLFFPKPLLKFPENWPKPPFSFFGGKPPPQGWVKGFSKKKRPVVRVVFPFF

SEQ ID NO: 348716 - protein, 246 aa, Zea mays
  Clone ID: MRT4577_81194C.1.pep
LGPRLGTWRPAGTSGILVATNAGAHQRHPVPPLAQKLSAPADAPKAAGANLPQAQPKNSMEHRRIQIARFNALKQQQLLKHMRERELAVATAAAWGTSVAGSHRAAGYRAPAPHVLSSSAWPTLQKQQQQQRAASPAGMRAVFVAPPGAKRERAGTGVFIPRQAGAPAEPKKRPAACAPVLLPARVVQALNLNVEDLGARPIYPGGFVLDHDALVSRSNALLASRASQQLHGASSREVNLPQEWTY

SEQ ID NO: 348717 - protein, 46 aa, Zea mays
  Clone ID: MRT4577_81195C.1.pep
ARSYRSLCASRRSLLERASGYVLVLPFCVFTTELNAIEPKLVVQMI

SEQ ID NO: 348718 - protein, 59 aa, Zea mays
  Clone ID: MRT4577_81196C.1.pep
MSFFKAPTSRKEEVVTMEHTINQHKRLHRCSFKNKAPYAIKEIWKSAHKAMGTTFILDW

SEQ ID NO: 348719 - protein, 79 aa, Zea mays
  Clone ID: MRT4577_81197C.1.pep
VQTEYAEGESTCLAQASPVDRPRTSSDRLPHNPLLIESHSAHTKIKHTPINKHAPFINIHQYVIKHTLTYRTNHILITY

SEQ ID NO: 348720 - protein, 99 aa, Zea mays
  Clone ID: MRT4577_81198C.1.pep
PLSITTRYQHVVSIERQIEIAVGERRRICRSQQGKEGIARRRGHNTVFIQRLKKKSFETVIQASLLLFREIGDGFAALSGFLSSTRFSCSKRRQRFDSC

SEQ ID NO: 348721 - protein, 65 aa, Zea mays
  Clone ID: MRT4577_81199C.1.pep
VGKVVKFQPSGPISKTKNFFAIRFPPRDTCRKFKFLPRFQSEDDQDRSSQKGLIVINSRRSRASS

SEQ ID NO: 348722 - protein, 101 aa, Zea mays
  unsure (1)..(101): unsure at all Xaa locations
  Clone ID: MRT4577_8119C.1.pep
PRRPXTLPLILIPVLFFPTSQSTQGPFKFLRGQTITKSILPNQNPPLSTFNFPKSKVKIHLTIPNPKVIPKISFSSPTTKNKPFLFILSPSQKMYFFPFIS

SEQ ID NO: 348723 - protein, 52 aa, Zea mays
  Clone ID: MRT4577_811C.1.pep
EKPSSKTGKCMHACYNKGSDTFIEAGKAKHPGGVAPLKIKGLQGVHLTKRFR

SEQ ID NO: 348724 - protein, 51 aa, Zea mays
  Clone ID: MRT4577_81200C.1.pep
SARARVLRLFAAGSHVHLGGLYQPDRLILNGELKPLIKAVLDSCNMLHQLF

SEQ ID NO: 348725 - protein, 99 aa, Zea mays
  unsure (1)..(99): unsure at all Xaa locations
  Clone ID: MRT4577_81201C.1.pep
PSPHPXXXXPXLXPSLPRXLXSGYRPTYPEGERERGEKGRAVGRGVSDGRGASPILRRDLARFRAMEDSRDTRGPGRTRGRKQGTGNGLMIRNHKNERP

SEQ ID NO: 348726 - protein, 140 aa, Zea mays
  unsure (1)..(140): unsure at all Xaa locations
  Clone ID: MRT4577_81202C.1.pep
LNHTXPRLKAPLTVGGSISPLERCGTVLGQVRLVRAPLSNITTMLAKRGNVVQGQFFWVTPGFYPVGHVVYNTAQLIWNNWAPIGRNWAPLRHMLGEIPQVLRHIRENCPQKRGLGLRYKFFFFFFFFFFFFFFFFFFFL

SEQ ID NO: 348727 - protein, 83 aa, Zea mays
  Clone ID: MRT4577_81203C.1.pep
LDCSVKIQQLELSVIKSSQFSSSITKAAACVQNCIRWCVPAVYHRVGIPPLLALAEATADSAPRHMRAPLYTKVFFEIKKTSQ

SEQ ID NO: 348728 - protein, 342 aa, Zea mays
  Clone ID: MRT4577_81204C.1.pep
MGCAQGKCCLRRHPRRGSAAAAVGGGATLGRAAVPGAGLVLEYAALAVAGLYPDSTARESQDAHLVATRFAGDPDLHLFAVFDGHGTAGTACAGFARDALPRLLASLSLASAADPTAAFREAMLGANAEMHAAPEVDDSMSGTTAVAALVSGGALHVANVGDSRAVAGVWRAGRVVAEDLSWDQTPFRADERERVRACGARVMSVEQVEGMRDPEAERWAPDEGDPPRVWARDGLYPGTAFTRSLGDLAAEAIGVIAEPEVKSVEITPSHLFFVVASDGVFEFLSSQEVVDRVATYQDPRDACSAIAAESYKLWLEHENRTDDITIIIVHIRDMESVGAPKF

SEQ ID NO: 348729 - protein, 99 aa, Zea mays
  Clone ID: MRT4577_81205C.1.pep
NLWADLCACLCTCLCACPSPCPYCGRLCRPQYTRHGFNHTPHLHQLDTYQVNRAPLKQNKYNTLLHKMYTPMLLVSDDSSPCMYVRDTPLSPHCYSNLT

SEQ ID NO: 348730 - protein, 89 aa, Zea mays
  Clone ID: MRT4577_81206C.1.pep
AGAASNHGRSSERPPPPVYRWRCLSSSIYRGHQIQEEGRAPRTFGARSGSTSCRAGSWLAFSSSDHLRGSWCSLPLSPVEVWMADLDIQ

SEQ ID NO: 348731 - protein, 85 aa, Zea mays
  Clone ID: MRT4577_81207C.1.pep
QEHLMMGKLILIDKQQTMEAWIYNGVPRYQGRMSVLQQLVDARRRAPSAPGRNDSPRFKLHHRRMRAICNYSVILNHPIGSAFKY

SEQ ID NO: 348732 - protein, 70 aa, Zea mays
  unsure (1)..(70): unsure at all Xaa locations
  Clone ID: MRT4577_81208C.1.pep
PTRFYLFNVLKIPNGREDLNTAAEPHPXPRTRAAGPQTRGEGGPPQRRGAVMDKGTVKHPGHGESIDGTG

SEQ ID NO: 348733 - protein, 48 aa, Zea mays
  Clone ID: MRT4577_81209C.1.pep
TGNTLTDHNSCFPFVSLLFFYLCCSSHTGVSRLLLMTVFSGRRYPHNF

SEQ ID NO: 348734 - protein, 87 aa, Zea mays
  Clone ID: MRT4577_8120C.1.pep
RRLLVLLGPCSASSIAAFGGPPLWAWACAGGRLLPGPAAVGPCPPPPPFGRLCPRRPKQTRRGSPPALGGLSFRFRLNAKPKEKGPR

SEQ ID NO: 348735 - protein, 93 aa, Zea mays
  Clone ID: MRT4577_81210C.1.pep
MEGLIPLVYRTIVEYRKARHQVAIASRLLYGDHHQQPCGSSALFRVVDPAASSSSWHAASSSMSPATSPAAARASGSLASPLLRSASRRQLAG

SEQ ID NO: 348736 - protein, 46 aa, Zea mays
  unsure (1)..(46): unsure at all Xaa locations
  Clone ID: MRT4577_81211C.1.pep
GCTQRFLKKKKKKKKKKKKKKKKKKGRKKIKDKKIKKKKKXKKKIK

SEQ ID NO: 348737 - protein, 128 aa, Zea mays
  unsure (1)..(128): unsure at all Xaa locations
  Clone ID: MRT4577_81212C.1.pep
MANSTIISNAANLQKYLDLPQKGXVMAEYAWIDGSNGIRSKSMTLKKKVESLDHLPEWNFDGPSTAHAPCYNSHVYLRPVAYFPDPFRQRDNVLVMRDTYMSDGTSNVYNFRHDAAIIFDKYKVADFS

SEQ ID NO: 348738 - protein, 94 aa, Zea mays
  Clone ID: MRT4577_81213C.1.pep
EQLKLEAELGNMKELMEDFKNKYEDEISKRTEMENEFVLIKKDVDEAYMNKVELESRLEGLTDEINFLRQLYEEEIRELQSQISDTSVVLSMDN

SEQ ID NO: 348739 - protein, 70 aa, Zea mays
  Clone ID: MRT4577_81214C.1.pep
RIAEHARGRGEFGGFRRAPYAARVQIEPGDGIAEEGKGKQKETERIRSVCEVVREYINFSSSLHEEELCA

SEQ ID NO: 348740 - protein, 60 aa, Zea mays
  Clone ID: MRT4577_81215C.1.pep
ELLVAEGIQQLLWCERAANHYLPTACIKYYYKHILLTSAPNIEPGTTTTTYSVFTAKPHF

SEQ ID NO: 348741 - protein, 38 aa, Zea mays
  Clone ID: MRT4577_81217C.1.pep
KSVCPVVGARQVLKFVPWRTRPEFSLGRGFLFQPAMVS

SEQ ID NO: 348742 - protein, 102 aa, Zea mays
  Clone ID: MRT4577_81218C.1.pep
KNSSRRTLVRSPATGGFSVTCPFVGHLLTCWIVRFPPMMEIIVLAPSRETDPHSSPVSEEEAGESMTQEAYHRAMRDSFMHRAVPRFHLTAKCTASRVSPTE

SEQ ID NO: 348743 - protein, 72 aa, Zea mays
  Clone ID: MRT4577_81219C.1.pep
MYMTIHLSELTVGTWDSRICIYLHRVVAHSSLVWFNLLSEQCLLSTSNTPLPTRLGHTLRPGCCITLSQQGS

SEQ ID NO: 348744 - protein, 112 aa, Zea mays
  Clone ID: MRT4577_8121C.1.pep
MATLQLNHIARETSDVARLAAFYEAVLGFERIPSPTYSGFQVAWLRLPSSPDVALHLAFSVADYDGFVTGLKARGTDVFEKSQPDGRTRQVFFFDPDGNGLEVTSAGAGNEK

SEQ ID NO: 348745 - protein, 59 aa, Zea mays
  Clone ID: MRT4577_81220C.1.pep
LHVVSSSPYQMRGIISTLNWTYLFSERERWPFKTSHTLGLSTRRVRNPHTLKRTPYLMD

SEQ ID NO: 348746 - protein, 69 aa, Zea mays
  Clone ID: MRT4577_81221C.1.pep
NEETIEKVLEEISLYLIGTADGSLDLVEIEDPIVKIRITGPAAGVMTVRVAVTQKLREKIPSIAAVQLI

SEQ ID NO: 348747 - protein, 91 aa, Zea mays
  Clone ID: MRT4577_81222C.1.pep
TGAGRWRKYVAARVAPPTAAELEQLSSTKMFDGFNLRFRHAERHLGLIHFTLCLSDVEACTYQSARHAAVTIENVPTSRASRYSIGFDLLS

SEQ ID NO: 348748 - protein, 191 aa, Zea mays
  Clone ID: MRT4577_81223C.1.pep
MAEQPMPCHDHDAESSTFFVESGQADSCVKARRLQQRQRRPCVGPPCVSAFVGPPVSVGATACQCSTFDTHRLCDEYNNHMTPKNSTCPSPPSNDDDARASLAVKKGKVHKLIYNYSKSTVRNTVDYSRQEKFFLKNTKRGPSGLRRGPSSRCKTRKPEAVDVHGRTIRTRGADRLRSTEKEQRLGSGWRL

SEQ ID NO: 348749 - protein, 79 aa, Zea mays
  Clone ID: MRT4577_81224C.1.pep
IGESLGDLPPVWDGILFLLLGAPAWEFQLTSALVLKVRGICLPGIVYKNGARKEQTGVARLELNFWVFFATHLFICFFH

SEQ ID NO: 348750 - protein, 221 aa, Zea mays
  Clone ID: MRT4577_81225C.1.pep
MAGVGSALRRLYLSVYNWVVFFGWAQVLYYAVLTLRLSGHKAVYAAVERPLQFAQTAAIMEIVHGLVGLVRSPVSATLPQIGSRLFLTWGVLWSFPETQSHLLVTTLVISWSITEIIRYSFFGTKEAFGFAPSWLLWLRTAPFMVLYPTGISSEVGLIYIALPYMKASEKYCIRMPNKWNFSYDYFYSSVLALLIYVPGSPHMYRYMLSQRKKALSKAKAA

SEQ ID NO: 348751 - protein, 49 aa, Zea mays
  Clone ID: MRT4577_81226C.1.pep
KFSRYGAIQISGSASMTTLKLSILHGSGMYAQICSLPCDTCPLPQKCLC

SEQ ID NO: 348752 - protein, 258 aa, Zea mays
  unsure (1)..(258): unsure at all Xaa locations
  Clone ID: MRT4577_81227C.1.pep
MTTPRFRPASRPASASSSPSPRPPQCRPSALSPAAPPRRARPPLCPAPILPLLLRLCITRSTKTRRRETRRRRAAGPRRGRLAPRHPHPRSTPXRRRGPRSAVRXRRRGGGRRCGSGTGGATPPPSPPRRRRRRARRAASASPPRSPCGGRRRPRARRRRSATGPATSSASTPTSGATRTGGSPPSSGSSSAGSGRRWRTRCRSAGRPPRWRXVKQASARMTHAEAXSTTCSVTARTTSNELTPTLCSSVLPLSLSCW

SEQ ID NO: 348753 - protein, 97 aa, Zea mays
  unsure (1)..(97): unsure at all Xaa locations
  Clone ID: MRT4577_81228C.1.pep
FPARRTHPNPPTYLTFRFPIYYFYYTASLSSNPETFTNNLYLXIIHSHLTILYSLSCIFPYLLSRNFFYFYXTFYFNAFSHIFIHTLSNYLYNPILI

SEQ ID NO: 348754 - protein, 72 aa, Zea mays
  unsure (1)..(72): unsure at all Xaa locations
  Clone ID: MRT4577_81229C.1.pep
MASEVARPSDAELLKAQADIWRXLGLSYLTPLRLRCAEELGMPTAIYRHAGAAXALSCSTGLSVHCTKLTKL

SEQ ID NO: 348755 - protein, 65 aa, Zea mays
  Clone ID: MRT4577_8122C.1.pep
LNSITYITCQNFIIITLLTCGLNLHGTIRDIKELYTVQRHIRNQFYVPSISVFWMAQYYHPCWSY

SEQ ID NO: 348756 - protein, 45 aa, Zea mays
  Clone ID: MRT4577_81230C.1.pep
EQSTRRLRGTRRINARRPQARARHRAVQRDRIDKRQAIDLEPLVE

SEQ ID NO: 348757 - protein, 102 aa, Zea mays
  Clone ID: MRT4577_81231C.1.pep
YGIRHEVRPNPPPTPSRMAAPSPTIYRRRRRRRHDPPPRAPPIRAPPRRALLCPPSATSAGPRPRPRPARATRRPRGGRVLRRGGVDGIPHLPPVTVRRGKA

SEQ ID NO: 348758 - protein, 69 aa, Zea mays
  unsure (1)..(69): unsure at all Xaa locations
  Clone ID: MRT4577_81232C.1.pep
MKKAMAAESFLFTSESVNEGQPDKLCDQVSDAVLDACLAXDPDSKVDCETCSKTSMVMVFGEITTKAAV

SEQ ID NO: 348759 - protein, 84 aa, Zea mays
  Clone ID: MRT4577_81233C.1.pep
LKYNPDDSRGGRNNSFFVLTKKIYDLSIERRSDLLKTDITYTNFKIKHVGDQDFYTIFKDEWLRALIYHAADHGTQAHQTINVY

SEQ ID NO: 348760 - protein, 63 aa, Zea mays
  Clone ID: MRT4577_81234C.1.pep
VLHQPNPGDRSGLLLLFPPCSITPGVFFGTMAPNDLWHSTNFKYLRSNIFFFVYKNERGGGGV

SEQ ID NO: 348761 - protein, 83 aa, Zea mays
  Clone ID: MRT4577_81235C.1.pep
VWQAAGVGWKEVSVNGAVRLGGTQEGFAKGFPTMLKGEIAMISEDLPVNIALALCWHQRGTCLASGDCSCTDHTEEICIADFG

SEQ ID NO: 348762 - protein, 115 aa, Zea mays
  unsure (1)..(115): unsure at all Xaa locations
  Clone ID: MRT4577_81236C.1.pep
PRPEXYDEFGNLKKKFALKXHTEGAQALPGSGRAGWEVEHRGPSEREGRERSRDRVRDDYYEKETRGVGRGDLGRDQRRSRSRSRDRERERRRERRREHDYERRERDRDRDRRHR

SEQ ID NO: 348763 - protein, 62 aa, Zea mays
  Clone ID: MRT4577_81237C.1.pep
RFWKNQRLNTKSNSSSFKRSFRPLLLTKRSTLLENVARLFSKSNARKKKMVQEYICSLNRTV

SEQ ID NO: 348764 - protein, 52 aa, Zea mays
  Clone ID: MRT4577_81238C.1.pep
EQTTSGGRPTTTEHGALTLKHGLSLYTQQFSASDRTIYVIRYNLTATNENTR

SEQ ID NO: 348765 - protein, 75 aa, Zea mays
  Clone ID: MRT4577_81239C.1.pep
RPVRLKTAARKTLFFPANCGVRFLQLMQVSSLFCPPRQGCIAFRLVYYANCDRMFFFNRNPGGAHDNAKLSYDSK

SEQ ID NO: 348766 - protein, 142 aa, Zea mays
  Clone ID: MRT4577_8123C.1.pep
MATLQLNHIARETSDVARLAAFYEAVLGFERIPSPTYSGFQVAWLRLPSSPDVALHLIERDPAAAPVGPGPGAEGAPPSQLPRRHHLAFSVADYDGFVTGLKARGTDVFEKSQPDGRTRQVFFFDPDGNGLEVTSAGAGNEK

SEQ ID NO: 348767 - protein, 84 aa, Zea mays
  unsure (1)..(84): unsure at all Xaa locations
  Clone ID: MRT4577_81240C.1.pep
FTYVTYIIISNTQPYLKQMSKHTPLQKKLMRQTTEILCNIIYMYLYVSFLCSALWRNLAEHLLLHPDFXSFFHIXIGNENIIYP

SEQ ID NO: 348768 - protein, 41 aa, Zea mays
  Clone ID: MRT4577_81241C.1.pep
EGGGLKCALPCSLNDSHVFTVNLVVMLRGRQFEPPLERKGF

SEQ ID NO: 348769 - protein, 33 aa, Zea mays
  Clone ID: MRT4577_81242C.1.pep
FTPKKKKKKKKKKKKKKKKKKKKKKKKKKKKRT

SEQ ID NO: 348770 - protein, 61 aa, Zea mays
  Clone ID: MRT4577_81243C.1.pep
STTSEVRSTIANTRNTLRWCSVGFCLVPSPGIGRADSDEYADAVGRARYTGSELYRARPAL

SEQ ID NO: 348771 - protein, 123 aa, Zea mays
  unsure (1)..(123): unsure at all Xaa locations
  Clone ID: MRT4577_81244C.1.pep
SNHNDGLXTCESYPRQGVNGIYKFKXNENVLVKVLDSINITLSAADXLKDSITLVRPHNATFHVITXFRLYISTIYTNDHYGTTPIDVNHAILTILYCIEHRDHYWLIXNSWSAFLCDDTILN

SEQ ID NO: 348772 - protein, 105 aa, Zea mays
  Clone ID: MRT4577_81246C.1.pep
AAPFGVVWGNWGPHLFKSGNNCFPKKKKNFPLKPRPERGNMKDPPGVLRGPRPRPGGKNFSICWEKPGDFLVKKKKKKKKKKKKKKKKKKKKKKKKKNSRKGAGT

SEQ ID NO: 348773 - protein, 76 aa, Zea mays
  Clone ID: MRT4577_81247C.1.pep
LTQNSLGASTVGTAVNWASSYTARCRMVASDRTTTWHGGGIVILAYERLLLPARVGLDGQVTEKGRLPTRPSKRGS

SEQ ID NO: 348774 - protein, 39 aa, Zea mays
  Clone ID: MRT4577_81248C.1.pep
ACGRVSSMDVTQKTLRTSAFLRLHVKEKWFKNLYIASIC

SEQ ID NO: 348775 - protein, 78 aa, Zea mays
  unsure (1)..(78): unsure at all Xaa locations
  Clone ID: MRT4577_81249C.1.pep
SARFYRKSSNGLEWTWTGTFMMKAKLVVISVAQCYPSRFQNXSCLNSPKQIXLSQLVFHILFCSIAPAWVNRRSRRQS

SEQ ID NO: 348776 - protein, 48 aa, Zea mays
  Clone ID: MRT4577_8124C.1.pep
NSTYIHIYTSCGMWQGTSNTILWYRGKPLCPYTYPHISCGTLSGPRWA

SEQ ID NO: 348777 - protein, 198 aa, Zea mays
  unsure (1)..(198): unsure at all Xaa locations
  Clone ID: MRT4577_81250C.1.pep
HSTCWPTYRPPVPATFSSNICSKWGTFTGPSTANAAVDVVIGTAYSTADSLVGDIPGDDPKCCWYCNKTXTAPSADTGTRLGETLADPPAKPHPQTTSFNTYFVTERIFDQPYTHPQTQIEPYIVPYATNDAANGDTXMKHHXPHYSPTYVLAFMLATIKYTLESYLXKAVITAPTSVTDSYNDATQDAPQDAGLIAG

SEQ ID NO: 348778 - protein, 112 aa, Zea mays
  Clone ID: MRT4577_81251C.1.pep
REGTPSSPPPSASWCSYPLPPSPPGVQQHKNLRETPEESPRIGDESSLISRCKNNWHGYMKDHLETGRPNRRLEPGHEAALTMELYHHHRRITTGHKGGSAGGVAAAPSKGN

SEQ ID NO: 348779 - protein, 119 aa, Zea mays
  Clone ID: MRT4577_81252C.1.pep
PPPGNPPFFTWPPNPSGSPLRIFPKPPPPRVFLPGRGPFVAPKHTLHPAGIFRTPPLNYPAINHLVPRTNGTRQLPFFPRPLIFFFFPAFNQVFSGDPVPPGGLVFWNFRKNPIKFFPH

SEQ ID NO: 348780 - protein, 46 aa, Zea mays
  Clone ID: MRT4577_81253C.1.pep
IKKIITNRSQLSQLNKNVLRKVTSMSFTALRNMVVMASLNHCLIVA

SEQ ID NO: 348781 - protein, 52 aa, Zea mays
  Clone ID: MRT4577_81254C.1.pep
AKYFPGLAHSRLDKHISRWFGLDQSKYQWALNDYFERTGQVIPHFSFSFFCL

SEQ ID NO: 348782 - protein, 152 aa, Zea mays
  Clone ID: MRT4577_81255C.1.pep
LDSPAPVSLALASGHCILGRARPVHQRPGRGARPPAPVSPSRSAPAGHAPRTNPDSKCCHDLVMDSRHHIVALLHRRTCCRLPAVFACVPEHLEEVVFEGVYSNACLSSGWIYLTKGWVEGFWDLLLQQGKPRCICHHPCVYKILSLICYIR

SEQ ID NO: 348783 - protein, 47 aa, Zea mays
  Clone ID: MRT4577_81256C.1.pep
CQIKGHDRPCACPVCKDSCLLLSRCSIMCMRVMSVNWHPCAMQCSRV

SEQ ID NO: 348784 - protein, 136 aa, Zea mays
  Clone ID: MRT4577_81257C.1.pep
TTKKRFFCVHAPFAFVERLIRSVFSKRGLFFYYNKGALTNSKDSKGAEESPKEEKKSSALRGCGQRFTRLKCSLFDWALNVFYPFDQVRGPFVFHGGGQKGRGGIIPSNFLQEVLGGLLLFLIQLTEWGADFLVYW

SEQ ID NO: 348785 - protein, 173 aa, Zea mays
  Clone ID: MRT4577_81258C.1.pep
SFDVASVQCLLRDQVKRIPDTFTSFESYLDSFTWPLIEEVHADVFSSLDGYSEANFIEVTQVGNLDASKPILGFRVAEPVKDEKSRETYVPVENDIIVLSSHKPRHVSDLTQNKSSFVLGSVIKTGEEDGFPPDWCVVHLSSAILVEADCHTKIPKRPLFLVFLINMKTYNRI

SEQ ID NO: 348786 - protein, 126 aa, Zea mays
  unsure (1)..(126): unsure at all Xaa locations
  Clone ID: MRT4577_81259C.1.pep
MDELCDDIRIKHELSAKYTPQSNEFVKRKNRTLIDMKKIHTYKAYGVFNKTIGIIEEVHDVEFDESNGSQDEDENRHDVRGTQLNNAMKAITICDMKPREVVNEKEDQXSMEINDQPSTSGIHDQE

SEQ ID NO: 348787 - protein, 80 aa, Zea mays
  Clone ID: MRT4577_8125C.1.pep
RAPCPCVHPDSKWSVGLPGQRGVGGADPAQAVLTLDRASDGIPRARPPFPPHPNSGGGGAAVTRADVGEGFGSARNEHQR

SEQ ID NO: 348788 - protein, 40 aa, Zea mays
  Clone ID: MRT4577_81260C.1.pep
RWRKLLHTSIRCEHGTIVWTVVSGIYPVGFYARTSLRRKT

SEQ ID NO: 348789 - protein, 119 aa, Zea mays
  Clone ID: MRT4577_81261C.1.pep
RPGDSPLPVSAVPADSSDGDKFKDLLTKYKNVKRLYFDGKTQIEGLNGQIVHLQNAVANQRMSQSRTALDDSEYSTRFNRLNGAINNLSFNIRKDWRCVPQWLDKYVSADALKTAKAEM

SEQ ID NO: 348790 - protein, 48 aa, Zea mays
  Clone ID: MRT4577_81262C.1.pep
YQAVDFRSSLPKIGLCLIYDVNSCHYMQCCFFRWYLKSEGVASLLSSI

SEQ ID NO: 348791 - protein, 100 aa, Zea mays
  Clone ID: MRT4577_81263C.1.pep
LLQQNQILFFRVFFYFSTLFTRHCFDRIPYFVSLFRKQGPLAFKTGMSGTKACNGRPRPNSRENPFMDVHFRPMHGLLNIGRANLFWHPQTWIFQPTRGV

SEQ ID NO: 348792 - protein, 110 aa, Zea mays
  Clone ID: MRT4577_81264C.1.pep
ATPSETSCMKRRKMNPAMMTISSDAVSQEATSLLVEYLGDTCWTKVSRTIKWQRLYTSSSVTRRLDPVATAIMSPCLGVQETAVSRRDYLELDAFLLWPASCQEYLPRIP

SEQ ID NO: 348793 - protein, 93 aa, Zea mays
  Clone ID: MRT4577_81265C.1.pep
TNVQYKDTYHISWFSDILISTCFEEMDIHICARPILLNQDGTISAFNRIKSLLSVSFSMKKIVQEMTRMKDERNRLRMIMTQYMVWLHSPCKI

SEQ ID NO: 348794 - protein, 53 aa, Zea mays
  Clone ID: MRT4577_81266C.1.pep
CYEGEHDGYLCSAIHMLDGVLAEGGSANKAVDRPPLHDSRVWPSAIITLRSVF

SEQ ID NO: 348795 - protein, 183 aa, Zea mays
  Clone ID: MRT4577_81267C.1.pep
ARVVMEGLNATDAVIKKPRSVAFRKPRSMKQLTVECNGICLPSRSARHDDDTGVEAGGQRRKELHLNSPEMKGSMTHRSDVPSKIRRDDKSGGDYDGHGRSRKTKDAAKHGSESVLALECTARNIESLDNPQLVPRDDSLPGENRPRKVKFKFNRTQRTKNGQDDGGSGIPATSACFINQYKQ

SEQ ID NO: 348796 - protein, 141 aa, Zea mays
  Clone ID: MRT4577_81268C.1.pep
EDGAGSRTVALELGAGVVQTIYCSEGWASKYPTISEIRWAKEDPWLRHQALKIDHGKHHVSQKFGISDWCVLMNIGSGCGGGGGGEVAYLLWEGMGIPIPSPEGNKGDAKRMLRSVGSTVSIYSPVTWPLSTIVCVCVGIR

SEQ ID NO: 348797 - protein, 34 aa, Zea mays
  Clone ID: MRT4577_81269C.1.pep
TSCILLINLDCRTERQPCRRAVYPEPIAFYDKSA

SEQ ID NO: 348798 - protein, 62 aa, Zea mays
  Clone ID: MRT4577_8126C.1.pep
ELLWLLIFLFSLDPKQANKRIGLSIKLSRSQKESRFSAKGKAVRLAVFSNVMMCSKGPLGPR

SEQ ID NO: 348799 - protein, 91 aa, Zea mays
  Clone ID: MRT4577_81270C.1.pep
KPGISSSILNSKGQLAAVPCYQYAVMRRLSIGHIHTPAHSSHLQPTHHCILEDKVWLHIRSHRTVSLCLLGGLSGLLGRLCLLAPATGRLL

SEQ ID NO: 348800 - protein, 113 aa, Zea mays
  unsure (1)..(113): unsure at all Xaa locations
  Clone ID: MRT4577_81271C.1.pep
PTNFPPPPPTGEGAKGXGPIRPRTGQRPXXRQTAKSNRTAKGNGGKKHGPXHGKPRRGRPKEKQKAXXXPENHKENXGDXTPPREPXXEXXXXRXXPPDAAPAATRXATTANR

SEQ ID NO: 348801 - protein, 100 aa, Zea mays
  unsure (1)..(100): unsure at all Xaa locations
  Clone ID: MRT4577_81272C.1.pep
ARNSARAVSRVGTFFYRPVTTFFHDGRGFQGEYATKVVHNSGTAVGLKCKAGLGMGLERPGTSXMMLEGGNPRTHLLHRHSASVVACRATNVTPNGGRAK

SEQ ID NO: 348802 - protein, 72 aa, Zea mays
  Clone ID: MRT4577_81273C.1.pep
RGGQPMLPQVFSLIPGFCRKGTVITRVGCSPLHEGNRNMGANWLFMEAKKTIDLGGGAGLFYLVITLICVCS

SEQ ID NO: 348803 - protein, 92 aa, Zea mays
  Clone ID: MRT4577_81274C.1.pep
NFPQAPLFLPRVTILGSIAGPHFSPHKIVFIPPPKGPPGGGKKKKKPKKKKKPPKKKKKKKKKKKKKKKKKKKKKKKKKTKKKKKKKKKSLY

SEQ ID NO: 348804 - protein, 67 aa, Zea mays
  Clone ID: MRT4577_81275C.1.pep
VLAGAPKGLPPFGRRASSFAVVCSKKKIKTAKPYGIGGGLTANFYPNGRKGKGKGVYQFFNKYGANC

SEQ ID NO: 348805 - protein, 72 aa, Zea mays
  Clone ID: MRT4577_81276C.1.pep
NLLCQSLYGGLWSGLSRGRRRFFRRKAFRRFSFQIKPGQASFQALGNNLSMKKAPFPIFENNVVQCVSMWVA

SEQ ID NO: 348806 - protein, 77 aa, Zea mays
  Clone ID: MRT4577_81277C.1.pep
MAASRTSVVVVLCFVVASLLLSSSSFAARTTTTTDEWRRETTAKQRSVVEEQDFPVTEGSPNIPSYYVPPPPSPYTA

SEQ ID NO: 348807 - protein, 171 aa, Zea mays
  Clone ID: MRT4577_81278C.1.pep
MSGAGVAAGTRPPSSPTPGSRRRRQRPSVGVQSLRPQSPQLRQSDPQKRNLDLEKSLQFLQQQHSEMLAKLHEEIEHLKRENKDLHYKLIMNQTSQKKDSLSTSSFQSVKSISNSGKARPQPGSFNKQDSKADVPQKADLEEEPLLHNSKLDKVPGVQGQARKEKAEASYA

SEQ ID NO: 348808 - protein, 109 aa, Zea mays
  Clone ID: MRT4577_81279C.1.pep
PTRPLLYVVYHDAHHHLMLAMMLATVDAPIALSVPIPAHRRSDLLSSPVARRDAQIGRLSSKCNAYRLGGAVARRGNLRGSPVATQIVLFASRLRAILRAIQQHPTQSA

SEQ ID NO: 348809 - protein, 157 aa, Zea mays
  Clone ID: MRT4577_8127C.1.pep
PWVGAKNSGPNAPEVSENVLAQKNFGGGVKAASGEPCPLVAPRIIDPPQVVRCFLEHQTSVAKTFIPPEAVVVPPRWLFPPPPLLLTPRPLVVAPGLGTKLFPRPPFPRSPRIISLGGFIIKWMKVASEIIAGGRYWCLLKNKNPAACDPNPLKKKI

SEQ ID NO: 348810 - protein, 149 aa, Zea mays
  Clone ID: MRT4577_81280C.1.pep
PVFPLGFHSGTLSFLGSRLFAPSLGVAVCWFFRASLGFCTLLPDCFWGPPFRFAVPLPLPFCFSQVVLAFSFGGSLLVSVLVFQCFFRVPLLCFFLRFPLFLPMFVSCCFFPLQSPFSVFFFETFSPPIFFLQDAFLTTFVGFHRPPPA

SEQ ID NO: 348811 - protein, 115 aa, Zea mays
  Clone ID: MRT4577_81281C.1.pep
KNCPFFYAHVPPFIYPHKNYLNVSTEKLGGAQIENPHIFFSKSGKIKTHRPSTHGPWGWPMDTSISSLAPSGMIPPNLFFSKSLTTLFFSTGRSHPRFQPKSHTELASECVLSMS

SEQ ID NO: 348812 - protein, 113 aa, Zea mays
  Clone ID: MRT4577_81282C.1.pep
IHSKKLQQPFSLNHQHARSNIIFPQKKKKKPTSPHKKKKTKRYPLFPPCSTNFPQNPKKRANGFFLSKQNQPLPILIHSYPFPYYQLLGFSQQITRYYLLIYFHPHPKTHLFC

SEQ ID NO: 348813 - protein, 77 aa, Zea mays
  Clone ID: MRT4577_81283C.1.pep
PSFKENRPQNLHGGPRKKTGEGLNNHLDNDGLTHTNTFLVIFAKLKHKGRAVPTPQDGPHTAKGTQRPLNSNPAPRN

SEQ ID NO: 348814 - protein, 189 aa, Zea mays
  Clone ID: MRT4577_81284C.1.pep
MAARRSLVVFLPWCCGPAASWADISRSVRSPLFPLFARFMGERLSGQTFPWRGPEDFTSLAPCFHGSWFESTIRPPLVEEEWPPLPRSVSALKMDPKGRNPNWDRWGQKDAPQGSQSWNKNRNLSWRLKPNLGKSDVKEDIVTSSSGDGGQSDARETMDNSLQVWADLKCVTPYVLARVLYVVGYKKVL

SEQ ID NO: 348815 - protein, 82 aa, Zea mays
  Clone ID: MRT4577_81285C.1.pep
MSFMLLAMFAKQTISHRALPSRSSGGQFHASRKCGICGSFWKTSILSLGISSKEVVENAVERSLLLGTANAMNADVSAITTG

SEQ ID NO: 348816 - protein, 72 aa, Zea mays
  Clone ID: MRT4577_81286C.1.pep
EAAAAGAARSGAGARELEPQGGLLPQLVGCPRACPPARSDPGLDSERQGKSVTSATASAPAGNLNHVTYILV

SEQ ID NO: 348817 - protein, 95 aa, Zea mays
  Clone ID: MRT4577_81287C.1.pep
MAMAKPPLQTAAIIFLVLLATASCLHTVDAAALGFCWGKCSARCARASARRAWAACMSSCGLCCEECNCVPRDIHDCPCYSNMFTTGPKKMPKCP

SEQ ID NO: 348818 - protein, 226 aa, Zea mays
  Clone ID: MRT4577_81288C.1.pep
MGSRLGRRVIHFANLPLKVMLPPAPLSSVQEFAVRTVPSASKVDIRRCLESMYGFSVAEVRTLNMEGKKLRRGPFLSAKPDYKKAYVTLRAPLAVSRDLFPIGAILAERERKASAAAARRKAVEGAEVEGESKGKHWMEDEREGFSRAGCGKVVYGNPGRLGRKRRGGDKVKEQAGDEAAKFPWSGMRLATEKPRRVRRSPSKKGIVLKQKSRKVSLQHRSKKLKA

SEQ ID NO: 348819 - protein, 62 aa, Zea mays
  Clone ID: MRT4577_81289C.1.pep
VFSGFSGALFVNLALTTLNRIADPTHYQKLSHDILGKSLLHPWAPSPAFELLPDSTAPLNLR

SEQ ID NO: 348820 - protein, 126 aa, Zea mays
  Clone ID: MRT4577_8128C.1.pep
WRHLSRENGRGDYTCVSECRGKTNLSFGGFSLSQPKHGVGEITNKSDGHWPDDGKIHRFPRTLYRQRMRSGGSTSVQQNAARKKKGGAYPESENKKRPKHASLFFVPFVMRTRWLGVTKNQEGNHR

SEQ ID NO: 348821 - protein, 61 aa, Zea mays
  unsure (1)..(61): unsure at all Xaa locations
  Clone ID: MRT4577_81290C.1.pep
VLGHINTVLVLTLGFLFFGKESXLSFHVLXGMFLAVIGMIWYRNAWSKFVGKDRQVYTTPS

SEQ ID NO: 348822 - protein, 81 aa, Zea mays
  Clone ID: MRT4577_81291C.1.pep
GAFRNFKVFVTNSCTVEPPQAFYISVPKIFFSNPRWFEPASSNLPKTVLELASPEKGKGKIPGDSKLHKLYAGLNKSFPLF

SEQ ID NO: 348823 - protein, 157 aa, Zea mays
  Clone ID: MRT4577_81292C.1.pep
MWYAIGRDVGQERSSKSCFNAFQEPQQQQPQVQVELQQQPQVQVELQQPQPQKQAAPVMRRGASIAARQAAMAQQSLETIPVPSSPKIKRQTSGRPGSVASTKPAAAASTPKPGGSPKKEGAEELDPALEETLMEETIRVTRAKLRRRTATEDSAGN

SEQ ID NO: 348824 - protein, 63 aa, Zea mays
  unsure (1)..(63): unsure at all Xaa locations
  Clone ID: MRT4577_81293C.1.pep
WVRTSXKLHGVRPFDCKRTPLQSEWSECFGALYPVHSVMPDVARLLQFRKASTARLAAAAAEK

SEQ ID NO: 348825 - protein, 92 aa, Zea mays
  unsure (1)..(92): unsure at all Xaa locations
  Clone ID: MRT4577_81294C.1.pep
RVAPTRTPTRTPTRTPTLSEKTVDGXPDXKDCRGVRSARINISPSRTATTKTAVKVLLFLFGKQTGMFFRVPTADVTAVDFAVRLEKSCSYD

SEQ ID NO: 348826 - protein, 332 aa, Zea mays
  Clone ID: MRT4577_81295C.1.pep
MMGGFLSRVLLLAFGYAYPAYECYKTVELNKPEIAQLIFWCQYWILVALLTVLERFGDFTISWLPFYSEAKLMFFVYLWYPKTKGTTYVYGTFFKPYISQHENEIDRNLLELRARATDMVVLYFHKAASVGQNTFFDVLKYVVAQSPSQKSRQRLHQESQQPPQQQQPQVQVQQAQPQKQAAPVMRRASSIAARQAAMAQQSQETKPVSSSPKIKRQTSARSGSVASTKPPVAASALKPGGSPKKGEVKPAADPVQTPTTGADSPKPEPSVPSLPGAEGVDKMAIDEASGDAPEGAEELDPALEEETPMEETIRVTRAKLRRRTTTEDPAGN

SEQ ID NO: 348827 - protein, 344 aa, Zea mays
  Clone ID: MRT4577_81296C.1.pep
MSAEGSESESEKMMGGFLSRVLLLAFGYAYPAYECYKTVELNKPEIAQLIFWCQYWILVALLTVLERFGDFTISWLPFYSEAKLMFFVYLWYPKTKGTTYVYGTFFKPYISQHENEIDRNLLELRARATDTVVLYFQKAASAGQSTFFDVLKYVAAQSPSQKSRQRLHQESQQPPQQQQPQVQVQQAQPQKQAAPVMRRASSIAARQAAMAQQSQETKPISSSPKIKRQTSARSGSVASTKPPVAASALKPGGSPKKGEVKPAADPVQTPTTGADSPKPEPSAPSLPGAEGVDKMAIDEASGDALEGAEELDPALEEETPMEETIRVTRAKLRRRTATEDPAGN

SEQ ID NO: 348828 - protein, 72 aa, Zea mays
  unsure (1)..(72): unsure at all Xaa locations
  Clone ID: MRT4577_81297C.1.pep
MAAKMLALFALLALXASATRATHIPGHLTPVMPLGTMNPXMQNCMMQQGLERLRXKPNLMLQXMMPLPVPTM

SEQ ID NO: 348829 - protein, 335 aa, Zea mays
  unsure (1)..(335): unsure at all Xaa locations
  Clone ID: MRT4577_81298C.1.pep
MMGGFLSRVLLVAFGYAYPAYECYKTGELNKPXIAQLIFWCQYWILVALSSVXIDENLTFVCAHXRLPFYSEAKLMFFVYLWYPKTKGTTYVYGTFFKPYISQHENEIDRNLLELRARATDTVVLYFQKAASAGQSTFFDVLKYVAAQSPSQKSRQRLHQESQQPPQQQQPQVQVQQAQPQKQAAPVMRRASSIAARQAAMAHQSQETKPVSSSPKIKRQTSARSGSVASTKPPVAASAPKPGGSPKKGEVKPAADPVQTPTTGVDSPKPEPSAPSLPGAEGVDKMAIDEASGDAPEGAEELDPAIEEETPMEETIRVTRAKLRRRTTTEDPAGN

SEQ ID NO: 348830 - protein, 175 aa, Zea mays
  Clone ID: MRT4577_81299C.1.pep
VLFFVYLWYPKTKGTTYVYGTFFKPYISQHENEIDRNLLELRARATDMVVLYFHKAASVGQNTFFDVLKYVAAQSPSRKSRLHPHQEPQQQQPQVQVELQQQPQVQVELQQPQPQKQAAPVMRRGASIAARQAAMAQQSLETIPVPSSPKIKRQTSGRPGSVASTKPAAAASTQN

SEQ ID NO: 348831 - protein, 58 aa, Zea mays
  Clone ID: MRT4577_8129C.1.pep
RLLSRGPTSLLTEFHATCLRMRATKLFTKVLSACIGEASERALLLCVAASTALANKAA

SEQ ID NO: 348832 - protein, 61 aa, Zea mays
  Clone ID: MRT4577_812C.1.pep
QNQPPLLSFFTIPHLPRRGFLNIRGSPITPKTTSTTATSPSLLIQLTILTLPSSFLSTLTT

SEQ ID NO: 348833 - protein, 257 aa, Zea mays
  Clone ID: MRT4577_81300C.1.pep
PPEETGSCVATSEREREGRNHSSWPFCLPIHRGAGRPSPVHIPPPLLQGSCAVCSAEGSESESESEKMMGGFLSRVLLLAFGYAYPAYECYKTVELNKPEIAQLIFWCQYWILVALLTVLERFGDFTISWLPFYSEAKLMFFVYLWYPKTKGTTYVYGTFFKPYISQHENEIDRNLLELRARATDMVVLYFHKAASVGQNTFFDVLKYVAAQSPSRKSRLHPHQVWSNVFSFLSKKNPLNNLLLSVHHVYTDTQNLF

SEQ ID NO: 348834 - protein, 74 aa, Zea mays
  unsure (1)..(74): unsure at all Xaa locations
  Clone ID: MRT4577_81301C.1.pep
ACPPPSVPPQGFSKEAPPPPPPPXPPPVCPPPARPPPPGRACGPPXPLPVFLVGPPAPPGPPATSPPPPSITPP

SEQ ID NO: 348835 - protein, 136 aa, Zea mays
  unsure (1)..(136): unsure at all Xaa locations
  Clone ID: MRT4577_81302C.1.pep
RLPFYSEAKLMFFVYLWCPKTKVFRLSFASSISQFSFWQQADVCFHXGTTYVYGTFFKPYISQHENEIDRNLLELRARATDTVVLYFQKAASAGQSTFFDVLKYVAAQSPSQKSRQRLHVCVDQMHYYSFCQKKIH

SEQ ID NO: 348836 - protein, 406 aa, Zea mays
  unsure (1)..(406): unsure at all Xaa locations
  Clone ID: MRT4577_81303C.1.pep
MILYICGTLRQRELRMFEGRNHSSWPFCLPIHRGAGRPSPVHIPPPLLQGSCAVCSAEGSESESESEKMMGGFLSRVLLLAFGYAYPAYECYKTVELNKPEIAQLIFWCQYWXFPVSRILVALLTVLERFGDFTISWLPFYSEAKLMFFVYLWYPKTKGTTYVYGTFFKPYISQHENEIDRNLLELRARATDTVVLYFQKAASAGQSTFFDVLKYVAAQSPSQKSRQRLHQDSQQPPQQQQPQVQVQQAQPQKQAAPVMRRASSIAARQAAMAQQSQETKPVSSSPKIKRQTSARSGSVASTKPPVAASALKPGGSPKKGEVKPAADPVQTPTTGADSPKPEPSAPSLPGAEGVDKMAIDEASGDAPEGAEELDPALEEETPMEETIRVTRAKLRRRTATEDPAGN

SEQ ID NO: 348837 - protein, 228 aa, Zea mays
  Clone ID: MRT4577_81304C.1.pep
MALDSVPPYPSDLGSSRAAAAARTQQRIRKEERTWTSDTYAPYDDGHQWRKYGEKKLSNSHFPRFYYRCTYKNDMKCPATKQVQQKDSSDPPLFSVTYFNQHTCSSSSALGSARDVASQSSSKKAVSICFSPHAPSEQTSFLTTTTVAPPVMHSYGANRQPDRSAYNQQPQWWTGGVPSPTSNGPAKMEVAESTQKPSGSYGSTTGNAPSRTLLPIGQSRCIEYFHFL

SEQ ID NO: 348838 - protein, 274 aa, Zea mays
  Clone ID: MRT4577_81305C.1.pep
MGSRRYDIDTRRCGIHSRPTKSMYLDAQQIVSCQTRVGDHDVGSCAVKHHFPSPIVSWIEDLSSFGNASFNPVSEYVDEQARASVGQSSASSNLHDMQISVRLTAEFMELAKENTSNNLETCGILGASFRDGTYFVTMLIIPKQEGTAHSCQAVSEEEIHAVLSEQSLYPAGWIHTHPSQTCFLSSIDLHTQYSYQVMLPEAVAIVVAPTDPTRSYGIFRLTEPGGMDVLRECDESGFHTHRETTNGSPIYETCSKVHFNPNLRFEIVDLRSAQ

SEQ ID NO: 348839 - protein, 70 aa, Zea mays
  Clone ID: MRT4577_81306C.1.pep
LPYSEPSKLPKTLIPFLLAEPVVAMLQQSTPNRAKVRKAKLNLVPEEIPFPKRKPLLATRVRPRVRGLVL

SEQ ID NO: 348840 - protein, 108 aa, Zea mays
  Clone ID: MRT4577_81307C.1.pep
MKRLKFWCPCSAMGSRRYDIDTRRCGIHSRPTQSMYLDAQQIVSCQTRVGDHDVGSCAVKHHFPASIVSWIEELSSFGKASFNPGSEYVGEQARASVGQSLASSNLHD

SEQ ID NO: 348841 - protein, 70 aa, Zea mays
  Clone ID: MRT4577_81308C.1.pep
MPYLFLKFFRSYGIFRLTEPGGMDVLRECDESGFHTHRETTNGSPIYETCSKVHFNPNLRFEIVDLRSAQ

SEQ ID NO: 348842 - protein, 107 aa, Zea mays
  Clone ID: MRT4577_81309C.1.pep
FLQPSISSLLNQSVPLNLLAHPSTQMPETATQGLAPGRGRVPASMRELWSWARPEGRTTDGSGRGGGVTDHWRPEGTAAAVGRWAGAGAVAAEFGRRVRRGLAEDVG

SEQ ID NO: 348843 - protein, 130 aa, Zea mays
  unsure (1)..(130): unsure at all Xaa locations
  Clone ID: MRT4577_8130C.1.pep
SGAALLYVGFIYSERRVPDAGNNXDALHPIIADYDAVLIIVRRFSDAYVHSDXKLRPLKVIPGTVEKPMIAPQXTGGERHSVHAEISCMGLIRMRWIDEAHRACWSKNAGVTCPAYLNCYQTRATQDAGW

SEQ ID NO: 348844 - protein, 107 aa, Zea mays
  Clone ID: MRT4577_81310C.1.pep
LTPRCRRGCYSSGRSTDSDVADRDFGSLLSSDPFHVIDQFVYAHILVLASPAWTNNAPYCTPIPPLVIEMPPRRRRFISFRFSMSGTRSAEMLLAAWRHLVANRRHV

SEQ ID NO: 348845 - protein, 640 aa, Zea mays
  unsure (1)..(640): unsure at all Xaa locations
  Clone ID: MRT4577_81311C.1.pep
MPFGLKNAGATYQRPIQTCLADHWGKWVEAYVDDVVIKTENSENFIEDLQLVFNSLQRYRWKLNPEKCVFEVPAGKLLGFIVSHRGIEANPKKIEAIMRMEAPQSQKKWTTEAQEALEALKKFLTTPPVLKPPRRAMPNQPAEELLLYISCMTHVYPQVQKLLYTVLLTARKLRHYFDDHKVIVVTGFPIGDILHNKEAIGRIAKWACELGAHDIEFRPCMAIKTQALVDFVSEWTEHQVPDNPETTEVWRMYFDGSLKLQGAGAGILFIAPRAEYEALMHRLNIAVSLSIKKLMVYEDSLVVIRQINKDWDCSTDSMGKYCAAVRKLEHKFEGLEFLHMKRDRNAAADALSKLGSSRAQAPPGIFVQEISQSSILLDQMEECNTLSQLESDPIDWREPIIRYIKNEEEPDDKVAAERIARQSAHYTLIEAYCTEEGLDMIGPFKKALGGYTRQHHSSLGSIDKFTKWIEYKPIASLTSAKAVEFIQDIIFRELPYVVWSLRTQPSRALHGNTPFFMVYGSKAVLPTDLIFGAPRLTFESIAEAEATRLEDIDVLEEERLNTVIQSGRYQQTLRRYHDKAVRHRSFAVGDLVLRRILMGEGRHKLSPLWEGPXIVSKVTRPRSYRLTQMDGTEVGKSWNI

SEQ ID NO: 348846 - protein, 68 aa, Zea mays
  Clone ID: MRT4577_81312C.1.pep
MASHQIDKNSERYIIAKTIYNEGHYEGVDVMEAVASTILNRYKLNKAELGGQDWRKICEMGYPGEEGQ

SEQ ID NO: 348847 - protein, 72 aa, Zea mays
  Clone ID: MRT4577_81313C.1.pep
QKRKKRLKKKKSLIKIWVSPCSIKTPLPVYSFPPEWSPKIRWFPQNKIVKSYYGLMLFCILCTSVHLQKSLS

SEQ ID NO: 348848 - protein, 93 aa, Zea mays
  Clone ID: MRT4577_81314C.1.pep
TGGTGKNRAGAKSFGLFFPRSVNGGGGGHTKGGVPSGGAGGFYNYHYHQGVIFGGGVGHNPFIGPNHLNAPKTDSRGGWEASLFNKMGAAGWG

SEQ ID NO: 348849 - protein, 53 aa, Zea mays
  Clone ID: MRT4577_81315C.1.pep
HSFIALWGKRSNVAIKNGMYAKYAVVMALTSVASWMRESPTCTALIEQLQDES

SEQ ID NO: 348850 - protein, 94 aa, Zea mays
  unsure (1)..(94): unsure at all Xaa locations
  Clone ID: MRT4577_81316C.1.pep
FNSESPLTLNFLDSCHSCYQVIMLLQYLQFXSCFNQSYFSFHTTVSSQQLSHSSQLESNFQESTVEPNRPKVLRKCICCVRFMAIQYKGLSRGR

SEQ ID NO: 348851 - protein, 56 aa, Zea mays
  Clone ID: MRT4577_81317C.1.pep
VAPPLLSHPVAQNPRALACSPPPPERAPHLHPSTMVYPHHQEEQVRHLRCFLRLAQ

SEQ ID NO: 348852 - protein, 76 aa, Zea mays
  unsure (1)..(76): unsure at all Xaa locations
  Clone ID: MRT4577_81318C.1.pep
PWPRINIDMNGFEGIAMLFPRVALQTEVVLLVTGNDPFITTHXQSYMFKHDTMHGHWNHSFIRLKDSQAFLLRDKP

SEQ ID NO: 348853 - protein, 104 aa, Zea mays
  Clone ID: MRT4577_81319C.1.pep
AGLVLLVPALRPGAPFLYSGSMCLGLVCSRPFSLWDSSTLWLSFFLYSVGDFCLDCRCGSGFIPCICLPPCWPMSPPFWGVVQRVGALNYPRFSPYLGRLITKG

SEQ ID NO: 348854 - protein, 57 aa, Zea mays
  Clone ID: MRT4577_8131C.1.pep
KKTPPPPPSKRRPGQARAATQGMGTIRNSAPQKSKTSELGRKAGARQSTSVAARPDV

SEQ ID NO: 348855 - protein, 132 aa, Zea mays
  Clone ID: MRT4577_81320C.1.pep
LGVGIPSEEGRRQLPSRASTAVRRWLTWCGPPSSPKAVSRRSRWSSVMAEADPGVMATDTEKGWLDDGGGERGDGEEERATVLRASRVGEKEEAGPTVGVRSLPETGDGRGRGGEGGEGGGGGRGRADAHAY

SEQ ID NO: 348856 - protein, 98 aa, Zea mays
  Clone ID: MRT4577_81321C.1.pep
SVKMNSLKTSRNSTAGHNNWFRTCKLCCESGAPRWLVIFTNGIKGRSGSNVGICSWCLFSQRMVVKAVESLMSSQGHRCPWLPLGLSIKGCRILSPCG

SEQ ID NO: 348857 - protein, 107 aa, Zea mays
  Clone ID: MRT4577_81322C.1.pep
FGKSIEAEEAYKNGCQYLLGQFGPPFATLRLDFSPVKLTVPSPSLASKPPLRDIRKNLEDMISARRSALATSSDGQLNPVPDKLLGEMQGLLANVDRMLTRPPENAP

SEQ ID NO: 348858 - protein, 62 aa, Zea mays
  Clone ID: MRT4577_81323C.1.pep
LVKCARDLHILHMLPQHINNCILSRGVNPAECSNLLAGRRDCRLSVKKLALLPLLRYYRLLI

SEQ ID NO: 348859 - protein, 80 aa, Zea mays
  unsure (1)..(80): unsure at all Xaa locations
  Clone ID: MRT4577_81324C.1.pep
YHFHFNXYYNIHIILSSFTIFLFFILLFFFYFFLFXYIFILFFFIFFFYYILLYILFSIYFFFIXIFIFILIFFYNFLYF

SEQ ID NO: 348860 - protein, 92 aa, Zea mays
  Clone ID: MRT4577_81325C.1.pep
FPQLRRATRAAATVLREVATVNESKPLDVSLGFAAQLVRLTGPHELAHHLVNAGVSERTWSTGWSACWLRTPALRSRRRGSEGLRSTSSSRC

SEQ ID NO: 348861 - protein, 57 aa, Zea mays
  Clone ID: MRT4577_81326C.1.pep
VSVPCTSFSQFQYNYIGVDILPNYFRTPTFFIVLPYPSIPYQNQVLQKYMPTKGVAI

SEQ ID NO: 348862 - protein, 89 aa, Zea mays
  unsure (1)..(89): unsure at all Xaa locations
  Clone ID: MRT4577_81327C.1.pep
VDSLXSYSSSASFSDPTLRESQRLGDASEPGDCLVALPRLPSHKLSLIWARRRWPGLGAPNEELVKGSAGDLSCPFSRSSGESVLGLAG

SEQ ID NO: 348863 - protein, 114 aa, Zea mays
  Clone ID: MRT4577_81328C.1.pep
VCVFYGDSWNPHANSKPEPRTGQKQIQTGITDEGVDGGTTYIGQGTTPAQGPDQGTGQRKQINSRGGQRREPEPGSSEASRGRIPMGKATVRGARATAPTEGKSGPAARPPGRD

SEQ ID NO: 348864 - protein, 70 aa, Zea mays
  Clone ID: MRT4577_81329C.1.pep
GASTVRMLVLWQAAQALLVKVRVYPICTKFSEETLILSSADTVGDCLAPPGPPAFALASLHDLRLHPTLL

SEQ ID NO: 348865 - protein, 150 aa, Zea mays
  unsure (1)..(150): unsure at all Xaa locations
  Clone ID: MRT4577_8132C.1.pep
MATSLSSHSQLRACPSHAHRATVLSRSLLPFPRRHHGSSRRGLSARSASSNGAAQDTAVTVRHFAAEPTKGGKLAGVEKIMILGAGPIVIGQACEFDYSGTQACKALVEEGYQVALVNSNPATIKTDPDLAHRTYIXPMTPVARRGHPSP

SEQ ID NO: 348866 - protein, 65 aa, Zea mays
  Clone ID: MRT4577_81330C.1.pep
GGSMRPKQFQLLPVIVCKGRAPCTIPLRQLANGRDPMVENRCDSTAASFWVTFHLDLYVQAIKKL

SEQ ID NO: 348867 - protein, 58 aa, Zea mays
  unsure (1)..(58): unsure at all Xaa locations
  Clone ID: MRT4577_81331C.1.pep
LPLLCCFARGAWWLAWSCFPSLRLGFVGPCSIFALVCAGAGXEVPXAGRPGLPPRKCG

SEQ ID NO: 348868 - protein, 87 aa, Zea mays
  Clone ID: MRT4577_81332C.1.pep
ASNRPPDPGASPCKRVTSSRFTNAVSFRCPHIDVPCSHVYKIGRPALFIAMLSVLEHTASSVLCKSDQVYHECRSADVITKAAVDIS

SEQ ID NO: 348869 - protein, 84 aa, Zea mays
  Clone ID: MRT4577_81333C.1.pep
VKTQTMRPPRPIRITSLEMDSLTAHPNAKEILAGFHLAFVDRATQTYPTGLYRCRIGQALWTSPCTRSADCRQLRTRLCLTRDQ

SEQ ID NO: 348870 - protein, 88 aa, Zea mays
  unsure (1)..(88): unsure at all Xaa locations
  Clone ID: MRT4577_81334C.1.pep
IXSXFFLGPNYQWGDYPERYLNKHKXRXXITHYGTNMGMKRHHWIFHLGLGQGDFWLAFAFSYQGIQMLVSPKKLEEIEQEGNVFMLP

SEQ ID NO: 348871 - protein, 50 aa, Zea mays
  Clone ID: MRT4577_81335C.1.pep
ETPRGELPGLSFMPTSLSLRVVVYEFRRASRLRLFHLACSRERALPPHLK

SEQ ID NO: 348872 - protein, 63 aa, Zea mays
  unsure (1)..(63): unsure at all Xaa locations
  Clone ID: MRT4577_81336C.1.pep
SFRASFTISIFFFQTKIIFLRAGYNQMCGGLSNAXQISGQNIISHPFQHGTNNKCLFLVRSEE

SEQ ID NO: 348873 - protein, 47 aa, Zea mays
  unsure (1)..(47): unsure at all Xaa locations
  Clone ID: MRT4577_81337C.1.pep
HXPNTQTFALTFCENNINIYMDSLHKMRTFNDNIHNKEGIITKHGAP

SEQ ID NO: 348874 - protein, 53 aa, Zea mays
  Clone ID: MRT4577_81338C.1.pep
YDSGLRLPQDILSPHKFYPVKPMIRTICLSSHSTYYHTLNMYYHTSASMSTAT

SEQ ID NO: 348875 - protein, 264 aa, Zea mays
  Clone ID: MRT4577_81339C.1.pep
KTFYDPVLRRRVLWGWVGETDSERADVLKGWASVQSIPRTVLLDTKTGSNLLQWPVVEVENLRMSGKSYDGVALDRGSVVPLDVGKATQLDIEAVFEVDAEGVRVAEEADVTFNCSTSAGAASRGLLGPFGLLVLADEDLSERTAVYFYLVKATDGSLKTFFCQDELRSSKANDLVKRVYGSLVPVLDGENLSVRILVDHSIVESFAQGGRTCITSRVYPTRAINDSARVFLFNNATGVHVKAKSVKIWQLNSAYIRPYPASSL

SEQ ID NO: 348876 - protein, 91 aa, Zea mays
  Clone ID: MRT4577_8133C.1.pep
PLVGARAFPLGAGFGPRGFPVFGVMLVLPARLFLRCHFRWGVGVQGGPYFKPLATPGWAAPPLGGFLSVLVVPPFVFFVYTGVFFQLSGAF

SEQ ID NO: 348877 - protein, 676 aa, Zea mays
  unsure (1)..(676): unsure at all Xaa locations
  Clone ID: MRT4577_81340C.1.pep
MIPAVADPTTTLDGGARTPLLPETDPRGRAAPAGARQNRPXRRRRRXTMTVLTAVVSAVLALVLVAVTVLASQHVDGQGGGVPAGEDAVVVEVAASRGVAEGVSEKSTAPLLGAGALQDFSWTNAMLAWQRTAFHSQPPKNWMNDPNGPLYHKGWYHLFYQWNPDSAVWGNITWGHAVSRDLLHWLHLPLAMVPDHPYDANGVWSGSATRLPDGRIVMLYTGSTAESSAQVQNLAEPADASDPLLREWVKSDANPVLVPPPGIGPTDFRDPTTAWRTPAGNDTAWRVAIGSKDRDHAGLALVYRTEDFVRYDPAPALMHAVPGTGMWECVDFYPVAAGSGAAADSGXRAETSTAPGPGVKHVLKASLDDDKHDYYAIGTYDPATDTWTPDDVEKDVGVGLRYDYGKFYASKTFYDPVLRRRVLWGWVGETDSERADILKGWASVQSIPRTVLLDTKTGSNLLQWPVVEVENLRMSGKSFDGVALDRGSVVPLDVGKATQLDIEAVFEVDASDAAAVTEADVTFNCSTSAGAAGQGLLGPFGLLVLADDDLSEQTAVYFYLVKATDGSLQTFFCQDELRASKANDLVKRVYGSLVPVLDGENLSVRILVDHSIVESFAQGGRTCITSRVYPTRAIYDSARVFLFNNATHAHVKAKSVKIWQLNSAYIRPYPATTTSL

SEQ ID NO: 348878 - protein, 75 aa, Zea mays
  Clone ID: MRT4577_81341C.1.pep
QQCFNLYHSLLALVSHTTSSPKIDDGCHPNILDHHARYANVCVSYASHLIPIDHFTPSHLVPLTPPTVPYSQKKP

SEQ ID NO: 348879 - protein, 147 aa, Zea mays
  Clone ID: MRT4577_81342C.1.pep
GTLEAGRGVLVYLRGHEGRGIGLGQKLRAYNLQDEGHDTVEANVELGLAVDAREYGIGAQILRDIGVRTMRLMTNNPAKFIGLKGYGLAVVGRVPVISPITKENQKYLETKRTKMGHVYGSDLPGSLPEFANPQEAPTEQDDDDNQN

SEQ ID NO: 348880 - protein, 67 aa, Zea mays
  Clone ID: MRT4577_81343C.1.pep
SLLQHVFTCLHAWFLILAAFLKSRKGIVIISIHSGCPLVLVFCFVQSYAYKLWMSVCQLYIKIARAV

SEQ ID NO: 348881 - protein, 191 aa, Zea mays
  unsure (1)..(191): unsure at all Xaa locations
  Clone ID: MRT4577_81344C.1.pep
CDCGNQLELAMKLIEKAGRGVLVYLRGHEGRGIGLGQKLRAYNLQDQGHDTVEANVELGLAVDAREYGIGAQVASRIHSNSCLIPCFKLGGDXVCFFDPNVRAFQILRDIGVRTMRLMTNNPAKFIGLKGYGLAVVGRVPVISPITEENQKYLETKRTKMGHVYGSDLPGSLPEFANPQDTPTEQEDDNQN

SEQ ID NO: 348882 - protein, 133 aa, Zea mays
  Clone ID: MRT4577_81345C.1.pep
GHEGRGIGLGQKLRAYNLQDEGHDTVEANVELGLAVDAREYGIGAQILRDIGVRTMRLMTNNPAKFIGLKGYGLAVVGRVPVISPITKENQKYLETKRTKMGHVYGSDLPGSLPEFANPQEAPTEQDDDDNQN

SEQ ID NO: 348883 - protein, 45 aa, Zea mays
  Clone ID: MRT4577_81346C.1.pep
AFSASDISGVVPSMSTLAMHLVFHLRKKIVVRVFSSSGAYKNAHF

SEQ ID NO: 348884 - protein, 52 aa, Zea mays
  unsure (1)..(52): unsure at all Xaa locations
  Clone ID: MRT4577_81347C.1.pep
IAYISSPSIQNKVSARLLDLXNRXGGAXSKAEVHYTTTXSKGGAHSKAQRPQ

SEQ ID NO: 348885 - protein, 128 aa, Zea mays
  Clone ID: MRT4577_81348C.1.pep
LPLPPRESLRTITRRFPRLWRRRLYPFRHLAKKAHRRDNSSLFLIFESSLWIQRCSHRVYIRLLRAVSICLPQAKTIQCHSARYHRSGKFLTPIFHRISHFPTNTVLTWLPLWMGLIVLAHYITQVSS

SEQ ID NO: 348886 - protein, 260 aa, Zea mays
  Clone ID: MRT4577_81349C.1.pep
MEMASAAGGVPKKLVDDPAAHAAEPWPPAAREEKNKLWRRVLLVGSLVTLPLVAFFVLGRESASTAWLQMAIAKLTAMNNGTAGFTEGPHVHGRDELLGGLLAPGMDRRACRSRYQSWQYYKHFPFAPSPHLLAKLRAYEARHRRCAPGTPLYAKSVEQLRSGRSADDMECAYIVWLPFDGLGNRMLSMVSGFLYALLTDRVLLAAVPPDSADLFCEPFPGATWRLPGGGLPRRQPCSESARTLIGRTRGSSATARSAPA

SEQ ID NO: 348887 - protein, 103 aa, Zea mays
  unsure (1)..(103): unsure at all Xaa locations
  Clone ID: MRT4577_8134C.1.pep
PANFGPNGITLMSTRGDLPGQVEVDVASXISEVCGKRNTNCGSFGFPSRIHAGPGMTAWGPRGGCFGFNTVPPHRVLGGWLLGIHVTKKNTHRKKQKIKKEGN

SEQ ID NO: 348888 - protein, 55 aa, Zea mays
  Clone ID: MRT4577_81350C.1.pep
TRSLHGNTKTEISLESVQYKKSATKAGTIGDAKHLEAELGKEPPVLACLEPLLEA

SEQ ID NO: 348889 - protein, 66 aa, Zea mays
  Clone ID: MRT4577_81351C.1.pep
SIQISDGAIQNFTHLDLHELWNVKSVPQLFVNNRSVPHLYARNMHSDLVEQLQGSCLGLVRHIPNI

SEQ ID NO: 348890 - protein, 133 aa, Zea mays
  unsure (1)..(133): unsure at all Xaa locations
  Clone ID: MRT4577_81352C.1.pep
WLRFSRQGRIQGFGQRSQHGLGVKVPKGPPFLVISPYEPGDVFSFTDXMGAFGANVGEKMKGEVEEALIVIAQGAKMDSKMVFRLDYKLFMVTKKDLRWLALMDWLSFEWFGSPQNNRRPKYGNQDKSIALRQ

SEQ ID NO: 348891 - protein, 111 aa, Zea mays
  Clone ID: MRT4577_81353C.1.pep
MDMGFYKRASRGGGIKHKAAAMPFYPRKPAQVAPAAPAAQQAVSKAKQPSATTMWSIPAPPSSTVVAMEVAGNGMVLDGDSDVDSRAASYISRVQERLRRERMAEDWRMYY

SEQ ID NO: 348892 - protein, 47 aa, Zea mays
  unsure (1)..(47): unsure at all Xaa locations
  Clone ID: MRT4577_81354C.1.pep
KNPLPSKETIEQEKQAGESXXGERRQYALYIPRALPSYFTSFSCLTS

SEQ ID NO: 348893 - protein, 64 aa, Zea mays
  Clone ID: MRT4577_81355C.1.pep
GRTTPVRVDFMDQDRPRLFVLGRLHCRMDRVVVVLETNRPVRGNVFYQATIKQGAFLLNRFQKL

SEQ ID NO: 348894 - protein, 297 aa, Zea mays
  unsure (1)..(297): unsure at all Xaa locations
  Clone ID: MRT4577_81356C.1.pep
MATAGSKQGGGSSKPPAAGQELDPRYEWEENASSFILRIHLSGFRKQDFRVQVDGAGRLTVRGQRSDAAANARHSRFNKVFQLPSTSNLDDIAGRFDLGVLTLTVPKRLPAPAKEDQQQAKKPEDAAXPLPPPSRWREPRAPNRSRSSSTRRXAAKEDKPKATAAAPAPXQPTRRQRKISPRPPPQHLHRQPTRRSSPRRRPTQRARRRIXESLAERRTEEERANANAAAAAEHQRKACRGFKERVAEELQGLAGSEWAEGLVETIKRNREVVAVAVAAFSLGVFVSSRLFSRSSRN

SEQ ID NO: 348895 - protein, 231 aa, Zea mays
  unsure (1)..(231): unsure at all Xaa locations
  Clone ID: MRT4577_81357C.1.pep
FQSIGSRCARALWVRWSPGLTRFSFRVEDDRSFTRFDLDDDTSTSPPEPDTPRAAAAATGREKPRRVAAGLTSCASAPSQLQLEVRGGSSSSNRSWRASTTRWPSALDATGVDRXEVEAAAARGAAAPAXRRVEGRVLGELSLARLSLKLEGEHGVAAEIYELTPELLVVEVRRTSDGAADYEEFFRTRLRPGLRDLVCDEDEPTLLQSDECSQSLSGVMGETRERRLRSL

SEQ ID NO: 348896 - protein, 92 aa, Zea mays
  unsure (1)..(92): unsure at all Xaa locations
  Clone ID: MRT4577_81358C.1.pep
MDLRISEGSGTGAILDDQSVQSPTRRAKVWEYFQQELVEVDGVMKAVCKYCGTKLTSKRNSGTDSLRNHVADTCSKIPGGGREXFIATMRKR

SEQ ID NO: 348897 - protein, 99 aa, Zea mays
  Clone ID: MRT4577_81359C.1.pep
GLCPCLRLRLAATYGDNYLRVLVAAVESCACCLVDLLLTDRRSSYVLDWSSGTRLGPTDLVSGVRSTCERRPATEEPEGEEVATTLGSPFVVTWGAWYC

SEQ ID NO: 348898 - protein, 194 aa, Zea mays
  unsure (1)..(194): unsure at all Xaa locations
  Clone ID: MRT4577_8135C.1.pep
ILKQEGVEFGSFDILTDNDVREXGELKDVFEEHNIPLKPQGSKNEEAGQPESATEKGAAVAEPMGLTDAQKSRLESLINSSPVMVFIKGTPEEPKCGFSGKLVHILKQENIPFSSFDILSDDEVRQGLKVLSNWPSYPQLYIKGELVGGSHIVMEMHKSGELKKVLSEKSVIPKGSLEDRMKSLVSSAPVMLFM

SEQ ID NO: 348899 - protein, 147 aa, Zea mays
  unsure (1)..(147): unsure at all Xaa locations
  Clone ID: MRT4577_81360C.1.pep
VDSGFEQSIGSSAVEVHGXLHRFVSQNMAHPRTRDIYEMLHQMEWQLRSDGYKPDTSKMALNAGEEKKGRVVTAHSQKLAMAFGLLSTPEGAPVRVVTNLRMSKECHAYSALISXIFGRXVVIRDRNRLHRFRYGTCSCRDYWPQLR

SEQ ID NO: 348900 - protein, 93 aa, Zea mays
  Clone ID: MRT4577_81361C.1.pep
IRGNSIGHLIILHPMLSRDMMPLHACAAATTATQNGATLARPVQPVIDPPSRAPVTHGKCCILLLQGAHPLHDGCTRRLSSSGGSLSRAFGSC

SEQ ID NO: 348901 - protein, 133 aa, Zea mays
  unsure (1)..(133): unsure at all Xaa locations
  Clone ID: MRT4577_81362C.1.pep
SWLPCSAGGGRSSPARAGGSMGVXSGSLAGGFXGVPGGVDDLLLLELGRFAVFVRGGGANALLGFGELVGAMTQVVAGAVCYLTFGVWDGEVXELYVALVWVMPWVXFLGLREFVPVGECACAWGSLLSRVRA

SEQ ID NO: 348902 - protein, 124 aa, Zea mays
  unsure (1)..(124): unsure at all Xaa locations
  Clone ID: MRT4577_81363C.1.pep
NGHASNRKCEVATFGFCXWEINCFDKPVPXFHFFGVPFPVVCQNFRLKIPRFCPGSLAIFFKNFWGGNPAKGPKLGEVVSILGGIATSKGGGLFPKAPPRGCLLGFPQGRGPYPRVVFLSPVKC

SEQ ID NO: 348903 - protein, 80 aa, Zea mays
  Clone ID: MRT4577_81364C.1.pep
GSCWTSHPRLYDEWSIQPGRYFLSVVQFVLIATVASATSSASELFLGISIRGFVKEKSVKECLEFGQPKSCRKAPKKKKK

SEQ ID NO: 348904 - protein, 77 aa, Zea mays
  Clone ID: MRT4577_81365C.1.pep
ENVQKKKKKTAPIEEEGISSRNTWSASIYKDRPFPKKQMLAMVSISMLSWGLDSRQVVDLPIMPQRILVQVIQLPVF

SEQ ID NO: 348905 - protein, 56 aa, Zea mays
  Clone ID: MRT4577_81366C.1.pep
LEAGREKITKKKKKKKKKKKKKKKKKKKKKKKKKKKKKKKKKNKKKKKTKKKKKDF

SEQ ID NO: 348906 - protein, 51 aa, Zea mays
  Clone ID: MRT4577_81367C.1.pep
PSCWQGPQRTGVARAPGLQVGGPRHQEIEEDGPSLTDRAWRSGCPLAPPLA

SEQ ID NO: 348907 - protein, 44 aa, Zea mays
  unsure (1)..(44): unsure at all Xaa locations
  Clone ID: MRT4577_81368C.1.pep
ITIISSIATXFILXXLKIXXQTFPAPPXXXXIAXEKTXNPXESK

SEQ ID NO: 348908 - protein, 123 aa, Zea mays
  Clone ID: MRT4577_81369C.1.pep
NFTGGARGGVKQPKPTNRGLSMGYAAYGFFFKKEKEKRGVLFTGDEKKQGPNRGGGDIYLFIYFFSLTKLGRNKLDLGSHAGRKKKTPATPLWGRGLRAGVLGKICENLFTTVGDDGGMGHAG

SEQ ID NO: 348909 - protein, 584 aa, Zea mays
  Clone ID: MRT4577_8136C.1.pep
MGRSERQRTPSASLRRPPNRSRRRRAEENPEPQPSSPHSNSSPRSLPHPPPRQLQSSSALHHNQAHLPPPHFFSSNRPVGSQRRGMASGGAVRDVGSPAELEAAVAGARAAAVHFWASWCEASKQMDEVFAHLAVDFPHAAFLRVEAEEQPEISEAYGVTAVPYFVFCKEGKIVDTLEGANPASLANKVAKVAGPASVAESAVPASLGVAAGPAVLENIQKMAQQNGSSAAESTNSGSTQDALNKRLEQLVNSHPVFLFMKGTPEQPRCGFSRKVVNILKQEGVKFGSFDILTDNDVREGMKKFSNWPTFPQLYCKGELLGGCDIVIAMHDSGELKDVFEEHNIPLKPQGSKNEEAGQPESATEKGAAVAEPMGLTDAQKSRLESLINSSPVMVFIKGTPEEPKCGFSGKLVHILKQENIPFSSFDILSDDEVRQGLKVLSNWPSYPQLYIKGELVGGSDIVMEMHKSGELKKVLSEKGVIPKGKLEDRLKSLVSSAPVMLFMKGTPDAPRCGFSSKVVNALKKEGVSFGSFDILSDEEVRQGLKTYSNWPTFPQLYYKSELIGGCDIVLEMEKSGELKSTLSE

SEQ ID NO: 348910 - protein, 66 aa, Zea mays
  Clone ID: MRT4577_81370C.1.pep
GSSSLSPSSFSCAHSQVLGFLHIHPTRGQNPHTLSLLYSGLHIHPLQRSIANNPKLSFSILETSSL

SEQ ID NO: 348911 - protein, 103 aa, Zea mays
  Clone ID: MRT4577_81371C.1.pep
AAWLRRASKDDTFLQYIQNNGKTLGAEDSSNEFGWDNKHAGLNVLVSKDFIEGAALPLQSYKEFADSFVCTLIPESSSSPHITYTPGGMIYKPGGSNMQHVTS

SEQ ID NO: 348912 - protein, 41 aa, Zea mays
  Clone ID: MRT4577_81372C.1.pep
TLHSHQSVFMPDLDINIPTAFDPCADANARYSGATYRVKGL

SEQ ID NO: 348913 - protein, 115 aa, Zea mays
  unsure (1)..(115): unsure at all Xaa locations
  Clone ID: MRT4577_81373C.1.pep
GAFFFFPKDGPGFFXPQEFLKVFLDNGAAPTIEKMANPIFQKIAPPKGGKINFKEFLAIIKTGPAWKKGSPPFFKGGFPPPPLKFLKDGSVKMGFKLKPPPPPFRGGGNFRPLGP

SEQ ID NO: 348914 - protein, 69 aa, Zea mays
  Clone ID: MRT4577_81374C.1.pep
HHLSPDGPKGTAHISWLKYCRCLSKTRHCGGWRRNAPNIRHSSWINPQKYRIGPSRLPKANCCTMGFGD

SEQ ID NO: 348915 - protein, 109 aa, Zea mays
  Clone ID: MRT4577_81375C.1.pep
AWHRRATGEPKKECVCVCGQIPNRSGVCVLLTEAAHTCIIEGRVGGAARPAGDILTKETRPEKEETRKCAPPVSIAPRASGTRVYISCAAHLSRVAATGLICLCSFVNR

SEQ ID NO: 348916 - protein, 83 aa, Zea mays
  unsure (1)..(83): unsure at all Xaa locations
  Clone ID: MRT4577_81376C.1.pep
AFREGKVASLIGVEGGHSIDSSMGVLRALYQLGMRYLTLTHSCNTPWADNWLVDTGDSEPQSQGLSPFGQRVVKELNRLXVLI

SEQ ID NO: 348917 - protein, 46 aa, Zea mays
  Clone ID: MRT4577_81377C.1.pep
TKPEPTGGYIMIKPKHPLIYRTNHKSQQPQIALTREVAYRTVNNCN

SEQ ID NO: 348918 - protein, 112 aa, Zea mays
  Clone ID: MRT4577_81378C.1.pep
QIDNKVPPKNLCILCITHKEIKHHFFIISLQCMFEYEMNDMSTRIFLITSRIDHKVPPKNICILCIRYKKTKPLFLLCKNNVCLNIKRIYFIHPNKFHSTVNTHMVIACKTR

SEQ ID NO: 348919 - protein, 50 aa, Zea mays
  Clone ID: MRT4577_81379C.1.pep
SEEPHLNDHKGQYVLTLIYHMPRITEANSDAPVVLNCIRLNDRYDTLLRI

SEQ ID NO: 348920 - protein, 66 aa, Zea mays
  Clone ID: MRT4577_8137C.1.pep
KCPPPPPPSWALCPATTSYCLCSPSAGAFFPPPPITWRCMPRLLHGQSTPVYPTHTPSHSAPSQVL

SEQ ID NO: 348921 - protein, 98 aa, Zea mays
  Clone ID: MRT4577_81380C.1.pep
NLSAGVWLARFLFFAWVPFHTGAVPGPAGMYKFPCLDFPPPIVLPPSALPAPCFFCLKPNVCGAVKKKSPGGFAPPPSLPQRVFYLCRRWNLGACLSP

SEQ ID NO: 348922 - protein, 57 aa, Zea mays
  Clone ID: MRT4577_81381C.1.pep
GGGVRPLSRWEGGFYFSASKQPVPFFPPPPCKYYWGKFFRHFKGLLLRGPEKESPHG

SEQ ID NO: 348923 - protein, 66 aa, Zea mays
  Clone ID: MRT4577_81382C.1.pep
ILQQRQQNLRLQASCTSCSIHWLTYWNVFISRDLTDPPRSHYMRAQIDEHTSYHRPQIAWVHVLTL

SEQ ID NO: 348924 - protein, 208 aa, Zea mays
  Clone ID: MRT4577_81383C.1.pep
MASKLQLLPSFIAIVVLAAVIHPCASVEFHRKLASWSNAGATWYGAANGAGSDGGACGYKGAVDQSPFSSMIAAGGPSLYASGLGCGSCYQVKCTGNAACSSSPVTVVITDQCPGGPCLEEPHFDLSGTAFGAMAKPGQADQLRAAGVLQIQFTRVQCNWAGVKLTFVVDAGSNPNYFAVLIQYQNGDGDLSAVDLMQSGAAAAWAPM

SEQ ID NO: 348925 - protein, 52 aa, Zea mays
  unsure (1)..(52): unsure at all Xaa locations
  Clone ID: MRT4577_81384C.1.pep
GDVRVNWTPTTKXGVTLKSGDVVSVSGMGRLKIGEIVTTRKGKXAVELIRYL

SEQ ID NO: 348926 - protein, 304 aa, Zea mays
  Clone ID: MRT4577_81385C.1.pep
MAAASLALASPLRLLLRVRHPRGAIAVPCYFISRGRYSTAIAVAAARDLAVKGSVDRNSAEEVRNILNMAERASQRRNVFHTNFLTPPIVKEAMLALEKFADTKAVAQGGYPQAERCRISVGHPDVMTSNPDVVAALSISGNFRLESCSHGDFLGAILGTGITREKVGDILLQGERGAQVLVDPELVDYLISTLEKVGKVGVSCTQIPLLALEYEPPRTNSFKTVESSLRVDALASAGFKISRTKLASLISSGDVRVNWTPTTKNGVTLKSGDVVSVSGMGRLKIGEIVTTRKGKYAVELIRYL

SEQ ID NO: 348927 - protein, 158 aa, Zea mays
  unsure (1)..(158): unsure at all Xaa locations
  Clone ID: MRT4577_81386C.1.pep
MQEALVSPANAGRLRSALELKPFAFGDQXRLASPRYLNLASVAGGGGGDDALFRCSSPFSPSFGFSSPSPLATSSTISLSPSSSSSLVGDCDCDDDADADAATGHRLQLARLALQYQEVADRYELCLARLADAADEAAALRRENAELRVANGDLTRRL

SEQ ID NO: 348928 - protein, 92 aa, Zea mays
  Clone ID: MRT4577_81387C.1.pep
HWVPRGRPAFKTVESSLRVDALASAGFKISRTKLASLISSGDVRVNWTPTTKNGVTLKSGDVVSVSGMGRLKIGEIVTTRKGKYAVELIRYL

SEQ ID NO: 348929 - protein, 49 aa, Zea mays
  Clone ID: MRT4577_81388C.1.pep
MAAASLALASPLRLLLRVRHPRGAIAVPCYFISRGKPEGPSYLSILPLR

SEQ ID NO: 348930 - protein, 172 aa, Zea mays
  unsure (1)..(172): unsure at all Xaa locations
  Clone ID: MRT4577_81389C.1.pep
MQASAPVPRVHAMKGAAARKGGGARNKLVTTSVQAGLQFPXGRIGRHLNKARYAQSVGTVVPVYLASVLEYLAAEVLXELARYSCQGXKKTRIIPRHVLLVIRNDXELGNLLSGVTIAHGGVLPNINPVLLPKKTAXNAAPQEAKSSMNAATSPKKAYRAAFTVVMLNARVQ

SEQ ID NO: 348931 - protein, 499 aa, Zea mays
  Clone ID: MRT4577_8138C.1.pep
MASGGAVREVGSAAELQAAVAGARAAAVHFWASWCEASKQMDEVFAHLAVDFPHAAFLRVEAEEQPEISEAYGVTAVPYFVFCKEGKTVDTLEGANPASLANKVAKVAGPASVAESAVPASLGVAAGPAVLENIQKMAQRNGSSAVESISSGSTEDALNKRLEQLVNSHPVFLFMKGTPEQPRCGFSRKVIDILKQEGVKFGSFDILTDNDVREGMKKFSNWPTFPQLYCKGELLGGCDIVVAMHESGELKDVFEEHNITLKPQGSKNEEAGEPESATEKGSAVSESIKLTDAQKTRLESLINSSPVMVFIKGTPEEPKCGFSGKLVHILKQENIPFSSFDILSDDEVRQGLKVFSNWPSYPQLYIKGELVGGSDIVMEMHKSGELKKILSEKGVRQKGNLEDRLKSLISSAPVMLFMKGTPDAPRCGFSSKVVNALKKEGVSFGSFDILSDEEVRQGLKTYSNWPTFPQLYYKSELIGGCDIVLEMEKSGELKSTLSE

SEQ ID NO: 348932 - protein, 38 aa, Zea mays
  Clone ID: MRT4577_81390C.1.pep
CSMSLQNVHQNLLESRCMNGIIEYKSCFHSKKKNPYNI

SEQ ID NO: 348933 - protein, 122 aa, Zea mays
  Clone ID: MRT4577_81391C.1.pep
LFFFFSFFFFFFFFSRVERELFKISLPGAYEKKNLPFFSLNKGLYPRGGRASDPQEPNSTAREGSWSTLVKTNKPGGSRRGDTSAHFTLKNLKGPQNRGGPEPPAPSKMGFFVPLGAPARGP

SEQ ID NO: 348934 - protein, 82 aa, Zea mays
  Clone ID: MRT4577_81392C.1.pep
SLQRRATRRTSNFPSCARAPLTALCVRRFKAPKNCFRCWGRLLDLEVDVGLDGVAALVTVRSLINFCAVVYQDVLACVFCAS

SEQ ID NO: 348935 - protein, 49 aa, Zea mays
  Clone ID: MRT4577_81393C.1.pep
MAPKAEKKPAAKKPAEEEPATEKAEKAPAGKNPKAHQHLPAPMPGAGRA

SEQ ID NO: 348936 - protein, 189 aa, Zea mays
  Clone ID: MRT4577_81394C.1.pep
TRDGKAAAAGGDPSTVAAPTAMPPTSVMTRLILIMVWRKLIRNPNTYSSLIGVVWSLVSFRWGFQMPAIILRSISILSDAGLGMAMFSLGLFMALQPRIIACGNKVATFAMAVRFLTGPAVMAAASFAVGLRGTLLHVAIVQAALPQGIVPFVFAKEYNVHPDILSTAVIFGMLIALPITLVYYILLGL

SEQ ID NO: 348937 - protein, 109 aa, Zea mays
  Clone ID: MRT4577_81395C.1.pep
STTLFLPRTTMLRRLIIQHERGGADRAYDDHPPPPGRGDGPHPGLPGRLSNLQLLIWWQPRDRGIAGVAATAVRAKVAGAVKEAADGTDAGARVRPAHTAVVAAAAQGT

SEQ ID NO: 348938 - protein, 67 aa, Zea mays
  Clone ID: MRT4577_81396C.1.pep
GFPGAPTRPAAAAPASALPRGGGGGLIRLHLRHPGRQRGTVLGRCRRRLLADGVECRDRRSVRGEGL

SEQ ID NO: 348939 - protein, 228 aa, Zea mays
  Clone ID: MRT4577_81397C.1.pep
MLASSRTALRQAATKQLSLKSSVRAVSAWSQVPQGPPDAILGITEAFKADSNPKKINLGVGAYRDDKGKPYVLPSVREAEKKVVDSALDKEYAGITGVPNFTKAALKLAYGADSKPLNEDCIAVTQSISGTGALRIGGAFLERHYPGPKTIYIPTPSWANHNAVFKDSGLKVEKYRYYNKDTIGLDFEGMIADIKAMPKNSIVLLHACAHNPTGVDPTEEQWTKIADA

SEQ ID NO: 348940 - protein, 91 aa, Zea mays
  unsure (1)..(91): unsure at all Xaa locations
  Clone ID: MRT4577_81398C.1.pep
LGGGAGYKMNHTHMLKMLYYGYDLGMPEGVLMNGLGPYMGNDSLAPDGIEHDTMKEEPGETXRFRAQNVGVSTSWDLLMQNHKMGIVETDG

SEQ ID NO: 348941 - protein, 95 aa, Zea mays
  Clone ID: MRT4577_81399C.1.pep
LYVFYFEKTNKFNPSLPLKSPALIDKKLFLFWEKKTSFWENCLFGWIGGIFFVLSFCQITVPVKNVIGLKKTGFSFKSTNMSFSINGGLVAKTNF

SEQ ID NO: 348942 - protein, 81 aa, Zea mays
  unsure (1)..(81): unsure at all Xaa locations
  Clone ID: MRT4577_8139C.1.pep
MLSDEELSSVVFFVERKTTIVEKRYGQLTFWPDVYLCAFXEDDSEEHRGKPLYLSQEKHTSLAHLGAYYRLDRTSEGFRQT

SEQ ID NO: 348943 - protein, 52 aa, Zea mays
  Clone ID: MRT4577_813C.1.pep
NWIYYLFDCSRYILLLLNTAYKFCILTNDLISHYHIKSFNLNDISILLNLTT

SEQ ID NO: 348944 - protein, 145 aa, Zea mays
  Clone ID: MRT4577_81400C.1.pep
LDDPEQARLGVQVLEHHASFFVALKLMFQTTYIDEGNRSKCCVFKGDPAKVAHHCGSSKEVKEKISMIMDELALDGYQAIAVGHQVDSCWDFIALLPYTDDLRSDSADVVDSLIDLGLDIRVLTGHSVVHIAISCCRDFCYCHFL

SEQ ID NO: 348945 - protein, 76 aa, Zea mays
  Clone ID: MRT4577_81401C.1.pep
MSPPHGGVSARALERRLHELLQKRQQDRIVELESALDSAQRRLHEKEREVVWWRDAAKLVSHRRDESRRIATASAR

SEQ ID NO: 348946 - protein, 157 aa, Zea mays
  Clone ID: MRT4577_81402C.1.pep
NAGHQIYAFNRAPQHRLPRAQKRARQREHRPPPHHTQEPPARLEEQLAPGQQKTAGSSTRKGWSTTSQGSTPTEATTTTRGPWNAKRRTARKHQERKLAEEKQPRPKQQPRAARRSTTEATHQQGPPDPATNATEQDNPNEHRHMDDTAQTERTKQA

SEQ ID NO: 348947 - protein, 100 aa, Zea mays
  unsure (1)..(100): unsure at all Xaa locations
  Clone ID: MRT4577_81403C.1.pep
GCDGXXHPDDKRDNNGEKTXGPNANPXRGXEGXDANKTEPEREXPXTXXXADPXANAARDPDXGXGGPSREXEGGRKDSRTASPQGANTNXPAPTTGRDT

SEQ ID NO: 348948 - protein, 104 aa, Zea mays
  Clone ID: MRT4577_81404C.1.pep
SPGRGPTPRGRGPTERGFVFPCNCVPWMGCCRAYSFGGPPLGVVGPCLAGVGHPWPVVGNGVQFFFRPMEFFPEKKKKKKKGGKKPKKNLKKTKKRRAAADWSA

SEQ ID NO: 348949 - protein, 73 aa, Zea mays
  Clone ID: MRT4577_81405C.1.pep
ARRAFQAVHFAQMVMGPQVDVLVQQGVIRQDGVEGVSAASVPTGLRFLRPLAEVITIVASAERGLSGTTRGMT

SEQ ID NO: 348950 - protein, 52 aa, Zea mays
  unsure (1)..(52): unsure at all Xaa locations
  Clone ID: MRT4577_81406C.1.pep
KSWKRXSXPXFPPRRIVSWRRSCRGXTSRFTSCPLTPWLSCRRMSRAAXCRL

SEQ ID NO: 348951 - protein, 185 aa, Zea mays
  Clone ID: MRT4577_81407C.1.pep
RVNKPKGYICSCGEESKSVVSLFNDYLKGWNKIQPGLPKPRLFTVGRLDVATAGLIIVTNDGEFAQKLAHPSSNVTKEYVVTIDGAVHKKHLIAISEGTKIDGVMCIPDLVEPLAAQSDTRKTRLRIVVHEGRNHEVRELVQNAGLQVYALKRVRIGRFRLPADLGIGKFVELKQADIKALDGNN

SEQ ID NO: 348952 - protein, 54 aa, Zea mays
  Clone ID: MRT4577_81408C.1.pep
CRNRRQQHSRAHQEAALRLRVSHRPLRPYTPPRSRRRPLETTRQLRLIPTYRGS

SEQ ID NO: 348953 - protein, 134 aa, Zea mays
  Clone ID: MRT4577_81409C.1.pep
PRPNSRFPNRLVFWGPSSSSLSRPIWQQKKYKILAKKGISLIKKKKTGDAVVGLRRDHGNPGLIMTPSNIGLWPQGRIFHTKKKRGKLAITTRGVGLQPHKGPVDKPKRQAGDVVILAEHLPRYSWAKKNRGAH

SEQ ID NO: 348954 - protein, 91 aa, Zea mays
  Clone ID: MRT4577_8140C.1.pep
CCSGPSLSIACAACCGCSSRGFSPSPLVCFWCPALCLASLLAPSGSWSLCACPSPCLVFPPASLPRCASCLVSAPSRLWSSPLLRACARKV

SEQ ID NO: 348955 - protein, 66 aa, Zea mays
  Clone ID: MRT4577_81410C.1.pep
RYLGTSFKINSHTGDLGPPADTDRAGAGQDTRETLDSKGFRAGPFDGVEPGDSDYGARNTIEQDLT

SEQ ID NO: 348956 - protein, 83 aa, Zea mays
  unsure (1)..(83): unsure at all Xaa locations
  Clone ID: MRT4577_81411C.1.pep
GQFLDSSLSLSCXRVNGKSTPPPPLYKQRNMIHRHYRKESQYTYIATLVNIYIEEHRYKFTSTQHIPLGSIQAVPIRRXRGER

SEQ ID NO: 348957 - protein, 477 aa, Zea mays
  unsure (1)..(477): unsure at all Xaa locations
  Clone ID: MRT4577_81412C.1.pep
FVFPCTARSPAGPQHFAFGFPPLDSTPNPNRLRSPPSHGVPLLRRCGHQPRLLPTNPRRHPPRLPPRTRSRRRPAQAVGLPPQPPSAPGLPYAPAPTNRRRVRSARTPKKDXHPPRPRWQTVLSIAAKNAALLAALLYLGDLAWRWSHPPPPSPPPDRAALEGYAARVDEVEASLTRTFRMIQVQLEAVDRKIDGEVGAARGDLLALLEDKRLALERQLTRLDARAGELGDALAGLKRMEFLRKDEFEKFWDEVKGSLGSSSESEVDLDQVRALAREIVMREIEKHAADGIGRVDYAVASGGGRVVRHSEAYVPKRGXSWFGCLEXDVGPKPEKMLQPSFGEPGQCFALQGSNGFVEVKLKSGIIPEAVTLEHVSKDVAYDRSTAPKGCRVYGWYEETPGETQSGHAAKMALAEFAYDLEKNNVQTFDVTAPDVGVINMVRLDFTSNHGSSQLTCIYRLRVHGHEPVSPGSSAGSQA

SEQ ID NO: 348958 - protein, 47 aa, Zea mays
  Clone ID: MRT4577_81413C.1.pep
AEIILQSWSRILPREPLLQMITACYVSWPASSSSESVVHIIKRAREA

SEQ ID NO: 348959 - protein, 202 aa, Zea mays
  Clone ID: MRT4577_81414C.1.pep
GTCITRAKFETIPHDYSNIAGIQESVHEILMNLNEIVLRSNLYGTRNALICVQGPGYITARDIILPPAVEIIDNTQHIATLTEPIDLCIELKIERNRGYSLKMSNNFEDRSYPIDAVFMPVENANHSIHSYGNGNEKQEILFLEIWTNGSLTPKEALHQASRNLINLFIPFLHVEEETFYLENNQHQVTLPFFPFHNRLVNL

SEQ ID NO: 348960 - protein, 48 aa, Zea mays
  Clone ID: MRT4577_81415C.1.pep
ETPGNPRRNTSSLFGPKKPNPFKKAVSKKLSWNYHRNATTISLKNPTT

SEQ ID NO: 348961 - protein, 131 aa, Zea mays
  Clone ID: MRT4577_81416C.1.pep
MTTTRLCAALTTFLPLLLLSSAAVSLANAAGRESEDGRGQQAATTASVYVVMVKAPAQGVDSEAYHMRILATALGSEEKAKRALIYSYKAAASGFAAKLTPAQVAALQKHPDVVQALPDVKYTLEDRNHLN

SEQ ID NO: 348962 - protein, 40 aa, Zea mays
  Clone ID: MRT4577_81417C.1.pep
NGLYSKQEHFKLCWSPTRFISTVKRGGRKKKSQCLQLSRP

SEQ ID NO: 348963 - protein, 87 aa, Zea mays
  unsure (1)..(87): unsure at all Xaa locations
  Clone ID: MRT4577_81418C.1.pep
SLQRHGPSRKFFVGGNWKMNGRXQSLGELIGTLNAAKVPADTEVVCAPPTAYIDFARQKLDPKIAVAAQNCYKVTNGAFTGEISPGM

SEQ ID NO: 348964 - protein, 68 aa, Zea mays
  Clone ID: MRT4577_81419C.1.pep
MAGARQMLAICHSSGYIYIMFSVKFRIFTAALYISPLPRFPPITCSAYLSQRYKDTHADLKSYDDSKA

SEQ ID NO: 348965 - protein, 94 aa, Zea mays
  Clone ID: MRT4577_8141C.1.pep
RASVNSALRCWSDTVFDSLMYPAREVLYEPKVLELEPEILPDISWGLSSSVDGKAKLDEDCLADDQLDQYPSLENNPVTFELRDEPAIPQLGVH

SEQ ID NO: 348966 - protein, 148 aa, Zea mays
  Clone ID: MRT4577_81420C.1.pep
MAGAGVTTTGSPCGACKFLRRRCAAECVFAPYFCAEDGASQFAAIHKVFGASNAAKLLQQVAPGDRSEAAATVTYEAQARLRDPVYGCVAHIFALQQQVAALQAQVAHARTQAQLGGRRRRCTRCSSSSCSSRRGRWPPPRISTTTSP

SEQ ID NO: 348967 - protein, 138 aa, Zea mays
  Clone ID: MRT4577_81421C.1.pep
LGDNLEARVADFGLAKFLRSGATSECMSAVAGSYGYIAPEYAYTLRVDEKSDVYSYGVVLLELITGRRPVGGDFGEGVDIVQWAKRATAGRREAVPGIADRRLGAAPKDEVAHLFFVSMLCVQEPPATSYKLFPDLLA

SEQ ID NO: 348968 - protein, 227 aa, Zea mays
  Clone ID: MRT4577_81422C.1.pep
MASLDAVRGDLALLILYLNKAEARDKICRAIQYGSKFISNGEPGPAQNVDKSTSLARKVFRLCRISPPAKGTPLPLILLGKSKNAMLSTFLFLDQIVWAGRTGIYKNKERAEFLGRIAFYCFLGSNTFTAIIELAELQRLSTSMKKLEKELKHQELYKDEQYRMKLHKSNERLLALVKSSLDIVVAVGLLQLAPKKVTPRVTGAFGFASSLIACYQLLPSPPAKQSK

SEQ ID NO: 348969 - protein, 97 aa, Zea mays
  Clone ID: MRT4577_81423C.1.pep
VVQVFKTFFWFQWLVVVALQEAVEVYLVGLLEDASLCSFFARGVSIMPGVINLGQGIRGNMSFAVGFLFVVVISELPAFVSCRAYRECVALIKMEIN

SEQ ID NO: 348970 - protein, 227 aa, Zea mays
  Clone ID: MRT4577_81424C.1.pep
MASLDAVRGDLALLILYLNKAEARDKICRAIQYGSKFISNGEPGPAQNVDKSTSLARKVFRLCKFVNDLHALISPPAKGTPLPLILLGKSKNAMLSTFLFLDQIVWAGRTGIYKNKERAEFLGRIAFYCFLGSNTCTAIIELAELQRLSTSMKKLEKELKHQELYKNEQYRMKLHKSNERLLALVKSSLDISKPPSKPEQSPILVPSPVSQENNPFSDGWDSRLCPP

SEQ ID NO: 348971 - protein, 261 aa, Zea mays
  unsure (1)..(261): unsure at all Xaa locations
  Clone ID: MRT4577_81425C.1.pep
MASLDAVRGDLALLILYLNKAEARDKICRAIQYGSKFISNGEPGPAQNVDKSTSLARKVFRLXRCCCCCCCFALASWCGFXDSEPVLVLQFVNDLHALISPPAKGTPLPLILLGKSKNAMLSTFLFLDQIVWAGRTGIYKNKERAEFLGRIAFYCFLGSNTCTAIIELAELQRLSTSMKKLEKELKHQELYKNEQYRMKLHKSNERLLALVKSSLDIVVAVGLLQLAPKKVTPRVTGAFGFASSLIACYQLLPSPPAKQSK

SEQ ID NO: 348972 - protein, 235 aa, Zea mays
  Clone ID: MRT4577_81426C.1.pep
MASLDAVRGDLALLILYLNKAEARDKICRAIQYGSKFISNGEPGPAQNVDKSTSLARKVFRLCKFVNDLHALISPPAKGTPLPLILLGKSKNAMLSTFLFLDQIVWAGRTGIYKNKERAEFLGRIAFYCFLGSNTCTAIIELAELQRLSTSMKKLEKELKHQELYKNEQYRMKLHKSNERLLALVKSSLDIVVAVGLLQLAPKKVTPRVTGAFGFASSLIACYQLLPSPPAKQSK

SEQ ID NO: 348973 - protein, 69 aa, Zea mays
  Clone ID: MRT4577_81427C.1.pep
AWRHYLSLHHASITLEAVGDSFSHDDHLYCTTQLCVNLVPRSSKVHLLRAVMDMPTPRTYSLLQVPSSR

SEQ ID NO: 348974 - protein, 92 aa, Zea mays
  unsure (1)..(92): unsure at all Xaa locations
  Clone ID: MRT4577_81428C.1.pep
MVGFFFFILFELFFWXGGGISAKFFLFFFFFFFFFFFFFFFFFFFFLYFIILLFCFFFDLYFXYFYYNFYFFNISIIYTTYHNTNSLSPLYI

SEQ ID NO: 348975 - protein, 256 aa, Zea mays
  unsure (1)..(256): unsure at all Xaa locations
  Clone ID: MRT4577_81429C.1.pep
MASLDAVRGDLALLILYLNKAEARDKICRAIQYGSKFISNGEPGPAQNADKSTSLARKVFRLXRCCFALASWCGFXDSEPVLVLQFVNDLHALISPPAKGTPLPLILLGKSKNAMLSTFLFLDQIVWAGRTGIYKNKERAEFLGRIAFYCFLGSNTFTAIIELAELQRLSTSMKKLEKELKHQELYKNEQYRMKLHKSNERLLALVKSSLDIVVAVGLLQLAPKKVTPRVTGAFGFASSLIACYQLLPSPPAKQSK

SEQ ID NO: 348976 - protein, 49 aa, Zea mays
  Clone ID: MRT4577_8142C.1.pep
MSAAFKAFLNSPVGPKTTHFWGPVSNWGIILASVADTKKPPEMISGPKP

SEQ ID NO: 348977 - protein, 235 aa, Zea mays; identical to SEQ ID NO: 348972
  Clone ID: MRT4577_81430C.1.pep

SEQ ID NO: 348978 - protein, 255 aa, Zea mays
  unsure (1)..(255): unsure at all Xaa locations
  Clone ID: MRT4577_81431C.1.pep
NDLHALISPPAKGTPLPLILLGKXERTGNLRMVFCSGLLXWFCCPRARLRXSKNAMLSTFLFLDQIVWAGRTGIYKVLREITFVEADAALLHDDELTNXGPCFYTDDXNKERAEFLGRIAFYCFLGSNTFTAIIEVXRACVSVSSAVLSRVSAPDSCSKPCXAELQRLSTSMKKLEKELKHQELYKNEQYRMKLHKSNERLLALVKSSLDIVVAVGLLQLAPKKVTPRVTGAFGFASSLIACYQLLPSPPAKQSK

SEQ ID NO: 348979 - protein, 53 aa, Zea mays
  Clone ID: MRT4577_81432C.1.pep
QVYPELTPELSPPSPLTWSVTPPDAIGFPASMSGHVRLSQALKLRLAPLAPWC

SEQ ID NO: 348980 - protein, 40 aa, Zea mays
  Clone ID: MRT4577_81433C.1.pep
QEAKVYPGRLKPGLNGHGAWKQELPVSGPSPECCLIQFLF

SEQ ID NO: 348981 - protein, 75 aa, Zea mays
  unsure (1)..(75): unsure at all Xaa locations
  Clone ID: MRT4577_81434C.1.pep
IFNTRLYLYQLENYNTGFTLRIIQEWTCNVRRCSILLQDSFLICQPSXPIPALXLRHIRXQXRTRGRTGVGXXPG

SEQ ID NO: 348982 - protein, 51 aa, Zea mays
  Clone ID: MRT4577_81435C.1.pep
VCFCSLCIQCSCYTSCLMLRSCRVWFLRLLCHETDFIQLVCPNVGVLSSNS

SEQ ID NO: 348983 - protein, 63 aa, Zea mays
  unsure (1)..(63): unsure at all Xaa locations
  Clone ID: MRT4577_81436C.1.pep
GSMSXSGXTPPPPXASRQALRFSSSGPSPATSTQQVPHPFSSVPAVRNRAPKPSLSYLHSYLI

SEQ ID NO: 348984 - protein, 59 aa, Zea mays
  Clone ID: MRT4577_81437C.1.pep
SFSPLLYTFGKQIFFVTKPRQNCSLNQKVPASTWGFFFTLYLWAESTKKPLNPSQMSLL

SEQ ID NO: 348985 - protein, 94 aa, Zea mays
  Clone ID: MRT4577_81438C.1.pep
MDQGTIISKQFRYIITHKSQGQPIDARNTDASADSMSIYDDIDADALQTYLGYNLATIIYYALQESTTSEQSARMTAMDNASKNASEMIDKLTS

SEQ ID NO: 348986 - protein, 128 aa, Zea mays
  Clone ID: MRT4577_81439C.1.pep
GRPFFFFFFGETAITTHRDSIQERQNTIFAVLILLEATRMPRCAGTSFRFVKVKSLEIFCLFVRLFFLFARAIPKRVAKYAILFLNLRSSSVVKMHTVIQNALTAVAFFCFTSLESGPDAVCCYPPYP

SEQ ID NO: 348987 - protein, 42 aa, Zea mays
  Clone ID: MRT4577_8143C.1.pep
RATERLNKNRAANGLAVWLYVHKSIHAPKGMMLIIGMQNSYL

SEQ ID NO: 348988 - protein, 164 aa, Zea mays
  unsure (1)..(164): unsure at all Xaa locations
  Clone ID: MRT4577_81440C.1.pep
SILSPAAISGPRQAPSPPRQSSPRPRQAIHEKRPLTGEEHVAAPAVEETSEKKQASTTELVAPSGWTKKSYADKWWRPGGKLFIKIARAVKFTPIIFWDKFGTPFPFPKPMHVVVGKXIEVNKIPHPTIDEINEVHEQFIIAMRDLFEKYKAKAGYLGLHLRVL

SEQ ID NO: 348989 - protein, 105 aa, Zea mays
  Clone ID: MRT4577_81441C.1.pep
MGADGGLNRAAEKPRDGEGGEARVFRCTDYSLPRTTLALALWLGGIHFNVLLDLASLFLLSGRSAAIVVAFQLLFMYAPGHDRLKWGQSATRFIWRPGMGYFPIT

SEQ ID NO: 348990 - protein, 70 aa, Zea mays
  Clone ID: MRT4577_81442C.1.pep
GRVGCGDKKKHKNKKKKKGGTSTMMLALISVAPTRLPVCDLTYIHWRGRHSITSCLVKHLTLHNWLPFYN

SEQ ID NO: 348991 - protein, 243 aa, Zea mays
  Clone ID: MRT4577_81443C.1.pep
MPRIPPPSSPYAPRHQLAPTLARDPSSPDVRDPSSPPRESRALGRHPLPRDNLPHALGKRSTKSALSPARSTWRRRRSRRRRRRSRPAQPSWSHPQAGRRPNPWHEGVREMLHMNNDSEVAFLKSRKGFVKIAIQSGCPLVPVFCFGQSYAYKWWRPGGKLFIKIARAVKFTPIIFWGRFGTPFPFPKPMHVVVGKPIEVNKIPHPTIDEINEVHEQFIIAMRDLFEKYKAKAGYPGLHLRVL

SEQ ID NO: 348992 - protein, 108 aa, Zea mays
  Clone ID: MRT4577_81444C.1.pep
PRHFFVFSSPLRPPGLFPFTFLSPRRAEFSRDYHFWPGTRFSYFPPPLCSDFALLWFGPQFFLFCLFRGFGQGTFFIPFFFWIFFFFFFSFFFFFFNFKNFILKTEHN

SEQ ID NO: 348993 - protein, 69 aa, Zea mays
  Clone ID: MRT4577_81445C.1.pep
ILGCDAVTTRFLLRVLRSLIVTRLFLRALSYDRALSTITLLSTRVRVVLHSEADAEILDVYLDGQVGNE

SEQ ID NO: 348994 - protein, 74 aa, Zea mays
  Clone ID: MRT4577_81446C.1.pep
LLMEMALWSDCGLPYLTLSQLSVFLTRTLQWPPPLLGGARAAASLVLHRCYLNVLLDATPHTGFMYCRWLPLLL

SEQ ID NO: 348995 - protein, 107 aa, Zea mays
  unsure (1)..(107): unsure at all Xaa locations
  Clone ID: MRT4577_81447C.1.pep
FCSLHCSTQHKIRASNNRAVGSSXMALFCTVFDRKALNHPKYLSVEDHVTLLTTVVQAQHSESYWSPTYRTRPGVLPRHSDHLALVLPHGRDPRLLQVMHTMLDLVP

SEQ ID NO: 348996 - protein, 67 aa, Zea mays
  unsure (1)..(67): unsure at all Xaa locations
  Clone ID: MRT4577_81448C.1.pep
GRGYVIIGERRGHFALDPWIAAGDTEDEQPVLLVLGRALKEDGEEXXDPVSLLEMHPLGCVLVGTIH

SEQ ID NO: 348997 - protein, 144 aa, Zea mays
  unsure (1)..(144): unsure at all Xaa locations
  Clone ID: MRT4577_81449C.1.pep
FTRTCGSSDWTDRYLQTAEIETTVRSPEDKGSSGEEVVPAKKRRGRPQKXSPVXDQAVDVENFVEKVDGDQEEADDGKLKNSAAAGGNKRGRPLKEGSNIVVEDNNSIVPSSSDESTRTNGFRQIGSRRKNKPRRAAEAGLECK

SEQ ID NO: 348998 - protein, 96 aa, Zea mays
  Clone ID: MRT4577_8144C.1.pep
MSAAFKAFLNSPVGPKTTHFWGPVSNWGIILASVADTKKPPEMISGNMTGVLCVYSALFVRFAWMVRPRNYFLMVTHSCNECVQLYQLSRWARAQG

SEQ ID NO: 348999 - protein, 151 aa, Zea mays
  Clone ID: MRT4577_81450C.1.pep
AVQCEPRDLADSLTWLATEAHRPSKAQQQQHLPRFSSHSLSSLVNQVFKRSTGKWRPCSLCLPIQSSGYLCFLGVSRVIIDRENPFNAIKTYTNPFNAIRIYSFPSMPSNLNFNLLNAITVSLELTPLVRFKVNLSNAIKIYIDPFNATRS

SEQ ID NO: 349000 - protein, 57 aa, Zea mays
  Clone ID: MRT4577_81451C.1.pep
NKIFKNLQLHQINPLFCNVGNLDILEYRNIIHSQSNLTTCHVWRSIQELLVVSKTCF

SEQ ID NO: 349001 - protein, 159 aa, Zea mays
  Clone ID: MRT4577_81452C.1.pep
MFIWVSINLNVAAFLAFRSFGGVLVAGWLLNRRCLSLSRFRQLSCTPQSASTPLSTFCRRLPPLAFPVPSPPSRRKKRRREEEEREREREREREREREREREKERARLSLLAELERRSWPCGGAATPPKSSPSARGSFHALAALQGKPRQSFRPMNLPV

SEQ ID NO: 349002 - protein, 63 aa, Zea mays
  Clone ID: MRT4577_81453C.1.pep
ISRNLLDLVRSRLSRSAALPVRGRVGTVNEGPRPPSYPSSSSYWPCWSTSASSSSTAPLRVGD

SEQ ID NO: 349003 - protein, 94 aa, Zea mays
  Clone ID: MRT4577_81454C.1.pep
PPSSQTNHHAYSQRTAQLSCSSMVSYIPPDLTLNTHARGRYLNARQHLVPHTFLSLIGRITKNIDCQDESPECASSFYSDDTSFISAPAAPITR

SEQ ID NO: 349004 - protein, 721 aa, Zea mays
  Clone ID: MRT4577_81455C.1.pep
PYSAVYNTDSSAEASRREALLVKHVKEKLREQGFVEESIRTDSYLNLRYEGTDTAIMVRQPEQGSGNDYADEFEKLFQQEYGFKLLNRKILICDVRVQGVGTTNILQPRELTQISTKPVQESSCRIYFSSGWQDTPLYKLENLGYGHLLEGPAVIMNGNSTVIIEKDCKAIITKYGNIKIDINAAPSTVSISEKVADVVQLSIFNHRFMGIAEQMGRTLQRTSISTNIKERLDFSCALFGPDGGLVANAPHVPVHLGAMSSTVCWQLNFWGENLNEGDVLVTNHPCSGGSHLPDITVVTPVFDHGKLVFFVASRGHHAEIGGITPGSMPPFSKCIWEEGAAIRAFKLVERGVFQEKGIIQLLQSPCSDELAGYKIPGTRRIQDNLSDLRAQVAANQRGIALIKELINQYGLITVQSYMNHVQKNAEVAVREMLKTVASRVAKENGSCVVEDEDYMDDGSVIHLKLTLDAIKGEATIDFEGTSPEVYGNWNAPEAVTTAAVIYCLRCLVDVDIPLNQGCLAPVKILIPKGSFLSPSDKAAVVGGNVLTSQRVTDVILMAFQACACSQGCMNNLTFGDDTFGYYETIGGGCGAGPTWDGTSGVQCHMTNTRMTDPEIFEQRYPALLHTFSIRENSGGSGLHRGGDGLVREIEFRRPIVVSVLSERRVHAPRGLKGGRDGDRGANYLVREDGRKIYLGGKNTVTVSAGDILQIFTPGGGGFGCP

SEQ ID NO: 349005 - protein, 254 aa, Zea mays
  unsure (1)..(254): unsure at all Xaa locations
  Clone ID: MRT4577_81456C.1.pep
VLRKKHTVSTRTVVQALEGWHWISDILTPLSWAGIQQFLLLWDAVRRVVLTQEADTHIXCIXSSGQFSSKSCYKAFFMGSITFEPWKRLWKSWAPPKCKFFLWLAIRNKCWTSDRLERRGLDHPESCLLCDQSQETIQHLLCTCVFARHFWHSVLLALGVGNLSPSGDETSFADWWRKSSKKIHKSKRKGMNNIIILGAWCLWIHRNKAVFNGETPSLSSIRCVFLDEMGCWITTGAKHLQSFDIEITRNLHRA

SEQ ID NO: 349006 - protein, 450 aa, Zea mays
  Clone ID: MRT4577_81457C.1.pep
MATLAPPAVEVEPEADAMALASEAAAPELPSSHSQLDFFKTRVQLLCESNTRDFDAWVSLINAAEGTSADDIEVMSLVYHNFLLEFPLCYGYWIKYAAHKARLCTTRYVMDVYEQAVHAVPHSVDIWVNYCEFGICAFEEPAHVRSLFERALSLVGKDYLCYHLWDKYIEFESSQKQLIHLATIFINTLKFPTKKLHMYYESFRKFVTLLEQEVTSCVAEILSEKVHASEMVGTEGSELDISTIIADLFDQKGGHLSPEALKHYLSAGEKLYKMSSKIYKEICYFEASIKRPFFNVKTLDDDQLENWHQYLDFVEKNGDFDWAVKLYERCLIPCANYSEFWIRYSEYVDAKGGREIANHALGRASSCFAKVSLGNIFDILHLPIVLKLCKDPMSLCVMCMVGCGSKDEGYNTCSHLTAGMGNRAPPCGSRLEAWLRRERPDNFFIYTKIS

SEQ ID NO: 349007 - protein, 177 aa, Zea mays
  unsure (1)..(177): unsure at all Xaa locations
  Clone ID: MRT4577_81458C.1.pep
MKIQGSGALGSRNAYLRGLASLPQRPILRDSRPLIRPDGERSWKVAENAGGHGRNPNGILGLLCREHFPRLVKYSGVTDPAYTFNHYVVAPDAVDQDSREFNNKAERVKQKLWDFFRYEVVYEARADVLATTSYKKLVVDMHYEVRIQAIISYHGXSVLGEKVTKXDARTMSLTRDQ

SEQ ID NO: 349008 - protein, 122 aa, Zea mays
  Clone ID: MRT4577_81459C.1.pep
KEEFLPPFFGPFLTKKYVFFSFLNGWVNLRTKCRCFKKNRFKIRFKKKKWSNQPSPVWMPWKINLFSQKKPFFIVLLDRISYLGPFIGRSWSNFVKKNFGFKILPWNNCLCSEPFLWILEFG

SEQ ID NO: 349009 - protein, 95 aa, Zea mays
  Clone ID: MRT4577_8145C.1.pep
DRKGQDHTPSHLHSWYSLDCDHLTPQYRLHQHTSRRLTADTPIALPAKPLSITPPMLQAVAATATLLPQQLLSPSSTQPHSSPAVAPGHTSGTGI

SEQ ID NO: 349010 - protein, 59 aa, Zea mays
  Clone ID: MRT4577_81460C.1.pep
IPGVRPTGSCNYMLSTPLQSLQFNHLCGLNYSANLLRHHLLPLIQLDRENPATFYIHPQ

SEQ ID NO: 349011 - protein, 124 aa, Zea mays
  unsure (1)..(124): unsure at all Xaa locations
  Clone ID: MRT4577_81461C.1.pep
RSWKVAENAXGRGGNPNGILGLLCREHFPRLVEYSGVTDPAYTFNHYIVALDAVDQDNREFNNKAEHVKQKLWXSYYIVKYVSFVAHSSNKSLYXDFFRYEVVYEARADVVATTSCKKLVVDMH

SEQ ID NO: 349012 - protein, 71 aa, Zea mays
  Clone ID: MRT4577_81462C.1.pep
WKKYSSESLTVEICNFVPLALSISLLFSTAMAQKALRLEICQKCVTQWYCTLLLEIHPVLVIDFQCLFAEI

SEQ ID NO: 349013 - protein, 130 aa, Zea mays
  unsure (1)..(130): unsure at all Xaa locations
  Clone ID: MRT4577_81463C.1.pep
VSKEGCQKQGGRGQPPRFLGKNRREDLTTPPPGPERLPGGPLEGFWACPPPPKLRRAVSPLCXRPGPPPLFFXPKGGGGGIKRPPGPQIPVCNPGXKPPPPXAPGASPPPPPPCFLGPLGNNIVFSGVFF

SEQ ID NO: 349014 - protein, 142 aa, Zea mays
  unsure (1)..(142): unsure at all Xaa locations
  Clone ID: MRT4577_81464C.1.pep
MALGEEIVQLSVFRVPQLXQLLLLLLGHHECLFRASSLFHGPSLGCHCGRTSQGIGPTCTCPRLKDLRRHACAPDNLTGSVYIRRSSPPALNTITAAQSYILCCSEEALDPSTGYPVRWLLHLINRYWSRLLLQSPLRLGLI

SEQ ID NO: 349015 - protein, 66 aa, Zea mays
  Clone ID: MRT4577_81465C.1.pep
ATRLGLKAIATHAGPGRRQRRTSIQRVLMALQKVLATYQPCRLWCGTHAPLAGSNYGSIPLNDILA

SEQ ID NO: 349016 - protein, 81 aa, Zea mays
  Clone ID: MRT4577_81466C.1.pep
RGPARHNIRLCPYTKSSLLFFAMPLQGMIFDHFHSTQQGVELGYLHNSSFNFGAVTPLILSNDFHEGSLVIPLTLLEGHLD

SEQ ID NO: 349017 - protein, 164 aa, Zea mays
  unsure (1)..(164): unsure at all Xaa locations
  Clone ID: MRT4577_81467C.1.pep
MKKETMEGHVPLPLPLLPDGETAVGYSKDAASSSSAALSPLQEEISSLRSRQRRVDRRRREALDRLVDLKGSVRVFCRVRPLAHTNSLHAQSSPVTVEQERITVKAAGIKREFGADRVFGQEXTQEDVFEEVKPILRSALDXHNVCILAYAQTGDGEDYXMEGT

SEQ ID NO: 349018 - protein, 115 aa, Zea mays
  Clone ID: MRT4577_81468C.1.pep
RYEQGYIVEIITEDQWRQRHKIEGRIVEIDKFYRLLGGMVSSSTHKFPSGHRFAIAEVSLTGDGRKSCLVTTWQKTTKKISCKGMVEYYVLLVHSRSAWTFSFWFLLVEQLASQS

SEQ ID NO: 349019 - protein, 119 aa, Zea mays
  Clone ID: MRT4577_81469C.1.pep
RCKWWQSGFHLRHQREAQILFCLPLGARQTGAVCSGDAISKHSSVPLVENCTTPTVAVCTTLKRVAEKVVSELVGSERLGSNNSAELLESMEKEDVLAENVRFGGNGVAQGGLPEELEV

SEQ ID NO: 349020 - protein, 64 aa, Zea mays
  Clone ID: MRT4577_8146C.1.pep
NSDKSSVNSFRRSRSRSLCTLRSCPHKRGVPRERRLPRRRRRDRVPQDADADAEAACVLVTRNS

SEQ ID NO: 349021 - protein, 516 aa, Zea mays
  Clone ID: MRT4577_81470C.1.pep
MLLQELDISQGSVLYAVDEATVRSLNGCRVADRIIRLVPNIENFRTALRCLKCWAKRRGVYSNVTGFLGGVNWALLVARVCQLYPNAVPSMLVSRFFRVFTQWQWPNPVMLCSIEEDELGLPVWDPRKNPRDKCHHMPIITPAYPCMNSSYNVSTSTLRVMVEQFQFGNKICQEIEMNKASWSALFEPFQFFEAYRNYLQVDIIAEDDEDLRLWKGWVESRLRQLTLKIERDTYGMLQCHPYPHEYADPSRQCVHCAFFMGLSRKEGVKIQEGQQFDIRGTVDEFRHEINLYMFWKPGMELAVSHVRRKQIPAYVFPEGYKRPRPSRHVNHQSDKNDTEDGTMIRSPDSQLKRRHNSVGTDDIEPSWPAKRSSVSPVHPKNSPQSGSSGDETRCNNQIKRAPSDATGASPASPQASERSPDTIMSAPRCTTAGAVCSGDAISKHDVPHVENCNTPTVAVCTTLKRVAEKVVSELVGSERMGSNNSAELLESMEKAENVCFGGNGVSQGGLPEELEV

SEQ ID NO: 349022 - protein, 201 aa, Zea mays
  Clone ID: MRT4577_81471C.1.pep
MSAPVGRLLLLVSAVAVGLALPVAAEIKKESFREDPRSSIMFEKFGFSRSGEVRIIISGASVSSPVARADLKQLGFFLVSDESLLDAIDEAREEGPTPEKLVAASDDDPDDGAAAGCVLYSPSPYVRKLFTFKNMKGGHYNRSFPVTRPDEYALFFANCAPGSLVSMTVRTEMYNVGADGSKDYLPVGQAPVAVIHGVFAL

SEQ ID NO: 349023 - protein, 72 aa, Zea mays
  Clone ID: MRT4577_81472C.1.pep
MAFSPPLIDWEAESYPAYPDFAAIPLFVVFFLVVRFFLDRFVFEVVVFPAHFYNISRLLYVSLSTMLEPVIL

SEQ ID NO: 349024 - protein, 159 aa, Zea mays
  unsure (1)..(159): unsure at all Xaa locations
  Clone ID: MRT4577_81473C.1.pep
ATYHSLQQGGRTYPSLHHFFPNLVWLMPLTLSDDFHNVHLFIPASAQETASILLFGSNSSGRPPCATPFPPKRTFSARTSSFSILSNNSALLLLPSLSLPTSSETTFSATRFKVVHTATVGVVQFSTRGTLLCLLIASPEHTEAVVVHLAADRIVLGSX

SEQ ID NO: 349025 - protein, 135 aa, Zea mays
  Clone ID: MRT4577_81474C.1.pep
GSCSSRVYQQNMTFDHGLPQNLHSLQQGGRTYPSLHHFFPNLVWLMPLTLSDDFHNVHLLTPLTLLEGHLAQPPPPQNEHFQQGHPPFPYSPTIPHCCCSPAFHFQLCMKQYTQLREGRLCTPLGSSKCSRFKYM

SEQ ID NO: 349026 - protein, 52 aa, Zea mays
  Clone ID: MRT4577_81475C.1.pep
IRNNLAGYDSTSRLIKLIQSVVSFVGKNKCRQVELLINCHIIVNDYPRDLFG

SEQ ID NO: 349027 - protein, 139 aa, Zea mays
  Clone ID: MRT4577_81476C.1.pep
SVPARHDIRPWPSTKSSSSFFFCHAVVQDMISDNLPSSIIIETPVIANLSDDFHNVHLFIPLTLLEGHLAQLHSRQNEHFQQGHPPFPYSPTIPHCCCSPAFHFQLALKQLSQLRASKLCTLLQSEWCSSQQEEHYYAY

SEQ ID NO: 349028 - protein, 90 aa, Zea mays
  Clone ID: MRT4577_81477C.1.pep
ATYHSLQQGGRTYPSLHHFFPNLVWLMPLTLHQLKKPLQSYCWALTLLEGHLAQLHSRQNEHFQQGHPPFPYSPTIPHCCCSPAFHFQLA

SEQ ID NO: 349029 - protein, 140 aa, Zea mays
  Clone ID: MRT4577_81478C.1.pep
VSPVHPKNSPQSGSSGDETRCNNQIKRAPSDATGASPASPQASERSPDTIMSAPRCTTAGAVCSGDAISKHDVPHVENCNTPTVAVCTTLKRVAEKVVSELVGSERMGSNNSAELLESMEKLKMFVLVGMELVKVAFQKS

SEQ ID NO: 349030 - protein, 56 aa, Zea mays
  Clone ID: MRT4577_81479C.1.pep
IQHVKIDNFVVSWSPQIINSSVRVHLGMRCSRLEAPAHTQHGRHEILLGETLWTEI

SEQ ID NO: 349031 - protein, 70 aa, Zea mays
  unsure (1)..(70): unsure at all Xaa locations
  Clone ID: MRT4577_8147C.1.pep
TNXTLFNQRTQHPSYNLQVYGKIGNLGIGNFWYEVNDIMGTNVQIRKEWQVVHAQGLKVTVGRSKPRFVS

SEQ ID NO: 349032 - protein, 61 aa, Zea mays
  Clone ID: MRT4577_81480C.1.pep
GLILVHDCLDLNKILVEQHYDIRQVLQADEMLFELRFDTEHMVQKNTVDSLRPCKAGSIRY

SEQ ID NO: 349033 - protein, 70 aa, Zea mays
  Clone ID: MRT4577_81481C.1.pep
FARVFVIYKIHESVKVACNVMWSDPWPSMNTASAATLLRYDIITPIPVRHRHTYIYVCKYICIVQVQSHG

SEQ ID NO: 349034 - protein, 83 aa, Zea mays
  Clone ID: MRT4577_81482C.1.pep
LLLFYLFSHRWVKMLGISTGSLASLETRELAQAFATEKWRDLFLREERAKLRQDPEALAGYLAPHKSLSSPTGLLVKIMYEAA

SEQ ID NO: 349035 - protein, 192 aa, Zea mays
  unsure (1)..(192): unsure at all Xaa locations
  Clone ID: MRT4577_81483C.1.pep
LKKDAMTMVSLHLTAAGPNNKDATATASDEDHSSSTTRSPDADIASAYDADDDVQRQTDTSIEAANHLQCXQLSAXADRMVMLSTEETGMMMKQXTHRDGSTSAXAQEIPNDKAGVTKPTPYDXLFGHIKASLGRAPTPTQLKAVLASXTLPAQDEMNALLEALFGGAGKGYTRDAVRNNKYLAGPVPDEGA

SEQ ID NO: 349036 - protein, 108 aa, Zea mays
  unsure (1)..(108): unsure at all Xaa locations
  Clone ID: MRT4577_81484C.1.pep
TPKEFFVFGGKGLPRGTVXKLVSGGRPVKNLIKQKTRGFIYSLPKVSQGGKNKFGGGPQTPLRVLGPKKYLKASPFVKKQFKKPRSAPRAFFFWNKKQKFNRAGHPFF

SEQ ID NO: 349037 - protein, 63 aa, Zea mays
  Clone ID: MRT4577_81485C.1.pep
LTRGRAALLKTSLLLAASAVTCRVVCWLSDPDGSSPLSSPTVIIILFSFIINLQYYFIVVSFL

SEQ ID NO: 349038 - protein, 113 aa, Zea mays
  Clone ID: MRT4577_81486C.1.pep
FACGVGPPRLFCCGCPGTGGASRRSSWVCSSPAACWWLPATLVVPLRPLGGHPLALCSVPVVVTGSWLVFAAFVLALSGALSVLWVVMVSAVRVLGRGCVRPLFFLLRPGGFF

SEQ ID NO: 349039 - protein, 94 aa, Zea mays
  Clone ID: MRT4577_81487C.1.pep
HLPFAGERAHLLIAVVHITDYGARVSIVSAVISALVFQLAVAACVTMRHVHIGVAEPPSLWSQVRTSYRPSLALCFRAIESRVFPLLAKACWVF

SEQ ID NO: 349040 - protein, 126 aa, Zea mays
  unsure (1)..(126): unsure at all Xaa locations
  Clone ID: MRT4577_81488C.1.pep
RGRVGSALPPAPASDDRAGSPAAARASKLARAAPRRSRSEKMAAGPRLLQVRRAASPPAAPELRRTESENGRRRRSSVSARACRWGADDADEFRRTVEAFIDKHKRFHXQESMTLAVVAGSGTGSG

SEQ ID NO: 349041 - protein, 43 aa, Zea mays
  Clone ID: MRT4577_81489C.1.pep
PLSRAYVLYLSRQIKLQHTIIIDLRDRTMNIAVTQTIIPIVVF

SEQ ID NO: 349042 - protein, 103 aa, Zea mays
  Clone ID: MRT4577_8148C.1.pep
TRKTSKAKTGLWPSARDHPSIAFIRVSITLLSTEACSTTVAYARYTQFHPSTYVSLRLVAPIEISPPAYVHVYASHQDALWYAYNHRVLLLAKNRYPPGGSSR

SEQ ID NO: 349043 - protein, 77 aa, Zea mays
  Clone ID: MRT4577_81490C.1.pep
CETPAGRVLGRLVSMSLYGALLPRLAYVTDRCATSRRTVFGRYKLLRARVLKGRTYGARCGASDLHPAYPWSRSRRG

SEQ ID NO: 349044 - protein, 95 aa, Zea mays
  unsure (1)..(95): unsure at all Xaa locations
  Clone ID: MRT4577_81491C.1.pep
MPLSGSADHISGLPLLGLQVTYFKCGRLSLAVGMQHHAAHGMSDLHFINXGLDLCRVPQITRMPFIHRTLVNARDPPPPFFQHMLSQPLHCYGCC

SEQ ID NO: 349045 - protein, 157 aa, Zea mays
  Clone ID: MRT4577_81492C.1.pep
MANALDHLNSGRTRIEWLSQLNTEYTPAREYRRTSIICTIGPKTNSAEKINALRKVGLNVVRMNFSHGSYEYHQSVIDNAREAERTQPGRPVAIALDTKGPEIRTGNTVGDADIPIKAGSIINMTTDEQYATGCDDKNMYVDYKNITKGIVPGRTIY

SEQ ID NO: 349046 - protein, 84 aa, Zea mays
  Clone ID: MRT4577_81493C.1.pep
SVVQDAPAAARHSGKGPAQHAARWLQESPASDYLLLHAPTHLDMLNERAIGSSNCLDGPRQPLNPRCRDQLIRIPGRKISPHPN

SEQ ID NO: 349047 - protein, 138 aa, Zea mays
  unsure (1)..(138): unsure at all Xaa locations
  Clone ID: MRT4577_81494C.1.pep
MLLLSSPLACRRPTLTSIIFHGGRXALPFEGHRHLTRRLXQTKGNNTVAAEVETLDPYLKYEGRERIMNNDEGHEREILHLLLDVEQLLPXRAISKRKCFVGIAVPAGDTRGRARLLAPLQCDDHHDPPSPERLIGHE

SEQ ID NO: 349048 - protein, 194 aa, Zea mays
  Clone ID: MRT4577_81495C.1.pep
DPRHASADQDQSSMLKVICNQRDRFRARLRETEEELRRLKEKHEMLTVELEKTKADNVQLYGKIRYVQDYSHDKIVSRGPKKYAEDIESGSSDVEAKYKKMYEDDINPFAAFSKKEKDQRYKELGLRDKITLSSGRFVLGNKYARTFIFFYSIGLHLLVFTLLYRMSALSYLNTTTQQDEIILDAGNQRLTHML

SEQ ID NO: 349049 - protein, 178 aa, Zea mays
  unsure (1)..(178): unsure at all Xaa locations
  Clone ID: MRT4577_81496C.1.pep
KKRTAPKSDEVYLKLLVKLYRFLVRRTKSNYNADILKRLFMRKTNRPPIYMRRLDKFMERKXEKNIANIXGTNTDAXXXPXVPXXXVPALXFXXPXXARXVXAGGXCLPFAPLALRASLGXXPVLLXGPXXARXXVXPFGXAPXVPPAXPXPXVRSXXXXFXXARGXXARXXFXVGPC

SEQ ID NO: 349050 - protein, 63 aa, Zea mays
  Clone ID: MRT4577_81497C.1.pep
PLGDAPLFSSMMLLVSLHILFPFMPFSYGLESNNSKPQCLMKLTLQNLQKQVAFEVFSHTKYN

SEQ ID NO: 349051 - protein, 423 aa, Zea mays
  unsure (1)..(423): unsure at all Xaa locations
  Clone ID: MRT4577_81498C.1.pep
ERAQARLVSLEREKGDLRSQLQTXELRILESTLSSEREMHVKELKKLTTLLTERESALMELKKELQERPTQKLVDDLKKKVQILQAVGYNSFXTEDWELATNGEEMSKXLEAVLLDKFRKMEHELTQLKGKISEKTRVIEEAEKRIVELTSKVEEQQKLILKLEDDILKGYSSTDRRGSLLNDWDIQEIGSSEASEGSDPRHASADQDQSSMLKVICNQRDRFRARLRETEEELRRLKEKHEMLTVELEKTKADNVQLYGKIRYVQDYNHDKIVSRGPKKYAEDIESGSSYVEAKYKKMSEDNIKPVCWFFKDTQETXSSSSDEEAKYKKMYEDDINPFAAFSKKEKDQRYKELGLRDKITLSSGRFVLGNKYARTFIFFYSIGLHLLVFTLLYRMSALSYLNTTQQDEIILDAGNQRLTHML

SEQ ID NO: 349052 - protein, 128 aa, Zea mays
  Clone ID: MRT4577_81499C.1.pep
TGGPCSRGLPRRSCVGDHDVQAVQGLLRGASLPPLLVLNGKGVSVVGVVRDEEMAAHMVHAHGSTGCALTFISRVMVCVTQATGHTMKTFSEQAGRGGGAQCCAARAREAQLHPSSSSRRIVTGSLSA

SEQ ID NO: 349053 - protein, 47 aa, Zea mays
  Clone ID: MRT4577_8149C.1.pep
RDKLRLTPASRRHTLTQPGKRGLMHDHNVWICLAYDDRETYHSLGDG

SEQ ID NO: 349054 - protein, 89 aa, Zea mays
  Clone ID: MRT4577_814C.1.pep
QQQMSMMDVQSVAQQLHMMMQLEREAAASNSLYETALMHQQQQLLAGQGLKAMAMMMAQNMPAMGGLYQYQVASYSTTSCGVSAAIPPY

SEQ ID NO: 349055 - protein, 129 aa, Zea mays
  Clone ID: MRT4577_81500C.1.pep
DGVPGEKLLSLQHRPVGAFSQAPRSSVRMQCSTTVSMDVSVCVWSVGKPRYSREAPLLMVNLLVQAQQQNYPWGMSQLHHFMFYMASIVFHHAPQHCPAAPAQLFDFTQCALAGVHTSVVEHLGSHADP

SEQ ID NO: 349056 - protein, 132 aa, Zea mays
  unsure (1)..(132): unsure at all Xaa locations
  Clone ID: MRT4577_81501C.1.pep
PRVRAXICLQKGKALKTYXRATLSCGKGNKHELREKIQDAGAAYFNAXAMEGEHVPSKGSIGALLSKQGAKVLPGGRGVLSDALRLEPTNRVGWVYLGEGHKQDGRLXDAADCVQGGSMREDSDPVXRFRSL

SEQ ID NO: 349057 - protein, 50 aa, Zea mays
  Clone ID: MRT4577_81502C.1.pep
LATPSNALLLGCLGECYARGVNSMYRKQAMTYWQYLNCSLHPCTGARLRW

SEQ ID NO: 349058 - protein, 56 aa, Zea mays
  Clone ID: MRT4577_81503C.1.pep
DYCFILVISYSLLHENNVSHIVCCFTSIKLVKVISLLSRIVAFISKSSMLIGFSYF

SEQ ID NO: 349059 - protein, 80 aa, Zea mays
  Clone ID: MRT4577_81504C.1.pep
IISNTWCPQTVFCLIVKETPPNETNITIQCTEIIDLTGVQTQTLSIYVGIRTGPARANYCLSGGRGNHKPIMHENIDGLQ

SEQ ID NO: 349060 - protein, 102 aa, Zea mays
  Clone ID: MRT4577_81505C.1.pep
MPLAGRRRAGGRQLLALPRIHLVMELCEGGEFFDRIVARGHYTERAATNVTRTIVEVVHFCHRHDVIHRDLKPENFLFANKKENSPPRSAPLDMPPCFLLSS

SEQ ID NO: 349061 - protein, 350 aa, Zea mays
  Clone ID: MRT4577_81506C.1.pep
SDAETGMSEEDILLQDEICKSRLMSIKREEEQYMRERDRYELEKGRLIREMKRLRDEDGSRFNNFQILHHRYALLNLLGKGGFSEVYRAFDLVEYKYVACKLHGLNAQWSEEKKQSYIRHAIREYNVLGTWVHPNIVRLWDIFEIDHNTFCTVLEYCSGKDLDAVLKATPILPEKEGRIIIVQIFQGLVYLNKRGQKIIHYDLKPGNVLFDEVGVAKVTDFGLSKIVENDVGSQGMELTSQGAGTYWYLPPECFDLSKTPFISSKVDVWSAGVMFYQMLFGKRPFGHDQTQERILREDTIINARRVEFPSKPAVSNEAKDLIRRCLTYNQSERPDVLTIAQDPYLSYAKR

SEQ ID NO: 349062 - protein, 509 aa, Zea mays
  unsure (1)..(509): unsure at all Xaa locations
  Clone ID: MRT4577_81507C.1.pep
NKEPQSSVQLGHDDRAALQEELSMLHGKVAFLEEELSKSRQDATNYHQLSDRVAKELKDLKDHDQQMRSKQMKVLSDLLIAVSKAERQEARMRIRQESFRLGNVGVMRAGTIISEIWEDGQAIKDLNSHLKSLLETKETIERHRKSLKKRQSDKGDGSDAETSMSEEDIVLQDEICKSRLTSIKREEEQYMRERDRYELEKGRLIREMKRLRDEDGSRFNNFQILHHRYALLNLLGKGGFSEVYRAFDLVEYKYVACKLHGLNAQWSEEKKQSYIRHAIREYNIHKTLVHPNIVRLWDIFEIDHNTFCTVLEYCSGKDLDAVLKATPILPEKEARIIIVQIFQGLVYLNKRGQKIIHYDLKPGNVLFDEVGVAKVTDFGLSKIVEDDVGSQGMELTSQGAGTYWYLPPECFDLSKTPFISSKVDVWSAGVMFYQMLYGRRPFGHXSELREKKYLREDTIINARRVEFPSKPAVSNEAKDLIRRCLTYNQSERPDVLTITQDPYLSYAKK

SEQ ID NO: 349063 - protein, 104 aa, Zea mays
  Clone ID: MRT4577_81508C.1.pep
RPTRAGTSHPVSKSTQHGVSRPPPPWLPPRGHSTALQLKLDGLAAMEQVACSNDPSVQLDDYTRFLKLLSIERSPPIEEEIITGVVPRLIDVLTPEDHAQLQCE

SEQ ID NO: 349064 - protein, 90 aa, Zea mays
  Clone ID: MRT4577_81509C.1.pep
RLVPALGLFRAIMITFLSLSPEKPFRGPRKRKRRPHGFATSPLLLNPPLKRGLFGAPPPLICACGPGYVMIQNLVGRAGGVFPLGRPFFF

SEQ ID NO: 349065 - protein, 185 aa, Zea mays
  unsure (1)..(185): unsure at all Xaa locations
  Clone ID: MRT4577_8150C.1.pep
GGGPPSAGRTPGPRFPKYPVKGGPPWPRAWQGYPXEPGDTKPPPPGNKGAPKKGHPFRPNVPKNPNPLGVGGGPPRKPLSRGCSFFGRERPLWAPPPXAPGGFRPLCRFPGPGPGGWPPFPPPGPPFFPKKKPPPPPFFFPPPKEGNPFLKKKKKKKKKKKKKKKKKKKKKKKKKKKKKKKNPPP

SEQ ID NO: 349066 - protein, 55 aa, Zea mays
  Clone ID: MRT4577_81510C.1.pep
AIVITGTPSCIRAASITGRPSTLVFPRPSCFFMSPAATQAGQAKKIGISNSARAE

SEQ ID NO: 349067 - protein, 70 aa, Zea mays
  Clone ID: MRT4577_81511C.1.pep
LLYSSMQICLSTRLKVLSRPRCPPIAKQGKSASTLGSTCASAHCPRRVLYRICPPVTCHLWHGPLCHHPV

SEQ ID NO: 349068 - protein, 62 aa, Zea mays
  Clone ID: MRT4577_81512C.1.pep
HASAHAYDNTSDDQQSIINTLICYMCYMAWLMEHHCQLCPWMTNDKTIHCHVDGSCMICHAY

SEQ ID NO: 349069 - protein, 54 aa, Zea mays
  Clone ID: MRT4577_81513C.1.pep
PEASARCHLIEAGRETSDAVAERQILSAAAAAVTRVPSATMGGSRRWSVGATKN

SEQ ID NO: 349070 - protein, 73 aa, Zea mays
  Clone ID: MRT4577_81514C.1.pep
GLHLDTLLYGTFVLPGFRALVHPLFRALVRIPVLSTFPVNYISSHVLPFNTQLLIQATSNNLFIENHFLPDTT

SEQ ID NO: 349071 - protein, 67 aa, Zea mays
  Clone ID: MRT4577_81515C.1.pep
DPLYYVVKPRVIQSCAYNPEALLFQSVTNRLMSSCYGPSHLWFHVKLWVVQRSLLPCSLSISKNKQF

SEQ ID NO: 349072 - protein, 116 aa, Zea mays
  Clone ID: MRT4577_81516C.1.pep
GTHYKGAAYFFLKGDLGALPQEKKHSRPRFTQGPPPKTQYGKRPPPISTQKKTLGLARSRALSPPKSFSTLGSENSIKAPGPWGGIRVPSTKTLGGHSLWAARLSPKQDRKELSFP

SEQ ID NO: 349073 - protein, 82 aa, Zea mays
  Clone ID: MRT4577_81517C.1.pep
YILDYQNNIHVIFFFIFYLLSGFLCFFIYFINNFNLCYIINYAYFISFYLYIFHRCCFFYFHRYYIINYEPILSSRSRMLFL

SEQ ID NO: 349074 - protein, 83 aa, Zea mays
  Clone ID: MRT4577_81518C.1.pep
LAPLGFMVFPAKSLRLPNPVPSGAIIYPVMRKMAPVGPQRGLLRQEMFFNGPSFSSVWARMIVQWASSYQPLHSVSPGFVLGG

SEQ ID NO: 349075 - protein, 109 aa, Zea mays
  unsure (1)..(109): unsure at all Xaa locations
  Clone ID: MRT4577_81519C.1.pep
SXPQGKFGPGEDHAPGGESPPPQKLVLFRPGAAQGGQPAFGGLKPKPPFQQNVLPPREVLPWGKDFTLCWPQKSSPGNLPPPSYLFLFFFSFPRPVGANPVYKVLPPVG

SEQ ID NO: 349076 - protein, 215 aa, Zea mays
  unsure (1)..(215): unsure at all Xaa locations
  Clone ID: MRT4577_8151C.1.pep
YLATCKKKKKKKKKKKKKKKKKKKKKKKKVFPSHAEVESIRIPASSPEPHPCPPPPRPLPATGPXPPPRPPPXATPHAPPPSPMPRRLSPXPSPLVXPPIPLSTPPASPASSRAPTPPSPASLPPLXPQPPPGLVAPPPPQSPRPGPPLPPXSAASSPPPPRASSSRSPPXTPRPPPESRLRXTSSTPSSPPSSARPPRRSASPSRASTTGAAVA

SEQ ID NO: 349077 - protein, 119 aa, Zea mays
  unsure (1)..(119): unsure at all Xaa locations
  Clone ID: MRT4577_81520C.1.pep
LVHVRYLSEERTYTYTQLLAMELTNXKGIADGNLNAAVVDRCIGIQDYFTDMQXRLXLDTATIAGLQPLLXHHETTATALAYGIDKTDLPQNDQLNXHYVDVHHASMQVSDVCNNKGQL

SEQ ID NO: 349078 - protein, 65 aa, Zea mays
  Clone ID: MRT4577_81521C.1.pep
PRLSLPNQYHPMRIRATSPAMPPSVNEMPAPGDVADGGDMRMISSKELPSQASADDLWISISGDA

SEQ ID NO: 349079 - protein, 74 aa, Zea mays
  Clone ID: MRT4577_81522C.1.pep
MAAAAAKKTVLVVAALLLVALIALEAATPASAVTDCKAGCDELRRLGVFNCEKRCEAIAAQAQKGPKDASKSYF

SEQ ID NO: 349080 - protein, 106 aa, Zea mays
  Clone ID: MRT4577_81523C.1.pep
PLLAMSAPHSQVAHRIVTVHCVVRATSACSLGFEAVDRWSRLSFCCTEQSSATPYSPVTSDFCAALFSTVRFCSRPLACKKSLLHWLTGQLGGTPDSPMNYSVGCP

SEQ ID NO: 349081 - protein, 48 aa, Zea mays
  Clone ID: MRT4577_81524C.1.pep
IKKNAKRNGVRQTRHFLFPTNYITHVILIVHLKTKTRILGLKKTSKHC

SEQ ID NO: 349082 - protein, 78 aa, Zea mays
  unsure (1)..(78): unsure at all Xaa locations
  Clone ID: MRT4577_81525C.1.pep
VQILNTIXEVLRYSSFLLHLLLNSPAESLITLRRGHEENTILGKIINLKQHSGTKTCYSLQDRSILSFILHSNPTNST

SEQ ID NO: 349083 - protein, 68 aa, Zea mays
  Clone ID: MRT4577_81526C.1.pep
ITEGAYVRRCRNWPPLDPRALTTGAPQGSIGSFCLRLRLSSMECIRLPGPSCCAPRFKQFASKLRSSR

SEQ ID NO: 349084 - protein, 64 aa, Zea mays
  Clone ID: MRT4577_81528C.1.pep
AGEHPSLYSRISISYPANPTSLSRTHRGTRWHPMRRSCRRGRSPQRRSPRSSGRKAALGRSRRP

SEQ ID NO: 349085 - protein, 85 aa, Zea mays
  unsure (1)..(85): unsure at all Xaa locations
  Clone ID: MRT4577_81529C.1.pep
MSYYGQQPPVGVPPQQXLISPGYPGKGGYPPGGHPPAGXQGYPPQGYPPQYAQPPPPQQQQSSGPSFMEGCLAALCCCCLLDACF

SEQ ID NO: 349086 - protein, 129 aa, Zea mays
  Clone ID: MRT4577_8152C.1.pep
FGGPPRGGSPKHFPTQENPFCLRGNRVGAPFFSPPILGGPFWARGLSRGPLFWGEFFRGLISKGPRPSRFFLGPFFFLTTIFPGPKKGFQKKGFFFPRGGAKGGVFKTRGPKNWGGPPGDTIGKTIAFP

SEQ ID NO: 349087 - protein, 84 aa, Zea mays
  Clone ID: MRT4577_81530C.1.pep
MSYYGQQPPVGVPPQQGYPGKDGYPPAGYPPAGYPPPAQGYPPQGYPPQYAQPPPPQQQQSSGPSFMEGWYVLRPPTFVPRIRS

SEQ ID NO: 349088 - protein, 60 aa, Zea mays
  Clone ID: MRT4577_81531C.1.pep
FKPKNQYNCSLLFCMSVKYNSLLAKLYTWLTSPNSLLHLINTPPSLQSNHGKRIDLMFIK

SEQ ID NO: 349089 - protein, 84 aa, Zea mays
  Clone ID: MRT4577_81532C.1.pep
MSYYGQQPPVGVPPQQGYPGKDGYPPAGYPPAGYPPPAQGYPPQGYPPQYAQPPPPQQQQSSGPSFMEGCLAALCCCCLLDACF

SEQ ID NO: 349090 - protein, 34 aa, Zea mays
  Clone ID: MRT4577_81533C.1.pep
SVSLSRLVRHQQYLRMNQLPTQLFRPCVLLPAHI

SEQ ID NO: 349091 - protein, 81 aa, Zea mays
  Clone ID: MRT4577_81534C.1.pep
LLPSSDLLAERSSSSGSSQSPLSFFLRSRFTVLTNIEAFLAYLFMSPSQAFPAPPCTPLPNLSFFYIILHKWPSFFVVFMA

SEQ ID NO: 349092 - protein, 149 aa, Zea mays
  Clone ID: MRT4577_81535C.1.pep
LDFTRLPGQGRLPASGVPAGRRRATLRRATRRSTRSRRLHSSSRAAGLPSWRDGTFLAPPLLCRAAAHKLFLDRSVFENFLARLDGRHLPSAHRRRRRLPCWCGTLAPVGGWGLDLTREPPLEKGAAATPRHATLVAFPWRRVGCYTQR

SEQ ID NO: 349093 - protein, 53 aa, Zea mays
  Clone ID: MRT4577_81536C.1.pep
VSLSCFYYCHRSCSFLGYPFSYGRSQIFVPLAQFLTYTLTNIILVMNLVVITY

SEQ ID NO: 349094 - protein, 36 aa, Zea mays
  Clone ID: MRT4577_81537C.1.pep
LEYGPDSGSPRAGPGPRAARSTSEPHSHSDLASTLV

SEQ ID NO: 349095 - protein, 160 aa, Zea mays
  Clone ID: MRT4577_81538C.1.pep
MPLFFSKFAPLVPRVRRLSIAAATAAGEDPKLSRIADELLALSPAELDDYAALLRLKLRLSLTSSAAAGASPAGAGDAAAAAVEAAAAVKTAFDLKIEKYEAAAKIKIIKEVRAMTDLGLKEAKELVEKAPVVVRAGLPKEEAEALAAKLKAAGAAVALE

SEQ ID NO: 349096 - protein, 94 aa, Zea mays
  Clone ID: MRT4577_81539C.1.pep
RAPSTRSEGLIIRRQLSLITLSTWITPGWRDQTWTMTRLTHMDLVGRRRNGKPYLSRMGGTHPNRHSIGKDDQLHERPKAWSAESLNDIREIAQ

SEQ ID NO: 349097 - protein, 222 aa, Zea mays
  unsure (1)..(222): unsure at all Xaa locations
  Clone ID: MRT4577_8153C.1.pep
MASTSSIGDVGASDAKSRVEDVWKKMNGGFPNKMPKPAMTKLSSTATEKKNKPTNNWMTVLGLSPSKACNSSQGSKNGLKWTQHETREDAKKLAAKALAAAKNAAAVASGRGKVEITEVRDFAGKDIEIKKXLVDPNSKEAIEKAKXXAGAAPSAVDSILEQIRKKQKLSVLDKTKKDWXGEYKEENRGLEEELDAYKKSSNQYLDKQSFLQRTDYREFERE

SEQ ID NO: 349098 - protein, 127 aa, Zea mays
  Clone ID: MRT4577_81540C.1.pep
MAGKAAAATAARWAEGYPWKEKLAKYKGELGKGVWGYWELGAWKPLGISARKRARLRKEVLLAGEDWSYDPPRGEMRTKRKGHKCDRISAEKRANTVELMKKMPQMLLDYKKRRWEKKMKAEESGKN

SEQ ID NO: 349099 - protein, 56 aa, Zea mays
  Clone ID: MRT4577_81541C.1.pep
DACGLRLHLPLSPPASCSRVRVSMRPRRRWPTLLQSALAQALVEEAEAGASWRTER

SEQ ID NO: 349100 - protein, 37 aa, Zea mays
  Clone ID: MRT4577_81542C.1.pep
SKGIADQPSPGYDQRSLSLKWSPIENKGVFRGGGVKS

SEQ ID NO: 349101 - protein, 88 aa, Zea mays
  Clone ID: MRT4577_81543C.1.pep
LHLPAEEDCLKKKKKKKKKKKKKKKKKKKKKKKKKKKKKKKKKKKKKKKKKKKKKKKKKKKGGGPFKKIKLFLPGFGKEKIFFFAHLN

SEQ ID NO: 349102 - protein, 58 aa, Zea mays
  Clone ID: MRT4577_81544C.1.pep
CCTNFRPTKHFPKVGLIKTEILHEVAQNLKASSPSEELLLQCSQPGIPLHYISQSFMA

SEQ ID NO: 349103 - protein, 131 aa, Zea mays
  unsure (1)..(131): unsure at all Xaa locations
  Clone ID: MRT4577_81545C.1.pep
GPPPGGGPXPPGTPGPPRRNCLRRGTPGELGRPKPWGGGAPTPGAPPPKGGKTGVPPFPNLADPGEEKPPGVPNPRGEVFGPGPPRGVLFIPPPXGPPMFFEGKIPSGAMSGFPPPPLLEPKKQNPGPRAQ

SEQ ID NO: 349104 - protein, 85 aa, Zea mays
  Clone ID: MRT4577_81546C.1.pep
RHEFFCRNRHPILLPFVSSSTVQHWYKLPRARQVKARQNLIKKRRPKQKKPPSLPSSRSVRGSGRLFRAAGPCKARGHDPGRPRG

SEQ ID NO: 349105 - protein, 37 aa, Zea mays
  Clone ID: MRT4577_81547C.1.pep
AAAVHSPQVLVSSLEAITTIPLPGNGRESTWPPPMPA

SEQ ID NO: 349106 - protein, 116 aa, Zea mays
  Clone ID: MRT4577_81548C.1.pep
RGCIVTFRGKNLGGTVADSLSHIPHSKLQMYSFVRYIKMCYYVFCRSFTLARAAAVAARQHVLGGWIDRRPYVAWRLLFVFSVRMSLVVWTVPLHSMILRSLPPFLFFSDRKKKFL

SEQ ID NO: 349107 - protein, 353 aa, Zea mays
  Clone ID: MRT4577_8154C.1.pep
MASINTVLGAIFVASFYFCGSLAFFPPGPGPHHEGAHHPPIGSTPIPGLSTDYYRLTCPQADETVAPILKKAIAKEPRVAASLLRLLFHDCFVQGCDASVLLDDAEEVVSEKNAIPNKDSIRGFEVIDEIKAALEEACPQTVSCADTVALAARGSTVLSGGPYWELPLGRRDSRTANMKLANKNLPPPNATLHRLIKFFRRQGLDKVDLVALSGSHTIGSARCVSFKQRLYNQHRDNRPDSTLETSFYHTLASACPRAGGDGEIRPLDLVSPSRFDNSYYKLVLEGKGLLNSDEVLWTGRDPEIAGLVKSYAEDEALFFEHYVSSVTKMGNINPLTGHDGEIRKNCRRVNQEI

SEQ ID NO: 349108 - protein, 112 aa, Zea mays
  Clone ID: MRT4577_81551C.1.pep
IFSLENHYLRVFFCSRLLFCQYQRAFALARSVLNNCLDIPLHNNEDLSFPSNFLKKLSGSVSSKSETSQLPISQDECEETPIFTENSKSEAYEVKKVGESEVTEESENHVAF

SEQ ID NO: 349109 - protein, 177 aa, Zea mays
  unsure (1)..(177): unsure at all Xaa locations
  Clone ID: MRT4577_81552C.1.pep
MKTHERAANLALAGLSLAPLVINVNPNLNVILTACLTVYVGCYRSVKSTPPAETMSKEHAMRFPLVGSAMLLSLFLLFKFLSKDLVNTVLTAYFFILGIAALCATLLPTVKRFLPEGWNDNAIVWRAPYFHSLXVEFTKSQVVASVPGFFFCVWYAMKKHWLANNVLGLAFCIQGIE

SEQ ID NO: 349110 - protein, 86 aa, Zea mays
  unsure (1)..(86): unsure at all Xaa locations
  Clone ID: MRT4577_81553C.1.pep
VLPFLLRAVANIVAFLRQKHXRPFYQQDVGNIYPFLLRRRLLPFFPQNVSNIFAFFNHLQIMPFKLFFLPGASPLFQPPTIGGAIF

SEQ ID NO: 349111 - protein, 111 aa, Zea mays
  unsure (1)..(111): unsure at all Xaa locations
  Clone ID: MRT4577_81554C.1.pep
VEFDLSPVLPRNMVHVPFIILXYLKKLATFLSQKSAYATRIMDLFERARRHTAPVEEFQWLGLVLFIVVPFLGTRAWTGAIIVSVLSMSFWPSFQYNYCLNLSTLGLAWAG

SEQ ID NO: 349112 - protein, 84 aa, Zea mays
  Clone ID: MRT4577_81555C.1.pep
AQLLELDIENIIISHIHLYCPSISLTYKSTLTHYSQRWVLHGLGDDADVIWDDSTDPGLGFKRDWYIQLQPFWVYPSMFYSDGQ

SEQ ID NO: 349113 - protein, 42 aa, Zea mays
  Clone ID: MRT4577_81556C.1.pep
PLFFFFFSDELLNGFKQMASDEMIQVLIPLSGEEHQRHASIR

SEQ ID NO: 349114 - protein, 91 aa, Zea mays
  Clone ID: MRT4577_81557C.1.pep
LSVSLSHDPGYGHQLMGGCYHLSSTEHFASQATSQTSSAMYSLSSVLSIQLLINLVHNAFVLSGDCGGIDVAPIGVSDLTVGNFRCVPIDR

SEQ ID NO: 349115 - protein, 102 aa, Zea mays
  unsure (1)..(102): unsure at all Xaa locations
  Clone ID: MRT4577_81558C.1.pep
GSSSGXRVXRCWGWXGGXXGVCLXCWAWVXQCXGGXGXXCRRVLGEXVXGVGGWTGGXVVVVAGANKGSSSIQVVGWMDDTAVAETHASAHATAHATAARGG

SEQ ID NO: 349116 - protein, 57 aa, Zea mays
  Clone ID: MRT4577_81559C.1.pep
ILNGAYLYYINYNVIKYMFMYISLSNYYNMVSDYKLKNLLPCKSFRLKVHKLGPIAY

SEQ ID NO: 349117 - protein, 75 aa, Zea mays
  Clone ID: MRT4577_8155C.1.pep
MRMEKTHINIEVIGHVDCGKQTTTGHLIYKLGGIDMRVIERFENEPTLMNTWTYKHASLLDKLKADRERGLTTEY

SEQ ID NO: 349118 - protein, 248 aa, Zea mays
  Clone ID: MRT4577_81560C.1.pep
MSERSESATEKIMSSIMDTIADNLPKQKSGKFDPGSVSDKVKNKLFGRQKTLHGVLGGGKPADVLLWRNKKISSSVLALATAIWVFFEWLDYHFLTIVSFALVLGMVVQFVWSNFSNMLSSGSRSQVPRVELPDELFVNIAVAIGAQVNKFLCFLQDVSCERNLKHFVVAIAGLWAAAVIGSWCNFLTVIYVGFVCVHTLPVLYEKYEDQVDDFLYSLLGLLRDQYQKLDQGVLSKIPKGNMKAKKNE

SEQ ID NO: 349119 - protein, 46 aa, Zea mays
  Clone ID: MRT4577_81561C.1.pep
INKNEKIRAVLIYNQMAQVTRKRVRVFKNKNRLQNQRSTAWEITKL

SEQ ID NO: 349120 - protein, 72 aa, Zea mays
  unsure (1)..(72): unsure at all Xaa locations
  Clone ID: MRT4577_81562C.1.pep
VRLRXXXVSVCLGPXALRLCXGVXXAWPFLSGXVSXCGCLSLAFFXLVWPRGCPPIXPLXLVFFCFGLNXXX

SEQ ID NO: 349121 - protein, 86 aa, Zea mays
  Clone ID: MRT4577_81563C.1.pep
DRISRKRGVAVLATFSQHGWIIGVGNKLKRCDVWIKLSGLCVWVLYPGKMVKGLDRKYRNPQLFLNLPGVKKILIKKKKKKEGRSM

SEQ ID NO: 349122 - protein, 98 aa, Zea mays
  Clone ID: MRT4577_81564C.1.pep
GLSVCPCLGSNNFLKGGGCFQTSIVGGRKKVKCPSPVVGPGLFAQIPGWLGQTGFNIYFWAVVYWLGGGLAFVLCFKPKLGQGFREGKKQNFAFFSRN

SEQ ID NO: 349123 - protein, 89 aa, Zea mays
  unsure (1)..(89): unsure at all Xaa locations
  Clone ID: MRT4577_81565C.1.pep
RXXAYAVLDVDGHCVIYRGHRLPALLLFFHGPXLPLGGGGGVFFXXSXYSYXRGVYYAXMMVXXVLCLAWGESLMKVRFGVVGCGLLDF

SEQ ID NO: 349124 - protein, 79 aa, Zea mays
  Clone ID: MRT4577_81566C.1.pep
DGSSTDQAPGEDSEVILYPQAIFKDPFRRGNNILVMCDCYTPNDESIPTNNRYNAAKIFSSPEVADEEPRYGIEQEYTL

SEQ ID NO: 349125 - protein, 78 aa, Zea mays
  unsure (1)..(78): unsure at all Xaa locations
  Clone ID: MRT4577_81567C.1.pep
ANECLKEIKKNGLHPKVDEYGQLIPSFCFQAKGLKKSXKLLEEMEESGLSLKGISCNLITAVKEFEREENQSKASPQA

SEQ ID NO: 349126 - protein, 114 aa, Zea mays
  unsure (1)..(114): unsure at all Xaa locations
  Clone ID: MRT4577_81568C.1.pep
GRRLLCPIQLALEAIHPXRADVSKGDLNERLAKMYDLKDPNTIFVFXLLTHFXGGKSTGFRLIYYNLDSAXNIQPKYXLIMNGLANKAEKSSXQMIHEKNRAXNIRGAKNSQGC

SEQ ID NO: 349127 - protein, 80 aa, Zea mays
  Clone ID: MRT4577_81569C.1.pep
VCDPCDMNNQQPKQKQWSRAVIIFVHSVQAEPLLGLPMLRTIALRERARPLMLVLGGRTSFSKAASGGRTPGQSPTHRNS

SEQ ID NO: 349128 - protein, 85 aa, Zea mays
  Clone ID: MRT4577_8156C.1.pep
NFRPVMIPPLFSPPHGVKTVCTFIKETAQKFFGARTAFYPLNLFRKPYWRLSPGQKDQDPSLLIFMPPVCHALESRGPVLFYWLN

SEQ ID NO: 349129 - protein, 58 aa, Zea mays
  Clone ID: MRT4577_81570C.1.pep
ELSCLFTAASTTTIQPASWSKVGYLTIITTITTVTIRSIYCNITSLLQLLQQLALQKL

SEQ ID NO: 349130 - protein, 40 aa, Zea mays
  Clone ID: MRT4577_81571C.1.pep
PPCFWRGAFKPGLVWFENPLNCCPLHFTFSTPVYCKGSYI

SEQ ID NO: 349131 - protein, 348 aa, Zea mays
  unsure (1)..(348): unsure at all Xaa locations
  Clone ID: MRT4577_81572C.1.pep
MDVDSDPAASSKPTQMDLEDQTNTKGKGKAEEGNGKGEELADSIGSLSIGPGRTNFKKKPVIIIVIGMAGTGKTTLMHRLVCDTQASNKRGYVVNLDPAVMTLPFGANIDIRDTVRYKDVMKEYSLGPNGGILTSLNLFATKFDEVVSVIERRAEQLDYVLVDTPGQIEIFTWSASGAIITEAFASTFPTVVAYVVDTPRSTNPVTFMSNMLYACSILYKTRLPLVLTFNKVDVAKHEFAIEWMQDFEAFQTAVESDKSYSATYTRSLSLVLDEFYNNLRSVGVSAISGSGVNTFFEAIESCAXKYMVTYXTDLDKKHWWILGFLRMMKTKTKEKMRRGLILAFAGIQ

SEQ ID NO: 349132 - protein, 149 aa, Zea mays
  Clone ID: MRT4577_81573C.1.pep
EELAVSIGSLSIGPGRTNFKKKPVIIIVIGMAGTGKTTLMHRLVCDTQASNKRGYVVNLDPAVMTLPFGANIDIRDTVRYKDVMKEYSLGPNGGILTSLNLFATKFDEVDCYNLFITLLPIPAVLITFHSTAGQLVCLLVLSVISPPLS

SEQ ID NO: 349133 - protein, 256 aa, Zea mays
  Clone ID: MRT4577_81574C.1.pep
VVSVIERRAEQLDYVLVDTPGQIEIFTWSASGAIITEAFASTFPTVVAYVVDTPRSTNPVTFMSNMLYACSILYKTRLPLVLTFNKVDVAKHEFAIEWMQDFEAFQTAVESDKSYSATYTRSLSLVLDEFYNNLRSVGVSAISGSGVNTFFEAIEASAKEYMETYRADLDKRIAEKERLEEERRKENMEKLQKDMMKSKGQTVVLTTGLKEKKSVSDMMDGADEEEEEEALEDFGFSEDDEDEDEGEDEEVAHFGF

SEQ ID NO: 349134 - protein, 378 aa, Zea mays
  unsure (1)..(378): unsure at all Xaa locations
  Clone ID: MRT4577_81575C.1.pep
MAMEGRRRRRLVLWLVISAQTMLVAAAAGAKRQAPVMFVFGDSTLDVGNNNFLSGAAVPRANKPHYGVDFPGGHPTGRFSNGDNTADFVAKSMGLKSSPPPYLSLAXRLQPSARXTALTTGVSYASADAGVLDSTNEGKCIPLSTQVRYFNGTKAKMVAKKGAAAVSKLLADSVILMGIANNDLFVFAAAELLRGRSAAEQKSDAAAFLTDLLSNYSAAITDLHSIGARKFAIINVGLVGCVPVVRVLDADGGCAEGLNKLAEAFDVALGPLLAGLADKLPGLTYSLANSFRLTQDAFADPKASGYSDVASACCGSGRLLAEADCLPNSTVCSDHDSHVFWDRYHPAQRACNLTARAFYDGPAKYTTPINFMKLAQAS

SEQ ID NO: 349135 - protein, 194 aa, Zea mays
  Clone ID: MRT4577_81576C.1.pep
GAMRTVLSGLLAAFAWPATLLAATDFIDSKWSVAIDRPDKAGKMLAEVLLKGLQGNRPVTLVGFSLGARVIFKCLQELALSSDNEGLVERVVLLGAPVSVKGERWEPARKMVAGRFVNVYSRDDWILGVTFRASLLTQGLAGIQAIDVPGVENVDVTGLVDGHSSYLSAAQQILEHLELNTYYPVFVPLPEVNK

SEQ ID NO: 349136 - protein, 96 aa, Zea mays
  Clone ID: MRT4577_81577C.1.pep
KEGKSYHVSFFKQPGVRDRQITSNTRTPTMTSTHTSAEGRFGDCLIYFLGGGGITREGLLWNNHKSRFIGPSSSEGVLAPPRPGAPGPYLEHTGAP

SEQ ID NO: 349137 - protein, 138 aa, Zea mays
  Clone ID: MRT4577_81578C.1.pep
KKDSVPSHLLVSLKPPCLNHFFAWLPSFGLCSFSPALLRPFSTASVAASPAPAPAPLRAVATGAPVAAALLLLPFIVAVTCASSPVVAARGHDDSLLAAAPASTFRSLAAPAEEPFGRGFAVVVVPVVTFFGALSGLA

SEQ ID NO: 349138 - protein, 89 aa, Zea mays
  unsure (1)..(89): unsure at all Xaa locations
  Clone ID: MRT4577_81579C.1.pep
TEREAGAQDGKERTTNDEKGNEPAEEGQNKKKRDKDSGKGGQPKNKDTRGNMPGRNGIHQANRQLTTRXPILTTRHGERKEKGRGRNGG

SEQ ID NO: 349139 - protein, 81 aa, Zea mays
  Clone ID: MRT4577_8157C.1.pep
NQTGKWEGNKLVYQTIKNVLRMQKNWAKKKKTGGDFNGEKKNWGHDSPPWAGQEGTPLERTIFYTIWGSEGRTQRAPGTRG

SEQ ID NO: 349140 - protein, 76 aa, Zea mays
  Clone ID: MRT4577_81580C.1.pep
ASPTCGPPRGVARSGRPGQCTDTPWNGVCSRWLAPPETYPRGCRTDTGEAATARAFIAASAAILQLCPAGGVVAVA

SEQ ID NO: 349141 - protein, 97 aa, Zea mays
  Clone ID: MRT4577_81581C.1.pep
AHTDGHAFVTGHPPPFFVNAPAPKIPPANPEAWPNDLRCPNTLEVMTDPDSLPSGHTYERRSNQSWLDGGHTSCPVTNQPTTTYAPVMHNHALRRHK

SEQ ID NO: 349142 - protein, 120 aa, Zea mays
  Clone ID: MRT4577_81582C.1.pep
MATQGKDLEKPKSESATVHRIRITLTSTNVRSLEKVCADLISGAKKQKLRVKGPVRWPTKVLRITTRKTPCGEGSKTWDRFQMRVHKRIIDLHSPSEVVKQITSINIEPGVEVEVTIANA

SEQ ID NO: 349143 - protein, 219 aa, Zea mays
  Clone ID: MRT4577_81583C.1.pep
MDPAAMLRSPCSIVSPGSLLTAPLLPVRLAVQPRRRVPGFIAPSGRPSVARRAAAGDKFEAETPIEKSFPPFPTVMDINQIRDILPHRFPFLLVDRVIDYKPGEYAVAIKNVTINDNFFPGHFPERPIMPGVLMVEAMAQVGGIVMLQPEVGGSRENFFFAGIDKVRFRKPVIAGDTLIMRMTLIKLQKRFGIAKMEGKAYVGADLVCEGEFLMATGSE

SEQ ID NO: 349144 - protein, 118 aa, Zea mays
  Clone ID: MRT4577_81584C.1.pep
DKSVCVAWRDSCETPSSLRSSWAPPTRRRPPPLRLSLVPCLCRSGPPPSASAWYRASAAFASVLRLGLRPPRLRLATLPCTARRRPVARPEPLTRVSVQHSSDQRLFVQSTNRSRQEV

SEQ ID NO: 349145 - protein, 60 aa, Zea mays
  Clone ID: MRT4577_81585C.1.pep
MKTMMVALAVLALIASATCAHSTQTCGCQPPPQLNLPPPVHLPHPVQLTHQDHPPPQDHL

SEQ ID NO: 349146 - protein, 101 aa, Zea mays
  Clone ID: MRT4577_81586C.1.pep
FSCPVLLCLLVINNKCYDGAKGDLWSCGVIFFVLMAGYLPFKDSNLMSLYKKIFKADFSCPSWFSTSAKKLIKKILDPNANTMSSVVCSHHLTHFVQHLQS

SEQ ID NO: 349147 - protein, 72 aa, Zea mays
  Clone ID: MRT4577_81587C.1.pep
QYSTYLKMNPLKTDRTTKVVRIQDQSCVHNNICCFKSGMLINLLEPLIVNVLRNSYYLHRPQNDGTQLLALP

SEQ ID NO: 349148 - protein, 83 aa, Zea mays
  Clone ID: MRT4577_81588C.1.pep
PIQLNHRADYRLLRASAEPEPGARAAPGGDRPGVAFNTAIWVWMSPQSPKPSCHAVMTGDWRPMDNDRAAGSAPGYRLTTNII

SEQ ID NO: 349149 - protein, 115 aa, Zea mays
  unsure (1)..(115): unsure at all Xaa locations
  Clone ID: MRT4577_81589C.1.pep
ISYEAHHVTARGKGTHWRLDAGSTCTDFANQALTQLMGSVKGVDEPAKFEEYGYALTLNXGTEWGQPVRSVAEEKDYVMAMTLQFVNRLIFYKTIHIRPKDYWYTKGAGNECLGM

SEQ ID NO: 349150 - protein, 38 aa, Zea mays
  unsure (1)..(38): unsure at all Xaa locations
  Clone ID: MRT4577_8158C.1.pep
KEVVSSTAYSVXTQVLSNTLSFRPIPRIIENLGVHINI

SEQ ID NO: 349151 - protein, 112 aa, Zea mays
  unsure (1)..(112): unsure at all Xaa locations
  Clone ID: MRT4577_81590C.1.pep
LPLDLAQVLANXTRLIEVLTRSLENQRPIGGRPXDKMGDFLRLKPPTFXGSVNPLDADDCLCPIGMKLXAIGCPDTLRVRLAAHHLPGMALSWWDTFSTTLTAASWAVFRSG

SEQ ID NO: 349152 - protein, 50 aa, Zea mays
  Clone ID: MRT4577_81591C.1.pep
GSSSRAQELVMNIIWLGSRRDEDAERWFTYKCQTRFDAQVSQVNGPCGQK

SEQ ID NO: 349153 - protein, 173 aa, Zea mays
  Clone ID: MRT4577_81592C.1.pep
MDSASSDLRARPQPRPREESRPRPTPASASGEVSASPDPRARPRPRKVVSASPDPRARPQPRPREESRPRSTQASTSGGVSTSPDLGLGPTTPQGVHHYPTPSQLRLRGNKTGVPSRLAPPLRESVSGLVSNEYGEKAPAPTPSAENVVARRWRHQGSKKRSRMTNEVVTTEA

SEQ ID NO: 349154 - protein, 225 aa, Zea mays
  unsure (1)..(225): unsure at all Xaa locations
  Clone ID: MRT4577_81593C.1.pep
ILDPTTILAALAARTEQIGLVAAVNVYTALPYDFARRLASLDHLSSGRAGWKPYSTADEPEEARIAEFVHAVSHLLDSWDDDAALYDKESGIYVDISKVHRLDHIGEYYRVAGPLDIPRAPQGRPVLVREVLAADLAEGAWPTADIIEIVPVPGQSTNKPLAPRAEGNTTLLSIVADTNDLASMHALLNDGDVDGATERVAPRXIDAVARAXARDIGLWSKPRGS

SEQ ID NO: 349155 - protein, 93 aa, Zea mays
  Clone ID: MRT4577_81594C.1.pep
PFSRFGSHLPLVSSIRCSVARDSTHPPVTQPSRDSTVYADALPWTAMRSPPDGDALATVGRHRPVQYHLPLRPWECLRLLLRERLDTARRRLP

SEQ ID NO: 349156 - protein, 409 aa, Zea mays
  Clone ID: MRT4577_81595C.1.pep
MDGRESTVASGPNFSSFFAQHRGIGAPGVPGHSQGLHAPPPGGYRQHLDAVSAGYAFQTPHVGGPSIGQGYEASPHAAQHSAGGGSGSGGCGGMDIGMGSAVCADVKGELGSGPAQDEQVKKKRGRPRKYKPDGAVTLGLSPSSSLTPHSASLGMGTMISAPGSGFGSEGSGASGLGAPSEKRGRGRPPGSGKMQQLASLGKWFLGSVGTGFTPHVIIIQPGEDVAARIIPGEDVAARIMAFSQQGPRAVCIISATGAVSAATLHQDSESGSVVTYEGRFEILCLSGSYLVVDEGGGARTRSGGLCIALCGPDNRVIGGSVGGVLMAAGAVQVIVGSFMYGGGSKKNKVKAELDAEPEEANAGDQEVALAEHSSMAPHPAMSGGGGWASGMMRQMESRTPNIDINSIRE

SEQ ID NO: 349157 - protein, 400 aa, Zea mays
  Clone ID: MRT4577_81596C.1.pep
MDGRESTVASGPNFSSFYTQHRGIGAPGVPGHSAVLHDPPPAGYRQHLDAVSAGYAFQTPQVGGSHIGQGYHHVEASPHVAQYSSGGGTSSGGDMDIGMGSAVCTNVKGELGSGPAQDEQVKKKRGRPRKYKPDGAVTLGLSPSSSLTPHSASLGMGTMISAPGSGFGSEGSGASGLGAPSEKRGRGRPPGSGKMQQLASLGKWFLGSVGTGFTPHVIIIQPGEDVAARIMAFSQQGPRAVCIISATGAVSAATLHQDSESGSVVTYEGRFEILCLSGSYLVVDEGGGARTRSGGLCIALCGPDNRVIGGSVGGVLMAAGAVQVIVGSFMYGGGSKKNKVKAELDAEPEEANAGDQELALAEHSSMAPHPAMSGGGGWASGMMRQMESRTPNIDINSIRE

SEQ ID NO: 349158 - protein, 105 aa, Zea mays
  Clone ID: MRT4577_81597C.1.pep
LRISMANPRVFFDMTVGGAPAGRHRDGPVRPRGGQDRRATSVCCARPTSPLSRSLRRYSRWLATIVRAPLPSLIRNTMLCWPPPLPTTSVRTMTTLATACGHYLR

SEQ ID NO: 349159 - protein, 163 aa, Zea mays
  Clone ID: MRT4577_81598C.1.pep
METDDFIEESRNKNENIFQEGLLFSSQNDAEFHGITSDVLTVSKNSLLLDHETCKMVETNTTIFSDHLELLNEKHSEGVESTRNMMSDCLEKDYMANSPVRNHPRELLTSANSLESIDKLRASLPDLVAKFRLENKLNEMDKGNQYWDQRTRPPKSPFTPVNQ

SEQ ID NO: 349160 - protein, 64 aa, Zea mays
  Clone ID: MRT4577_81599C.1.pep
VCVVSSTAAVRKAQLQGSPQKTFSVRHLLWESKGQSLITPPPAGQSMIINKTIKVSRVKGIPVL

SEQ ID NO: 349161 - protein, 61 aa, Zea mays
  Clone ID: MRT4577_8159C.1.pep
KPPSVLSFGAPSFTNTLSPKGFSKVYFGMAAVAALSSRLRIKQPQQSKPVALRSNILGSCL

SEQ ID NO: 349162 - protein, 60 aa, Zea mays
  Clone ID: MRT4577_815C.1.pep
HGLRFNDVEIPGSTKPPGAWPSHVNRHRKTGPVIFYLKCFLFKWGHLLLWIFLPIHMVLV

SEQ ID NO: 349163 - protein, 60 aa, Zea mays
  Clone ID: MRT4577_81600C.1.pep
STESLYGRHELSMDTIYLNPCPNHSVRNDGCSDFWRTTGRRVTQLDLAPQVNRAPREPRG

SEQ ID NO: 349164 - protein, 81 aa, Zea mays
  Clone ID: MRT4577_81601C.1.pep
EDVVVGEVGWQGRGKKKGERRRGRRRGKATSATRVMRTRTKLQCILLMLLCFDNRSNVSYVINSFVYQCMNASFLNFRSYG

SEQ ID NO: 349165 - protein, 67 aa, Zea mays
  Clone ID: MRT4577_81602C.1.pep
GQSIQRQVRAHRIDQHAAHTSLAHSPERRGARYVDYNMQKESTLHLVLRLRRGMQNFVKTLTGKTIT

SEQ ID NO: 349166 - protein, 169 aa, Zea mays
  Clone ID: MRT4577_81603C.1.pep
MGERVKGTVKWFNVTKGFGFISPDDGGEDLFVHQSSIKSDGYRSLNENDAVEFEIITGDDGRTKANDVTAPGGGALSGGSRPVEGGGDRGGRGGYGGGGGGYGGGGGGYGGGGGGYGGGGGGYGGGGYGGGGGGGRGCYKCGEEGHISRDCPQGGGGGYGGGEYGGRDR

SEQ ID NO: 349167 - protein, 143 aa, Zea mays
  unsure (1)..(143): unsure at all Xaa locations
  Clone ID: MRT4577_81605C.1.pep
MANEEPAPVTAPAAAAPXAGGDHSPAFSFSIWPPTQRTRDAVVRRLVETLAGDTILCKRYGAVPAADAEPAARAIEAEAFDAVAAAGGAAASVEEGIEALQSYSKEVSRRLLDFVKSRSADAKADPPSAEALAPDAPEAQPAA

SEQ ID NO: 349168 - protein, 109 aa, Zea mays
  unsure (1)..(109): unsure at all Xaa locations
  Clone ID: MRT4577_81606C.1.pep
DHPRVRPRVQAGTVGYVAPEYGQTWRATTKGDVYSYGVLLMELATGRRAVDGAEDECLVEWARRMAREGWSSAGAVVGTVSXELLMLGMRCTADAPQERPDMPDVLAAL

SEQ ID NO: 349169 - protein, 223 aa, Zea mays
  Clone ID: MRT4577_81607C.1.pep
RARHWEYVQGSIGNRTVAVKRLLPVLHFDENGFYRAVKCLMKVKHQNVVRFLGYCNETRGKMAGFKGTLVMAQEEERLLCFQYLSKGGLNNYINADASSALEWEQRYRIINGVCQGLHQLHQHNILHMDLKPENILLGNDMVPKIADFGLSRRLHEDQSYIITKNLCGTRGYMAPEFIDSNPENRAITKKCDLYSLGVIIMELLTGTRTTGAVNDVLDSRISQ

SEQ ID NO: 349170 - protein, 554 aa, Zea mays
  Clone ID: MRT4577_81608C.1.pep
MWSRSPSPDVEYKEDEEKVTREAEAQYDGDIEQRSTAEDEGGVDMSDDEHSSGGEKGESAPVYDLAPVADNCMDHSEKEIIALNDHSGGEAASDAQRSPEAVSARQLAAVPSDQAAGPAKRSPEPSEQEFVGIVDHSLEHSSDDRKETASESDQSYEIVFDDKRKPEPPETGFLDTAEEEYGGTNDRSNHLISYEKKKVSFSTTDDRPYAAVADEKSVPETPEQGFSLTDHRDGVAPDATNISETREDEEQDSAARQAYVSVAGKAKVYDEDGEDPEVRWKDLSAEEEDELESLWEHQDLIEQLKLELKKVRSIGLPTILEESETPKAPMEDLKPWRIDAKFLREDPMDELNKFYKSYRERMRKFDILCYQKMYAIDFLQLRGPQQSSNSLKSLSPTVASILSHNFRSSRRRSPEDPSERFLRELRYDLETVYVGQTCLSWEFLRWQYEQARDLPESDPYHSHQYNQVAGEFQQFQVVVQRFVEDESFKGPRLSNYINNRCVLRNLLQVPVIKEDSLKDRMEDQRKGNYVITSEELEDVMEEAMHVLWEFIKAD

SEQ ID NO: 349171 - protein, 68 aa, Zea mays
  Clone ID: MRT4577_81609C.1.pep
SYIAVAFSIFISPSILSADTIKRTHTYRETVKRITTLHLNTGTPSQFYLYGSLKKECKKKRLVNHLYP

SEQ ID NO: 349172 - protein, 75 aa, Zea mays
  Clone ID: MRT4577_8160C.1.pep
VLVKRIRRIIWFRLILQSLLVFRDHILFFCFFFFFCFFFFFFFFFFFFFFFYMVSMLFETIKFDRPSLFHKLRLV

SEQ ID NO: 349173 - protein, 220 aa, Zea mays
  Clone ID: MRT4577_81611C.1.pep
MGGLKLRRLASTFLSPGPASPGSAADAHHSVSRATAHHPSTAPPSAQHMDALLAFGRGSRLSAASLAAALVDRLRAAASGQGDAAVALKCLVALRVLLARGAFILRDQLLAALARHPASGRNPLALSSFPLGRSSFAAASWVRFSARLLELLLLLPDASADAEYLAALPNPHLVAELAAFVSVADAVRQGPPPPPSGPQPNALIWEAVRLADEDRVPAET

SEQ ID NO: 349174 - protein, 53 aa, Zea mays
  unsure (1)..(53): unsure at all Xaa locations
  Clone ID: MRT4577_81612C.1.pep
XITGHPEAGKENFTTRWRNANRLKGKVNRSLNTTRTTGRTARKTRRIFKVGKP

SEQ ID NO: 349175 - protein, 58 aa, Zea mays
  unsure (1)..(58): unsure at all Xaa locations
  Clone ID: MRT4577_81613C.1.pep
LESKEGPXMGGWGDFGCIGNTKIDXRVGYRLRRKRPGGVACPGFSMKLSNLPKILPLH

SEQ ID NO: 349176 - protein, 73 aa, Zea mays
  Clone ID: MRT4577_81614C.1.pep
TRLNDIFLSTILRTHRTTYMPMWNNQLITSYNPLSLHMHINSFTFHLYNSTCIILSLVARFLYKFCDITNLQY

SEQ ID NO: 349177 - protein, 81 aa, Zea mays
  Clone ID: MRT4577_81615C.1.pep
GAIRVSLQTRLKFTSQLVDRLLEHYEGEVTRTLGNILVHGCFATKVHRHQESLSYEEWRGQLRALLILMEKLRHRVRLPNT

SEQ ID NO: 349178 - protein, 110 aa, Zea mays
  unsure (1)..(110): unsure at all Xaa locations
  Clone ID: MRT4577_81616C.1.pep
TSGQGKGKGGGGGGKQAKNGPQDSNPRSGGXGKMGGQKGGXGGGRGGGPGKGGPGPAGGQPCPKGGGXRGGKKGGXGGGGKWPGGNRSHNKLPGTKKGKAGGAKGGGEQK

SEQ ID NO: 349179 - protein, 76 aa, Zea mays
  Clone ID: MRT4577_81617C.1.pep
GGPCVCFKSVSQLGPMACFGFKIIIRADGGFVSSPGLLGGFWRPVFFFVWVPPHNRLPLCPVGLGPPPFFFFSLPP

SEQ ID NO: 349180 - protein, 64 aa, Zea mays
  Clone ID: MRT4577_81618C.1.pep
QSLLLFRNLQGLLFRKCHQQIIILSAMLLSLISATRLDLYHSCDKFYSCNITTISLLKRDQVSK

SEQ ID NO: 349181 - protein, 79 aa, Zea mays
  unsure (1)..(79): unsure at all Xaa locations
  Clone ID: MRT4577_81619C.1.pep
MRAPSKLRIFENMQDLYETVKKAPMGRQVXAVRXRRYLAATEIDGYCQGELIKGTLSGXHDPIRGAITQAAMDLGVVQL

SEQ ID NO: 349182 - protein, 71 aa, Zea mays
  Clone ID: MRT4577_8161C.1.pep
ASVRSGVGNSLAASSWLSGFLGVYFLPARNEMEGKPMSFFCTCSRFFPRRVSLPFYSCGYVPPVRDQLFFM

SEQ ID NO: 349183 - protein, 72 aa, Zea mays
  Clone ID: MRT4577_81620C.1.pep
GSYPPAEGSYPAQGSYHPAQGSYPAQGSYSPAQGSYPAQGSYPPPPAQGSYPPAQGSYPAQGSYPPQAYPGK

SEQ ID NO: 349184 - protein, 252 aa, Zea mays
  unsure (1)..(252): unsure at all Xaa locations
  Clone ID: MRT4577_81621C.1.pep
MQGFMLCLQQVACIFSIVAAIVGSEELSEASQILNCLSDLVYWTVCACMQXIAHSFLLATLLIMALVNQTLTYPSCGIEINANXTQHKVEMDKRDGKFSPQPMAVPPVQQMTRIDQPMPPPAGYAPQPAYGQPYGGYPSPPGQGYPPAGYSQGGAYPPPAQGYPQGQGGAYPPPGSYPPQGSYPPAEGSYPAQGSYHPAQGSYPAQGSYSPAQGPYPAQGSYPPPPAQGSYPPAQGSYPAQGSYPPQAYPGK

SEQ ID NO: 349185 - protein, 98 aa, Zea mays
  Clone ID: MRT4577_81622C.1.pep
PAQGYPHGDSARAPGQGYPQGQGGAYPPPGSYPPQGSYPPAEGSYPAQGSYPPAQGSYPAQGSYSPAQGSYPAQGSYPPAQGSYPAQGSYPPQAYPGK

SEQ ID NO: 349186 - protein, 181 aa, Zea mays
  Clone ID: MRT4577_81623C.1.pep
CFFILLNKVVLSATSSMLEVWLMLYQNLISVVILLILELLRVISTEELTWKLIKVWIPVNLVFIGMLLTGMYSLKYINVAMVTILKNMTNIITAIGEIYIFRKGQNKKVWAALFLMIVSAVCGGITDLSFHLVGYTWQILNCFLTTGYSLTLKRLMDTAKQSTKSGFLNEVSMVVLNNALL

SEQ ID NO: 349187 - protein, 488 aa, Zea mays
  unsure (1)..(488): unsure at all Xaa locations
  Clone ID: MRT4577_81624C.1.pep
MGVDHLHLLKVIHSVRVVHIPHLVMIFLQLLKVTPRASMEHNFRSILSLQGVPCSQHSPPILHYVPSQRHRAPTLHRVRIPPPRGSVTNHTRSLICCILLFLFSGPCVSYMLRKRALYNDMSRYVCCAGYMPCSGKCGESRCPEFCLATEVFLCFGNSVASTRFLLQDEFNIQTTQCDNCIIXTTCLLNFLSDAIQRPVEGSCSFFRCHLDXYNLLXGFMLCLQQVACIFSIVAAIVGSEELSEASQILNCLSDLVYWTVCACMQXITHSFLLATLLIRALVNQTLTYPSCGIEINANXTQHKVEMDKRDGKFSPQPMAVPPVQQMSRIDQPMPPPAGYAPQPAYGQPYGGYPSPPGQGYPPPPGQGYPPAGYSQGGAYPPPAQGYPHGGGYPPPGQGYPQGQGGAYPPPGSYPPQGSYPPAEGSYPAQGSYHPAQGSYPAQGSYSPAQGSYPAQGSYPPPPAQGSYPPAQGSYPAQGSYPPQAYPGK

SEQ ID NO: 349188 - protein, 58 aa, Zea mays
  Clone ID: MRT4577_81625C.1.pep
TFFNSLGKDREHITPSHGLNPYYIGGQNNALCLCQTVKHIFLSTHRGKSVPRSISSLC

SEQ ID NO: 349189 - protein, 240 aa, Zea mays
  Clone ID: MRT4577_81626C.1.pep
PRVRKYREEHFAEKELIPMKIRLKGKCPLTPEEVGFILRAMGFDNRTRIYLASGELFGGKRFMKPFKTMFPRLENHSTVGPGKLEENTQGLAGSAVDYMVCLLSDIFMPTYDGPSNFANNLMGHRMYYGFRTTITPNRKALAPILIDRMEGRHIGFERIRRVMSNTHFGAPHKRVHPESFYTNSWPECFCQTDAKNHADRCPPDNINDVLESQFQSEEEMEEARASNQTDPSSQIEELTI

SEQ ID NO: 349190 - protein, 126 aa, Zea mays
  Clone ID: MRT4577_81627C.1.pep
CLENRDKAKITPSFIEKLTMLDLRVFPTVISLPEVCGKTGDPTKGAPVAPSDPDPLPSETNLPITANGELHFSDTRGESDDIVVPKNPKKRGGTEPFSFPGRASSFIESPTYESDEKISVLSKPMA

SEQ ID NO: 349191 - protein, 64 aa, Zea mays
  Clone ID: MRT4577_81628C.1.pep
KVRWMKGLVCIGRDVSAGDGACCSCNMAEGGRYIVDPQLGCPLPIQDACGVDMEMVRVCAPGAS

SEQ ID NO: 349192 - protein, 77 aa, Zea mays
  Clone ID: MRT4577_81629C.1.pep
CKIFRSNRVSSTVYVRQEHLQYFWRKTLEPGNYQFKYCNLIQKLQFTQASVKKKRRIQTPIAAHRLIIFCISLNTVI

SEQ ID NO: 349193 - protein, 48 aa, Zea mays
  unsure (1)..(48): unsure at all Xaa locations
  Clone ID: MRT4577_8162C.1.pep
XFSXXXNDIGTLXXLFGAXAGVLXTALSLLIXXXXXXPGXXLGXDHIY

SEQ ID NO: 349194 - protein, 39 aa, Zea mays
  Clone ID: MRT4577_81630C.1.pep
PAFNIMVGYNLHQATNEKKGKNFGATTNVRQKLQTDKDF

SEQ ID NO: 349195 - protein, 59 aa, Zea mays
  unsure (1)..(59): unsure at all Xaa locations
  Clone ID: MRT4577_81631C.1.pep
SWRTSLSLPPRSDDRQSXMAQDPSTSRADTGLHHVLFTHLPIRRTTGRLHGPQQIHQVD

SEQ ID NO: 349196 - protein, 71 aa, Zea mays
  Clone ID: MRT4577_81632C.1.pep
YCGWLFLDSPDPYTRSALPSACFIADSTTSEERGSARMIASLGSYGSTTSIVIIYTTSSHANMNACHRLIV

SEQ ID NO: 349197 - protein, 81 aa, Zea mays
  unsure (1)..(81): unsure at all Xaa locations
  Clone ID: MRT4577_81633C.1.pep
VGFNDEHFCRVREWPTFRFHVDXVYDQRAFSISTPTISPNFFTNTTHQSSKIIWGARSKKPKLTYPCLRPHTLPIATPKFN

SEQ ID NO: 349198 - protein, 59 aa, Zea mays
  Clone ID: MRT4577_81634C.1.pep
MNALNVGLVFLALVASAAYTTSSRCGCYTPPIHLPHPLYMPYTLYLPYQQQQQPWQYST

SEQ ID NO: 349199 - protein, 115 aa, Zea mays
  unsure (1)..(115): unsure at all Xaa locations
  Clone ID: MRT4577_81635C.1.pep
VWGFLVRPPFVGPLPSRMVVPLLVVAPVCCRIPSPFFPVFWAGLTCFFVFPVWFPLCCSCRSPFFCSVFRPSHWAEPRALCVCHCPSPWVRLLCGFXFAPSLRWWGGFFVLFPPP

SEQ ID NO: 349200 - protein, 107 aa, Zea mays
  Clone ID: MRT4577_81636C.1.pep
KGKFAGVPILKKQNRPLQLEGWKGTNTANCTWLNLHWDWEEKHDRTKTMDQSSMLREAMASGKKKKRGAHTPPLQIGVLKLAPCWGYPQKNDAIHGNAKNKHCLKKL

SEQ ID NO: 349201 - protein, 58 aa, Zea mays
  unsure (1)..(58): unsure at all Xaa locations
  Clone ID: MRT4577_81637C.1.pep
MNCIDQXRDFCKNQATGYVSFELSGGTPPKPRFNSAQVCISFPMGPKQRLFWQGPKKI

SEQ ID NO: 349202 - protein, 91 aa, Zea mays
  Clone ID: MRT4577_81638C.1.pep
HTLSNTIHTEPWVHYTHVRPWYDITCKTCILRPMKSMLHGATSNTYPRRTASVSPRTELAANPLLTIQKLYERSGMIDSTISSWGMRMGSP

SEQ ID NO: 349203 - protein, 79 aa, Zea mays
  Clone ID: MRT4577_81639C.1.pep
SMCACNGVSSIFNHFLYLLRIMLHVCFYVIVIHTCVKRVSRFVILHQHITLINHVCSSLLSSLISYLQLLLKPVLLDGL

SEQ ID NO: 349204 - protein, 197 aa, Zea mays
  Clone ID: MRT4577_8163C.1.pep
YRKKKISKKMDTVSFEEKIEIRHLTISKNVEINQYSLDCLQVCRQNWAATSLQFATTQEKPVTYSFVNPSGMFIWQKDLLVTEKKNNTPAVDTRQLVVLVLQVSFIGSLKTPVRVILPAIQNLRLLSADILLGSDTDLGCILLYIYLRSHFTSDKNRAHAVSAILSNLSENDKDHCCSVPNDYQEDPISQNNKQKMF

SEQ ID NO: 349205 - protein, 171 aa, Zea mays
  unsure (1)..(171): unsure at all Xaa locations
  Clone ID: MRT4577_81640C.1.pep
TRAAXAPXKKPGTQRNGAGXPRYATAAPTAGAQKKAPRASKKPAQKPKPAAAAAXPPDTSDEHAKRDGXDRRXNRPDGRXDRXEAPEHHTGEAXGDXGDDPKGPRKKPEDGAKXQAHEPXQARRATPGAAGAANPEAGNKPRANRGPEAATAKTEARHPDGNTRNHXGNSS

SEQ ID NO: 349206 - protein, 72 aa, Zea mays
  unsure (1)..(72): unsure at all Xaa locations
  Clone ID: MRT4577_81641C.1.pep
VPPHKLGGINLSPRSALITGFRNDSYHGTTKNYRRRTTYTTXKKAKKKKKINRVLCVVTLLXANLQISSHCG

SEQ ID NO: 349207 - protein, 41 aa, Zea mays
  Clone ID: MRT4577_81642C.1.pep
THFNYCTNINSKVLIKYLIQGALSASFLLTLDWVPFLVITT

SEQ ID NO: 349208 - protein, 45 aa, Zea mays
  Clone ID: MRT4577_81643C.1.pep
FMIAGGRANHRGGEVYMRLPLNQPPRQGVQNWSIWAGGDEAELSP

SEQ ID NO: 349209 - protein, 91 aa, Zea mays
  unsure (1)..(91): unsure at all Xaa locations
  Clone ID: MRT4577_81644C.1.pep
PVRSSGSHHASGAAHLSGGHVHPAVTFGALLAGRLCLVRSLIFWAAQLLGAVAXALVLRLATGGMHLPEFALAGAVTVWSAAVLDAAIAFG

SEQ ID NO: 349210 - protein, 98 aa, Zea mays
  Clone ID: MRT4577_81645C.1.pep
RLIELGWKTLELFALTHIFSRIEVAHQEAVALKRQEELIREGGGGGLAEIELKAKRSAGEKEKRAKKKQVNIFLVQACHPHPIIILFLLPFLAYFIYK

SEQ ID NO: 349211 - protein, 185 aa, Zea mays
  unsure (1)..(185): unsure at all Xaa locations
  Clone ID: MRT4577_81646C.1.pep
EEXXGXGXXEPXXXXKEXQRXNXAXXXEKGXXXQGRRPXXXAEXSXRXXXXKATGAPGHXAKXXXXXAXEXXXKSXEXXRRNRTXQXXXXKXGEKXEGXXXXXXXAXXKXGTXTPTXXXXXXQPXEAEXXXDXRXXXXAXGEAXERRXXEEXAPXXRNPTXEXKQKEXXPDNXGKPAXTAADSTN

SEQ ID NO: 349212 - protein, 76 aa, Zea mays
  Clone ID: MRT4577_81647C.1.pep
ISSKIVRRRSNNNYIGWFCDDPKKKENTNQRIIYIITLRNLSLSHVLSSLHRIYPPLVCIFGGDLRVRPRVRPRVR

SEQ ID NO: 349213 - protein, 42 aa, Zea mays
  Clone ID: MRT4577_81648C.1.pep
KFSGIPHQVVSITWHSFLWGFNPFIFNVAEQGLKVVLDTRHA

SEQ ID NO: 349214 - protein, 66 aa, Zea mays
  Clone ID: MRT4577_81649C.1.pep
CQAFLVSIHLIIEVASSKLLVYLVTKILSLIWNQGQVTNLDAKTMIRHPLPFGLQKIMVLDQSPSG

SEQ ID NO: 349215 - protein, 84 aa, Zea mays
  Clone ID: MRT4577_8164C.1.pep
FLQKGIKVVEGKAGQLGKGVTVTRDKSKVPVTSEGPFFKRSLKNLPKKRLNKPNVRVWLRVVPANKAPSVYELRFSTFAKHEEE

SEQ ID NO: 349216 - protein, 96 aa, Zea mays
  Clone ID: MRT4577_81650C.1.pep
KQKRIFFSLSHTNFLGVSQPLIPWVFFCGSGFFFCARVMPSLLFQLFVFFARQISLGCCAGVTFWLILGPIEYLILRYLQYSKSFITIRNLARSTQ

SEQ ID NO: 349217 - protein, 98 aa, Zea mays
  Clone ID: MRT4577_81651C.1.pep
SHTNIDCSVIMVREEPRCCRMALLVALSESLVAHGRRVHTPSVRPSAGSLTYSLQSQNLKEAQTKYKHLMELSLNLSKHASSSLYELLATCIVTYQRR

SEQ ID NO: 349218 - protein, 56 aa, Zea mays
  Clone ID: MRT4577_81652C.1.pep
KPTAACAYTYITFNASLSLCSFLMLDEKHSCFLFNMSPFLLLLLTFNTDIFFFFFV

SEQ ID NO: 349219 - protein, 217 aa, Zea mays
  Clone ID: MRT4577_81653C.1.pep
DDELHLAVAHASAHASGREVAASLHRSLAKFIVPDNPEKILSLVAAKASHHRALGSADLTCALQACRGRGNRWPLVLEIHATSVVRGLGADRLIGNLLIDLYAKNGLVWQARQVFKELSSRDHVSWVAMLSGYAQSGLGKEAFRLYSQMHWTAVIPTPYVLFSVLSACTKGKLFAQGRMIHAQVYKQAMCSAGFVPNALSAIHSVIKTTFKRCLNYV

SEQ ID NO: 349220 - protein, 163 aa, Zea mays
  Clone ID: MRT4577_81654C.1.pep
GLIQTRSIYQEVLEHITSINQQKIMQVQYKIPDHVHISTECQQLIARIFVANPMRRITMKEIKSHPWFLKNLPRELTETAQGMYYRRDNKVPSYSDQTSEEIMKIVRDARTMPKSSRSGYGWSAEYSDEEEKEEEHRLEEDEYDRRVKEVHASGELRMDTLHI

SEQ ID NO: 349221 - protein, 366 aa, Zea mays
  unsure (1)..(366): unsure at all Xaa locations
  Clone ID: MRT4577_81655C.1.pep
MDKYEAVRDIGSGNFGVARLMRNRETRELVAVKCIERGHRIDENVYREIINHRSLRHPNIIRFKEVILTPTHLMIVMEFAAGGELFDRICDRGRFSEDEARYFFQQLICGVSYCHYMQICHRDLKLENVLLDGSPAPRLKICDFGYSKSSVLHSRPKSAVGTPAYIAPEVLSRREYDGKLADVWSCGVTLYVMLVGAYPFEDPDDPKNIRKTIQXLRLQQIMQVQYKIPDHVHISTECQQLIARIFVANPMRRITMKEIKSHPWFLKNLPRELTETAQGMYYRRDNRVPSYSDQTSEEIMKIVQDARTMPKSSRSGYGWSSEYSDEEEEKEEEHRPEEHEEEEDEYDRRVKEVHASGELRMDALHI

SEQ ID NO: 349222 - protein, 335 aa, Zea mays
  Clone ID: MRT4577_81656C.1.pep
MATTAPLLSPQRACPTHLRRRLSPLHLVFPLDASARRLRLRRAPPPCSAKFGKFDASDAPAEAEEAGGATDGGLAQPVEEDDSCLPSDLEGAIRQSGKASADFVNSGGMRAIAELLIPQLEFLNEEGAQAELWALSKIFLDTLVQETGQKVTAIFPDAGAAALLKHQWKDAQFKCASLGDRKPVGPEDEVAVMIIPDHQMLEAVERITSQLSDDPIRPLVMWNPRLVSGDVGVGFNVRNLRRNFLSTFTTVYSMRPLPTGAVFRCFPGQWKVFYDDPNRPNRYLLARELTSRPDATDIERIFGGADEQSEEAPSLMNNVMGVFSSVSRFMRVISK

SEQ ID NO: 349223 - protein, 69 aa, Zea mays
  Clone ID: MRT4577_81657C.1.pep
SYQKLLVWAQILLRGKIEKNFRFFYLEKVFAFGINLLRRAKGQTQGGKCPRKFQNGKNNGFLPEKIVHQ

SEQ ID NO: 349224 - protein, 87 aa, Zea mays
  Clone ID: MRT4577_81658C.1.pep
RSSCYRSDRARWHYESSEPDWNPRPVSRPSSLCIKHPLVRALTGSAREMTNRTTQDKIILWTLDLAAEGILVGGTIALVLTEVTREA

SEQ ID NO: 349225 - protein, 168 aa, Zea mays
  Clone ID: MRT4577_81659C.1.pep
MASAVVVDAGDAPEPTVRNLLDQESLKWVFVGGKGGVGKTTCSSILSVLLAGVRSSVLVISTDPAHNLSDAFQQRFTKFPTLVRGFTNLYAMVNIQKSKISSIIFSVLRLQAFNPPFLRGRLHLTALPNSVVLVRIGWAGFVSWLRPWSAEVYMAVQNAVLHIEWSLK

SEQ ID NO: 349226 - protein, 44 aa, Zea mays
  Clone ID: MRT4577_8165C.1.pep
YLNVSNVRCFENKFLFSYISMIHIDSLLVTTRIQSRSFVLSDEY

SEQ ID NO: 349227 - protein, 101 aa, Zea mays
  Clone ID: MRT4577_81660C.1.pep
RYYVRGFLFIEGPAKGAFVQGAIIGDTGGFSRHSFGIRPAINFNLVLRKKPIEVGWVGHKLGFFKRDARPSVLSTFLASPGLLALVLVLELGADFLFFFFF

SEQ ID NO: 349228 - protein, 69 aa, Zea mays
  unsure (1)..(69): unsure at all Xaa locations
  Clone ID: MRT4577_81661C.1.pep
PPALVVGSFPAGLALFLSGRVXVSGXRGRVRCVVRAVLALWWCSPRRRVRRRPGVLVLAGGGCRPSSPG

SEQ ID NO: 349229 - protein, 119 aa, Zea mays
  Clone ID: MRT4577_81662C.1.pep
LSVLGTFLVWSRVFQFNLPTPPIFGAAASDYSISQLHVRVDDSDVGTRGCLPSLDPSALLRTWMSLWWTEAVVPRCQRSRPSMATLIKPTLISFPDAIVSKRHTVLALSPAGLEDPNPL

SEQ ID NO: 349230 - protein, 146 aa, Zea mays
  Clone ID: MRT4577_81663C.1.pep
MASLGRPERFQSEGALNLVRDLLGWSAPGLARRIRAGAAPLGDLVAGELVLFTSYISCGLALPISPFFLLLLEEFELQLQHLTPHSILHAAIFVHLCEMFVGVAPCTSLFRHFFVLVKSGKTRDHIGAYYFQMRPDPAVVYISTQF

SEQ ID NO: 349231 - protein, 96 aa, Zea mays
  unsure (1)..(96): unsure at all Xaa locations
  Clone ID: MRT4577_81664C.1.pep
VATVLLRRMTSPMHARKAKLKTHFISAKANSSITSPRAASSCWLPPLPPPSSSYSASAPSTLPRHAAPEQAPLPPLPLSXAPRLQRPSPPTTPTSW

SEQ ID NO: 349232 - protein, 54 aa, Zea mays
  unsure (1)..(54): unsure at all Xaa locations
  Clone ID: MRT4577_81665C.1.pep
ISFSSTYGEAVYHSRWSWDSRDVLHSITVCADRDFPEAPMLNAGQSTHRFRGIX

SEQ ID NO: 349233 - protein, 44 aa, Zea mays
  Clone ID: MRT4577_81666C.1.pep
GPLCPVELMSYLLKSDVSGIYLTVHLSDAGLLIEKQASVEIYCQ

SEQ ID NO: 349234 - protein, 58 aa, Zea mays
  Clone ID: MRT4577_81667C.1.pep
DRTSIFIYLTPSSSTLYQQGTNKKDTLFGCYDSVLPVIDFCYFPLGKLKCIRKTVFPN

SEQ ID NO: 349235 - protein, 30 aa, Zea mays
  Clone ID: MRT4577_81668C.1.pep
LIVGKGDRCGHLRYYSSYRKKNVMKGHSVR

SEQ ID NO: 349236 - protein, 91 aa, Zea mays
  unsure (1)..(91): unsure at all Xaa locations
  Clone ID: MRT4577_81669C.1.pep
MACPLDQAIGLLVAIFHKYSGQXEGAKHTLSKKELKELIQKELTIGSKLQDAEIARLMEDLDRNKDQEVNFQEYVHFLGALALIYNEALKG

SEQ ID NO: 349237 - protein, 134 aa, Zea mays
  Clone ID: MRT4577_8166C.1.pep
RTGAAACLVAYLAFPALCDKGLLPPTSKDKSQLDIPLDGLTPLRLRDMVFSPTTTHANMTECLKCLVDATRSCSGVIFNTFRDLEDSDLQRIANGVVGVPIYPVGPLHKISPCTEDSLLAPDRACLEWLDKQEA

SEQ ID NO: 349238 - protein, 41 aa, Zea mays
  Clone ID: MRT4577_81670C.1.pep
NPPCPWPQKKKKKKKKKKKKKKKKKKKKKKKKKKKKKKKKK

SEQ ID NO: 349239 - protein, 64 aa, Zea mays
  Clone ID: MRT4577_81671C.1.pep
RPTSITLLTVAHTVWTVEHPLLPNLMRLRCIRFSPAGLFTSRRPPIGFSNFFAFLFRNGTRLVP

SEQ ID NO: 349240 - protein, 51 aa, Zea mays
  Clone ID: MRT4577_81672C.1.pep
LVSSPNRYVSETELTEGPAWLGRTFDFLYFHRSKKTSAPLIQHAPSKLPPI

SEQ ID NO: 349241 - protein, 182 aa, Zea mays
  Clone ID: MRT4577_81673C.1.pep
MGSGKASSPPGPTAGGRGSPPGAAVCCMCGDRGLLPELFRCSACSVRSQHTYCTDRYPKVESYGVCNWCLRADGGVASTSNSPRSAGKAAVQRPAPHGGDKIGIGTSPKAAARGDFASSNLSKPIKKQPQQHAQRLLLRRSASDPGSRVVRTDHDAPPSPGVTTRGRPRVRRYKLLEEVITS

SEQ ID NO: 349242 - protein, 58 aa, Zea mays
  unsure (1)..(58): unsure at all Xaa locations
  Clone ID: MRT4577_81674C.1.pep
MGSGKASSPPGPTAGGRGSPPGAAVCCMCGDRGLLPELFRCSACSVRSQHTYCTXSVP

SEQ ID NO: 349243 - protein, 183 aa, Zea mays
  Clone ID: MRT4577_81675C.1.pep
MGSGKASSPPGPTAGGRGSPPGAAVCCMCGDRGLLPELFRCSACSVRSQHTYCTDRYPKVESYGVCNWCLRADGGVASTSNSPRSAGKAVVQRPAPHGGDKIGSGTSPKAAARGDFASSNLSKPIKKQPQQHAQRLLLRRSASDLGSRVVRTDHDAPPSSPGVTTRGRPRVRRYKLLEEVITS

SEQ ID NO: 349244 - protein, 79 aa, Zea mays
  Clone ID: MRT4577_81676C.1.pep
RGYCYWVPLSISYFDRKLTHLMFSLMITITQYIACIVLHTWWKCDLWGGRYTRYCVSYTPVQRPTYHDRPPKSNTLSML

SEQ ID NO: 349245 - protein, 53 aa, Zea mays
  Clone ID: MRT4577_81677C.1.pep
LILTFCWCVWYFASWNMNFTCSDGITMPYVTLFYLLLNIRIYPSSIFNRINSI

SEQ ID NO: 349246 - protein, 103 aa, Zea mays
  Clone ID: MRT4577_81678C.1.pep
TCSPSVLLEPVAPSCFSAILRLRLSIQTPSALSPTYPAMFFQEVQAQTIKGPPQSLLKISPKADLFLTGPNVTSLLDDRQYSPQSLIRNTLSDRPCHARPSCC

SEQ ID NO: 349247 - protein, 69 aa, Zea mays
  Clone ID: MRT4577_81679C.1.pep
KTLLSVSLLSNIFGFSYVIHIIKPFCSNSVFYSSLSVSLHHDFTLCFVFEALGFIGFKSLWWPWFILWY

SEQ ID NO: 349248 - protein, 184 aa, Zea mays
  unsure (1)..(184): unsure at all Xaa locations
  Clone ID: MRT4577_8167C.1.pep
ILGSTHAYAHSSAASQTDGQVPGDKTAGHHDEALSTFFSQTGAGKHVPRAIFDELEPTVIDEVRTGTYRQLFHPEQLISGKEDAANNVPRGHYTIGKEIVELGLDRIRTLADNXTGLQGFLVFNAVGGGTGSGLGCLLPERRCVEYGKKYKLGFTECPFPQGSSFWWEPYDSVLFTHLLLERTD

SEQ ID NO: 349249 - protein, 128 aa, Zea mays
  unsure (1)..(128): unsure at all Xaa locations
  Clone ID: MRT4577_81680C.1.pep
PAGRPPYTGEKDPPSPPHPAPPMXPSPPALPPPPGPRCASSHPLPTVSPSPXPSPPPPPXPSPPPSPSSASQPGPRPPLPHPPPPRPRPDLSTRSNCPPRYATSPNSFFPPRTRAPGTSSSLPMSRAC

SEQ ID NO: 349250 - protein, 48 aa, Zea mays
  unsure (1)..(48): unsure at all Xaa locations
  Clone ID: MRT4577_81681C.1.pep
SRIYXXXYIXXXXHLVXXHMHXXEHXMMNKVMPTLGQKNKHTYDDALH

SEQ ID NO: 349251 - protein, 174 aa, Zea mays
  unsure (1)..(174): unsure at all Xaa locations
  Clone ID: MRT4577_81683C.1.pep
SLEKLHFALGILGXGCVQEIGVENMKPVHEKWIRNMADFKNEIPVFKGIAEVIKIVSSYKIRTGIVTSKTRQEFINDFKPFGLHSYFEHSICVEDTIKHKPHPEPLVTCLKRLNIDAQEAIYIGDSVYDLQCAKQAGAKFGLALWGAKTRKGFEVADYIFQTPHEILSLVKRDS

SEQ ID NO: 349252 - protein, 315 aa, Zea mays
  unsure (1)..(315): unsure at all Xaa locations
  Clone ID: MRT4577_81684C.1.pep
SFHPSSRSSSISVKLRLDHAFVYPQPDSEDTCSHTWKTLSNYVFEDDDELVRFAGEEVILEPKEDEVVVLKSFFKVGLXIPLYEMIGDVLKKFKIYLHQLTPNAIVRLSVYIWTLRSQXKVPIXEGFYRVHGLHYQTKARSDGLHKNFGCYNFAYRKDTKAPVIGYRTKWPTGWTNEWFYVKGDEKKREKLMSMVMSPLRLSFGMTRPLCNMXSWGPPTXTEVEFRVVAEHIGTKDLVQEYLANRAFPTSGWWGMQKKKEEGKKYELVRLPYRFKFQKRSSKPCTEWLELIETMCNEILGNYTKKEDQLMTAAFG

SEQ ID NO: 349253 - protein, 124 aa, Zea mays
  Clone ID: MRT4577_81685C.1.pep
GIPKEEEFKLMYGMLFSIRSFVSKRSPLDMKDGFLAFQTSRYKLHYYETPTGIKVVMNTDLGVGPILDVLHHIYSALDVELVVKNPLCPLGQTVQSELLRSRLDSYVRSLPFFSGQAGLRKPST

SEQ ID NO: 349254 - protein, 78 aa, Zea mays
  unsure (1)..(78): unsure at all Xaa locations
  Clone ID: MRT4577_81686C.1.pep
MAASHRTAGPGPSDGSSAGARKKLQLTNEQSTLLEDSXRAHNILSNAQKQELARQVDLSARQVEVWFQNTHVQITCFA

SEQ ID NO: 349255 - protein, 95 aa, Zea mays
  Clone ID: MRT4577_81687C.1.pep
LSTQGTRAAWAAHIQTTPTQSPPTRAGLQLEPDERRERVTIRAASGPARGNVGGRAELSSALVISLSTGVSLFLGRFVFFNFQRENVAKQVPAQN

SEQ ID NO: 349256 - protein, 857 aa, Zea mays
  unsure (1)..(857): unsure at all Xaa locations
  Clone ID: MRT4577_81688C.1.pep
MSDFVGSRYTKQEDFHVLLSKKDPGEPPEHKHVLWMAHWTKASSNNGSSNPLEGTTKGTTTKDSETLPYEFTESTVAKRLMVGVSHGSASMQHDRQFNSSVWGMARHISNELGPKNSEHVDGSFEKFVKKDAVNLRARAVVSETYSVHKLSELPLDFQHLGDSDDPSPDWSHFXXIKVXARRGWLPVTARPVGAPATAPAQARGRSSNSPMSSRRCSRTPSAPTTYSPXQKQELARQVDLSARQVEVWFQNTHVQITCSXAGEFDPILNGQAGFHPDNPGPSASHVMALSSQEYMMHSHQTADENMDTCKPAEGFASRVEDHAGFNSDPPGPKLKGQLLDTMSCSCSKDDNNSADCPIDEQHTSHYFANSKHELPSVSNKKKFKFAGNNHNRIVASASHDLKTKRSAVHKQQSAAEAVFCAPVLDSEFQNEPITISNIDKKDGENFHDMYKCLGKAVSCPLLPYEHRHLNTQRTESAENLKVCTLPDHQTANKLTEKSHGELLTYGPKPKKNTGSCNRRSLYLFEKLTIPSKSQSAYPKNSASSGKSSGFGVCMYGTNIGSQLFGAQNQSSSKTETLHSDALIGSKSSAGIASLSAQKDNGCPAPAPAPAPDEAKSEQLAAPSSNTKQGGESAYSKEDGSHNLNEGHDVSSKAAIGSKQPCMPGAGITNLDLILSQMSRMRNQIPSGGVTQPPIGAEPSDRWLKRLQLGVPDPDVPGSKTKRPKVGDSPPPPRQINRSFDVALPCNRAGSDTGAIDRGKEEQSLNGGGKVQGRAPPIPEKSVSRWIGRWCQGGTPVFREGPGQQGRQATKPAGRLSEELEGQFFPSTAAMAMMGRAMHKLRPCEQQQKGPFVVWKID

SEQ ID NO: 349257 - protein, 82 aa, Zea mays
  Clone ID: MRT4577_81689C.1.pep
LSLCPLLLSSILLIKCFCIHQYLDQLDCPVMLHCNQYRYYIVFGTLLTDLQHHVSSCKSKTLIRIFGDSSSSGHKKKKKKGP

SEQ ID NO: 349258 - protein, 297 aa, Zea mays
  unsure (1)..(297): unsure at all Xaa locations
  Clone ID: MRT4577_8168C.1.pep
MSQQPAPAPPYRPYRQVREATPHSRAISCVRFSPCGRLLATASLDGTVALLSPSSLAVIAVLRGHSDGVSDLSWSTESFYLCSASDDRTIRIWDIRXSSPVAPRQPPSPAQXCVRVLKGHTNFVFSANFNPQTSSQIASGGFDCTVRIWDATSGRCTRAIEAHSEPVTSVHFIRDGSIVVSGSHDGSCKIWDAKSGACLKTVIDEKKPAVSFSMFSPNGKFILVAMLDNSLKLCNFATGKFLKVYSGHVNRQYCIQSAFSVTNGKYIVRVSCHQSENKIASGGLHNDRTVRLWVQDS

SEQ ID NO: 349259 - protein, 56 aa, Zea mays
  Clone ID: MRT4577_81690C.1.pep
TVTTGIYRVPGPRGDRKGTPLNSRIPSSSALRGQVTLDHCFYFRIKTGIGSPYNPG

SEQ ID NO: 349260 - protein, 41 aa, Zea mays
  Clone ID: MRT4577_81691C.1.pep
NCSYVSTRVEKITLVLCSNPQRFSIWILLLEWHLLPKAISP

SEQ ID NO: 349261 - protein, 55 aa, Zea mays
  Clone ID: MRT4577_81692C.1.pep
VASRFCWVTLLFWQSFRCRSAACGLCLCGRLVALRRRMQAWFSLVVVGGPWSNGR

SEQ ID NO: 349262 - protein, 68 aa, Zea mays
  Clone ID: MRT4577_81693C.1.pep
VSTDHYLYRGEIVYYVDTHHEDVARFPHYAGSRFELHNDVYNPPFKLPAIDISLSTVSLACTTSGLTA

SEQ ID NO: 349263 - protein, 34 aa, Zea mays
  Clone ID: MRT4577_81694C.1.pep
QTSYASLKAPIMGALIISYDETDSTGLTDALDDT

SEQ ID NO: 349264 - protein, 42 aa, Zea mays
  Clone ID: MRT4577_81695C.1.pep
GRFFFFFFSKNLKMHWISYLWNAAGRLKILGARYATILIICH

SEQ ID NO: 349265 - protein, 279 aa, Zea mays
  unsure (1)..(279): unsure at all Xaa locations
  Clone ID: MRT4577_81696C.1.pep
HLARCYSSAVKGGTSIAGVCDIIAVASGKGGVGKSTTAVNIAVALAKEFKLQVGLLDADIYGPSIPTMMNLHAKPELSEDMKMIPIENHGVRCMSIGFLVDKDAPIVWRGXMSALEKMTRGVAWGDLDILVVDMPPGTGDAQLSMSQRLRLSGALIVSTPQDIALIDARRGANMFRKVQVPILGLVENMSCFKCSKCGEKSYIFGEAGAQRTAEEMDMKLLGDVPLEISIRTGSDEGNPIVVSSPNSASAQAYVNVAEKVTQRLKELAEERRMGPEILL

SEQ ID NO: 349266 - protein, 201 aa, Zea mays
  Clone ID: MRT4577_81697C.1.pep
MKMIPVENHGVRCMSIGFLVDNDAPIVWRGPMVMSALEKMTRGVAWGDLDILVVDMPPGTGDAQLSMSQRLRLSGALIVSTPQDIALIDARRGANMFRKVQVPILGLVENMSCFKCPKCGEKSYIFGEGGAQRTAEEMDMKLLGDVPLEISIRTGSDEGNPIVISSPNSASAQAYVNVAEKVTQRLNELAEERRMGPEILL

SEQ ID NO: 349267 - protein, 451 aa, Zea mays
  Clone ID: MRT4577_81698C.1.pep
AEAKRLMRLAGPIVASCVLQNVVSMASIIFVGHLGELHLAGASLATSLANVTGYSLLTGMASALDTLCGQAFGARQHHLLGVYKQRAMVVLGLACVPIAVVWACAGRILLLLGQDPQIAAEAGAYARWLVPSLAAYVPLQCHVRFLQTQSVVLPVAASCGATALCHVLVCWALVYKAGMGSKGAALSNGVSYAVNLVVLALYVRLSGACRETWKGFSREAFKDLWRFAELAWPSAMMICLEWWSFEVLVLLSGLLPNPQLETSVLSICLNTGALLYMIPLGLTYSISTRVSNELGAGQPQAAKMAAKVVMYMALSEGLVISLTMTLLRNIWGYVYSDEEEIVTYISKMLPILGISFFIDGLHSSLSGVLTGCGKQKIGAAVNLGAFYLLGIPVAVLLAFVFHLNGMGLWLGIVCGSATKLGFLLFVTCSVDWDKEAVKARYRVLGSSLPLA

SEQ ID NO: 349268 - protein, 114 aa, Zea mays
  Clone ID: MRT4577_81699C.1.pep
MELVSGKVVPGCSNAGNPFHECTAICFERVNSPDVHKKEKKLFGFGKRTPSRDQTPPASPARGSRSPLASYFAKKKVESSAESSPSSYDHTNGNFLSRLSPLQGRKIEPSSNVD

SEQ ID NO: 349269 - protein, 38 aa, Zea mays
  Clone ID: MRT4577_8169C.1.pep
MGVLLLLVLLLDAGVVLLVVLLLGGAPCSCWCSTTGAC

SEQ ID NO: 349270 - protein, 332 aa, Zea mays
  Clone ID: MRT4577_816C.1.pep
MGTPSQGSATVTAARVDLCALDLMPVFAKEMIAGGVAGAFSKTAIAPLERVKILLQTRTNEFGSLGVLKSLKKLRQLDGVMGFYKGNGASVMRIVPYAALHFMAYERYRCWILNNCPSLGTGPLVDLLAGSASGGTAVLCTYPLDLARTKLAFQVNSSDELSRALKRGSPQPAYGGIIDVFRCVYSEGGVRALYRGVGPTLMGILPYAGLKFYIYEGLKVHVPEDYRSSVTLKLSCGAAAGLFGQTLTYPLDVVRRQMQVQNQQQHEQFGAPRITGTFQGLVSIKQTQGWKQLFAGLSLNYIKVVPSVAIGFTAYDTMKHLLKIPPREKNKV

SEQ ID NO: 349271 - protein, 181 aa, Zea mays
  Clone ID: MRT4577_81700C.1.pep
STHSSSVVGRGACWGWRGAPWQCSDGEKRCGAYPRAKMPVPRWRGMSSVVLRTLLCWSDLISNPGGALNSCGGPDAEVEATTMFGWALTLRDAALEACAAAAVLRATARWGGGAATVVQRGGRGAEMDAATIGMPCGQHWLVATLGFLAPWWDGLGCVGHKNRRSARPTQSGLGGWRRVAC

SEQ ID NO: 349272 - protein, 74 aa, Zea mays
  Clone ID: MRT4577_81701C.1.pep
YFFFFFFFFCGFFNFFLGDQNIYIFIYKSKPTPKKKPKTKTYYNQTIKIPNTKAPDYLHRSLVRHHALHHVRPN

SEQ ID NO: 349273 - protein, 58 aa, Zea mays
  Clone ID: MRT4577_81702C.1.pep
ITTLNACSDRGRDVVALPTGGCTRQVTAAALICGEHPFNCTIIEPACLHLMYEALLMN

SEQ ID NO: 349274 - protein, 79 aa, Zea mays
  unsure (1)..(79): unsure at all Xaa locations
  Clone ID: MRT4577_81703C.1.pep
HASDNTNVDDHKHKLLAQKYYLIXKTQXAVCTNPNLSLDMQXMFHFKLSNLPINIFITRLINRCIFTVLYFAVYNKFII

SEQ ID NO: 349275 - protein, 57 aa, Zea mays
  Clone ID: MRT4577_81704C.1.pep
LYFNLRQKTWRVEILGRHTLPQTFLYIHTGGTHTLFLTELGASTSYAWDGRFRFHKP

SEQ ID NO: 349276 - protein, 74 aa, Zea mays
  Clone ID: MRT4577_81705C.1.pep
CQFTHQTPVKLSRHRGRLDRSERDPSRGFQIDVTTFSVRGIEGVLNHSYSVPGVKLHLESLQLDPCLESGVRCY

SEQ ID NO: 349277 - protein, 184 aa, Zea mays
  unsure (1)..(184): unsure at all Xaa locations
  Clone ID: MRT4577_81706C.1.pep
TFYLFCLQEPQPIDWEYYRKGIGSKVVDMYKEAFESIEIPKYVDTVTPQYKPKFDAVXAAVALTLLYFKVYCLKIYSVFCVFYLELLYQHFLDECIQFFSSRINSLXLLMCFFLVLIFMLPVXAELKEAEKEHQKESERIEKELAEMEEMRKKISTMTADDYFEKYPELRKKFDDEIRNDNWGY

SEQ ID NO: 349278 - protein, 35 aa, Zea mays
  Clone ID: MRT4577_81707C.1.pep
QAGPELEESHPRGGGGVKNCAILQQLVTVTLAYHE

SEQ ID NO: 349279 - protein, 219 aa, Zea mays
  Clone ID: MRT4577_81708C.1.pep
GEPQLVHLRDLLAGGRRRGHLGRRRRRPPQQGGPHQERQADQVGAAPQGAARRRVAAGRTDAEAGVVAAAGESPVVRSRFYAFIKAFLVVSLLLLAVEVAAYFNGWDLAASALALPAIGLESMYASWLRFRATYVAPGIQFLTDACVVLFLIQSADRLIQCLGCFYIHIKRIKPKPKSLALPDAEDPDAGYYPMVLVQIPMCNEKEVYQQSIAAECTLT

SEQ ID NO: 349280 - protein, 69 aa, Zea mays
  Clone ID: MRT4577_81709C.1.pep
YGCLRRSPQCEVICPKISPLCVVTPLGLSLFFFFFFFFLLFFFFFFFFFFFFFFFTLESGNVTSYFWLA

SEQ ID NO: 349281 - protein, 87 aa, Zea mays
  Clone ID: MRT4577_8170C.1.pep
MDWMYANCSTTAQRGALDWWKKFHDASKPIFEELYESVANGTETRRSLTKNSAPNYRAELEAELAEIANHEMWRTGKSVRKLRPENQ

SEQ ID NO: 349282 - protein, 45 aa, Zea mays
  Clone ID: MRT4577_81710C.1.pep
SREVRQALLHDRAGLRGQGLLAFVIEDCLQRHVLDVHHRLLRTRG

SEQ ID NO: 349283 - protein, 136 aa, Zea mays
  unsure (1)..(136): unsure at all Xaa locations
  Clone ID: MRT4577_81711C.1.pep
SGSTFQLLLLHLQGAEHGLLHLPSPAASPSSPSRRRFWPAPRARTPPPASSPPPPGRIPSLLRPHSSASSEQSSSPPAQCLLRPPSPPPXLXTPAPWPESPESTRRGWPGTRGAAGGDTTPTPAASGAPPCTAACA

SEQ ID NO: 349284 - protein, 81 aa, Zea mays
  unsure (1)..(81): unsure at all Xaa locations
  Clone ID: MRT4577_81712C.1.pep
GRRTLVTVPSSESSGVGXTPLLNQYVHKQLNNHXKATIGADPLNKEVQFADRLFNLQIWDTAGQQRFHSLAGAFYRGAHCR

SEQ ID NO: 349285 - protein, 253 aa, Zea mays
  unsure (1)..(253): unsure at all Xaa locations
  Clone ID: MRT4577_81713C.1.pep
AVVTTQSTRGPEDLTADGASPVKVSTSQDILAGTSANGVASFDNSALYQTARIFTGPSSYTFPIQKQGRHFVRFYFFPFTYQSYDLSLAKFTVSTQDVLLLSDFQQPDKTAPLFKEYSLNITRDTLVISFKPSNGIAFVNAIEVVSVPDDLITDDAQMVNPVQQYSGLSTQPLETVYRVNMGGPKVTPDNDTLSRTWVTDLKYLLNPSVTKQXIMASVSTIRRVGGGATQLSAPDIVYGTATELAATNTSNAL

SEQ ID NO: 349286 - protein, 56 aa, Zea mays
  Clone ID: MRT4577_81714C.1.pep
YTPAICSVHRVRVLHFSRYLLTLVRCLEPMTKCHRQGPLTVPAQQQSVSAHDRSSR

SEQ ID NO: 349287 - protein, 156 aa, Zea mays
  Clone ID: MRT4577_81715C.1.pep
VGLLSVGQTTRLSASGKEASAQPLSVSGPHGTEDEAPRKKARLGWGQGLAKYEKQKVQGPVDPAEAVADGSPADGELKTTSPVPVPVHPVPVPVPYVAPAPPAVPVLAPAPAPYGTPGLLSAPMQCSSPVTGPPYCSSTPGDKTCEKMPNAGTNST

SEQ ID NO: 349288 - protein, 76 aa, Zea mays
  Clone ID: MRT4577_81716C.1.pep
AMPNSIDTQKKTPQNIRPQTQNLVGYLWLHATYTFDYNTTRELRMNLIVKFQQRADTDMNTPPKNGQGGNVIKGPN

SEQ ID NO: 349289 - protein, 269 aa, Zea mays
  Clone ID: MRT4577_81717C.1.pep
AYKNIVAADDFPAELRKKITRVIDVTKLKAKYGQYEAQRKLFAEHDVFLGDDRIINRLPKILGKTFYKTTLKRPVPVVLKPKARKVDGKRTKPQKKEGEVNAATPAEIAKEIEKALGSALVSLSPSTNTAVRVGFSDWTPEQIAANVEAVAGAVVEKWVPQQWRNVKSIYIKGAETAALPIWMTDELWLDEKDVIADSEGKASEKANIGKKRKNVEEQAEAAPAAKKAKKAAKEEKPKPDSNDDKLDQQISDRKTRLRSAKAKAAKASE

SEQ ID NO: 349290 - protein, 74 aa, Zea mays
  Clone ID: MRT4577_81718C.1.pep
RAGRDYEVIVPPHTVITVRILATQGTCQVPFSYTQEDILTTGEKKVTKYDDGIFRGVNSFGFKSEVTERKINGE

SEQ ID NO: 349291 - protein, 132 aa, Zea mays
  Clone ID: MRT4577_81719C.1.pep
IWCDTDDTSTDNRDTLFEVVRVGDDAGAVYGLRNLGNNHICHRLTYEGKESCLNASIPSVRKEAQLKIEEAVLLRKIYGVDYHLKDAKILNNKQRQDLGRQQVLEAGHQKQLPSRSPRSRDRIDYAGKRVRH

SEQ ID NO: 349292 - protein, 55 aa, Zea mays
  unsure (1)..(55): unsure at all Xaa locations
  Clone ID: MRT4577_8171C.1.pep
HLFSLFFLSSXTLPVWWRWYRWLCPVAWPLSGLVASPFGDLPHPLAASPPGPPVA

SEQ ID NO: 349293 - protein, 177 aa, Zea mays
  Clone ID: MRT4577_81720C.1.pep
MTAILERRESTSLWGRFCNWITSTENRLYIGWFGVLMIPTLLTATSVFIIAFIAAPPVDIDGIREPVSGSLLYGNNIISGAIIPTSAAIGLHFYPIWEAASVDEWLYNGGPYELIVLHFLLGVACYMGREWELSFRLGMRPWIAVAYSAPVAAATAVFLIYPIGGEHRELAYIASSL

SEQ ID NO: 349294 - protein, 336 aa, Zea mays
  Clone ID: MRT4577_81721C.1.pep
MSGRALKDLNVSQSADLENGKDNSVKSCITKPVLNGNKCANKEEKAPSACHDAVTNGNAAAIADVEYIDSENLVDLPDVDAALSTLAKRLDSKDWVMTCEALNNVRQLAMYHKERLQELLEPLVPLIVKSVKNPRSAVCKTALMTCADIFKAYGDLMVHSIDPLLVQLFLKASQDKRFVCEAAEAALISMTSWISPLLLLPRMLPYLKNKNPRIRAKASVCFSKSVPRLDVVGIKEYGMDKLIQIAATQLSDQLPESREAARNLALELQAFYEKSQASTSDEHEVEASASPDAESWEAFCQSKLSALSAQAILRVTSTTTKECVTSAPKEGLAVGC

SEQ ID NO: 349295 - protein, 61 aa, Zea mays
  Clone ID: MRT4577_81722C.1.pep
SASSRTTSASSGGAARTGSGATPTTPARTTVTPCSRSSGSATTRTPCTGSGTSATTTSATG

SEQ ID NO: 349296 - protein, 62 aa, Zea mays
  unsure (1)..(62): unsure at all Xaa locations
  Clone ID: MRT4577_81723C.1.pep
QQPPDLSSLQALLQTIKAQQRVQLXMLRATNSRRCIPLSXYSAQQQXLXFNQLSTLNLTTYV

SEQ ID NO: 349297 - protein, 85 aa, Zea mays
  unsure (1)..(85): unsure at all Xaa locations
  Clone ID: MRT4577_81724C.1.pep
GLTSHETASAGIFSTTKMRILMSGLDATGKTTIFYTLKLGHIVTTIPTIGXNAETAAYKNVRSSVCHVARQDKIKLLXLHYFQNT

SEQ ID NO: 349298 - protein, 71 aa, Zea mays
  Clone ID: MRT4577_81725C.1.pep
PTHPINARTRVFDGALLAMGAEGDISTRGIHSHGPNTVERLLTTRWIMPGSRHVMNGNNDFEYTHNNLRLP

SEQ ID NO: 349299 - protein, 102 aa, Zea mays
  Clone ID: MRT4577_81726C.1.pep
FLGDGGRAGARAQYPSHCLLRALSFLHRDRHRRLSLTYLGSLSWCCSAACRSGHRCGSAPACRLNPRSDPGQTRREAQSRSTAHPPWTPAPGPRSSEGPTPT

SEQ ID NO: 349300 - protein, 135 aa, Zea mays
  Clone ID: MRT4577_81727C.1.pep
GPFFFFFLKNYMYSFEFPVDDNSWRATAHVYNEHTSYRHSRQSNFILADAGWHCSFCFREIKEFVFKMKAYSHADRVKQKSFLNPDRIQKIICNGDDLFDMLPEEYTFADLFKKMGPIPKSGSAVHLPSHLLGAS

SEQ ID NO: 349301 - protein, 56 aa, Zea mays
  unsure (1)..(56): unsure at all Xaa locations
  Clone ID: MRT4577_81728C.1.pep
FLLVALFRLSLEVFGXAIKFFKWIMFLXIWRGVGFPSIGMGLVKGLMNVFIMFSQD

SEQ ID NO: 349302 - protein, 430 aa, Zea mays
  Clone ID: MRT4577_81729C.1.pep
MIAAGAASMGRAATPAPGAQSSRLPRAVSRLRLVLRSSEAAARSGSKRWIGCFRPSPSPATAAAGAAVVKEAKGKRPEVEVEPARGGGEDVWSADAETEVAQGGAFPEHLVIMVNGLVGSADDWKFAAEQFVRRMPDKVIVHRSQCNSATQTFDGVDLMGERLANEVLSVVEQRRGVKKISFVAHSLGGLVARYAIGRLYEPNSRRKSSGGESRDDVVHLNGHIAGLEPMNFITFASPHLGSSGNKQLPFLCGLPFLERRASEAAHLIVGRTGKHLFLTDNDDGRRPLLLRMVDDSDDLQFRSALRSFKRRVAYANANFDHMVGWRTSSIRRQHELPKHRLLVRDEKYPHIVYVEKEVTDNNETKAHADHYDPEEEMIRGLTQVPWERVDVSFQKSTQRLVAHNTIQVKSYWLNSDGADVINHMMDNFIV

SEQ ID NO: 349303 - protein, 69 aa, Zea mays
  Clone ID: MRT4577_8172C.1.pep
ILKTTSRARRAGTAGGANPYTETQPSPQGKPGPPGASFLNNRAGLFGNPWVRAKNLNSPLAWARAPLRF

SEQ ID NO: 349304 - protein, 462 aa, Zea mays
  unsure (1)..(462): unsure at all Xaa locations
  Clone ID: MRT4577_81730C.1.pep
MIAAGAASMGRAATPAPGAQSSRLPRAVSRLRLVLRSSEAAARSGSKRWIGCFRPSPSPATAAAGAAVVKEAKGKRPEVEVEPARGGGEDVWSADAETEVAQGGAFPEHLVIMVNGLVGSADDWKFAAEQFVRRMPDKVIVHRSQCNSATQTFDGVDLMGERLANEVLSVVEQRRGVKKISFVAHSLGGLVARYAIGRLYEPNSRRKSSGGESRDDVVHLNGHIAGLEPMNFITFASPHLGSSGNKQLPFLCGLPFLERRASEAAHLIVGRTGKHLFLTDNDDGRRPLLLRMVDDSDDLQFRSALRSFKRRVAYANANFDRIXNSFILVCVLIINAELHFLPLTCFQLTKQTDMVGWRTSSIRRQHELPKHRLLVRDEKYPHIVYVEKEVTDNNETKAHADHYDPEEEMIRGLTQVPWERVDVSFQKSTQRLVAHNTIQVKSYWLNSDGADVINHMMDNFIV

SEQ ID NO: 349305 - protein, 69 aa, Zea mays
  unsure (1)..(69): unsure at all Xaa locations
  Clone ID: MRT4577_81731C.1.pep
LIKALXPTTMLIGTPKVKNQQKEQGNTSYNHQISPSIDIHLPRRNAKTPTFTPSTLLHGSSLARFIGPK

SEQ ID NO: 349306 - protein, 92 aa, Zea mays
  unsure (1)..(92): unsure at all Xaa locations
  Clone ID: MRT4577_81732C.1.pep
LVLEHPTISRFHAVLQFRNDGKVFLFDLGSTHGSFINKNLIKKKLYTEIHVGDVIRFGQXSSRLYIFQGPSELMPPEKDLQKLRDARIQQDM

SEQ ID NO: 349307 - protein, 103 aa, Zea mays
  unsure (1)..(103): unsure at all Xaa locations
  Clone ID: MRT4577_81733C.1.pep
RPPPRRRRPPXPPRWPPLEPPPPRPPSGSSGTRTWRSRTPTAARRAPARRPAATAAPRTAAASRRAPGTRRLPARRGAGPLPPPTRTRCPPAAPAPAAARTRG

SEQ ID NO: 349308 - protein, 228 aa, Zea mays
  unsure (1)..(228): unsure at all Xaa locations
  Clone ID: MRT4577_81734C.1.pep
MRRSEVLADESITCLQKALTHLREIWELIGIPEEQRLQRTEVVKKHIKDLLDRMIAEEESLRERLLKSISICQKELSTLCSELQVKPFQEEKDTTILQLEKDLRTQVELMRKQKKERKQELKLLQEQEQELRDILCMPPCDVDSTSVPTLEELKLFRQRVATLRETXESRREEFVNIKKXIILCMEELEHSXDTSFERDVVCEDESAFCXSLENICTLQKLLKQLEMK

SEQ ID NO: 349309 - protein, 33 aa, Zea mays
  Clone ID: MRT4577_81735C.1.pep
DSLRQMARPLSLGLYLGANMNTMDCSCSHLEQP

SEQ ID NO: 349310 - protein, 135 aa, Zea mays
  unsure (1)..(135): unsure at all Xaa locations
  Clone ID: MRT4577_81736C.1.pep
ALXFSSXGGVGLAWXXXXLLXXFGGALVWGXXXLFXXVAXXGCWGXXXCXWCXCXPPLLWXSLVAXARXXXLXWLFVCAGVCXVXXCLGXXGVWLVXXRGLSFXPXXXVCXXAFFCAGGRXPVWPVFXXFXXXXX

SEQ ID NO: 349311 - protein, 35 aa, Zea mays
  Clone ID: MRT4577_81737C.1.pep
PPFTGASVAGFPVISSPTSLTFRPGQASAPIHGLT

SEQ ID NO: 349312 - protein, 96 aa, Zea mays
  unsure (1)..(96): unsure at all Xaa locations
  Clone ID: MRT4577_81738C.1.pep
RARRWPSAACPGRVPSAPPPPRRRLPXPPPPPPPARPPPARXPHPPSPPPPPPPPPRPPPRRLRAAPPPXPLAPPPAPPLPPAAAPRPSPPAAAAA

SEQ ID NO: 349313 - protein, 99 aa, Zea mays
  Clone ID: MRT4577_81739C.1.pep
SGVNRDGGTQGVVSALGGGLNLAVEIQADAGYGYGGGYTPTPTPVTPTPKPEKPPTKGPKPDKLAKEHKPSKEHGPKPEKPAKEHKSTPATFTPSSKPT

SEQ ID NO: 349314 - protein, 123 aa, Zea mays
  Clone ID: MRT4577_8173C.1.pep
EKKPAVSFSMFSPNGKFILVAMLDNSLKLCNFATGKFLKVYSGHVNRQYCIQSAFSVTNGKYIVSGSEDNCVYIWDLQGRNILQKLEGHTDTVISVSCHPTENKIASGGLHNDRTVRLWVQDS

SEQ ID NO: 349315 - protein, 36 aa, Zea mays
  Clone ID: MRT4577_81740C.1.pep
STFVTTQPHTPFFDKLNKATISDQGLAYKAYKPQAA

SEQ ID NO: 349316 - protein, 59 aa, Zea mays
  Clone ID: MRT4577_81741C.1.pep
MVILIDAIIIDVQWKTTRYFSAVIDPQGYWDHILDRNNSTISKNRENCDGIKMIIKISA

SEQ ID NO: 349317 - protein, 58 aa, Zea mays
  Clone ID: MRT4577_81742C.1.pep
LTTSSHPHSLYFHNTSLMLHSLSPLIFKEKIIYVFHPPLSPDVQTIKLPKKNELCLSH

SEQ ID NO: 349318 - protein, 181 aa, Zea mays
  Clone ID: MRT4577_81743C.1.pep
SRPAENRWLSLTSQDVGTVLAISGFGVLVYQLAIYPFLAKYFGPIKTFRPAAILSIILLTTYPFMANLHGLELKILINIASVLKNMFAATITIACNILQNTAVTQEQRGVANGISVTLMSVFKSVAPAAAGILFSWAQKHISGLFLPGDQILFLAINMVSVIGLVLTFKPFFSLPNPTRHS

SEQ ID NO: 349319 - protein, 59 aa, Zea mays
  unsure (1)..(59): unsure at all Xaa locations
  Clone ID: MRT4577_81744C.1.pep
MFSSGSDISGTIAKAVAAAARASCLKSMVVKVGVVAMQKKMAMEQSTVCNSMEIEGXES

SEQ ID NO: 349320 - protein, 145 aa, Zea mays
  unsure (1)..(145): unsure at all Xaa locations
  Clone ID: MRT4577_81746C.1.pep
GPGGVPPVPVPGRGLPIQMGPKKGAGSPKNGRDSKGQPLGVKIYGAQLPKAGAIFIRQGGPRVFPGKNVGMGKDPPLFFFINGLAKFXKYGPAKKKVSVFPYEKGPXNPPRFRARKKGFFPIRGERKKAKGGGPPDPQLGLTPVY

SEQ ID NO: 349321 - protein, 86 aa, Zea mays
  Clone ID: MRT4577_81747C.1.pep
LRPYRSEHMISIPCSLFHITTVSLYISLMTTIRLYSYRKPCNPTLLHALFPYELSVLNLMPPDLCLSLSFVISWLPLNSKWFLPSN

SEQ ID NO: 349322 - protein, 151 aa, Zea mays
  Clone ID: MRT4577_81748C.1.pep
MRKAEGQHFDPVMFIHVSQTFRVDKIFRDMLREIRKDRQSDSNSVKCLHDELKEKLRGKCFLLVLDDLWVSRENQEERAILLTVLDAGQSGSRVLVTAQKKDVAAALGAEEQIPIPDMEEEQYFSMFMHYALEGINRLVLKGIEQTSSSVM

SEQ ID NO: 349323 - protein, 39 aa, Zea mays
  unsure (1)..(39): unsure at all Xaa locations
  Clone ID: MRT4577_81749C.1.pep
SRPDLILTGHKENAKFALAMFPTTLYLLSXGKDPFVPYE

SEQ ID NO: 349324 - protein, 155 aa, Zea mays
  unsure (1)..(155): unsure at all Xaa locations
  Clone ID: MRT4577_8174C.1.pep
MRECISVHIGQAGIQVGGGGGELYCLXHGIQPDGQVPGDKTAGYHDDAFSTFFXQTGAGKHVXPRAIFVDRGPTVIDEVRTGTDRQLFHPEQLIRGKEDAANNFARGHYTIGKEIVDLGLDRVRKLADNCAGPPGFLGFNALGGGTGSGLGSLLL

SEQ ID NO: 349325 - protein, 226 aa, Zea mays
  Clone ID: MRT4577_81750C.1.pep
FNRPELLPATFPPIYRSTHTVMASSKDIQHPARPHGQQRLSMSSTLGSSLPLRNSHPRHHSHSISAGSMGGPTHRVTRRKSGSANAAAVAAAVREVGEAVLSSPPMPTASSRRHTTSRTSGTEFAGLATPPSSLPGGHRLSLMAGRKGDRDESAIDDDQNDDMDEDVDSFNKARMRRASEGQSSVKSEGKKNDLRCDKCGKGYKHSSCLTSIYGSILQNGRTRRNC

SEQ ID NO: 349326 - protein, 81 aa, Zea mays
  unsure (1)..(81): unsure at all Xaa locations
  Clone ID: MRT4577_81751C.1.pep
LLHQLYAVXGRVTRLNDXVVSFGVILMGLITGRKALDXSQPKESKHLVTWFRRTQLNKEKQNTKTNKTDKDSKKKKNKRDR

SEQ ID NO: 349327 - protein, 196 aa, Zea mays
  unsure (1)..(196): unsure at all Xaa locations
  Clone ID: MRT4577_81752C.1.pep
SDVSRTSARKAPFVIKGSSSPPAKQGADRELWLASKQALSYIYGTLPGDYGYDPLSLSEPEGTGXFIENKWLDYSEAIYGRYAMLRRGGXAXVPEIFGKMGIIPAETXVAWHKMSDIPPEYTYNYRVDSYTIFVVNMAXLMGFVEHRRLQDWYNPGSXLGKEYFLGLEKCLAGSGDPPYHGEALFNPLGFGXNEKE

SEQ ID NO: 349328 - protein, 134 aa, Zea mays
  unsure (1)..(134): unsure at all Xaa locations
  Clone ID: MRT4577_81753C.1.pep
QSVIFVNTRRKVDWLTDKMRSRAHTVSATHGDMAQNTXRDIIMREFRSGSSRVLITTDLLARGIDVQQVSLVINFDLPTQPENYLHRIGRSGRFGRKGVAINFMTSEDERMMADIQRFYNVVVEELPSNVADLL

SEQ ID NO: 349329 - protein, 299 aa, Zea mays
  Clone ID: MRT4577_81754C.1.pep
MMRCAAAALAVALIAAVAAATAAGSPAAGTCARRGAPPFLDAVGSRCPFVRIDPSPPLEVRGETVDTELNLRRRGASYSILFYAAWCPFSSKLRPIFGTLSTMYPQIHHFTVEESSATPSLFSRYGVRGFPAILLVNETTMVRYRGSKDLNSLVDFYKETTGLDPIAYIDVVEQESTGSLSSVMPWDRSIREMAKDEMYLLVAVLFIIVKVVAHFIPVVMSHLRAFLVVRVQNLNLGIRRGSNQLLERALNVLDVRRLWSKLRLSNKATDLRKGASNARAWASSFPSVSLGEPSSSRQA

SEQ ID NO: 349330 - protein, 233 aa, Zea mays
  Clone ID: MRT4577_81755C.1.pep
MASESEACSWEPHPLHPNGTEPLHRIAVDYCPEACLHERHAGEIHVTYDDRGGARWRSCCRFLPGSAVATTIRAPAGDTSGLNYNIYLSSLEGSADQDEIDFEFLGHDKRAVQTNYYVGGNGGREQIHALPFDSSDGFHHYAIAWDAAAIEWRVDGELVRRDERREGEPWPEKPMYLYASVWDASHIADGAWTGTYHGRDAPYVCSYKDVRVPTAEHSVEDAAHAPRWRSCRR

SEQ ID NO: 349331 - protein, 70 aa, Zea mays
  Clone ID: MRT4577_81756C.1.pep
ISRLQGRLPNMGRRILMVLTVALVARGAEALICIYDREPFREVYRASYSLAHSILPVICSRTKGHSDTSP

SEQ ID NO: 349332 - protein, 340 aa, Zea mays
  Clone ID: MRT4577_81757C.1.pep
ERRGHDSTGEAGREGERRCVAPPPRLRSPSSLSLPAQPRRGRRPRARARGGVRYRSSTPSDPAAPSSGSSRPRCLEAGRVILRIWKVVSYIPCLLLKVRGETVDTELNLRRRGASYSILFYAAWCPFSSKLRPIFGTLSTMYPQIHHFTVEESSATPSLFSRYGVRGFPAILLVNETTMVRYRGSKDLNSLVDFYKETTGLDPIAYIDVVEQESTGSLSSVMPWDRSIREMAKDEMYLLVAVLFIIVKVVAHFIPVVMSHLRAFLVVRVQNLNLGIRRGSNQLLERALNVLDVRRLWSKLRLSNKATDLRKGASNARAWASSFPSVSLGEPSSSRQAYHL

SEQ ID NO: 349333 - protein, 93 aa, Zea mays
  Clone ID: MRT4577_81758C.1.pep
PTPTTSFILLSYRPLQIASRSSTRCLVNLSLWPIDVSIANLNTQARLTQLHEYLLTHNYITGYQAIKDDLDDYTYVSSATSSKHINVSRWQNH

SEQ ID NO: 349334 - protein, 116 aa, Zea mays
  unsure (1)..(116): unsure at all Xaa locations
  Clone ID: MRT4577_81759C.1.pep
TDEGKEAGGQHDETDSTGARXEXXXQXXRRKRXXXXXXXXXXQXPNXRXRGGXXXXXREXEKRXPGXXXXXNNQAXRXEXXXKKKTKKKKKKKEKEKKKKRKKKKKKKKRRKKKNK

SEQ ID NO: 349335 - protein, 522 aa, Zea mays
  Clone ID: MRT4577_8175C.1.pep
MALGPLDEKHRWNMIIWLGSVHWPRPGVLYTRRERERPPLASPLLILSPLSPAPFVSGELGFAPPPRHPTAPAILGSPAMYGGDEVSAIVIDVGSYSCKAGYAGDDTPKAVFPSVVGSIEQTEDTDDPKPEKEADSASDSKNGAKPMDVDKAKTKRRLYVGQELEFRRDHMEVISSMKDGTVTDWDIVDNIWNHAFRRRLLINPEEHPMLIAEPSTNTAQQREKAAELMFENYKVPALFLAKNAVLTSFASGRATSLVVDSGGGSTVVSAVHDGFVLQKSVSTSPVGGEFLTDCMMKSLESKGIVIRPRYSFKKKEISPGEYKIVDLDLPNTTESYRLYCMRAIASDVKESVCRVPDTAFDEVAYANVPTTSYELPDGQTIEVGADRFKVPDILFNPSLSQTIPGIDGFADSIPVRGLQRMVIDSVNKCDVDIRKELFSNILLSGGSSSILQLKERLEKEVLEESPQAARVKVMASGNSVERRFSVWIGGSILASLGSFQQMWFSKAEYEEHGVSYIQRKCP

SEQ ID NO: 349336 - protein, 101 aa, Zea mays
  Clone ID: MRT4577_81760C.1.pep
RRSQCRLLPKRGCRLLWFNGLPRSSSKIPSQAFNSHINPTSPPLLFFDVRSLEVCFARLERVGFQECSVRRHDNAGSEARGHVRARRTRFTKYESNGRTLF

SEQ ID NO: 349337 - protein, 531 aa, Zea mays
  Clone ID: MRT4577_81761C.1.pep
MSSAASAAPPSRRTRSRPPSASSRKSDDSSAAAANGNGNRKVATKPASPHQLTGERTVKKLRLSKALTIPEGTTVLDACRRMAARRVDAVLLTDNQGLLSGIVTDKDIATRVVAEGLRVEQTIMSKIMTRNPVYVMSDTLAIEALQKMVQGKFRHLPVVENGEVIAMLDIAKCLYEAIARLEKAAEQGSAIAAAVEGVERQLGGNFSAPSALIETLRERMFKPSLSTIVTENTKVAIVSPTDPVCVAAQKMREFCVNSVVVSTGNTLQGIFTSKDILMRVVSQNISPELTLVEKVMTVNPDCATLETTILDTLHIMHDGKFLHIPVIDKDGQIAACLDVLQLTHATIQLVEGGNGTVNNVANSVMQRFWDSALALEPPDEEFDSHSEVSLLLQSEAGDGKSSVYPPVVGNSFSFKLQDRKGRVHRFTCGSESLDELVSSVRQRLSIADEKEAVQLLYEDDEGDRVLLTTDADLAGALLHAKSSGLKVLKLHIEDPSLNTEVTKPSQELAPPCLRSGISMLLVHCCMPNLLG

SEQ ID NO: 349338 - protein, 376 aa, Zea mays
  unsure (1)..(376): unsure at all Xaa locations
  Clone ID: MRT4577_81762C.1.pep
EGVERQLGGNFSAPSALIETLRERMFKPSLSTIVTENTKYSIXCWTIFFQLLAIETTFSXMLSCRVAIVSPTDPVCVAAQKMREFCVNSVVVSTGNTLQGIFTSKDILMRVVSQNISPELTLVEKVMTVNPDCATLETTILDTLHIMHDGKFLHIPVIDKDGQIAACPDVLQLTHATIQLVERGNGTVNNVANSVMQKFWDSALALEPPDEEFDSHSEVSLLLQSEAGDGKSSVYPPVVGNSFSFKLQDRKGRVHRFTCGSESLDELVSSVRQRLSIADEKEAVQLLYEDDEGDRVLLTTDADLAGALLHAKSSGLKVLKLHIEDPSLNTEVTKPSQELAPPPLKSGISMVHVGLTAGVVALSGAAVMVYLKRSQL

SEQ ID NO: 349339 - protein, 103 aa, Zea mays
  Clone ID: MRT4577_81763C.1.pep
LACGYLSTCPPALTHPTPTRCEYTVHSQTATPTPGHRERGRPRRGLADARREARTTTAAARAQAGTRAGGMGVLRSTQSLRGPRRHVRLHETHGNVRSPGSGA

SEQ ID NO: 349340 - protein, 276 aa, Zea mays
  Clone ID: MRT4577_81764C.1.pep
MGVLRSTQSLQAEVDELRAALLAGGGHEAAGGCHRSAGLADPARMSGYTKHMATLEAQAAERVIEVRVRTGSVRKCVFSACLLACVWRQNNPHGRRCPTIIDESCWSDESFCRDNKLWFALGKTAAEKAAWRAARGRDLKLVTICPALVTGPGFRRRNSTASIAYLKGARAMLADGLLATANVETVAEAHVLAYEAMGDNTAGGRYICYDHVVKRPEEFAELERQLGLPGGAAPAPAHGSDDRPARFELCKRKLSRLMSSRRRCAYDTYYSVAFEV

SEQ ID NO: 349341 - protein, 53 aa, Zea mays
  unsure (1)..(53): unsure at all Xaa locations
  Clone ID: MRT4577_81765C.1.pep
FSSIFFFNLSIAPRITFKTSKIFLYQDILYTXXXSLTHQLTXFIYXLPKXLYF

SEQ ID NO: 349342 - protein, 278 aa, Zea mays
  unsure (1)..(278): unsure at all Xaa locations
  Clone ID: MRT4577_81766C.1.pep
SVEAQAAERVIEXCVRTXESVRXKCVFTSXSLLACVWRQDYPHDRRCPTTIXDESCWSDESFCRDNKVXSGEDIRRICISVSPLITQTIVTQEEATYCDASFFQLWFALGKTAAEKAAWRAARGRDLKLVTICPALVTGPGFRRRNSTASIAYLKGPCRALPPGCVRVHTVHETHXRVAHRSEPLTSSSSSSCIFGSXARAMLADGLLATANVETVAEAHVHAYEAMGDNTAGGRYICYDHVVKRPEEFAELERQLGLPGGAAPAPAHGSDDRPASRY

SEQ ID NO: 349343 - protein, 117 aa, Zea mays
  Clone ID: MRT4577_81767C.1.pep
LSPLLSCTLAPSHWKSPSTVTGTDELSPDVAIPSQNTKKSIIEEEEEVVPPTENPPVENNFYFDICGEKVAIPTTHGLRVMAGTTPGYTYISAWPLETAQETSPGYTEIVRGISRRV

SEQ ID NO: 349344 - protein, 93 aa, Zea mays
  Clone ID: MRT4577_81768C.1.pep
IKKNHIKKDKKNKKINNKINTKGGRPFGVSPFPPRCLQKITFFLGTLNTNTTARVFQSLPVGNTWGFPNFFPCAKIPFCRGREYGKGPTPSAF

SEQ ID NO: 349345 - protein, 57 aa, Zea mays
  Clone ID: MRT4577_81769C.1.pep
RQGKHLTNKLYISTYYRKHKQGFHNTNGVAALPTKSACSDKHLPTVRLSASSWVKPT

SEQ ID NO: 349346 - protein, 153 aa, Zea mays
  unsure (1)..(153): unsure at all Xaa locations
  Clone ID: MRT4577_8176C.1.pep
MRECISLHMGQGGIQGGNACGELYCVERGIQADGQVPGDKTAGHHDDAFSTFFRQTGAGKRVPRAIFVDLGPTVIDEVRTWTCRQLFHPERLISGXKEDAGNNFAPGHYTIGKEIVDLCLDRIRKLADNCAGLQGFLGFXARGGGTXGSGLGS

SEQ ID NO: 349347 - protein, 66 aa, Zea mays
  Clone ID: MRT4577_81770C.1.pep
TRSLFSMHISSYTLFSHSVVMGKAVPERVLGNCDPVYPTAYVHTLNGSERNTLYTQLLKLKQKMLT

SEQ ID NO: 349348 - protein, 137 aa, Zea mays
  Clone ID: MRT4577_81771C.1.pep
RGRLLRPDTRSHSGRADLEKSRIRPVDRRALIGTKATSSRQSTVTAAGRGATQTERAAARARPTRPARPLAPHMRRRGETYTEARTPEPTRRRRTQMLSSGGMQASHIQGGPPTGKTLKGTGKANSKPPRRTSWRSK

SEQ ID NO: 349349 - protein, 50 aa, Zea mays
  Clone ID: MRT4577_81772C.1.pep
NNPFPSIDFLWIWPLSLEQNIASWFAPPVPIPVSGQLLDSVFFITPGCPP

SEQ ID NO: 349350 - protein, 89 aa, Zea mays
  Clone ID: MRT4577_81773C.1.pep
KKAGAGQLGKKLAKGGRYPIPLVWEKNGFKGPAPNFGKGGKGGPQPHFQKLGRDMFFPGVFLKTLGTGILKILRGKGHPFFKKRKHFNL

SEQ ID NO: 349351 - protein, 99 aa, Zea mays
  unsure (1)..(99): unsure at all Xaa locations
  Clone ID: MRT4577_81774C.1.pep
FSPXXXXXXXXFXXWFXALPXXXXXXXLXXXXAXVXAXXXXFLXYXCXWXSLXXLXXVXXASXPXSXVXXFXRXLFXLAGSVRLXXGSCFFHFFFALXL

SEQ ID NO: 349352 - protein, 78 aa, Zea mays
  unsure (1)..(78): unsure at all Xaa locations
  Clone ID: MRT4577_81775C.1.pep
RTERISVPSPWKRRGGXGLKKRNNRPPPFTXPWRRTTYTQLRAEYPAPANVERLAAPRLXCXPVPADPXHAPRPPFCH

SEQ ID NO: 349353 - protein, 65 aa, Zea mays
  Clone ID: MRT4577_81776C.1.pep
RRAGCWLVIDSISKLLALFLSDCSRRIKYHGCSPSYRRYTLLSAEHIALAVFIGQGKMTIYITRV

SEQ ID NO: 349354 - protein, 189 aa, Zea mays
  unsure (1)..(189): unsure at all Xaa locations
  Clone ID: MRT4577_81777C.1.pep
MSFFPELYFNVDNGYLEGLVRGLKAGVLSQADYLNLVQCETLEDLKLHLQSTDYGNFLANEASPLTVSVIDDRLKEKMVVEFRHMRNHAYEPLASFLDFITYSYMIDNVILLITGTLHQRSIAELVPKCHPLGSFEQMEAVNIAQTPAELYNAILVDTPLAAXFQDCISEQDLDEMNIEIIRNTLYKAY

SEQ ID NO: 349355 - protein, 114 aa, Zea mays
  unsure (1)..(114): unsure at all Xaa locations
  Clone ID: MRT4577_81778C.1.pep
PPPPRPRRRRPRTPRRWTTSQCPRPPLPPPFPARTARRSYHPATTTLHPGPGPGPGPRPRPSSSSPRRRTAAARKTPPPRAPRPPQRTSRPPAXPSPLRPTVLLLSSTAQRTRG

SEQ ID NO: 349356 - protein, 111 aa, Zea mays
  Clone ID: MRT4577_81779C.1.pep
HIHSAPLLIPEESKTRKTETEKRVILCSHLMVVTKCKTTRNVHLTSTFFLILVIICSASPSCKDRRLVARCVTLLPYTCGYLKGAASKALGRTARGHEGRQQHTTLLDMFV

SEQ ID NO: 349357 - protein, 450 aa, Zea mays
  Clone ID: MRT4577_8177C.1.pep
MRECISVHIGQAGIQVGNACWELYCLEHGIQPDGQVPGDKTAGHHDDAFSTFFSQTGAGKHVPRAIFVDLEPTVIDEVRTGTYRQLFHPEQLISGKEDAANNFARGHYTIGKEIVDLCLDRIRKLADNCTGLQGFLVFNAVGGGTGSGLGSLLLERLSVEYGKKSKLGFTVYPSPQVSTSVVEPYNSVLSTHSLLEHTDVSILLDNEAIYDICRRSLDIERPNYSNLNRLVSQVISSLTASLRFDGALNVDVNEFQTNLVPYPRIHFMLSSYAPVISSAKAFHEQLSVAEITSSAFEPASMMVKCDPRHGKYMACCLMYRGDVVPKDVNAAVATIKTKRTIQFVDWCPTGFKCGINYQAPTVVPGADLAKVQRAVCMISNSTSVVEVFSRINSKFDLMYAKRAFVHWYVGEGMEEGEFSEAREDLAALEKDYEEVAAEGGSDDGDEEEEY

SEQ ID NO: 349358 - protein, 61 aa, Zea mays
  Clone ID: MRT4577_81780C.1.pep
SIVRWSVVSNVGRPSYIVQTRMPFPWRKLHSSKSVGSMSLPVLTRAGSGSYQQGQAGSAQQ

SEQ ID NO: 349359 - protein, 68 aa, Zea mays
  unsure (1)..(68): unsure at all Xaa locations
  Clone ID: MRT4577_81781C.1.pep
ETNXATXERWNTXSQLIEQPNGXAKXIGGDPYAXLALXXAXXLLXXXTIXFLNTXXKLXYXXAXFXXP

SEQ ID NO: 349360 - protein, 321 aa, Zea mays
  unsure (1)..(321): unsure at all Xaa locations
  Clone ID: MRT4577_81782C.1.pep
MAGGSSLKNMVVAFLVPLPSILFYLSFVRXPAGTPXSPLASWCAAHPLVLANVLFFLNVDVLFWLVGLLLSNHWLIDLYWTVIPVMLLHYYRGHPASVADAARSAVAVALTWAWSARLTHNYLRREGWELGKREDWRFNEMRAQYGNTWWWMSFFAVYLSQQVFLIGICLPMYAIHSSNQPWGVWDLVAAATCVAGILIAHFADTQLHRFVTRNEKLKRLGEPTVPTLEDGLWRYSRHPNYFGEQLWWWGLYLFAWNLGQRWMFLGPLVNSLCLGYVTVLVERRMLKQEHRAEAYKLYQKRTSVWIPWFRKAVPESKLKET

SEQ ID NO: 349361 - protein, 137 aa, Zea mays
  Clone ID: MRT4577_81783C.1.pep
RPGPAAARRLGLSGSRRLAVSASSLPWTRGGADPVGRRLPQARLRSWPGAQVLSSVCSAVEQRAVYRKPQAAACLTLTGIQLTSPAGSSLHCPSHRRHGESQRRAGSGAALRRCLTKHKVQVYFGLRRPTVPSSAVG

SEQ ID NO: 349362 - protein, 137 aa, Zea mays
  Clone ID: MRT4577_81784C.1.pep
LLGPKKINNDYIKYDHYTTSTTTCYSYNPNVLFVGTIRTISFPYSYTLINMLHGKCNQFPEIKQYNRLHKAPCDHTVVISLHGKYFYKTQKIVSYDLQYKDQMLGMDTLALFICGFWPRCCDRWHAVIQCEIKFIAS

SEQ ID NO: 349363 - protein, 152 aa, Zea mays
  Clone ID: MRT4577_81785C.1.pep
MANGGCKDPAHFMGQNFNKLLRLEVGKTVASSMAGMRFSLASPSNFVPALMGTPLMAGLRVVPRAFFGLGKINPPVLWAHPNPTFCLGCDDYMFWGMFPPSQATKERGGVALFFGPPEYPDPLNFAQLAPAPPKDDGDLKTAMAPGVFSPLL

SEQ ID NO: 349364 - protein, 138 aa, Zea mays
  Clone ID: MRT4577_81786C.1.pep
MQATTKGESRRAIATDLRPQELNENSRYDPPESAKLSPLQVPPERRWSLVHPRRCSAFSLPSVHGADSGMEGRAAPELPGEYLSVADDPEGGVAENPRSPRSPRRLQRRVSGHGERSGPFGHDTAGRQDDRWDPQDDK

SEQ ID NO: 349365 - protein, 182 aa, Zea mays
  unsure (1)..(182): unsure at all Xaa locations
  Clone ID: MRT4577_81787C.1.pep
KAKSEPRLADKIVCLRMLLVLYARAGYSRPSTPDCITSIYSFLSSHVPPTRGVLCERTPIYPYLKQPAGKGSRQPTLITLVHQTIIIPMTVPTLHALIDTIXRTHYLQQRELTKLATYSNNRQFLSFNQLDGSMFVIYMNHHHLPFSHLLATYRQQFHSFNRQTGTISPAYRQHHYLHSFSQ

SEQ ID NO: 349366 - protein, 115 aa, Zea mays
  Clone ID: MRT4577_81788C.1.pep
SGALFFMKFHKKWGYIFTGVKKKILGFFFKKTAGQSTFFSQQDFGVHAWDRGRLQLFSFQMVDRNPFLAPPSTRKGCFCRGGTFFGGALKGIPFGAFSGRAEPGLKKPPYPFGHS

SEQ ID NO: 349367 - protein, 105 aa, Zea mays
  Clone ID: MRT4577_81789C.1.pep
FCDEYMIRTWWAPARSSKRGCMTLATLRLRSPPYALPDASPEVILPSSNNEEREACQNEENLRRATHTSMKRRRLVSSRSKHDYRRKYDEAAKRRVVADSHAQPL

SEQ ID NO: 349368 - protein, 89 aa, Zea mays
  unsure (1)..(89): unsure at all Xaa locations
  Clone ID: MRT4577_81790C.1.pep
GEELETLRCEEMIATTNTIATRAGCSMMHLVLDPNMQERLYHXVRSKVGKTDRVTEDLVEVMPYLLAVVKETLPRDRPGHFVLSNAVTR

SEQ ID NO: 349369 - protein, 89 aa, Zea mays
  unsure (1)..(89): unsure at all Xaa locations
  Clone ID: MRT4577_81791C.1.pep
PSPVLGPSAAEVMRANPGHYVALVXTARAPATRGSGPSSGSGXEQQRHGGARVTRVKLLKPRDTLVLGQAYRLITVAEVAKALQAKKEE

SEQ ID NO: 349370 - protein, 127 aa, Zea mays
  Clone ID: MRT4577_81792C.1.pep
RSRSLVLLEKRGGSIVYGLLESKTQFDITALVRPSSAEKPATISLKERGIKIVLIDLGGSHDELVAVLTGIDTVISAIHFQSLDDEIPLSNAAKKAGVKRYVPCFFATIAPRGIMDARDRKEAVLDH

SEQ ID NO: 349371 - protein, 160 aa, Zea mays
  Clone ID: MRT4577_81793C.1.pep
EFRVDPRVRKAPLPALTCAPPFPTPTDPSSARLPPTAIAAAATATSSCSSFEGPSDDRTCVSAEEVAAGAGATGIDDRETADCGVGAICPDRIAVQETTIGTGCDHAYRATGRSRWAGYKDNRLRPNGQNASETLRGNWFPTAGNQVVNRIGEMVAGKFQ

SEQ ID NO: 349372 - protein, 73 aa, Zea mays
  Clone ID: MRT4577_81794C.1.pep
MEMHMDDKSKTPLSKKGSRRSASASAAAGLKSRPSRAAAGRSVPGRLAGLVKEQRARFYIMRRCVTMLVCWRD

SEQ ID NO: 349373 - protein, 74 aa, Zea mays
  Clone ID: MRT4577_81795C.1.pep
TSWGDPFRFSAQDRQFHIRPCNPLKTLEFFVPQSKVRSPKPKRGDSLPPLTNGFEESLPRTPLLKFAVVANHFC

SEQ ID NO: 349374 - protein, 465 aa, Zea mays
  Clone ID: MRT4577_81796C.1.pep
MALLLLLLAVLGVVLASSLLLRWNELRYSRRRGLPPGTMGWPLFGETTEFLKQGPSFMKQRRLRYGSLFRTHILGCPTVVCMEPELNRRALASEGAGFVPGYPQSMLDILGPNNIAAVHGPLHRAMRGAMLALTRPHMIRAALLPKIDAFMRAHLHGWAGRRVDIQEMTKEMALLSALRQIAGISAGPLSDALKAELYTLVLGTFSLPINVPGTNYSKGLQARKKLVAMLRQMIADRRSSGCARDDMLDALLSGNEGTRAKLSDDQIIDLLITLIYSGYETVSTTSMMAVKYLSDNPKALGQIRKEHLDIRKAKSPEDPLDWNDYKSMTFTKAVIYETLRLATVVNGLLRKTTHDVEMNGYVIPKGWRIYVYTREINYDPFLYPEPMVFNPWRWMETNLESHPHFMLFGGGARMCPGKEVGTVEIATFLHYFVTRYRWEEEGNNTISKFPRVAAPNGLHIRVQDY

SEQ ID NO: 349375 - protein, 57 aa, Zea mays
  Clone ID: MRT4577_81797C.1.pep
STCFSPYTHHRMRQINGHGYQLSTLESNTGWKESLRYASSLCFNQRITLTVAFDLPY

SEQ ID NO: 349376 - protein, 71 aa, Zea mays
  Clone ID: MRT4577_81798C.1.pep
LGHTQNVPTGFNPVPPDGSVAHLSALTKGAQCCPLPQLSNAPLFDPCSLCRSLPCLLVLHPRGSLLYQVTT

SEQ ID NO: 349377 - protein, 77 aa, Zea mays
  Clone ID: MRT4577_81799C.1.pep
KNLLQNALFSPTKLTKAIPKIAYIGLNSLAKILHCLVQGGFFQRSRIKKLKNLPTKAIPFGSTPKINDGTSDVGTNW

SEQ ID NO: 349378 - protein, 452 aa, Zea mays
  unsure (1)..(452): unsure at all Xaa locations
  Clone ID: MRT4577_8179C.1.pep
MRECISVHIGQAGIQVGNACWELYCLEHGIQPDGQVPGDKTAGHHDDAFSTFFSQTGAGKHVPRAIFVDLEPTVIDEVRTGTYRQLFHPEQLISGKEDAANNFARGHYTIGKEIVDLCLDRIRKLADNCTGLQGFLVFNAVGGGTGSGLGSLLLERLSVEYGKKSKLGXFTVYPSPQVSTXSVVEPYNSVLSTHSLLEHTDVSILLDNEAIYDICRRSLDIERPNYSNLNRLVSQVISSLTASLRFDGALNVDVNEFQTNLVPYPRIHFMLSSYAPVISSAKAFHEQLSVAEITSSAFEPASMMVKCDPRHGKYMACCLMYRGDVVPKDVNAAVATIKTKRTIQFVDWCPTGFKCGINYQAPTVVPGADLAKVQRAVCMISNSTSVVEVFSRINSKFDLMYAKRAFVHWYVGEGMEEGEFSEAREDLAALEKDYEEVAAEGGSDDGDEEEEY

SEQ ID NO: 349379 - protein, 74 aa, Zea mays
  Clone ID: MRT4577_817C.1.pep
MKMGLAFGKLFSRLFAQKDMSILMDGVDYAGKTSILYKLKLGEIVTTIPTIGFNVETVEYKNISFTVWDVGGQD

SEQ ID NO: 349380 - protein, 70 aa, Zea mays
  Clone ID: MRT4577_81800C.1.pep
AAPFFFFFFAFINIHLDIHRIIIIISYRKGRCFDYEDKPSEKEEIFMLHCVRKEGKVFFAFGSKIKFRPQ

SEQ ID NO: 349381 - protein, 119 aa, Zea mays
  Clone ID: MRT4577_81801C.1.pep
TKRARHKQQAMRHIEKGAQQPKWIRTHLHEKDEQEELSQKCSQNGLKGCRHGQAEQHSNTGAGTQTHDEASEAIAYPTMPSSRSATNNKEEKALTLNGDRGPEWLGRNDIGKPDSPNEG

SEQ ID NO: 349382 - protein, 51 aa, Zea mays
  Clone ID: MRT4577_81802C.1.pep
TGRRRGPPTSSGTSGGRKPTARTYKWSGARSGLGAPGRSWRSPTLSSSVTS

SEQ ID NO: 349383 - protein, 85 aa, Zea mays
  Clone ID: MRT4577_81803C.1.pep
DVAYSAAGRVGSGGFPLLNRFWRLVIYRELVDARSAGGAAVFSWSSYCDAYVRVVCSRSIPLGRVLRGYSLRHRLSKHINQPKGP

SEQ ID NO: 349384 - protein, 225 aa, Zea mays
  unsure (1)..(225): unsure at all Xaa locations
  Clone ID: MRT4577_81804C.1.pep
KSSDTSSKRCIPQHSNHFNEFKQKNQGCTXPARLLRKRDGKVPFRKRRPRRHFYEVSPSDVDPFCIVKERIRVFWPLDETWYFGLVKEYNPDTRLHHVRYDDKDEEWINLQNERIKLLFLPAEARNRSKCTNSRSAFDPKHEHGDREDMHGSGGNTESSESGPIGSWLARSNQAKSAALCDISKQDHSHSNTVPVSFDRQQRRASDAKESIDSAPCSSLANGGVE

SEQ ID NO: 349385 - protein, 109 aa, Zea mays
  Clone ID: MRT4577_81805C.1.pep
GIGWPHRGADPSTTTNREAARCQPRCSSSSSLFLTCCGFRWRWGEEACTRARGRRPSESRGRIPEVPNLKLSSAPQVINAYGSDVPFKFVAFKFSATSNSLDTKSSYVT

SEQ ID NO: 349386 - protein, 82 aa, Zea mays
  unsure (1)..(82): unsure at all Xaa locations
  Clone ID: MRT4577_81806C.1.pep
THKPCPSPTPDDGGGAKTLGSSGAGSSVVVPRNFRLLEELERGEKGIGDGTVNYXMDDADDMGGGGCTGTMIGPHNTEHEGH

SEQ ID NO: 349387 - protein, 71 aa, Zea mays
  Clone ID: MRT4577_81807C.1.pep
YYTNQGRHKLLPISYKQKILCGGPSPPALQSCFSSFGTTLEQKQQKYVASSPKNNKGITPEYGLTQQVLPD

SEQ ID NO: 349388 - protein, 56 aa, Zea mays
  Clone ID: MRT4577_81808C.1.pep
KKKKKKKKKKKKKKKKKKKKKKKRKKKLKKTKGRPFCGPHLSFPLLAPSFIFFGVP

SEQ ID NO: 349389 - protein, 50 aa, Zea mays
  Clone ID: MRT4577_81809C.1.pep
GSIKGFFSQPKGVKNQNKKGFLEPEKHLTVFRHPNLFYNGFANNLFKPFA

SEQ ID NO: 349390 - protein, 452 aa, Zea mays; identical to SEQ ID NO: 349378
  unsure (1)..(452): unsure at all Xaa locations
  Clone ID: MRT4577_8180C.1.pep

SEQ ID NO: 349391 - protein, 29 aa, Zea mays
  Clone ID: MRT4577_81810C.1.pep
QQTPPGPFGGGPPPFGVPPAESRGPPAPQ

SEQ ID NO: 349392 - protein, 185 aa, Zea mays
  Clone ID: MRT4577_81811C.1.pep
PSPLPPLSPAIPSSSPPSTPRFRTLCDAACSAARPSPVSPAATVADGAPTPLQSYKDALLSPAPPHLHRRRLLAFLSSPVKKLCHKCYSAEHLVRDCRDPVRCRDCGRSGHLSSACKFEPLLPPSLVSPASHPPLPPRRLSNELLRSLSRSRSTSPPNSPMSRAPPREHWLDRYYREVEAERTIP

SEQ ID NO: 349393 - protein, 154 aa, Zea mays
  unsure (1)..(154): unsure at all Xaa locations
  Clone ID: MRT4577_81812C.1.pep
SYCSLRSSTWFTVLFLAEGSPAPVVVSEGANTMDVGRPVLVQNAPRTRLDAGTWGTMGIGLGYCIAAAVAEPEXLVVAVEGDSGFGFGAMEVEVNRGFNSDAVLAMETIHSLSASKSSYPMADLTQLFMTATQEGKRSESQGQILRVECYSLMP

SEQ ID NO: 349394 - protein, 124 aa, Zea mays
  Clone ID: MRT4577_81813C.1.pep
LSYHVVVRGHPHPGLAYVVCCVLQVGVALPHQSAQVQPAVSCSAPVLGQFLWLSSLSLRSIVRIVLAIVQDALSWTHRTYILVSVMDFGFIIRRQICCAPYQCFRNRPTGPYGPQFSLVIYHLM

SEQ ID NO: 349395 - protein, 59 aa, Zea mays
  unsure (1)..(59): unsure at all Xaa locations
  Clone ID: MRT4577_81814C.1.pep
XPCXAPPWVXXXPWAAXXRXXARXGRPLCXPRRLLRXRRRRRRPPXRPPTRPXXLGXPG

SEQ ID NO: 349396 - protein, 36 aa, Zea mays
  Clone ID: MRT4577_81815C.1.pep
QQVELFNWNLVFYSELSFPLRKKMSFSLCCDVYNLH

SEQ ID NO: 349397 - protein, 77 aa, Zea mays
  Clone ID: MRT4577_81816C.1.pep
RTTAVDYRCLCGCLSWATDKHSLNNVFNSNVVHIEMQDHPRLVDAEVPLLRAPSTFSTQEEMLKRHLRDEHHKSTPA

SEQ ID NO: 349398 - protein, 52 aa, Zea mays
  unsure (1)..(52): unsure at all Xaa locations
  Clone ID: MRT4577_81817C.1.pep
MGKDDVIESGAGGGEFAAKDYTDPSPAPLIDAAELXSWSLDRARIGEFIPHA

SEQ ID NO: 349399 - protein, 74 aa, Zea mays
  Clone ID: MRT4577_81818C.1.pep
FRSVSYLATIRAATITSDLTSIASRCKRPCTLGSETGQPACKFICCLWFLYSAICILTHPTETILVFFLSPPNV

SEQ ID NO: 349400 - protein, 94 aa, Zea mays
  unsure (1)..(94): unsure at all Xaa locations
  Clone ID: MRT4577_81819C.1.pep
ATTARRGPSTEMATTRXGGPDGCCAEHEALWTARLRCEQKAKNSSRAPAPGAAMELARCRGSQCRDLALYRTNRAACNVNSRAVDLPMRAGLRS

SEQ ID NO: 349401 - protein, 46 aa, Zea mays
  Clone ID: MRT4577_8181C.1.pep
WGCKNGLPKKKKKKKKKKKKKKKPKKKKKKKKKKKKKKKLERGRRY

SEQ ID NO: 349402 - protein, 81 aa, Zea mays
  Clone ID: MRT4577_81820C.1.pep
RCTPCSNLSCPTLARGCGWRAVRVPLPTAGRPPEPPSELVWHGSAARHQSRPPPARTRNIFVQALTFIVSLFFFPSPTQTS

SEQ ID NO: 349403 - protein, 93 aa, Zea mays
  unsure (1)..(93): unsure at all Xaa locations
  Clone ID: MRT4577_81821C.1.pep
RNPEGDPXRHRKGEGGXLGAAXPGVGFFLGPVEXXPPPFCPXRPPVGXXXXXXXEKKTSRSAXCSFSXFFLRAGKKFAGXXCQKISFFFPPPP

SEQ ID NO: 349404 - protein, 95 aa, Zea mays
  Clone ID: MRT4577_81822C.1.pep
LNCIKGIGHCDARFSDAHNMTVMKSYTAFFKPHGISYSVESSKKGYWAPPTREENPPQHLEFILFLRCRITHVQRRCRFHVSRSHHQTIDLCTWT

SEQ ID NO: 349405 - protein, 121 aa, Zea mays
  Clone ID: MRT4577_81823C.1.pep
PVMPLGPMNPCMQFCMMHQGLPSLMGGPPLMLHHLLAFPLQTIPVMMPQMMTPNPMSPLMIPSMMSPMVFPSMISQIIMPQGPCDPVSQILLHHQFPFLFPPRALGFPPMFFQPPFVGAAF

SEQ ID NO: 349406 - protein, 55 aa, Zea mays
  Clone ID: MRT4577_81824C.1.pep
LLFPPKAFGAPGGILVWLSPEGCCVPSSGGFSMSKKKWLHLIGGRNDHFFKPFFV

SEQ ID NO: 349407 - protein, 188 aa, Zea mays
  Clone ID: MRT4577_81825C.1.pep
MRPLDEKETTQVFEKLFKFTGPNLKHLLERPAVEGPDAEPGRYCLRLHRNRVYYASEALVRRATAVSRPRLAGVGTPIGKFTHHGAFHLTVHALDLLAAHARRRVWLKPDTERSFLFGNSVPKSSLARITENTKAGDGVVVMSMADVPLGFGIAARSAQDCRKADTNAVVVLHQSDAGEYLRKEEELM

SEQ ID NO: 349408 - protein, 85 aa, Zea mays
  Clone ID: MRT4577_81826C.1.pep
TGLPQQNNPWGVETLAGANLAKSKGGGGSRQKGSESPFGKGGGPKHYFLGEKNPLKKRGGFGGAQGPRGGLKKLFGRGGAPKGLF

SEQ ID NO: 349409 - protein, 119 aa, Zea mays
  Clone ID: MRT4577_81827C.1.pep
HSPQLSCMLCVGTARQCPAHQRRGVAWLRPSLSASRVKSGQVLSQPWHRTLQSRLDFTSLFSFGVTRSPGSRPPEQKGCGARSEHRRDAGLDYSLHVRHRITLRFEARREISDPERRVE

SEQ ID NO: 349410 - protein, 52 aa, Zea mays
  Clone ID: MRT4577_81828C.1.pep
GCSYMHRVCLSSRSFHSMSSSMNSTMRWSSCISIQRPKGNRLSGNSRCSRYR

SEQ ID NO: 349411 - protein, 178 aa, Zea mays
  Clone ID: MRT4577_81829C.1.pep
MPSVDSPSMATHFITSFLPPELAETVQKHILSPRSPVQVVVRNVLVQAQNVIDTVTPIVEPILDRVMVLLTENQGLVGVIASLLVLATVVIILNWIRRLLMWWTRMAMRIMTWAFMFALAAWIWERGVFESARDMTVIGARILGYLAVIKDVWLQEYDRYEAQQGMAGTRGPASGRSR

SEQ ID NO: 349412 - protein, 177 aa, Zea mays
  Clone ID: MRT4577_8182C.1.pep
MARRLCRLPRLFPLVSSASASAAPRPHHLPFAVNPNPAPLAPSFSSSSPPAFPGPHRLFSSTSGSSMVVVGSADSFNSIFSKVQDEKLPAVFYYTAVWCGPCRAIAPLVSKLSSQYPKIPVYKVDIELEGLGNKLRDLNICSVPTFHFYHKGQRISEIVGADAKKIEATMESLHKQQ

SEQ ID NO: 349413 - protein, 95 aa, Zea mays
  unsure (1)..(95): unsure at all Xaa locations
  Clone ID: MRT4577_81830C.1.pep
TKYPHPHNHKEPSTQTSKQTTTYPTTRNPTPCHTKPXITPPMIRRQASRAHVPMNRGTHSSHSTPYHRAVSAIHLRYLYSSCYRPNHASQRARRP

SEQ ID NO: 349414 - protein, 124 aa, Zea mays
  unsure (1)..(124): unsure at all Xaa locations
  Clone ID: MRT4577_81831C.1.pep
MSRTKHTARKSTGGKAPRXSSPSRADRKSEPMTGEVNKPYWYRXGTVALREIRKYQNSTXLLIRKLPFQRLVREIAHDFKTELRVLSHAVVGLLDDXRTXLVGLFEYTNLXAILAYRGTIMFMG

SEQ ID NO: 349415 - protein, 120 aa, Zea mays
  unsure (1)..(120): unsure at all Xaa locations
  Clone ID: MRT4577_81832C.1.pep
RELTTIPTIGFNVETVEYKNISFTVWDVGGQDKIRPLWRHYFQSTQGXIYVEDRTDRXAINTXRVEMLNRPLLDELXTAVLLVIPNPRTIXTALNACQITDRLXGLHSLXRRRHWYIQST

SEQ ID NO: 349416 - protein, 44 aa, Zea mays
  Clone ID: MRT4577_81833C.1.pep
SSGNNAEYAGYRPDLTKPALARLSSVYRSLQVAKSGVKKKNRQS

SEQ ID NO: 349417 - protein, 86 aa, Zea mays
  Clone ID: MRT4577_81834C.1.pep
YSVASPLHSPQGYVRRRGRSQVDALPHRSVSAHMQLNPRALRDVPPRQVGFQARSGRLRHPGPAGTSSLWRSRVLTTSSRCSSAMA

SEQ ID NO: 349418 - protein, 101 aa, Zea mays
  Clone ID: MRT4577_81835C.1.pep
MPKAAAGKRGKAEKTKRGKKDPNAPKRGLSAYMFFANEQRENVREENPGISFGQVGKLLGERWKALNEKQRAPYEAKAAADKKRYEDEKQAYNADQEEEES

SEQ ID NO: 349419 - protein, 54 aa, Zea mays
  Clone ID: MRT4577_81836C.1.pep
IFILKKGNQMQGGLGLPIHQCLKEIELLLDILTQNWRDYTTCINLDIMERAWFF

SEQ ID NO: 349420 - protein, 149 aa, Zea mays
  Clone ID: MRT4577_81837C.1.pep
TDWTLVPLAIIVVAHGSVRFQLPGSRISRDTGIATERQLLAAMVAVGFFKTSFIALAIVLIDRVGRKPLLYVSMVGRTGCLAALSAALFLQARGSVSRGAGVGVAILTVCNDVAFFSVGIGPVPAARFHVDGQGIVQGLEQGIMPRPCA

SEQ ID NO: 349421 - protein, 112 aa, Zea mays
  Clone ID: MRT4577_81838C.1.pep
GAKKWAQNLAGTVYLKGGVWAREAPRGGCKGSKTLTPAKLFGAFWFTCPKKGGAKGQAPWTSLFNPNKKGLKKAFKMKQPLGSFCPGKKGSNWAQRIFFPKGARTWENLKPK

SEQ ID NO: 349422 - protein, 103 aa, Zea mays
  unsure (1)..(103): unsure at all Xaa locations
  Clone ID: MRT4577_81839C.1.pep
GGCLCPPRKAKMAPRVGPFDPVTRAPLENQEXKKVLGQKVLFIFENTLLNNPGGAGMAPFNPPVKKAWQVKFPKPMVKMGKAQVLPGAEGEIREKCFPAPPPS

SEQ ID NO: 349423 - protein, 39 aa, Zea mays
  Clone ID: MRT4577_8183C.1.pep
RRSNRCSVSSLSRAAIALVVDCPTVVLGNVVLAAELVLV

SEQ ID NO: 349424 - protein, 659 aa, Zea mays
  Clone ID: MRT4577_81840C.1.pep
AARGGSGGGGGGGGPRHVRRSHSGKAIKVKKDGAGGKGTWGKLIETDAEACLDRNDPNYDSGEEPYELVEAPVSTPLEDYKKSVVPLIEEYFSNGDVKLAASDLKELGHDGFHCYFVKKLVSTAMDRHDKEKEMASVLLSYLYGNVVSSTQIRLGFVLLLEAVDDLAVDIPDVVDVLALFIARAVVDDILPPAFLSNAKVSLSGSSKGMQVVQIAEKSYLSAPHHAELIERRWGGSTHITVEEVKRRIADLLKEYIRNGDTAEACRCIRELAVPFFHHEVVKRALTLGMESPAAEALIVKLLKEASEECLVSSSQMMKGFHRVAESLDDLILDIPSAKSEFQLLVSKAISEGWLDSSYVNSGVNGSVEDDEHEKLARYKREAVSIIHEYFFSDDTTEVIRSVKELGYPEYNPIFVKKLITIAMDRKNREKEMASVLLPSLSMELFSSEDIAKGFVMLLESAEDTALDILDASDELGLFLARAVIDDVLAPLNLDEISSKLPPNCSGAETLNMARSLASARHAGERLLRCWGGGTGWAVEDAKDKITKLLEEYESGGDVGEACNCIRELGMSFFNHEVVKKALVMAMEKKNERTLNLLQECFGEGIITINQMTKGFSRVRDGLDDLALDIPDAREKFLSYVQRAKKSGWLLPGFGVASSA

SEQ ID NO: 349425 - protein, 69 aa, Zea mays
  Clone ID: MRT4577_81841C.1.pep
PTLSPSLTNFSARHLLKCAGFLHQRNPPQESVIPYPIPITYYNTRWYIHYAECFFTSIYAQLVINIYLL

SEQ ID NO: 349426 - protein, 65 aa, Zea mays
  unsure (1)..(65): unsure at all Xaa locations
  Clone ID: MRT4577_81842C.1.pep
TLFFPXKPSLNFFPKSSIPKSFLNPPLKNPNFTPVPFNTKRSLHFFKQPITFHLPIKYTWCFPSF

SEQ ID NO: 349427 - protein, 74 aa, Zea mays
  unsure (1)..(74): unsure at all Xaa locations
  Clone ID: MRT4577_81843C.1.pep
IVLVSYFFVLEPSYCLYGKPGAYGVVTLPFSVREGINIFLAGFVPTENVWFXDESITLKVTYPQFHMLLELFIL

SEQ ID NO: 349428 - protein, 97 aa, Zea mays
  unsure (1)..(97): unsure at all Xaa locations
  Clone ID: MRT4577_81844C.1.pep
QVASAYFQQQQFXPFNQLAALNPPAYFQQQILLPFSELAAASRASFLTQQQVLPFYKQCAVNPAPLFALQQLLPFGQLALANPGASHQRHLVGGAPF

SEQ ID NO: 349429 - protein, 130 aa, Zea mays
  Clone ID: MRT4577_81845C.1.pep
KKLSCSTPPFSTRSITKDKYTVQAVAPQFGTRDAAASDSSGRNATAASSRGSSDSSSRQQQQHLQQRFDTSSYQQRAEALEGLLEFSAQLLQQERYEELGILLKPFGPEMASPRETAIWLTKSFKETAPS

SEQ ID NO: 349430 - protein, 59 aa, Zea mays
  Clone ID: MRT4577_81846C.1.pep
LRGVKPIIYQPNHPPIKVGHPVGPNCPKKHWGHPKLIWPPLKIPDPNFKVDQALNQTTS

SEQ ID NO: 349431 - protein, 102 aa, Zea mays
  Clone ID: MRT4577_81847C.1.pep
LVTGGWGKMGERGNRAWDFFLSLLRLWEAPFGHPQQNSCDGRGVSDSGTSHFQRGRHQKAKSPCGGNWVWGLTTPLGRRPRTTGWISARGCSGERGGLLDFL

SEQ ID NO: 349432 - protein, 53 aa, Zea mays
  Clone ID: MRT4577_81848C.1.pep
RRISLFSSELTYVKTVVTLRLDHDLWFDSVILVKYIALFPQVSKKETSRLLVY

SEQ ID NO: 349433 - protein, 81 aa, Zea mays
  unsure (1)..(81): unsure at all Xaa locations
  Clone ID: MRT4577_81849C.1.pep
MSPPTMGKENSHINIEGIGHVNSSKSTTTRHLIXKLGGIDKRVIDMFEKEAAEMNKRHFKYAWALDKLTAERERRITIDIT

SEQ ID NO: 349434 - protein, 90 aa, Zea mays
  Clone ID: MRT4577_81850C.1.pep
ILARAEDACTFSLPAPPVSLFTIAWSTLIIAFYFFSLRTAFFLQAYIVPASIIILITTYFFFPLFNNNFTSLFFPSLKPPFVSFNFPYPS

SEQ ID NO: 349435 - protein, 85 aa, Zea mays
  Clone ID: MRT4577_81851C.1.pep
DNPVTKQTLESPYHVDTTQKNENNDALRPSTPKAPRQCPQEEERRKEGSHRRHHDARKNAITCRPPSGANVPASMSETSHPSFTS

SEQ ID NO: 349436 - protein, 146 aa, Zea mays
  unsure (1)..(146): unsure at all Xaa locations
  Clone ID: MRT4577_81852C.1.pep
GPPSRPSQPPTSPSACGSCFPQLTCPAQLPYAAPGGTQSXPSSRCLSAANSEVRAPDAKXNEGSRHGSCEAPFALAAAAASAATTGAGTIVSCPASNPAPQSCPRPSPNKSPAHVGIEHHDTTHAVVIHTDVHGEIGPTRRRLGGA

SEQ ID NO: 349437 - protein, 94 aa, Zea mays
  Clone ID: MRT4577_81853C.1.pep
PTNDRYIHHQSVMVTPTAARKISNKLQRGGERNSTKKSRGSGNSDNHHPHQVPKTEMRKGPWTEDEDPQLLRCPPAAQKHQHDSRNRKTAMASA

SEQ ID NO: 349438 - protein, 124 aa, Zea mays
  unsure (1)..(124): unsure at all Xaa locations
  Clone ID: MRT4577_81854C.1.pep
SRTAVEAVQKYIDDKNHLPLDEDDIGLLKTYGLGPXCLTIWQTXEDIREPAXSIDYLCAIRDXDLXKATATQWTSVIDKXQRWHEEQPLQHPRCAKIISPNTDDAKCVIHGRPESIVRTTAPSW

SEQ ID NO: 349439 - protein, 402 aa, Zea mays
  Clone ID: MRT4577_81855C.1.pep
RKEALSILRDMRGAGCGPNVVTYNTLVAAFFRAGEVDGAERLVGMMLEGGLKPNLVTFNSMVNGMCKAGKMEDARKVFDEMMREGLAPDGVSYNTLVGGYCKAGCSHEALSVFAEMTQKGIMPDVVTFTSLIHVMCKAGNLERAVTLVRQMRERGLQMNEVTFTALIDGFCKKGFLDDALLAVRGMRQCRIKPSVVCYNALINGYCMVGRMDEARELLHEMEAKGLKPDVVTYSTIISAYCKNCDTHSAFELNQQMLEKGVLPDAITYSSLIRVLCEEKRLSDAHVLFKNMIKLGLQPDEFTYTSLIDGHCKEGNVERALSLHDKMVKAGVLPDVVTYSVLINGLSKSARAMEAQQLLFKLYHEEPIPANTKYDALMHCCRKAELKSVLALLKGFCMKGLMN

SEQ ID NO: 349440 - protein, 166 aa, Zea mays
  Clone ID: MRT4577_81856C.1.pep
AVRHLEENCLEPLLVDLSNGLSCEVKEVHRINSSTRRKSRTRKCHSRNGEICGACHSGMKSSTRNHLCGLSGATIWARPQQMPHPSASVLAKGGDYELPIFCVAAILIINRQKIIRGTHSIDDAIKMFNDNVLKINVKRCVRLAIKLRKKYLYKSLKGGSSDDKES

SEQ ID NO: 349441 - protein, 169 aa, Zea mays
  unsure (1)..(169): unsure at all Xaa locations
  Clone ID: MRT4577_81857C.1.pep
AIVVANPTDLVKVRLQADGKANTIKRSYSGALXAYATIIRQEGIGALWTGLGPNVARNAIINAAELASYDQFKQMFLKLPGFTDNVFTHLLAGLGAGFFAVCIGSPVDVVKSRMMGDSMYRSTLDCFTKTLKNDGPCAFYKGFIANFCRIGSWNVIMFLTLEQVKRFFL

SEQ ID NO: 349442 - protein, 123 aa, Zea mays
  Clone ID: MRT4577_81858C.1.pep
SSTRADGSHQGSFLTKGAVATPAAVTGAALSRTLAAAHPFLRGVDAEVDPALPGLATGLGGAVSRNCWHQLGPFLGAPAVRARAPAPGGFARHRGALGTLPHRQLQLRLKRGQSFSLTPRALT

SEQ ID NO: 349443 - protein, 196 aa, Zea mays
  unsure (1)..(196): unsure at all Xaa locations
  Clone ID: MRT4577_81859C.1.pep
AIVVANPTDLVKVRLQXADGKANTIKRSYSGALNAYATIIRQEGIGALWTGLGPNVARNAIINAAELASYDQFKQMFLKLPGFTDNVFTHLLAGLGAGFFAVCIGSPVDVVKSRMMGDSTYRSTLDCFTKTLKNDLQQSKQSALIRSVLCFDHXQLKSWLQGPGAFYKGFIANFCRIGSWNVIMFLTLEQVKRFFL

SEQ ID NO: 349444 - protein, 140 aa, Zea mays
  Clone ID: MRT4577_8185C.1.pep
NSNTEPIYSPYKYLFFFHVGTTKFPFGKNKRWPRGGKNTIWAKYHPPLVSSRKKQPFGGPTFSWNKWALSYYRLGPLQKNIKISGPVFVDSQLKLQPLILLGRNKNRFFKHPKLLGGPHFFKQRGGHHLQNFKGRALKTP

SEQ ID NO: 349445 - protein, 66 aa, Zea mays
  unsure (1)..(66): unsure at all Xaa locations
  Clone ID: MRT4577_81860C.1.pep
MGGLAPCSRLLLLPLLLAVSGLRPVXAHAQIDCSCSTVTPGVLAPIVMXVLVLTVLIALAVYFLGR

SEQ ID NO: 349446 - protein, 82 aa, Zea mays
  Clone ID: MRT4577_81861C.1.pep
LLTHTVGQHTGGVHQGIVGPTIIRVKKRLWAQTLARQSAWPIFTSLTKHVTVLKKHQIGMGCGVKVHVHCAGGALEYQGAPG

SEQ ID NO: 349447 - protein, 101 aa, Zea mays
  unsure (1)..(101): unsure at all Xaa locations
  Clone ID: MRT4577_81862C.1.pep
GKNRGNFIGGRPKPKKGGPEKKKRGAWDKKKKGPRRGKSNKRPPGCLNLQKAQFCKNGAKKPETGFPPLGRQTDPGGCFKGPHSXXGTCGSPASLAPGGAP

SEQ ID NO: 349448 - protein, 39 aa, Zea mays
  Clone ID: MRT4577_81863C.1.pep
GNRLPEFSFSLNHEMSWLMDSSDCRIMPTGMYYLHCAQF

SEQ ID NO: 349449 - protein, 260 aa, Zea mays
  Clone ID: MRT4577_81864C.1.pep
EHPSVSKSGKVCSDGPVMDWSTRMKIALGSAKGLAYLHEDCHPRIIHRDIKAANILLDNNFEAMVADFGLAKLTTDTNTHVSTRVMGTFGYLAPEYASSGKLTDRSDVFSFGVMLLELLTGRRPIDTTNYMEDSLVDWARPLLSAALAGETGFAELVDPRLGGEYSVVEVERLAACAAASTRHSAKRRPKMSQIVRALEGDASLEDLHQDGGKPGQSVLFSGGGSDNISRLRQLAFDSGDYSDYSTDSSTGGGGRPPRRP

SEQ ID NO: 349450 - protein, 80 aa, Zea mays
  Clone ID: MRT4577_81865C.1.pep
RAEAPGHQNALAGAHFFYGDTLDTPTFDIQRDLRSWATMHNGADTVHSHRRRADVFNTSPLEPDARNREKGGDLLYYSHD

SEQ ID NO: 349451 - protein, 106 aa, Zea mays
  Clone ID: MRT4577_81866C.1.pep
MPGHLRDERRAGPRPQTELEKLRKATTDRPLVINKDADGGSYKRAQSTPSTPTTPVTPSSSTTPRGAGNVWRNVFHPVSNLATKGMGANLFDPGEANSPTVYYWLY

SEQ ID NO: 349452 - protein, 100 aa, Zea mays
  Clone ID: MRT4577_81867C.1.pep
PTRKHRPGGGKSKGQPHTPENTEKGNDARHLSEALGDSKHEAEKQQSRRDQRGETEREEPEHGQHQLNPTPTTTANALPSTQGQNQTCQRDVDRHNPSPT

SEQ ID NO: 349453 - protein, 91 aa, Zea mays
  Clone ID: MRT4577_81868C.1.pep
TEGLAKAADTPKSDPDLRRGEDARLSGRPQTELGSCGSVVFMRTPNPCSLTAGQNKGLTTTEGMMYCLSTHKYHCYGHGCMSEGADRAVHA

SEQ ID NO: 349454 - protein, 473 aa, Zea mays
  unsure (1)..(473): unsure at all Xaa locations
  Clone ID: MRT4577_81869C.1.pep
MAGGFRVLHLVRPFLAFLPEVQSADRKIPFREKVIYTVISLFIFLVCSQLPLYGIHSTTGADPFYWMRVILASNRGTVMELGITPIVTSGMVMQLLVGSKIIEVDNSVREDRALLXCCLSKNIVXSIITILIVAFLYQVCXVDYKPSDLYLXICIVMHIAFLYSGMXQKLLGILIAIGEAVAYVLSGMYGSKGYGLGSGISLFIATNICENIIWKAFSPTTINSGRGAEFEGAVIALFHLLITRTDKVRALREAFYRQNLPNVTNLLATVLVFLIVIYFQGFRVVLPVRSKNARGQQGSYPIKLFYTSNMPIILHSALITNLYFISQLLYRKYSGNFLVNLLGKWKESEYSGHSIPVGGLAYYVTAPSSXCALFSKTWIEVSGSSAKDVAKQLKEQQMVMPGHRESNLQKELNRYIPTAAAFGGVCIGALTVLADFMGAIGSGTGILLAVTIIYQYFETFEKERATELGFFGF

SEQ ID NO: 349455 - protein, 166 aa, Zea mays
  Clone ID: MRT4577_8186C.1.pep
RYQYAQCICIPTKRSLSCAKTRRRNFNAQAFIRRPHQLREGAHAEFSDCIYTCTSGSRGSLPSHLTAAFAPSRRVGPQKHRTPHQRSRRTLLDRAPAAFDRAEPRGLQLRAGGVSAGGDRCEGRPGGGHPVRRASWRGESGSGGRGGAGAQHVRTADAWGYANTCQ

SEQ ID NO: 349456 - protein, 50 aa, Zea mays
  unsure (1)..(50): unsure at all Xaa locations
  Clone ID: MRT4577_81871C.1.pep
IAILRTXSRISARSLQLLRSLPSSRRRPIHFFHHSXNESNARRYSLGXLD

SEQ ID NO: 349457 - protein, 90 aa, Zea mays
  Clone ID: MRT4577_81873C.1.pep
LLSLGFSRCLPHGLAISALQLLLLCALYSVVDKAVILTAVISSTCSILTASRALKCCLRWNTQCSCKSLKVIRYTLSFAQKKKKKRPLGP

SEQ ID NO: 349458 - protein, 887 aa, Zea mays
  unsure (1)..(887): unsure at all Xaa locations
  Clone ID: MRT4577_81874C.1.pep
MDPQLKMALDTQTRSFVTELGKKFAAQDAKWETRIDNLERAAASASTQLCEFKDAILTNVTAQLASYNTNSANRLAHVEAATTTRVATLESTTAAFESWQCSLRLPLSQGFSEIIGQHPITHLPDAGLTAQKGKALQLTVGSMVLGFSMPETNSRPMFGGHTVESPTTPNLGSLPKLHFPTFDGDNPRLWISRSKDYFDLYGVGPSMWIWVSVQHFSGPAARWWQSMERKLKGASWREFSTWMLEHFGRDQHEQLIRQLFHIHQTSKVALYIEQFSELIDKLSAYENKTDPMFYTLHFIDGLKDTIKSNVLLHRPSTLDTVSALAQLQEEVMEPTRSEVRKPVYARGPSPAQHPLPLPRPPAPVKFTSEAGKGTRSTDDKLSSLKVYRRACGLCDKCTEKWFHGHRCAPTVQLQVLEEMWELMHEPVEQSCFLRSCFLFLRRCDSTEPDNKSISQELLSVSVSAVSELSSPHTVQLQGRFHHSXIHPTCFMLSTSCKLMAQQPCQLIWILASLQSCSXTLSTFEEPKGLPPSRSCDHSIPLVPGAQPILIQPYRYAPAIKDEIEAQVKDMLQSGIIKHSTSPFSSPVLMEGEEFKTAFQTHSGHYEFRVMAFGLTGASATFQSAMNNTLLLVLKKFTLVFFDDILVYSSSLEAHIEHLKVVLDLLQQDNWKVKLSKCTFPTWSISYLGHVISAAGVHTDPHKVSTIVTWPTPTNSKELRSFLGLAGYYRKFIRHFSIISKPLTNLLKKNTMFCWTTEHDTTFECLKTALSQAPVLALPDFSKQFILETDACAVGIGAVLMQAGHPLAFVTDSHAKELLAKLSLDGSSMPHFQLQNGLLRYKQRKWIGDDNTIKCQLVEVFHQSPLGGHSGIPVTYWKLKQVFAWRGM

SEQ ID NO: 349459 - protein, 214 aa, Zea mays
  unsure (1)..(214): unsure at all Xaa locations
  Clone ID: MRT4577_81876C.1.pep
ALRRRPALADVGQKEAGGLKVLHLXVRPFLAFLPEVQSADRKIPCTEKDIYTXVSLFIFLECSQLPLYGIHSTTGADPFYWMRVILASNRGTVMEVTITPIVTSGMGMQLLVASKIIEVDNSEREDRALLNGAQKLLGILIAIEEAVAYVLSGMYGRVSQLGTGNAILIILQLFFAGIIDICLDELLQKGYGSGSGISLFIATNICEYIIWKAF

SEQ ID NO: 349460 - protein, 476 aa, Zea mays
  unsure (1)..(476): unsure at all Xaa locations
  Clone ID: MRT4577_81877C.1.pep
MAGGFRVLHLVRPFLAFLPEVQSADRKIPFREKVIYTVISLFIFLVCSQLPLYGIHSTTGADPFYWMRVILASNRGTVMELGITPIVTSGMVMQLLVGSKIIEVDNSVREDRALXLNGAQKLLGILIAIGEAVAYVLSGMYGSVSQLGTGNAILIILQLFFAGIIVICLDELLQKGYGLGSGISLFIATNICENIIWKAFSPTTINSGRGAEFEGAVIALFHLLITRTDKVRALREAFYRQNLPNVTNLLATVLVFLIVIYFQGFRVVLPVRSKNARGQQGSYPIKLFYTSNMPIILHSALITNLYFISQLLYRKYSGNFLVNLLGKWKESEYSGHSIPVGGLAYYVTAPSSLADVLANPFHALFYVVFMLSACALFSKTWIEVSGSSAKDVAKQLKEQQMVMPGHRESNLQKELNRYIPTAAAFGGVCIGALTVLADFMGAIGSGTGILLAVTIIYQYFETFEKERATELGFFGF

SEQ ID NO: 349461 - protein, 97 aa, Zea mays
  Clone ID: MRT4577_8187C.1.pep
SGLIHNLDGGHMDSYESVLKKYPFGTTPPDPRLESGDGAVPNGPKESPPARIHIRLGRVCTKSSAHVRRRPHAVVGVDVTWLVNQRRVGGRSSDSTL

SEQ ID NO: 349462 - protein, 93 aa, Zea mays
  unsure (1)..(93): unsure at all Xaa locations
  Clone ID: MRT4577_81880C.1.pep
FIDCSRDRATPAPQGSSRNWSCGSRXGGVSSCKRGKKEPDLQETSTAAQPTXILGVAPEKKDAPEFGKAXSQPXKAAHGCSCTSGCKCNPSHC

SEQ ID NO: 349463 - protein, 44 aa, Zea mays
  Clone ID: MRT4577_81881C.1.pep
IIFLCTVISWYLILDAGKKTWTTFQIECLKHFVARNAPNRVFQM

SEQ ID NO: 349464 - protein, 97 aa, Zea mays
  Clone ID: MRT4577_81882C.1.pep
VKSLALVSSNSFLKFNTRSARSSLVPVRLTSRLSCSQSERRQVISTSFVKNTHIETSCQGRALFKRMVGTHTPLCRAAARTSSEPAQSEPALPSPPN

SEQ ID NO: 349465 - protein, 64 aa, Zea mays
  Clone ID: MRT4577_81884C.1.pep
MAAKIFCLLMLLVLFVRAATATIFPKCLQAHIASLLIAYLLPALPSLLNDSIFEHLTLQHYMIQ

SEQ ID NO: 349466 - protein, 75 aa, Zea mays
  Clone ID: MRT4577_81885C.1.pep
FVIPFCVVIGWTMGQKMDLNFQLFETATLFITVLVVAFMLQDGTANYLKGLMLILCYLIVAASFFVHVDPQSSEG

SEQ ID NO: 349467 - protein, 45 aa, Zea mays
  Clone ID: MRT4577_81886C.1.pep
VLKSYDKTVKLQNPNERLVQRSNHDLTVDDLTHAPKDSARYVSTV

SEQ ID NO: 349468 - protein, 51 aa, Zea mays
  Clone ID: MRT4577_81887C.1.pep
AVVSMKSIWVTRRVRQSYGSYVYYSDSVRFGLRVSFRATLCSSCWRPVLFP

SEQ ID NO: 349469 - protein, 81 aa, Zea mays
  Clone ID: MRT4577_81888C.1.pep
GVSRHRHQVLSASCTWLRDMWHVVAKVDPNPWLVGLYPGSPLWFQVSSTAPYRQPCGRQEWLHQCSVSRSVTSKLVCSRDV

SEQ ID NO: 349470 - protein, 58 aa, Zea mays
  Clone ID: MRT4577_81889C.1.pep
DRQYTDEGFNKTCGWRKDPTGLHIPTSYSILCTRSDGTYITYSIPSAKIKRGGRQKNK

SEQ ID NO: 349471 - protein, 74 aa, Zea mays
  unsure (1)..(74): unsure at all Xaa locations
  Clone ID: MRT4577_8188C.1.pep
MSSTECGVGGGGAKTSCAEVVGLSVKDAKKVILKDKSDADIVVLXPVGSEETVDYRPNRVQIFLDIVDQTPHIG

SEQ ID NO: 349472 - protein, 126 aa, Zea mays
  unsure (1)..(126): unsure at all Xaa locations
  Clone ID: MRT4577_81891C.1.pep
SGIPGSTHASGVLLAALGDAGAADLEAGAGPGREAAPATAAPSLGPALARAPDQPPSPDLPEDPSPSPPRSPDPARGQGPGRDREALRPCRSESPSLGXRGPRAHPSLQKKREQFLPKKMVMSAGI

SEQ ID NO: 349473 - protein, 89 aa, Zea mays
  Clone ID: MRT4577_81892C.1.pep
GGGPAASRVGSASGESRPVSSGAMSRNSLAPAARFMGGERCAAWAPGPPPPPPLCLLVGGGVGETPLWLWWWRCPCCAPSLLCHGVSAS

SEQ ID NO: 349474 - protein, 38 aa, Zea mays
  Clone ID: MRT4577_81893C.1.pep
PYRGVTRDLYHFHPDTSFHSKAPLACMSTQSYPYFILD

SEQ ID NO: 349475 - protein, 58 aa, Zea mays
  Clone ID: MRT4577_81894C.1.pep
NSLQFISHFLHYHAHGSFSIHPNIPRHFFRRQETLINTTNLGAVHLHHHDFQSHPSRN

SEQ ID NO: 349476 - protein, 51 aa, Zea mays
  Clone ID: MRT4577_81895C.1.pep
TCILYHGRPDFVIKFSHSYIQNSLFSLYINTTKTIATILPNFYTLYYATDT

SEQ ID NO: 349477 - protein, 157 aa, Zea mays
  Clone ID: MRT4577_81896C.1.pep
MAATAYSTALPGGARLPAAGAAAPPSALLLPRRNKLSPLPLRLQDAPRLSLLRVKASSDDSSAASGDELIADLKAKWDAVENKSTVLTYAGGAVVALWLTSVIVGAINSVPLLPKIMELVGLGYTGWFVYRYLLFKESRKELADDIESLKKKIAGTE

SEQ ID NO: 349478 - protein, 157 aa, Zea mays; identical to SEQ ID NO: 349477
  Clone ID: MRT4577_81897C.1.pep

SEQ ID NO: 349479 - protein, 140 aa, Zea mays
  Clone ID: MRT4577_81898C.1.pep
MVSFEMNDLKKIGLGLTGFGVLFTLLGIIMLFDKGFLAMGNILFVSGVLLTIGLKPTVQFFTKPKNHKGSIFFGFGFFLVLIGWPVSGMLVESYGFITLFSGFWPTAAVYLQKSPSFGWIFHHPLVTSLITRFRGRRVPV

SEQ ID NO: 349480 - protein, 58 aa, Zea mays
  Clone ID: MRT4577_81899C.1.pep
MSFTLFHDIWSGSKLTSLSLSHPGFRDPGVDIITMCARTKSYTYDDSWYRNECHIFTI

SEQ ID NO: 349481 - protein, 80 aa, Zea mays
  Clone ID: MRT4577_8189C.1.pep
RCSPVCFIGGLACATSTESLVNTLAAEGEIRDSNVIIDRETGKSRGFGIVAFSSDISMLDTIYYINGIDRDGRSITVNQA

SEQ ID NO: 349482 - protein, 99 aa, Zea mays
  Clone ID: MRT4577_818C.1.pep
DRRDPWSQHAHARGVVEPQLLLLLLLLLMVMMLARSRRRRAPIFVGRRPKAHPRAGEAAGCCSGLCLLAKRSQCVSPPIMVTHPVRGTRLAANALAFRP

SEQ ID NO: 349483 - protein, 105 aa, Zea mays
  Clone ID: MRT4577_81900C.1.pep
NKSNLAGSVSRMCCPPASIALHRHSTRRDIDGGRGFRRRRAGAAQIDGEWTDLASASQRRASLLLQYVARRGRYTGRIHGCFTLWHSVEQARALGKKMELATHDH

SEQ ID NO: 349484 - protein, 29 aa, Zea mays
  Clone ID: MRT4577_81901C.1.pep
CMVSEPASRDRLPYTIPYEMVHLIRRYTV

SEQ ID NO: 349485 - protein, 163 aa, Zea mays
  Clone ID: MRT4577_81902C.1.pep
KNDGTSPEPSPLKDKTATEDSYRGSLGSAKGLHGPVTTPVWFSLISLPNQKEDPQLKEDPQLPQLSKNGSLQISSIQRYIMKKLDLANENEVEIICHGEPICPSSTLRGLMELWHRRQPTEPVEASVGAPAEEFVMVLGYRCHRRHPYLAPGTTVAVPPELPS

SEQ ID NO: 349486 - protein, 246 aa, Zea mays
  unsure (1)..(246): unsure at all Xaa locations
  Clone ID: MRT4577_81903C.1.pep
MNRRLPARQTPINLRGIFLGNPLLDLYLYEKGKLEFMWSHGVISDEVWASTLHNCSFLHDLCSSNASEHTFEGGRMDCFNLYAPVCLQSPNGTYYSSSHRPXYVRSYLNSVEVQEALHARIRNWSACMPNLVWNDSPAIMVPTIRYLVDCGLRVWIYSGDFDSICSLTATRYSVKDFNLAVTKKWGPWYTPNGEVGGYVQQYQGGFTLASVRAAGHMVPTFQPERSLVLLKAFLSNTLPPADIVTN

SEQ ID NO: 349487 - protein, 97 aa, Zea mays
  unsure (1)..(97): unsure at all Xaa locations
  Clone ID: MRT4577_81904C.1.pep
NILLLVNHLXTSEKTIYFNRNSDFSGSRTYGFVSTRREYYCVVCFHLWCNVILFIICLYVCFATSRSEVTRNLTPKLGEISGVALKRQVVSLITFFT

SEQ ID NO: 349488 - protein, 158 aa, Zea mays
  Clone ID: MRT4577_81905C.1.pep
YLAVAGTQIDTEVLQLIPVCQLPGYDPCSDHYVRSYLNSVEVQEALHARIRNWSACMPNLVWNDSPAFMVPTIRYLVDCGLRVWIYSGDFDSICSLTATRYSVKDLNLAVTKKWGPWYTPNGEVGGYVQQYQGGFTLASVRAAGHMVPTFQPASRYPM

SEQ ID NO: 349489 - protein, 58 aa, Zea mays
  Clone ID: MRT4577_81906C.1.pep
LFHRAYKCLKDYRVCRSLIKHCPNHVYTYSRGLNTILSLSTKVRDFWNLQIIPKNARD

SEQ ID NO: 349490 - protein, 501 aa, Zea mays
  unsure (1)..(501): unsure at all Xaa locations
  Clone ID: MRT4577_81907C.1.pep
MRRSNTTTFVLLSVAILLGTSHVVASSQEAQLSKLMASGRSRPRLSLSRNGRAETDTCSDSGTYAPLPERCRRPPSGGKEADRIKELPGQPPRACRFGQYSGYVTVNEERGRELFYYFVESPRRRXSKPLILWLNGGPGXSSLGYGAMMELGPFRVNPDGETLSENKHAWNSLANVIFLESPAGVGFSFSRDAADYKTAGDRRTAEDTYIFLVNWLERFPEYKGRELYVAGESYGGHFVPQAATVVTLMNRRLPARQTPINLRGIFLGNPLLDLYLYEKGKLEFMWSHGVISDEVWASTLHNCSFLHDLCSSNASEHTFEGGRMDCFDLYAPVCLQSPNGTYYSSSHLPGYDPCSDHYVRSYLNSVEVQEALHARIRNWSACMPNLVWNDSPAFMVPTIRYLVDCGLRVWIYSGDFDSICSLTATRYSVKDLNLAVTKKWGPWYTPNGEVGGYVQQYQGGFTLASVRAAGHMVPTFQPERSLVLLKAFLSNTLPPADIVTN

SEQ ID NO: 349491 - protein, 248 aa, Zea mays
  unsure (1)..(248): unsure at all Xaa locations
  Clone ID: MRT4577_81908C.1.pep
SSHFTLGPYRNGGFLRLHTPFTFLRFLLQFIPPIQKVYAPGVAVSEGNGGLPKIDLKSPHGSEAEIYLFGACVTSFKVPNGKDLLFVRPDAVFNGQKPISGGIPHCFPQFGPGPMQQHGFARNVNWSITDSEVTEGDPAVTLELKDDTYSRSMWDFSFHALYXREEVTFPGFVDCVYLGAPSELILDNGLGDKIAIANSNWSDAVLWNPHLQMEACYKDFVCVENAKIEMVQLEPKQSWVAEQKIELV

SEQ ID NO: 349492 - protein, 37 aa, Zea mays
  Clone ID: MRT4577_81909C.1.pep
RGSTGTIYFFCLMCNDDTDQRLLPYYTAGWSLGLKKR

SEQ ID NO: 349493 - protein, 125 aa, Zea mays
  unsure (1)..(125): unsure at all Xaa locations
  Clone ID: MRT4577_8190C.1.pep
HACYHACYCPSVLCMDGDTYNSSLLSLIILFGVVKVVFILIGMALADRVLRSLLLLLSTSGMTWXLLVLGXVFAVYVKAMDDAKYAYRTREAHDCIVVGSFARSAPVARPYCSRMLTTPAATTRP

SEQ ID NO: 349494 - protein, 315 aa, Zea mays
  Clone ID: MRT4577_81910C.1.pep
MAASCASTLPSLSFVSSSSSSRRFRRSGVVAMASVGQKVYAPGVAVSEGNGGLPKIDLKSPHGSEAEIYLFGACVTSFKVPNGKDLLFVRPDAVFNGQKPISGGIPHCFPQFGPGPMQQHGFARNVNWSITDSEVTEGDPAVTLELKDDTYSRSMWDFSFHALYKVSLHSKSLSTTLAIINTDDKPFSFNSALHTYFSASITGVSVKGLKGCKTLNKDPDPKNPLEGKEEREEVTFPGFVDCVYLGAPSELILDNGLGDKIAIANSNWSDAVLWNPHLQMEACYKDFVCVENAKIEMVQLEPKQSWVAEQKIELV

SEQ ID NO: 349495 - protein, 152 aa, Zea mays
  Clone ID: MRT4577_81911C.1.pep
IGYLEAGRGFLSNSVDAFATAAQASSSAVGSASDPLPSSTMRAHPLILFVPAPPPHPLPRRADTHRALSSPCRRRYPVAASTPPSPSAPAAAPPAAPPRAQPQPVRTATKMVALTRCHGPLQLSIPKEGGNEGSLGKGFGFPLPFDRSRATK

SEQ ID NO: 349496 - protein, 152 aa, Zea mays
  Clone ID: MRT4577_81912C.1.pep
MGQRLLLLVTTCLWALSCAVPHDASSRDGLLRINLNKKSLTYESLAAAKVARQHGALRLKSSDSDSDIVPLVDYLNTQYYGVIGLGTPPQNFTVIFDTGSSNLWVPSSKCYFSIACYLHPKYKSSKSSTYKADGETCKITYGSGAISGFFSN

SEQ ID NO: 349497 - protein, 227 aa, Zea mays
  unsure (1)..(227): unsure at all Xaa locations
  Clone ID: MRT4577_81913C.1.pep
MGQRLLLLVTTCLWALSCAVPHHASSLDGLLRINLNKRSLTYESLAAAKAARQHGALRLKSSDLDSDIVPLVDYLNTQYYGVIGLGTPPQNFTVIFDTGSSNLWVPSSKCYFSIACYLHAKYKSSKSSTYKADGETCKITYGSGAISGFFSNDNVLVGDLVVKNQKFIETTRETSVSFFVGKFDGILGLGYPDISXVXEAPPVWLSMQEQKLLADDVFSFWLNRGSD

SEQ ID NO: 349498 - protein, 110 aa, Zea mays
  Clone ID: MRT4577_81914C.1.pep
MAAPAEKTITDLSGKWVLNKSLSDSSEPILALQGIGYLTRKGIGMATITLDVNQYSAPPKEPNTSTDVFTHIDITQSASGLTSTQENRCLDFEQREPSDWLFGSVRAVPD

SEQ ID NO: 349499 - protein, 59 aa, Zea mays
  Clone ID: MRT4577_81915C.1.pep
RISGANQAFRQAFRGPGGPKSFPSSSQPWTWFSFNLTGLPTGDYWLDFSVGPLGPLNNT

SEQ ID NO: 349500 - protein, 151 aa, Zea mays
  Clone ID: MRT4577_81916C.1.pep
MSPPLEPHDYIGLSASRSKAPAEEAASGAGPMYVKVSMDGAPYLRKVDIKMYSSYEDLSLALEKMFSCFIAGQSGLHKSSSKDRLTNGSKVDALKDQEYVLTYEDKDADWMLVGDLPWDYFTSICRKLKIMRGSDAVGIAPRTVEQTGQNK

SEQ ID NO: 349501 - protein, 272 aa, Zea mays
  Clone ID: MRT4577_81917C.1.pep
MSPPLEPHDYIGLSAAAAAAPPTPTSSSSSSSSPAPRLTLRLGLPGSESPDRDRDRDRCEDVAAALSLGPLPATPKAPAAVSAKRAFPDPAQRPGAAKASDDKQASPAAPPAAKAQVVGWPPVRNYRKNTLAASASRSKAPAAEDAASAARPMYVKVSMDGAPYLRKVDIKMYSSYEDLSVALQKMFSCFIAGQSGLHKSSSKDRLTNGSKVDALKDQEYVLTYEDKDADWMLVGDLPWDYFTSICRKLKIMRGSDAVGIAPRTIEQTGQNK

SEQ ID NO: 349502 - protein, 269 aa, Zea mays
  Clone ID: MRT4577_81918C.1.pep
MSPPLEPHDYIGLSAVAAAAPSTPTPTSSSSSSSSPAPRLTLRLGLPGSESPDRDRDCCEDVAATLSLGPLPAAAAVSAKRAFPDPAQRPGASKASDAKQQASPAAPPAAKAQVVGWPPVRNYRKNTLAAATASRSKAPAEEAASGAGPMYVKVSMDGAPYLRKVDIKMYSSYEDLSLALEKMFSCFIAGQSGLHKSSSKDRLTNGSKVDALKDQEYVLTYEDKDADWMLVGDLPWDYFTSICRKLKIMRGSDAVGIAPRTVEQPGQNK

SEQ ID NO: 349503 - protein, 139 aa, Zea mays
  unsure (1)..(139): unsure at all Xaa locations
  Clone ID: MRT4577_81919C.1.pep
PGTQXPAXRXDAXXARPDTQAKKQGNGKAKQANGKAXDPPPATGNPQKEAETKDKXERQXGNKEGQGGXKEGAKGGXTPXXTPETEGNSPKQQGADDNRXEGXAGRPQAAAHATXAAKEKEKDDEEDHXRRPAEXKARG

SEQ ID NO: 349504 - protein, 84 aa, Zea mays
  Clone ID: MRT4577_8191C.1.pep
GTCGIYKQNKRAGGADHSFIDARLKRWRILYTAGTPTPDTNENKAVSSSNMIMKERNAWTEKTEQSTNMDTVPVLAYVEKHLLD

SEQ ID NO: 349505 - protein, 259 aa, Zea mays
  unsure (1)..(259): unsure at all Xaa locations
  Clone ID: MRT4577_81920C.1.pep
PSVVSVLQELYFRSQSQEDEILLLRKKIAEASLKELRLLGEKHILERRLTDLRMAVDEKQEEAISGALQQLNQKKTHLEDNMRLANELKVEEEELYFFTSSLLSMLAEYNIRPPQINASIITTVTKRLYQQMHLKLRSLNDNLGDMTQPGNIYNPNLQQVTLSRNEPSPSYNLDSNRNTLQQYAQGPSDRHMDQMDTGGTTPSNYFEGDRRVDGDSQLYQPDGDALPGIEGFQIAGEPRPGFQLTACXXFPTNGTTLCN

SEQ ID NO: 349506 - protein, 70 aa, Zea mays
  Clone ID: MRT4577_81921C.1.pep
ERAPFFFFYIFFFFFFFFFWGFLKKNAGFKNPIPLKLNHGRGGLSILIPGKKIVPYTLNTLGLLNVIYEC

SEQ ID NO: 349507 - protein, 81 aa, Zea mays
  Clone ID: MRT4577_81922C.1.pep
VAIPTVAAAREHGHHITCKIRDHISTVNGAALTCTGPRNVIHVMRPRHAPRQNHQRQVSEQHSICCYQWQCSELEGRRLLP

SEQ ID NO: 349508 - protein, 180 aa, Zea mays
  Clone ID: MRT4577_81923C.1.pep
DAHRVDSSQDDRTGAGWECDVRRGKCFLTIPLPHPQFAEKFQEVKEAARLAREKSQDGGEFTSTGLALASHQVPPSPLVSTNGPGEEKLFRSQSADTPGPTERERLKKMLSEGSVGEVQWEAEFFALQDSNQRLAGALREANAAATQWRQQLEVQRAEAELLRQRVAELEAQVAVEPVRA

SEQ ID NO: 349509 - protein, 69 aa, Zea mays
  Clone ID: MRT4577_81924C.1.pep
LCWFFQELHGSFRSVFSTRQYKRVFFKKCFYRNLFDGQDFFLTLLIMGLFLKNLLRVYSLGAPAFLMLL

SEQ ID NO: 349510 - protein, 61 aa, Zea mays
  Clone ID: MRT4577_81925C.1.pep
RMHYWCEVRRYEGNIYKLHDQCCRMVEEVARSERPTSITRHSILSASVGAVWCHRRCKIVS

SEQ ID NO: 349511 - protein, 93 aa, Zea mays
  Clone ID: MRT4577_81926C.1.pep
GGPQGQGCLLRPPAVQGAHHGGDRGPRHRHIPRSLQDGHGPAPHEQPWLRLQPKGVPGQPHQPLRAELQTPGPHWREARVLQRSSHVTLQLSQ

SEQ ID NO: 349512 - protein, 122 aa, Zea mays
  unsure (1)..(122): unsure at all Xaa locations
  Clone ID: MRT4577_81927C.1.pep
VRFFLFMLLGLIWRKPFRFLLMNLRSLFFALLFWRFKCDFDGSFLIPLTSAHMILIQLGFESDNCTNSHDYMKLCDGSGKVDGWDKPTSIMWWFRIDSHRKSVKKEGNCCLALNEFYCEKXK

SEQ ID NO: 349513 - protein, 166 aa, Zea mays
  unsure (1)..(166): unsure at all Xaa locations
  Clone ID: MRT4577_81928C.1.pep
MAAPGSSNGGGGSRSQQQQPQQDKQSIWAGCFSGLSCFGAQKGGKRIVPAARIPDGNASTNRGNAQSGGNPNQNGAMNLPLLAPPSSPASFSNSALPSTAQSPNCFLSISANSPGGPTSNMFAVGPYANEPQLVSPPADFSTYTTEXSTAPLTPPPELAQATLHPL

SEQ ID NO: 349514 - protein, 65 aa, Zea mays
  Clone ID: MRT4577_8192C.1.pep
AQVTEQLMVNNGICPCLCTQYPDDWYQKLECTVTGATFLTRGNKCQERPEVQHIEIKAIVPGIIL

SEQ ID NO: 349515 - protein, 128 aa, Zea mays
  Clone ID: MRT4577_81930C.1.pep
CSNDLMASSKIPKQTFEQHDSIIKGKRRFSLLSNLQEKYEKDKEVPLQKEKSTKFKNNHDTRDTTSAVIERPQSIDITTIDTSINGWKATKHLIYRGQVWEIVDRKSMIRPLHKKLSTTRRRKWLPHK

SEQ ID NO: 349516 - protein, 113 aa, Zea mays
  unsure (1)..(113): unsure at all Xaa locations
  Clone ID: MRT4577_81931C.1.pep
GQNFYRYVITFVFPGSLRCQLHIHKCGNVDVXFRRQRCXYPAGKKFELRSEKGCNPNYLGVLVXYGSYDGDIVLMEIQDKLSDEWKPMKFSWAPIWRMDTAKALKGPFSIASQ

SEQ ID NO: 349517 - protein, 90 aa, Zea mays
  Clone ID: MRT4577_81932C.1.pep
SNQNCNSSYCTRQEAVVCEVNHWALALPHWQVALVLVLTALLLCWWSPITEIYIRRHLQWCLMQKLLRCRKGYSQKILELSFREETPFVA

SEQ ID NO: 349518 - protein, 73 aa, Zea mays
  unsure (1)..(73): unsure at all Xaa locations
  Clone ID: MRT4577_81933C.1.pep
LKQQQVQQSVQEQQQIEIQPFQVPNDANMVTQLSDQMTIQLLTALQPXQPLVMEQQRMISDLQHQAVHSQSTA

SEQ ID NO: 349519 - protein, 38 aa, Zea mays
  Clone ID: MRT4577_81934C.1.pep
LILTSCLVRGREQAIGSCCPQETMFHRASSGCSIVPLS

SEQ ID NO: 349520 - protein, 82 aa, Zea mays
  Clone ID: MRT4577_81935C.1.pep
TVHLETFIMCSLPHGTRKTDSTIYVRSNTIMSERDRSRQCSAESQRSESYDVSHQYDGVNDLMSLPSGNEGDGRTGGDKDVI

SEQ ID NO: 349521 - protein, 568 aa, Zea mays
  Clone ID: MRT4577_81936C.1.pep
MAATSAPPTSVHANGNGSLVGVAAPVGAPTNPMATALLTDQYQFSMAYAYWKAGKHADRAVFDLYFRKNPFGGEFTVFAGLEECIKFIANFKFTEHDISFLQSVMPMCEGAFFNYLREVDCSDVEVYSIPEGSVVFPKVPLMRVEGPVAVVQLLETPFVNLINYASLVTTNAARHRHVAGKSKVLLEFGLRRAQGPDGAISASKYCFMGGFDATSNVLAGNLFGIPLRGTHSHAFVSSYMSLDEIPNKALRNKDGSRVCEDFVSLVQEWLQKFQAADSLGGVFGDTNKSELAAFASYALAFPSNFLALVDTYDVIRSGIPNFCAVALALHDLGYKASGIRLDSGDLAYLSIEARKVFRAVEKEFNLPGFAKMLITASNDLNEETIDALNKQGHEVDAFGIGTYLVTCYSQAALGCVFKLVEINNRPRIKLSEDVAKVSIPCKKRCFRLYGKEGYPLVDIMIRESEPSPKAGERILCRHPFIESKRAYVVPQHVEELLQYYWPGTSDKPRAELPSLEKIRSRCMQQLEKLRPDHIRRLNPTPYKVSVSAKLYDFIHCLWLNEAPVGELQ

SEQ ID NO: 349522 - protein, 72 aa, Zea mays
  Clone ID: MRT4577_81937C.1.pep
NSARGETPFVNLINYASLVTTNAARHRHVAGKSKVLLEFGLRRAQGPDGAISASKYCFMGGFDATRSIILHL

SEQ ID NO: 349523 - protein, 128 aa, Zea mays
  unsure (1)..(128): unsure at all Xaa locations
  Clone ID: MRT4577_81938C.1.pep
KFLKNGXAXMVKIIPPKPMVVETFSQYPPLGRFAGRNIKQTVSVGVIKSVEKKDPTGAKVTKAAVKKKKWVLSWAPVYFGLGPGKFHLLKYIGCGPRVCCLGIQTVILKHVYLQGHLDWVRLFESPAF

SEQ ID NO: 349524 - protein, 409 aa, Zea mays
  Clone ID: MRT4577_81939C.1.pep
GSCGCRHPLLAVLLPLLLVLAMVPESAQLQSSQTWSLLKIQQLLSYPPVLRTWGNGTDFCYGGDYKTASAFVECYGDSVTQLHIMGPGGAPPLPKTFNLDALFTTLTRLPDLRVLTLTGLGLWGPLPGKVSRLASLEIVNVSGNYLYGQLPEGLSRLGGLQTFIADDNMLSGELPGWLGRLASLAVLSLRNNSLQGAVPESVRDMGSLRSLALACNNLSGQVPDLSALTNLQAVDLSNNSLGPAFPRLGRKVASVVLSGNRFGNGVPAEEVASLYLLERLDVSRNRFVGPLPPALLALPSIEYLSVAGNRFTGLLAANMSCGENLRFVDVSSNLLTGTLPSCLKTLPSSSNSKQVTVLAASNCLSGGAGSTQHPALFCQNQALAVGIVPVQARGGGKAKGKAGAVAGAV

SEQ ID NO: 349525 - protein, 50 aa, Zea mays
  Clone ID: MRT4577_8193C.1.pep
CQGSIRIKDSGHEGRRSWRSVCCCCTVVYLHMEISEDSIFRPVWFSVTKL

SEQ ID NO: 349526 - protein, 124 aa, Zea mays
  Clone ID: MRT4577_81940C.1.pep
MAAADPLVVVVAVAIAFLLAAAAAAAPLPGGGGGLPFPLLPADPGAGCRGPVGTCPAGDEAPPDFGEASTMAVDDHPVRARRVQHQRRDSVPCSRRGASYYNCRPGAPASPYSHACSRIKHCHG

SEQ ID NO: 349527 - protein, 122 aa, Zea mays
  Clone ID: MRT4577_81941C.1.pep
QIQPRQREALGVQAIGKSPFPCGQNAGNGGSFGGKGCCLAAPGRRPRGCPGPARPVSSSGPCRGPGAGATRGRKSCSRAPLRDLFCLQLQSAFSPLKWPGKWSFCNAQILDGCSVELNPFAV

SEQ ID NO: 349528 - protein, 68 aa, Zea mays
  Clone ID: MRT4577_81942C.1.pep
CHEDSVEHEEDDCNEALWRHEARRAITRTGSIRQGIPVAVWLSTPGRPPLLLNCSTACHRRRDHPRSP

SEQ ID NO: 349529 - protein, 79 aa, Zea mays
  unsure (1)..(79): unsure at all Xaa locations
  Clone ID: MRT4577_81943C.1.pep
LIWPITIXHQPSRIHLVPPAYIRLAFSPRXXVMTXXERLGGHXDRRPILCPMSQHSEKSLPMSLLPSEMRVILSSVRAX

SEQ ID NO: 349530 - protein, 172 aa, Zea mays
  unsure (1)..(172): unsure at all Xaa locations
  Clone ID: MRT4577_81944C.1.pep
KTDINIVSNASCTTTCLAPVANGINDKIGIEEGLTPTAHAITATQNTADGPSSNDWRGGRAASFNTIPSSTGAAKAVGKVLXVLNGKLTGMSFRVPTANDSDGDLTGRLEXSASYHXINDAINAQPECSLQGMLGYGEEDLDSTHSQGDSTSNIVDAKAGIALNGNILKLAY

SEQ ID NO: 349531 - protein, 66 aa, Zea mays
  Clone ID: MRT4577_81945C.1.pep
GCRRFSSPINPSGSVTYGRRTGNKRAKHVQTHLNVPTQSPTIHINTRHLFFDTVGEKHGGKTPFVF

SEQ ID NO: 349532 - protein, 67 aa, Zea mays
  Clone ID: MRT4577_81946C.1.pep
ALLINLHRYLRLRNFLAFPASAGRPEGSSPAQGSSSGNHHQMNSNKREYMKTIDASTIEDPRFSHVP

SEQ ID NO: 349533 - protein, 84 aa, Zea mays
  unsure (1)..(84): unsure at all Xaa locations
  Clone ID: MRT4577_81947C.1.pep
KKKRKKKKKEKKKKKNXKRXXXGRRQXEXGRAXGEXQKKKKKKKKKXPXPKXRPRKKRPGAARPXXKGKXKKGLEGAEDGWGEG

SEQ ID NO: 349534 - protein, 71 aa, Zea mays
  unsure (1)..(71): unsure at all Xaa locations
  Clone ID: MRT4577_81948C.1.pep
XXXXXXXXXXXXXXXXXXXXXXXXXXXXXXXXXXXXXXKLRLKTEGLCSLTAASSRNNLFSIKHQGHKHLN

SEQ ID NO: 349535 - protein, 219 aa, Zea mays
  Clone ID: MRT4577_81949C.1.pep
MPRDRDEPAAVRVYTVCDESRYLIVRNVPSLGCGDDLASLFGTYGPVEECTPMDAEDSEPYTDVFFVKFSQVNNARFAKRKLDESVFLGNRLQVTYAPQFESPQDTKEKLEVRRKEVLGRIKSSAGRPEGSSPAQGSSSGNHHQMNSNKREYMKTIHASPIEDPRFSHVPSDKDYFPSESMNATVKLVRGKLDKIQSGGDNSSTSAASRKPGVDKRRRI

SEQ ID NO: 349536 - protein, 77 aa, Zea mays
  Clone ID: MRT4577_8194C.1.pep
SKNNYPKNARQEKWGAKKDLPNATKMGWGARLFRGGAHWLRGPLPGGGVRRQTQEGNLGEVPLFVFHKFEQFLFLKV

SEQ ID NO: 349537 - protein, 145 aa, Zea mays
  unsure (1)..(145): unsure at all Xaa locations
  Clone ID: MRT4577_81950C.1.pep
RCGYHVVQXTIECIPQEKIQFIISAFYGHVVEFSXHPYGCRVIHRVLEHCDDESTHNAMMEEIMQSAATLTEDQYGNYVIQHVLQHGKPEERSTLITQLAGQIVKMSHQKFASNAMMNDQFAHYVVHKVLEICDDQNRELILSRI

SEQ ID NO: 349538 - protein, 63 aa, Zea mays
  Clone ID: MRT4577_81951C.1.pep
LCSPPREFLPLHLVSYKMICMLAMLCKLYLWWCSLRRVFGLSVSERCHGLLSGRGVVDGASAS

SEQ ID NO: 349539 - protein, 712 aa, Zea mays
  unsure (1)..(712): unsure at all Xaa locations
  Clone ID: MRT4577_81952C.1.pep
VCSSISRSTTPDPQLIRRTPSPCLPPVGVRMGSSDKKSXASVSSLNHDGADIVATLSSLSLSGNKMSNVENQAQNHVYQNFGDQADVLFNVPKEHRQFSPQILSQNTDDGSFNAPEYAVFPNGGSNFSNLHASKVASHSNSKFSXNHHTVMPTXGSLMSSTGSVSQYQNLNGDSHDIDVSGQYMKTHAGGFTSSMLNNQLNPDGDYGNVLSNNGVSGYQGQPTETMYAQCLQANPDSPLGAAASMSPFQGRGFTGSGHLDSPGYQKAYLGTLFAQQKLQYGMPYLGKSGALNQSIYGSDPAFGIGMTYLTSPPSSQYISSPRGHVRQADRPTRLPAVRNTAGGSLGSWNSENGLMDNGYGSSLLEEFKTNKSRSFELLDIIGHVVEFSSDQMGSRFIQQKLETASTEQKNMIFPEILPQARTLMTDVFGNYVIQKFFEYGTETQTKQLATLLKGFVLQLSLQMYGCRVIQKALEVVEVEQQTQMALELDGSIMRCVRDQNGNHVIQKCIECIPQERIRFIISAFYGHVVELSMHPYGCRVIQRILEHCDDESTQNAMMEEIMQSVVTLTEDQYGNYVIQHVLQYGKPEERSTIIAQLAGQIVKMSQQKFASNVVEKCLTFGSPEQRQILINEMLGTTDENEPLQAMMKDQFANYVVQKVLETCDDQNRELILSRIKVHLNALKRYTYGKHIVTRVEKLIAAGERRIGALPSC

SEQ ID NO: 349540 - protein, 447 aa, Zea mays
  unsure (1)..(447): unsure at all Xaa locations
  Clone ID: MRT4577_81953C.1.pep
RPSSRRSSLRRNPSPPXSVRLSLNRSEELVSPDPAATLPSLGLASGDLVFFTLSPLTALAPPAQALPRNPSPSSGAAASIAEAADRGKGSKQSGTGDFSSSSLAQAVVVSPSFPVASGTRDVVMEEEAVDATKGWSSFVLRDLKREMDNVGAAEGTAAGRLVAALHAALLDAGFLTAKLTGSHLSLPQGWPSGALKPLTIKYTIPELSSMVSVTEEGKVVVLNYSLMANFVMVYGYVPGAQSEVCRLCLELPGLEPLLYLDGDQLNGVHEKGVHDLWRVLKDEICLPLMISLCQLNGLRLPPCLMALPADLKTKVLGFLPGVDLAKVECTCKEMMNLASDDSIWKKLVSKFENYGEGSRLAGKNAKAIFVEAWQANKRRQKRPNPTFWNYGWGNSPYSRPLRLPLIGGDSDRLPFIGNHGSVGRHFGNQRRNISPNCILDGHRHNFL

SEQ ID NO: 349541 - protein, 48 aa, Zea mays
  Clone ID: MRT4577_81954C.1.pep
ESVPPDDPGSPGGLTDEFQTRVGRPWLGPARNEPYIGSQTGGESLEPN

SEQ ID NO: 349542 - protein, 85 aa, Zea mays
  Clone ID: MRT4577_81955C.1.pep
LGGDLHGTVFRIVGCLQLSSVVGIKGVIHKGLLFSHIADELENFADSRPEAVGYVMPLPDEEPRRGHRVLLTSRPSSRAMVDDYC

SEQ ID NO: 349543 - protein, 1136 aa, Zea mays
  unsure (1)..(1136): unsure at all Xaa locations
  Clone ID: MRT4577_81956C.1.pep
MNGLRSGSTSPSLVRVQSLGSSMSHTFASAVGSSISRSTTPDPQLIRRTPSPCLPPVGVRMGSSDKKVEAAAVASLNHDNADIAATLSSLNLSGNKMSIVENQAQNHVYQNFGDQTDVLFNVPKEHRQFSPQILSQNTDDGSFNAPEKKKKKKKKKKKKKKKKKKLGEPVPQARATRAKEDESEVERERERKTLPRPGSRRRRKRRRPQRRHAREPRRSSTRAVPIRRPDRRISSPAPGPSIALSPCPCPSGGFIARAPAMSDLASSCKDKLAYFRIKELKVILNQLGIPKQGKKXDRVERVLPILLDEQGQHHHGWGRKNALTREAVAKVVDDTYRKMQVCAPDLPSRSHSGSDFSHFRPKEEAPDFYHVDTKVRCLCNSTLLNDNMSKXEVGKSLVWQHITYVLIPYKPTEGAGPYFPQNFYCDLDGVTFEDPVWVFIRNXMNXVKFMSSGVGNDGASVPQIVEKTFQLSRADRETVQRQEYDLQVWCILINDKVQFRMQWPQYAELQVNGIPVRVMTRPGSQLLGINGRDDGPLVTTCSREGINKISLSRVDARTFCFGVRIVRRRTVPQVLNLIPKEGEGESFEDALARVRRCLGGGGATDNADSDSDLEVVTESVTVNLRCPNSGSRMRIAGRFKPCVHMGCFDLETFVELNQRSRKWQCPICLKNYSLENLMIDPYFNRITSLLHNCSEDVNELDVKPDGSWRVKGDARTSLCLSLXILIQGSLXHTEIANPGIDSVNEFKREGTSDVHRTLKLGIKKTPNGLWQVSSKPDDKKPVVRNHIQNNTGYSIPNIVPMISSPTGSCRDGEDVSVNQEGGGIQFDISLNQEFDSFAHNFGQTYNTEDRQQEPQHNAADVIVLSDSDEENDPIVQPAXVYANTPTNGDSFPFVTDAAVSGYPEGYQEDAGVGTSGLGLLSNNTGDFEINNWQMHSYPQPEQGFQFFGTDTDVGNPFVGPHNSFSITPEDYSLDCNVGIEDPSAAHDVSICRNSNDVHGSLVDNPLALAGDDPSLQIFLPSQPSTVPLQEELSERANTPNGVHPDDWRISLTLAAGGGGNEEPTSVDGLKSQPKVPSKEAGVEPLLDAASALPSMNNDRCNGSNLNPRRIENIFSHPRQPRSVRPRLCLSLDSDSE

SEQ ID NO: 349544 - protein, 45 aa, Zea mays
  Clone ID: MRT4577_81957C.1.pep
MARAKQTGRKSTGSKAPRKQLGTKAARKSAPTTGRVKKPHKYKPR

SEQ ID NO: 349545 - protein, 85 aa, Zea mays
  Clone ID: MRT4577_81958C.1.pep
RLMNTIKSRLGPLKGCDLASPEPSLGQGQPTPEDLRLVRGPPQATDTPSARPRPSLRQEATLAKSPQRPTVSQEHLMQRWPDTLS

SEQ ID NO: 349546 - protein, 97 aa, Zea mays
  Clone ID: MRT4577_81959C.1.pep
YKRKELNLLKYEALKDELLLLTTGIGAACSLYCLLVFYLETAVSYALGVGFNCLYIKLVSEHADNLSKQDIAHVFVKKKGKKIGFQVMIGENTVHKT

SEQ ID NO: 349547 - protein, 179 aa, Zea mays
  unsure (1)..(179): unsure at all Xaa locations
  Clone ID: MRT4577_8195C.1.pep
SAVSTEEAVVXAEVPVTEVPTEVPSAHVAEGPKDNKAPXKEKKVPKEKKLSAPKKPAAHPPYAEMIVEAISALXERNASSSVAINKYVEGXYGGKLPTIFCWXFTVQLNNVAVVGKLTRLKNSFXWRAPTPRPRTSCPMHSMSRPMPSPRXESDVKTAANSKAVSSQSCAKDMAKPVAP

SEQ ID NO: 349548 - protein, 37 aa, Zea mays
  Clone ID: MRT4577_81960C.1.pep
GHDIHKIRVDMFMVQSSHKTALLATHNSMVSRISFQK

SEQ ID NO: 349549 - protein, 195 aa, Zea mays
  unsure (1)..(195): unsure at all Xaa locations
  Clone ID: MRT4577_81961C.1.pep
LEAGRTPPIHSPALPRRPSSPPPGHHPPPPALPVAPIVVSDALTDGQVGRIDQNDQLQQDSVHALXAAGNEGILFGDPGSFTPTCSNQHATGFITHAEQLIAKGEYEILLISANDPFVMXAREKTYREKKQVXLLYDGSGAXTKGLDLKFDLRDMGEGVRSKRIILLCEGLAGNVASIEGGAHMAISGGDEIPKG

SEQ ID NO: 349550 - protein, 67 aa, Zea mays
  Clone ID: MRT4577_81962C.1.pep
VDFLNKNKLCRSGLHVVSNNMQEGSIFNMVSIVRSFLQIRYRRHINFKYSLPLGSLRLLNQFCSTCI

SEQ ID NO: 349551 - protein, 133 aa, Zea mays
  unsure (1)..(133): unsure at all Xaa locations
  Clone ID: MRT4577_81963C.1.pep
ILPPSATAKRPVVFSAWXRRXPGEAEQRPNXKLWKQRTDXLYMRPFLVNVFFFKRFVHAKVMHRGPSKVISVAPPNFKDLRVTLPFFFDDNAFRTIRRLFSERFMDAHVFFMAFXPKKNERIEGKLGVVIYPL

SEQ ID NO: 349552 - protein, 231 aa, Zea mays
  Clone ID: MRT4577_81964C.1.pep
MAATTPDGIRESSAAPSPLRSRGSTPPRQLKAAPALAVADTPATAMDKTLASVANLAKLLPTGTALAFQSLSPSFTNRGACLPSNRYLTAALLYLCLVSCVFFSFTDSFVGTDGKLYYGLATVKGFLVFNYTGDDDDEGDAERRRQVFKDLRRLRIRWVDYVHAGFSAVVFLTVAFGTAAVQSCFFPNAGENVNQMLINLPLGAGFFSTMVFLVFPTTRKGIDYTGHFTNV

SEQ ID NO: 349553 - protein, 98 aa, Zea mays
  unsure (1)..(98): unsure at all Xaa locations
  Clone ID: MRT4577_81965C.1.pep
XKTAFTKKARIKGGVTXXPLNKRGGGAPYFGAPVSRGNPVGGMAPWAPYPKPTLHFPPRGGGFPKGKKPFPGPLGGFFPGTPNSVGRFPGEPKPRGPX

SEQ ID NO: 349554 - protein, 60 aa, Zea mays
  Clone ID: MRT4577_81966C.1.pep
PVCGTYHRLLPVHIEHECALAASTLFDLLQLLPFKQLALTSLAVFCQQPIIGGALLLDFL

SEQ ID NO: 349555 - protein, 88 aa, Zea mays
  Clone ID: MRT4577_81967C.1.pep
GGGGHTLFVARKIDWLVNPSPIFKSCFFCVEGEELFTLWFFCGVFPRVFWFKFFGLYYCDGPSFGCWPKPKKGGGGRFRGGFIFLWSG

SEQ ID NO: 349556 - protein, 67 aa, Zea mays
  Clone ID: MRT4577_81968C.1.pep
GMSFAPGKPQQEPMRYLTRMLLKFPETLHNAAEPKRRTCKAVSGDYLQHTVTRNGPPLVPKQRDRAN

SEQ ID NO: 349557 - protein, 56 aa, Zea mays
  Clone ID: MRT4577_81969C.1.pep
QKRMGHDSLREWGQAGSRRRGAFCIGRKGYAHSTMGEIHCLVLRSCLSVLHGAFMY

SEQ ID NO: 349558 - protein, 44 aa, Zea mays
  Clone ID: MRT4577_8196C.1.pep
VNVQVVLKKEDSNQRICDCINNQVHLSVLCPINLIGVFKKKFKI

SEQ ID NO: 349559 - protein, 51 aa, Zea mays
  Clone ID: MRT4577_81970C.1.pep
YIRLPFFFSSLFPFLVGFTRVWVGTLSIISIFFLCVASPLLDSRRGPHFSL

SEQ ID NO: 349560 - protein, 177 aa, Zea mays
  Clone ID: MRT4577_81971C.1.pep
TPALCYGFQLPTQREEAGNQIILRHGLLQKESVPTGGHDHSCGAATKSCKARQHHEGCRLDARERPRSSAGGHSYAQATSRGCDAALLPDILSSKPASSRLLMMMVVAGCKVKLAATHNHILPASRKIKNQARPDQRASQLTSRCARRTDCFRNGRPARSSQHSYIGQRAGRERVAF

SEQ ID NO: 349561 - protein, 40 aa, Zea mays
  unsure (1)..(40): unsure at all Xaa locations
  Clone ID: MRT4577_81972C.1.pep
RLQNTNKEHVYCRDNELHXRLFRFPYHRKGYAXCCMHCLI

SEQ ID NO: 349562 - protein, 942 aa, Zea mays
  Clone ID: MRT4577_81973C.1.pep
MEGDDFTPEGGKLPEFKLDARQAQGFISFFKKLPQDPRAVRLFDRRDYYTAHGENATFIARTYYHTMSALRQLGSSSDGILSASVSKAMFETIARNILLERTDCTLELYEGSGSNWRLTKSGTPGNIGSFEDILFANNDMEDSPVIVALFPACRESQLYVGLSFLDMTNRKLGLAEFPEDSRFTNVESALVALGCKECLLPADCEKSIDLNPLQDVISNCNVLLTEKKKADFKSRDLAQDLGRIIRGSVEPVRDLLSQFDYALGPLGALLSYAELLADDTNYGNYTIEKYNLNCYMRLDSAAVRALNIAEGKTDVNKNFSLFGLMNRTCTVGMGKRLLNRWLKQPLLDVNEINNRLDMVQAFVEDPELRQGLRQQLKRISDIDRLTHSLRKKSANLQPVVKLYQSCSRIPYIKGILQQYNGQFSTLIRSKFLEPLEEWMAKNRFGRFSSLVETAIDLAQLENGEYRISPLYSSDLGVLKDELSVVENHINNLHVDTASDLDLSVDKQLKLEKGSLGHVFRMSKKEEQKVRKKLTGSYLIIETRKDGVKFTNSKLKNLSDQYQALFGEYTSCQKKVVGDVVRVSGTFSEVFENFAAVLSELDVLQSFADLATSCPVPYVRPDITASDEGDIVLLGSRHPCLEAQDGVNFIPNDCTLVRGKSWFQIITGPNMGGKSTFIRQVGVNVLMAQVGSFVPCDQASISVRDCIFARVGAGDCQLHGVSTFMQEMLETASILKGASDKSLIIIDELGRGTSTYDGFGLAWAICEHLMEVTRAPTLFATHFHELTALAHRNDDEHQHISDIGVANYHVGAHIDPLSRKLTMLYKVEPGACDQSFGIHVAEFANFPEAVVALAKSKAAELEDFSTTPTFSDDLKDEVGSKRKRVFSPDDITRGAARARLFLEEFAALPMDEMDGSKILEMATKMKADLQKDAADNPWLQQFF

SEQ ID NO: 349563 - protein, 69 aa, Zea mays
  Clone ID: MRT4577_81974C.1.pep
LVYEITVVVVINGGTGALNHVSADMVRGNRGAVGTAEVQCVKSLPAPRLSYAVNRCMQEDSDISNRYND

SEQ ID NO: 349564 - protein, 149 aa, Zea mays
  unsure (1)..(149): unsure at all Xaa locations
  Clone ID: MRT4577_81975C.1.pep
PGRYAGNQVVAANLAAYLQQQQFFPFNQQTLVXPFSFNVGSKRGPLQPSVGIPAPLLLQQQLVQFRPQVVXADIGAFVQQQQVGPFSPQVVGTISAFWQQQQMRPFYPQDVANILALLQQQQLLPFGQLALSNPSPLLHQPPIXGGAIF

SEQ ID NO: 349565 - protein, 86 aa, Zea mays
  Clone ID: MRT4577_81976C.1.pep
ICAFQKIPILYSNGKSTYLGQSMETTISYYSWGALSHKINVTHQFPTSYVLLMILPLLSIISPLFKSLFTLSFIKIKVSFTANFSP

SEQ ID NO: 349566 - protein, 189 aa, Zea mays
  unsure (1)..(189): unsure at all Xaa locations
  Clone ID: MRT4577_81977C.1.pep
MGISRDSRQERRATGGNQKAGRKKPQYXELGRXPTNTKVTNNETVMRDRDREGNAKWRALHLDTGNYSWGIDDDARMTRILDDALXTSNNELVXRTQTPAKTAXIVQLDAAPFKXRHLTHYGVDIGTKNKTAAXTTMNALRQQVLVPDEETKIIYHVTRTLVKRNEGRPLDPHIEEHLVSELLLACISS

SEQ ID NO: 349567 - protein, 99 aa, Zea mays
  Clone ID: MRT4577_81978C.1.pep
MCTKILCALDKFSWCPVRLPLFPLAVADFSSRQTLILLLPFSSPTVGRAVAVAMEGKEEGRIFVGGLSWQTDERKLEDAFGRFGKVVDAQVPVPPVRLR

SEQ ID NO: 349568 - protein, 55 aa, Zea mays
  Clone ID: MRT4577_8197C.1.pep
KYGFYYLAWLVKRRGPPTIIAVQAVEPAFLSSKQTALKNFFVWPSPGTHMGRTLG

SEQ ID NO: 349569 - protein, 85 aa, Zea mays
  Clone ID: MRT4577_81980C.1.pep
QRIRISFNVLENLLIILHQLNAVIAVKSILSCEKRIDFLHSLLDKFVTPESFQGEVSSLLDKEEISSIFLEFLVLFGAVGIIYIL

SEQ ID NO: 349570 - protein, 280 aa, Zea mays
  Clone ID: MRT4577_81981C.1.pep
MPSAPLVAAAIGTRVSLRPNLSLLADRCATPCALARVHAAMLVSGRLAEDAFAASRLLDAYVALSPDPAAAALALLSSLPCAPNSFMFNTTLRVLASSPDPATAFPFFSRIHGTGALVPGRHTFPFLLKAAARLPLSLPVTEQLHALAVRHGVHLDAYVANGLVRAYSVAGLLRPARRVFDEVPERNAAVYTTMVSAYAQNGRHEDAMAAFVQMVRVGFEPCGAALASVLSACARSPSGGLEMGRHVHDLMVARRGSWSHPRHGAGRHVRQKWRHLRGLG

SEQ ID NO: 349571 - protein, 186 aa, Zea mays
  Clone ID: MRT4577_81982C.1.pep
MEDERSTQSYQGGEAAEQVEVTDRGLLGNLLGKKKAEEDKEKQEELVTGMEKVSVEEPEVKKEEHEDGEKKETLFSKLHRSSSSSSSSSDEEEEEVIDDNGEVIKRKKKKGLKEKLKEKLPGHKDTEGEHVTGLPAPAAPASVQTHHDTDVVVEKIDGDVKTEAAPAVPEEEKKGFLEKIKEKLPG

SEQ ID NO: 349572 - protein, 59 aa, Zea mays
  Clone ID: MRT4577_81983C.1.pep
QVDSCSRLKRMCVYLLVFLDGSLNNEGGCERLFSSRHLEGVVLELRIIGATIGRQSSAL

SEQ ID NO: 349573 - protein, 63 aa, Zea mays
  unsure (1)..(63): unsure at all Xaa locations
  Clone ID: MRT4577_81985C.1.pep
SAIIVAQWDRFATPKHREAXAGGFLGLGLSGVVPTMHFTIAAGFVKATTVGQMGWFFLMAVMY

SEQ ID NO: 349574 - protein, 74 aa, Zea mays
  Clone ID: MRT4577_81986C.1.pep
HRPDRRPCRKIPADVAGLRLLLPPVQEQAQLVEVALLQHALAVVKIDQRLIHLPRAIVQQLPHVASRDDVHVVP

SEQ ID NO: 349575 - protein, 106 aa, Zea mays
  Clone ID: MRT4577_81987C.1.pep
GRATFPWPREGDASDLHKPMSAASLRHRPHPPPSSTTPPRSSSVATTPFAVVLIQRHGLGFEHSSIVSLPLLHHLLASSLLCVLHQDLASIFGPNAYFLQKPRIQI

SEQ ID NO: 349576 - protein, 100 aa, Zea mays
  Clone ID: MRT4577_81988C.1.pep
MAPDHRVSEHLITGSSSYLRRHGTSVLAQEFMVSTHDYDIEEEEEIHGFALPHQSAPRDMESTGRHPFRHQIVRLSETADIKFKWRVLLQPGIRHALCYD

SEQ ID NO: 349577 - protein, 55 aa, Zea mays
  Clone ID: MRT4577_81989C.1.pep
RDAVIRCHLIIMGDPETHRAGQGQQPHDLTMLTGQRSSHTARRCSRRRTCLLQLS

SEQ ID NO: 349578 - protein, 85 aa, Zea mays
  Clone ID: MRT4577_8198C.1.pep
SFKFESGYLCVKPFICELGRVIRNRSEDFLPFASTRRSRSRSQTSKTYSLHRTRPVPRYRHLSGTRAPAADREGNSLPTRPTTRP

SEQ ID NO: 349579 - protein, 64 aa, Zea mays
  unsure (1)..(64): unsure at all Xaa locations
  Clone ID: MRT4577_81990C.1.pep
RASPKAQTKAAYRSVQNRCHXPKWAGPPXQKMAVFLSYEYALFSYPYTRLAYDHQQTRCYELRG

SEQ ID NO: 349580 - protein, 171 aa, Zea mays
  Clone ID: MRT4577_81991C.1.pep
MAPDHRVSEHLITGSSSYLRRHGTSVLAQEFMVSTHDYDIEEEEEIHGFALPHQSAPRDMESTGRHPFRHQIVRLSETADIKFKWRVLLQPGIRHALCYDMLIQAIQQSTGISGLLRCAPEIFEQSGVASLFSDIGVSPHSTSILMSTLNALLILPCITAAMLLMDVCGRR

SEQ ID NO: 349581 - protein, 409 aa, Zea mays
  unsure (1)..(409): unsure at all Xaa locations
  Clone ID: MRT4577_81992C.1.pep
MDDAGRAPPPAPAAVTVSATAAPAPTPPSATVAADKSSLDPDALYEEGMWQQMAMNSGATMQPGSYPERPGEPDCTYYLRTGLCRFGMSCRFNHPPDRNLAIASARMKGEYPERVGQPECXREKAGIAGRVQLNTLGYPLRPNEKXECAYYLKTGQCKYANTCKFHHPELFNVVPSSRGSPIYTSVHSSASAGPQSYTGTMSSWTFPRASFIPSPRWQSPSNYAPMIVPHGLVQVPSWNSYPGQLQSPGAQQTYGSSQQGEASAGNQGMLSPYRSSSFPVPQYALQRDNVFPERPDEPECQYYMKTGDCKFGAVCKFHHPRVRSQPPPDCVLSPMGLPIRPGEELCKFYSRYGICKFGANCKFDHPTMAAPMGVYAYGFSGSASVAPASTNAPMTRHLLGSPSGSGYMS

SEQ ID NO: 349582 - protein, 72 aa, Zea mays
  Clone ID: MRT4577_81993C.1.pep
TKWCFLFFPTPVCSFLEAVWGYPRTPFIGLHHCSPLPIGFLNAQTPRPIKVCFGGPLFWFAFMVESLGFLFG

SEQ ID NO: 349583 - protein, 135 aa, Zea mays
  unsure (1)..(135): unsure at all Xaa locations
  Clone ID: MRT4577_81994C.1.pep
FTDGILVQTVTRDDICVFIAXAHPVXIKTWAPDGDQIRLIAEDHSRRCTLLCPPEKTIQEVMFARFVDPXGMCGNLTVGTRHTLNAKLIAEKDCLYKPFCMLSPDHTVHGADINCQQTTATLLEQVRCHRRKKGA

SEQ ID NO: 349584 - protein, 264 aa, Zea mays
  Clone ID: MRT4577_81995C.1.pep
MDDAGRAPPPAPAAVTVSATAAPAPTPPSATVAADKSSLDPDALYEEGMWQQMAMNSGATMQPGSYPERPGEPDCTYYLRTGLCRFGMSCRFNHPPDRNLAIASARMKGEYPERVGQPECQYYLKTGTCKFGPTCKFHHPREKAGIAGRVQLNTLGYPLRPNEKECAYYLKTGQCKYANTCKFHHPELFDVVPSSRGSPIYTSVHSSASAGSQSYTGTMSSWTFHELLGVFWEGVFLGGVYVFFFFFFWVVFFFIKSMALPQAL

SEQ ID NO: 349585 - protein, 76 aa, Zea mays
  Clone ID: MRT4577_81996C.1.pep
LCPNETPNSTKEGHFDFFKKGAMKKPNYLVPQKIDGGAYFQPICLKNNFIRRPWEKVFLETKNWLEKLLKRALRGP

SEQ ID NO: 349586 - protein, 224 aa, Zea mays
  Clone ID: MRT4577_81997C.1.pep
KKKKKKKKKKKKKKKKKKKKKKKKKKKKKKIPLGNRKKGGFRTPLFPEPKGSPLPHFFFIFPPRPRLPLLKNPRGGGFSIQMGKAGIQVENGGGELNGPKKGFRVGGKRPGEKTLGGGEEVFNPFFRETGVGKPPPRGVFVDLDPPAFKGGGRGPYRRFFHPEKFIGGRGEAAKNFAGGHNPMGKEIVDLGLDRIRKFEKNGPGPRGFLVFKVVGGETGSGLGS

SEQ ID NO: 349587 - protein, 74 aa, Zea mays
  Clone ID: MRT4577_81998C.1.pep
GRLVRSARLSAGSEERSAPCTHGRGRVYAGTHALWEPPGRPCWRAPSTNHASCMTPCTATISPFHVARRIMQVA

SEQ ID NO: 349588 - protein, 111 aa, Zea mays
  Clone ID: MRT4577_81999C.1.pep
CVIVALSDVVMSEQRALLELKSYHLRYISRLRRYKSRLASVRWPADEHYQALVGFPSGAGVAGSLAGVSGTACSYASGVSPTSVRHQVQDAMDVGEEDETERERSRGDEIL

SEQ ID NO: 349589 - protein, 97 aa, Zea mays
  Clone ID: MRT4577_8199C.1.pep
SKTFFFYYILYCFYFFFFLEQKRVLYPTNATGGTPNLDLKKKDRPTPTIANPKIQKPPLAKRGRGPPNPKTLGENPPTQKPRQTEPHLSLKPMENNP

SEQ ID NO: 349590 - protein, 65 aa, Zea mays
  unsure (1)..(65): unsure at all Xaa locations
  Clone ID: MRT4577_819C.1.pep
MAKEPMRVVVTGAARQIXYALVPMVAKGVMLGAEQAXIXXMLDIPPAAEALNGVKMXLVXAXFPL

SEQ ID NO: 349591 - protein, 379 aa, Zea mays
  unsure (1)..(379): unsure at all Xaa locations
  Clone ID: MRT4577_81C.1.pep
MLLTRRWSLLASLQYHLSPSTKFNFQQYIKRSLEDDFKVVVGISLPLWFVAIFTLLIDIKGFGTLVWISFVPLVVSVDAIVFVSLVFLEQLPLSACPSLLAQTKSQLVIPKQIQLKPPWNXVILQYSISKGVVVVXILLLVGAKLEVVIMEMAKEIQDKATVIXXXPVVEPSDRFFWFNRPGWXXXXXXXXALPERLPDGAFRLDTAHPRPEEMLPREAGXLSIMKVAVGLALQVLCSYITFPLYALVTQMGSHMKKTIFEEQTAKAVMKWRKTAKDKVRQREAAGFLDVLTSADTTPSHSRATSPSRGNSPVHLLHKYRGRSEEPQSAPASPGRELGDMYPVADQHRLHRLDPERMRPASSTAVNIDIADADFSFSMR

SEQ ID NO: 349592 - protein, 67 aa, Zea mays
  Clone ID: MRT4577_82000C.1.pep
QQHKLQLIDWISSSSFFLVELEKALLLPKFVCSIVCVTFLVADKKLVLVAPSVLRPGTKFVNKGRRL

SEQ ID NO: 349593 - protein, 253 aa, Zea mays
  Clone ID: MRT4577_82001C.1.pep
MVEGSPEKMTSPEPRTNSQIDDEPSIESTNRRNHDKSLDETNAMPIMCYDPSLARLNYGDNTNNKEALPSNVTQVEMVGPNEEEMTPLIKRFKKALKGHKDFSDKGKSRGKRAYFKCGRVRKVEKKKFYKKGEAHIVKEWDSDCSSSDSEDEGLVASAFDKSHLLLKKVYSRKTSKYTSSSEDEDGLIEKQENLIIEEHDKFVNVEKSLALEINKNELLSKELSDSYDSINCLKSANADLSAKIVDLNRSSTS

SEQ ID NO: 349594 - protein, 67 aa, Zea mays
  Clone ID: MRT4577_82002C.1.pep
PFYVSNTSQTNLSKQQASERTLDICDAKLGEYLMNYPQISFLCPARNTLGGKPLHGNHQTPLLALLR

SEQ ID NO: 349595 - protein, 103 aa, Zea mays
  Clone ID: MRT4577_82003C.1.pep
EMSARARATKRTDTSLIARASRRRRRRPTKQPADQSIMRVRTCPNQTETTGAKHRQPIRQDDVRPAGFEERPARRPGCVVGWWLASFSCDDVRSAAKWKWKRP

SEQ ID NO: 349596 - protein, 156 aa, Zea mays
  unsure (1)..(156): unsure at all Xaa locations
  Clone ID: MRT4577_82004C.1.pep
RSPRRSGTAAAGPAGGAAGPPPPPSPSPRAPAAACRSSRSTAPPRPAARSTPARAPAPPSAAPRGGSAAAPAPARGGDRRPPXGGLVSNSSASPPSSPVQXGGAVXWATAPXPLPRSPSTPPPPSAREAASPGHXCIPPARSXPPPPPXLSPGVAL

SEQ ID NO: 349597 - protein, 186 aa, Zea mays
  Clone ID: MRT4577_82005C.1.pep
MDRPQVVSENYANPITCLFHVLFKASALAFYILFSLFVKSFVIIFVITVLLAALDFWVVKNVSGRILVGLRWWNEIDDDGNSVWKFECLDGESLARMNKKDSWLFWWTPYLNAAAWIILGIFSLIRLEADYLLVVGVCLTLSLANIVGFTKCNKDAKKNIRAFAENAAQNAITSRITSSLQSAFGI

SEQ ID NO: 349598 - protein, 124 aa, Zea mays
  unsure (1)..(124): unsure at all Xaa locations
  Clone ID: MRT4577_82006C.1.pep
LFFSRLIGEEERAYSESGGEASSVGKIVQRLTYRKRHSYSTKSYLTRFVKTPVGKLVYQFTKNRASGPKCPDTGKNIQGIPLLIPAXYNRSMLARNHMTVYRPYGGVLSGTVVRYRIFRAFLVE

SEQ ID NO: 349599 - protein, 119 aa, Zea mays
  Clone ID: MRT4577_82007C.1.pep
FLKEKKFLVTGSGGKPYTLSSQFLTNACCSPFPFGSGKKASIFSNWLIAQQKNTTDSGVYLYPDIQCGEIVHLFSLVLSGNLLISPFLPSEGVGEADEPNSSGPLVVDTSGLADNSHKR

SEQ ID NO: 349600 - protein, 47 aa, Zea mays
  Clone ID: MRT4577_82008C.1.pep
RSHCAQVICMWSRSVVTHLVADIAISSYERCLRMNRRDVLKPTRFLP

SEQ ID NO: 349601 - protein, 184 aa, Zea mays
  unsure (1)..(184): unsure at all Xaa locations
  Clone ID: MRT4577_82009C.1.pep
SRPAGLSEEXYSEAXRHFEFDDQLGPYNLDSYGDWKQLSDYLSPNVIERLEPIGGEITIAWESSWMDKAPQSDMERRLVEQLREGKFAKNAPVQSGRRGCYYTSIPASVKHKDISGGDLTALNLDKTSLLETILAKNYEGQEDLFLGELQFAFIAFMMGQSLEAFMQWKALVSLLLSCSDAVLC

SEQ ID NO: 349602 - protein, 60 aa, Zea mays
  Clone ID: MRT4577_8200C.1.pep
CLAPSADLSFLAFPPSAPSHPFAVLCSDLVRNRCCTLPPAPFMSLKFYYCNKSALCRLFS

SEQ ID NO: 349603 - protein, 295 aa, Zea mays
  Clone ID: MRT4577_82010C.1.pep
MAMAGAAAAAAGRCLLLSRPSPLRLRLLHAALSTAAPTLGPTSTPAPPPRHELLLERLRLRHLKDASSPGAPRPTSRSSERSSQQGKGKRVEAAESFEELGLGEEVMSALGEMGISKPTEIQCVGVPAVLAGTSVVLGSHTGSGKTLAYLLPLVQLLRRDEAMLGMSMKPRRPRAVVLCPTRELTEQVYRVAKSISHHARFRSTMVSGGTRLRPQEDSLNMPVDMVVGTPGRILDHIKDGNMVYGDIKYLVLDEADTMFDQGFGPDIRKFLAPVKNRAAKPDDQGFQTVLVTATM

SEQ ID NO: 349604 - protein, 31 aa, Zea mays
  Clone ID: MRT4577_82011C.1.pep
VGHHLVFCSRTSTKPTSSARWSALTHAFSPL

SEQ ID NO: 349605 - protein, 122 aa, Zea mays
  unsure (1)..(122): unsure at all Xaa locations
  Clone ID: MRT4577_82012C.1.pep
DRRPGRRPSSTWPAPTLQSSKVSTGGCGYSSKKFLSYLHGRLPGYYGFDPLGLSDSEGTGVCIEPKWLVYXEAIDXRYDMLSAVGAIGAEIFRNMVIIPPENELPWYKTGGIPPADTYDYWD

SEQ ID NO: 349606 - protein, 94 aa, Zea mays
  Clone ID: MRT4577_82013C.1.pep
MISSPNPSSAALLLLSSSSVLTHSLAYLTHDNCFNNNNVTVHNLFIHYFTLTLYPLSNILPLFSITYTLHPLNHSEFPLCYFTVLLLSPYSSHF

SEQ ID NO: 349607 - protein, 145 aa, Zea mays
  unsure (1)..(145): unsure at all Xaa locations
  Clone ID: MRT4577_82014C.1.pep
ALGVGVGAAGVAVPTYSPDPHADFLRSMEEMAAALRLDARRRGDRARLHELLLCYLALNDRRAHKYVVSAFTDLLLRLTXPPPQPPTSATTTGTSNRLFFHGHGRAYGQNFGYGGGSKILDSMSERSKITQSCTYCLQLQIELRS

SEQ ID NO: 349608 - protein, 93 aa, Zea mays
  Clone ID: MRT4577_82015C.1.pep
TERVKLAAHWRWATTYEGSDPARESICWFVHDSVSEGRGKHRMWWSTKAAILSRDPGGFGDGARRPSGGGGAAQQSPPIHLFSGTSRLPDPAG

SEQ ID NO: 349609 - protein, 62 aa, Zea mays
  unsure (1)..(62): unsure at all Xaa locations
  Clone ID: MRT4577_82016C.1.pep
MLVGGGQPMQNRVAWSXQDAAGRGHCNWKAEGTRXRFTGESLWTKEIQARLASRGLLYIPQR

SEQ ID NO: 349610 - protein, 77 aa, Zea mays
  Clone ID: MRT4577_82017C.1.pep
TEKKTGPGFFFFFFFQKYPLFLRFPEPKLEDKAGAVFFFFFFFQNNPNLWWSRHKNCRKKQGPFFFFFFFFQNIIYL

SEQ ID NO: 349611 - protein, 54 aa, Zea mays
  Clone ID: MRT4577_82018C.1.pep
LHRAHPTALNWDNQLTREAPHMTPMTIKKKKTDPPLRTETSNHQLNIYDLTKFN

SEQ ID NO: 349612 - protein, 70 aa, Zea mays
  Clone ID: MRT4577_82019C.1.pep
CIYHGINCLLIAQLVIMVVFHATSRLYNRQLIASPTVNSFLVTSYVVPALMQHHMTSITRSERQRQIIAG

SEQ ID NO: 349613 - protein, 55 aa, Zea mays
  Clone ID: MRT4577_8201C.1.pep
IPIHTLTGNTPYCLSKDLVLEPKTSGQPGRQPIIQELYGRQRDWRPQRKLNARGP

SEQ ID NO: 349614 - protein, 56 aa, Zea mays
  Clone ID: MRT4577_82020C.1.pep
AGAMVEVYMASAIYRAVVINRCTMVHRTGMRYDNYSQDIVAEKTERRQLVYWGAQQ

SEQ ID NO: 349615 - protein, 195 aa, Zea mays
  Clone ID: MRT4577_82021C.1.pep
MQPQQDAAEDVVIVGAGLAGVGVALGLHRKGVRSVVLESSPALRTSGFAFMTWTNAFRALDALGVGDKMRSHHLQVQGVRVMSPTTGEVVRELDLRVQGKLGPHEARCVQRNVLLQALEEELPADTIRYNSRIVSIDDDKEGGGDAKILHLADGSMLRAKVLIGCDGINSVVAKWLGLAKPLDSGRIATREHVKY

SEQ ID NO: 349616 - protein, 151 aa, Zea mays
  Clone ID: MRT4577_82022C.1.pep
NKNLIAHLKSGSGTPLMPGRVIATYLFALYDENLKPGKGFERAFGLFRPDLTMTYDIGLPKTTNYNQTSMAPLSPTRPRLPPAAAPTRQTLPFPPQMILPSPVTPSDKNSGQTDVHNSTPRSASLAHICRSLSISASMFFVSVLYALIILL

SEQ ID NO: 349617 - protein, 111 aa, Zea mays
  unsure (1)..(111): unsure at all Xaa locations
  Clone ID: MRT4577_82023C.1.pep
WKRDTLRDLDETLAITQSVIFVNTLHQEDWLTDGMTTEYHTLSETHGDMDQITKDIITREDGPGYIGMLITTDLPATGMDVHPVFLDINYDLATDPXNCLDRIARLGTYGR

SEQ ID NO: 349618 - protein, 108 aa, Zea mays
  Clone ID: MRT4577_82024C.1.pep
GPTPPPFYSPKETHSGSLLFPGFPPSNGLWAPSPGAWFTHAFGILPTDPPVELKKGRGNLAQLNIIGQKNTAFFRIYNFPGFWILKAGFTSLWDRGGVFFPSPSYSPS

SEQ ID NO: 349619 - protein, 102 aa, Zea mays
  unsure (1)..(102): unsure at all Xaa locations
  Clone ID: MRT4577_82025C.1.pep
VILINYFAHVCKQLNCKKKKKKKKKKKKKKKKKKKKKKKKKKRGARKLKSSRTRKKIPNRDLKGNKXKIRRGIKARRKKGHKMIPMRKGKXKNSKKKKNRKE

SEQ ID NO: 349620 - protein, 314 aa, Zea mays
  unsure (1)..(314): unsure at all Xaa locations
  Clone ID: MRT4577_82026C.1.pep
MEQAGDETPGEIGREAARREAALRSGGGDAGERVDKAVVDGGEDERFRVQRKWRRFLAHVGPGALVAIAXAIGVLDPSNLEXGADFKYQLLWVILVGMVFALLIQTLAANLGVKTGKHLAELCREEYPRSVNICLWIIAEMAVISDDIPEVLGTAFAFNILLGIPLWAGVVLTVLSTLLLLGVQRFGARKLEFVVAAFMFAMAACFFGELSYLRPSAGEVVVGMFVPRLRGKGAAANAIALFGAIITPYNLFLHSALVLSRKTPRSVKSIRAACRYFLVECSLAFVVAFLINVAVVVVAGSICNAAGGNLSPVD

SEQ ID NO: 349621 - protein, 271 aa, Zea mays
  unsure (1)..(271): unsure at all Xaa locations
  Clone ID: MRT4577_82027C.1.pep
MEQAGDETPGEIGREAARREAALRSGGGDAGERVDKAVVDGGEDERFRVQRKWRRFLAHVGPGALVAIGFLDPSNLETDMQAGADFKYQLLWVILVGMVFALLIQTLAANLGVKTGKHLAELCREEYPRSVNICLWIIAEMAVISDDIPEXADRLGNQLASFLPSFLLEFFFFFFLLSSCTCVCSKRCPATFGFTFTYXVLGTAFAFNILLGIPLWAGVVLTVLSTLLLLGVQRFGARKLEFVVAAFMFAMAACFFGELSYLRPSAGEVVV

SEQ ID NO: 349622 - protein, 109 aa, Zea mays
  unsure (1)..(109): unsure at all Xaa locations
  Clone ID: MRT4577_82028C.1.pep
QTSSSLLGLLLESITTISIGNASQGTPTKYVTVACTVSYFTCMETTSVLITWTLIVLILHPEWQEIARXEXLMQFETTTPXIDILSPFQTITMILHEALKLDENATLLS

SEQ ID NO: 349623 - protein, 37 aa, Zea mays
  Clone ID: MRT4577_82029C.1.pep
TIVGAVSPDGGDFSDPVTSETISIVHVFRGLNTKLAK

SEQ ID NO: 349624 - protein, 103 aa, Zea mays
  Clone ID: MRT4577_8202C.1.pep
MWTPSRGSNARRSGHRRIADYLADDQTTTTATDASDNESYTTAYGEEFFAAAGGSGGGAGGMLPAFLADQGDLVEVMLELDEESMVVRSVTPTSAALYGASLP

SEQ ID NO: 349625 - protein, 179 aa, Zea mays
  Clone ID: MRT4577_82030C.1.pep
NPTRGGITTRRGGGQKPNKQRGGKKRNKAFTLPRTRFINSPCSTRQATIYPEKLNINPNGRFCWGLKSCPTSRKSAPLSFPPFWARGFGARPGCYPSQAYPTPEETPMTRMAGPSFLPRGGLPRIRRRCLTPPSCQTPRAELHGDLARLFGPVPFPVPFPFPFPVGGGGPPPPRGALFF

SEQ ID NO: 349626 - protein, 175 aa, Zea mays
  Clone ID: MRT4577_82031C.1.pep
TASAPEGVSVLRRNLDDVGWEYGVLVDINNKDKVKRILCDKQMCGGVYRLKQHIAKEGKNAKKCQGMKTTKEKLLEAQEKCKKALDGAKRKREVKTVRELELREEVHVSRVGGSEEVTCVGSSEPHKLGPMDKWTKAIDPTATKSEYLTQQRLNKELWKERLHEISYSSDFLAVL

SEQ ID NO: 349627 - protein, 105 aa, Zea mays
  Clone ID: MRT4577_82032C.1.pep
RFGTTPQQSKFTFQNHYMCLQQIPLYVDQEENYMTSLLQPSSKWQLHEIALQSRAENSCFYEQLCRLVVTKSISNSVLNQCTILKYRALLIKETTSTAFYLQTRP

SEQ ID NO: 349628 - protein, 52 aa, Zea mays
  Clone ID: MRT4577_82034C.1.pep
LLGLPGLWEMSSIPPPPFLHVKTPFVPPQISRVVRPGAFCLLITFVVFPVGP

SEQ ID NO: 349629 - protein, 981 aa, Zea mays
  unsure (1)..(981): unsure at all Xaa locations
  Clone ID: MRT4577_82035C.1.pep
MRQERMVRQQQAPMPPPPPPVPPWDKHREFMSHKISMFASSPDPLHMDDWLKSVEKMLNIAQCSDREKVLYASDRLTGPAADWWYSYTAAHDAANNITWAEVTTQFRNYHIPAGLMNIKKKEFLSLKQGNMSVSEYCDKFIQLSRYAPDEVVDDERKQEHFMEGLNGPLQYSLRIASTPVQNKQQTPGSRKGFSIARVNQVSADTTADGADITIGNNIRVIRDFPDVFLEELPGMPPDREVEFVIDLLPGTTPISKRPYKMSVEELKELKKQLTELQEAGSLNDVTIKNKYHLPRIEDLFDQMRGARVFSKIDLRSGYHQMMIKPYDIPKTTFSTRYGLYEFAVMSFGLTNAPTYLLNLMNKVFMEYLDRFVVVFIDDILVYSKNDSDHEEHLRVVLQKLQDNQLYAKFSKCEFWIDEVPFLGHIISKGGISVDPAKVTMIVGWKISSSVKEVQSLLGLAGYYRCFIEGFSKIAKPMTSLLEKGKEFKWTHECQESFNQLRFKLMSTPVLIMPDLQKELAAVVHALKIWRHYIMGTKCQVYIDHKSLKYIFTQKDLNLRQHRWLELIKDYDLEIHYHPGKANLVADAFSRKEHVHAAIVAQLPYELVEDFIRLNLGIVAHTKGITIEVEPTLEQEIRKGQVGDAKIQEIKDLITEGRGPKFTEDEQGTIWFKNRICVPEIDSLRETILKEAHDSDYSIHSGSTKMYQDLKQKCWWYGLKRDVAAHVVVCDVCQRVKAEHQRPARLLHPLKVLEWKLTKVAHFIPVNTTYKGSQLAELYMAQIVCLHGVPKKIISDRGSQFTSRFWKSLHENIGTKLKFSSAYHPQTDGQTERTNQVVEDMLRACALKHGGSWDKSLPYVEFSYNNSYQASLKMSPFEALYGXRQFFGPEIIQEAEEXKVRVIWEKLRVAQTEQKSYANNQRRPLEFEEGDHVYLKVSPIRGMRRFKVRGKLSPRFIGPFRIFRRVGGWPTSLSYQIIYLMS

SEQ ID NO: 349630 - protein, 58 aa, Zea mays
  Clone ID: MRT4577_82036C.1.pep
TAPPAKAGKTSAKDPPRKKAPVAKKSPSPPKKAPPKKAPPLKKAGPPVRKAPSRKAKK

SEQ ID NO: 349631 - protein, 97 aa, Zea mays
  Clone ID: MRT4577_82037C.1.pep
LFLNIVMSNRAVGLLVITTTIEHHNHCTPYFYCLKITTQTNGQPYKNMLHEIDVPAIRSDTLNKNHRPATWNHKTKTYSIKHIGERRTPPSLGPSPT

SEQ ID NO: 349632 - protein, 44 aa, Zea mays
  Clone ID: MRT4577_82038C.1.pep
CWCGRLCSTYRVEMPFSKGPTATGHQIECDDKSLFFGVWRAVEQ

SEQ ID NO: 349633 - protein, 93 aa, Zea mays
  Clone ID: MRT4577_82039C.1.pep
APRQQQATRKNNEERAKERRKDQSGDDDPDGAGRDELKRKQNEHNHSAQKETNGRTKTTRAVADDDTDMNPEAQEFMKALDGCRPERSGANAR

SEQ ID NO: 349634 - protein, 259 aa, Zea mays
  unsure (1)..(259): unsure at all Xaa locations
  Clone ID: MRT4577_8203C.1.pep
RPGTLQGCEWGDLPLKKGPIPRAVDIPRSSCDHRALPPSGPLDGVCRCSLEGSVSRSSLPVTSPSESMRPWWCRRSCLLPAAIGGVQPHGGWHPFATIRLQGFSSRSPAAVPRRRSPRRMTTSLVVGRSKPGCGLSPTLSFKDVHHPCCGGRQVEPGPFPPLGLVTRFFLQHSEGKGVHQSCXGSVLGYTGSADCRLSAAACLALXGWIALVLPLSLPPAAWSGCGYPSTTRATVVSCAGLPHSWLPLPVGCIGGLYQT

SEQ ID NO: 349635 - protein, 167 aa, Zea mays
  unsure (1)..(167): unsure at all Xaa locations
  Clone ID: MRT4577_82040C.1.pep
MSGLYDRRXTMFSXEGGLYHREYSXDAIGNAXGSPLGILAAEGVHLLTHKKETSXKLLWTSGSXEIMDEIDSHLGXALHVIMSDXKILINIARLHYLSYPVSYHEPIPVDDCVHXVCETHXRGTLQLGXLRPLDVFFLFTDCDNNLGFXLXLIHPSGNYSEWNASAV

SEQ ID NO: 349636 - protein, 72 aa, Zea mays
  Clone ID: MRT4577_82041C.1.pep
FFFFFFSLLNPQHDLQLMSSLLLKLHMQTLRNSRGGDRVRTDEMSRSIRRESTDGPQGSGGGHAAASAFSSP

SEQ ID NO: 349637 - protein, 72 aa, Zea mays
  Clone ID: MRT4577_82042C.1.pep
GLYAILLSNAVNTLITRMYASSLHNEVLRNMCGDYCINISLDYGHHLKNTCLVRRLPVLLLDTRLGNLEAAV

SEQ ID NO: 349638 - protein, 78 aa, Zea mays
  Clone ID: MRT4577_82043C.1.pep
PQNHNQQYRLLMKTYPTPTGVALHRHPDNLLPYIKRHCHCQLNRRWSVSVSRLGANQTCSRPITLEDYQTATSCYARL

SEQ ID NO: 349639 - protein, 113 aa, Zea mays
  Clone ID: MRT4577_82044C.1.pep
VPSGSAGEKKNNTTALFTSLASTQRLKLHSYLALLARGSRTTPGAKWMTLRISSPSTSDNGTGMVKAGFAGDDAPRTILRRRGGRPRHTARTTCEGGSSRCTRTLASRPRTCP

SEQ ID NO: 349640 - protein, 93 aa, Zea mays
  Clone ID: MRT4577_82045C.1.pep
CKVPSKPFFSLLKALWGFKAPFFLLPALKAKVFGVFFYFPPKVRGLVKFFGKGGPQGSFWGLTPPGGFPLLTFSVQIFFCPPPPWAKSIPFVP

SEQ ID NO: 349641 - protein, 82 aa, Zea mays
  Clone ID: MRT4577_82046C.1.pep
FSLSFFLFFDYIIILFFFFSPQNPRAVFFLFAQNIIFLKEYLKYLVAPPKLPKKKGKENCLSPLTGIKPFNFLNSKPETSFV

SEQ ID NO: 349642 - protein, 199 aa, Zea mays
  unsure (1)..(199): unsure at all Xaa locations
  Clone ID: MRT4577_82047C.1.pep
MEGSSSQLLETCLPASLYAVTPPPCAHPHPLLAPLPNQQHMLLQMPFVKEQAANNHGLMLSSDHHHHSGLLYPLLLPGIPFCPSVAAACEKTTTTGSGALDAGEAXQLGGGEXTGEIASTAATACNSPSSCNWWKGPAAAAAGEKGGRMKVRRKMREPRXCFQTRSDVDVLDDGYKWRKYGQKGVKNSLHPRSYYRCTH

SEQ ID NO: 349643 - protein, 69 aa, Zea mays
  Clone ID: MRT4577_82048C.1.pep
TRFLSSVSLFWSRDSALRRIHAVCSRCCLHLLRIMLTVGLVALSPVVADFGSYAADCYDSIIWLGSHRC

SEQ ID NO: 349644 - protein, 138 aa, Zea mays
  Clone ID: MRT4577_82049C.1.pep
KNPQTSPDRGEPKCPPTHPIQGSQQRGGTPRAKPPPQAEGPARTHNCQKASQSARKASPKSRPCGGHQAGRPSKEVTLRPVKLWLPLCSPSPTEALLEKALYVPNLKKDPWNFGILTCCPPPFATNVCCWEPPPPPFL

SEQ ID NO: 349645 - protein, 117 aa, Zea mays
  Clone ID: MRT4577_8204C.1.pep
KGGFSRGVWAKGSVFGKRRVFFPSGLCLKGSDQRDPRHIKGHTGDSPFGPHPPFDLVVRQKSFSLFWKQKKQVDFSGHNGTPPFLSFFLSIEQFRRLGALFHPPSQVQKTKGHFLSR

SEQ ID NO: 349646 - protein, 202 aa, Zea mays
  unsure (1)..(202): unsure at all Xaa locations
  Clone ID: MRT4577_82050C.1.pep
MWPMEEEEVFVTVRRTEHVDVTSRAVVVAAGRAAVAGPRTVRVFCDDYDATDSSGDEAEEEEKKAARRRVKRYVQEIRLERAAKXRRXEEEEATAAASLGAVLPGRKRKRKPDGEASEPRFRGVRQRPWGKXYAAEIRDPWRRXWRVWXLGTFDXTAEEAAKVYDSAAXRLRGRDATTNFQAAGGPRALSQGRAGSKSAATS

SEQ ID NO: 349647 - protein, 92 aa, Zea mays
  Clone ID: MRT4577_82051C.1.pep
SRSRKKKKKKKKKKKKKKKKKKKKKKKKKKKKKKKKKKKKKKKGETFFFFFFWGGGGGGNLFPNFFSNCWSARGPVPSPVLMASQWVLRGCF

SEQ ID NO: 349648 - protein, 107 aa, Zea mays
  Clone ID: MRT4577_82052C.1.pep
VGNKLYVVDNKRNLERNIPLYLKMGYLSRCDRITSSGSAIATPFGLTKENLRLALFLNGWPLLDTGPSSATGYKCRKTSLSNQIHLKINTTPATGRVIEEILKFNIL

SEQ ID NO: 349649 - protein, 76 aa, Zea mays
  Clone ID: MRT4577_82053C.1.pep
TIICPCYVVNGYRDFFTLAKVQLWYLWISRHHFCPFQNPRTTSPFLRSSLLHIYAVQGPSPLVDKNAAIKCNNTKN

SEQ ID NO: 349650 - protein, 95 aa, Zea mays
  unsure (1)..(95): unsure at all Xaa locations
  Clone ID: MRT4577_82054C.1.pep
MGVPVMPNKIVMKXSLXLMTPHVNRYKCLKQICSRPKGLDSPISRNFKXCTLQPNIGYGSDKLTMLYLPTQYKNSEVHNVFHLQLLMIHNRTYCA

SEQ ID NO: 349651 - protein, 84 aa, Zea mays
  Clone ID: MRT4577_82055C.1.pep
VTTGLDLSNKQCRGNTLASAETSNAPNTMWDIIQMSHQRGATSLDKKPELDLNESVAPLARPPGLLEEKTIMPREPPRNLENKG

SEQ ID NO: 349652 - protein, 64 aa, Zea mays
  Clone ID: MRT4577_82056C.1.pep
REHCIAHERERTYTLGPHRGNTEAIVVADRTCQHTGPDRLDEEQEDADGVRHSTALPYGVPECT

SEQ ID NO: 349653 - protein, 92 aa, Zea mays
  unsure (1)..(92): unsure at all Xaa locations
  Clone ID: MRT4577_82057C.1.pep
YWRYWQKKRWGNKNWDGAQKTTXXKAQXEATKXVLPLVETEALPLAAEEEIEMVPEAEAEVEMKVAITAVCDSTSNIHAWRVQARARHTPQA

SEQ ID NO: 349654 - protein, 47 aa, Zea mays
  Clone ID: MRT4577_82058C.1.pep
IVGCPRASPCMRARELALSWGAIPPYLISWLDFFLRILVGAAADRRA

SEQ ID NO: 349655 - protein, 45 aa, Zea mays
  Clone ID: MRT4577_82059C.1.pep
YNNMPSQAPPWASEPNASKASSMLQLNPLMCTFHACAILSKLPLL

SEQ ID NO: 349656 - protein, 75 aa, Zea mays
  unsure (1)..(75): unsure at all Xaa locations
  Clone ID: MRT4577_8205C.1.pep
YCITYAVHVRAPXMYSTASQDHPIETHRIXVHRIXCHSXIVVVHPISCHRCVHLIYLCDHPSLPCRHPSLTIDSR

SEQ ID NO: 349657 - protein, 44 aa, Zea mays
  Clone ID: MRT4577_82060C.1.pep
EVGWPPPPCSSKKKKKKKKKKKKKKKKKKKKKKKKKPKKKKKKR

SEQ ID NO: 349658 - protein, 88 aa, Zea mays
  unsure (1)..(88): unsure at all Xaa locations
  Clone ID: MRT4577_82061C.1.pep
KKKVEKAPKKALEWLGDNQSAQKEAFKKKPKKVEAVCNPIVSAVSKRSGGAPGGNPNGGVYHAPHNLXMVVNGXGGGNVKSRKPNQIL

SEQ ID NO: 349659 - protein, 46 aa, Zea mays
  Clone ID: MRT4577_82062C.1.pep
ALGFKKDIIRRGVNIRELILRPWAPSGIYLMDSERDGRTDSKEKNG

SEQ ID NO: 349660 - protein, 103 aa, Zea mays
  Clone ID: MRT4577_82063C.1.pep
FYRGDCRRGVHERRGLQSGGRPVEDFLWRRVNEMESFGSETVLMPDDEVLVFESLFATGLRLPCHDFVIEVLKKFMVHIHQLTSNTPNKRLFVKYYQLMICNQ

SEQ ID NO: 349661 - protein, 175 aa, Zea mays
  unsure (1)..(175): unsure at all Xaa locations
  Clone ID: MRT4577_82064C.1.pep
ISPTIGGIENPESANGITTGQLTPTIGSIDEPVIGQXTKYAAXRNKRVFKLAXWALTPSPTERATSVCMDHAYXHNRPPTYYCVTTDEAXQRVFIDNMITGTSPLNCGXLSPDSIMXDRAAAMSNEGPTXEHVLLVLTLAMIRMIRXCNEMDATTHKYAXGRYDEIVKEGSSHRE

SEQ ID NO: 349662 - protein, 104 aa, Zea mays
  unsure (1)..(104): unsure at all Xaa locations
  Clone ID: MRT4577_82065C.1.pep
ACVRVLARWISPAGPFXLLGRASDMPAWNMPPYRPLNEVLLRLPPPPASPSSRADRSPLGLGQGAEGAGSSSGSTEQVKSRQGEVLQQKQRYTQAVRSRVCGKV

SEQ ID NO: 349663 - protein, 547 aa, Zea mays
  unsure (1)..(547): unsure at all Xaa locations
  Clone ID: MRT4577_82066C.1.pep
ENLLLLSTIDPSKDPIRSGLKPCLERPEGNPNGEGGINAIENKLKMRARRVLAKLAEKRKSAVESSRSERSLDGIDLTCKIVDFGNACWADKQFTDFPRVRQYRAPEIILGAGYSFSVDMWSFACIAFELATGEILFTPKEGHGYSEDXGSLGFNDGTTWQDXKKIATMGTRSKEYFDRHGDLKRIRRLKLSSIERVLVDKYKISESDAREFANFLCPLLDFAPEKRPTALDCLKHPWLHYNEDKTCQSLNNNDAKNIDLVQSTGSITTVNCTNIDLTSKKGSSTGTCDKTVDAKYNTRSITSNATMNTYVQPTSGSFANRLAKNVDVNPNIGSISNRDAKSSDMKAHMGSNTISDAKSSIVKLDTGNITDRNAKTVDIKPNSDNISSRDDKSSNVDTTTSSVVNKDAKRSIRSVVNSYIKNFDAKCNTGSTANSDARDPSDTKSSTKIVSSADNAKCVDIKPINGSDKSNDTSDKSNDTVDANVKSNSGIVANSDASNTDVQTNTGSVNNSDDYSIDSKPNIGRVAASIQRLESSMGKYRADLSQD

SEQ ID NO: 349664 - protein, 65 aa, Zea mays
  Clone ID: MRT4577_82067C.1.pep
SDRPPSTAGTQAASRSRSGTAVMLVIRCPMTRPLLEVMKLPFQRLVREIVQDFKTDLRFPEPCRG

SEQ ID NO: 349665 - protein, 45 aa, Zea mays
  Clone ID: MRT4577_82068C.1.pep
IPLGKFIALHDPNFKEAYQSFDDLVKCSCKLQSTNKDGACDEEGT

SEQ ID NO: 349666 - protein, 115 aa, Zea mays
  Clone ID: MRT4577_8206C.1.pep
KKRRRGQRGVLILRLLLVQLLQVQPVPVVEMRMLHMLLPELLPVRLVPMKDPTVGGRSLVARNFIWSPENEIGVARPSRLCFRRIIRQTGFGVGMCTSADTEHTVQCPISRRNGS

SEQ ID NO: 349667 - protein, 140 aa, Zea mays
  unsure (1)..(140): unsure at all Xaa locations
  Clone ID: MRT4577_82070C.1.pep
MQIFVKTLTGKTITLEVESSDTVANDKAKIQDKEGIPPDQQRLIFAGKQLEDDRTLADYSIQKDSTLHLVLRLRGGXGVATPSXVPWDLINLARKHNEDKMICRKCYARLPPRSKNCRRKMCGHSNELRSKKKLIFKFSM

SEQ ID NO: 349668 - protein, 95 aa, Zea mays
  Clone ID: MRT4577_82071C.1.pep
TAYVLNRAAPSLAESCERSRPGFDRVSLQMSAAVSGAFVLQSRIWVVESNIARTDWYCDMLKRCSWWLTSTKKRAVNRGHHRDLSCTHTSDRKKK

SEQ ID NO: 349669 - protein, 171 aa, Zea mays
  unsure (1)..(171): unsure at all Xaa locations
  Clone ID: MRT4577_82072C.1.pep
MASAVTSNLPAGAPAPYPHGWLSPRVSISRDVTADPVATTTPEPAISKDFIDFEFSLGGSATMLPADELFADGKLLPLRKVAPSPDPAEAAAPPXAAGGGNAAGAQHRGXSSPSARRSRRLTAPTPXVLSPKAPSCSGRWRELLGLKRAADARSPWDAKGLKVSVAAQYPA

SEQ ID NO: 349670 - protein, 49 aa, Zea mays
  Clone ID: MRT4577_82073C.1.pep
ASRGTLSYRQVFLPKKKSYTLLLFLSFNSANDNVTSYHAHFAPQPNGTY

SEQ ID NO: 349671 - protein, 75 aa, Zea mays
  Clone ID: MRT4577_82074C.1.pep
FPLQPVGDLILNPYMISYAQSCNTSLVHGLWIDYDPMKGCPTHHTRDLESFSEMVLVEQSQKAGTDEDGWKCRLD

SEQ ID NO: 349672 - protein, 94 aa, Zea mays
  Clone ID: MRT4577_82075C.1.pep
KKILPPQPRENNLDPFKRPPPIFFFYFFFFFYFNYIFFFFFFIFFFFFFFFFFRAHFNIIKVNIQDPSSQPTKTTLVASTNLNQNAWCPTTGNH

SEQ ID NO: 349673 - protein, 106 aa, Zea mays
  Clone ID: MRT4577_82077C.1.pep
WHFWKFLQVLSSPAAEILFRAHTVPAHLSHPLLLYPAPRQTSAFPNTFVPLHMVFSCPFSARLAPDFQVQDLTQGSGLPGGLTYVVSLGNSPCASITVRLPLSQPF

SEQ ID NO: 349674 - protein, 79 aa, Zea mays
  Clone ID: MRT4577_82078C.1.pep
IRLETDRIVGRARIAVLKPTGRSDEPQYQHTQAKSYRPWVMADAVDRILFTGRRCYIYTPWLSSSCYGLLCSNQPGRAS

SEQ ID NO: 349675 - protein, 301 aa, Zea mays
  Clone ID: MRT4577_82079C.1.pep
TEENISKYCDQLRQDLIPMTRNIYVALIVAYARLGNFDMAKQVLLDKEIPCKFLSDIKSALVGALALNGQVSDALRLHDEIMQSGGSLEPKAAIALIEHIRTEGELDIMHQLLDGLNDSNSWFDGCGRVLLYCVQHNYPDAAIDLLKQIKEKDEMSTYMVVDQVFCQIWDMETTNLDFGMVFLDAVKELGLNVSRTSLDFLLSACVKAKDLRRAQQIWTEYESAGLPHNVLSSLRMYQAFLSSGGRKAAKKLLKKIQKEDAHVRYITDACRATYCSKDFKPSATVRLSSKGRARSKPTNEG

SEQ ID NO: 349676 - protein, 418 aa, Zea mays
  Clone ID: MRT4577_8207C.1.pep
HEKLSNASNNTRKKQAALPNSTFSPSSIQAAAIAAGGRLATASTAANLLKAAQSKNAVHIRSLGATSLKSSASFDHGTQSGGSQHLESLNASAVNGVSGVSAVNQSGPPAGAETKKALGTTLAPVPCDSEENEDGSEFCAITLDDLFPEDAKQPETVDTKAKQPETTGPKAKQPENADPKAMHQETMDPKSKQPDTLKVGILDPKDKDMLEFDQYVASQGAHLNTDDLNKSKCTNSASQAQGLVGSQKNPLKLTPVDGKANPVTAAGRGKPVAAGVASTGKKATIPISHLGAGTPRGIVDTVNANAPIRRTLTRRAAAPVPAGCQAPPPKHAIDVKGCQMTNSIATFVSSGVPGSSQASTPAKDANKASPPSSSCQPKPDSVAVNGAIRVVNPPSSQAITAVKSVAKKGNLPAAAARQ

SEQ ID NO: 349677 - protein, 51 aa, Zea mays
  Clone ID: MRT4577_82080C.1.pep
AGPRLMTVTGTSVYAKLFTTRCHKDYIIIYRERRAGQAFYGADAITTDSPE

SEQ ID NO: 349678 - protein, 208 aa, Zea mays
  unsure (1)..(208): unsure at all Xaa locations
  Clone ID: MRT4577_82081C.1.pep
MASSSFKVTRISEGAVKPASETPDHTLPLAWVDRYPTHRGLVESMHIFRSGADAAPAVIREALGKALAFFYPLAGRIVEQPEKGCPAIRCTADGVYFAEAVAECSLEDVRFLERPLLLPKEDLVPYPADDLWGVEPHNTIMMMQITKFTCGGFVMGLRFNHASADGMGAAQFIKAVGDMAXGLPEPAVKPVWDREKFPXPSIKPGPLP

SEQ ID NO: 349679 - protein, 73 aa, Zea mays
  Clone ID: MRT4577_82082C.1.pep
ENAKTRLIFCSKDYFFLGRGNSEPPLVERCSVQLFLTRRAAKSFLCTLVPPPWGHQELKAVWSFSPEKVPLGL

SEQ ID NO: 349680 - protein, 89 aa, Zea mays
  Clone ID: MRT4577_82083C.1.pep
GVRRCSASPFALVVVLPWRALVFFWPLLVRGCLLFPGRARSSFLVLLVVVVFPLLAGFPGLVCFLPRGGVRGGGILRWAAALWVRASSA

SEQ ID NO: 349681 - protein, 76 aa, Zea mays
  unsure (1)..(76): unsure at all Xaa locations
  Clone ID: MRT4577_82084C.1.pep
YVDSLCHDSITRQPLSTSLSIRIRSTDHIXFGVFVCTLVGNWMALKTSTDYYLKXIYSFPEILWFPVTLFGTKKCH

SEQ ID NO: 349682 - protein, 109 aa, Zea mays
  unsure (1)..(109): unsure at all Xaa locations
  Clone ID: MRT4577_82085C.1.pep
HSPTLFPSTTRGRPPPWTVEKNTRISKGKKXGGKKNTVAPFSKKDWYDIKAPSVFSVRNIGKTLGGGAHATRIAYDGVKHKHYEVSLADLQGDEDHAYRKITIRAEDVQ

SEQ ID NO: 349683 - protein, 91 aa, Zea mays
  Clone ID: MRT4577_82086C.1.pep
NFCASFIPCFTRYEDRISGEEEVQCSVSTGLPAVQRAHTETFYSHLRHPRINLRHVGFGAPLFASVTIKLKNSVFHTYADSGMPVISIIFL

SEQ ID NO: 349684 - protein, 121 aa, Zea mays
  Clone ID: MRT4577_82087C.1.pep
LVSHYSEFNAVTQVDVDVDGQIGESGSNQPVSIVGTFPAMNVVLDIRGMGRLTSADAAHSPLRLGSCQWMSRCRSSHVGRCDTPSRRCCSFCVRFRVFWTLTPVVQRILLGVSYSRWRSCQ

SEQ ID NO: 349685 - protein, 245 aa, Zea mays
  Clone ID: MRT4577_82088C.1.pep
IRHEVTKESRKRLSNSLAKICYCLEDAGLLCASEATKICIERGQRKGWLKGGSDTTDQQSGQNGPILFAEISMLHMEFFQEVLDIIGKRVQQQQGIDALLNSERGCVEAKNMGYISPKLYELMQVFLSFSDPDNVRCLVFVDRKISARVIERTMKKIGQLSCFRVSFLTGGSSSVDALTPKMQKDTLDSFRSGKVNLLFTTDVAEEGIHIPDCSCVIRFDLPRTTRSYVQSRGRAPTEDSQYILM

SEQ ID NO: 349686 - protein, 49 aa, Zea mays
  Clone ID: MRT4577_82089C.1.pep
MADVDVEPEVAAGAPKKRTLRKHSYRGADLNELLDMTTDDLLHTLPQAL

SEQ ID NO: 349687 - protein, 472 aa, Zea mays
  Clone ID: MRT4577_8208C.1.pep
MAALKASFRGELSAASFLDSSRGPLVQHKVDFTFQRKGKRAISLRRTCCSMQQAPPPAWPGRAVAEPGRRSWDGPKPISIVGSTGSIGTQTLDIVAENPDKFRVVALAAGSNVTLLADQVKTFKPKLVAVRNESLVDELKEALADCEEKPEIIPGEQGVIEVARHPDAVTVVTGIVGCAGLKPTVAAIEAGKDIALANKETLIAGGPFVLPLAHKHKVKILPADSEHSAIFQCIQGLSEGALRRIILTASGGAFRDWPVDRLKDVKVADALKHPNWNMGRKITVDSATLFNKGLEVIEAHYLFGAEYDDIEIVIHPQSIIHSMVETQDSSVLAQLGWPDMRLPILYTLSWPDRIYCSEVTWPRLDLCKLGSLTFRAPDNVKYPSMDLAYAAGRAGGTMTGVLSAANEKAVELFIDEKISYLDIFKVVELTCNAHRNELVTSPSLEEIVHYDLWARRYAASLQPSSGLSPVPA

SEQ ID NO: 349688 - protein, 118 aa, Zea mays
  unsure (1)..(118): unsure at all Xaa locations
  Clone ID: MRT4577_82090C.1.pep
TDIRKAYGEESLXKKRLDALPASAAEGPAMAHSTTLQQNLDGLARMTHGGHSNNPSVQLEATTQYXRNLLSIERSPPIKQVIITGVTSRFIEFPTREDHPQIQCEAAWALTNIASGTS

SEQ ID NO: 349689 - protein, 178 aa, Zea mays
  unsure (1)..(178): unsure at all Xaa locations
  Clone ID: MRT4577_82091C.1.pep
MDQRQVVSENYANPITCFFHVLFKAGALAFYILFSLFVKSFVIIFVITVLLAALDFWVVKNVSGRILVGLRWWNEIDDDGNSVWKFECLDGESLARMNKKDVVGVCLSLSIANIVGFTKCNKDAKKDIQTFAXNALAXRVKSSLQSAFVNSLKSCCSMDRSILLIHSSGLSQIKLAAV

SEQ ID NO: 349690 - protein, 56 aa, Zea mays
  Clone ID: MRT4577_82092C.1.pep
PPPILISFLTKQFQILRGYIAYNICWDPGKRHFRPPTYAPSLLKLGLKETPPPLVF

SEQ ID NO: 349691 - protein, 111 aa, Zea mays
  Clone ID: MRT4577_82093C.1.pep
HAMWTRAADDVFVFRGVYDWTFLRVPAAHSEEKRARTKLGTIPPRYSFPCPLFHPTVSPVAFLLMCLACALLPTPTTAGRIALRNLPPRWCCSSDRVPLPYCAACAWSAPS

SEQ ID NO: 349692 - protein, 183 aa, Zea mays
  Clone ID: MRT4577_82094C.1.pep
MDQRQVVSENYANPITCFFHVLFKAGALAFYILFSLFVKSFVIIFVITVLLAALDFWVVKNVSGRILVGLRWWNEIDDDGNSVWKFECLDGESLARMNKKDSWLFWWTLYLTAAAWIVLGIFSLIRLEADYLLVVGVCLSLSIANIVGFTKCNKDAKKNIQTFAQNALASRVTSSLQSAFGVI

SEQ ID NO: 349693 - protein, 108 aa, Zea mays
  unsure (1)..(108): unsure at all Xaa locations
  Clone ID: MRT4577_82095C.1.pep
TRYGYAPFLDXHLHIAVXYADLVTKIGMAILSRTCHNDPKCLNNGDAELCKTVPTNHMVAFTFCHHPSLGRFAVRDMMLTEAXVETXNTVEMIDPTGARETNAACHKY

SEQ ID NO: 349694 - protein, 103 aa, Zea mays
  Clone ID: MRT4577_82096C.1.pep
IRIVLPVQYSSSFPVARFADQVPPFQSCQAIPVSGSCDGGGSVQPPAPASGGEGGYVGAVAADEGPETEVPGLSPGGGCPGRVVPCWTIRPGQGPRRTDPSHR

SEQ ID NO: 349695 - protein, 49 aa, Zea mays
  Clone ID: MRT4577_82097C.1.pep
GYSEIINHLVPFSQGLDVGVNIQKRPNFALNQCIWSVNIPTQSPPPTKN

SEQ ID NO: 349696 - protein, 57 aa, Zea mays
  Clone ID: MRT4577_82098C.1.pep
WMDQSNLISIYTLCQNTACSCSAHRYMFPLGFLSFRMHNQNRYHITRVIYSYGTVPI

SEQ ID NO: 349697 - protein, 166 aa, Zea mays
  unsure (1)..(166): unsure at all Xaa locations
  Clone ID: MRT4577_82099C.1.pep
MARTKQTARKSTGGKAPRKQLATKAARKSAPSTGGVKKPHRYRPGTVALREIRRYQMSTELLIRKLPFQRLVREIAQDFITDLRFQSAAIGALQEASEXAWWVCSKIPTCVPSTLRESPSCPKTSSWLAGYGERELKXRQXLWRFVVNSVKYFGLICDFFCKXLFI

SEQ ID NO: 349698 - protein, 226 aa, Zea mays
  unsure (1)..(226): unsure at all Xaa locations
  Clone ID: MRT4577_8209C.1.pep
MAAQPALKASFRGELNAVSFLDSSRGPFGQHKVDFTFQRKGKRAISLRRTCCSMQQAPPPAWPGRAVAEPGRRSLDGPKPISIVGSTGSIGTQTLDIVAENPDKFRVVALSAGSNVTLLADQVKTFKPKLVAVRNETLVDELKEALADCEEKPEIIPGEQGVIEVARHPDAITVVTGIVXGCAGLKPTIAAIEAGKDIALANKRTLLQXGPFVLPLHTTQVKIFLL

SEQ ID NO: 349699 - protein, 134 aa, Zea mays
  Clone ID: MRT4577_820C.1.pep
EAHKSTRPRRRRTGRTRKPRTPPPRTGATGAGATPRPGPHRRSSRAARASTTRKTRNRNPPATTTAPPRTRARRPQPRKSNPRDRPGGTRRRPARRRRRRSRRRATPAGRRETPPGRPTPTRGTAAPTDTTTAA

SEQ ID NO: 349700 - protein, 52 aa, Zea mays
  Clone ID: MRT4577_82100C.1.pep
KKKKKKKKKKKKKKKKKKKKKKKKKKKKKKKKKKKKKKKKKKNFFSFPGGLF

SEQ ID NO: 349701 - protein, 60 aa, Zea mays
  unsure (1)..(60): unsure at all Xaa locations
  Clone ID: MRT4577_82101C.1.pep
LPIKDTFDLFNTRNAQPKSVLLYGPPCTXKTLLARADAHHTDCTFIRMSGSXLVHKYIGE

SEQ ID NO: 349702 - protein, 62 aa, Zea mays
  Clone ID: MRT4577_82102C.1.pep
TTLCFCTLVWVEPVHMGAPLGAVSARVDPRAGASHCAAPRREKTSLEINSLLTSACIVIHIF

SEQ ID NO: 349703 - protein, 126 aa, Zea mays
  unsure (1)..(126): unsure at all Xaa locations
  Clone ID: MRT4577_82103C.1.pep
DAWADMAHISELAATGVRASPFDYANLXTTTTHKSLREPHXAMIFYRKGVKAINNHGKEVMYDYEDKINAVLFXPGLQGHPHNHTITSLSSALKQATTPXYIAYQEQVITNXAKIAHNLISKRYEL

SEQ ID NO: 349704 - protein, 83 aa, Zea mays
  unsure (1)..(83): unsure at all Xaa locations
  Clone ID: MRT4577_82104C.1.pep
AIKGWGFSGKVFFLEPPLGGGQGRFKLSNSWGGRGGKYVMLSPWWGWVDLILFVARPPLFFLWGLKKKKGCFIFLXVWARVFF

SEQ ID NO: 349705 - protein, 126 aa, Zea mays
  Clone ID: MRT4577_82105C.1.pep
EILVQFPIGHPPLLPGFFSRTRVLPLSLGNPPPRGGPPPFMGLYRAPGIFMPPGVVPLEGESPSGGFPLLWYPYFFSEFPRARFFKGGPEFGFWEIAFSDGEGPITQGLFCFVPLVCLCNFRGSPL

SEQ ID NO: 349706 - protein, 89 aa, Zea mays
  Clone ID: MRT4577_82106C.1.pep
LKTVSISCYTKIYIKKFSRNLEIRSRTGAHRTEPYRSHRSPPPPVPTNSSVIIALLFAASYISFCGRLSGMAELVDGRIIVWNSMESNT

SEQ ID NO: 349707 - protein, 72 aa, Zea mays
  Clone ID: MRT4577_82107C.1.pep
ERSSSCIIVWRESDVCLSFITLVVGFIYGAEDAGICSWAVAHWVRAKHNQRYLSFVSCMHDHTVSVLKWGDL

SEQ ID NO: 349708 - protein, 38 aa, Zea mays
  unsure (1)..(38): unsure at all Xaa locations
  Clone ID: MRT4577_82108C.1.pep
VRVFQVSVGYGSIADTETCIWTGQFVKNVPQXGVVXVW

SEQ ID NO: 349709 - protein, 62 aa, Zea mays
  unsure (1)..(62): unsure at all Xaa locations
  Clone ID: MRT4577_82109C.1.pep
MAATLARRAVRSAATTLLGAARGFVSVGCDIVSEEPGVXMHKARSWNXGVAPKFSTTPFKDI

SEQ ID NO: 349710 - protein, 57 aa, Zea mays
  Clone ID: MRT4577_8210C.1.pep
KQFSPKQLARSYANDWIEGMIPMSGFRAMQALVQTESKSKLALSVCCHIFFLSNIPK

SEQ ID NO: 349711 - protein, 78 aa, Zea mays
  Clone ID: MRT4577_82110C.1.pep
LSAIIVHINQKAYTSGASSMVSKLAEQIISANKQANKSLKALGRPRSRGRQPSMMVSRLWSRRPVLSSKMLLGYVIKR

SEQ ID NO: 349712 - protein, 41 aa, Zea mays
  Clone ID: MRT4577_82111C.1.pep
QNGKAAAYSEIFLARHWIHRLSRRSFEVREAHTRNSEVGRP

SEQ ID NO: 349713 - protein, 59 aa, Zea mays
  Clone ID: MRT4577_82112C.1.pep
LYKTLGFTNIIAELVNRQFSTHSVTHARGITFSTGENFSWLGSCIFCLPLGSPHDSQCR

SEQ ID NO: 349714 - protein, 122 aa, Zea mays
  Clone ID: MRT4577_82113C.1.pep
EYMPNGSLDQHLFRRGAHEQRPVLDWASRYAIVRDVAAGLHYVHHEHTRMVLHRDVKASNVLLDAAWRARLGDFGLARVLDQGRESFTDVHVAGTFGFIAPEYSVGHRATRETDVFAFGALV

SEQ ID NO: 349715 - protein, 125 aa, Zea mays
  unsure (1)..(125): unsure at all Xaa locations
  Clone ID: MRT4577_82114C.1.pep
MAKVFSRLFIKIDILILMHILNAGHKTTILYKLMHRHIVTTIPTIIFNVETDDYTNINFTVCYADCHDKIRPMSRHYLQHTXRLIHGVNSNDRNHDHEPRDELHNMLNEDQLHDAVLDAFVNEQD

SEQ ID NO: 349716 - protein, 145 aa, Zea mays
  unsure (1)..(145): unsure at all Xaa locations
  Clone ID: MRT4577_82115C.1.pep
EVRIWFGVSRHYFSLLPHRTQEDIFRPAAGTAPRRLIVLAGLALEDTEDGANSGYGDSNPNRPVTDRADCELETTAFAGLGRTRDGLRCARXGVRXGKSYESAAEVHKRIRIFSESLQLGRSPTQKACANRXGINRFSDMSWEEF

SEQ ID NO: 349717 - protein, 58 aa, Zea mays
  Clone ID: MRT4577_82116C.1.pep
SLHRWPVPTLTLTLSCPLPQRILPWDSVGWALTTDASAHTIARSSASSPLPYDFRETL

SEQ ID NO: 349718 - protein, 42 aa, Zea mays
  Clone ID: MRT4577_82117C.1.pep
FLFSPGFSGAQKKKKKKKKKKKKKKKKKKKKKKKKKKKKKKK

SEQ ID NO: 349719 - protein, 423 aa, Zea mays
  unsure (1)..(423): unsure at all Xaa locations
  Clone ID: MRT4577_82118C.1.pep
MGIFFSKAEPPPPMVLVPPLFDYPPIAARTRMAVPAYELMFGKVSLQNLFEDYFDQAGNMTSRIMLKPLEDPHVDLIATVSAAADRNSGTEVKGDALFRWQRELDDPHTFVDLLVSTSNPLLQLRLCAYHPKYRIGAFGTLPLLMGXTGXHSEDYGVMGVRYGSENLSVGASFVPISLSSEVPFGAWLVGRKGSLSAGVQYKPLSGSKYPMPFTELENWNYAISYGVGSTSPLSPSFIFSLELARSTQLTASFYQHLVVQRRVKNPFEDDQVVGITNYIDFGLELAAKVDKDKVSGDGNSFQLAASWQANKNFLLKGKLGPSTSSVALAFKSWWRPSFTFSVTAVNDHSKGTTSYGFGLRVEDLRRASYQRADPNYVMLTPSKEHLAPGVLREYGKRPMFQTQIDSGNYDHLPTELKPLGRIF

SEQ ID NO: 349720 - protein, 149 aa, Zea mays
  Clone ID: MRT4577_82119C.1.pep
STSFIPKPMTEGTSSSGPHRDTRARAPTAPSRRRAELRPSQQPDPRTSLPKSMRGSWRVFSVGSHRERRHGQGSRRHRVVLPWDVSSDELSVSLLRRSSHTTPPVMIDIHGEASTPLGDAAAAVHRRRPSLSPRSLSSAQVLMLASCRI

SEQ ID NO: 349721 - protein, 90 aa, Zea mays
  Clone ID: MRT4577_8211C.1.pep
KPPALEAAYAAGLAAGVWTKKKVFAGLHKENPTVFRPKVREWCGGKKGVFMVQVGFNIIRSGRFLSVKWCPSDPAPPAAACFCVSVRSSK

SEQ ID NO: 349722 - protein, 36 aa, Zea mays
  Clone ID: MRT4577_82120C.1.pep
LLSSSQPRLILLISIPINKAMPLSLLLSSMELVGFN

SEQ ID NO: 349723 - protein, 76 aa, Zea mays
  unsure (1)..(76): unsure at all Xaa locations
  Clone ID: MRT4577_82121C.1.pep
DTSGDQCTSSFRVFALHRGVILEIGIFITDRHTKHIVIKIGLPGYGNFXRADXLMPMDHCLWLSECIKNLYLELIY

SEQ ID NO: 349724 - protein, 133 aa, Zea mays
  Clone ID: MRT4577_82122C.1.pep
RPAGIINFTSRYSVQYGGDKRITTLVGLANDILETTNNEENGVYKTPTKLIHMARQTLNSLTGFVHKTGEDENPPAVHIPQQQSPDDRTSLQYFLNKHMSDVKHQTSENKNTTLKRGKLRGMVDYVREANQKS

SEQ ID NO: 349725 - protein, 113 aa, Zea mays
  Clone ID: MRT4577_82123C.1.pep
FLPSVIIPLQLLCLPCLFTFFILADAAAPQVGAIGIPLIRGGHSRPGAPAKLAPPKPIPLRHAAPAPPKLTPIASGAYIVRSLCLKTDYSDLCMSGIAKLPQSQLPVGKRLDS

SEQ ID NO: 349726 - protein, 119 aa, Zea mays
  Clone ID: MRT4577_82124C.1.pep
LHFPALARAGAVRDPAPSAPFRRFWPGLARAPPGPRRRFGPLRGPAGAGPGWALAAPARGSWGALVFFQLDPVGSGWSQALLAVSGVSPPSPLFPLAPAGPCRLWCPLASVPFGNSTQG

SEQ ID NO: 349727 - protein, 96 aa, Zea mays
  unsure (1)..(96): unsure at all Xaa locations
  Clone ID: MRT4577_82125C.1.pep
LAGKKKKKKKISFLRFLPFYPQARERAXGLLSFLVXXRPSXGRRLPLRAXXPXFVPFXPAXRPTXXWLIRQXSLSPXXCXHHXXGRAGXYSRAFLL

SEQ ID NO: 349728 - protein, 108 aa, Zea mays
  Clone ID: MRT4577_82126C.1.pep
RSLSLRLLFVLSRVFRGQRLLCRVLVVRVRLFLMACLSLSSIRLSLLIMLLLLGLFLPIFLIRMVCILMRLRQVRCPKVAQGRRLSRLLSPLLFLLMVSVRLVAIWCT

SEQ ID NO: 349729 - protein, 66 aa, Zea mays
  Clone ID: MRT4577_82127C.1.pep
VQYMEFIFGGVVLELVYLLGVAALQNEAVSIFLVYLLDACLLYFLLFSLDWCLLPECRFSVIVRFC

SEQ ID NO: 349730 - protein, 118 aa, Zea mays
  Clone ID: MRT4577_82128C.1.pep
MINHSLVHTMLCELLNVGQILMYYRRPIRQKHWVMHCSTCTMRLPAWCSRNGDHRQKYLSDTQASMFHDRSIQAKKKSYHNIHIYKHMQCLSRCFQARSNMKTSKHLHQYVLTNIECS

SEQ ID NO: 349731 - protein, 157 aa, Zea mays
  Clone ID: MRT4577_82129C.1.pep
MGKGVLEVHLVDAKGLSGNDFLGKLDPYVIMQYRSQERKSSVARDQGRNPCWNEVFKFQINSAAANVQHKLILRIMDHDNFSSDDFLGEATIDVTDIVSLGAERGTYHLNAAKHNVVLADKTYHGEIKVAITFTSTQTQVQEDGGAIGGWRHSSFNQ

SEQ ID NO: 349732 - protein, 75 aa, Zea mays
  unsure (1)..(75): unsure at all Xaa locations
  Clone ID: MRT4577_82130C.1.pep
HLLSHHGDPELGVLMLLALSTCGANPTIFPXCSQASIAFLFSPYLSLIIASVXCXNPTFQPYXLXQAIAARHIPL

SEQ ID NO: 349733 - protein, 133 aa, Zea mays
  unsure (1)..(133): unsure at all Xaa locations
  Clone ID: MRT4577_82131C.1.pep
MAPSLLAAVSASPFLLPGSSRRPLGAAPTRRAGLRVAALKYDPAKXVAPQNDRVLVRLQQIPEKSAGGVLLPKSAVKFERYLMGEILSVGADVSEVEAGKKVLFSDINAYEVDLDTDEKHCFCRESDLLAVVE

SEQ ID NO: 349734 - protein, 87 aa, Zea mays
  Clone ID: MRT4577_82132C.1.pep
MSDYIRAAVSGVDHENLMLTFQDHQVLLPPDIDGQFGCLRFEACWHRIVCANCHTSERLGRMLVFNSGFYATFPMSTITHYLTEIAF

SEQ ID NO: 349735 - protein, 69 aa, Zea mays
  Clone ID: MRT4577_82133C.1.pep
ASGPCEAPDGRLRLVLPAARALLELASHLVVASAIAPEPYWYAPIADAAAGVRCRRRGGEKEARETARG

SEQ ID NO: 349736 - protein, 268 aa, Zea mays
  Clone ID: MRT4577_82134C.1.pep
IINAVMSGRDVLVIMAAGGGKSLCYQLPAVLRDGIALVVSPLLSLIQDQVMGLSALGIPAYMLTSTTNKEVEKFIYKTLDKGEGELKILYVTPEKISKSKRFMSKLEKCHHAGRLSLIAIDEAHCCSQWGHDFRPDYKNLGILKIQFPSVPMIALTATATSKVQMDLMEMLHIPRCIKFVSTVNRPNLFYKVSEKSPVGKVVIDEITKFISESYPNNESGIIYCFSRKECEQVAKELRERGISADYYHADMDIVNREKIHMRIDTQGM

SEQ ID NO: 349737 - protein, 42 aa, Zea mays
  Clone ID: MRT4577_82135C.1.pep
SNFQPFKWPKRHKAFLTRLSLIMILAFLGSPPVFSSHNLTGF

SEQ ID NO: 349738 - protein, 107 aa, Zea mays
  Clone ID: MRT4577_82136C.1.pep
FTKYTAGSVCPSSRQARNVRWLVSKHTALKSTGGKAPPKQLSTKALRMSVPATGGIKNPNRFRPDTVSLRKILMFHMSTELLMSMLTFQRLFRVIAQDFKTFLLFQS

SEQ ID NO: 349739 - protein, 201 aa, Zea mays
  Clone ID: MRT4577_82137C.1.pep
MAMMGSTSKKMYLCQVMKQLSSAISVPRWCPRRRKNTKTYMGRVFCLPHGAYQDYPMKGNQTSRERARDSRHIAELSAEVNRLQQEIVERDTTIDWVINSRSFAWDCEANSLARVSKLSATLKNLQAYCNTVHEEVHVLYDRLHPNVPSEVAAMGARPSGAASGGPDGELDHFGAPPSMNLADECSLGAGSGAAVAKDEDN

SEQ ID NO: 349740 - protein, 66 aa, Zea mays
  Clone ID: MRT4577_82138C.1.pep
VLVREDSVGSPSARRAPYKYNLPYSYLAVVKYLREKEQKNSESRLSLHMFMYSDRKKCNHFETRLF

SEQ ID NO: 349741 - protein, 75 aa, Zea mays
  Clone ID: MRT4577_82139C.1.pep
SYIPSKYPKPRASQQGHAATLPHQRKPGSMKPKHPCNLGTVHILSGCNIHIPWGPPNRDPEIEVTNNRPAPARAE

SEQ ID NO: 349742 - protein, 76 aa, Zea mays
  Clone ID: MRT4577_8213C.1.pep
THRADVLPGLSRAQARGRVRKIQLVLGANGVDGLALEALSVVVTEVEVVLAPYVDPSMARIGQGAVQVGEVVSRFF

SEQ ID NO: 349743 - protein, 47 aa, Zea mays
  unsure (1)..(47): unsure at all Xaa locations
  Clone ID: MRT4577_82140C.1.pep
KMPPPTILSSWRGAXTNNLTTSIQLNNFFPFXXYPTXFXTINXLNQX

SEQ ID NO: 349744 - protein, 100 aa, Zea mays
  unsure (1)..(100): unsure at all Xaa locations
  Clone ID: MRT4577_82141C.1.pep
MAMNYPTVSAEYSEAVENARRKLRALIAEKSCAALMLSLAWHSAGTFEVSSRIGRPFXTMNLSSDMAHGTSTGLDFCSSASRRRSGEHSSTICLRVGFLP

SEQ ID NO: 349745 - protein, 103 aa, Zea mays
  unsure (1)..(103): unsure at all Xaa locations
  Clone ID: MRT4577_82142C.1.pep
KVDSGTKIRPPLAAKMFSILMLVALSEXVANATIYPQYSQATIAALLTPYLTSMTALVCENPALQPYRIHLAIATSILPLSHLFFXQSPALSLVHTLVQTITA

SEQ ID NO: 349746 - protein, 60 aa, Zea mays
  Clone ID: MRT4577_82143C.1.pep
FSSLFWPPRFSPFFFRFIFFVDFLREKIFPQKKTLTIISPIFFPKLVPLIWPPSFFKFPL

SEQ ID NO: 349747 - protein, 77 aa, Zea mays
  Clone ID: MRT4577_82144C.1.pep
IQIFVKPLTGKPIPLEVESSAPIDNVKAKIRAKEGIPPAQQGLFFAGNQLEDARPLADSTIQKESPPPLVPPPRGGQ

SEQ ID NO: 349748 - protein, 71 aa, Zea mays
  Clone ID: MRT4577_82145C.1.pep
GSTHTSKTVQPVHIVDVPGHAMLKPKLAELLPKAAGVVLNVGAQDFLSNMQAAGKYPLYILTKASVTNIRI

SEQ ID NO: 349749 - protein, 82 aa, Zea mays
  Clone ID: MRT4577_82146C.1.pep
ASPIGTGRWRYNADPPPKENVVSNRKKPSKHQGFLQCQALVNLRLSYILILCFSYCRFYFFFMFFFFYSVFFYFFFFFFFFF

SEQ ID NO: 349750 - protein, 48 aa, Zea mays
  Clone ID: MRT4577_82147C.1.pep
ILPLVRPLFLRFLHLLIPIRQMYIQQWAMTLIPIIIPPASLSTNPNTI

SEQ ID NO: 349751 - protein, 191 aa, Zea mays
  unsure (1)..(191): unsure at all Xaa locations
  Clone ID: MRT4577_82148C.1.pep
MLHYPDLLSGDQLLSDSFTYKELXNGSLRDVERXWVPQGPVDVDIVAXPSSEDDEDQSVDDTAVKAVDXIVDTFRLQDXPPFDKKSXVXYIKKYIKNLIXVLQPEKENESRKGVEGATKFLLXQLKDLQLFVGESMKDDASVXFAYYXMRAANPTFLYXSHALKETQGYVCGDKYLPMSGTIYALLLCPRL

SEQ ID NO: 349752 - protein, 66 aa, Zea mays
  Clone ID: MRT4577_82149C.1.pep
ETHLLPFSFCTHTAVKPPNLAPSRHKKKHILLMTHSEPAHSQSASWHPRCSDSIQHLALYLQEVFT

SEQ ID NO: 349753 - protein, 64 aa, Zea mays
  Clone ID: MRT4577_8214C.1.pep
TRPEPRIQIKRRTTVKRRPRLQSQGQGQSGQESHRQRTRWHPKPSEPRPGLTHEEDGGLLRRSG

SEQ ID NO: 349754 - protein, 68 aa, Zea mays
  unsure (1)..(68): unsure at all Xaa locations
  Clone ID: MRT4577_82150C.1.pep
QIQWVKKENGWKLLEEERLRDGTGVMMMMMMGIFSVRGAAATAVIAACLVGRARXXVEGAWTTVTVPM

SEQ ID NO: 349755 - protein, 59 aa, Zea mays
  Clone ID: MRT4577_82151C.1.pep
EVFRNANSPKINNVSQNPSNKMCTVFTNIKYINFKIIEIEELHHLSGESVNLQKQLTYF

SEQ ID NO: 349756 - protein, 37 aa, Zea mays
  Clone ID: MRT4577_82152C.1.pep
SFHLAQRTDIRTFLLETTIVSNRYSISHVQIGSLVLS

SEQ ID NO: 349757 - protein, 42 aa, Zea mays
  Clone ID: MRT4577_82153C.1.pep
YFKECEYRHNGTLNLNGGSNIYGIASLRLDTVKNHKSLQLSN

SEQ ID NO: 349758 - protein, 72 aa, Zea mays
  unsure (1)..(72): unsure at all Xaa locations
  Clone ID: MRT4577_82154C.1.pep
FPSSFLFXXVFRSLLGLPAFFALPVXVPXPSXXAPLCLRSPPSGLSSXCRPWXLLPLWXLVCLLSSSVFFFL

SEQ ID NO: 349759 - protein, 64 aa, Zea mays
  Clone ID: MRT4577_82155C.1.pep
GVFFPAPVLFFSAQDLEPCHGRKLALPPAFPARVRSRAGVDLLYATLLSSWYLSEWAGSFFGDS

SEQ ID NO: 349760 - protein, 49 aa, Zea mays
  Clone ID: MRT4577_82156C.1.pep
TIRFPKSIHLILHARLTLYKMAMIVVYTKVLRDLGPVAPQPRNRSPPSC

SEQ ID NO: 349761 - protein, 72 aa, Zea mays
  unsure (1)..(72): unsure at all Xaa locations
  Clone ID: MRT4577_82157C.1.pep
PAGLSGLPPXXGGXXIYPNXWPPWTSWYSCPSEVNNCCLLKLIKPLHLLAHNNTLTMRDEEVNDPKEILKER

SEQ ID NO: 349762 - protein, 92 aa, Zea mays
  unsure (1)..(92): unsure at all Xaa locations
  Clone ID: MRT4577_82158C.1.pep
MSDLDIQIPTAFDPXGDANAGDSGATSRSKDYIHVRIQQRNARKSLTTVQRLKKEFSYSQIPKDLKKELCCNGTEVQDPELGQRIHLQGGSD

SEQ ID NO: 349763 - protein, 82 aa, Zea mays
  unsure (1)..(82): unsure at all Xaa locations
  Clone ID: MRT4577_82159C.1.pep
TSKVQAXLAEEYGIKFFDTSENHSFNVERVFFCIARDINQTLSDPDSKREVMVMKIKVQAKHHAAEVHKLACFGSFPVVSPP

SEQ ID NO: 349764 - protein, 39 aa, Zea mays
  Clone ID: MRT4577_8215C.1.pep
RSSTGHTPTPDATDFLKGGANPHSLRPGFIRCKAQDRST

SEQ ID NO: 349765 - protein, 61 aa, Zea mays
  Clone ID: MRT4577_82160C.1.pep
FFSSIFVASVCCLFDVFVTSMQFFFVKVNAIHVIKIGLYIYYSFKYLKKKNKKKFIKKNSY

SEQ ID NO: 349766 - protein, 155 aa, Zea mays
  Clone ID: MRT4577_82161C.1.pep
TLEARPGKLLNLGPSITRGATHPKASPSVSLADAAYVKISEADFGYVLDDVPHFTDYLPDIPTYPNPLQDHPAYSTVKQYFVNEDDTVPQKVVVQKNSRRGVHFRRAGPRQRVYFGTDEVKACIVTCGGLCPGLNTVIRELVCGLSHMYNVSSIF

SEQ ID NO: 349767 - protein, 83 aa, Zea mays
  Clone ID: MRT4577_82162C.1.pep
VIFASFYNYPTFSRLSCGVTKNNDACVKYKEMNFLIGDIKPSQDPLQYFNLKENQTPLILIQDGDYKILLKDHIEADQYPFCL

SEQ ID NO: 349768 - protein, 575 aa, Zea mays
  Clone ID: MRT4577_82163C.1.pep
MASHIILPPDDADENHNHQAAAAAEEEEEERDELGRDDDDDEHGVPPALPPKAALPFSATCVRISRDSYPNLRALRNASSVSLADAAYVKISEADFGYVLDDVPHFTDYLPDIPTYPNPLQDHPAYSTVKQYFVNEDDTVPQKVVVQKNSRRGVHFRRAGPRQRVYFGTDEVKACIVTCGGLCPGLNTVIRELVCGLSHMYNVSSIFGIQNGYKGFYSSNYLPLTPKSVNDIHKRGGTVLGTSRGGHDTKKIVDNIQDRGINQVYIIGGDGTQKGAYEIFKEIRKRGLKVSVAGVPKTIDNDIAIIDKSFGFDTAVEEAQRAIDSAHVEACSAENGIGLVKLMGRYSGFIAMYATLASRDVDCCLIPESPFYLDGEGGLLQYVEKRLKENKHMVIVVAEGAGQDLIAKSLATSDQQDASGNKLLLDIGLWLTHKIKDYFKSKKMEMTIKYIDPTYMVRAIPSNASDNVYCTLLAHSAIHGAMAGYSFTVGMVNGRHTYIPFYRVTSTRNKVKVTDRMWARLLSSTNQPSFLSQKDIDEASEADRLANRPPLPTGASSRVVRSFDQSSSCSSNGEI

SEQ ID NO: 349769 - protein, 68 aa, Zea mays
  Clone ID: MRT4577_82164C.1.pep
NGRFAFRSLFAGFIDILAVRASLVGFWGARDISSFSSGVNIDAHLSFIASFKLNCMLIFKVVTTVRSI

SEQ ID NO: 349770 - protein, 87 aa, Zea mays
  Clone ID: MRT4577_82165C.1.pep
HVLPIFVPPLALKHKALFMLFDLYASEDTAPHNDALLTEHCRFRYNKIPVTEGIVECVKRHQLIAFRVPSRTAHNAFDQISIGAHIT

SEQ ID NO: 349771 - protein, 49 aa, Zea mays
  Clone ID: MRT4577_82166C.1.pep
HCRHRVQCNVYTRSVIILWGTINVGGKYTFYYPALANSERKGLVLKTTT

SEQ ID NO: 349772 - protein, 117 aa, Zea mays
  unsure (1)..(117): unsure at all Xaa locations
  Clone ID: MRT4577_82167C.1.pep
PFVQTLTPSSGGRPLQTPHTFDHNQTHGKXSLCCEPSHAEWYTLQXQAAYACANRTTNLDVALDMRAPPXHIXGAHESDSCHTLTXDTNSHTRPTNGIVATGSRVASTTHRKVTSYA

SEQ ID NO: 349773 - protein, 75 aa, Zea mays
  Clone ID: MRT4577_82168C.1.pep
QFLCHPPAVKVRMWARELVLWGRTCGSLSWSSHGIQFTWCEFPVASIILLNIFVLSASFFYLGVIAQFVGGLCAR

SEQ ID NO: 349774 - protein, 147 aa, Zea mays
  unsure (1)..(147): unsure at all Xaa locations
  Clone ID: MRT4577_82169C.1.pep
GATIKKTRAGTWPPFPHFPKRPTPRPCXLPPGVKIEKPAPLPGNPAPHHPAPIHSDSNPTNGLAPPXNPGPPXKTGPFXPSSNPKTCPPPQGKGDPFPGAHGXANXPPGPWVFSSAEPPPVSXKAPPCLYPPPYLPCSHHRLGGGVL

SEQ ID NO: 349775 - protein, 107 aa, Zea mays
  Clone ID: MRT4577_8216C.1.pep
MEVAAATCTLLAAVALPVSSSAAAARSATKQSYSRRKTTAVRAVMARPHQVPPPATATATATTYRDNWFDKLAIGYLSRNLQEASGTYAVRTAHLLRPAHAAHSTGC

SEQ ID NO: 349776 - protein, 109 aa, Zea mays
  Clone ID: MRT4577_82170C.1.pep
CSSGMLFYLQLFDFFVNMQKSFLVVEAAMGWFLVISVVTSHGAAPSRAGQHQAAHRWLKKVVHGWPERQSQGHTNVRRPEASEQTAGRLELVAGAWTEGEGDIESVDEV

SEQ ID NO: 349777 - protein, 211 aa, Zea mays
  Clone ID: MRT4577_82171C.1.pep
PAGFEFSSDAFDVAQNAPCGHHTISIQVPLIKDMISSKIQQLPAYHHPKFEAKLRAYDSEVGKSFATINQRLSKIVKKQYDLADTFGELIDEVLRAEINSPDNKDDMIEPSNPSASATQLESQMIVTQVEAIYKRQQEMCRAFESSRDDSVTPQNIRGDTTEDDALQLDSGLVLDQILSGNETYMMHKTRRDSVPLTQMDLCSRPSTIPVC

SEQ ID NO: 349778 - protein, 58 aa, Zea mays
  Clone ID: MRT4577_82172C.1.pep
SKSSSFKITTCFVITLNATDCERCYMCSSPGSEQKKFEGQIEHATFMSQFTMIADTVV

SEQ ID NO: 349779 - protein, 50 aa, Zea mays
  Clone ID: MRT4577_82173C.1.pep
RRRSPSTSHGWPTAAEGPAPGRIRAGTIGAPDIDPAVILNDAAPLGNHNP

SEQ ID NO: 349780 - protein, 299 aa, Zea mays
  Clone ID: MRT4577_82174C.1.pep
MMHKTRHDSVPLTQMDCVRALRQFLCAKVMDLNRNVIDFGEYVGTCRDIQRSFADGECLDNVFMQCFIDCVRDDATNHIPPLTAHQLILDAIVGAILNFEEQEQHSNTHRPYDPAILENYLSKTLPSFKQLDEYKSIMVPMLRAGHWTLYVINFQNRCIHILDSNPYGPELGETTWESYHYVQMDIGKRKLPWARLIMVRLNMALQHVRPRSNLPRFDNFPIDMAPNCPTMKAGSNDCGFFAMRYIQYYDYMDGAINVVIDSDNSGDLRALALYYLIFHRLNKNRSLSPELERFKFPHY

SEQ ID NO: 349781 - protein, 67 aa, Zea mays
  Clone ID: MRT4577_82175C.1.pep
GLEAIVSGDGTPSVPVSASGLWDSITILASSRVSRTGWDEDLLVHWSPPPLEIIVFGRERRRVTATV

SEQ ID NO: 349782 - protein, 149 aa, Zea mays
  unsure (1)..(149): unsure at all Xaa locations
  Clone ID: MRT4577_82176C.1.pep
LSKGLIPPHWGPLQRNPSPDPSGAKQRPNLFPGKNGHPPPIPKEQTPPKPXGKTGGPKRGNKPKKKGKPQXPPGKKRKTRRPKKKXTGQNPEKGGPPKGGPTPNKXDGPPPPGPKGEKSGTTSLKRGKTATQKRGGKRRKKHGTKSHKK

SEQ ID NO: 349783 - protein, 38 aa, Zea mays
  Clone ID: MRT4577_82177C.1.pep
HDQRRKSFTDMTITLCREYHGSRLKIDALDQYKAGCRK

SEQ ID NO: 349784 - protein, 133 aa, Zea mays
  unsure (1)..(133): unsure at all Xaa locations
  Clone ID: MRT4577_82178C.1.pep
NPKKPNPPPGANGKQPNXNDPVPEGXXEGPGPLDSKMIDLKRPPAGPHGQGSNSPPPGGGLSVTPPPPPGGGPPSNSENPPTPPPLEDWNVPFPPIFFFIGAPGGRKKKKKKKKKKKKKKKKKKKKKKNPPPP

SEQ ID NO: 349785 - protein, 35 aa, Zea mays
  unsure (1)..(35): unsure at all Xaa locations
  Clone ID: MRT4577_82179C.1.pep
STDLPWGGLXGKKIQIRTKQHNANRARFVYRLAVL

SEQ ID NO: 349786 - protein, 161 aa, Zea mays
  Clone ID: MRT4577_8217C.1.pep
NLCQLIIAFSSLRHCSWWKELRVESNLSFVRDRIVEVYFWMSGGCYDPQYSHSRIILTKIVAFITILDDTLDSHANSYESMQLAEAVERWDETAVSLLPEYMKDFYMYLLKTFSSFENELGPDKSYRVFYLKEAVKELVREYTKEIKWRDEDYVPKTLKEH

SEQ ID NO: 349787 - protein, 63 aa, Zea mays
  unsure (1)..(63): unsure at all Xaa locations
  Clone ID: MRT4577_82180C.1.pep
LSSMGVGVRVRRGPREGHKEETLRERVSGNGCSSLSRXQRWERRRSVVLATHRAVFLAVVRSF

SEQ ID NO: 349788 - protein, 49 aa, Zea mays
  Clone ID: MRT4577_82181C.1.pep
VQLPKHNHQPPQGAKKARSSTPGLADQGATTGRRRKRRSFASGRRRGIK

SEQ ID NO: 349789 - protein, 101 aa, Zea mays
  unsure (1)..(101): unsure at all Xaa locations
  Clone ID: MRT4577_82182C.1.pep
CWCSPPCRCGPPXYVTXSSSPPPTASCPGAPCPRPGRPSARTARSSPGSSPPRCWTPHWVRSGRPCTEPRSAPPGPQEKGPISGPNGPRAVPHGEPARRTG

SEQ ID NO: 349790 - protein, 80 aa, Zea mays
  Clone ID: MRT4577_82183C.1.pep
HSCIGQRVKVWVLVYWRHRQTHMPLYAFHSISCACPSCKKHPFRFESSKATKATHSNLKDLHRVSIASFFPHVSPCKMIR

SEQ ID NO: 349791 - protein, 79 aa, Zea mays
  Clone ID: MRT4577_82184C.1.pep
MAASKFYVASCALLLIGVVLLGQQGIDGAVAACPQFCLDVDYVTCPSSGSEKLPASCNCCMTPKGCTLHLSDGTQQTCS

SEQ ID NO: 349792 - protein, 78 aa, Zea mays
  Clone ID: MRT4577_82185C.1.pep
MAASKFYVASCALLLIGVVLLGQQGIDGAVACPQFCLDVDYVTCPSSGSEKLPASCNCCMTPKGCTLHLSDGTQQTCS

SEQ ID NO: 349793 - protein, 78 aa, Zea mays
  unsure (1)..(78): unsure at all Xaa locations
  Clone ID: MRT4577_82186C.1.pep
MADCMQEWPEPVVRVQALAESGLSVIPSCYVKPPCDRPAPAXTDHGTTGAGSPSEEEGAQLGRLRQHSGRRPRRPAGR

SEQ ID NO: 349794 - protein, 106 aa, Zea mays
  Clone ID: MRT4577_82187C.1.pep
GFPANFRANPKGGFWGAIPRRKRMYPRLINSPVKLRKFLFSFPIPAKGPSLMDIENKLFAFFFRDSPMAQCFPSWGAPKERGLKFSSKWRGRFKPFIPVFAPGKGF

SEQ ID NO: 349795 - protein, 78 aa, Zea mays
  Clone ID: MRT4577_82188C.1.pep
ITGYAVVIASTLNAVALPIYTSNSVEFVPIAPVLKPSSGEMPLALAHSPLLHNYRRSRLSRRYRVESLHGRTHGRHDA

SEQ ID NO: 349796 - protein, 79 aa, Zea mays
  Clone ID: MRT4577_82189C.1.pep
GRPGELQSGLGYLGMVSQSLETAFGVVGSLPDAAGSFSDEYNSNRSSADFMSSNSNRLEQRVGGSSSGRGAATRRKSDG

SEQ ID NO: 349797 - protein, 232 aa, Zea mays
  Clone ID: MRT4577_8218C.1.pep
MTSIYSLFMPFRPGFISRSFEIRKDQAMFRYIVALILVAILVVSMNKSIDARMVHPIVTPEAISPSPAYNDGRRLIGTTGHDELVALCQQMHYKTLCTTMTTLPGVMTPEQLLDASLRITAVKAAMTEMKLDRAIKSSGAQGNAMMSSLETCKESYASLVDSINTTRNTLKSGGSNADIMSELSAAATFSTDCEDTFDERPELKSPIPGAQRHISRLVSNCLDLAATITDQP

SEQ ID NO: 349798 - protein, 101 aa, Zea mays
  Clone ID: MRT4577_82190C.1.pep
IYIFTHFEVSVSVCVCVYMQHSHAREGETESDLDTRWLPYIDPEMYISISIYVHTSTCRPWSVFVHINIQMYVVLCMSIYIYRKRKRETSTVRVGEGGIFC

SEQ ID NO: 349799 - protein, 115 aa, Zea mays
  Clone ID: MRT4577_82191C.1.pep
STVEMLLSTAALEHCAGTATPTPDCDRCLQLVLHDSRGADGDEEAKGPFVCLGLKTDLFLFLTGDTDADFWNTAASRYGPPLPPPPAVSRRSICSRRRGEGLQRLFGGVSSAQQW

SEQ ID NO: 349800 - protein, 44 aa, Zea mays
  Clone ID: MRT4577_82192C.1.pep
KCSLPDDPCRTQTMTEQMGSTASKFYADRVKEQLFRCSIINLTV

SEQ ID NO: 349801 - protein, 94 aa, Zea mays
  Clone ID: MRT4577_82193C.1.pep
FFKYILVKNCGDQKNKGPSQVTVTLVFSRYMAPDPPSSTAPPKGAVMRSCRNLTTQAASMFVTTTGLEQKMVRQPSPSFCQGLWRQKKTKKRAP

SEQ ID NO: 349802 - protein, 79 aa, Zea mays
  unsure (1)..(79): unsure at all Xaa locations
  Clone ID: MRT4577_82194C.1.pep
MARTQSAVAVAVVAAVLLLAAAATTSEAAITCGQVSSAVGGGLSYXRVTGSDPSVSCCLGVWNLRCAVLTRPGPVALPA

SEQ ID NO: 349803 - protein, 237 aa, Zea mays
  unsure (1)..(237): unsure at all Xaa locations
  Clone ID: MRT4577_82195C.1.pep
TVIDCEYGAKYKKKXWFSTAKDFSEDVMVAYDFDKVPALVSVNPKYKEQSVFYGPFEGTFLQDFIRQSLLPATVPIDRETAKLLKDDGRKVVLTILEDESDESSPQLIKVLRSAANANHDLVFGYVGVKQWEEFTETFDVKVSQLPKIVVWDTKEEYEVVEGSESLREGDYGSQVSRFLEGYREGRPPKKKVGRGSPTLLGLNAVYILVLLVAVLVVLMYFSAQGEEDHQPRRAHED

SEQ ID NO: 349804 - protein, 61 aa, Zea mays
  Clone ID: MRT4577_82196C.1.pep
NSRTHASSSRGPPSSFWGNLCRGSLHLRRTSEAGAHLMITTRLACAPTTEHTLQAPGKAHA

SEQ ID NO: 349805 - protein, 101 aa, Zea mays
  Clone ID: MRT4577_82197C.1.pep
MRPLPLVVVPAAALRQAVAVDERERSPRHLVQEPAPLHEEVPEVVGSQGEEVVQPPPPAARRRARMAPVVLHAACCLGRLLVAPETHATCCVTAARVFTRA

SEQ ID NO: 349806 - protein, 41 aa, Zea mays
  Clone ID: MRT4577_82198C.1.pep
RLSVISIVPINTPTVYVYHSLLVKDTALLNAEVMHLNRSIS

SEQ ID NO: 349807 - protein, 203 aa, Zea mays
  unsure (1)..(203): unsure at all Xaa locations
  Clone ID: MRT4577_82199C.1.pep
MATTHLLTPPRVHHPSPSASSSVARVRATASLALVELVAPPDRLPALRAEAEALPRVRLAPVDLQWAHVLAEGWASPLRGFMREHEYLQSLHFNCVRLPDGGLVNMSLPIVLAIGDADKEQIGGKPDVALQGPDGGVVAILRRVEIYPHNKEERIARTWGTTAPGLPYVDEAIASAGNWLIGGDLEVLEPIKYNDGXLDHYRL

SEQ ID NO: 349808 - protein, 145 aa, Zea mays
  unsure (1)..(145): unsure at all Xaa locations
  Clone ID: MRT4577_8219C.1.pep
AALFPLPPHQGRGPKNHPHPASGAPAPPPLGQKPPPGLPLPGLFWPRWQPPAQGPIYPXMGFGVGPPPVXGGFKKVPPEGRWLALRSPPXKGPPGGGRGYPRPGRSPSEXGRPFFPPIFCVGSAGVSNFLNGPSPPPGAPPALFG

SEQ ID NO: 349809 - protein, 79 aa, Zea mays
  Clone ID: MRT4577_821C.1.pep
DDAWGVQQHCKTPANGLITVHATDPYRHVDSPESRRAGLYVSCRDQCASHKAGEAHTDNAHRAELDGMKPTIRTPPVPA

SEQ ID NO: 349810 - protein, 476 aa, Zea mays
  unsure (1)..(476): unsure at all Xaa locations
  Clone ID: MRT4577_82200C.1.pep
MATTHLLTPPRVHHPSPSASSSVARVRATASLAHPLHLCRLRLAAPRSRSPSPRHGRRAMSVRSSLIDPDGGALVELVAPPDRLPALRAEAEALPRVRLAPVDLQWAHVLAEGWASPLRGFMREHEYLQSLHFNCVRLPDGGLVNMSLPIVLAIGDADKEQIGGKPDVALQGPDGGVVAILRRVEIYPHNKEERIARTWGTTAPGLPYVDEAIASAGNWLIGGDLEVLEPIKYNDGLDHYRLSPRQLRKEFDKRGADAVFAFQLRNPVHNGHALLMNDTRRRLLEMGYKNPILLLHPLGGYTKADDVPLPVRMEQHSKVLEDGVLDPETTIVSIFPSPMHYAGPTEVQWHAKARINAGANFYIVGRDPAGMGHPTEKRDLYNPDHGKKVLSMAPGLEKXLNILPFKVAAYDPVAKEMAFFDPSRSQDFLFISGTKMRTYAKTGENPPDGFMCPGGWKVLVDYYNSLQAEEATPVPV

SEQ ID NO: 349811 - protein, 124 aa, Zea mays
  Clone ID: MRT4577_82201C.1.pep
WVQNYNLFVFAPNKAQQNQNLTRSEQDGRTKRKTQKGNRDQNQQGPNGQGPRPHYSTTTTRLKNGVGPKGKGDDPPWGGRNISLRGLEHGEEHVSHREAGAPLEAAPRGELDEGGAQGNPGLGV

SEQ ID NO: 349812 - protein, 45 aa, Zea mays
  Clone ID: MRT4577_82202C.1.pep
TAALFFFFFFFFFFFFFFFFFFFFFFFFFWEKKKKTGTIIKYRGF

SEQ ID NO: 349813 - protein, 61 aa, Zea mays
  Clone ID: MRT4577_82203C.1.pep
MLKNGGYVYRFHIYQSMLWKCISFMLHVKLYTMLSCLIHSDLKILIVNYLIVLTAFSILDS

SEQ ID NO: 349814 - protein, 94 aa, Zea mays
  Clone ID: MRT4577_82204C.1.pep
ALIHSAFLPRLSPLNKLLLQLVSPLTETEALDHNQSMVFSTILVAKPRRLPSSVLISFKMPRVNLVRFSFPPISRHRVLLLSLYVMVHSRLFPV

SEQ ID NO: 349815 - protein, 106 aa, Zea mays
  Clone ID: MRT4577_82205C.1.pep
MGTKILSLLALLALFACATNAFIIPQCSLAPCSIITQFLPPVTSMGFEHPSVHAYKLHQAIAASVFKHPISQLLQQSLAHLTIHTIATHLLQQFLPSLSHLAMVNP

SEQ ID NO: 349816 - protein, 49 aa, Zea mays
  Clone ID: MRT4577_82206C.1.pep
HAEVPCFLIRGVVPCHEFLDFQVRVAFGSVLVIAEPSYAASSHQFLNQD

SEQ ID NO: 349817 - protein, 89 aa, Zea mays
  unsure (1)..(89): unsure at all Xaa locations
  Clone ID: MRT4577_82207C.1.pep
QKQFFPFTQLAALNFPAYYQQHQLPPFTQLVGVTPAPFLTHPQLFPFNQHVAPNLGPLLQLHQLXPFAHLVLTNPAPFSQQQIFGGPLF

SEQ ID NO: 349818 - protein, 60 aa, Zea mays
  Clone ID: MRT4577_82208C.1.pep
NGQPGSGDAEWGTTARNLWGFRFYPCVAATLPLLSFMNNTLLPLIRFLLEVMHSHLSNIY

SEQ ID NO: 349819 - protein, 80 aa, Zea mays
  Clone ID: MRT4577_82209C.1.pep
QPCNYKQTETRCRFDNSRTCPFWTRKTLCLKLPLSFWGWGPPVKYFSLPPTSRGARPIKWWLGSKDTLLKEGTMAGETPL

SEQ ID NO: 349820 - protein, 200 aa, Zea mays
  Clone ID: MRT4577_8220C.1.pep
LEAGRESRSRSRPETVAPGLPSPHSILAGHKLRPLPLPRLCRRRPIPPANAAPRLEARRNGRLDVAAATHRRAGRLRHQQLRGCAEAGGHGRSATSSSAHDKNGVGDPPPHLLPFPRPRPRLIWKVRRRDSDVEAMAEPHHFSPCLARGGRDGDGWVVRDGGPTCPPCYPRPKSTRIMQPKSKVEAPALSMEVSSLRWCL

SEQ ID NO: 349821 - protein, 558 aa, Zea mays
  Clone ID: MRT4577_82210C.1.pep
MVANKTTGEVEHDESDCDTEKQEEGDVGLVNDLENCSASLKPVSSPVSIPAIDFQSGNSNREAKSLPNLRSHIHDLERSYSFQLSRSLQSTAENNGIDLVKSMNYAFLEQKSEAIGDFSEENNSPPEVTNTVALDGNHADDLKVDAFIPFAELSLCRHLLSEGMGEDAACSAFDSEKVTLEEFRNMKQSLMRNNKLVVRIAGRYFPWDAAAPIVLGMISFSEEQVFEPKGMINVERVEQSAAPGGSWSIWPFSFRRTRTITAIQPVCESIVETSVSTPKELTHFKELDRERNKSRVKRIERKVRSLTPTSDELASLDLREGRNVVTFTFSTAIVGKQQVDCHIYLWRWNTRIVISDVDGTITKSDVLGQFMPLVGVDWSQNGVAHLFSAIKENGYQLLFLSARAISQAHITRQFLFNLKQDGKALPDGPVVISPDGLFPSLYREVIRRAPHEFKISCLEAIKDLFPHDSNPFYAGFGNRDTDELSYLKVGIPMGKIFIINPKGEVAVNRRVDTKSYTSLHALVHGMFPPILSSSEQASIPEDYNAWNYWKMPLPDVDL

SEQ ID NO: 349822 - protein, 115 aa, Zea mays
  unsure (1)..(115): unsure at all Xaa locations
  Clone ID: MRT4577_82211C.1.pep
NFPPGGRVPKPFVLGVLDPIPKVLGGPPPFFFGPPPPGPWGPPFPKKRPLGAPVLKPGGPPPPPXFQGPPGEKNPPFPVRSPXEPVDPPPAKPPSPGERFFPAPFPQLFFWGGGG

SEQ ID NO: 349823 - protein, 96 aa, Zea mays
  unsure (1)..(96): unsure at all Xaa locations
  Clone ID: MRT4577_82212C.1.pep
RAAVCRSGLGRRGSRLCRFGGGEGGGGLHLVLVVAIGVDGLGADFSARRRSKGSGRACWGPRRRRPWGRGDRRSLAQLDAELARGGWPACXQRLNT

SEQ ID NO: 349824 - protein, 85 aa, Zea mays
  unsure (1)..(85): unsure at all Xaa locations
  Clone ID: MRT4577_82213C.1.pep
GQKKKKKKNFRNWRFDPFVPCVRVWSRAAARQPPLPIPSKSSASFRDLFLGGGPPPDRGGIPFRXVGRLPCPVLALFPSHRAALG

SEQ ID NO: 349825 - protein, 73 aa, Zea mays
  Clone ID: MRT4577_82214C.1.pep
RSGMISINLDMKKGANRFIMTHACDRFDRDNNDFSWEVVKPLKFDKASGLRLGESLWTSGPLSSGSVVTYKHV

SEQ ID NO: 349826 - protein, 191 aa, Zea mays
  Clone ID: MRT4577_82215C.1.pep
DRSAGQCEALWGSCDSEMLLYLVGRAPCLKSLHLSTFDGSQVFVAVLNKLPVLEDLEVSPLLLKCSTDNFLESVCQACPLLRKLRIRFCAVEYYYGDDWMRKEIIGTFTRMSELRSLELLSYYLTVEGLTNILDSCPVLEDLYITGCFDGIMDAELYAKCAKVKKLTLPYSSDEAEYYWDVYNEHSSDDEF

SEQ ID NO: 349827 - protein, 151 aa, Zea mays
  Clone ID: MRT4577_82216C.1.pep
PGVFPPIGGGPQPKPFGVFFLVGGAPLGGGFYGPFPPPLEKAGRAPLEKSPMGELFGKTQPPEVFFFLAEPKNNPRGKKKPPFPWGGNSPGWDQTGWVPGFLFLINWKPGALRRRSSPGGPALAQGGFCFPGRGGAGLFLLRVRPGVFSRA

SEQ ID NO: 349828 - protein, 118 aa, Zea mays
  Clone ID: MRT4577_82217C.1.pep
VVDSSYTTSHFSFPLFVDGCASMSCYALNTHLRLCICHDTMDLTCALRDICSDVPQFADAEPSHASSPCLMCYDAPGPISDLNKLAYQIRCTFAQVTLLQHALVCASLDKLVPTFRSL

SEQ ID NO: 349829 - protein, 229 aa, Zea mays
  Clone ID: MRT4577_82218C.1.pep
FQEAVYIKSTDRDSGYYGVSATLDVYGYNLKDGQVSGAAISISNFEADFSKNVSAITVGWVVWPSYFNDSQTYLYTAWTKDSRQSTGCVNYDCPGIQLVSGSPIFPGDVIAPVSQANGTRQTITIKLFRTKLNGNWWLHAGVNDEDPIPVAYFPASLFDDFFYKATQVVLGGHALKSKTTTPPPMGSGAFGSDWGNAAKIRDIHVIMEDGRSNFIDDDLSTDVTDIKLY

SEQ ID NO: 349830 - protein, 53 aa, Zea mays
  Clone ID: MRT4577_82219C.1.pep
VTAFFHSNSHINNIAPPNAISTAYKPRACPVIPGKAHATRCLVRVESRSVWGW

SEQ ID NO: 349831 - protein, 85 aa, Zea mays
  unsure (1)..(85): unsure at all Xaa locations
  Clone ID: MRT4577_8221C.1.pep
MWEEKHHHFFNQHKKEEEEPAVAGXGYSATEVVTATGAGADDRHKTAENDHKRKHHLGEGEAIADGAFAVHDRREGDKDPEDANR

SEQ ID NO: 349832 - protein, 161 aa, Zea mays
  unsure (1)..(161): unsure at all Xaa locations
  Clone ID: MRT4577_82220C.1.pep
MGNPEKLMNQIFDLKFTSKSLQRQARKCEKEEKEQKLKVKKAIEKGNMDGARIYAENAIRKRTEHMNYLIGKSMQSIVKSLDSALATGNLQKMSETMDNFERQFVNMEVQAEFMEGAMAGSTSLSTPETEVNSXLMQQVADDYRLEVSVGLPQAAAHAILA

SEQ ID NO: 349833 - protein, 193 aa, Zea mays
  unsure (1)..(193): unsure at all Xaa locations
  Clone ID: MRT4577_82221C.1.pep
MGNPEKLMNQIFDLKFTSKSLQRQARKCEKEEKEQKLKVKKAIEKGNMDGARIYAENAIRKRTEHMNYLRLXTQAKMQVIGKSMQSIVKSLDSALATGNLQKMSETMDNFERQFVNMEVQAEFMEGAMAGSTSLSTPETEVNSLMQQVADDYGLEVSVGLPQAAAHAIPAAKDKEKVDEDDLSRRLAELKARG

SEQ ID NO: 349834 - protein, 239 aa, Zea mays
  unsure (1)..(239): unsure at all Xaa locations
  Clone ID: MRT4577_82222C.1.pep
MAFACASSAITAVAISTPSSGQKNGSGGCFLSGRKLRVKKERAAIGGRSMGTTVCAVAEPDRPLWFPGSTPPPWLDGTLPGDFGFDPLGLGSDPESLRWNVQAELVHCRWAMLGAAGIFIPEFLTKIGVLNTPSWYSAGELEYFTDTTTLFIVELFFIGWAEGRRWADIIKPGCVNTDPIFPNNKLTGTDVGYPGGLWFDPLXXGTGSPQKIKDLRTKEIKNGRLAMLAVMGAWFQHIY

SEQ ID NO: 349835 - protein, 204 aa, Zea mays
  Clone ID: MRT4577_82223C.1.pep
MGNPEKLMNQIFDLKFTSKSLQRQARKCEKEEKEQKLKVKKAIEKGNMDGARIYAENAIRKRTEHMNYLRLASRLDAVVARLDTQAKMQVIGKSMQSIVKSLDSALATGNLQKMSETMDNFERQFVNMEVQAEFMEGAMAGSTSLSTPETEVNSLMQQVADDYGLEVSVGLPQAAAHAIPAAKDKEKVDEDDLSRRLAELKARG

SEQ ID NO: 349836 - protein, 307 aa, Zea mays
  Clone ID: MRT4577_82224C.1.pep
MKKRSTLKLLIELYFVGIVEDASIFVNIIKDLTSAEHLKDREGTQTNLSLLSTFARQGKFFVGLQPHGQEAYDEFFKDLNVTAEQKKFFKKALNSYYDAVAELLQSEHASLRLMEAENAKVLSAKGELSDENTSSYEKLRKSFDQLLRGVSSLAESLDMQPPVMPDDGNTTRVTTGTDALPSSGKESSALEPIWDDEDTKAFYESLPDLRAFVPAVLLGEVEPKSNEQHVKGRELSGESTSEQETELHDNVPTSATERQLEVKVDDLVKESEDRDKEKGKDGEKEKSKEKDLDKKKKREKEKGRAMD

SEQ ID NO: 349837 - protein, 69 aa, Zea mays
  Clone ID: MRT4577_82225C.1.pep
IIVAERNMRQACDREVPVRSRGVYIVLFPSGPAGFFLDFNVRIARELSFYSNFLRRLGSFFVDRLRNFI

SEQ ID NO: 349838 - protein, 179 aa, Zea mays
  Clone ID: MRT4577_82226C.1.pep
MVGLQYDLVGNPLGAVRATFERTAAAAAAQSGGADPVAAFRGKDWGAGDLFRSFLFEQDGLGKVPVLDSSNLGLIKPNTLVRYRGMVQDMLGNEYYIGAFKDGSTWRTNKYTDFSPYSMPHPCDSHLWERHLFHCVPAPGQNSWTLESSPGPDVCRMSNCLAPELREKRKRDGDDDAMD

SEQ ID NO: 349839 - protein, 128 aa, Zea mays
  unsure (1)..(128): unsure at all Xaa locations
  Clone ID: MRT4577_82227C.1.pep
FTLDPTKFRSFSIHDTTVTTTNAGAPXRNDNXALTAGPCEPILLEDYHLIERVAHFARQRIPERAPHARGAFGKNWGERTHDFTXFTCAVPLRAPGVRTLVNVRFGTENHERWFFYTNQDRGGNGGDL

SEQ ID NO: 349840 - protein, 66 aa, Zea mays
  Clone ID: MRT4577_82228C.1.pep
IDVMRCFYLKSDFWELHTSWEMDFVKCLDGISYLECTLIENTAYKQGRHLVKHTPIHYDGSHFICN

SEQ ID NO: 349841 - protein, 147 aa, Zea mays
  Clone ID: MRT4577_82229C.1.pep
MALESQWYEYNKEWSYVQASTRKLQGINEIAKDVQNKMTAHGSSRNKGGQGQDSGPTVSKALIPLMSHPVLKSEHYAPVPIDGPPAKPTTPQVHLINQLRASHSTLMAALLSRVVTPQTGPYGEALRKQPEPSKVSQEHHRDNIIVS

SEQ ID NO: 349842 - protein, 285 aa, Zea mays
  Clone ID: MRT4577_8222C.1.pep
QSQKKALTWSTSARAFHGEVPSLQSRNKAAACSSSQKKDKIYQRIINVTQDSSNNSAPTELRASDSAAPLSDEQLALLLHQQLNSSPRVPRVPRCHQAAGAQMLHSTGSSVFSKRYSSHGGRDHAAVIKKRNREDSLKDSEDTKRTEKRHRVSSTEHAPVKNSCRSAENIASEQKIRGICPTGANAGLAKDDLMDTIVSHNLPGLIDEIVSKDRNITYVELCDAIHQHFRDSRKSNGGDSLYRSYADAIKGCLRKRREWAHLFDQASKMNSNKRRTGESNSLLPD

SEQ ID NO: 349843 - protein, 93 aa, Zea mays
  Clone ID: MRT4577_82230C.1.pep
AINPARRWPGISLKPVTPPNKAMYTSTSMSNLIINNVSCRRTITLARWNCLRESNSTWCLPLLTDAGAPYFLDETLVCHSRYYSLLGLLVMAN

SEQ ID NO: 349844 - protein, 75 aa, Zea mays
  Clone ID: MRT4577_82231C.1.pep
KLTALALVIGAASAMVVMLLAAAVSTSGDMQSHELPQEQLEPQLHLPLLQGMITDEGEQALAVVGGGRGGRGVVP

SEQ ID NO: 349845 - protein, 99 aa, Zea mays
  Clone ID: MRT4577_82232C.1.pep
RLAGAWVVCQGSPCPPLCCLFCGLCCSPNLSNDPLRRMVLSSIFLLEVRPPPVRVWLVCFPHQDGKLSVVLPGVARRRPCRLLLPWSLAPGVARRRQPS

SEQ ID NO: 349846 - protein, 71 aa, Zea mays
  Clone ID: MRT4577_82233C.1.pep
AAPVFLLSLPWTRSAPCRLPTFGTHYQSRSRDPTLAPTCTRDLAVRQRSIALLPPTFLPRTRQSHQSLTAY

SEQ ID NO: 349847 - protein, 120 aa, Zea mays
  Clone ID: MRT4577_82234C.1.pep
VWISKCRSTINDRRDAFSLSLNMNTSLRFCSCCKNSSRADISISLAGKSSRSDSISTPVVDISFLEGADSLLNQRYHAQQHHRIVWRLEFIHLSQHLGCVSYHQQYIMNLDQCTTICNTR

SEQ ID NO: 349848 - protein, 149 aa, Zea mays
  Clone ID: MRT4577_82235C.1.pep
VSNTLSALSSPLSGCQPASSERVFPVKQALNLPGKPSDPPRTSVTFCEAPMQRHLATASTGRPRPPMNQGKHAVRTFFHQGSGAGAATAQAERSSGHAGAGSAALRREHVRPDPSACWHGRCSTAQRGATWRGQEASRRGRGSADLGGY

SEQ ID NO: 349849 - protein, 148 aa, Zea mays
  Clone ID: MRT4577_82236C.1.pep
RRVLLYSPQSVPPQMRAAYLAADDGVRAPGVNHYGSKYEAGRLTGAPGFQGSENHISFASPPQTSSNIPTTVLGASTSTKLPAELQLPEGSVVATNAELKTPGPEATPSTLKPSDNPEPRVDGDDITDALYGDHGHRRLPILGEICPD

SEQ ID NO: 349850 - protein, 296 aa, Zea mays
  unsure (1)..(296): unsure at all Xaa locations
  Clone ID: MRT4577_82237C.1.pep
WVPRGRPGIFSLFPIRNASCSLPARPKRTTEQATATNGCVTLRARARAAAAAERSKEASRSFRPCKLHLRDTGSPRWNXESAARRRQRRLSSPSLRTHLTPAFDAVAGGEGGVSGYSSSSSSSGLELGFDASLLRNRRSGFAAPSDLDSRVLLYSPQSVPPQMRAAYLAADDGVRAPGVNHYGSKYEAARLTGAPGFQGSENHISFASPPQTSSNIPTTVLGASTSTKLPAELQLPEGSVVATNAELKTPGPEATPSTLKPSANPEPRVDGDDITDALYGDHGHRRLPIFREICPD

SEQ ID NO: 349851 - protein, 634 aa, Zea mays
  Clone ID: MRT4577_82238C.1.pep
MALLTAPAVAALLLLFWSSAYGGDAQGEGVPPPYKDASKDVEVRVRDLLDRMTLAEKVGQMTQIERLVASPQVLRDYYIGSLLSGGGSVPRKQATAAEWVAMVGDFQRACLSTRLGIPMIYGIDAVHGHNNVYGATIFPHNVGLGATRDPNLVKRIGAATALEVRATGIQYAFAPCIAVCRDPRWGRCYESYSEDHRIVQAMTELIPGLQGDVPQNFTSGMPFAAGKDKVAACAKHFVGDGGTQNGINENNTIIDRQGLMSIHMPAYLDALRKGVSTVMISYSSWNGLKMHANHNLITGFLKGRLNFQGFTISDWEGIDRITSPPGANYSYSVQASILAGIDMIMVPNNYQNFITILTGHVNSGLIPMSRIDDAVTRILRVKFTMGLFENPMPDPSLADQLGKQEHRDLAREAVRKSLVLLKNGKPGDAPLLPLPKKAARILVAGSHADNLGYQCGGWTIEWQGDTGRTTVGTTVLDAVKAAVDPSTEVVFAESPDAEFVRSGGFSYAIVAVGEHPYTETKGDSMNLTIPDPGPSTVQTVCAAVRCVTVLISGRPVVIQPFLGAMDAVVAAWLPGTEGQGVTDVLFGDYGFTGKLPRTWFRSVDQLPMNYGDAHYDPLFPLGFGLTTQGKMYQN

SEQ ID NO: 349852 - protein, 116 aa, Zea mays
  Clone ID: MRT4577_82239C.1.pep
MAPRTARASTRSRSSRFCGPCASWPSPRRQVVSGRRHGASPARGSGQSMYLAPFCRAHTVSVADFGGVDVLERRSFFLPPLSHKFFPAPAHPWSGQIWARTGCAGAISQFHCAKGD

SEQ ID NO: 349853 - protein, 110 aa, Zea mays
  Clone ID: MRT4577_8223C.1.pep
MARGPSHSSKEALEHNEAGCQSPEGPILCINNCGFFGSSATMNMCSKCHMEMITKPDQAKLAASSIHSIVIGTDAIMEPVVCWEGRGGVFSQLELQTMNVQHPADVARSI

SEQ ID NO: 349854 - protein, 65 aa, Zea mays
  Clone ID: MRT4577_82240C.1.pep
PLLECKHPKFIIVNKYLKVSLLCFSRLTNTNPYCPSRETSISISTLPDEIHCHPMHGSTNLGFGS

SEQ ID NO: 349855 - protein, 158 aa, Zea mays
  Clone ID: MRT4577_82241C.1.pep
DAVKAAVDPSTEVVFAESPDAEFVRSGGFSYAIVAVGEHPYTETKGDSMNLTIPDPGPSTVQTVCAAVRCATVLISGRPVVIQPFLGAMDAVVAAWLPGTEGQGVTDVLFGDYGFTGKLPRTWFRSVDQLPMNYGDAHYDPLFPLGFGLTTQGKMYQN

SEQ ID NO: 349856 - protein, 495 aa, Zea mays
  unsure (1)..(495): unsure at all Xaa locations
  Clone ID: MRT4577_82242C.1.pep
DPASAGIQYAFAPCIAVCRDPRWGRCYESYSEDHRIVQAMTELIPGLQGDVPQNFTSGMPFAAGKDKVAACAKHFVGDGGTQNGINENNTIIDRQGLMSIHMPAYLDALRKGVSTVMISYSSWNGLKMHANHDLITGFLKGRLNFQXKKKKQIDAFFKRXQTWKLPVYFXGFTISDWEGIDRITSPPGANYSYSVQASILAGIDMIMVPNNYQDFITILTGHVNSGLIPMSRIDDAVTRILRVKFTMGLFENPMPDPSLADQLGKQEHRDLAREAVRKSLVLLKNGKPGDAPLLPLPKKAAKILVAGSHADNLGYQCGGWTIEWQGDTGRITVGTTLLDAVKAAVDPSTAVVFAENPDAGFVRNGGFSYAIVAVGEHPYTETKGDSMNLTIPEPGPSTIQTVCGAVPCATVLISGRPVVIQPFLGTVHALVAAWLPGSEGQGITDVLFGDYGFTGTLPRTWFKSVDQLPMNYGDEHYDPLFPLGFGLTTQGKKGC

SEQ ID NO: 349857 - protein, 85 aa, Zea mays
  Clone ID: MRT4577_82243C.1.pep
MGGIADSLMLGIPVRAWERQERLEESVGRVVARGDCPDPGKFLSGDRYRGLAAVCRRCESALHGCRSVVARNLKTHLVKHLESQV

SEQ ID NO: 349858 - protein, 107 aa, Zea mays
  Clone ID: MRT4577_82244C.1.pep
SVYFPTPLPPPPGRFLIPSGRWGFRFPDRPVGPGPHPFVVCFLTRPGPRALFFRLPGCGELAPVTGPPLAPATPFDPPPGGLGAEPRTPTTGRQGFAISPDHRAPGQ

SEQ ID NO: 349859 - protein, 55 aa, Zea mays
  Clone ID: MRT4577_82245C.1.pep
FYPLYNNYDFFTGKGFFKNLFYPLNKNSWNNGHINHFFKKVNVRKQKIFFKQKGF

SEQ ID NO: 349860 - protein, 75 aa, Zea mays
  Clone ID: MRT4577_82246C.1.pep
TSACITSTGLFGALLPPRACRPHDSVLIDNKMPDHYALQKLPHLPSVDSVCGTRRITHHATTHLRTNGRNTIVLF

SEQ ID NO: 349861 - protein, 70 aa, Zea mays
  Clone ID: MRT4577_82247C.1.pep
CGRKVYHSASRSIMYACFLARGMKADYMVLITRRCLLSSTISSVGPFRIISPVSIGCGVGTRVCRSCASS

SEQ ID NO: 349862 - protein, 780 aa, Zea mays
  unsure (1)..(780): unsure at all Xaa locations
  Clone ID: MRT4577_82248C.1.pep
MRQDKIVPCNNLIAIFYADYLLPCVFLGGSGTCITELVESKGIIESKFKDLAVKLESAERSNSSHRYEXVCMLQKQLEIRSEERKFSLKSADAAHKQHLENVRKITKLESECQRLRSMVRKRLPGPAAIAKMRSEVETVGIDTGITRMRKSNSVTSXPLWFSTKLSXTSHGNSPLLARLHAIEDENKVIKESLSRKDGELQFSRTMLARTTSKLSQVEAQLEDLSKGRTTAELVKGSPTVVENPLSSISEDGFNEDNVSCSGSWASALLSELEHFKKGKHTAHSSKSTGVSDMSFMDDFAEIEKLASLCNDKHVEQYGSKREATESSGKELVPVDVSTGTADQIRQPRIEKAVRKLIELIEGVIQRSSKDCSSTVVLSGGDEENGQGTLSGYVARAFLWNTSELTSVLQNFVFACNELLYGSTDVESFVHDLQVTLDWIMNHCFSLRDVSDMKEAIMKHLELNNSDGLEIVAVGSHTGIHTTDEPKTPENVQTSLLTDSSCVDIKPDVSKQRTCNEVAISKFEGIEEKASHLRAELNELKESRKIMVHVDGKSTMTECITHESIFISGQNTGKQEGVSCLEPKHQLERCSTKQGSKSVTENEDKHLQELEISTASEKLIECRETIINLGKQLKALASPKDAILFDQVLQTAVRSERKPRSQSLSEMLSMEDGGFYYSGSPKTKEIICTEPSASGEGNRPADDEGDGGSAAACSSSHPMPVAPHVKQACRVNRTCKGEADVKVVRLAVVPRKQKGNGSLLKRILTGRRKEAMAKPQVVLSS

SEQ ID NO: 349863 - protein, 98 aa, Zea mays
  Clone ID: MRT4577_82249C.1.pep
RAGSFANLNTEAGLKKLDEDLLTRSYITGYQAFKDDLAGYTSFSSAPSSKYINVARGVNHIDALVRLSGITAEGQGVKGEFLTVPQPQLQMVLKHKPQ

SEQ ID NO: 349864 - protein, 109 aa, Zea mays
  unsure (1)..(109): unsure at all Xaa locations
  Clone ID: MRT4577_8224C.1.pep
LYDIAETLGVSADFSDINYPSLNKCFIYHDQLXSMLSMTPSSSYXHGLPMPPTFTSVYMXNDNNCINKELCTRIRKHRLNDLVNMISYPVNCTVPIAAHVLKNAGTYHE

SEQ ID NO: 349865 - protein, 149 aa, Zea mays
  Clone ID: MRT4577_82250C.1.pep
QLRQTTIRRLATRLRRRPSLSTTPPVSLPRTRLLHPPSPKKLVPTTHYQGALCSVQPPPVYPAVRPLPPLMTGENAPRLTALPVYAQHQPLRPPQSPPAQHHQRQQPHHHQQQQQQQPQQQQHSPLTQRSPSTNKASPQQTPGPLDATS

SEQ ID NO: 349866 - protein, 85 aa, Zea mays
  Clone ID: MRT4577_82251C.1.pep
WPAHAPRFPFPPHRPLWLGSPLGPCLCSRSSQPLTKPRRAKSLKADQEPPTKEPPCYPARPATVPWEVGARRRKTARAAALSRAV

SEQ ID NO: 349867 - protein, 70 aa, Zea mays
  Clone ID: MRT4577_82252C.1.pep
FALRKHSEQIFLEIKDCQYLSFRSTLVFLKLSWFPSYTPHLLGLLGKLMAGTQKGVGLKLFALGACKENF

SEQ ID NO: 349868 - protein, 107 aa, Zea mays
  Clone ID: MRT4577_82253C.1.pep
MAKPLTLVLGLSLVTAMSAIISHADGYCENDLQSLISDCTTYVMFPSNPNVPTSDACCRVIKKANVSCLYSNVTKDTDKAVCIEKVVYVPQHCKTPFEHCFQCRSYK

SEQ ID NO: 349869 - protein, 86 aa, Zea mays
  Clone ID: MRT4577_82254C.1.pep
GLGLKLPHRFFPQHHISFLFSLFSGNPSTPPICSEKLSLDIFGFRHPTGASLLACISSGRSRSIMAVGDPAALRHPDQSAPTPHDM

SEQ ID NO: 349870 - protein, 53 aa, Zea mays
  Clone ID: MRT4577_82256C.1.pep
ISCRIIVVQIYHVGAILLSIQSLLCVSQSNSTANSQADRMLRYTKLQYIPSVQ

SEQ ID NO: 349871 - protein, 56 aa, Zea mays
  Clone ID: MRT4577_82257C.1.pep
EFLGMCFKGFFMIALHQTGRLALCTKYLAYFSFLQSKQVTQLMNGLLKQLNKLRIQ

SEQ ID NO: 349872 - protein, 463 aa, Zea mays
  Clone ID: MRT4577_82258C.1.pep
MGSIGGPTATATADRRRRVLFFPLPYQGHINPMFQLAGLLHLRGFSVTVFHTDFNAPDKSRHPAYDFVPVPVRGCLPKGSSDALQVTVERILAVNRACEAPFRERLAALLAREDVACLVADAHLLTLLDVARGLGVPTLVLRTGSAACLRMFAAFPALCDKGYQPAQESQLEAPVTELPPYRVRDLPSTTSACHGVISEVISRLVTAVTTSSGLILNTMDALECGELASLRRDLGLPGPDIGPLHMLSPAASSSLLLQDRGCLEWLDAQAPASVLYVSFGSLASMSAAELVETAWGIANSGYPFLWVLRPGLVRGSQTSEAAPPLPDGFDAATRGRGMVVSWAPQEEVLAHPAVGAFWTHCGWNSTLESLCAGVPVIARPCFGDQMGNARYVDHVWRTGLTLDGVLERGEVEAAVAALMAPGEPGDGLRRRARELKSSAAECMAKDGSSCTNVDKLVDHILTL

SEQ ID NO: 349873 - protein, 89 aa, Zea mays
  Clone ID: MRT4577_82259C.1.pep
SASAERRPYATMINDATSSYCPRTTHQRSINDRKTQRGSRTGPNRPSRATCNLHPPTTCNNDATYHSTYLGSISWAQNSSAHKTTTSLG

SEQ ID NO: 349874 - protein, 132 aa, Zea mays
  unsure (1)..(132): unsure at all Xaa locations
  Clone ID: MRT4577_8225C.1.pep
DPSRSGNNTAATMCKRVSYINEIKDFVANGCQCLFKQGALLEETMQGIRFRVCDVVYHTXSIRKIGTHVMHGAIRFISAYQLANNPMPLELVXQVQIQPPKXSLGGIRALLSXQQQNHLFKELESTGPSARP

SEQ ID NO: 349875 - protein, 62 aa, Zea mays
  Clone ID: MRT4577_82260C.1.pep
VKVDAPLCFSSNNPRDSTVYLLDMVHLIFVHIVVILVTTVKVLDPYILAYLYDCSLARFLSC

SEQ ID NO: 349876 - protein, 87 aa, Zea mays
  Clone ID: MRT4577_82261C.1.pep
REGRPFLFNLDQYRLELIKPKLSVAKRDTGVLFQEPTSIAPIANQRKRDYHLAGLPSFFTERMKGHPTPPGCKRRGALIYRSRAVQS

SEQ ID NO: 349877 - protein, 101 aa, Zea mays
  Clone ID: MRT4577_82262C.1.pep
QLRSGSPPKSPRTTVHDKSAHQTHSSWTPPNAQYWSQFHSVRPQGPQLRQQQHKQNKQVLGYCLLLMLAGMGLHYIAFRKVKQMHLNFMDEKDRIITAFYN

SEQ ID NO: 349878 - protein, 145 aa, Zea mays
  Clone ID: MRT4577_82263C.1.pep
VTLLSECQFLYNEGIQTLHRKNCTPGCTCILLSLTILQIIILEKRYICPSAMSIEERKRSMIGKSTALNPNAGICSLSLRSVSDNSCKSLDATMVVSGPSKVSSTDKPKSILQNNSYEEAHQYWQQPLPDDITTDFKILGQDESP

SEQ ID NO: 349879 - protein, 588 aa, Zea mays
  Clone ID: MRT4577_82264C.1.pep
MSRMAPPSPPQSLKPPTLPFSPPKKPPPMPVYKDLHFNRDLSATKKLQAGVDLVARLLGVTLGPKGRNVVLGNKYGPPKIVNDGETVLKEIELEDPLENLGVKLVRQAGARTNDIAGDGCTTSIILAQGLIAEGMKVLAAGINPVQVARGIEKTAAALVSELRLMSRVIEDHEIAHVAAVSAGNDYAVGNMIYDAFQRVGRQGMVRIENGRGTENSLEVLEGMQFERGYLSPYFVTDRGNMTVEFTDCQILLVDKKITDASEIIRILDSAVKENYPLLIIAEDVEEQAMADLIKNKLKGTIKVAAVKAFSFGEQKTQCLDDIAIMTGGTLVRDDMGHILEKAGKEVLGSASKVVITKDSTLIVTDGSNRRAVEERVAMIKGQIENSKESYNKKILGERIARLCGAIAVIQVGAQTIIEMKDKKLRIEDALNTTRAAIEEGVVVGGGCSLLRLSEKIDAIKESSLDNIEQEVGADIFKQALSYPTSLIAKNAGVNGDFVIKKVLLNDDANYGYNAAKNCYEDLMAAGILDATKVVRCCIEHAAVVAKSFLTSDVVIVEAKEGKPIRIRPPMPPRHLIPPMPASISGIRV

SEQ ID NO: 349880 - protein, 123 aa, Zea mays
  Clone ID: MRT4577_82265C.1.pep
FGPRGFFFFKGGKKKMARSVVALLLVFQLMGGPPTAMAAPSPPGTVPDGSPPPTPQVAILLAPLFFPGGTCKNPPRFPPAWSPSFSGPPCYVKFSPVALVGALSRSPPFFMPAPAPDDDPPFF

SEQ ID NO: 349881 - protein, 373 aa, Zea mays
  unsure (1)..(373): unsure at all Xaa locations
  Clone ID: MRT4577_82266C.1.pep
PGVAHASVRVRASFVNDTEIQDACSGSLTDSSPLVLQLGKTYAKLAKDIMKKFGWLDLSRKVRISHDGGHVLFPINESFCALNAEEHINRNLDDSCTFGESLVFSEKKLVGDNLSLQDALIFFSSCNGSVMKDELAISRKPSKSPQTIMKELVSSLLESKGMPSQLLQQLPARWEXLGDIVILPKTCFKNPLWESVSEELWPLVAKSLGAQRLARQGKIMPNGTRDSTLELLLGDNGWVTHYENGICYSLDATKCMFSSGNRSEKLRMGQLNCRDEVVVDLFAGIGYFVLPFLVKYILFSPWSNTSDSDFIPSKKYYSXSYSCRANAKLVYACEWNPHALGALRRNVSDNRVEDRCIILEGDNRVTAPKNVAD

SEQ ID NO: 349882 - protein, 72 aa, Zea mays
  Clone ID: MRT4577_82267C.1.pep
QHRKLNSVPPMAAIIFCALMILGISASAAMATIVAKWTITPICSHQYLYLATAVRSECANHHYSKGNGRTTQ

SEQ ID NO: 349883 - protein, 122 aa, Zea mays
  unsure (1)..(122): unsure at all Xaa locations
  Clone ID: MRT4577_82268C.1.pep
MSTQQEDTVNYANANTCFFHVLFKASTLAFYILPTLFLNNSLMIFVITVLLAPLDYCELKNVSQQILVALAGRNEINDQGESDWKFECLDGQFLARMNNKDSWLIXCTIYLARAATIIHRIF

SEQ ID NO: 349884 - protein, 217 aa, Zea mays
  Clone ID: MRT4577_82269C.1.pep
MGSEGPSPVTVHVTGFKRFHGVAENPTERIVRGLQPFMETRGLPKGLVLGSCTVLEAAGQGALGPLYELLESTVSGRERQERVILLHFGANSGSHRFALENQAVNEATFRCPDELGWKPQRTPIISSDGSILHARQTTLPVEEISKSLQQMGYDVVPSDDAGRFVCNYVYYHSLKFAEKHGIGSLFVHFPLFLAIDEEVQMQFVASLLEVLASLNFQ

SEQ ID NO: 349885 - protein, 117 aa, Zea mays
  Clone ID: MRT4577_8226C.1.pep
PGGPAGKIPGRQPFHGGAHNPGGTRTKTGPHKSRNRTNEPRNACNNEPGLNSTQMSKQQAHSTRTKPNADTRRANAPTPRIQGQPETPTKEARTHPAPVTRVAATDRPHLPRAARQD

SEQ ID NO: 349886 - protein, 69 aa, Zea mays
  Clone ID: MRT4577_82270C.1.pep
NRYFQLKCITFSVTSCTQPSFHCGLAEDTFSSCTKPSNHGGLADQTLSCCTQPSFHYGLAGYTLSCMSY

SEQ ID NO: 349887 - protein, 52 aa, Zea mays
  Clone ID: MRT4577_82271C.1.pep
SFLLSTKTGVGNTMNCLAITTTTHRNLICTLQQNMHVDTNLHFVHSHTYNPA

SEQ ID NO: 349888 - protein, 217 aa, Zea mays; identical to SEQ ID NO: 349884
  Clone ID: MRT4577_82272C.1.pep

SEQ ID NO: 349889 - protein, 177 aa, Zea mays
  unsure (1)..(177): unsure at all Xaa locations
  Clone ID: MRT4577_82273C.1.pep
NTNFLAVLSEVLPAFFWGGKKGTPIYTALFTKNLNPPRGSMGPFSLGGNFFFGTSLKNPPRGETPLPPFLNPKKKRPPLQTSPKWFPPKRGFFPPPTNSLGGGEIWKKNTFLMNTHGGRVLQGXNFGGPPXGVSIKNPLLAVXKIGKFFFPQFFRVEKGFKKKGVALKLGGKPNPVF

SEQ ID NO: 349890 - protein, 84 aa, Zea mays
  Clone ID: MRT4577_82274C.1.pep
APWLRGELLAFSLFPPAQIRPLVLALHALAFRGTGSGAAYPEHGEGLELLRVSGVFRGEDRSRPPEHARYLERGERPGSWLPRR

SEQ ID NO: 349891 - protein, 109 aa, Zea mays
  unsure (1)..(109): unsure at all Xaa locations
  Clone ID: MRT4577_82275C.1.pep
QSTEPKPKXNALTXTEXDQTXPXXXEEEEEEEEVDLCANPSYYLSTGGRNSNGSRPEGKETASTRNRSNLARPVGWGGGRREGDGIWQRARPGARTTETIAAAAGSVHE

SEQ ID NO: 349892 - protein, 98 aa, Zea mays
  unsure (1)..(98): unsure at all Xaa locations
  Clone ID: MRT4577_82276C.1.pep
FRRGYDGDTNKQHDATGVYPGIDIGRDHGTTGVYGLNTDRHHGTSGVNPGIDTHNQQHGTTVGYAGYTGRQHGNTGGLYYGTDTADTGTGPRXGNTVA

SEQ ID NO: 349893 - protein, 94 aa, Zea mays
  unsure (1)..(94): unsure at all Xaa locations
  Clone ID: MRT4577_82277C.1.pep
MRVMLGVLALLALAASATYTHTSGGCGCQPPTSAHLPTXVHLPPSVHLPPTAHIPPAVQLTPTVHLTPTVHVPSTVNMPTSACHYATQPHRTXA

SEQ ID NO: 349894 - protein, 69 aa, Zea mays
  Clone ID: MRT4577_82278C.1.pep
RSFCVFLKKMREMMQNTSRDHDKIVLSFEGANMHDRMHETEKEPCKRQQQRSGGVKHKVFVILQRWVIE

SEQ ID NO: 349895 - protein, 87 aa, Zea mays
  Clone ID: MRT4577_82279C.1.pep
MQASDRFNINSQLEHLQAKYVGTGHADLSRFEWAVNIQRDSYASYIGHYPMLAYFAIAENESIGRERYNFMQKMLLPCGLPPERDED

SEQ ID NO: 349896 - protein, 103 aa, Zea mays
  unsure (1)..(103): unsure at all Xaa locations
  Clone ID: MRT4577_8227C.1.pep
KNSRCAIPNLHKEIVPYKCKVVVNPPRVVVTXFKGSKGTWLHLPLKEHKFNPHMHKEKAPMSGIMALMKHMXQEGHEDIKRTIPKPWFDPRSGNTPDSMTGSR

SEQ ID NO: 349897 - protein, 125 aa, Zea mays
  unsure (1)..(125): unsure at all Xaa locations
  Clone ID: MRT4577_82280C.1.pep
ALACVIGIAVCCCLPCIIGILYAVTDQEEGASEDDVNNLSKFKFRTMSDADKLAAGIAAPVGGVMTECGXCCICLCPYEDGVELLELPCNHHFHCSCIDKWLHINATCPLCKFNIVKSNLHREEV

SEQ ID NO: 349898 - protein, 86 aa, Zea mays
  unsure (1)..(86): unsure at all Xaa locations
  Clone ID: MRT4577_82281C.1.pep
IAAPVGGVMTECGTNPPCXRWHDILSAEDAECCICLCPYEDGVELRELPCNHHFHCSCIDKWLHINATCPLCKFNIVKSNLHREEV

SEQ ID NO: 349899 - protein, 357 aa, Zea mays
  Clone ID: MRT4577_82282C.1.pep
MASTSPRRSSGGDSASPSAPLIPSPPTSPASGPSGGPLGRLTSLRGAARFIRRTGSRRLMREPSVAVRETAAEHLEERQTDWAYSKPVVVLDMLWNLAFVAVAAAVLAASVGERPTVPLRVWIVGYVLQCLLHVLSVTVEYRRRRRNADQEGAGDEDLKLSIVKHLESANTMFSFIWWILGFYWVSAGGQALSHDAPQLYWLTIVFLAFDVFFVVFCVALACVIGIAVCCCLPCIIAILYAVTDQQEGASEDDINNLSKFKFQTMSDADKLAAGIAAPVGGVMTECGTNPPVEHILSAEDAECCICLCPYEDGVELRELPCNHHFHCSCIDKWLHINATCPLCKFDIIKSNRDIEEV

SEQ ID NO: 349900 - protein, 40 aa, Zea mays
  Clone ID: MRT4577_82283C.1.pep
DVSCFLRVSHFFVFNNSSQMQGSLTYGLGAKHQNSYFRTK

SEQ ID NO: 349901 - protein, 166 aa, Zea mays
  Clone ID: MRT4577_82284C.1.pep
FSHSLSSLSSPTFSLLSPRTAPPFLTPHHRRLHRRRQDASRQCLLLPPPHSCPTERAPALGRRPGAEQLTQPERSARPRIRFFSCWCLGDADADSGLLRRAEVTLLSVPLPSAACLRAEISSAHPGILSLCLWCRRPRGRPRPTPGAQVSIFGTFAGDEHPPRSTS

SEQ ID NO: 349902 - protein, 63 aa, Zea mays
  Clone ID: MRT4577_82285C.1.pep
APNRVITAKDHASVQINIGPFDTNGLYYGHFPTFALSGFVRAQGNTNSSFVRLWQKKKADINP

SEQ ID NO: 349903 - protein, 79 aa, Zea mays
  Clone ID: MRT4577_82286C.1.pep
SVPPHTYCAFGLVRCSRLLASAPVDIVVVSALSWFPCSGVEAVPRCVLFGSVESLALRSCLWSRFSGVDTFGCGRLEPN

SEQ ID NO: 349904 - protein, 43 aa, Zea mays
  Clone ID: MRT4577_82287C.1.pep
TYSIDYNYVFFDQHLFKHSFLLNNLCLVATLYFNEITFFRIPL

SEQ ID NO: 349905 - protein, 66 aa, Zea mays
  unsure (1)..(66): unsure at all Xaa locations
  Clone ID: MRT4577_82288C.1.pep
ICVCGFAHDLIKNACYVGTPGKGILAADETTGTIGKRLTSXLNGDNVEENRRALRELLXFCCPGGL

SEQ ID NO: 349906 - protein, 106 aa, Zea mays
  Clone ID: MRT4577_82289C.1.pep
YMCETNIYRPKQLTQSLNSSRTRHKLPPLICANPYITSHRVRLVSQQPIGRADQATKSHSTYVYSYDLHQLQPGQGPRALMSSMSRPYTSFSRPWVGICMRISASS

SEQ ID NO: 349907 - protein, 68 aa, Zea mays
  Clone ID: MRT4577_8228C.1.pep
ASMACVAIAAAIAKALDHPSLRSCSMEQPPATDQTHTSSCTNASRLQQTQRKVVLMLTVNTPNLKPMP

SEQ ID NO: 349908 - protein, 47 aa, Zea mays
  Clone ID: MRT4577_82290C.1.pep
NLHYLQTVESDIILDKYIDDDHANNILALKSNEPANPENIKHEMNND

SEQ ID NO: 349909 - protein, 88 aa, Zea mays
  Clone ID: MRT4577_82291C.1.pep
KKKRKTCHNCPGGEIKPGRGTKFLGGNTEGPPRKVYYLPDNLGEFNRQTIGQPRNERKQGFKWGGAQTPLTRVGGPPRPWIPALNKKG

SEQ ID NO: 349910 - protein, 138 aa, Zea mays
  Clone ID: MRT4577_82292C.1.pep
FRRRPIPLASAPLLTPPQDAALPFPYTRPHDHRPPSSPARAPTAAAHLCSRTGRRRPSPLEHRPQPPYPLVQKGKENPFFPSPPPPLIYPRSPLPRPPQGKTSWRGPPEPRSPSGGRLSDRGAFSICAAPLLPPTSYH

SEQ ID NO: 349911 - protein, 41 aa, Zea mays
  Clone ID: MRT4577_82293C.1.pep
YDDVSLDGQLVPKKGTFRYLGSMLHKQGYIDKDVSHKTKPG

SEQ ID NO: 349912 - protein, 78 aa, Zea mays
  Clone ID: MRT4577_82294C.1.pep
RKPRGLPVSRTVISLKSTTSPYGAGGIVQRLVEGGPGKPAHEAAVISISRGHPPSTKSEVTRSLKVHGKMCRSRLPAW

SEQ ID NO: 349913 - protein, 165 aa, Zea mays
  unsure (1)..(165): unsure at all Xaa locations
  Clone ID: MRT4577_82295C.1.pep
ALSVLMTAASTFAAAFMTPLLTSKLAGQYVAVDPMGLFVSTSQVVLAPVLLGALLNQYCNGLVQLVSPLMPFIAVAAVAVLCGNAIAQNASAVLASGSQVVLSVGCLHASGFFFGYVLSRVLGIDTSSARTISIEVGMQNSVLGLVLANKHLGNPXTGVPCAVRA

SEQ ID NO: 349914 - protein, 154 aa, Zea mays
  Clone ID: MRT4577_82296C.1.pep
MRSYHSREICVGFGFRFGLFANEFTGNAPDLGWNGTLPSEYIRKNSRHHMKNVSVHPFALFLHYRRGAHVLVSDAATFRPVLRTAWPAATLNAISSDARARRGGSSADTTVLPSVQIRHAVAVPDRVLLILKDGPLLPSPERFQCLYSPANPGR

SEQ ID NO: 349915 - protein, 93 aa, Zea mays
  Clone ID: MRT4577_82297C.1.pep
MASMSLSSSRAQWTAKQNKLFEQALAVYDRDTPDRWHNIARAVGGKSADEVRRYYELLVKDLEHIEAGKVAFPAYRCPGGYDDADSDRLKHLT

SEQ ID NO: 349916 - protein, 121 aa, Zea mays
  Clone ID: MRT4577_82298C.1.pep
MPASLVFCVISSTSLYHFFPLPLDKCLPLFARSRTNPFARRHHRPPFRSREEGTGRQRTMATAALCVTDAGDFIGSWIVKILLARGYAVRAPPATQIGTCWALAAASLPLWRFGESALLTL

SEQ ID NO: 349917 - protein, 61 aa, Zea mays
  unsure (1)..(61): unsure at all Xaa locations
  Clone ID: MRT4577_82299C.1.pep
PPPPKPRLGNFWYKRAKVLGPFLKGGSPAKNKAFPQVGXNQPQVFYPKELKKVALHFPTKF

SEQ ID NO: 349918 - protein, 58 aa, Zea mays
  unsure (1)..(58): unsure at all Xaa locations
  Clone ID: MRT4577_8229C.1.pep
EXAGGRTLTLFLLSFSTFFHYPEAVHLGEVILFNSTTRFFYAYFPPTHFLMTSQKSAP

SEQ ID NO: 349919 - protein, 175 aa, Zea mays
  Clone ID: MRT4577_822C.1.pep
DINPSTMVGSACSSSCTHSRQRSPGSRSGTSNSPVRAPSSRYESMSCLRVRSASVRAEASALSTRLCSALSRSSSCSARCLARLPSAHAKLASTCVACALARASVASFLSAASWRRRSAFSPSSTATLSASLRHLLSAADFSRTASACCVRSLSTSADTTAIRAPDAARFAKSAA

SEQ ID NO: 349920 - protein, 230 aa, Zea mays
  unsure (1)..(230): unsure at all Xaa locations
  Clone ID: MRT4577_82300C.1.pep
HTGSQTLGKESSDDVDCSQGKSPTSTIKRKIGLKPKQVPGKSVRRKEEVLSVDADNKPTDTTEIIEASTTPVIEENLDQLPVMAPKDSXLHMTXVGNSPMCLGADMAAPVKYVDIVDVATPLDYEDKENTSKVKRVTRGSKKRKHGDMAYEGDVDWETLMQEQGLFSNPSAGFPDQSIKTKNKIKTSEVYEGGGDTGVAAVRAGLKAKTITPIEKIKFKEVLKRKGATAT

SEQ ID NO: 349921 - protein, 81 aa, Zea mays
  Clone ID: MRT4577_82301C.1.pep
RSELDRPPSGAGWIHWTDFSTAASGAGAAASSSVAKTSGVAATAGAACSSSSLASAAATSLVSAAISGSAASAGAAAASVT

SEQ ID NO: 349922 - protein, 537 aa, Zea mays
  Clone ID: MRT4577_82302C.1.pep
GDGRRGLLVGAAHQVLAVHRQIQLWQGAVWRVHRAVQPWRRAEAEWVGHRVQEPSPECTALGEGIRGLQLCKGCRFPAKADLHLATGDRTINSSARLRFVTRRRRPPPVPVDAVRSASTKVSKPPPKPKRRAKSPIPKRVISDVFKEAKAATKRFSSPQRQRKPMSPRSPDDSPPLGFASLRAPSKLKINTRASSWPRTNLDSGPARVAAPEILERWTVDRSELLIGHRFASGAYSRLFHGIYKDQPVAVKFIRQPDDGEDDELSAKLDKQFTSEVTILARLQHRNVIKLVGACNCPTVFCVITEFLSGGSLRAFLRKLERETLPLEKVISIALDIARGLEYIHLQGIVHRDIKPENILFDGEFCAKVVDFGVACEEKYCNLLGDDPGTYRWMAPEMYKHKPYGRKVDVYSFGLVLWELVTGSLPYQDMTPLQAAFAVVNKNLRPAIPLSCPAALKLLIEQCWSWQPERRPEFQQIVSVLENLKTVLERDGTLDKIPSSICQALEPNDQNKKKAGNWIQRLSYAQPAFSGPPPPKLL

SEQ ID NO: 349923 - protein, 402 aa, Zea mays
  unsure (1)..(402): unsure at all Xaa locations
  Clone ID: MRT4577_82303C.1.pep
MDDFFYSCVRRTRFSQSIVRSSSGREQYGAFIEQFSRGAELRQNGLGTGYRNPRQSVQPLAKGSGVSNSARLPIPKAKSAVAQSERKLKHASSEGQLNRDGDRPLQESSXEAEPERGRRPQSGXPQLHVVRPSQESPDALDFSFHSDEHSQRLQRVCSSPAPFSTKDATAPAGDSRASSASMKIIGQVSKPAPKRRAKSPIPKRVISDVFKEAKAATKRFSSPQRQRKPTSPRSLDDSPPFGFASLRTPSKLKINSRTSSWPRRNLDSGLAKVAALEILERWTVDRSELLIGHRFASGAYSRLFHGIYKEQPVAVKFIRQPDDGEDDELSAKLEKQFTSEVTILARLQHRNVIKLVGACNCPPVFCVITEFLSGGSLRAFLRKLERKALPLEKVISIALDIA

SEQ ID NO: 349924 - protein, 129 aa, Zea mays
  Clone ID: MRT4577_82304C.1.pep
QPKTTPGRGGRTPGTSLRAALRPRAPLVRGGRLPRETRLGATEAAPPAIPPPRGRMPFFNWGPPVSFPGGPNPPSRGGPLAGFRFQGQLGAWTPLLRGFWAQLLVSFPPLMGWVGCCPPGPSIFCLFPF

SEQ ID NO: 349925 - protein, 254 aa, Zea mays
  unsure (1)..(254): unsure at all Xaa locations
  Clone ID: MRT4577_82305C.1.pep
APVRRRATAVLHLHCPRSAATPHANQESGAEKPESASTPEQSKRAVVSYWGIEPRKLVKDDGTEWPWFCFRPWDTYRPDTSIDVTKHHEPKALADKVAYFVVRSLRVPRDLFFQRRHASHALLLETVAAVPPMVGGVLLHLRSLRRFEHSGGWIRALMEEAENERMHLMTFMEVTQPLWYERALVIAVQGVFFNAYFFGYLISPKFAHRVVXYXLEEEAVHSYTEFLKDLDDGKIDXVPASXIAIDYWRLPANA

SEQ ID NO: 349926 - protein, 47 aa, Zea mays
  Clone ID: MRT4577_82306C.1.pep
STDYTLPGGGISKAWGGNLPTPSRLSITLLSHICYPASNSTLATLTP

SEQ ID NO: 349927 - protein, 170 aa, Zea mays
  unsure (1)..(170): unsure at all Xaa locations
  Clone ID: MRT4577_82307C.1.pep
SSSSPDCCWLYTLFRTVVRYWSNVTSGVTVTKQACVRRGKAIGXRADEKVTYRISKAGLESRLGRIPRLLKGRLHVQIVEARAPVYLPAPLQGPAAEDLELHDAAPPDNTETRIXQAHMQLDGQNDQELCRLLSTATIGRGGEAPIIXHRLQLPKNAGGRNAKAGVGEQD

SEQ ID NO: 349928 - protein, 61 aa, Zea mays
  Clone ID: MRT4577_82308C.1.pep
ENVKLEFPEEFRSHFLWLQDRPNKITNNSNSYMNIFASLCLENVELEFHEEFRSHFLWLQR

SEQ ID NO: 349929 - protein, 55 aa, Zea mays
  unsure (1)..(55): unsure at all Xaa locations
  Clone ID: MRT4577_82309C.1.pep
TXXLSFLTGLKAWMAGHSSPLHQKPYTFALCTVWMANGSSSGTTSVENPVSNSRS

SEQ ID NO: 349930 - protein, 69 aa, Zea mays
  Clone ID: MRT4577_8230C.1.pep
ATEEAHRAGEGLGAPSISMGQNEDRREFRRLSTWNTKTMCCNLLLIVVIFREISDMLSTYLNILNILIP

SEQ ID NO: 349931 - protein, 79 aa, Zea mays
  Clone ID: MRT4577_82310C.1.pep
AWAGAYLWASEKPMFAVCISRGCLPLWDIWEWGPPPFRRLYFPPPSPVAKRFLIFGGYGDVKKPLAKKRALLFPLKLGR

SEQ ID NO: 349932 - protein, 40 aa, Zea mays
  Clone ID: MRT4577_82311C.1.pep
QTSAFVLICKGSSLQTIHDFTLTATRIFKNYISEICNDSR

SEQ ID NO: 349933 - protein, 46 aa, Zea mays
  Clone ID: MRT4577_82312C.1.pep
MARRLLVALLAASLLLPLARADSSSFKRDSKEHGVAYATRVSRGGR

SEQ ID NO: 349934 - protein, 66 aa, Zea mays
  Clone ID: MRT4577_82313C.1.pep
LLGDKQQKKKKDLTFLFQKSTTRPTVADPIWTEIIEISTFASKAQTTRQLVAPNSDQTIVSSIFIR

SEQ ID NO: 349935 - protein, 162 aa, Zea mays
  unsure (1)..(162): unsure at all Xaa locations
  Clone ID: MRT4577_82314C.1.pep
RWNRLXNLLVQGRQDREFAAKDALQPVLKLLLGPDGEELRVLVVKEAVRVTEAITIGTLIDSYNAAPAFLKPLISSGNPAGPFKFSEAEQEQMLELRDQVFRVWGLLRSSNNFDPSLLQPIVQVLQEPEARVLGSRVAGGVTQRLAARLLQQLLRIPSPGSS

SEQ ID NO: 349936 - protein, 714 aa, Zea mays
  Clone ID: MRT4577_82315C.1.pep
MAATTSTAAAAVSFSLPSPPHCRGARRRRAPSLLRAASTAAPPSPDLSIQLSPRASPPASTNGAATALGPPVSASFARDRAEDLQAEARAMARAAGATVYSPELLAARYGSRPFKVALRAAEVLSKLASFGVKVLLDERRGESSSERRRARAVELRTIFTRLGPTFVKIGQGLSTRPDLCPAEYLEELAELQDSLPTFPDEEAFACIERELGFTLDSIYSTISPSPIAAASLGQVYKARLKYSGKLVAVKVQRPSIEKAIGLDFYLLRGLGFLINKYVDIVTSDVVALIDEFARRVFQELNYVQEGQNARRFKKLYADKQDVLVPDIFWDYTSAKVLTMEWIEGVKLNQQAVIESQGLKVLDLVNIGIQCSLRQLLEYGYFHADPHPGNILATPEGKLAFLDFGMMSETPEDARVAIIGHVVHLVNRDYEAMARDYYALDFLEPDVDVSPIVPALKNFFDDALNATVSELNFKTIVDGLGAVLYQYPFNVPAYYALILRSLTVLEGLALYADPDFKVLAASYPYFAKRLLTDPNPYLRDALIELVFKDGKFRWNRLENLLVQGRQDREFAAKDALQPVLKLLLGPGGEELRALVVKEAVRVTEAIAIGTLVDSYNAAPSFLKPLISSGNLAEPFKFSETEQEQMMELRDQVFRVWGLLRSSNNFDPSLLQPIVQVLQEPEARVLGSRVAGGVTQRLAARLLQQLLRTPPAPGSS

SEQ ID NO: 349937 - protein, 83 aa, Zea mays
  Clone ID: MRT4577_82316C.1.pep
QDMLRYRLYFLQLHSCAHSGGLPMPDRLWLQPPLLPLTYHHFNIHIQLQLHILHFTTSIITTYLQLNPLQSLFSDHTYYSTVL

SEQ ID NO: 349938 - protein, 46 aa, Zea mays
  Clone ID: MRT4577_82318C.1.pep
PRRARRRAELGSTLLVLLRSPRGWGYGSRQWPWLTIRRLMSTRQSG

SEQ ID NO: 349939 - protein, 36 aa, Zea mays
  Clone ID: MRT4577_82319C.1.pep
QFEGRVTRPVDRTLFPTITLLVNAPNQSAWTMLKLL

SEQ ID NO: 349940 - protein, 72 aa, Zea mays
  Clone ID: MRT4577_8231C.1.pep
TRLTLGSRVNIISARFFSGSSGLLLVAQITRRPERGGYLCTKTTAAAADEDGSRLTADAWADAWADAWADAW

SEQ ID NO: 349941 - protein, 58 aa, Zea mays
  unsure (1)..(58): unsure at all Xaa locations
  Clone ID: MRT4577_82320C.1.pep
KPPKFQKNFPRRGFVPXTXVKKGNDSPVXPLVLGFFIFVAIGSWLFQIIRAAPTGGVA

SEQ ID NO: 349942 - protein, 44 aa, Zea mays
  unsure (1)..(44): unsure at all Xaa locations
  Clone ID: MRT4577_82321C.1.pep
VRVGIIGVIMGIRGHCFYVKESMRKDEMMVRLRSVGEVLXXSLG

SEQ ID NO: 349943 - protein, 88 aa, Zea mays
  Clone ID: MRT4577_82322C.1.pep
ISPPRGSHPVQSSAKAPFFVSVRAPGFGFLCGRGGGAEFCGVRAASYDCQLRRYLVVGLPPPRPLCICIVIYVCFVFDYACLCVYIYI

SEQ ID NO: 349944 - protein, 78 aa, Zea mays
  Clone ID: MRT4577_82323C.1.pep
DPSSKEDNPKWSMVDVQFVRMMKRFISLDELKTYHQAHKATGGPLKSMTLFTRQRLSVQPLTQEEFDYILSLEEAEPS

SEQ ID NO: 349945 - protein, 80 aa, Zea mays
  Clone ID: MRT4577_82324C.1.pep
QPLGAATAQQSLAPSMGDLWTNIRVDLAKMQATLQKVEQGLMQIKAAVQHEQLRCPHGSRRRRLWARAEFRAYVRVHATS

SEQ ID NO: 349946 - protein, 163 aa, Zea mays
  Clone ID: MRT4577_82325C.1.pep
VSVTGSIDLSSSPPAAARHDDRLYNGLLTDSFDEESCHSRYQSAMYRGNPGRRPSAYLISKLRRHEALQRRCGPGTAAYSNALEQLRAGSMSTIAPPECAYIVSISYSGLGNRILAAASAFLYAVLTDRVLLVDPSNDMDDLFCEPFPGTTWLLPPGFPVANY

SEQ ID NO: 349947 - protein, 54 aa, Zea mays
  Clone ID: MRT4577_82326C.1.pep
FNLCRIPRGQEKFLCIVDLKGWGYSNCDVRAYIAAIEILQVYVHVHPSLTTRSS

SEQ ID NO: 349948 - protein, 58 aa, Zea mays
  Clone ID: MRT4577_82327C.1.pep
DWKNPGCPQFNGFEKNPLLAGWGIRKRGRTNRLFKKLRSLNGNWDPPCMGTLSGGVLL

SEQ ID NO: 349949 - protein, 258 aa, Zea mays
  Clone ID: MRT4577_82328C.1.pep
MVFEQQQEEAVLPGAVHGHRLSTVVPSSVTGEVDYALADADLAFKLHYLRGVYYYRSGDGLATKVLKDPMFPWLDDHFPVAGRVRRAEAEGDAAPRRPYIKCNDCGVRIVEARCDRDMAEWLRDGAPGRIRQLCYDKVLGPELFFSPLLYVQITNFKCGGLALGFSWAHLIGDIPSAATCFNKWAQILSGKKPEATVLTPPNQPLQGQSPAAPRSVKQVGPIEDLWLVPAGRDMACYSFHVSDAVLKKLHQQQNGRQD

SEQ ID NO: 349950 - protein, 426 aa, Zea mays
  Clone ID: MRT4577_82329C.1.pep
MVFEQHEEEAVAPGAVHGHRLSTVVPSSVTGEVDYALADADLAFKLHYLRGVYYYRSGDGLATKVLKDPMFPWLDDHFPVAGRVRRAEAEGDGAPRRPYIKCNDCGVRIVEARCDRDMAEWIRDAAPGRIRQLCYDKVLGPELFFSPLLYVQITNFKCGGLALGFSWAHLIGDIPSAATCFNKWAQILSGKKPEATVLTPPNQPLQGQSPAAPRSVKQVGPMEDLWLVPAGRDMACYSFHVSDAVLKKLHQQQNGRQDAAAGTFELVSALVWQAVAKIRGDVDTVTVVRADAAARSGKSLANEMKVGYVESAGSSPAKTDLAELAALLAKNVVDETAAVAAFQGDVLVYGGANLTLVDMEQVDLYGLEIKGQRPVHVEYGMDGVGDEGAVLVQPDADGGGRLVTAVLPGDEIDSLRAALGSALQVA

SEQ ID NO: 349951 - protein, 86 aa, Zea mays
  Clone ID: MRT4577_8232C.1.pep
SNLGGNLIPLASLPMRGTPSFSLPPSVRPAPPTDVAVPPAHGESFPGIVPPPPQVELGEFPQGGVASLCQTGPFRFCIVQAGSPGV

SEQ ID NO: 349952 - protein, 73 aa, Zea mays
  Clone ID: MRT4577_82330C.1.pep
DRQDHIYERAILYSRPKRKAIQLRWHNLAVFTEVHTENSFHGFRMVLLTQMGSYIWAVSVRLETRKMSLIGTL

SEQ ID NO: 349953 - protein, 85 aa, Zea mays
  Clone ID: MRT4577_82331C.1.pep
MLTSLLMPGIPQFHQPSTSTIYIHSTYLTYKLQLTLAFSALQQPIAQSLQQYLSHLTLQTISTQQQQQQSLPSINHLSTVNPLTY

SEQ ID NO: 349954 - protein, 66 aa, Zea mays
  Clone ID: MRT4577_82332C.1.pep
SLLFPSLLLVFSIYIFSSDILSSYVTLVTTGSIFPDLFNSWNIKYIWSHLFLLRKEARQHRNKVLF

SEQ ID NO: 349955 - protein, 160 aa, Zea mays
  unsure (1)..(160): unsure at all Xaa locations
  Clone ID: MRT4577_82333C.1.pep
LCYDKVLGXELFFSPLLYVQDXTLLLSSKVTMSSPICFVKKNSATSFLWSQITNFKCGGLALGFSWAHLIGDIPSAATCFNKWAQILSGKKPEATVLTPPNQPLQGQSPAGAAAPRSVKQVGPMEDLWLVPAGRDMACYSFHVSDAPLPKLHQQQNGRQD

SEQ ID NO: 349956 - protein, 91 aa, Zea mays
  Clone ID: MRT4577_82334C.1.pep
MSGSAQGSNDMKKAVTNDSKNGEQPLAPEKKPATQLEEDDEFEDFPVEDWTEEETQIPNGNTHLWEESWDDDDTNDDFAVQLREELKKLGK

SEQ ID NO: 349957 - protein, 325 aa, Zea mays
  unsure (1)..(325): unsure at all Xaa locations
  Clone ID: MRT4577_82335C.1.pep
VGAEKGLSFDLWTTYLAELLKVHHGRQTHQTGDNFLYDEKVLCIGSSKKRPVLKWEENTAWPGNLTLTDKALYFEAIGLSGTKKPMRLDLTNQNSRAEKTKVGPFGSKLFDSAVSVSSGSMSDEWTLEFVDFSGEMRRDVWLAFISEIISVYRFIREYGPGGDDPAIHNVYGAYKGKKRAVSSAANSIARLQSLQFIRRLYEDPAKLVQFSYLSNAPFGDVVLQTLAVNFWGGPLTTKARSANHRSTQWHRSSEDPSSGRTHVYDIDGSVYLRKWMTSPSWTSSHSANFWRNSSVKYGIILSRSLVVADKNLXRKGMVDCKERAK

SEQ ID NO: 349958 - protein, 836 aa, Zea mays
  unsure (1)..(836): unsure at all Xaa locations
  Clone ID: MRT4577_82336C.1.pep
MLQLQPPGFLPIPRRRVTARGRRARPVIAFNSQWKIPDVDTDAVRERVRSWMSLARGAIADAGRAAREGGRHKEEPEGGKKKQRKEVTVEEQAFVAVPEVTVEPRVPQGWLSLDAVVSIEQFARLNGLTGRQVQRIFESLAPEHLHNDARSLVEYSCFRYLAKDNSDFHPNLKELAFQKLIFVTMLAWEDPYNEDSSPLSSLDNYSVLGRLVGEDAFARIAPAVAGVADVSTAHYLFRALVGAEKGLSFDLWTTYLAELLKVHHGRQTHQTGDNFLYDEKVLCIGSSKKRPVLKWEENTAWPGNLTLTDKALYFEXTKKPMRLDLTNQNSRAEKTKVGPFGSKLFDSAVSVSSGSIXCYDIMFLVXLNSEGNWFTTSRSDEWTLEFVDFSGEMRRDVWLAFISEIISVYRFIREYGPGGDDPAIHNVYGAYKGKKRAVSSAANSIARLQSLQFIRRLYEDPAKLVQFSYLSNAPFGDVVLQTLAVNFWGGPLTTKARSANHRSTQWHRSSEDPSSGRTHVYDIDGSVYLRKWMTSPSWTSSHSANFWRNSSVKYGIILSKSLVVADKNLVEKAMVDCKEKSKVVERTQATIVAATIEGIQCMLLQSKELMLPFAIVAENFKKLQRWENPRSTFCFLLLVHTVIFRNMLSYVFPFTLMTMALSMLAVKGLKEQGRLGRSFGKVTIRDQSPSNTIQKILALKEAMASVENYLQNLNVSLLKIRTILLAGQPEVTTQVAFVLLASSAVLLVFPFKYVLAFFTCDLFTRELEFRRETVRAFMNFVKERWESIHAAPVVVLPYEGAESSPKTLPAEVSGQAEPQNVQRGSGYVSSKNGISS

SEQ ID NO: 349959 - protein, 96 aa, Zea mays
  Clone ID: MRT4577_82337C.1.pep
SMCYCQALSTFACCSQYPFTPVCLKTFVVTGRRHCWLMELGTNERYRIMRAFVAHAHSTSTSRKNKNHKEAEDFVCQCWYARCFLVPKRGVPNSVG

SEQ ID NO: 349960 - protein, 126 aa, Zea mays
  unsure (1)..(126): unsure at all Xaa locations
  Clone ID: MRT4577_82338C.1.pep
PRVRGRVXKKKKKKKKKKKKKKKKKKKKPKKKKKKKKKKKKKKKGPRFRNSKTSKIHKRATQGRGPYFRRKTQVKRGRKCLAPTPPRLFCFPEPPGAPNRPAGRLFTRKRSLAEGPAKNFQLLWKA

SEQ ID NO: 349961 - protein, 80 aa, Zea mays
  Clone ID: MRT4577_82339C.1.pep
EIESIVKPKVLVKEAEKKLPSDTEKEDRSPSAIFSAELSKTSVVDLLYWRDIKKTGVVFGASLFLLLSLTVFSIVSVTAY

SEQ ID NO: 349962 - protein, 44 aa, Zea mays
  Clone ID: MRT4577_8233C.1.pep
NHAITKKMILVGEVFRFYLDALTLSVICAHAFPNQDILIYVLTT

SEQ ID NO: 349963 - protein, 203 aa, Zea mays
  unsure (1)..(203): unsure at all Xaa locations
  Clone ID: MRT4577_82340C.1.pep
HPTPQYTKVDEHLLTLSYITGYQASIGRTLRCLPSPPSXLSDEPINESWRHNHIXVLITMRAIXVQGTGAKGESSTMPSYPTPYVGETHAPFDDEDNDYXVNSNGEETKEDKKAVEYRGAIDKGSVLKKESGKASPLLDVKPCDNETDMRNLEEPVKSGQMXEWSAAHXLVPAGYDIKKVQIVMTIDDDLVSEDTLIDDYLCA

SEQ ID NO: 349964 - protein, 89 aa, Zea mays
  Clone ID: MRT4577_82341C.1.pep
KAPCAPQTFGGEVFTTPQEALHPSLFRKRLNGPPKENPSFSGHLPGKKVVSRRGVKINPVFWWGLPPNFFVTVTLLALLPSKILLAPSP

SEQ ID NO: 349965 - protein, 151 aa, Zea mays
  Clone ID: MRT4577_82342C.1.pep
SLKIISQVYIEQCLYLDSLDLAPVLAYLSLATCNDLPDVNQTGSCFESSTANQSLDHLLNCFDKLLNGTVSNPPSKLNKNGKALRSKDQQKGASEAKGTFNVIMLGASILKFIIDTNMKPLNDDKIRCLKFASSYIKYAVSSIKKHQEQSS

SEQ ID NO: 349966 - protein, 74 aa, Zea mays
  Clone ID: MRT4577_82343C.1.pep
PTFSSHLKRRPSRSGMRMIRYCTQHTCLLWTLLLAHRCKLILRCSRQLCSSLSPEPKRSLPYKYDKAMLLTLQH

SEQ ID NO: 349967 - protein, 202 aa, Zea mays
  Clone ID: MRT4577_82344C.1.pep
MAHPASHARPTTTTILFMSLLLVLATASLGYPCPCPYTCENELNWRLYLKQVAGAGPNHNQEVIFRPQHANPFGETVVQDWTLVDAPAPGAKVVGHAQGVHVLSDLANVGWFVSLNMVFQGDRFSGSTLQVMGVLPPEGEWAVVGGTGELALARGTIKHRIAGSAPETSFRQLDIHAFYANGSASCVGSAAVIAEKGSAHAK

SEQ ID NO: 349968 - protein, 79 aa, Zea mays
  Clone ID: MRT4577_82345C.1.pep
LGRMAHLGVAFSLLGGILPGKGALAQLNIETGGPPPKIKPLVFFKVLFFFFAPLNPGNGGFFFGEEKEKGAGCFCWPRP

SEQ ID NO: 349969 - protein, 148 aa, Zea mays
  unsure (1)..(148): unsure at all Xaa locations
  Clone ID: MRT4577_82346C.1.pep
PKPGGPHPSANPSESNKILPFQKKLPCPWGRVNNFKLGTGIYKKFVVSSFQFVFEPIDNHFPDNPQLISFTFRVIQFDLKPNGVSFGRPLNLAFSLDXGVLLNPNXGNASPVDLILKFVLPFAFKFLYKTNLKARVVTLPKKIGCMVV

SEQ ID NO: 349970 - protein, 328 aa, Zea mays
  Clone ID: MRT4577_82347C.1.pep
MSRSLSMRGSMRSRRDLPPPEKTIERLESMVDGGNFYEAQQMYKSTSARYIAAQKYSEALDILQSGALVQLKHGQVTCGGELAVLFVDTLITGELPYSEQIFDRIRKMYEAFPRVTVPHFLGDDYDDEGHQLSEAISAAKVRAESCSSFMKAAIRWSAEFGTSRNGSSELHVMLAEYIYSESPETDMTKVSSHFVRGNDPKKFASMLVNFMSKCYPGEDDTAIARGVLMYLSQGNLRDANLLMDEMKEQLKSANSDFPKTDLIQFIMYLLPTLERDAYPLFRTLRQKYKTSTDRDAVFQELLDEIAAKFYNIQRQNPLEGLFSEMFKI

SEQ ID NO: 349971 - protein, 194 aa, Zea mays
  Clone ID: MRT4577_82348C.1.pep
MASEEMTATEVAALLDLKPHPEGGFYTETFRDGSITLTTSQLPPHYKVNRAVSTAIYFLLPAGSVSRLHRIPCAETWHFYKGEPLTVFELHDDGHIDLTVIGPHLEAGQRPQYTVPPNVWFGSFPTLDVESFASDGSVLVKSRKRDPELHYSLVGCTCAPGFQYEDFEMAKFEDVRSIAPKAEPFLKFLIPSTD

SEQ ID NO: 349972 - protein, 108 aa, Zea mays
  Clone ID: MRT4577_82349C.1.pep
MTGGSGGRRDHESDRDASTALPVPGPCASTQRALAECRRRAARGPLQPEVLCRHLNRALAECVVTACCPDEIDAVRTLCGSAGTALKRKQCQRARIDLALCLEAHQEP

SEQ ID NO: 349973 - protein, 37 aa, Zea mays
  Clone ID: MRT4577_8234C.1.pep
LNEIMRLQFRSLSINCRVFKPVISVKGAVYIVQKFFL

SEQ ID NO: 349974 - protein, 144 aa, Zea mays
  unsure (1)..(144): unsure at all Xaa locations
  Clone ID: MRT4577_82350C.1.pep
PHPEKPPNRAGEKKTPGLSPHPPRRGVPENPXPPPKGIGPALPAGPXTSSAGPRPKPPRNPVPEPPKGPPPPXGGFKTTPPQNPSXGNPPGGDLPVPPHVQGPPXGPPQSPNWGSPPPPFGKGHRGPXQSPPPLQMATSPPPNF

SEQ ID NO: 349975 - protein, 57 aa, Zea mays
  unsure (1)..(57): unsure at all Xaa locations
  Clone ID: MRT4577_82351C.1.pep
NPERPLMSNMNSQLHAGCYSLIMCASRVTGVCLMMHITDSFYLLATESVMRIVXLPG

SEQ ID NO: 349976 - protein, 67 aa, Zea mays
  Clone ID: MRT4577_82352C.1.pep
KDCRNAFHALHFIKSSFVSRSHETHQIKLMKHPSTISKTDVCMKESFPGGECKQVVATRKCFCKKPC

SEQ ID NO: 349977 - protein, 82 aa, Zea mays
  Clone ID: MRT4577_82353C.1.pep
KKKKKKKKKKIKIKKKKKKKREKKKKKKKKKKKKKKKKKKKKKKKKKKKRGAPFKGPNFTSPSLQILIFFFGPPNLIHLAVF

SEQ ID NO: 349978 - protein, 68 aa, Zea mays
  Clone ID: MRT4577_82354C.1.pep
PQPAHPVVKHQPPSVEVHRHAQCDSRSMDLVICMQISHVTVVVRCLLLVRILNILDQPDSSQMQADKI

SEQ ID NO: 349979 - protein, 50 aa, Zea mays
  Clone ID: MRT4577_82355C.1.pep
TEQTGSGQFQPLTPPKRQTTTSNFLLCFKMELISGLTHHHLHRYQFHRPE

SEQ ID NO: 349980 - protein, 87 aa, Zea mays
  Clone ID: MRT4577_82356C.1.pep
CRAREVGSSIVRSPIFPPNLFPCMRGSRARLTRNPHSTIYDLVNDLHDGTSLTKSAFRTLPLVNVFVTTSTLGTVACPAAPLSLTIK

SEQ ID NO: 349981 - protein, 100 aa, Zea mays
  unsure (1)..(100): unsure at all Xaa locations
  Clone ID: MRT4577_82357C.1.pep
NVGTTTRVVAPDAPPHMNTVTAAAAAAIASDPNFTVALAAAITSIIGGXPSSSDLNSSWRAGARTTAAGXTPTSNSNANNNNAVVTSSSNNTATSNSETQ

SEQ ID NO: 349982 - protein, 35 aa, Zea mays
  Clone ID: MRT4577_82358C.1.pep
HPITRLGINTSYTHVLLRYNQILSLWKTGGIILNA

SEQ ID NO: 349983 - protein, 87 aa, Zea mays
  Clone ID: MRT4577_82359C.1.pep
RQADPHKKGRRTRDMAEKEAPRSFLARLPPLDRSADIGNEEQQRCVVITHHADPVLTAPLLIHDPEQSKVRKKALKCAAQLTLSLVS

SEQ ID NO: 349984 - protein, 38 aa, Zea mays
  Clone ID: MRT4577_8235C.1.pep
VHAPPRPYVGHVKALVFSFTTYPIFRTSLENSFFPSSR

SEQ ID NO: 349985 - protein, 134 aa, Zea mays
  Clone ID: MRT4577_82360C.1.pep
MAPKDIDATVTAMPAYIVPSVTLPSSSVRPPRASRTEQNSTSTHAVRNAGAMTGNMAPTTRRSCKIVSASTRAADTKHGSHDDVCCSEYCPLPCRSQLLVVAGQQLDQQGGCEDWICMMRDDDAALLLFISNVR

SEQ ID NO: 349986 - protein, 182 aa, Zea mays
  Clone ID: MRT4577_82361C.1.pep
MAEARGQYSLQQTSSWLPCIVSAALVLAETILHGLLVVGAMFPVIAPALRTAWVLVEFCSVRDARGGRTEEEGKVTLGTMYAGIAVTVASMSFGAILAIFAGLLGGTVSKEQLKACTFLLVSAFVGDDMDSAGGQNEGEHRVRGDGARLLQPWHSRARGARSLLSDRGMSWSNKNGVPCTFS

SEQ ID NO: 349987 - protein, 368 aa, Zea mays
  unsure (1)..(368): unsure at all Xaa locations
  Clone ID: MRT4577_82362C.1.pep
IGSSVNLIRIMSKANLMKYYADAKLSALMSFLKFLSVYKGAISNKNLDLPDGGISVAATQSAIKCACNRDESTVDSLLPQAHTDEVLFPLLSGQVELLLTLARILFHQAKNKKSSHLCPDIVLLMKTSGASTCLFVDLMPSAHALKQPVKTLLVLLLSSYEFMYSKVDIKDLPNDINIFGELALLSVSLLPILCKLAENRECSDLAVASMDLILKGSVPSNVWMPILQKHFHLQTILHKCQNGDLLSTQVILNFLLTLGRTKDGAKVLQSANIFAFLKLLLSQLSLDDSCLRNSLSAQXKDVNLWGLGLGIVASLNHCLDDDISHNNVVSNTISFLSGHVPLVSSYLSTQSATTHQSKKRALSQKSQT

SEQ ID NO: 349988 - protein, 246 aa, Zea mays
  Clone ID: MRT4577_82363C.1.pep
LWEQVSRKLAEKGYNRSAKKCKEKFENVHKYYKRTKESRAGRNDGKTYRFFTQLEALHGTGAAPASVAASQVPPAISGGVSGAAGPLAVRLPAEPPPAVSGGVGMPMTTVGYPSFSTSNTEDYTDEDDSDDEGTEELVGGGGNERGKRKRVSEGGASVAGGGSGKMMRFFEGLMKQVMERQEAMQQRFLEAIEKREQDRMIREEAWRRQEMTRLARVAGDPGAGARHGRLTRRLRPLLYTEDHRTD

SEQ ID NO: 349989 - protein, 72 aa, Zea mays
  unsure (1)..(72): unsure at all Xaa locations
  Clone ID: MRT4577_82364C.1.pep
MSSIRFDECTPAFFTAIESMAAEGEKKMITLKSSDGEEFDVEDVVAMESQTIRHMIXDDCADNVIPFPNVNS

SEQ ID NO: 349990 - protein, 128 aa, Zea mays
  Clone ID: MRT4577_82365C.1.pep
SQTFLSYLWRCCSGGAGDVTTARAKRARTNKNPSVGAFPPAGDGAGVEWSGGEGAWDGRQARTRGCVQASTGSVYSEAWRGRVGRSTTRGKAAGRDELNKAMAALNRGGAGRACRTGAFSGEQKQARE

SEQ ID NO: 349991 - protein, 104 aa, Zea mays
  unsure (1)..(104): unsure at all Xaa locations
  Clone ID: MRT4577_82366C.1.pep
IRLEVINTDWHKQSNRDFARRYTLREQHECEELARKVTNLTTDNSAFRVYLDNLKKACQDMEAANPRMLXGLADTQLPSVTTTLRMSIEPPNLQLQLXQHYDEE

SEQ ID NO: 349992 - protein, 35 aa, Zea mays
  Clone ID: MRT4577_82367C.1.pep
KVSQELGSIWIALLAKCNASLGIKIPTRLNMKPNM

SEQ ID NO: 349993 - protein, 70 aa, Zea mays
  Clone ID: MRT4577_82368C.1.pep
SSHLIIVLALDVQRVFHKRLRTFSIRIIIFPTWKSAQSPKYRKVEIDNRTWLDHILKLKTLIMFSWSTPH

SEQ ID NO: 349994 - protein, 67 aa, Zea mays
  unsure (1)..(67): unsure at all Xaa locations
  Clone ID: MRT4577_82369C.1.pep
MNQNQKIDTSASGRYQXNSYAPAALXLECFLRVDGLNTAQNLKTCGILAGALKKRTFYVTTLIIPKQ

SEQ ID NO: 349995 - protein, 79 aa, Zea mays
  Clone ID: MRT4577_8236C.1.pep
GIHLHIDVYKDRKLNRRLVRAQARVHAPFDALRDKLSDYDGLADFIHGLFECRLQDRHHGYQRLYQDREQDLTLGFKGN

SEQ ID NO: 349996 - protein, 342 aa, Zea mays
  unsure (1)..(342): unsure at all Xaa locations
  Clone ID: MRT4577_82370C.1.pep
MLGGQSETVKYRVFAGTWNVGGLAPPDDLDLEDWLDTKNDSYDIYVLGFQEIVPLNARNVLGPKQRRAAMKWQLLIGDALNSTRHGAAGMHGQGQGGAFRCLMSKQMVGIFVSVWTRSSLCRHVRHPGVCSVGAGVLGRLGNKGAVSVRFLLHGTSFCFVCCHLASGGEKGDALRRNADAAGILSRTSFXLRRRGGSTXEVPKKILGHDRVVLLGDLNYRIAMDDDEARQLVRARKWGMLLEGDELLLELSSGRQFHGWHEGHVTFAPTYKYRRNSDHLHWCADGVAAGREKQHRAPAWCDRILWRGKGMKQVRYERCGCYRLSDHRPVRALFHAVCELADG

SEQ ID NO: 349997 - protein, 214 aa, Zea mays
  unsure (1)..(214): unsure at all Xaa locations
  Clone ID: MRT4577_82371C.1.pep
HASAHASGDALRRNADAAGILSRTSFLGFDGGAAANPLRLCTVLGCDRVVLLGDLNYRIAMDDDEARQLVRARKWGMLLEGDELLLELSSGRQFHGWHEGHVTFAPTYKYRRNSDHLHWCADGVAAGREKQHRAPAWXTLTPRPSPLDISMQARWFRSHAVRRYCYLIICRCDRILWRGKGMKQVRYERCGCYRLSDHRPVRALFHAVCELADG

SEQ ID NO: 349998 - protein, 376 aa, Zea mays
  unsure (1)..(376): unsure at all Xaa locations
  Clone ID: MRT4577_82372C.1.pep
MLGGQSETVKYRVFAGTWNVGGLAPPDDLDLEDWLDTKNDSYDIYVLGFQEIVPLNARNVLGPKQRRAAMKWQLLIGDALNSTRHGAAGMHGQGQGGAFRCLMSKQMVGIFVSVWTRSSLCRHVRHPGVCSVGAGVLGRLGNKGAVSVRFLLHGTSFCFVCCHLASGGEKGDALRRNADAAGILSRTSFXLRRRGGSTXEVPKKILGHDRVVLLGDLNYRIAMDDDEARQLVRARKWGMLLEGDELLLELSSGRQFHGWHEGHVTFAPTYKYSRNSDHLHWCADGVAAGREKQHRAPAWXTLTPRPSPLDISMQARWFRSHAVRRYCYLIICRCDRILWRGKGMKQVRYERCGCYRLSDHRPVRALFHAVCELADG

SEQ ID NO: 349999 - protein, 45 aa, Zea mays
  unsure (1)..(45): unsure at all Xaa locations
  Clone ID: MRT4577_82373C.1.pep
QMNKAFIEGVSSLYACNKGGTGNPRTYIYXFRILQHDTHIHLRKL

SEQ ID NO: 350000 - protein, 74 aa, Zea mays
  Clone ID: MRT4577_82374C.1.pep
FNFFFFFQNSFFFFFSVTNSLKTHIPKPASKQRGFLITKLTHINWLPLKTQFPEIKSKGPASLNSFPTHNLRQY

SEQ ID NO: 350001 - protein, 58 aa, Zea mays
  Clone ID: MRT4577_82375C.1.pep
FCARVDGPHRYDKTLTDSAHAWTVHTATTGSCFSKEAALPYSRAVCLCSFSATKNNTS

SEQ ID NO: 350002 - protein, 207 aa, Zea mays
  Clone ID: MRT4577_82376C.1.pep
MAAMCRAAAKQLVDRAVGSRAAHTSAGSKKIVGVFYQAGEYADKNPNFVGCVEGALGIRDWLESKGHHYIVTDDKEGLNSELEKHIEDMHVLITTPFHPAYVTAERIKKAKNLELLLTAGIGSDHIDLPAAAAAGLTVAEVTGSNTVSVAEDELMRILILLRNFLPGYQQVVKGEWNVAGIAHRAYDLEGKTVGTVGAGRIGRLLLQ

SEQ ID NO: 350003 - protein, 106 aa, Zea mays
  Clone ID: MRT4577_82377C.1.pep
ARRRAGGDLLPVSPASPAAGSSRRASPARCRTRGSSAGLSVLRWQRQRRVAAGKDKFVFLAGAGEGHGSAARGGGKSTTTTFLPWKQDLVGLVASAITFRRSCQPF

SEQ ID NO: 350004 - protein, 71 aa, Zea mays
  Clone ID: MRT4577_82378C.1.pep
ASAIFSFRKGVESLPRHSVFQLDRSLQEVFICRGPRCPPKTNPSLGVIQNRHCMKHVVLFPPVFQLKTRSH

SEQ ID NO: 350005 - protein, 81 aa, Zea mays
  Clone ID: MRT4577_82379C.1.pep
LPTHSGGCSPRFQDFDHRTPCSPLGPLAQEPVPSFPLTGSSRTPRAVLGRRQPPASSFPRPVCAARSRTRRGCRRRKRTRG

SEQ ID NO: 350006 - protein, 41 aa, Zea mays
  Clone ID: MRT4577_8237C.1.pep
GRGQPVTGSLQFLAQIALPQNYIRYLQFVENGPITYTGSRP

SEQ ID NO: 350007 - protein, 183 aa, Zea mays
  Clone ID: MRT4577_82380C.1.pep
GYRPGGLGSLLWSYFHWFYTGGPGWGFTAFPTFGLTAYKHGFYINMNGTYVGVGMISPYLINISMLVGSIISWGIMWPYLLTKKGIWYDANLQETSLKGLNGYKVFSAIGMILGDGILQLVVISLKTVHTMRHHQLAAETIRSFSNVDSMPRPVLSFDDRRRTHVFLREHIPSTFAISGYVVL

SEQ ID NO: 350008 - protein, 72 aa, Zea mays
  Clone ID: MRT4577_82381C.1.pep
TALPLPKYRCEPCLVKPLLNIFTTPRLLTTSSAGLHSYMLTRKTTTGRPASCSSTCYSLAITTRSSASYYPA

SEQ ID NO: 350009 - protein, 823 aa, Zea mays
  Clone ID: MRT4577_82382C.1.pep
MLCLVSPSSSPTPLPPPRRSRSHADRAAPPGIAGGGNVRLSVLSVQCKARRSGVRKVKSKFATAATVQEDKTMATAKGDVDHLPIYDLDPKLEIFKDHFRYRMKRFLEQKGSIEENEGSLESFSKGYLKFGINTNEDGTVYREWAPAAQEAELIGDFNDWNGANHKMEKDKFGVWSIKIDHVKGKPAIPHNSKVKFRFLHGGVWVDRIPALIRYATVDASKFGAPYDGVHWDPPASERYTFKHPRPSKPAAPRIYEAHVGMSGEKPAVSTYREFADNVLPRIRANNYNTVQLMAVMEHSYYASFGYHVTNFFAVSSRSGTPEDLKYLVDKAHSLGLRVLMDVVHSHASNNVTDGLNGYDVGQSTQESYFHAGDRGYHKLWDSRLFNYANWEVLRFLLSNLRYWLDEFMFDGFRFDGVTSMLYHHHGINVGFTGNYQEYFSLDTAVDAVVYMMLANHLMHKLLPEATVVAEDVSGMPVLCRPVDEGGVGFDYRLAMAIPDRWIDYLKNKDDSEWSMGEIAHTLTNRRYTEKCIAYAESHDQSIVGDKTIAFLLMDKEMYTGMSDLQPASPTIDRGIALQKMIHFITMALGGDGYLNFMGNEFGHPEWIDFPREGNNWSYDKCRRQWSLVDTDHLRYKYMNAFDQAMNALDERFSFLSSSKQIVSDMNDEEKVIVFERGDLVFVFNFHPKKTYEGYKVGCDLPGKYRVALDSDALVFGGHGRVGHDVDHFTSPEGVPGVPETNFNNRPNSFKVLSPPRTCVAYYRVDEAGAGRRLHAKAETGKTSPAESIDVKASRASSKEDKEATAGGKKGWKFARQPSDQDTK

SEQ ID NO: 350010 - protein, 348 aa, Zea mays
  unsure (1)..(348): unsure at all Xaa locations
  Clone ID: MRT4577_82383C.1.pep
MYCYHGKNSTAGTVPMLLLLLLFSLTATLEFQGXDGAXLPGPGCLRYCGDVEIQYPFGGGGHGCSMEGFELSCNRSAVDGHSFLTIFGAIPVRNISLVDGQVRIMKHISSMFYNQSTKKIHYDIWGKELSSTTIMDSGQSNISTVIDINTLAYILCNTHVIGCVSQSKPYRXLEAQDGKCDGDSAGCCQAALADDMNFDDIGFSPDHNTTDYYEHRNATDRRADYRGYAVVMETDKFQFKTTYLNTTAFLDENAGGRVPAILIWEVGNETCDVATKKEDSYACLSANSVCVNSSSGGYLCNCSQGFEGNPYLPDGCKGRCCNCVCIFFGKCVQVQQRIPQKNICIQYP

SEQ ID NO: 350011 - protein, 215 aa, Zea mays
  Clone ID: MRT4577_82384C.1.pep
PASAHASAHASAHASAHAFAHASAHASAHASAHASAMNALDERFSFLSSSKQIASDMNDEEKVIVFERGDLVFVFNFHPKKTYEGYKVGCDLPGKYRVALDSDALVFGGHGRVGHDVDHFTSPEGVPGVPETNFNNRPNSFKVLSPPRTCVAYYRVDEAGAGRRLHAKAETGKTSPAESIDVKASRASSKEDKEATAGGKKGWKFARQPSDQDTK

SEQ ID NO: 350012 - protein, 45 aa, Zea mays
  Clone ID: MRT4577_82385C.1.pep
WIDYLKNKDDSVWSMGEIAHTLTNRRYTEKCIAYAESHDQVPCII

SEQ ID NO: 350013 - protein, 294 aa, Zea mays
  Clone ID: MRT4577_82386C.1.pep
METASAASVQGPSAAPWADMDTDCLVHVFGRLDLEDLAAAAPLVCRGWRRAAAEPSLWRALDLRRDHVARFMPWGALAAAFARRYAVRGFSLAGFLRICVWRARGSAEDVALPPLLAEPAHEIDHISLRCPRLRRLALPHLTVGDEARLPDLVPRWPLLEHLELETKPSSSSFPALAAQVALHCPAFASLKTSGAFKREDAAALARSLPRLRSLCVDRSYLPKEQLLAILAACRDLREFSARSCVGFDDEDEEVLRHGARILRFDVGGSKLVDELDDEFPGGGGFCDSSYVDVM

SEQ ID NO: 350014 - protein, 183 aa, Zea mays
  Clone ID: MRT4577_82387C.1.pep
QPAGRWSGSSRPAEPTLSQATSLRVIRPALGILLRKACSSATPLPTTSFSLLSAILSAVIGADATGGASPPPLLPGSPGQVSRELALSVAESCPASEFDSGSCVSGGDPTCSGEAEPARERDVCSVGARPWGRGGSTACGVGCWWKSAPDEIPIWDQSLGKANSIEEAPQMRNRRRRRRRRSR

SEQ ID NO: 350015 - protein, 49 aa, Zea mays
  Clone ID: MRT4577_82388C.1.pep
LLFLLESFAFVLNFLSHLVERAQKQPWPCKMDSFILQLYLALLFSASVT

SEQ ID NO: 350016 - protein, 617 aa, Zea mays
  Clone ID: MRT4577_82389C.1.pep
MGISSGADFHQQPTPQAVLPPRPHGRAPTLQTSLSLAGSASPEQVGSPPDTQEPLSNSDAGHDSATESASSRETWPGEPRKSGGGDAPPVASAPITALRIADNKEKEVVGNGVAELQAFRSRIPSAGRMTLREVAWDRVDLVAEKMKGMSDELLDETKAELQSILEGTGGQHQIQEFMYLQKLLQGRVDLTLPILLMAHHVQLEILVAIKTGIQAFLHPSVDIPQIRLAEIFLYKRCRNIACQSAVPAEECKCNICSNRNGFCNLCMCVICNKFDFEVNTCRWVGCDICSHWTHTDCAIRDGKIGTGQTIKNGVGHAEMLFRCQACQRTSELFGWVRDVFQQCAPNWDRDALLRELDYVCDRFRLSEDSKGRKLFRKCAELVERLRGGSAESMTPRILLQALQELDIDSSKNFEHQEPGRLITPQEACNRIAEVVQEAVRKMEMVAEEKLRTYKRARLAVEACDRELEEKAREAQELKVERLRKLQQAEELESIIRLKQAESEMFQLKASEAQEEAERLRSVALAKRKSEAAGQDYASMYLKRRLEEAEAEKQYIFEKIKLQENQHATSSSGGGARLGGGAPSAGEPSQAMMLSKIQDLLKNVRSVPSGKPDGQRSK

SEQ ID NO: 350017 - protein, 59 aa, Zea mays
  Clone ID: MRT4577_8238C.1.pep
KLQTSRFNPGADRELPNIPKGAMKRKLKKLYNPGPGLAQRTKTPSNPARKLNCATHAHR

SEQ ID NO: 350018 - protein, 120 aa, Zea mays
  Clone ID: MRT4577_82390C.1.pep
AIIDGDYHEWVVEANAAYRQLSAYIDYKQCEGVAEIIVARSISDGFRSIVQIMGLGNLKPNIVVMRYPEIWRRENLAQIPSSFTSIINDCIIANKAIVIVKGLDEWPNEFQRLYGTIDLY

SEQ ID NO: 350019 - protein, 80 aa, Zea mays
  Clone ID: MRT4577_82391C.1.pep
GRAPHLLSSRVHRPRLALSSRASRLRRPRPCLPAAPTLGLLLGSSGSPVIQCVAHGGNYLCSIVIASPISALLDLSSGFF

SEQ ID NO: 350020 - protein, 111 aa, Zea mays
  Clone ID: MRT4577_82392C.1.pep
GDVYSFGVVCLEILIGKRPIDPVFIGGLDIISFVKNSFPDQIFHIMDSHLVEECEHLIQDNKVTNEEMYQCLVDLLQVALSCTCSLPSERSNMKQVASKLHAIKTSQIGYK

SEQ ID NO: 350021 - protein, 87 aa, Zea mays
  Clone ID: MRT4577_82393C.1.pep
SFIYTRSLIAALGFHAYQQAAYMTLARVSPDTHSVGNCVKRVVVIVTYCLFFRTPVSPINSLGTGVALAGVFLFSQLKRLKPKPMTA

SEQ ID NO: 350022 - protein, 38 aa, Zea mays
  Clone ID: MRT4577_82394C.1.pep
GLTACIEPNCTSVYTHSHFLYLVSEKSGIEDDYIWIAI

SEQ ID NO: 350023 - protein, 76 aa, Zea mays
  Clone ID: MRT4577_82395C.1.pep
VNIYIRTIFSRYYEHQSSQRLNLLPKLCCPCLHLLATRRHDERLRPDRTQNPSNPAKPNSARSRRRAQARRPQGIC

SEQ ID NO: 350024 - protein, 201 aa, Zea mays
  unsure (1)..(201): unsure at all Xaa locations
  Clone ID: MRT4577_82396C.1.pep
AGGDTXVMATYFXHVALSGPAQTWLMNLTPGSIYSWEELCARFIANFASSYQWHGVEAHLHAVRQVPGETLWAFISHFTKVRGTIPRISDASIITAFCQGVRDEKMLEKLATHDVETVTTLFALADKCARAAEGCAWHSAPQTGVAQTGGSGAITEDGKKKKKKNRGYERPPSAAPIVAAATGGRNERNKRPRPQRGNSGS

SEQ ID NO: 350025 - protein, 141 aa, Zea mays
  Clone ID: MRT4577_82397C.1.pep
LLIDSVNAALLDIGQSKVWGGAYPCTARHYSNAPGVGTCDDDVLVTDEAWRLVRSWLFDDENDIAGLGDNAGLAADWVVGREIHGKGWAETLLLLLLLPIRFLCVYYPRNCSKCSLLLPLYLCCISFSIDTFTVITFTDEY

SEQ ID NO: 350026 - protein, 105 aa, Zea mays
  unsure (1)..(105): unsure at all Xaa locations
  Clone ID: MRT4577_82398C.1.pep
GKKGPGARAPPQNQGGGPGGGGRRLRGVPLPRAPRKKKGPQGPPGGRRRKKPPLFRLIDPPXCRPPPCATRXCESEIERPPFCARVRMFAPLLCPNKGGSVIFCM

SEQ ID NO: 350027 - protein, 300 aa, Zea mays
  Clone ID: MRT4577_82399C.1.pep
MFPSIRFNHGPIGPVDEPEAPSVSKPPASLEKTLSFEIRASHFDQPSPTSVFDVQFEDISEKSPISSESAITAKQEPLSRSIPIGSIARTLSWDDASQEAPPQCSTKGDSNHEQEQHEFVEKTLASAGFCNEKTQDIFARWHSLDRPLDPAVVEQLLERKVEDAKCRERRSNQRLLIDSVNAALLDIGQSKVWGGAYPCTARHYSNAPGVGTCDDDVLVTDEAWRLVRSWLFDDENDIAGLGDNAGLAADWVVGREIHGKGWAETLRMEVDEMSREICGEVLGELVGEAFSELAGAAGWH

SEQ ID NO: 350028 - protein, 74 aa, Zea mays
  unsure (1)..(74): unsure at all Xaa locations
  Clone ID: MRT4577_8239C.1.pep
MGSLMAGWDSPVLGDDTKARVMRNRSLTKEEVEAFWRQRGKPAREDGGGETLAXTSPPGSPPLVAPWEKKPPWE

SEQ ID NO: 350029 - protein, 80 aa, Zea mays
  unsure (1)..(80): unsure at all Xaa locations
  Clone ID: MRT4577_823C.1.pep
MRVLLVALALLALAASATSTHTSGGXDXQPPPAGDIPATVHMPPPVQLPYPEHVPPAVHLSPPVHLPPSDHVPSTDHVTS

SEQ ID NO: 350030 - protein, 893 aa, Zea mays
  unsure (1)..(893): unsure at all Xaa locations
  Clone ID: MRT4577_82400C.1.pep
MINLFELSVGASAKVSSRDGSPVRGTQSERKEYAGSKALTGSTRRSSSDXIXGTPMKMLIAQEMANEGDANQKTTNVVARLMGLDDNVDLAKPVVPPNRRSFPDGHLSATLARVNNQIPFEKHTSSAEDVEYKDVYEVGYQPPRGDEYPRRRRPSEDHDKRRMDLVRQKFVEAKRLASHDNILQSKEVHDALEVLNSNKDLFLKFLEEPNSLFAKQSGGLGSAPTSPQRKHITVLKPSKSVEMKGDKAIRRQTNHAAGNRTDRSNVHKSDAAHVKEDKLPKHTRIVVLKPTSVIASMEQSEQSYHADLDDSEAPALSRHLSEEIDWSVHGISRRHTESLQGCMQSNMFGADRPYHQYAEEEGNSLSDSDIGTPTSHHSWEYIYRFSNPYFGSLSHASCSPESHVTREAKKHASDRWAIVPSSEMTQDKVPVRRSLSTLGEMLAMPDMKKEEAAEQASPDATHQLCEPTVGVSSNCAVGEGEGESSLRKISRSRSVPVSSTAFDSLRLDGGCLDAQHKEPTVPKEVKPKSGKSSLKGRITSFFSKRKKAEKEKPSPSPLGTLNGRGSSVSTVAVAKPDVPQHVCASSQDDVSFESLEDQFNHGPIGAPVDEPEAPSVSKPPASLEKTLSFEIRASHFDQPSPTSVFDVQFEDISEKSPISSESAITAKQEPLSRSIPIGSIARTLSWDDASQEAPPQCSTKGDSNHEQEQHEFVEKTLASAGFCNEKTQDIFARWHSLDRPLDPAVVEQLLERKVEDAKCRERRSNQRLLIDSVNAALLDIGQSKVWGGAYPCTARHYSNAPGVGTCDDDVLVTDEAWRLVRSWLFDDENDIAGLGDNAGLAADWVVGREIHGKGWAETLRMEVDEMSREICGEVLGELVGEAFSELAGAAGWH

SEQ ID NO: 350031 - protein, 358 aa, Zea mays
  Clone ID: MRT4577_82401C.1.pep
MTLSKKQGAGTDQQALLDAQLQLWHHTIAFVKSMALKAAVDLRIADAIHLHGGSATLSQIVTKVTLHPSKIPCLRRLMRVLTLTGVFSVNSGAVVDEPVYGLTPASRLLVGPGLNQTPFLTLMLSTFFVSSFLGLDEWFQHETGPSPFELANGRDIWTLSGHDASFGKLFDDGMVADSGFIMDVVVKECGDVFRGVGSLVDVAGGLGGATQTIAKAFPDVACSVLDLSHVVANAPTDTAVKYIAGDMFESIPSANVVFLKWILHDWGDAECVKILKNCKKAIASQEEGKVVILDMVVGAGSSDEKHVETQIVFDLFMMFINGTERDETEWKKIIFEAGFSRYKIIPVLGVRSIIEVYP

SEQ ID NO: 350032 - protein, 65 aa, Zea mays
  Clone ID: MRT4577_82402C.1.pep
QRLELITNQGDTVSPPPLPDLSVQRSYLSLQRKRSRPTTRVNDAVASYHTVGVSVAVLGSITRSL

SEQ ID NO: 350033 - protein, 230 aa, Zea mays
  unsure (1)..(230): unsure at all Xaa locations
  Clone ID: MRT4577_82403C.1.pep
GKRKKPLPNFLPPPARPIIRGPPPNPKNKNGGEKKGPPQGGXKKNPSKKPPFWVFWPIPPPPQLPGPPTPPPGGPPPPGXAPPPLGPPTGGPYSXGGAPLPPPPKPGPIRGGPPNKSRAKKTPFGPTLNNPGKGPENTSPPPRRAPTKALGPNPGPKGXPGPTPPKIKAPPGYPPNGGPRKNPETPPPPEPPPPGXRNPPPRGPSPRGPHGKQQSPRRSPPPPPPAKKRG

SEQ ID NO: 350034 - protein, 67 aa, Zea mays
  unsure (1)..(67): unsure at all Xaa locations
  Clone ID: MRT4577_82404C.1.pep
PSSGFRLAPCVAXSANLQDLGRLVGVALGGCVLLICRLVSPCYLQACLGVVLLFCAEWVPCGPRSFG

SEQ ID NO: 350035 - protein, 98 aa, Zea mays
  Clone ID: MRT4577_82405C.1.pep
PQQADTELQDHGSGGQVQGEGTALSQVPGRTPLLSPPLQASVFQPFNWGHEPPFPSPRHHTPKKNELPQTAAPPLTFCHPLVPSAQPSLSSALQPRLL

SEQ ID NO: 350036 - protein, 63 aa, Zea mays
  Clone ID: MRT4577_82406C.1.pep
PMPLSSRTGWLNRDLPHDDKYKVCIQAGTCKVGNLKAGYAFVLWYTQMCILYKILYWEWRLPH

SEQ ID NO: 350037 - protein, 60 aa, Zea mays
  Clone ID: MRT4577_82407C.1.pep
QDDDAKVKRAFQTLLTYIGNVAKNPDEEKFRKIRLTNATFQVTINKSFDLGESLLCIRPC

SEQ ID NO: 350038 - protein, 42 aa, Zea mays
  Clone ID: MRT4577_82408C.1.pep
AKDAPKSLLSPLVVNANWKSVHHTESRLSTKLSKQITQNSST

SEQ ID NO: 350039 - protein, 121 aa, Zea mays
  unsure (1)..(121): unsure at all Xaa locations
  Clone ID: MRT4577_82409C.1.pep
SFVRGIVVPLDLSHFKGPVIQWPAPTNEQRRELTTIDTDMLHTLRESRTIVRNKIXAXAPLMGTAGAPCTFESYIAQWTMTNAYTNINCMCNTSPYALXGLMFKITDAIFYYIIYEFYCRV

SEQ ID NO: 350040 - protein, 108 aa, Zea mays
  Clone ID: MRT4577_8240C.1.pep
MDGNVTHGDERDELGLVGAAKDDAATGAAPTAHPAAVVQFMKLGDRRRSSCHVKPPLFKAALLVGGKKLGLAASPMGHFEDDGGCQLLHTDEDDEEWCHGQLRLTKEN

SEQ ID NO: 350041 - protein, 74 aa, Zea mays
  Clone ID: MRT4577_82410C.1.pep
LILYLIIYIAYVTVSPPGVSLIRHSVGQLSGKSAIESRNGGVVLVQPSAGCAASPPPLEEPWRGPCRRRARPRS

SEQ ID NO: 350042 - protein, 258 aa, Zea mays
  Clone ID: MRT4577_82411C.1.pep
MGTMVVAQLKPSSLLAALVLLLLLTSAMAANYWNSGTATFYGGADGSGTMGGACGYDNLYNAGYGVLNAALSQVLFNDGASCGQCYSIRCDASRSVWCKPGTSVTVTATNLCPPNYALPNGGWCGPPRPHFDMSQPAWENIGVYRGGIIPVLYQRVSCSRQGGVRFRITGSKYFQLVLITNVAGSGSVQSMSVKGTSTGWIAMTRNWGAQWQSNSALLTQALSFTVTSTAGQTLYINNVVPAWWDLGMTFATNAQFDY

SEQ ID NO: 350043 - protein, 149 aa, Zea mays
  unsure (1)..(149): unsure at all Xaa locations
  Clone ID: MRT4577_82412C.1.pep
YMSLFYTAHGQEKQAGVKVKDSKTLLFGEKEVAVLGCKNPEEIPWGSVGAQYVVESTGVFTDQEKAAAHLKGGAKKVAISAPSKGAPMIVVGVNEXECKADNNIAFNASCTTNWLVXLAKXHNDKFGFVEGLMTTAHAFTXTPKTGDGP

SEQ ID NO: 350044 - protein, 90 aa, Zea mays
  Clone ID: MRT4577_82413C.1.pep
LGLVLYRVFGWRLSQHFASFLSFFFFLKKRSWREESFSTHSNGPDLPFLRKHHSGAKKRCTRRAGVVLQWISIDNKPAKKKKKKKKGAPP

SEQ ID NO: 350045 - protein, 239 aa, Zea mays
  unsure (1)..(239): unsure at all Xaa locations
  Clone ID: MRT4577_82414C.1.pep
MASSRIPDALAAPALTPAPAAVPLKVQAQNPSIAPADPPSPEMETTAEALTREEVLRRRRRRAARLAGVYRQLYWAMAEEVRARHRQYVWDLARSPLEAEQXASPSRRAHPGGRGASEAGAGAEEXNKCGFPGCKVRAMATTRFCHSHILSDPKQRLYKPCAYINKSGLQGGLIPCSRPIIKSAAPSLCNIHLQKCQKNIAQAYKKVGLNPPLTGKVTLXFSVLVAECVRQIQDKRRNH

SEQ ID NO: 350046 - protein, 104 aa, Zea mays
  Clone ID: MRT4577_82415C.1.pep
ASSFQEMLAFTSIAPKSWKGEYSPSRKHCLSFHRFSCPLLNLAYMSHVKELPFYICNSLEEHHNVIHNFSMSTVCFVNIHKKMIGKNSYMFLKQQGCTCDENRH

SEQ ID NO: 350047 - protein, 85 aa, Zea mays
  Clone ID: MRT4577_82416C.1.pep
SCSSLVSSLSMKSTSCCLTAIRICWQSSMRPALVCVFPSVYLLIQVAYMLAVLFEQFLLAAYMRAMSPVPGTAHFMCVFAVEACA

SEQ ID NO: 350048 - protein, 35 aa, Zea mays
  Clone ID: MRT4577_82417C.1.pep
FTFKRFPLRAFTPVIRDLAPRLTRCGELGGFLELS

SEQ ID NO: 350049 - protein, 126 aa, Zea mays
  Clone ID: MRT4577_82418C.1.pep
MVSSQQGYANTTVDMKGNNKAVDEAQSNLPLPDQPPVASDFNSSDARTVNVGSGGQEASFTSGGGAIREPAVGAGGASAREAKDGLDGIPNDAVSREAKNHSGLADTTGKDYGYPQKNDPSSGLKQ

SEQ ID NO: 350050 - protein, 197 aa, Zea mays
  Clone ID: MRT4577_82419C.1.pep
VGFALLHRGKSCGPGLRLRPGFGLEGGLASLGLAAVGFVKGGGQLHYCSSPNLRYHQSICFIKRRITCYRNKLRAQGTCLASGVAECPWLSVRASHLDHGAAMQEPGAAAAWSAALFCADSPLNLVCISPCGAFWSANALQLVALRDLADARSPSRSSCVGTVIGPVAQRYVWSGPCARRSRESCCCSLQITWSNRS

SEQ ID NO: 350051 - protein, 190 aa, Zea mays
  Clone ID: MRT4577_8241C.1.pep
PQLLPTHQQRRLEQRRLNMAGCASRQPATEMRSASHSTGSQLLRLSPSFINCTTAAGWAVGAAPVAASSLAAPTRPSSSRSSSCMTLPSIHRRSASAADQTHLKACRCRLAEPGDGLCPQPGLAARGRRPIPTLASCRPEPRSAPKSSNADDGAIADDAIHHARSIGSSPPTVGGGAVLAGNYISFYCFY

SEQ ID NO: 350052 - protein, 146 aa, Zea mays
  unsure (1)..(146): unsure at all Xaa locations
  Clone ID: MRT4577_82420C.1.pep
DAWAALSTELRHTYNVRSMXSRKDDQVQVLRCTYKGREGKVVQVYRRRWDIHVERITRQNVNGCTVNVGIHPYKVMVTKLKLDKDRMALLDRKVRGRSGDKAKGKFTADDVDDADGGAAXTGAYLQEIDYAHSGDLMVRLPPITAY

SEQ ID NO: 350053 - protein, 59 aa, Zea mays
  Clone ID: MRT4577_82421C.1.pep
RLLILLYRLHLNNNTLLHTPHLLHLNNSYHHGAVICAHPNNPIHCRRANHVALCVYYVN

SEQ ID NO: 350054 - protein, 119 aa, Zea mays
  Clone ID: MRT4577_82422C.1.pep
HQRAHACRRLPPARAPTGYAARRTGGAPLLAGDDPPPLTRPRLGSVLCRRANDVCRRPAVVPTPATRVSSELNGNPATPSGFTPFPILDLLYSFSYNKIMCTISSHSDELIPSILLTIA

SEQ ID NO: 350055 - protein, 127 aa, Zea mays
  unsure (1)..(127): unsure at all Xaa locations
  Clone ID: MRT4577_82423C.1.pep
MQRVWCPPTWSXVMAAVKASEARGDPPLLQVVELSRIVAVEGAGTLSSADLARILVSNLCFAHNSPSLWKLLGQAVVSRLLCPLHVLALLTPRVLPQRRAQPEAYRLYLELLKCHCHVVLTVDGGWA

SEQ ID NO: 350056 - protein, 89 aa, Zea mays
  unsure (1)..(89): unsure at all Xaa locations
  Clone ID: MRT4577_82424C.1.pep
MSSEKDAALDAXLDDSPTVCDKIIKNEIPSTVVYEDEXVLSFRVIHPQAAIHILIIPKVQDGLTGLAEAEERXIEILXYLLYVAKLCDR

SEQ ID NO: 350057 - protein, 88 aa, Zea mays
  Clone ID: MRT4577_82425C.1.pep
PLPPSDHLQGYAPPPPSSPFPFSPLLSRRKSVNTFLCPRNFVPVYLFMIHYVLLFFLETLLFSVIIQDSFLDYDGARKLKLVVLLSMC

SEQ ID NO: 350058 - protein, 96 aa, Zea mays
  Clone ID: MRT4577_82426C.1.pep
QWTPSPLRGEVPPKPPPRKNFNPFRGRVFLFGTNLCLCLSLFFRLKVFGPVSFFFFPFSPSGGPVGFLALPLTFFFGPFSPPTCFFFLWLFGAHPG

SEQ ID NO: 350059 - protein, 99 aa, Zea mays
  Clone ID: MRT4577_82427C.1.pep
RFSDHGEVPPLSLQTAVPSVVHWRALAERTVLPPGWLDARCPIVLCSFALGASLVVTCEVISRVRLVAVAPSHRGVVSSALGPSYVVSARPAAVVGREE

SEQ ID NO: 350060 - protein, 49 aa, Zea mays
  unsure (1)..(49): unsure at all Xaa locations
  Clone ID: MRT4577_82428C.1.pep
KVFSPARTSRKEVCQMCWVDQHXLDSMPHPDSPETTFIQTTSHSLQVRK

SEQ ID NO: 350061 - protein, 54 aa, Zea mays
  unsure (1)..(54): unsure at all Xaa locations
  Clone ID: MRT4577_82429C.1.pep
AEQLEQPLIQLLHLLHVATIKAAALLLQFHLQXSVYVPNRAPLQVADHASADAW

SEQ ID NO: 350062 - protein, 139 aa, Zea mays
  Clone ID: MRT4577_8242C.1.pep
PSPPSGVALGSLFPLVSLLSFYGRPRGFRVKASFQVWCPLSIAKCLFFRPPCSQNQSGLFPGGWDPPLRSGFREEEFPVRARVSREGNFISFGFTGFVWEWGFFFFLYFGSVFKAPSKCRGLCFWVFVTRVSPIKLACP

SEQ ID NO: 350063 - protein, 54 aa, Zea mays
  unsure (1)..(54): unsure at all Xaa locations
  Clone ID: MRT4577_82430C.1.pep
LTFQEISPNKDTVFHYXSHIAFTMPCLYRIFHRIYVFYPYFYILSSGADLSIYF

SEQ ID NO: 350064 - protein, 56 aa, Zea mays
  Clone ID: MRT4577_82431C.1.pep
VTGIYTMTLYVSRGQGLIRFREDKANDFFKTPIFLLEVVGKPRIAAFPTIFLLEVV

SEQ ID NO: 350065 - protein, 97 aa, Zea mays
  unsure (1)..(97): unsure at all Xaa locations
  Clone ID: MRT4577_82432C.1.pep
KRAGHGTADGNEAICTGDHDGWVLEELMWTMFCNGKRVGYAVRRDPTEXDMDGPDGEMAYMRGSFEHTVGSRDSESLYMVGPPGGDCPELAIFFVRL

SEQ ID NO: 350066 - protein, 199 aa, Zea mays
  Clone ID: MRT4577_82433C.1.pep
DSSSSLLTQLIASSSFGGAASSRRRLTGTLFGYRDGRVSLSLQQNARCQPTLVVELALPTHALLRELGAHAGARIVLEVEKRAEQGTADGNEAIATTDHDGWVLEELMWTMFCNGKRVGYAVRRDPTEEDIAVLETLWAVSMGGGVLPGRSDMDGPDGEMAYMRGSFEHTVGSRDSESLYMVGPPGGDCPELAIFFVRL

SEQ ID NO: 350067 - protein, 70 aa, Zea mays
  Clone ID: MRT4577_82434C.1.pep
TWCISRRRAAGCIATLHWRPSASLGEDVEASRMTIQRFGSTSSSSVVSERRGKVLARPSFVSVSRPPSRY

SEQ ID NO: 350068 - protein, 62 aa, Zea mays
  unsure (1)..(62): unsure at all Xaa locations
  Clone ID: MRT4577_82435C.1.pep
MEKRMLLSRAQLLRVMETCRTVLRKXQAMAFARAVAAGFVIDKLLYLVTFAERFGSSRLIES

SEQ ID NO: 350069 - protein, 73 aa, Zea mays
  Clone ID: MRT4577_82436C.1.pep
NTLTGEHRLEDIVDERCGDVEVEAVEAILDIAAMCTDADPAQRPSMSAVLKMLEEEILSPCMSELCYEQHLEL

SEQ ID NO: 350070 - protein, 194 aa, Zea mays
  Clone ID: MRT4577_82437C.1.pep
PASEDNHFTGEVPSALVGLPRLREVYLGGSAFSGEIPASLGNLSWLEALSIPRNRLTGGLSGELFQLGNLTFLDLSENNLAGEIPLAIGNLLALQSLNLSGNAFSGHIPTTISNLQNLRVLDLSGQKNLSGNVPAELFGLPQLQYVSFADNSFSGDVPEGFSSLWSLRDLNLSGNSFTGSIPATYGYLPSLQVL

SEQ ID NO: 350071 - protein, 79 aa, Zea mays
  unsure (1)..(79): unsure at all Xaa locations
  Clone ID: MRT4577_82438C.1.pep
MLLPIKELQEQKLNKSCRMSCRGRAQLLRVMETCRTVLRKXQAMAFARAVAAGFVIDKLLYLVTFAERFGSSRLIDSDS

SEQ ID NO: 350072 - protein, 75 aa, Zea mays
  unsure (1)..(75): unsure at all Xaa locations
  Clone ID: MRT4577_82439C.1.pep
MLLPIKELQEQKLNKSCRMSCRGRAQLLRVMETCRTVLRKXQAMAFARAVAAGFVIDKLLYLVTFAERFGSSRLM

SEQ ID NO: 350073 - protein, 72 aa, Zea mays
  Clone ID: MRT4577_8243C.1.pep
DQRRPSSLGPMLPMDHKPLLCAFSGFQKDPLLSRENHPGSELTFSSCMFVAVAFPPWFSPFNSLCSGCIFGS

SEQ ID NO: 350074 - protein, 138 aa, Zea mays
  unsure (1)..(138): unsure at all Xaa locations
  Clone ID: MRT4577_82440C.1.pep
KKKKKKKKKGKRKTKKKKKKKKKKKGEGGKRGXAGGPRAGERRNRPMGGQKKNQGAGVQKGGDGKNLDKXSKGNRGRSXLKGGGKRXRGRHGGPFQKGANPKGKRGGAWKGGIRGGGWGGTSKGDRKGGNPQRAGSLG

SEQ ID NO: 350075 - protein, 93 aa, Zea mays
  Clone ID: MRT4577_82441C.1.pep
VLLAATRASVRKDPINSSVHSRISRTDPGVQPSNRTPRARLAAEALLTRLFDVTDIGPTLAKRVTIRLQGSTLDLCFLAIARVPVFSGNRMNV

SEQ ID NO: 350076 - protein, 75 aa, Zea mays
  Clone ID: MRT4577_82442C.1.pep
IYSWSRCLLRNGFASAFIYDAGVQGKAQQFDGHIVMTVPCSPMLRLSAAVSSKFFPLYHFLRHIINISSPTFFIS

SEQ ID NO: 350077 - protein, 85 aa, Zea mays
  Clone ID: MRT4577_82443C.1.pep
VRDRSGGRCKVLYIPWEWMSSFGVISHLRMASLKPPKEGILRAASPVQSPPFAHSEDLFLQGVRFASRVRRLVGGFREASRRGFQ

SEQ ID NO: 350078 - protein, 105 aa, Zea mays
  unsure (1)..(105): unsure at all Xaa locations
  Clone ID: MRT4577_82444C.1.pep
ASGHACAHAFTDAWGPGGGVKPRLPWPELKRKCXRELADIPAYCRCTALSILMDGAIPPGPDAQLEGRLEDLAGCPREVHRGFADTLVKDVECNLATISGVFECP

SEQ ID NO: 350079 - protein, 68 aa, Zea mays
  unsure (1)..(68): unsure at all Xaa locations
  Clone ID: MRT4577_82445C.1.pep
WRCMHIVSWXMRNYICVETAPTISWLIVMVTLRTPVYWIGVCWAVLSEACNFVYVHVWDSGRFLELRX

SEQ ID NO: 350080 - protein, 65 aa, Zea mays
  Clone ID: MRT4577_82446C.1.pep
TGAQREFICPRPAWDEAPKVQLDRSQPLLWLTQVQEIWNSRKGMIVLRGTFIVRLVLNQGINEII

SEQ ID NO: 350081 - protein, 55 aa, Zea mays
  Clone ID: MRT4577_82447C.1.pep
TKSLSSSQAYILGRLDDDIKELYLVIEIGHHPIRMTKDVLSTLEYIQIFRTKRAK

SEQ ID NO: 350082 - protein, 99 aa, Zea mays
  Clone ID: MRT4577_82448C.1.pep
VFKFVSNDLLTSSELSLWAVFHFLNHQFPISIYFVTIIYLQLWIFLAVYGHSHYYVCWVVGAKSDPSLTARRIFFLRDRVKLRHQVIVPVSIEPICSAN

SEQ ID NO: 350083 - protein, 118 aa, Zea mays
  unsure (1)..(118): unsure at all Xaa locations
  Clone ID: MRT4577_82449C.1.pep
FEAMRKGKXSEGEAXLRXNLVMEDGKMDPVAYRVKYTPHHRTGDKWCIYPTYDYTXXLXCDSIEHITHSLCTKEFQARRSSYCWLCNAXDVYCXCXXEYGRXXLHYVVVSKRKXPAVW

SEQ ID NO: 350084 - protein, 74 aa, Zea mays
  unsure (1)..(74): unsure at all Xaa locations
  Clone ID: MRT4577_8244C.1.pep
DKVFSAFGYVHKIATFEKAAGFQALIQXTDAATASAARESLDGRSISSYLLPEHVTSYCLRISFSAHKDLNIKF

SEQ ID NO: 350085 - protein, 141 aa, Zea mays
  Clone ID: MRT4577_82450C.1.pep
MAAIYSLYIINKSGGLIYYKDYGSAGRMDTNDSLRVASLWHSMHAISQQLSPVSGCLGIELLQADTFDLHCFQSLTGTKFFAVSEPGAQHMESLLKFVYELYTDYVLKNPFYEMEMPIRCELFDINLTQAVQKDRVTFLGR

SEQ ID NO: 350086 - protein, 106 aa, Zea mays
  unsure (1)..(106): unsure at all Xaa locations
  Clone ID: MRT4577_82451C.1.pep
GTSRPAGPGFRHPPDGEVLLPMPGDAYILNHXAQERGMELPYSCRAGACSSCVGRXVSAIRPRFDQTLLHDXQAFEGFVLDCIAYPTSHLAIHRHEDDAARRVTLL

SEQ ID NO: 350087 - protein, 127 aa, Zea mays
  Clone ID: MRT4577_82452C.1.pep
AWGPGRRRPWNWRGRELLLILCGASSPLTRSRSGLQQVTVLVRRLLLRISGWRISCGLWETEEGGPCCRSMANVSSRSTRQRLGMAAASIGPLQPPSPWISGRRHRLEAGRWRRRTGPRRGKAWRRR

SEQ ID NO: 350088 - protein, 129 aa, Zea mays
  Clone ID: MRT4577_82453C.1.pep
MAYKRLLSLVALLLAAVFLAVSRASNDHQGQPRNDAGENKLHVQDYRGHRGGCGGEGGYPGEGGYPGRDYPGGGGYPGGGRGVYCKCEGCNRPDYADWRCMLARRRCRGGRVPPGLHIPRPLREKQGSL

SEQ ID NO: 350089 - protein, 132 aa, Zea mays
  Clone ID: MRT4577_82454C.1.pep
PRRSSSSGLSVGSRSSPSMELERQRAPTDLVRGVVAVDEVALGPPAGYSPRPLLVRCLLLRISGWRISCGLWETEEGAPCCRSMANVSSRSTRQRLGMAAASIGPLQPPSPWISGRRHRLEAGRWRRRTGPR

SEQ ID NO: 350090 - protein, 195 aa, Zea mays
  unsure (1)..(195): unsure at all Xaa locations
  Clone ID: MRT4577_82455C.1.pep
MQGIQDLVQDELPPMSSKKKTVHKRLKNFTATEDECLVSTYLNVSTDPIVGVNQPIKGYXQRIANYCEEHKKTPVSPTISSLQHWWADIQRDTSRFCGFFAQVERRKQSGVNESDKVGLWFGYSIQLXSAFKFMHCWLMLKDEMKWTTQLVGRQLILSPTRQQVRSHALRTINNITHFGSIPCGEVVEHGRDITP

SEQ ID NO: 350091 - protein, 96 aa, Zea mays
  Clone ID: MRT4577_82456C.1.pep
KANSPHLHNLKAVQISLRRENYRRLGPHATRDHLAKPFVFLMPASGFRPARLLWGRREQLHIPWPDSHFILAHCRFGNFSCWEPNKGFTGWFPIWG

SEQ ID NO: 350092 - protein, 176 aa, Zea mays
  Clone ID: MRT4577_82457C.1.pep
CMMNSRRQGCFFFFFFCTSEQQYLKDARTIKNNNERRYSSFPPPTQCKKIFRKKEKTRAINETGRRRRSNLQPIDQPIAGVRSSFPYEDCMRHATDRDRVQETGTERCGGGGRSGASTSSPRAATGCARSRRPGSWPRPSPPPRRARRARPPPARASGRSRGRRRCGPGPPLVPLV

SEQ ID NO: 350093 - protein, 89 aa, Zea mays
  Clone ID: MRT4577_82458C.1.pep
SIFKIQVQFGFGCRWRIPNLHRPATRRVSEEDKTAASAEQPKRAPKLNERILSSLSRKSVAAHPWHDLEIGPDAPAAFNVCVEITKGSK

SEQ ID NO: 350094 - protein, 73 aa, Zea mays
  Clone ID: MRT4577_82459C.1.pep
GSTGASKLALVLLTIGHFKFSTLLSFSCMSRFILMKHFESIRLKNLKVKNPERSHYRTHDTYLPDEKLFLRNR

SEQ ID NO: 350095 - protein, 98 aa, Zea mays
  Clone ID: MRT4577_8245C.1.pep
PRRWDEKDRGGGGSGRPTRDCITVLEGDIQNTNTLALARAHVLLVNTYASVIERMLEGYGGDRTHRRRLLGLPPRWRTAEGTEADRWDQPNARLPSSI

SEQ ID NO: 350096 - protein, 79 aa, Zea mays
  Clone ID: MRT4577_82460C.1.pep
SKPCGDFDSSVLSPGIPMGAALTKILQELQEFIWLVPENNSQCLIRLGLGLTLRKRRKELMIKSLSLKLICFFSTFTES

SEQ ID NO: 350097 - protein, 59 aa, Zea mays
  Clone ID: MRT4577_82461C.1.pep
SQDKRCYFKKKKKGGKREKKKKKKKKKRKKHAGGPLLKKVPRGRAGLKEPIFFFRASTT

SEQ ID NO: 350098 - protein, 58 aa, Zea mays
  Clone ID: MRT4577_82462C.1.pep
RYLRQRRVPLRRQGPQGPPPGVLRRQGGDPVPLKRIGVQDGVIFAAEPLLCPDFPKFF

SEQ ID NO: 350099 - protein, 83 aa, Zea mays
  Clone ID: MRT4577_82463C.1.pep
AEKINLKCSAIYSFQNSFHFLKHTVHFCRTCIFSCTLKTVLASGELLLTVSTETLFQWTNIVAWQLMPAFWGIAANLQVTLVG

SEQ ID NO: 350100 - protein, 222 aa, Zea mays
  Clone ID: MRT4577_82464C.1.pep
MSMFNRIFGKPKEQANSSALATLDKLNETLDMLEKKEKVLDKKAAAELERAKEFSKAKNKRAAIQSLKRKKLYEQQIEQLGNFQLRIHDQMIMLEAAKATTETVDALRTGAAAMKAMQKATNIDDVDKTMDEINEQTENMKQIQDALSTPLGASADFDEDELEAELEELEGAELESQLLEPVAALPVHPVHVPGNKQPARPAPQKATAEDDELAALQAEMAL

SEQ ID NO: 350101 - protein, 172 aa, Zea mays
  Clone ID: MRT4577_82465C.1.pep
MLETLEASKDGKVRDARNGENNGTEDGGNEGMRSGNVGSNAEAEESHGHGNNERAEHTEDDKGQECSHNENSASVGILGDGDSEAREGDINAEAEQSQADGGGNSKAEDAEHNENTKTDANSSKNGTTAAGNGKTDVDVKGATAMAQLKEALCDEMDVDCKGGGVGPRLCRS

SEQ ID NO: 350102 - protein, 222 aa, Zea mays
  unsure (1)..(222): unsure at all Xaa locations
  Clone ID: MRT4577_82466C.1.pep
MSMFNRIFGKPKEQANSSALATLDKLNETLDMLEKKEKVLXKKAAAELERAKEFSKAKNKRAAIQSLKRKKLYEQQIEQLGNFQLRIHDQMIMLEAAKATTETVDALRTGAAAMKAMQKATNIDDVDKTMDEINEQTENMKQIQDALSTPLGASADFDEDELEAELEELEGAELESQLLEPVAALPVHPVHVPGNKQPARPAPQKATAEDDELAALQAEMAL

SEQ ID NO: 350103 - protein, 222 aa, Zea mays
  Clone ID: MRT4577_82467C.1.pep
MSMFNRIFGKPKEQANSNALATLDKLNETLDMLEKKEKVLEKKAAAELERAKEFSKAKNKRAAIQSLKRKKLYEQQIEQLGSFQLRIHDQMIMLEAAKATTETVDALRTGAAAMKAMQKATNIDDVDKTMDEINEQTENMKQIQDALSAPLGASADFDEDELEAELEELEGAELESQLLEPVAAPPVHPVHAPANKQPARPAPQKATAEDDELAALQAEMAL

SEQ ID NO: 350104 - protein, 222 aa, Zea mays
  unsure (1)..(222): unsure at all Xaa locations
  Clone ID: MRT4577_82468C.1.pep
MSMFNRIFGKPKEQANSNALATLDKLNETLDMLEKKEKVLEKKANAELERAKEFSKAKNKRAAIQSLKRKKLYEQQIEQLGNFQLRIHDQMIMLEAAKXTTETVDALRTGAAAMKAMQKATNIDDVDKTMDEINEQTENMKQIQDALSAPLGAFADFDEDELEAELEELEGAELESQLLEPVAAPPVHPVHVPANKQPARPAPQKVTAEDDELAALQAEMAL

SEQ ID NO: 350105 - protein, 82 aa, Zea mays
  Clone ID: MRT4577_82469C.1.pep
QIIFPLEEAAGPPGGVVRPKDFLLGLAKVRPGRKGGLPVGSGILPVVPSFSTVGVRKARGGSLEFLEFFKHLSFSSRAVVWR

SEQ ID NO: 350106 - protein, 407 aa, Zea mays
  Clone ID: MRT4577_8246C.1.pep
MEGWASAAAYTAAALASAAAATVVALRLVHRHLLHYAEPTHQRFIVRIILMVPVYAVMSFLSLVLPHQAIYFNSIREIYDAWVIYNFFSLCLAWVGGPGNVVVSLNGQSLKPSWLLMTCCLPAIPLDGRFIRRCKQGCLQFVILKPILVVITFILYAKGKYEDGNFSVNQSYLYITIIYTISYSTALFALALFYAACRDLLQPYNPVPKFIIIKSVVFLTYWQGVLVFLAAKSGFIKNAEKAAYLQNFVLCVEMLIAAIGHRFSFSYKEYAGSNARPFGGFRGSLLHAMKFNDFYHDTVHQFAPTYHEYVLYSNEGEDEPTKYSPSTMVPTGEHIVELAEVTVVNSKAPGMSRFLMYEPDQAETMPSQVMEANRTASAEPYDLTSFLNVELSDHPDEVPAIPDAREQ

SEQ ID NO: 350107 - protein, 61 aa, Zea mays
  unsure (1)..(61): unsure at all Xaa locations
  Clone ID: MRT4577_82470C.1.pep
RVFGFXXXNQIKLRGYTCSFKGFFFNLFFFWEQKLVILPGKLWVSLFTPMKPCFIAFFPML

SEQ ID NO: 350108 - protein, 96 aa, Zea mays
  Clone ID: MRT4577_82471C.1.pep
TPPLDHLAPESKFQHVCCRENLLVPWRPRSPYPRRAGEASCRREDEYSAPLCTGALFASRPSRRAACWMTLTPLGYIVSPCHVAPFVLPMWWGQAP

SEQ ID NO: 350109 - protein, 86 aa, Zea mays
  unsure (1)..(86): unsure at all Xaa locations
  Clone ID: MRT4577_82472C.1.pep
IKVQWVGFXDKLECGGGLLRQALLLAYKSDFQVCDVERVDDVRXIEYRHDGAVSFIQVLKDPIFTTESRDRFVDVRPSLALACDRV

SEQ ID NO: 350110 - protein, 99 aa, Zea mays
  Clone ID: MRT4577_82473C.1.pep
PARKGERRLTTVTGTIARKRGEAGVPDDMHMTREQSLLDATRDNLYEHIQRPPRLRQPRLRRWRAPPEGSGAARDHCRRGYSNLDPPVMRSHRQLPPQS

SEQ ID NO: 350111 - protein, 110 aa, Zea mays
  Clone ID: MRT4577_82474C.1.pep
TNSYLINTVLFKVLPVCRDNKNRPTITRAKRITTTKKSTHHIFRSSGHTRRTDDGSRKQLGLPVTGAHSRLATNRLDHLLDLEARAVAVSGGVLVHAVSADHGFTQALGH

SEQ ID NO: 350112 - protein, 72 aa, Zea mays
  Clone ID: MRT4577_82475C.1.pep
FYQLKRMLLLQTSLNGLRHKIIQSRIICNGTITRSSWDVSLQLETTNFGRACSIKCCAVGGRPWMKELVCFI

SEQ ID NO: 350113 - protein, 82 aa, Zea mays
  Clone ID: MRT4577_82476C.1.pep
NIIQKGNKYRFLDDRSSIRRQFRREWIVGEASLLFTADCDLTLPVLRKKGDLTVFIILESPPHSNASFRIVGPSSRSPQLSL

SEQ ID NO: 350114 - protein, 302 aa, Zea mays
  Clone ID: MRT4577_82477C.1.pep
HEVSLDSRSDFAIVDNKVRKLIEDLKNERTDPERAAIGELLVLSRHNMESRISIANHGAIPFLVNLLYSADPSMQENAVTVILTRPPTRNNKIGIASADAIKPLIHVLETGNPEARANSAATLFSLSVNEENKAKIGRSGAIKPLVDLLRDGSAQGKKDAATALFNLSIFHENKARVVEAGAVKPLVELMDPAAGMVDKAVAVLAILATVQEGRNGIAQAGGIPVLVEVVELGSARAKENAAAALLQLCTNNSRFCSLVLQEGAMPPLVALSQSGTARAREKAQVLLSYFRNQRQVGKVTRR

SEQ ID NO: 350115 - protein, 190 aa, Zea mays
  Clone ID: MRT4577_82478C.1.pep
TRFAADLGISFEFNAVAFDPLDPLPPTGLSVAPGDAVAVHLSVGSGVPSAATFRVVKELRPAVVVCVDHGCHRGDLPLSHHALSVVRSSAAFLESLDAAGAPADAVARLEEYVVRPRVERLLLGDRMPPWRTMLDSAGFAPVQLSNAAEAQAECLVRRTPTPGFHVEKRQAALALRWQDSELVMVSAWRC

SEQ ID NO: 350116 - protein, 154 aa, Zea mays
  Clone ID: MRT4577_82479C.1.pep
ALETIMQLLLFTSCKHKDILLRKACVQIFVNLVKDWCSNSEDKVPGFRVFMIEKFATNCCLYSVLDKSFDLRDANSLVLFGEIVLAQKIMYERFGEEFIMNFVAKGLPEVHCPPDLAEQYYQKLKGNDIKAFRSFYQSLVEKIRPQGNGSLVFR

SEQ ID NO: 350117 - protein, 55 aa, Zea mays
  Clone ID: MRT4577_8247C.1.pep
EQRDYDAEYLTGCWGQRFPYHFSASHELSHMFARRGQKRTAAVMHQLLAHCARLI

SEQ ID NO: 350118 - protein, 88 aa, Zea mays
  Clone ID: MRT4577_82480C.1.pep
VACHDLTIRLDIILIRAYLPFQAGHYQSTFFSSRALVVHKRSESLGNINFPANHSKKFWRSPKLQSPQQGTNRTENTPHLSKCMNTVR

SEQ ID NO: 350119 - protein, 58 aa, Zea mays
  unsure (1)..(58): unsure at all Xaa locations
  Clone ID: MRT4577_82481C.1.pep
TPLVHQIHIDEAMCDTPDSRARTPDPEQISRISLPSTRQVPRSRHLSGRRSLAAXARE

SEQ ID NO: 350120 - protein, 73 aa, Zea mays
  Clone ID: MRT4577_82482C.1.pep
FFSTIKKGFGDFFRVFIIPTKPGLVIIYFKDKNSIYKTPQKHSLCTKINQFLRVILNQTMNKLDQVHLKSMAL

SEQ ID NO: 350121 - protein, 45 aa, Zea mays
  unsure (1)..(45): unsure at all Xaa locations
  Clone ID: MRT4577_82483C.1.pep
XSKSNQALNIRKEPPSHSKHSYKSAIFPQYNPKSNPYQSKLGATY

SEQ ID NO: 350122 - protein, 71 aa, Zea mays
  Clone ID: MRT4577_82484C.1.pep
SMSWTFVGPRALLQLCQPLSLAHPTYSCLVFFTVLDLPCTFNKLRRLSFRPCVSRHLKLQIAVVQISHHAD

SEQ ID NO: 350123 - protein, 110 aa, Zea mays
  unsure (1)..(110): unsure at all Xaa locations
  Clone ID: MRT4577_82485C.1.pep
GTSSRPGAVFGLSXVRPGVALQGPLPGAHTTTSSFPRCDRASLSDGGALDVPAESVEERENSIDLNKGREPAQRQKASRADEKNHRRQRPRHGEEQAEEPHPRQDHLIGH

SEQ ID NO: 350124 - protein, 61 aa, Zea mays
  Clone ID: MRT4577_82486C.1.pep
EVLLNLDPGPDAWSMMNQTSRLHEYRTTLSGMNRRRSPGQNSWKQLQSKRLFLHSWMFRPL

SEQ ID NO: 350125 - protein, 136 aa, Zea mays
  Clone ID: MRT4577_82487C.1.pep
MSGTAAPRYAPDDPTVPKPWRGLVDGTTGYLYYWNPDTNVTQYEKPVPPEAQLPPPPPLPPPPPRARGRDRRDRSRSRSRSRSRTPPRREHRDRDRDRRRHDEHDSFKSSSSHHHLPPAATIPTAAADDPSAEAYR

SEQ ID NO: 350126 - protein, 600 aa, Zea mays
  unsure (1)..(600): unsure at all Xaa locations
  Clone ID: MRT4577_82488C.1.pep
MANADADEAPLLSVEHLRPGSCSRELELREFRDRYVIRSLDGAAAFAVLRSGGSIRPLSPEEAVAESDCKVSRIYGVVGTIRLLAGSYVLVITSQKDAGSYLGSPVYQVNSMKFLCCNEAIKHLTPQERRDEAYFMSLLRIAETTCGLYYSYDRDLTLNLQRASKLAAGRVHKPLWKQADPRFVWNKNLLEELIEAKLDEFIIPLIQGSFQSAQFTLKDRPVRITLFSRRCNRRLGTRMWRRGANLEGATANFVETEQLVEYEDLTSSFIQLRGSIPLLWEQIVDLSYKPRLSIIEHEETHKVVQRHFHDLSQRYGKIIVADLTDKRGDEGDLSNAFAAEMDRIPGVRYIHFDFHHVCRGGNFDNLQALYNQIEEAIHKQGXRYFLMNTKGEILLEQSGVVRSNCIDCLDRTNVTQSFLARKSLDSQLQLMGALLSSESISLSDNIHDTFKKLWVEHGDELSLEYAGSYALKGDLVRYGRQTLPGLIKDGMSALSRYYLNNFHDGVRQDALDLISGYYTVSQGSSSPFHNGVDSSSYLPVASAIIVGGITATTFTLSQVGRNAQHLISSIICAGLTVGVVALVKANGKQFCSRPRLCGLI

SEQ ID NO: 350127 - protein, 187 aa, Zea mays
  Clone ID: MRT4577_82489C.1.pep
MAETATKQATPSFVGTSKVVQTDYPLIDNDPHFKRVVGYARTSDYLAGTAAAAFAPAALYALEKFAPSHVGKGGFAKAMRLAGGIGVLGGFLYFYQRSALRFYGATENSREIEMDMREMVDKVKKGEPLYGASRLSPHLQGVAARQSRYSALFLSTIPWFNFVNHNQHGVDTAKYYQQAERELEAER

SEQ ID NO: 350128 - protein, 64 aa, Zea mays
  Clone ID: MRT4577_8248C.1.pep
SSADAWADAWADAWVLADVISIPKTMENYRLLYDTKGRFRLHPIRDEDAKVRPILLHIISHCSS

SEQ ID NO: 350129 - protein, 165 aa, Zea mays
  Clone ID: MRT4577_82490C.1.pep
PRTNCRDLPTPPVMSALFSSPSRSTCLMARPTSTSARARSSRGTRLSLTPLPGMALRPDFSHETDASCMPFAPPKASVSLYNSTPAHTISSSPVSRFTPPSFSFFNSISSLTFLLLNLLFYPFCSHFSIHPSMLLFLAFAVQTACDCSTLQQGTDHHHHQWACCC

SEQ ID NO: 350130 - protein, 99 aa, Zea mays
  Clone ID: MRT4577_82491C.1.pep
SGRNSLCTVGASVSASIVPLQVDGSERVIMPPYHYGYLLRLHLTRPPLRCETHFHLLMVIGSAGSGKSRDSRVLRARTTPERTRLRGDVWRGSAGSTEA

SEQ ID NO: 350131 - protein, 93 aa, Zea mays
  Clone ID: MRT4577_82492C.1.pep
GRVGGSPLSSASRPRRTTTRQPWTPALISWRVRTTAAGAPVRDTGNGGRRCKASTRPRADMSAQYTHHTTHNRRAVIIDRWTCIFGDHLAGLD

SEQ ID NO: 350132 - protein, 57 aa, Zea mays
  Clone ID: MRT4577_82493C.1.pep
LGITVGSLGLNPDLGEGHLAFGLSLVCFGFQGLGLAPSVVSRWGDFPGGQGPPPALN

SEQ ID NO: 350133 - protein, 141 aa, Zea mays
  Clone ID: MRT4577_82494C.1.pep
KKKKKKKKKKKKKKKKKKKKKKKKKKKKKKKKKKGGGHKMGGRASVLFPRAPPSMGPPSSLPRPFYGLNLYFCCPLNSISLALAFNNPWPGQTLAFPHLSPFPPLPLFPNCPYSHKRPPPFPLPNCSPALSPNGPPPLAAL

SEQ ID NO: 350134 - protein, 46 aa, Zea mays
  Clone ID: MRT4577_82495C.1.pep
VWSVANQTCKNFYIYSTSYNLQFREQSFCFCFCLVHVSFIEVASHF

SEQ ID NO: 350135 - protein, 71 aa, Zea mays
  Clone ID: MRT4577_82496C.1.pep
EHRIPANSNFLQLHLTFNSKGVLCVALKSLVTSSYRLSLSRLSKCSKKVLFNGCIQVLREDHGVTWWQDLK

SEQ ID NO: 350136 - protein, 59 aa, Zea mays
  Clone ID: MRT4577_82497C.1.pep
LQKQTKLTPPESTDTPSNTLLPQRQPATLTHLFTPIVRYKIQVLFCPRQISPMMRQVTN

SEQ ID NO: 350137 - protein, 88 aa, Zea mays
  Clone ID: MRT4577_82498C.1.pep
NTRKLYYESGNCIHFQNCLQLLIQLVLIDQPRLQRTHSTADTRELGLLWRRPNNILVAASCSFPALARSSPAASSALLILSCLESVRS

SEQ ID NO: 350138 - protein, 415 aa, Zea mays
  Clone ID: MRT4577_82499C.1.pep
MEGSLEARPGVLLVGAPGVGKRTILSQFLGAEIPDVHDLSSGVLCQGWTIETKYYSADLSIWTANLGEEFSLDSLPHLDRVAALVMVFDMSDESTLLTLQSWAASVDIQRFEILLCVGNKADLVPGHSVHVEYRRRMQNLGESSSDPHPDYFNFGINESEGCSLLSEEEPCIKIRNSTAQWCIEQNIEYIEACASNADFDKCLSVDGDSQGLERLLGALSAHMWPGMILKSGNRITVPSLVEKQESTDDESNYDFEYEVLSHGSDDQWEFIGETSTSRRFERPNEPDGAQDHTHQVVNAGTDSSASNSPPTNTPTETAEENTVTQSNKTDNSDHVDKTTAYSTEDHQSDLREANHLFEDEHYGLDDLEKIMSEIGNMRSNLRLMPDFQRREMAAKLAMKMAAMFGDDDEEAFDDI

SEQ ID NO: 350139 - protein, 51 aa, Zea mays
  Clone ID: MRT4577_8249C.1.pep
VVLNELSSDASEVCSLTCVTVRGQYGGRHYRDSGGFYCGGGSATAGGAHGV

SEQ ID NO: 350140 - protein, 60 aa, Zea mays
  Clone ID: MRT4577_824C.1.pep
PLVGARRTPLLCAPRGTPPYTGHLWGDDYYFFFRAPLKTKPATATLVPKTTQSSGKQPRG

SEQ ID NO: 350141 - protein, 90 aa, Zea mays
  unsure (1)..(90): unsure at all Xaa locations
  Clone ID: MRT4577_82500C.1.pep
LNVSVSVTXQSRAYFLIFLWAIHLALRIRPPPLPCFSPHPVILTKGIRFSNKISPAIFLFPKKKKKKKKKRKKKKKKKKKKVLCVVTTAK

SEQ ID NO: 350142 - protein, 129 aa, Zea mays
  unsure (1)..(129): unsure at all Xaa locations
  Clone ID: MRT4577_82501C.1.pep
PPPFFYIPPPPPPHGXGSLLHKKTHPPKRKPTNTTPALTTGKPANPHPVKPPSCPPPPPAXTTTKTXKPRPQXENLPLHGQKRAPNPPXPQKPFPNXSPLTGADNFTIKPTPRPRNPPPTPMKKKLSPP

SEQ ID NO: 350143 - protein, 158 aa, Zea mays
  Clone ID: MRT4577_82502C.1.pep
DVPPSTRRALPLELRALRPPTPEVSPRRTTHHGWRLENKLQGHGDGDLGTMDEETSTINRGGLSASTWEERKRDHQVAAGNGQAEAGGEFQGGAAPEVFSTKGKRPGAIWGDPAGRKLNHGDPGRPWELGIGLGEHARNLAGASSKGAGIQGTMEKLS

SEQ ID NO: 350144 - protein, 97 aa, Zea mays
  unsure (1)..(97): unsure at all Xaa locations
  Clone ID: MRT4577_82503C.1.pep
ALKKGLDYIDVVALKKMNNNKKLVKRLAKKYHAFLSSXAIIKQIPRLLGPCLNKASKFPTLVTHQEFLESKVNETNATVKFXLKKVLYIVVTFCNFS

SEQ ID NO: 350145 - protein, 114 aa, Zea mays
  unsure (1)..(114): unsure at all Xaa locations
  Clone ID: MRT4577_82504C.1.pep
WAPAQRTLHGLQPPEAXPARCFPPKTTSPNCAEIPEQAKRRPQISRLRELPPPKGPVESVVKLKGLGIDPLPQKYPVLNVCCDVHENPFSLPPLLFFRRRSHVIVSKKKKKIFR

SEQ ID NO: 350146 - protein, 86 aa, Zea mays
  Clone ID: MRT4577_82505C.1.pep
CRTTLALPADLSPTVLAPPSPQCRLPLLLSIHGCARPPPQAVPWISMVEFFPAESPQWCLVFFPWSKTPLHLTPSVDGRRLSIHGT

SEQ ID NO: 350147 - protein, 78 aa, Zea mays
  Clone ID: MRT4577_82506C.1.pep
EQAAGAWGWRSRYHGWRDVDHQQRGLSAEVFSTKGKRPGTIGGILQGKTRPWRSRARLEVEAEHSHRWRGAGAVDTGG

SEQ ID NO: 350148 - protein, 115 aa, Zea mays
  Clone ID: MRT4577_82507C.1.pep
VPWMERRRPSTEGVKCRGVFNQGKKTRRHWGGSCRGKTRPWRSRAAMGELGIGLGVYGEEQGMERGAGRMPQPEEVEADGVHGWGRGRSPGRGCTGCCHGMGREAGGCHPGRPRG

SEQ ID NO: 350149 - protein, 135 aa, Zea mays
  Clone ID: MRT4577_82508C.1.pep
AWPSPGAPPGGGTPSSGSAPGRTPCWGGTSARSRPPPRRTLGTPPSAPNRTSSSARGGPDPASFQEVGGHGAFPSLAARTLSCSRNKATDDFDFVVMYVAPIYLCKYGDCVHDAIGRSRKEHGRSMVAPSWRPGP

SEQ ID NO: 350150 - protein, 48 aa, Zea mays
  Clone ID: MRT4577_82509C.1.pep
LNNLASYRRSDPLIMVLDSIGFFFFVVVVVVIPRALLRKSFYFWIFHV

SEQ ID NO: 350151 - protein, 78 aa, Zea mays
  Clone ID: MRT4577_8250C.1.pep
SNVTKMRRRLSILLALYPPTALVHHDGRELEEVGDLILGFPGICEVCISQYCIMRHVFPSTHVFYINCFPFLVDRSRW

SEQ ID NO: 350152 - protein, 43 aa, Zea mays
  Clone ID: MRT4577_82510C.1.pep
VEHYTSCYQIEPLMFPIPQCHSPIYLMYGSSRKIEKFVGDALA

SEQ ID NO: 350153 - protein, 80 aa, Zea mays
  Clone ID: MRT4577_82511C.1.pep
KKKNKNLSHTKYQKTKTVDMGGTQSYLTVTLVAHIACCRLKRSKPSYPSLPWDNFFFGVPTFLFFAPVSKSPPFEYLFIP

SEQ ID NO: 350154 - protein, 59 aa, Zea mays
  Clone ID: MRT4577_82512C.1.pep
THIKLVHFSQTGHLLSTLMCTHPCFHKTPGFLWCNLCSGKEKGVEADLQEFQDFDEFED

SEQ ID NO: 350155 - protein, 80 aa, Zea mays
  Clone ID: MRT4577_82513C.1.pep
GRDPSSPSPDLNRVGPGIPSRRLLVFLRSQTAIHFRASRNRQSSFDDQGIELFEFYKAEDPEHLFGEGKCPLTYYVPFTL

SEQ ID NO: 350156 - protein, 70 aa, Zea mays
  Clone ID: MRT4577_82514C.1.pep
CVLTLAFTKHQVAFGAIYAQVKKASRWISRSSRTSTSSRIRLATSPSQLPVVGCLRWQRFDSVYFDLYYV

SEQ ID NO: 350157 - protein, 71 aa, Zea mays
  Clone ID: MRT4577_82515C.1.pep
QNQIKEPLQPASAEQVLCLDPIDGPTAKPTTPLVPLINQLRASHSTLMVALLSRVVTPRTGPYGEALRKTA

SEQ ID NO: 350158 - protein, 98 aa, Zea mays
  Clone ID: MRT4577_82516C.1.pep
CLCPRRRPRSAPALVAPAPRHLSLLLRPLLRRGEARPEPRRRGAAGGDQLWGSSRRVALASRRAAASESARETGREGAMTRAVAEDKLSNPANNLLAS

SEQ ID NO: 350159 - protein, 48 aa, Zea mays
  Clone ID: MRT4577_82517C.1.pep
MAACAALGAQCESGSRRVSSPVTIVPGSSRRPFLACTRSPRSRFVFEL

SEQ ID NO: 350160 - protein, 48 aa, Zea mays
  Clone ID: MRT4577_82518C.1.pep
TVKDWPVKKAMGKAKLALKCAEMRRRDRRALATVVLPELTRLRTLVHA

SEQ ID NO: 350161 - protein, 72 aa, Zea mays
  Clone ID: MRT4577_82519C.1.pep
LVRLLLLVESHVLALTQVINPKYPFQTERIPLTIIIVIIITILLITTCKPYISDQVSLIKEDPKAALNREHG

SEQ ID NO: 350162 - protein, 92 aa, Zea mays
  Clone ID: MRT4577_8251C.1.pep
EGYAESLRNYLEGTCVEWLRRYLENGKDTLLRANPSKAHVTHHSISGREVTLKCWALGFYPEEISLTWQRKGEDQTQEMELVETKPLRDGNF

SEQ ID NO: 350163 - protein, 107 aa, Zea mays
  unsure (1)..(107): unsure at all Xaa locations
  Clone ID: MRT4577_82520C.1.pep
ATAFNPILRNARPQGLHKNGPPEPKLPGFPSLRVFYELFQEQKYPPFKTFVRRKHANLGYNPKVDPVAPLERSKAEIPIXEILEVAQPKLEPFSFGKGPGLPVLTLP

SEQ ID NO: 350164 - protein, 65 aa, Zea mays
  Clone ID: MRT4577_82521C.1.pep
ALTEFGVRRDKTLFFLKQKHLKKKGGAKTTMLPPGGGRGPISPYTGGVYRRSLAGFLQRGGGKTP

SEQ ID NO: 350165 - protein, 109 aa, Zea mays
  Clone ID: MRT4577_82522C.1.pep
MLSSSKAGGNGDGEHLVCVTGAGSFIGSWVVKELLLRGYHVRGTARDPAHRKNAHLLAMDGAGERLNLCRADVMDGNSLRAAFHGCRGVFHVASPVSNDPVGSLPPLLL

SEQ ID NO: 350166 - protein, 37 aa, Zea mays
  Clone ID: MRT4577_82523C.1.pep
NKAKRHKQPANATESAKDRTERQAKSQDTSPQPDETL

SEQ ID NO: 350167 - protein, 32 aa, Zea mays
  Clone ID: MRT4577_82524C.1.pep
FTKSLPVQRSGGSENSFKVKFSIFKGIHRHNY

SEQ ID NO: 350168 - protein, 88 aa, Zea mays
  unsure (1)..(88): unsure at all Xaa locations
  Clone ID: MRT4577_82525C.1.pep
REKVLYAPGRLTGPAADWWDAYCAAHTAVNTITWAEFSTQFRNYHIPAGLMKIKRKEFLTIKXGGMSLSEYRDKSIQLSRYAPRDVEK

SEQ ID NO: 350169 - protein, 46 aa, Zea mays
  Clone ID: MRT4577_82526C.1.pep
TGFVAHTAPKSFTQMSGKTLSLPTPYVYEYMQLTTSAMVIFNHLAY

SEQ ID NO: 350170 - protein, 56 aa, Zea mays
  Clone ID: MRT4577_82527C.1.pep
EVTGCVPFAHACCDNCSVGQWRHGLFAAYMICRKKHIIRDSSVDFLHGCLIISCVL

SEQ ID NO: 350171 - protein, 81 aa, Zea mays
  Clone ID: MRT4577_82528C.1.pep
PAVATLNCRSGSRTILAQLFTLFPLFPGERETDTALQNLHCPWDPPLHYFFKGNEPCLDHPPLSFLRILQKHIVSYLSRRI

SEQ ID NO: 350172 - protein, 57 aa, Zea mays
  Clone ID: MRT4577_82529C.1.pep
PRKKGYEGEQKVLHRHGVIMACCTPLCDFVYRLWANRKRFELGGQQIDQSAYRGRPK

SEQ ID NO: 350173 - protein, 75 aa, Zea mays
  Clone ID: MRT4577_8252C.1.pep
IRLEPSSFCRLSIPHLGGLSSVPKPGPTSLPAALTHDREFPTRESYTGEEAQAPALAAAASRVSQIRCRLVSCCS

SEQ ID NO: 350174 - protein, 59 aa, Zea mays
  Clone ID: MRT4577_82530C.1.pep
VPAAPGRAGIINQSIGQVMRSCHLLNKSWTLRVLLPYLHVCFQQVYVRYSWIFCGARNK

SEQ ID NO: 350175 - protein, 138 aa, Zea mays
  Clone ID: MRT4577_82531C.1.pep
VVSSPELELILAEGAGLRGGYSTVDSLSNRDRCRVGQISLYDGPLAQFGEGGKYGDLFVAALKSYGMLCIGLYRFRDTSSSCDASSKRYVITNPPDDFSLLSTDQVFVLMQFDPGLEYKPSSVRCATNVNTQSAGVGG

SEQ ID NO: 350176 - protein, 180 aa, Zea mays
  unsure (1)..(180): unsure at all Xaa locations
  Clone ID: MRT4577_82532C.1.pep
KIIQLQGYDIILAMDWLTAHSPMKIHXGSRWIKFLHHQEKIKLQGILPQAAMGPPISPLQLQALNKIDSILFVVQLNAVVVPVDNHSSLPADLQNLLQQFEHVFAPPSDMPPSRIGDHKIPLLEGAYPFCLRPYRYNXSSLVLLVRKKTGDWRLCVDFRRLNALTTKNKYPLPIIEELLE

SEQ ID NO: 350177 - protein, 105 aa, Zea mays
  Clone ID: MRT4577_82533C.1.pep
STSTFNDLAPSKTNPASNSLFQEDIEALTKKTQDGGTKVVEAKAGKGLCNIVYGISLEHMNRCHCQHVYWLHYRISCLFISLLEFYDYFLLCFVTIQSVDASCLH

SEQ ID NO: 350178 - protein, 61 aa, Zea mays
  Clone ID: MRT4577_82534C.1.pep
SVSVDRLCRRKVFLLGGTQMLACQIVVGSLIGAMFGFSGVAEIPKGYAAIVVLFICAYVPK

SEQ ID NO: 350179 - protein, 352 aa, Zea mays
  unsure (1)..(352): unsure at all Xaa locations
  Clone ID: MRT4577_82535C.1.pep
AASAFLYAELYLVAIGFLILEGDNLDKLFPGTSLSLGLRGAALVVSGKQLFVVLVALVILPTTWLRSLGVLAYVSASGVLASAVVVVCVLWTALADGVGFRARGRMLNVSGLPTALGLYTFCYCGHAIFPTLCISMKEKKRFSRVLVICFAACTLNYASMAILGYLMYGDDVKSQVTLNLPEGKVVSKLAIYTTLINPFSKYALMVTPLSTAVEEKLLTAGRGGKSSRSVSVLVRTLLVVTTVVVALAVPFFGHLMAPVGSLLSVMASMLLPCIFYLKIFGAARCGRAEVALVATIIVLGSVVLATXDVRLCEQDCSGLLKKRCLEMSVAVSQSLLAFFCGDRQSHISTSAD

SEQ ID NO: 350180 - protein, 116 aa, Zea mays
  unsure (1)..(116): unsure at all Xaa locations
  Clone ID: MRT4577_82536C.1.pep
MGLVNEGIYMEEGTLEIVMEYRTVSVVAGPLVILYKAKAPKYQEIVNIRLEDDTNRRGQVLXMMAEKADEHVFEGTSXGIHNEYATVQFTSEGLTTPVSLDMLARIFNGSGXPIDN

SEQ ID NO: 350181 - protein, 63 aa, Zea mays
  Clone ID: MRT4577_82537C.1.pep
DVLLIQTQLKHFSSVVGFLNYPHASLNLLFISSMINALLDDPLHDSKQKSLETLLCFGHLEKK

SEQ ID NO: 350182 - protein, 199 aa, Zea mays
  unsure (1)..(199): unsure at all Xaa locations
  Clone ID: MRT4577_82538C.1.pep
MVLANFYRNYGNTVNKPRWPYEKERFDGEVKLSRQYELXRWKREHLQVPRXLHKIRNAARYLFTLXDNNPPHIFDGEXLLPLMNPDGLLDXEGQNKXIDYAIGLTDENFLARRLPTLDFQAVMSKXSIQHARAVIRERTITGDQQIDDVPSFLVXRVXREKHIDFSLLSLFGARPTPRVKRNNXRRSSAGPDAGDDDDE

SEQ ID NO: 350183 - protein, 45 aa, Zea mays
  Clone ID: MRT4577_82539C.1.pep
LPLPLSLYYCIFPLLKKSPAFDIIKGVFPNVCPPGKNYNFDPIIM

SEQ ID NO: 350184 - protein, 142 aa, Zea mays
  Clone ID: MRT4577_8253C.1.pep
MACCTTTSRLVLSAAAALLAVACGAAEAPSYCAPGQAIPYRPLSGCTWYVASRSCDVIEAMLPTRAVLKETCCSQLRDIPAECRCRALRVMMETPLGVGAEPGAQQRCRVAQARFAPALVAAAECGLLTAHGRRFCNALDAE

SEQ ID NO: 350185 - protein, 59 aa, Zea mays
  Clone ID: MRT4577_82540C.1.pep
SHHRFWASNGGVPPPLTNLTTPPSRLCRVAIHVTTIRGKIPPSLFLNEGPQFRWVIPSW

SEQ ID NO: 350186 - protein, 52 aa, Zea mays
  Clone ID: MRT4577_82541C.1.pep
GRKEDLMLRGKNCNLHKEERKNIIGVTGSLREELFGNIFVNLQEGIFYLKGL

SEQ ID NO: 350187 - protein, 78 aa, Zea mays
  Clone ID: MRT4577_82542C.1.pep
PASQLVVATSPAADTRTARAERRGQRGLLTSSRVGHGRRAHGAVRSREGSRRPPPPPGACTVGLQGCALHERTVGAGN

SEQ ID NO: 350188 - protein, 202 aa, Zea mays
  Clone ID: MRT4577_82543C.1.pep
GRRSSPADILVLEVLTDGRCVSAKQIPASAGCQPAGRFPGRCLRVPSVATPIKTSWTSGGLEEEEEHLDLDFRGNGDRSRLFSCGLAWTFGSAGGRTDGPEEGRKKTSVPAFFSFQRRPKNAFAQMNAHAPRRQPLVALWGATSSPISFLRNRVYLCSFVPGLKPFLQKKKKKFAAWVSVLQYPQNFCSFSHVAEHGEMLWV

SEQ ID NO: 350189 - protein, 69 aa, Zea mays
  Clone ID: MRT4577_82544C.1.pep
QAATKAPAICHSTRFFSLLLHKGSNNAMQIPKLMDCNVRLLLASEDSCQGDNRTREWMNQYYHFSFSRA

SEQ ID NO: 350190 - protein, 105 aa, Zea mays
  Clone ID: MRT4577_82545C.1.pep
ALKQLRIDRHACFPSFTDPVLPRKLYEKIIPGLCFYLRPYNSNSSIDCCCWSPSKPGSSFPTLSTFTPMLSSARSSCSCNSSSLYTKTCLRTIFVCLSKTFFLFG

SEQ ID NO: 350191 - protein, 465 aa, Zea mays
  unsure (1)..(465): unsure at all Xaa locations
  Clone ID: MRT4577_82546C.1.pep
EKAAAPFTRVFPDLASSYFPSHTRCRREPPPTRLSTNHGLRSSRHVEAGQVRPHPCICRCPGSRCPADSTSSALQAWSXVARLLSTKPAATDVIGIDLGTTNSCVSVMEGKTPRVIENAEGARTTPSIVAKNQNGDLLIGITASRQAVTNAQNTIRGSKRLIGRTFDDPQTQKEMKMVPYKIVKAPNGDAWVEMGGQQYSPSQIGAFVLTKMKETAEAYLGKTVSKAVITVPAYFNDAQRQATKDAGRIAGLEVMRIINEPTAAALSYGMNNKEGLIAVFDLGGGTFDVSILEISNGVFEVKATNGDTFLGGEDFDGALLEYLVSEFKKSDNIDLSKDKLALQRLREAAEKAKVELSSTMQTEINLPFITADASGAKHFNITLTRSKFESLVSNLIERTRIPCVNCLKDAGISAKEIDEVLLVGGMTRVPXVQEVVSQIFNKPLSKGVNPXDEAVAMXAAIQGGI

SEQ ID NO: 350192 - protein, 84 aa, Zea mays
  Clone ID: MRT4577_82547C.1.pep
EARGNEKCLFARNSDWHGKSTGWRLHENINFNMSTYIISILTTYRPNAFLNRCLVNMKADNIQLGPYEILTNQILVPVIPVQSP

SEQ ID NO: 350193 - protein, 326 aa, Zea mays
  unsure (1)..(326): unsure at all Xaa locations
  Clone ID: MRT4577_82548C.1.pep
LGPRAGKPRCRPWLLLHALFCATSMAVGFRFSRLIVFLLFLPTPPINPAAHLVSLVSSPAVALAGANATATITTTTTTTTTVTTTTTTVAADIGGAHPHHHHHRHGPVFVGRHPIRVRAWPHPDPSELLKAHRILAAVQNAQRSTKRRGAGPARPVIAVTPTTTSALQVPSLTSLAHTLRLVDAQLVWIVVEPGNRTDAVAAVLSRSNLDFLHITGPGDSTASLRIHALREIRTKRMDGIVVFADETVLPANRSDMLMASRLEWSGFVVNARALWEDAKERPVWVRDLSAIDDADPRAXSXLALVTDAGRVEPLASCVQAALAWSS

SEQ ID NO: 350194 - protein, 114 aa, Zea mays
  Clone ID: MRT4577_82549C.1.pep
HHHHHRHGPVFVGRHPIRVRPWPHPDPSELLKAHRILAAVQNAQRSTKRRGAGPARPVIAVTPTTTSALQVPSLTSLAHTLRLVDAQLVWIVVEPGNRTDAVAAVFSRSNLDFL

SEQ ID NO: 350195 - protein, 119 aa, Zea mays
  Clone ID: MRT4577_8254C.1.pep
CWAWFLVGPLWTVGGDPSFVAFFVRAGLVYVSCSPFWVRVVRLAAAQVFVWGALLFGLRVACCWCLWWSPVLFQGRAMCALLVAVLMKVSIPCPFFPQSCVTSCVLPGSFLCFGNPRQF

SEQ ID NO: 350196 - protein, 67 aa, Zea mays
  Clone ID: MRT4577_82550C.1.pep
ETYYLESPLNSYAPLSGHPRCRLHLLRPLGYEPLRDQGPYAVSLARLLAASGTSRNINLPAPGTPLQ

SEQ ID NO: 350197 - protein, 186 aa, Zea mays
  unsure (1)..(186): unsure at all Xaa locations
  Clone ID: MRT4577_82551C.1.pep
MKLPLLRPLWPGLGPAAAGPPDAAPEPAKPSLPATWLLLHALFCATSMAVGFRFSRLIVFLLFLPTPPINPAAHLVSLVSSPAVALAGANATATITTTTTTTTTVTTTTTTVAADIGGAHPHHHHHXGPVFVGRHPIRVRAWPHPEPRELLKGHRILAAVQNAQRSTKRPGAXPARPVIAVNPNTT

SEQ ID NO: 350198 - protein, 384 aa, Zea mays
  Clone ID: MRT4577_82552C.1.pep
MKLPLLRPLWPGLGPAAAGPPDAAPEPAKPSLPATWLLLHALFCATSMAVGFRFSRLIVFLLFLPTPPINPAAHLVSLVSSPAVALAGANATATITTTTTTTTTVTTTTTTVAADIGGAHPHQHQHRHGPVFVGRHPIRVRAWPHPDPSELLKAHRILAAVQNAQRSTKRRGAGPARPVIAVTPTTTSALQVPSLTSLAHTLRLVDAQLVWIVVEPGNRTDAVAAVLSRSNLDFLHITGPGDSTASLRIHALREIRTKRMDGIVVFADENSILRTELFDEAQKVTTVGAVPVGILGEDDGASESFLQAPSCDAEGNLVGYRVSEETVLPANRSDMLMASRLEWSGFVVNARALWEDAKERPVWVRDLDDADPRAASPLALVTDA

SEQ ID NO: 350199 - protein, 73 aa, Zea mays
  Clone ID: MRT4577_82553C.1.pep
TLTIWTEGTNTAYSRASSLETVSENCYTEAAQVQAVQQTEVSVSYIKRNTPPGECVSRFQVLLPGKRLTAAIM

SEQ ID NO: 350200 - protein, 115 aa, Zea mays
  Clone ID: MRT4577_82554C.1.pep
VKPKGTTMHRTRAHIHTHQQAAAASQAIPLEPEHNSKQWRRLLLLRPTPTLPIPRRMGASSTSAGAHRRVMRVGGATMDRGGSVVMDAGASELGLLGGRSSRLLKHGRGPNAAGG

SEQ ID NO: 350201 - protein, 83 aa, Zea mays
  Clone ID: MRT4577_82555C.1.pep
RMGVAYTSGAGGGAARRGVRRNSATASWRCGCTRHSAPATMRRARKLLAPDLEWWFHCPPTRQHMMRLLTGADHTCNMSPRGG

SEQ ID NO: 350202 - protein, 96 aa, Zea mays
  Clone ID: MRT4577_82556C.1.pep
IKLLASNTPSTLFKFTLRSPCDNLPSIVWVPHHPSYLNTIFVLGLHGKNSLVTPPGVFALKPSKETLCEVLVTPIFLFMPPFCILISQTINYSLFN

SEQ ID NO: 350203 - protein, 122 aa, Zea mays
  Clone ID: MRT4577_82557C.1.pep
MYTVVYYGQHSCNSNKDHNDDGGGANSSRPVDDDDSEPIKTRSSSDSQSSSSMSSITCCADARGGGHQIIDQAFLPHDSKPIVDDDESAEEELDMREPFDVAAFAPMDFDSWELDALLRFGA

SEQ ID NO: 350204 - protein, 92 aa, Zea mays
  unsure (1)..(92): unsure at all Xaa locations
  Clone ID: MRT4577_82558C.1.pep
NQAVGLRGEFEGPAEKAKPLPETPGNETKLFLYGLSKQAPVGDVNPVRPGIFSQKARAKWDAWKAVXGQSKVEAMNASFPKVKQLPEGAPAS

SEQ ID NO: 350205 - protein, 50 aa, Zea mays
  Clone ID: MRT4577_82559C.1.pep
IRLDIAWSFTWQSPDLRISTGQCGHRWLVSVTSEHADSIVIQFLHAYASS

SEQ ID NO: 350206 - protein, 143 aa, Zea mays
  Clone ID: MRT4577_8255C.1.pep
IGQPCHITGRLYYSSPGRKEEEGTNVNNLSSTPEVSDCLPQSEQGIPAAGRKMGHQAIAAASSTHPFPCSRYKEQSTSAAAAVPPRGWKIGTCSAYPSSGGSTSITSWSNLPVTPSWGRLGSYSASRDHLTYLVEMCNAYVGA

SEQ ID NO: 350207 - protein, 63 aa, Zea mays
  Clone ID: MRT4577_82560C.1.pep
PTCEKLYRSESIGSDVVARCRCLSGVHRTVRCSIEQTASQRQLLVVGAINTLTTPLFIACKFA

SEQ ID NO: 350208 - protein, 151 aa, Zea mays
  Clone ID: MRT4577_82561C.1.pep
MAALSCLLDSVRRDIKKVDRELRQLRCIDEFSTRCLCDLYMHPYCCCDLHPYPYCLCYSKRSRSCGLCDLYPCCLCDYKLYCLRPSLRSLERKAIRAIEDEKRELAKLRRTTNRILASSCCSSNILGSVNVCGFEPDQVKVRVKDGKRKLL

SEQ ID NO: 350209 - protein, 450 aa, Zea mays
  Clone ID: MRT4577_82562C.1.pep
LKALEEEMQSFVTSKGKVAGGLQEHVRKLKESFNSRIAELHGFANELKHKSMLSFENLNSQVTTHTSSLEDCMKDLLVDADELLIALQNGLSQHEVNFATFIEQQHEGLSRNLEGIKFVSATTMNFFRTIDSHALGLLKILEESKMEHQKQLFQLQKKFEAVVADEEKYLMEKVAGLFAESNARKKNMVQDDICSLNRTVSESSNNLQTETTKLHDFTSSMKEQWEGYMKKTEEAFQQNVSSIEQKRGFLAGNFQQCKEKVESCSEQWITAQNLVLALGRRNAEAIGLVISDGNEVSNQLGARISSAVAAGFEDNDISSKSLLSCIDDSLKLDHGIRENVKSIVMTSRAQLHDLEHGHYEMTKAITGNADRSLGEDYKVDEATCSTPRRREINIPDSQSIIELVTPLEDIVKSFWDSRTPTKPALNAKGKQQLVGSTTPETQRAPLSAIN

SEQ ID NO: 350210 - protein, 41 aa, Zea mays
  Clone ID: MRT4577_82563C.1.pep
AAVLIISSCIIFLDGGGTTTGHALYLFSETFRYKKHPSHTK

SEQ ID NO: 350211 - protein, 78 aa, Zea mays
  Clone ID: MRT4577_82564C.1.pep
QSPSYSRRTSLLANHELLVDERATTFSQEGTEPAVRQQKRYMILITSSWAHGILSRDRSLLAMQSGLRSTYFLFVDAG

SEQ ID NO: 350212 - protein, 31 aa, Zea mays
  Clone ID: MRT4577_82565C.1.pep
KKPKKKKKKKKKKKKKKKKKKKKKKKKKLEG

SEQ ID NO: 350213 - protein, 83 aa, Zea mays
  unsure (1)..(83): unsure at all Xaa locations
  Clone ID: MRT4577_82566C.1.pep
YSVNFLRAHNPXCQPCSTIPEFPIESRVWFARYAEDQSYPHHQQTVNNVGYYETSSTNVSPDAKVPVLHSICSFPCRGVPFLT

SEQ ID NO: 350214 - protein, 213 aa, Zea mays
  unsure (1)..(213): unsure at all Xaa locations
  Clone ID: MRT4577_82567C.1.pep
GGGPRKKYPTPRKKFFKGKPLEKKKPQGXPPPKPKKPKKNQNPPGLVKTPEQTGKKPNFNKTPRFEKQKRAPLGEKPRGPGKSXYPKKPFFLGEKKKRGRGPXPNRXAGGKNNPGDREPAKNPDGPGKGKKGPRGMGLEPEKKKRGKKRGEPNLGKKKKGPTQKGGGGGGPKGQPHPPPHRESPGGGGGDPGKPRXPPPGGGGGGPPPPAPPA

SEQ ID NO: 350215 - protein, 135 aa, Zea mays
  Clone ID: MRT4577_82568C.1.pep
GFKGGLVGPNRPSLSGKIPGGLQQSPPNTGGGPPPPQNLSRGPGRGPRPISSKLSLIYEGHGTLAPGKGRARLVSSPRGEPPFDHPITEPGDLGLEPLNNPPLLPPEGGEPPYQLGPHTGGPPVQLGPQLPGGLL

SEQ ID NO: 350216 - protein, 50 aa, Zea mays
  Clone ID: MRT4577_82569C.1.pep
CIITTVHRVKLSSIEQLWPAIGKMNSQANPVITGLVYQKATRPNQSRRKR

SEQ ID NO: 350217 - protein, 76 aa, Zea mays
  Clone ID: MRT4577_8256C.1.pep
MNGTSKKSRGTPLLGKYELGRLLGRGTFAKVYLAHTVTGGEPVAVKVIDKAEVMGTEGMAPRVLQEVEAMRRLRHP

SEQ ID NO: 350218 - protein, 181 aa, Zea mays
  Clone ID: MRT4577_82570C.1.pep
LGTSRPAGNSLIAWPWCRSLSSLRRPCRVHLAKLRIDRGYRAAAFYRCLGRRRKAKAPVASSRSPPGVRGESSDCRRLHTTTNAPRSLPRPPQLGHSTDGVMLRRVGGAGNTRRTNGLDGAHPSGGCGAEQLAVRVPHRRRRPGHGSPLSEGVECAFSPDVRVRSAPTAPTAPGLTSLPST

SEQ ID NO: 350219 - protein, 76 aa, Zea mays
  Clone ID: MRT4577_82571C.1.pep
SNFHEKVYMVSGRCNPQQAALCKVASQLRISSFNASLFLHSEKFMLERCFAVIFFLLFARSPNLSYNPNLPKRYRQ

SEQ ID NO: 350220 - protein, 47 aa, Zea mays
  Clone ID: MRT4577_82572C.1.pep
PFGFGGMLLAFWMLTGSNLELLREIGVVAFWMLLAFCWHVDMLHLCC

SEQ ID NO: 350221 - protein, 272 aa, Zea mays
  Clone ID: MRT4577_82573C.1.pep
RGRRVKKILPHGLSCFNLIEVVTTEEQFRAEGKKLAAHLAEPDVEGIYETKIPPELNAVLQIGCVCKVDKSAKRRSIQDGWDLAELQMKTTAECSYLEQTFSFFYLYHSLSEGRAVYVFYFPTSFRIHAVIVNPFRNKEISPSFLEKQFRDACQALGSVPENLSFHVGYQTSIDAGSKYAQRMLLEYRQQHSGPVVGIIECPKLQAIKVAIRALDDLPCVTIPSNARDNNYQALGWQATAGRTSMQRCAASTQWFNERISLAKYAHVPLGNF

SEQ ID NO: 350222 - protein, 54 aa, Zea mays
  Clone ID: MRT4577_82574C.1.pep
HTRLASTNPRKHDCSTTGHRTSGFLAPSPARRPPLRLLCHSTFLLSTAQAATRF

SEQ ID NO: 350223 - protein, 57 aa, Zea mays
  Clone ID: MRT4577_82575C.1.pep
CGSPTPCYLNFPQEFPLSIAADAVLVVYRTLRATRRTSSTTSAYTAMAQSNQSPNRT

SEQ ID NO: 350224 - protein, 301 aa, Zea mays
  unsure (1)..(301): unsure at all Xaa locations
  Clone ID: MRT4577_82576C.1.pep
MQGNVFTFNEKRAPKTVDQDKMNQTTESPGSESPGSAEERENSKQPSHSPLSPTEDEGTQXVKVPXSFAKGYKSQKWIPDIKGTDKSPLEYVGRKTKLKEDRMNKRYLSSPTPFATSGTQETIVSDKDQEQCPENYLTRAFDQLIVVLGRFQTKIKSETSKKSSEILAATRETICQHLEGVEAQMQADVDKLVNAGRSKRKRLESTFEDQQEKLRILHEKFKEEVNKQLLNCRSSLEDFESYHAELKGVADKQKSSHKKLLANAEKTVGAQLNDAETKIAEVQKRARERMNGLXYLLKELI

SEQ ID NO: 350225 - protein, 540 aa, Zea mays
  Clone ID: MRT4577_82577C.1.pep
MASAPEPENGRELYALLHLSPDASSEEVRRAYRQFAQIYHPDKYQDPQMKDVATENFQRICEAYEILSDENKRQVYDIYGMEGLNSGLELGPKLTKPEEIKEQLERLRRRKEEEKLFKHALPNGSIIANFSVPQYLNDGSIMRGMAMLSQVELPVSKQNTVVVGGNLIVNGSAGSGAATTVLRHQLSPVSSIEFMATAGLRSVIGGQMFRQISPHSTATSGLAVSLRDGSINLSNAWTRQLSDNTVGNIQLVLGDESSISVGWQKKDEKRTATGEVKFGTNFFGASAHYTHRFSSKSHARIAGRVGSTILDFEIGGGRKISEFSTVRMMYNIGIQGVSWKFELHRAGQKLIIPVLLSTDLNPLFVTSAFAIPSTLYFLLQTYVVKPYYLKREKQKTLEKMEGLSTQLTEARKAAEKAQKLLEPVSNRKKNRQLENNGLVITKALYGSRQKIKMSSELNDIHNDMASQVFDVTLPLNFLVTEAGQLKLHDGIKKSGIMGFYDPCPGDPKLLLVEYTFHGHKYKVMVDDYEALLIPQDIHQF

SEQ ID NO: 350226 - protein, 163 aa, Zea mays
  Clone ID: MRT4577_82578C.1.pep
LGRGGRQLGEDCRGRLVEREKQGRAQGATGLGVHGGWRMKTMGKTARRGKGRLEKWRLGRARLLRCEEEGAGAPWTTARRMSPRNGSCCSTPWTWSSAALEKMEPTPGLVSVCSKGARPWSRRGAAALHARAWGRLGAGRKKVWAAAVWEKKTGRKTKWRLGG

SEQ ID NO: 350227 - protein, 68 aa, Zea mays
  Clone ID: MRT4577_82579C.1.pep
CSNMLHVKHESNRNHQQPTNFLPCSLACSWFFATSICKLAETACQGLPDATLSLGRRDTVLSAFLDAA

SEQ ID NO: 350228 - protein, 76 aa, Zea mays
  unsure (1)..(76): unsure at all Xaa locations
  Clone ID: MRT4577_8257C.1.pep
QPQSSIPFGPPEGKGTTVPRTPNKTYNTKHYELLRLPKSTXPHELKTSYLKAAIKNHPDKSDNPXKLKELTQAYHA

SEQ ID NO: 350229 - protein, 46 aa, Zea mays
  Clone ID: MRT4577_82580C.1.pep
RPGCGHMASIIHGWDDYRLLRRLHSVRARIGDSLSDHSSELDGVFT

SEQ ID NO: 350230 - protein, 543 aa, Zea mays
  Clone ID: MRT4577_82581C.1.pep
MAPPTEDCGWLLYLSLAAKCGDPQRLLGFAAVFVAACVVTSLLHWASPGGPAWGWYWWTRRAGLGIVRAAIPGPRGLPVVGSMGLMTGLAHRKLSAAAERQASRRRLMAFSLGETRVVVTADPDVARELLASAAFADRPVKESAYGLLFHRAIGFAPHGAYWRALRRVASAHLFSPRQIAASAAQRAAIARQMVDATTTAAAHAPVVVARRFLKRASLHNVMWSVFGRRYDLMADSREAEELKALVDEGYDLLGQLNWSDHLPWLARFDLQKTRARCCALVPRVNRFVGNIIGEHRARLGRGGDTAVMDFTDVLLSLQGDDKLSDADMIAVLWEMIFRGTDTVAVLIEWVLARLVLHQDVQSKVQEELDRVVGLGQAVTESDTASLPYLQAVIKEVLRLHPPGPLLSWARLATSDVYVSGYLVPAGTTAMVNMWAITHDPSLWPEPMEFRPERFMGPAAEDVPIMGSDLRLAPFGSGRRSCPGKSLAVATVGFWVATLLYEFKWLPPSDEPRGGGVDLSEVLRLSCEMAAPLEARVVPRHAVC

SEQ ID NO: 350231 - protein, 802 aa, Zea mays
  Clone ID: MRT4577_82582C.1.pep
MASSSSPPPPKLPIPGRRNILITSALPYVNNVPHLGNIIGCVLSADVFARYCRLRGYNAIYICGTDEYGTATETKAMEEKCTPKEICDKYHAIHNEVYKWFNIKFDKFGRTSSPEQTEVCHAIFHKLMENNWLTENTMQQLYCDTCQKFLADRLVEGTCPNKVCNASARGDQCETCSTLLNPTELIDPKCKVCKYTPRIRDTDHLFLELPLLRDKLVNYINETFDTGLWSQNAIQATNAWLKEGLKPRCITRDLKWGVPVPHEKYKDKVFYVWFDAPIGYVSITASYTPEWEKWWKNPDNVELFQFMGKDNVPFHTIMFPSTLLGTGEKWTMMKTISVTEYLNYEAGKFSKSKGIGVFGNDAKDTNIPPEVWRYYLLMNRPEASDTLFTWADLQAKLNSELLNNLGNFINRVLSFVAKPAGAGYGSVVPDAPNAGAHTLTKTLAEKTSKWVEQYLDAMEKVKLKQGLKSAMGISSDGNAYLQESQFWKLYKEDPAACAIVMKTSVGLVYLLACLLEPFMPSFSDEVLRQLNLSPEENLSLSEEKGEIAKAKTPWNFVPAGHRIGKPAPLFKELKDEDVALHREKYAGSQAERSSKAAADAEANKVANQLKGTKLSDGGTKKEPKKQSGGSKSKTAEADITVAKLDIRVGLIRKAEKHPDADSLYVEEIDVGEDTPRTVVSGLVKFIPLEEMQSRKVCVLCNLKPVAMRGIKSHAMVLAASNEDHTKVELVEPPESAAVGERVTFAGYAGEPEASLSGKSKTWEKLAAELHSNGELVACYRDVPFTTSAGVCRVKTIANGEIR

SEQ ID NO: 350232 - protein, 377 aa, Zea mays
  unsure (1)..(377): unsure at all Xaa locations
  Clone ID: MRT4577_82583C.1.pep
VEQYLDAMEKVKLKHGLKSAMVISSDGNAYLQXSRCFCLVFPCRLXTFSYLLLSNQXESQYWKLYMEDPAACAIVMKTSVGLVYLLACLLSPFMPSFSDEVLRQLNLSPEENLSLSEEKGEIAKAKSPWDFVPAGHRIGKPAPLFKELKDEDVALHREKYAGSQAERSSKAAADAEANKVANQLKGTKLSDRGTKKEPKKQSGGSKSKTADADITVAKLDIRVGLIRKAEKHPDADSLYVEEIDVGEDTPRTVVSGLVKFIPLEEMQNRKVCVLCNLKPVAMRGIKSHAMVLAASNEDHTKVELVEPPESAAVGERVTFAGYSGEPEASLSGKSKTWEKLAAELHSNGELVACYKDVPFTTSAGICKVKTIANGEIR

SEQ ID NO: 350233 - protein, 111 aa, Zea mays
  Clone ID: MRT4577_82584C.1.pep
CPSGRARFLMLWIRLYSCRLDHSESSQFSCAQHQVHAPRVLSNRPAGVLVHLLLIGGGACRLSTSWPLVSAARNLACRSTSKTPTGGDAAFCVMIVSGSMSAMALYRSRDR

SEQ ID NO: 350234 - protein, 63 aa, Zea mays
  Clone ID: MRT4577_82585C.1.pep
KTRPPTPIKNYLFTFITFILSHLHQSPRPFFLISTPIPLYNFQTLPTTYLTTNLTFYHQFLNH

SEQ ID NO: 350235 - protein, 45 aa, Zea mays
  Clone ID: MRT4577_82586C.1.pep
HLHGACTRVKRYTGIGALIYTWLLVDIFKQDLGDVDAQLFQASRV

SEQ ID NO: 350236 - protein, 142 aa, Zea mays
  Clone ID: MRT4577_82587C.1.pep
PLGGPLKKKFNPFSGFSTRFFGNRTRFFSPRSPPRQKPKFFGLRPRGPRVQMGKAPPPRGLQRTPPPARWGPPTLGGPQFPRFSFSGDGPFVCFPLTLVGGELTKMVFPPLLKFWLGRFFVIFFFSRGGLAGLRFKPVGSPL

SEQ ID NO: 350237 - protein, 98 aa, Zea mays
  unsure (1)..(98): unsure at all Xaa locations
  Clone ID: MRT4577_82588C.1.pep
GLYTSLTXNYQTDRAANFTPAFSPFSVQALVPANLVQQVSAAARLRQVSSSSSELLPEGVKIQPEVVTEEESTPVAADQVEDPSNWGLIEGSSTSSLQ

SEQ ID NO: 350238 - protein, 133 aa, Zea mays
  Clone ID: MRT4577_82589C.1.pep
PPSDEGPAQSRPALMLVCVPDAASLSTARNEARRLPLCPYGFWMLRPLPVVTLLRSPDEPPRRPSRHLRRRSSTATRGSSACSGTPVSFFEHTGSWPVITPLSPQTPCDCILFCLENAVPKLPYLLSALVMEV

SEQ ID NO: 350239 - protein, 75 aa, Zea mays
  Clone ID: MRT4577_8258C.1.pep
GQVVAHVCQSRNRGALQPVGRYGVLDIPDRDRALVHGRTMDCRTSPGSLRYLLSCMLVTGPSRYTCVGQSFSLGC

SEQ ID NO: 350240 - protein, 137 aa, Zea mays
  unsure (1)..(137): unsure at all Xaa locations
  Clone ID: MRT4577_82590C.1.pep
PRRQHRQHQRRRRRRAVATPKQIRELMKVDGLTNDEVKSHLQKYRLHTRRXRRTAATSTXRAVVVGAGSXYTTSQHSTSQSQSQSGSPQGPLQLAVSSRAMSATAGDSCDAGDEAQGGRSESYGWEMPQHGTKASSS

SEQ ID NO: 350241 - protein, 84 aa, Zea mays
  Clone ID: MRT4577_82591C.1.pep
ILSVRQGIQYIIPMGPSSRPTRRRDKETQCLCAGLLVARLRQLGHCGLLTLLSGCGCSSTASFSLWIATAAPNTVATVSACSQA

SEQ ID NO: 350242 - protein, 69 aa, Zea mays
  Clone ID: MRT4577_82592C.1.pep
RYVTRSFLTAYGSGYYLADGGAGTRYPGFKLCPKRTVVGHWSQVRASAETIGVCRGVDLFVSNDGYCGL

SEQ ID NO: 350243 - protein, 71 aa, Zea mays
  unsure (1)..(71): unsure at all Xaa locations
  Clone ID: MRT4577_82593C.1.pep
IHQQDRRTRGGXXKKTVETPHRAQLKLQKEKSRKPTPQNCTPRHGDDYNPGNTAAERNQPKPGPVKLFGDQ

SEQ ID NO: 350244 - protein, 173 aa, Zea mays
  Clone ID: MRT4577_82594C.1.pep
GSVENLGDKSFDQEPDALDLFKECHYSKIKKCYSSSVQQVITEIENKWSTPTEGEQEMSVTEVVADVLAQNTKKNLFLQNVGIQSAYPRSSVRNIEAQLEVEKRANSALRSVVNTQREELEVLSKQMHEAEESRIKEQEEMKKRQVEMEAEMKKRQASMDAKLQLLFSKIQPR

SEQ ID NO: 350245 - protein, 44 aa, Zea mays
  Clone ID: MRT4577_82595C.1.pep
NRGRNFYFLYNPPKHGAYLQTPGFIGFFKKALTNGCYGTTNFVG

SEQ ID NO: 350246 - protein, 97 aa, Zea mays
  Clone ID: MRT4577_82596C.1.pep
IFVLVSDEPHLNGSVEIGALIHGSWQPSASGFEVPVVIQRCLPPGGIKRPMMFGSKNVTQMVMVMVSARLLAVTNLNRLVSNFSVVSDYGSPPTNMI

SEQ ID NO: 350247 - protein, 91 aa, Zea mays
  Clone ID: MRT4577_82597C.1.pep
LLFFVLSNLLFILNYALNHSMYAQCKSCPVYSLSQILYFCPANAYIVTFIHVFKLVFRSVKLISVCKLNVALHDFHSNELLSEYDYLFREV

SEQ ID NO: 350248 - protein, 67 aa, Zea mays
  Clone ID: MRT4577_82598C.1.pep
FHLIMCARDSFPPRCPHHAPRTTRRVKGQALMRTLIYIHRFSLTGCFLLVEPVPPAIFMNLPNFPYM

SEQ ID NO: 350249 - protein, 106 aa, Zea mays
  Clone ID: MRT4577_82599C.1.pep
PKSSAREWLVVVHTLHRNNDAHGQDIEHGVNVNDSLNGNLDSAIYKDSRRCSKGCLIAILKCSSSEKVRDYLVWTGHKVGFCQVYQWHRHNMCVSQCRSNSPGHPA

SEQ ID NO: 350250 - protein, 103 aa, Zea mays
  Clone ID: MRT4577_8259C.1.pep
SSYPSRRWRSCTGRASMEGNRQCGVDYIRRMVCPLQIGSSDIHRAACCPSDTMHIRSCLSAVQGGTIRLVIRTTVAPAYESCHSCGFCSSRRFGIGGTWPEEK

SEQ ID NO: 350251 - protein, 132 aa, Zea mays
  unsure (1)..(132): unsure at all Xaa locations
  Clone ID: MRT4577_825C.1.pep
PVRKLEALIAAANIIYIFHILHTPPGENALFDVLLITPIFTXNKFKTXGPASAGAGSETGPSLFQLIFYPNLYPELALALQLSMXEERSRQQAIANKAAXDTFNTEHNNVPSSNSDSVMAEXEPASNAAAVD

SEQ ID NO: 350252 - protein, 220 aa, Zea mays
  Clone ID: MRT4577_82600C.1.pep
MAGRARRGQNECIPPPPPPPPTMQELMAQQNEILRQLAQRQPPPQHYGGGDHHQRPPAAATYQEFLSTQPPLFTRAEDPLDADVWLRVVESKFPLLTGVCSDVAKVCFATQQLRGPARTWWIHFLAMQPVDHAVEWGEFKAAFRGHHIPAGIMDRKLNEFLALTQGNRTVLHYTQAFNDLCQYVGYLADTDEKKRDRFRRASVLSSATVSIQSGPIAIMS

SEQ ID NO: 350253 - protein, 60 aa, Zea mays
  unsure (1)..(60): unsure at all Xaa locations
  Clone ID: MRT4577_82601C.1.pep
TPGGGGVTPRVTVKFASPLAPVPFVFFPSFFPTFAGFPRKXLKWGAPLRVPIKGLTAPQP

SEQ ID NO: 350254 - protein, 46 aa, Zea mays
  Clone ID: MRT4577_82602C.1.pep
PPPLLRGRHGNYIGSHGAACDMHRPPVASRLRTIHLELISRKKEER

SEQ ID NO: 350255 - protein, 70 aa, Zea mays
  Clone ID: MRT4577_82603C.1.pep
TEFAITGFIITNMTAIFTDEDLKNSKFVQEHKKRCPTGWSHPNRLSVKYLPPIFLGFSLSKCRHPIVIME

SEQ ID NO: 350256 - protein, 98 aa, Zea mays
  unsure (1)..(98): unsure at all Xaa locations
  Clone ID: MRT4577_82604C.1.pep
MPHASHARLLYTPSSLAENACASRDLYDHGVGVCFVAXDMTVHKVDMGKLTRVEGDFKAGIHNRNPLIPARFGDGHLGWRLEWSAVWTRVTSGCRDEQ

SEQ ID NO: 350257 - protein, 111 aa, Zea mays
  Clone ID: MRT4577_82605C.1.pep
QILHFQMTCLEHRRHDSCRTIPPTYLPIPVLTRFYRRGNPLIYTILRNLQPPMLWDMQKTRTLECAGGASANSSSILLFRVLDHPPNDRINVGRDLARCHETCHFLFSDCP

SEQ ID NO: 350258 - protein, 152 aa, Zea mays
  Clone ID: MRT4577_82606C.1.pep
MSRWLQIGTPASARPQPIVGFQDKARDADELWRRWLDRCAQLHSHGRPRRLRAPSGTARVLSAACMRRCRSGHRRRLEARWWTPTSWTPMPWDEKALAKRLTEAVRWQPEAAAAVADTIVKARFGGGKRRRVWPKADTCLLFAGANMIGKRR

SEQ ID NO: 350259 - protein, 52 aa, Zea mays
  Clone ID: MRT4577_82607C.1.pep
FSTYKKRPPIWLKLDLNAPLLYFFFFFFFFFFFFFSHDLVRHAYVFITNIQA

SEQ ID NO: 350260 - protein, 125 aa, Zea mays
  unsure (1)..(125): unsure at all Xaa locations
  Clone ID: MRT4577_82608C.1.pep
TGDRFYWFKHQQITRQQMGVLNRVXIKVLHEFPIKSQVQPEVYXGPPXYAIVKEILEXQITATFPVYQTLPSKSLFIMSYLYVFMPYVHKVRDWQDITLYASRTXFILSIIGKRIPMANELTRHK

SEQ ID NO: 350261 - protein, 133 aa, Zea mays
  unsure (1)..(133): unsure at all Xaa locations
  Clone ID: MRT4577_82609C.1.pep
HAHAXGTAXFAFAKKGEEERXRKAGXTDTHXPRXKXKXDXKXTXHPEKGXGPNXXAQXXKXDXGDXDXXAXDXKEKGXDTXEPXKHTXGATXRKDSDKPXKGPXTXRXTTEGGTKXXXDDXXXANXKANTXXT

SEQ ID NO: 350262 - protein, 67 aa, Zea mays
  unsure (1)..(67): unsure at all Xaa locations
  Clone ID: MRT4577_8260C.1.pep
SVDAFSAFXKAGLNDEKAIXEIGRRFKNTVLALEGGKSPLKVFVSFQGRKPLLEPLFKQNGLLPVAA

SEQ ID NO: 350263 - protein, 194 aa, Zea mays
  unsure (1)..(194): unsure at all Xaa locations
  Clone ID: MRT4577_82610C.1.pep
RPLLFLGDLKTAASRATPSPDTSEVRSTDITIDVSRGLRARVFCPTAIADDAPAPLPVFVYFHGGGFMLFSASFGPYDTFCRRLCRKLRAVVVSVNYRLAPEHRFPAAYDDGVATLRYLDETPTPLLADIVPAPVDLASCFLIGDSSGGNMVHHVAQRWXPCRRRRXTAFTAXRRLRLGGAVLIQPFFRGEDPT

SEQ ID NO: 350264 - protein, 73 aa, Zea mays
  Clone ID: MRT4577_82611C.1.pep
LLDRRTRFVLVSVCPSSSRALFLRTRGKNTGGRPLLNVVGSLAIPPQDHAGLAARHEREAIRTARTTMGRTLV

SEQ ID NO: 350265 - protein, 125 aa, Zea mays
  unsure (1)..(125): unsure at all Xaa locations
  Clone ID: MRT4577_82612C.1.pep
VQARQSCRWRRMRRLRHSRLPTFKSPPRPWQMEWGFKRLRFKCPMKRNFSPVSLIPHKKIPGHSPSNTTGLVFDPLKSKVCHIGSSPLSQKDPYLCAGKTAISSHCTPLPPGALTXISRKDRTQK

SEQ ID NO: 350266 - protein, 79 aa, Zea mays
  Clone ID: MRT4577_82613C.1.pep
KDPGPSATTSCFLTGSVMLFFTQQKGLALIELQYVVKTSLGNSIATEGFNEDIRLTVRYKKRKVTKGNAAIQFCIYWRP

SEQ ID NO: 350267 - protein, 131 aa, Zea mays
  Clone ID: MRT4577_82614C.1.pep
PKVPPRSYSMEANIWSIGVITYILLCGSRPFWARTESGIFRSVLRADPNFDDSPWPSVSAEAKDFVKRFLNKDYRKRMTAVQALTHPWLRDEQRQIPLDILVFRLVKQYLRATPLKRLALKALSKALREYV

SEQ ID NO: 350268 - protein, 639 aa, Zea mays
  unsure (1)..(639): unsure at all Xaa locations
  Clone ID: MRT4577_82615C.1.pep
MGQCYGKAGGASSRRADHDDHAHAVAPPSPLPANGAPPPQPATPGRRKSGSATPVHHQAATTAWPSPYPAGGASPLPAGVSPSPARSTPRRFFKRPFPPPSPAKHIKATLAKRLGGGKPKEGTIPEEGGAGVAADSAEAERPLDKTFGFANNFGAKYDLGKEVGRGHFGHTCSALVKKGEYKGHAVAVKIISKAKMTTAISIEDVRREVKILKALSGHNNLVKFYDACEDALNVYIVMELCEGGELLDRILARYFFQHSIFIYSSRVAVPLVNAYQGCKLELXRGGRYTEEDAKAIVVQILSVVSFCHLQGVVHRDLKPENFLFATRDESAPMKLIDFGLSDFIRPDERLNDIVGSAYYVAPEVLHRSYSMEADIWSIGVITYILLCGSRPFWARTESGIFRSVLRADPNFDDSPWPSVSAEAKDFVKRFLNKDYRKRMTAVQALTHPWLRDEQRQIPLDILVFRLVKQYLRATPLKRLALKALSKALREDELLYLRLQFKLLEPRDGLVSLDNFRTALTRYVTDAMRESRVLEFLHALDPLAYRKMDLEEFCAAAISPYQLEALESWEEIAGTAFQHFEQEGNRVISVEELAQELSLAPTHYSIVQDWIRKSDGKLNFLGFTKFLHGVTIRGSNTRRH

SEQ ID NO: 350269 - protein, 625 aa, Zea mays
  Clone ID: MRT4577_82616C.1.pep
MGQCYGKARGASSRADHDADPSGAGSVAPPSPLPANGAPLPATPRRHKSGSTTPVHHHQAATPGAAAWPSPYPAGGASPLPAGVSPSPARSTPRRFFKRPFPPPSPAKHIKATLAKRLGGGKPKEGTIPEEGGAGAGAGAGAGAGAAVGAADSAEADRPLDKTFGFAKNFGAKYDLGKEVGRGHFGHTCSAVVKKGEHKGHTVAVKIISKAKMTTAISIEDVRREVKILKALSGHDNLVRFYDACEDALNVYIVMELCEGGELLDRILARGGRYTEEDAKAIIVQILSVVAFCHLQGVVHRDLKPENFLFTTRDESAPMKLIDFGLSDFIRPDERLNDIVGSAYYVAPEVLHRSYSMEADIWSIGVITYILLCGSRPFWARTESGIFRSVLRADPNFDDSPWPSVSAEAKDFVKRFLNKDYRKRMTAVQALTHPWLRDEQRQIPLDILIFRLVKQYLRATPLKRLALKALSKALSEDELLYLRLQFKLLEPRDGFVSLDNFRTALTRYSTDAMRESRVLEFQHALEPLAYRKMDFEEFCAAAISPYQLEALERWEEIAGTAFQHFEQEGNRVISVEELAQELNLAPTHYSIVQDWIRKSDGKLNFLGFTKFLHGVTIRGSNTRRH

SEQ ID NO: 350270 - protein, 171 aa, Zea mays
  unsure (1)..(171): unsure at all Xaa locations
  Clone ID: MRT4577_82617C.1.pep
GIPGSTHASALALVIHDNFGIVEGLMTTVHAITATQKTVDGPSGKLRRDGRGAAQNIIPASTGAAKAVGKVVPELNGKLTGMAFRVPTPNVSVVDLTCRLEKPAKYDDIKKVVKQASEGPLNGXLGYTEDQGVSCDFSSNSHSSTFDAGAGIALNDNRVKLISWRDNEYGY

SEQ ID NO: 350271 - protein, 247 aa, Zea mays
  Clone ID: MRT4577_82618C.1.pep
MDKNYGELYNILGWGEEYFAVNTEGHLSVKPFGRWTEPGQEIDVHSVIVEALATQPNDSTSKSQFPMILRFPDVLKNRIETLHNAFNSAMESTGYTSRYQGVFPIKVNQNKHVVQDMVRFGQQWNYGLEAGSKPELLIAMSCLPVTEAEPKPYLICNGYKDADYIALALSARAMGLNPIIVLEMEEELAIVLDQYRKLQQKLPDDDAVRKKFEPIIGIRAKLLTKLPGHFGSTAGKHGKFGMLADQI

SEQ ID NO: 350272 - protein, 43 aa, Zea mays
  Clone ID: MRT4577_82619C.1.pep
IPLTLQLVFYDKIFDTTSVKILVTRQEWKELLYLLERGVKQSL

SEQ ID NO: 350273 - protein, 119 aa, Zea mays
  Clone ID: MRT4577_8261C.1.pep
SEQIALAQRASERAARQCPKKQKSSLRALPLSARGVGLKDSRRDSGLSGQQRTESSAHSVGDRALMGHHTVYYMLSRCHMLCDIARGTLFHRGHTSAQLCPERANNPLKREAKKGARGL

SEQ ID NO: 350274 - protein, 80 aa, Zea mays
  Clone ID: MRT4577_82620C.1.pep
HSKETHSRGAPTSYNQQNKPFHLCIIVIIKHIFFTNCSTPGLYHSTQINTDYFLEHIGQTRCKITEAVIKTAPSADYTFI

SEQ ID NO: 350275 - protein, 109 aa, Zea mays
  Clone ID: MRT4577_82621C.1.pep
LLGLFSFFFRASLVVFGFHTPESRVAGQGEKKWPKFVHPGHPGGGPQQKKTYGTRSRPGPKSLIPRDGGQKQISCFWGRKTPSPGDLNLPKRIPGGPKLFFNPTGDPLF

SEQ ID NO: 350276 - protein, 130 aa, Zea mays
  unsure (1)..(130): unsure at all Xaa locations
  Clone ID: MRT4577_82622C.1.pep
SARGWQELGCIKGAKWKTKVCVAEDGDRRCSIEERPGAIGGKPVFCIKHAGGTRXQDIGXTQTAESHPGACMXHVGNRRGQTLNWHKAIHGRTIFCSAHGAGTRCMPAACSIGAXALLPXCTGHAAGNRS

SEQ ID NO: 350277 - protein, 40 aa, Zea mays
  Clone ID: MRT4577_82623C.1.pep
RLKKIRNPRGLGPYWGPRVRGQHPKTIGRGGKTVGVSKKQ

SEQ ID NO: 350278 - protein, 82 aa, Zea mays
  Clone ID: MRT4577_82624C.1.pep
ASMEPLKSPELSYWNDLLFHGIQSPNVSLLSSIMLWHRIAKTLIGRTLVHEYLIFIGQLSCMCTHGKYIVLGLAYLCGYVPR

SEQ ID NO: 350279 - protein, 72 aa, Zea mays
  Clone ID: MRT4577_82625C.1.pep
GKGFPDLSRTRRRFLSVLRTRRRFLSVLRSRRRLLSLAQSADPPFARHQQSQIPAPLTGPCPSRAVSRSLRR

SEQ ID NO: 350280 - protein, 106 aa, Zea mays
  Clone ID: MRT4577_82626C.1.pep
EVLSLFTDNGRDRPRGRPRVRGLLVDDIMGYKIYTHELRSGYAARIDNFRSYDTVSKDVIQRWTYPMVPDVVSSRDSLESRLHRQGIYKASNVTMASSSTNLSIFL

SEQ ID NO: 350281 - protein, 370 aa, Zea mays
  unsure (1)..(370): unsure at all Xaa locations
  Clone ID: MRT4577_82628C.1.pep
MTPSSATARRRTSQRRRPRNAASASARALAAGLWRLRHAERMMAAGASPPPAAQTKPQKLMGRSRTRPSHHLCRCRCTSSSTRNGILDKIDACLDGSSSMEKATKWDANHSHLXEEVHGXRLDNIFFASPSAMSSPLLLLMEAELEKARGEARELEEERRLMTKRLDRFLRRLAEEKAAWKSRVRDKARHAVAALQDELGAERRHRRQLEQANARLLRDLAEARAAAKQQAQSYEMERKARELMEDACSELTREVEEDQAEVELLRGECLRMREEMEEERRMLQMAEVWREERVQMKLSDAKLALENKYTHLNRLQAEMEAFLRNKGDESASHSAVLREARLISDAAAATSSDHFRRKESESPAGLEVPN

SEQ ID NO: 350282 - protein, 620 aa, Zea mays
  Clone ID: MRT4577_82629C.1.pep
MTQVKPAPGGRMLTVLRVHLPSEIPIVGCEITPYVLLRRPDGGVFTDDVSETAPVDGYFMRYKWYRIQSDRRAAICSVHPTEQATLQCIGCLKSKIPVAKSYHCSSKCFSDAWQHHKVLHDRAISALNENGTEDDELFGRFGSGSSSSGVISAALSGSTSNLSLSSGVNNGPTPVYPTGTEKSSGETWFEVGWSRTYTATTDDIGHVLRFECIVVDVETRGTVRAPTSVMTSRVIPAPTPTPRRLIPVNAADAMVHFDLDSRTSSFGTFTVLSYNILADTYATSDTYSYCPTWALTWAYRRQNLLREIIGYHADIICLQEVQSNHFEDFFSPELDKHGYQPLYKKRTTEVYSGTPQAIDGCATFFRRDRFSHVKKYEVEFNKAAQSLTDAIIPAAQKKLALNRLVKDNIALIAVLEAKFSNHGTENPSKRQLLCVANTHINIHHDLKDVKLWQIHTLLKGLEKIAVSADIPMLVCGDFNSTPGSTSHGLLARGKVDHLHPDLAIDPLGILRPLSKLTHQLPLVSAYSSFVSMAGVGYDLDHQRRRMDPGTNEPLFTNCTRDFTGTLDYIFYTADSLTVESLLELLDEDSLRKDTALPSPEWSSDHIALLAEFRCKLRVRR

SEQ ID NO: 350283 - protein, 45 aa, Zea mays
  Clone ID: MRT4577_8262C.1.pep
EDQKGILEGCLARFLTASLWVLDESQMVNAVDVMERKSVGHRHRE

SEQ ID NO: 350284 - protein, 74 aa, Zea mays
  Clone ID: MRT4577_82630C.1.pep
TMAPLGAFFLIFNMKTPTPLYFYMCFLFVNKLFLLFGFFLWIYFSPINPFCGFNLGFFPFVFCKMGKIKKSWFP

SEQ ID NO: 350285 - protein, 73 aa, Zea mays
  Clone ID: MRT4577_82631C.1.pep
ERYWVRRMLDELIERLYQRQMYGGLSRYVPYSRMRLSERGLAVKWTYYQWQVLVWAFHQFAMWRFLAMLGALE

SEQ ID NO: 350286 - protein, 138 aa, Zea mays
  unsure (1)..(138): unsure at all Xaa locations
  Clone ID: MRT4577_82632C.1.pep
PPCPPALPRVPSVFWSVPVGAPPAVXPAVVVRRAAXVPGVRRRRVRVAVLGGGRRVRRLVPERGAPRPVARGVPLRRLAGVPPPPVGVPCRVPRVLVRRRAAALLVPGLGVGAAVELVEGAGAAGAGVLWCGAPRSPP

SEQ ID NO: 350287 - protein, 109 aa, Zea mays
  Clone ID: MRT4577_82633C.1.pep
NFGGTIGPPCLNVGVPFCPPRWYFSLMGSVPPPGLRGAPLSRGARAGYLFTPLLGSHLAPGLLMFSFFPPGFVCELCEPLPSSPYLVFHLYRCKNQKNTIKPTKKKKRT

SEQ ID NO: 350288 - protein, 82 aa, Zea mays
  Clone ID: MRT4577_82634C.1.pep
PLHRPRFLYLPHGALPGARPGCYRLARTRPQPRLSLSSFLTHDFLCPSPAFFSWWSSSLKLLSSSARERPWRDRLSVHTPSP

SEQ ID NO: 350289 - protein, 67 aa, Zea mays
  Clone ID: MRT4577_82635C.1.pep
CTAYYSAKVAGILFLSDTSRSHLVSILQVASILGNGLPLCHCLFGCNTSILERGSTTRIFPFYLFFS

SEQ ID NO: 350290 - protein, 84 aa, Zea mays
  Clone ID: MRT4577_82636C.1.pep
LLQNMVDPPERIVFFTSGRSEVNTVARACVAFQRYGMEMCIIGSNELRRPSLVVEPLVGSWGCNHKGCRLFLCFRQEDVVPFDF

SEQ ID NO: 350291 - protein, 95 aa, Zea mays
  Clone ID: MRT4577_82637C.1.pep
GRDTFSPAPLHFLLYLILRLLLLRPTPRSPCQSQHGTSPDQQATVMKDTPTRGNVYATKKANNTDAKTVPAKLSRLQPHGRALLNTTNVNQPSTK

SEQ ID NO: 350292 - protein, 164 aa, Zea mays
  unsure (1)..(164): unsure at all Xaa locations
  Clone ID: MRT4577_82638C.1.pep
LLVIRYGFTEGRSPVMGGNRXGPKGFYXHPIALSVVRSGLKIGQEQCYGPVQWHLRIKVFIRVHKRETSMQYVRAPGGFSDNREWANPFTRALRACTIWVHRYXVLYKCFPLGGAKLGGIGREXAFVALKSTCXVMRVVTSFKASGWLNSVKGWPSAGRPSALF

SEQ ID NO: 350293 - protein, 105 aa, Zea mays
  Clone ID: MRT4577_82639C.1.pep
GPPKTETLLFFFNKAQKNLNLGIRYRAGVFYLKHKKTTVSKTRLVPASRGPVQIFFQLKQAANLVWDQRPLGPPLMGGEKFFFLLAHWGLNMWGIRATTRFFFPD

SEQ ID NO: 350294 - protein, 50 aa, Zea mays
  Clone ID: MRT4577_8263C.1.pep
SGVFRGALEMVSIKPKVTWVHHMLRGNDAYHMRVKLIKQVPGVYPHKTDN

SEQ ID NO: 350295 - protein, 96 aa, Zea mays
  Clone ID: MRT4577_82640C.1.pep
KIITQGSVDSLSVHVVPFQTVIALSIVLKGLRPLAVSCIRLFQLSSPPVCELSCVLPQVACVVSLSAFSRTIALHGHVSTRMEPVPISPAGHIVAA

SEQ ID NO: 350296 - protein, 65 aa, Zea mays
  Clone ID: MRT4577_82641C.1.pep
SRSRTFFFFFFFFFFFFFFFFFFFFFLGGRCLTQPGFFFGYLLAKGNMLCICNISRSHTGALPGH

SEQ ID NO: 350297 - protein, 88 aa, Zea mays
  Clone ID: MRT4577_82642C.1.pep
PPGLAMGSPFVGNSPSIQKMFRRVNNQFPPMFRPKPFLPWYPGEGMAKMEFPEPETTMTALVAESHQSQDPPAEKEEESQEKGNKVAP

SEQ ID NO: 350298 - protein, 86 aa, Zea mays
  Clone ID: MRT4577_82643C.1.pep
LILMTALCGQLPKMQQRNSGLKYTMALICLRYDQLTCWMNRLCGSIPYLIRPSDNHKNQSPEDRVLVVETVAAATHIQSEVMLVSS

SEQ ID NO: 350299 - protein, 85 aa, Zea mays
  unsure (1)..(85): unsure at all Xaa locations
  Clone ID: MRT4577_82644C.1.pep
MRRLTLGSTRRGSSPAANLKWVTAPAPLIVGDNSDGPMSERQHPGCWHHNGGXSSLEDPCACRLYLYLKIQDLPTVGNGQTQRLY

SEQ ID NO: 350300 - protein, 177 aa, Zea mays
  unsure (1)..(177): unsure at all Xaa locations
  Clone ID: MRT4577_82645C.1.pep
LARQPGAYFNLSNRTHIDLQLQSPPPPPPTPPRSVCACCCLPDPHRNPSQDAASVEGFNCSANRTYPCQAYALYRAXFAGVPLDLVAIGDLFAASRFMVAHANNLSTAAAPATGQPLLVPLQCGCPSGSPNSYAPMQYQIASGDTYWIISTTKLQNLTQYQAVERVNPTLVPTNLDV

SEQ ID NO: 350301 - protein, 189 aa, Zea mays
  unsure (1)..(189): unsure at all Xaa locations
  Clone ID: MRT4577_82646C.1.pep
MSSDGEKVPKRAESPVADSENDGGNTDGLHRRLNNRQVQLLSIGGTVGTGLFIGIGXGLAKSGPGSLLVCTALYAMVLGLTNNSIAEMNTYMPXVSGGFIRLAGHWVDDALGFMVGWNFFLYEALLIPFEIVALXLVVSFWSDNVTQAGPTAGFIIAGIIAYGVLNLLAVGVFGEAEFWLALGKALLIF

SEQ ID NO: 350302 - protein, 643 aa, Zea mays
  unsure (1)..(643): unsure at all Xaa locations
  Clone ID: MRT4577_82647C.1.pep
MRPPALRLSALLLFLYAFPVPARSQNATTTAPASVEGFNCSANRTYPCQAYALYRAGXRAYRSXAAIGDLFAASRFMVAHANNLSTAAAPATGQPLLVPLQCGCPSGSPNSYAPMQYQIASGDTYWIISTTKLQNLTQYQAVERVNPTLVPTNLDVGTMVTFPIFCQCPAAADNATALVTYVMQPGDTYSTIAAAFSVDAQSLVSLNGPEPRTQQFAEILVPLRRQVPGWLPPIXSETTPPXPAAPPPSASPNATVVRNDRNGVVAGLAVGLGVVGALWLLQMLLLACLCRRLRAKGRGGDAVLSGDGVEGGVFAKGSSAAAAGGGERFLVSDMSEWLDKYRVFTVEELERGTGGFDDAHLVNGSVYKANIDGLVFAVKKMKWDACEELKILQKVNHSNLVKLEGFCIDSATGDCYLVYEYVENGSLDLWLLDRDHARRLNWRARLHIALDLAHGLQYIHEHTWPRVVHKDMKSSNVLLDARMRAKIANFGLAKTGHNAITTHIVGTQGYIAPEYLADGLVTTKIDVFAYGVVLLELVSGREAADESGEPLWADAEDRVFRDRDERLEARVAAWMDPALAEQTCPLGSVATVVSVARACLHKDPSKRPSMVDVAYTLSKADEHFADYSGESVSVDGSGEIAAR

SEQ ID NO: 350303 - protein, 1193 aa, Zea mays
  unsure (1)..(1193): unsure at all Xaa locations
  Clone ID: MRT4577_82648C.1.pep
MVQIVEHRAEISTNFLVEEEAVSSTPQVPNRAVPSTAAVHAARQHTTAQTSRTPSRAVPGALSAARELLRHPLSSTASPGAMKQWRDDVDRLLGMAHSTLTRSRPRNMNVSHTQFLLVHTTAIMGDRRDWMYEGFKKGGCHTSEWFAKTQMFLDHAAALSQIDNIRCPCNKCRNMTIHTKRQVTLHLCSHGFVPGYKVWYLHGESRLERAAEVEVDDGEDDIHRMDQMLEDLQPELAPDHHDSPTPEVQKFFDLLKASEEPLHGHTDVTEHGREQKCLKCGKSRYVELVNEDGEKVMTKVAHKQLRYMPLTPRVKRLFLSRKTAMNMRWHKDXVRTDXGLMLHPSDGDAWKALDKFDPYFASNARNVRIGLATDGFTPFNLTAASYSCWPVIAIPYNLPPTLCMKYEFMFLCLVIPGPEHPGVRLNVMLQPLIEELKKLWQGVEAYDCLKKQKFNLRVAYLFSVHDFMAYGIFSGWSVHGRLTCPYCAKDTDCFRLSAGGKICYFDCHRCFLPFNHPFRRQRKEFRKGTIVTKGPPKRRSGIEITEEHMKLVLDESGKRNWEDLSFDGKGHHTQVNLTLGSLCRLHYPGIVKVSNGDTEDEVLVSTWDEYKFKKEQNHTDRQGLVRNDFWLRYRLPDGEDYMGHAERVFQNNAKKLVKDAIYYARIQATNLYFQKHQEEAGPLNKKEGSSKIYLTEDQYREVMVPWMVPVPDAYYAWCRYWASEGFQKASAHHRQCRGTNPNHKFGGDDMIRKAKRMAAYGEEMVRRHGPDFDWRHESVDPSVVYASGGGKAHGHSCSRRPNEQELEIMRMCEEMRQQREFMEACNAHNQAMYQLMQQHGMTTNFPPPPQWSQFANTPVPSPQFNTPPTHIPAPGDRVMPEAGGSGSDPAAGTGFVDSLFAFPPPGGGGGGGQSSNHPSGGVRHITTITAAGGNTAVMATYFHVALSRPARTWLMNLAPGSIYSWEELYARFVANFASAYQQHGVEAHLHAVRQEPGETLPTFISRFTKGVRDEKMLEKLATHDVETVPTLFALADKCARVAEGRAWHSAPQTGAAQSGGSGAVPRDGRKKKKKDRDYQKSRSTTLVVAAATGGRGDRNKRPRLQRGNSGSCPVHPNGRNSAAECCDIIDLAKRVSERREQSSKDGSPPRRRSGKEKVDDGEVATAERDLGYESPEGDLKDVFAGDSHSGGDN

SEQ ID NO: 350304 - protein, 725 aa, Zea mays
  unsure (1)..(725): unsure at all Xaa locations
  Clone ID: MRT4577_82649C.1.pep
MGDRRDWMYEGFKKGGCHTSEWFAKSQMFLDHAAALSQIDNIRCPCNKCRNMTSHTKRQVTLHLCSHGFVPGYKVWYLHGEDVERATEVEVDDGEDDVDRMDQMLEDLQPELAPDHHDSPTPEVQKFFDLLKASEEPLHGHTDVTVLEFVTRLMSIKSKFAFSINCYKELVDLISEVLPTGHKMPKDMYQSKKLLEGLGMEYEKIDVCQDNCMLFWKEHGREQKCLKCGKSRYVELVNEDGEKVVTKVAHKQLRYMPLTPRVKRLFLSRKTAMHMRWHKDXVRTDXGLMVHPLDGDAWKALDNFDPDFASDARNVRIGLATDGFTLFNMTAASYSCWPVIAIPYNLPPALCMKYEFMFLCLVIPGPEHPGVCLNVMLQPLIEELKKLWQGVEAYDCFKKQKFNLRVAYLFSVHDFMAYEEAGPLSKKEGSSKIYLTEDQYREVMVPWMTPVPDAYYAWCRYWASEGFQKASAHHRQCRGTNPNHKFGGDDMIRKAKRMEATSGQKPSDIEVYQEGHKGPDPNNPDQLCSQTTTDRLAAYGEEMVRRHGPDFDWRHEPVDPSVVYASGGGKAHGRYTLFDGFIDSSSVRYQRTGSSSRSSCSRRPNEQELEIMRMREEMRQQREFMEACNAHNQAMYQLMQQQGMATNFPPPPQWSQFANIPVPPPQFNTPLPHIPAPGDRVTTEAGGSGSDPAGTGFVDSLFAFPPPGGGGGSGQSSNHPSGGYL

SEQ ID NO: 350305 - protein, 52 aa, Zea mays
  Clone ID: MRT4577_8264C.1.pep
VNVLSLFCTKFMRTSQPKGMFVLKQKHVLAYETLPVIRRMVARMRGSTRSFR

SEQ ID NO: 350306 - protein, 91 aa, Zea mays
  Clone ID: MRT4577_82650C.1.pep
THIGATTSQDNNKGHIPVHKKLIIVTHSLVGLVCLTNIIIVSIQLRLDPSRAPHGDLLHNAINQSNVDTPVSVAVNAVDHLTNDGHLAALR

SEQ ID NO: 350307 - protein, 676 aa, Zea mays
  Clone ID: MRT4577_82651C.1.pep
MFGEEMNLNDDLRQLSIGSVTAKSYGRYDINGYRFRSCIFELSHPMAATQNSGVVTRATDMEGHEACYYGKIKNIIEITFAGNKPLALVFFECKWYDPKYYRTEFGMTQIQPEKLLQGHDTYILAHQEDQVYFSTYPCKKLSKWRIVYNVNPRECLYTPGEDEYQIGHLEQVDEKSVKGLFKGLGLFQGSSSSSSRRRELLSAVHGDEDEQHTEEQHIEEEQHNEAEQHNEEVEHNEEVKHVTWDQAAQHHQPWDQWDHQREQQQAWDQWGQQGEPANNPMDDGSGGSSATRTRRSRKSHSVKPCHAIEREADRTLIMPHGDRNWEDLFFDGKGHDTQVNLTLGSLYHLHYPGIVKVSNGDTEDEVLVSTWDKYKFKKERNHTDRQGLVRNDFWLRYRLPDGEDYMGHAERVFQNNAKKLHPEEAGPLNKKEGSSKIYLTEDQYRKVMVPWMAPVPDAYYAWCRYWASKGFQKASAHHRQCRGTNPNHKFGGDDMIRKAKRMEATSGQKPSDIEVYQEGHKGPDPNNPDQLCSQTATDRLAAYGEEMVRRHGPDFDWRHEPVDPSVVYTLFDRFIDSSSVRSQRTGSPSRTSCSHRSNEQELEIMSMREEMRQQREFMEACNAHNQAMYQVTPEPGGSGSDPAAGTGFVDSLFAFPPPDGGGGSGQSSNHPNGGYL

SEQ ID NO: 350308 - protein, 1349 aa, Zea mays
  Clone ID: MRT4577_82652C.1.pep
MGDRHDWMYEGFKKGYKVWYLHGEDVERATEVEVDDGEDDVDRMDQMLEDLQPELAPDHHDSPTPEVQKFFDLLKASEEPLHGHTDVTVLEFVTRLMSIKSNFAFSINCYKELVDLISEVLPTGHKMPKDMYQSKKLLEGLGMEYEKIDVCQDICMLFWKEHGREQKCLKCGKSRYVELVNEDGQKVVTKVAHKQLRYMPLTPRVKHLFLSRKTAMHMRWHKDCTDRQDGLMVHPSDGDAWKAFDKFDPDFASDARNVRISLATDGFTSFNMTAASYSCWPVIAIPYNLPPALCMKYEFMFLCLVIPGPEHPGVRLNVMLQPLIEELKKLWQGVEAYDCFKKQKFNLRVAYLFSVHDFMAYGIFSGWSVHGRLTCPYCAKDTDGFRLSAGGKICYFDCHRCFLPFNHPFRRQRKEFRKGTIVTKPPKQRSGIEITEEHMKLVLDESGKRYQGFGEEHNWTHICGLRELPYAKSLILMHNIDVMHKESNFCQALINTCMDFPDKTKDNDKARMDLAVICDRPTQVLRENGGKPKADYCLKSKQRKEVMKWMKDIKFPDGYAAGFRRSVNLKTMKMNGLKSHDFHIIMERLMPVMFRGYISEAVWKTLAEHLFVHLPYEAKVGGPVQYRWMFHIERALKKLRAMVGNKARVEGCIAEQFKLKEVAHFTSCYFAEEHNVFARKKMYHDDEREMPPCSDLSIFQTNDKAVGPPKAYHLSMEEQKSALLYMFTNMPEVEKYLVEFDEQNMRCLGRPTARDIDKLRRDGMHGRPNFIMWLRGRFGEEMNLNDDLRQLSIGSVTAKSYGRYDVSGYRFRSSIFESSHPMAATQNSGVVTRATDMEGHEACYYGKIKNIIEITFAGNKPLALVFFECKWMPPKSKKSVKGLFKGLGLFQGSSSSSSRHRELLSAVHGDEDEQHTEEQHIEEEEHNEAEQHNEEVEHVTWDQATQHHQPWDQWDHQREQQQAWDQNWEDLSFDDKGHHTQVNLTLGSLCRLHYPGIVKVSNGDTEDEVLVSTWDEYKFKKERNHTDRQELVRNDFWLRYRLPDGEDYMGHAERVFQNNAKKLVKDVIYYARIQATNLYFQKHPEEAGPLNKKEGSSKIYLTEDQYREVMVPWMAPVPDAYYAWCRYWASEGFQKASAHHRQCRGTNPNHKFGGDDMIRKAKRMEATSGQKPSDIEVYQEGHKGPDPNNPDQLCSQTATDRLAAYGEEMVRRHGPDFDWRHEPVDPSVVYASGGGKAHGRYALFDGFIDSSSVRSQRTCSSSRSSCSRRPNEQELEIMRMREEMRQQREFMEACNAHNQAMYQVTPEAGGSGSDPVAGTGFVDSLFTFPPPGGGGGSGQSSNHPSGGYP

SEQ ID NO: 350309 - protein, 72 aa, Zea mays
  Clone ID: MRT4577_82653C.1.pep
DKGFRKKFSFQFHHCGYQFFYSPIIIMQICQIGIIYIYKLYHRKIILSLNVNRLGYFIQNKKKITESSTFIF

SEQ ID NO: 350310 - protein, 305 aa, Zea mays
  unsure (1)..(305): unsure at all Xaa locations
  Clone ID: MRT4577_82654C.1.pep
MDDGSGGSSVTRTRRSRKSHSVKPRHTIEREADRILIMPHGDRNWEDMSFDDKGYHTQVNLTLGSLYRLHYPGIVKVSNGDTEDELRYRFPDREDYMGHTERVFQNNAKKLVKDAIYYARIQATNLYFQNHPKAGPLNKKEGSSKIYLTEDQYREVMVPWMAPMPDAYYAWYRYWASEXLPESEATSGQKPSDIEVYQEGHKGPDPNNPDQLCSQTTTDRLATYGEAMVRRHGPDFDWRHEPVDPSVVYASGGGKAHGWFRGRPGRWRPRWCPEYVTGFRVPLCAVGGLFTSANPAMLSSNHPLW

SEQ ID NO: 350311 - protein, 1243 aa, Zea mays
  unsure (1)..(1243): unsure at all Xaa locations
  Clone ID: MRT4577_82655C.1.pep
MGDRRDWMYEGFKKGGCHTSEWFAKTQMFLDHAVALSQIDNIRCPCNKCRNMTSHTKRQVTLHLCSYGFVPGYKVWYLHGEDVERATEVEVDDGEDDVDRMDQMLEDLQPELAPDHHDSPTPEVQKFFDLLKASEEPLHGHTDVTVLEFVTRLMSIKSKFAFSINCYKELVDLISEVLPTGHKMPKDMYQSKKLLEGLGMEYEKIDVCQDNCMLFWKEHDKEQKCLKCGKSRYVELVNEDGEKVVTKIAHKQLRYMPLTPRVKHLFLSRKTAMHMRWHKDCTDRQDGXWCTRQMVMHGRLLTNLIQILPGMQETFVSAWQLXFHPIQYDNCVVFMLACHCHTXNLPPALCMKYEFMVLXPGPEHPGKAEXKEFRKGTIVTKGPPKRRSGIEITEEHMKLVLDESGKRYQGFGEEHNWTHICGLWELPYAKSLILMHNIDVMHQESNFCQALINTCMDFPDKTKDNDKARMDLAVICDRPTQVLRENRGKPKADYCLKSKQRKEVMKWMKDITFPDGYAAGFRRSVNLKTMKMNGLKSHDFHIIMERLMPVMFRGYISEAMWKTLAEVSYFYRQLCAKEIRRDVMEQLEKEAPMLLCKLEKIFPPGFFNPMQHLFIHLPYEAKVGGPIQYRWMFHIERALKKLRAMVGNKARVEGCIAEQFKLKEVAHFTSCYFAEEHNVFARKKSVTAKSYGRYDVNGYRFRSSXSNQVILWPPLKIVESLLGQPTWKDTKXYYGKIKNIIEITFAGNKPLVLVFFECRWYDPKYYRTEFGMTQIQPEKLLQGHDTHILAHQADQVYFSTYPCKKLSKWRVVYNVNPRERLYTPGEDEYQIGHLEPVDEDAAKIKEVSEGLFKGLGLFQGSSSSSSRRRELLSAVHGDEDEQHTKEQHIEEEQHNEAEQHNEEVEHNEEVEHVTWDQAAQHHQPWDQNWEDLSFDGKGHHTQVNLTLGSLCRLHYPGIVKVSNGDTEDEVLVSTWDEYKFKKERNHTDRQGLLRYRLPDGEDYMGHAERVLQNNAKKLVMVPWMAPVLDAYYAWCRYWASEGFQKASAHHRQCRGTNPNHKFGGDDMIRKAKRMEATSGQKTSDIEVYQEGHKGPDPNNPDHLCSQTATDRLAAYGEKMVRRHGPDFDWRHEPVESLGGVRKWWWQSAWTRTGSSSRSSCSRRPNEQELEIMRMREEMRQQREFMEACNAHNQAMYQVTPEAGGSGSDPVAGTGFVDSLFAFPPPGGGGGSGQSSNHPSGGYP

SEQ ID NO: 350312 - protein, 143 aa, Zea mays
  Clone ID: MRT4577_82656C.1.pep
GGGEPNRPNKKGPPPPSIKINGKPPPPRGGQNKKKQQTARQGNGSQTTTFRPKLVGPGRGTIFPGPFLKRGRRNLAGPRDYKQLLGPRATQHSHPPRKTFWPGPKMGTGGRPSENQVPGGEKSSEGDFWWAIPGIPPAQAISK

SEQ ID NO: 350313 - protein, 54 aa, Zea mays
  Clone ID: MRT4577_82657C.1.pep
PAVCVSRTARRSEKHVLYWESVYSPVEWVLPVPRMNTRLGPNLLPVFSFVTLVE

SEQ ID NO: 350314 - protein, 1161 aa, Zea mays
  Clone ID: MRT4577_82658C.1.pep
MTLIIKSFRQILKQRRGKDYKSRSKKVCYKYGKPGHFIAKCPLSSDSDRGDDKRKEKKRYYKKKGGDAHFNYLSIDVCVTFRNMNVSHTQFLFVHTAAIMGDRRDWMYEGFKKGYKVWYLHGESRLERVAEVEVDDGEDDVDRMDQMLEDLQPELAPDHHDSPTPEVQKFFDLLKASEEPLHGHTNSKFAFSINCYKELVDLISEVLPTGHKMPKDMYQSKKLLEGLGMEYEKIDVCQDNCMLFWKEHGREQKCLKCGKSRYVELVNEDGEKVVTKVAHKQLRYMPLTPRVKHLFLSRKTAMHMRWHKDCTNRQDGLMVHPSDGDAWKALNKFDPDFASDARNVRISLATDGFMSFNMTAASYSCWPVIAIPYNLPSALCMKYEFMFLCLVIPGPEHPGVRLNVMLQPLIEELKKLWQGVEAYDCFKKQKFNLRVAYLFSVHDFMAYGIFSGWSVHGRLTCPYCAKDTYCFRLSAGGKICYFDCHRCFLPFNHPFRRQRKEFRKGTIVTKGPPKRRSGIEITEEHMKLVLDESGKRYQGFGEEHNWTHICGLWELPYAKSLILMHNIDVMHQESNFCQDLINTCMDFPDKTKDNDKARMDLAVICDRPTQVLRENGGKPKADYCLKSKQRKEVMKWMKDINFPDGYAAGFRRSVNLKTMKMNGLKSHDFHIIMERLMPVMFRGYISEAVWKTLAEVSYFYRQLCAKGIRRDVMEQLEEEAPVLLCKLEKIFPPGFFNPMQHLFIHLPYEAKVGGPVQYRWMFHIERALKKLRAMMGNKARVEGCIAEQFKLKEVAHFTSCYFAEEHNVFARKKRYHDDEREMPPCSDLSIFQTNGKAVGPPKAYHLSMEERKSALLYMFTNMPEVEKYFVEFDEQNMRCLGRPTARDIDKLRRDGMHGRPNFIMWLWDRVMVPWMAPVPDAYYAWCRYWASEGFQKVLAHHRQCRGTNPNHKFGGDDMIRKAKRMEATSGQKPSDIEVYQEGHKGPDPNNPDQLCSQTATDRLAAYGEEMVRRHGPDFDWRHEPVDPLVVYTLFDGFIDSSSDLEIMRMREEMRQQHEFMEACNAHNQAMYQLMQQQGMATNFPPPPQWSQFANTLVPPPQFNTPPTHIPAPGDRVTPEAGGSGSDPAVGTGFVDSLFAFPPPGGGGDSGQSSNHPSGGYL

SEQ ID NO: 350315 - protein, 84 aa, Zea mays
  unsure (1)..(84): unsure at all Xaa locations
  Clone ID: MRT4577_82659C.1.pep
LPTGRRCVCIYVFADAINLLXYPVTYTFVPFSNGQXNPTYTELIGRILTNEFHAGSRDVAIGTNWTKVDDFTQPYVDSGLVLLT

SEQ ID NO: 350316 - protein, 79 aa, Zea mays
  unsure (1)..(79): unsure at all Xaa locations
  Clone ID: MRT4577_8265C.1.pep
YSCLRLFACVCYMLLLPHEHTKLTAQSAECVFLGYSAEHKGYHCWDLIARWMRVSWDVVFDEXFFLFLSFFRCFINILG

SEQ ID NO: 350317 - protein, 807 aa, Zea mays
  unsure (1)..(807): unsure at all Xaa locations
  Clone ID: MRT4577_82660C.1.pep
MGDRLDWMYEGFKKGGCHTSEWFAKTQMFLDHAATLSQIDNIRCPCNKCRNMMNHTKRQVTLHLCSHGFVPGYKVSYLHGEDVERATEVEVDDGEDDVDRMDQMLEDLQPELALDHHDSPTPEELVDLISEVLPTGHKMPKDMYQSKKLLEGLGMEYEKIDVCQDKCMLFWKEHGREQKCLKCGKSRYVELVNEDGEKVVTKVAHKQLRYMPLTSRVKCLFLSRKTAMHMRWHKDXVRTDXGLMMHPSDGDAWKALDKFDPDFASDARNVRIGLATDGFTPFNMVAASYSCWPVIAIPYNLPPALCMKYEFMFLCLVIPGPEHPAVRLNVMLQPLVEELKKLWQGVEAYDCFKKQKFNLRVAYLFSVHDFMAIPPKSKKSVKGLFKGLGLFQASSSSSSRRRDLLSAVHGDEDEQHTEEQHIEEEEHNEAEQHNEEVEHMTWDQATQHHQPWDQWDHQREQQQAWDQWGQQGEPTDNPMDDGSGGSSATCTRRSRKSHSEDLSFDDKGHHTQVNITLGSLCRLHYPGIVKVSNGDTEDEVLVSTWDEYKFKKERNHTDRQGLVRNDFWLRYRLPDGEDYMGHTERVFQNNAKKLVMVPWMAPVPDAYYAWCRYWASEGFQKASAYHRQCRGTNPNHKFGGDDMIRKAKRMEATSGQKPSDIEVYQEGHKGPDPNNPDQLCSQTATDLLELEIMRMREETRQQREFMEAFNAHNQAMYQLMQQQGMTTNFPPPPQWSQFANTPAPPPQFNTPPTHIPAPGDRVTPEAGGSGSDPAAGTGFVDSLFAFPPPSGGGGSGQSSNHPSGGYL

SEQ ID NO: 350318 - protein, 1483 aa, Zea mays
  Clone ID: MRT4577_82661C.1.pep
MGDRRDWMYEGFKKGGCHTSEWFAKTQMFLDHTAALSQIDNIRCPCNKCRNMTSHTKRQVTLHLCSHGFVPGYKVWYLHGEDAERAAEVEVDDGEDDVDRMDQMLEDLQPELAPDHHDSPTPEVQKFFDLLKALEEPLHGHTDVTVLEFVTRLMSIKSKFAFSINCYKELVDLISEVLPTGHKMPKDMYQSKKLLEGLGMEYEKIDVCQDNCMLFWKEHGREQKCLKWGKSRYVELVNEDGEKVVTKVAHKQLRYMPLTPRVKRLFLSRKTAMHMRWHKDCTNRQDGLMVHRSDGDAWKALDKFDPDFASDARNVRIGLATDGFTPFNMTAASYSCWPIIAIPYNLPPALCMKYEFMFLCLIIPGPEHPGVRLNVMLQPLIEELKKLWKGVEAYDCFKKQKFNLRVAYLFSVHDFMAYGIFSGWSVHGRLTCPYCAKDTNCFRLSVGGKICYFDCHRCFLPFNHPFRRQRKEFRKGTIVTKGPPKRRSGIEITEEHMKLVLDESGKRYQGFGEEHNWTHICGLWELPYAKSLILMHNIDVMHQESNFCQALINTCTDFPDKTKDNDKAHMDLAVICDRPTQVLRENGGKPKADYCLKSKQRKEVMKRMKDIKFPDGYAAGFRRSVNLKTMKMNGLKSHDFHIIMERLMPIMFRGYISEAVWKTLAEVSYFYRQLCAKEIRRDVMEQLEKEAPVLLCKLEKLFPPGFFNPMQHLFIHLPYEAKVGGPVQYRWMFHIERALKKLRAMVGNKARVEGCIAEQFKLKEVAHFTSCYFAEEHNVFARKKRYHDDEREMPPCSDLSIFQTNGKAVGPPKAYHLSMEERKSALLYMFTNMPEVEKYFVEFDEQNMRCLGRPTARDIDKLRRDGMHGRPNFIMWLRNRFGEEMNLNDDLRQLSIGSVTAKSYGCYDVNGYRFRSSIFESSHPMAATQNSGVVTRATDMEGHEACYYGKIKNIIEITFAGNNPLALVFFECKWMPPKSKKSVKGLFKGLGLFQGSSSSSSRRRELLSAVHGDEDEQHTEEQHIEEEQHNEEVEHNEEVEHNEEREQQQAWDQWGQQGKPADNPMDDGSGGSSATRTRCSRKSHSVKPRHTIEREADRTLIMPHGDRNWEDLSFDGKGHHTQVNLTLGSLCRLHYPGIVKVSNGDTEDELRYRLPDGEDYMGHAERVFQNNAKKLVKDAIYYARIQATNLYFQKHPEEAGPLTKKEGSSKIYFTEDQYREVMVPWMAPVPDAYYSWCRYWASEGFQKASAHHRQCRGTNPNHKFGGDDMIRKAKRMEVTSGQNPSDIEVYQEGHKGPDPNNPDQLCSQTATDRLAAYGEEMVRRHGPDFDWRHEPVDPSVVYASGGGKAHGRYALFDGFIDSSSELEIMRMREEMIQQREFMEACNAHNQAMYQLMQQQGMATNFPPPPQWSQFANTPVPPPQFNTPPTHIPAPGDRVTPKAGGSGSDPAVGTGFVDSFFAFPPPGGGGGSGQSSNHPSGGYL

SEQ ID NO: 350319 - protein, 673 aa, Zea mays
  Clone ID: MRT4577_82662C.1.pep
MPFGLKNAGATYQRAIQTCLADHWGKRVEAYVDDVVIKTENSENFIEDLQLVFNSLRRYRWKLNPEKCVFGVPVEKLLGFIVSHRGIEANPDKIEAIMKMEAPRSQKKVQRLTGCMAALSRFISRLGEKGLPFYKLLKKVDEFQWTSEAQEALDTLKKFLTTPPLRHYFDDHKVIVVTGFPIGDILHNKEAIGRIAKWACELGSHDIEFRPRTAIKTQALVDFVSEWTEQQVPDNPETAEVWRMYFDGSLKRQGAGAGILFIAPGGEHLKYALQLLFPASNNVAEHEALIHGLNIAISLGVKRLMVPPGVFVQEILQPSISMDQAEECNIIDQPESDSDDWRKPIIKYIKNEEEPDDKNSAERIARQSAHYTLIGEILYRRGASGILMKCVLPSTGKQLLEEVHAGQCGIHAASRTLVGKVFRSGFYWPTAKNDAAELVQRCEACQYLSKQQHMPAQQLQTIPVTWPFACWGLDMIGPFKKAQGGYTHVLVAIDKFTKWIEFKPIASLTSAKAVEFIQDIIFKFGIPNSIITDLGSNFTSSEFFDFYEQKSIQIKYASVAHPRANGQVERANGMILEALRKRVFDKNEKFAGKWIRELPYVVWSLRTQPSRSLHGNTPFFMVYGSEAVLPADLKFGAPRLIFESIAEAEATRLEDIDVLEEERLNAVIQSTRY

SEQ ID NO: 350320 - protein, 54 aa, Zea mays
  Clone ID: MRT4577_82663C.1.pep
FGWGGGGFYNFMPVKNLGVTKFNGFAELPFLASWLIKKKGLTVWLSKQLPILYW

SEQ ID NO: 350321 - protein, 1398 aa, Zea mays
  unsure (1)..(1398): unsure at all Xaa locations
  Clone ID: MRT4577_82664C.1.pep
MAVTFNSKITMRLGSVFCFGTISSVADEEGTLHRIVDPPEKKSPPTNPENAGEAQHPALRKKIVFGKPESKSSLTRKTPLSTSPTKEWTRIARKKETREKQVVLSVPPASKENGKKVATTAAPFYPDVLFIGRVESPAVSDDEPTAPGEEPPQRESRRRRNRRRNVRRHHAAGERDPEQPVSRDEVSEIGETPEERVFRERRNSRRRDRRRAQEQAEQDARQRRENPLFGHNLNPDFARAMNTPSEVGGVLARIADGLPRTPDAEGYRRLFTQAANHLLPLAHPPNDLRHAINSRRDARSSINASRERRHENEIRRREEYDRDHGFPTQSQATRTESATASTGGTTRGRSRNHNHNSPPRDRHRPRRQEDTCGVSALTPRLRAIQWPPNFKVSNVDKYEPKQDPGGWLAVYTTAARAAGASEDVMIAYLPIVLGQDALQWLRHLPRHCIDDWGDFSRRFTANFQSLSDKPAQPWDLKSIKRRXGETLRSYLKSHTXQKAPTTSEELFREADLYITADEXSGPHRRSKXVPAAPRRDANQPPDKRWEKRPREEVHAAGPPASRARGGPRGGERTLDDILDAQCPYHKDMRHTLRNCRDFKHSVGHGRPFQPLPPPPPRGGPDEPRQPHQPEEGGGGAFPRVDREVNVIFGGHGSQENKRQQKLNDRQILVATTGPPAPYRWSEHPITFTREDQWLNFDHPGKYPLLVDPVIRESRVKKVLVDGGSSINVTFPRTLQGLGAHLKELHKSDTPFFGIVPTEGEYPLGHIYMPVTFGTPENYRTEFLRFEVANFNCGYNAIIGRPGLAKFMAIPHYTYMILKMPGPRGIITRAIQTCLADHWGKRVEAYVDDVVIKTENSENFIEDLQLVFNSLRRYRWKLNPEKCVFGVPAGKLLGFIVSHRGIEANPDKIEAIMKMEAPRSQKKVQRLTGCMAALSRFISRLGEKGLPFYKLLKKVDKFQWTSEAQEALDALKKFLTTTPVLKPPRRATSTQPAEDLLLYISCTTHVVSTALVVERVEEGHAYPVQHPVYFISEVLGPSKKKYPQVQKLLYAVLLTARKLRHYFDDHKVIVVTGFPIGDILHNKEAIGRIAKWACELGSHDIEFRPRTAIKTQALVDFVSEWTEQQVPDNPETAEVWRMYFDGSLKLQGAGAGILFTAPGGEHLKYTLQLLFPASNNAAKYEALIHGLNIAISLGIKRLMVYGDSLVVVSQINKEWDCSSDSIGKYCAAVRKLEDKFEGLEFHHIERDRNTAADVLSKLGSGRTQVPPGVFVQEILQPSISMDQTEECNIIDQPESDSDDWRRPIIKYIKNEEEPDDKNSAERIARQSAHYTLIGEILYRRGVSGILMKCVLPSTGKQLLEEVHAGQCGIHAASRTLVGKVFRSGFYWPTAKNDAAELVQ

SEQ ID NO: 350322 - protein, 97 aa, Zea mays
  Clone ID: MRT4577_82665C.1.pep
LACLLAYVFSCGGVVFSHQDCICFLWYMCVYTSLSLSLSLSLSLSFAVCLCSSLIDDHACRLGWSTMSYSWVVSVASSYPHAWIISLLAGRPVVAEH

SEQ ID NO: 350323 - protein, 98 aa, Zea mays
  unsure (1)..(98): unsure at all Xaa locations
  Clone ID: MRT4577_82666C.1.pep
NGPKKGQGPKCPGGPALEKGPARQNKPTPPSKKTGPPVHPXPGPRGASPPKXPNPRPXPPKPPPTTPPKRKHGGKPPPRPAARTPAAPPGNPPAPKSP

SEQ ID NO: 350324 - protein, 778 aa, Zea mays
  Clone ID: MRT4577_82667C.1.pep
MSFGLKNAGATYQRAIQTCLADHWGKRVEAYVDDVVIKTENSENFIEDLQLVFNSLRRYRWKLNPKKCVFGVPAGKLLGFIVSYRGIEANPDKIEAIMKMEAPRSQKKVQRLNGCMAALSRFISRLGEKGLPFYKLLKKVDKFQWTSEAQEALDALKKFLTTPPVLKPPRRATSTQPAEDLLLYISCTTHVVSTTLVVERAEEGHAYPVQHPVYFISEVLGPSKKKYPQVQKLLYAVLLTARKLCHYFDDHKVIVVTGFLIGDILHNKEAIGQIAKWASLVDFVSEWTEQQVPDNPETAEVWRLYFDGSLKLQGAGAGILFTAPGGEHLKYALQLLFPASNNAAEYEALIHGLNIAIALGIKRLMVYGDSLVVISQINKEWDCSSDSMGKYCTAVRKLEVKFEGLEFHHVERDRNTAADVLSKLGSSRTQVPPGIFVQEILQPSISVDQAEECNIIDQPESDSDDWRRPIIKYIKNEEKPDDKNSAERIARQSAHYTLIGETLYRRGASGVLMKCIPSSAGKQLLEEVHAGQCGIHAASRTLVGKVFRSGFYWPTAKNDAAELVQSSEFFDFCEQKSIQIKYASVAHPRANEQVERANGMILEALRKKVFDKNEKFTGKWIRELPYVVWSLRTQPSRALHGNTPFFMVYGSEAVLPADLKFGAPRLIFNNIAEVEATRLEDIDVLEEEWLNAVIQSARYQQTLRRYHDKAVRQRSFSIGDLVLRRILTGEGRHKLSPLWEGPFIVAEVTRPGSYRLTQMDGTEVGNSWNIEHLRKFYP

SEQ ID NO: 350325 - protein, 761 aa, Zea mays
  Clone ID: MRT4577_82668C.1.pep
MPFGLKNARATYQRAIQTCLADHWGKRVEAYVDDVVIKTENSENFIEDLQLVFNSLRRYRWKLNPEKCVFGVPAGKLLGFIVSHRGIEANPDKIEAIMKMEAPRSPKKVQRLTGCMAALSRFISRLGEKGLPFYKLLKKVDKFQWTPEAQEALDALKKFLTTPPVLKPPRRATSTQPAEDLLLYISCTTHVLRHYFDDHKVIVVTGFPIGDILHNKEAIGRIAKWACELGSHDIEFRPRTAIKTQALVDFVSEWTEQQVPDNPEIAEGAGAGILFTAPGGEHLKYALQLLFPASNNAAEYEALIHGLNIAISLGIKRLMVYEDSLVVISQINKEWDCSNDSMGKYCTAVRKLEDKFEGLEFHHVERDRNTAADVLSKLGSSRTQVPPGVFVQEILQPSISIDQAEECNIVNQPKSDSDDWRRPIIRYIKNEEEPDDKNAAERIARQSAHYTLIGETLYRRGASGVLMKCILSSTGKRLLDEVHAGQCGIHATSKTLVGKKAQGGYTHVLVAIDKFTKWIEFKPIASLTSAKAVEFIQDIIFRFGIPNSIITDLGSNFTSLEFFDFCEQKSIQIKYASVAHPRANGMILEALRKKVFDKNEKFAGKWIRELPYVVWSLRTQPSRALHGNTPFFMVYGSEAVLPADLKFGAPRLIFESIAEAEATRMEDIDILEEERLNAVIQSARYQQTLRRYHDKAVRQRSFSVGDLVLHRILTGEGRHKLSPLWEGPFIVAEVTRPGSYSFTQMDNTAIGNSWNIEHLRK

SEQ ID NO: 350326 - protein, 39 aa, Zea mays
  Clone ID: MRT4577_82669C.1.pep
KLAAASLVEKTLSFDRCMQSAVQLVIEKGEHLVDYPAMR

SEQ ID NO: 350327 - protein, 69 aa, Zea mays
  Clone ID: MRT4577_8266C.1.pep
IGRVNSAVQVIVSAAGREADVGCLQPHPPLVCVEVALSARSMRARATSSSLMGRSVLLRSGVIGKGRRP

SEQ ID NO: 350328 - protein, 438 aa, Zea mays
  Clone ID: MRT4577_82670C.1.pep
MASAAAATQVGTYFLRNYYNLLQQTPDVVHQFYSEASTMVRVDDLTGTTAAANNMMDIHSLIMSLNFTQIEIKTANFVNSWGDGVLVMVSGLVQTKEYSHQRKFIQMFFLAPQEKGYFVLNDYFHFVDQEHVQPAPVIAQEDYESNLAPNTVVETAPEYVHEEEAQQIAPEVHDVVENYTYSEPQQQVVSDNWGEEPLPEEPPSFSNEMAVAPEEPVQAPPVPLPHVDEPVCEPVKKTYASILKTAKAPAFPVAQQVPVSKPSHPTTESNQTQHSVMASSMGTEKPRSDVFGEGASHDDEESKSVYVGNVPSSVSEADLENEFKKFGRLIPDGVAIRSRKETGGYYAFVEFEELSGVHNALKASPIEINGRQIYVEERKPNSGIRGGRRGGRGRFSGGGRGYSRGGGDEYNSNRGRSNGYGRAPHQERGILGSHTPRN

SEQ ID NO: 350329 - protein, 933 aa, Zea mays
  Clone ID: MRT4577_82671C.1.pep
MAVTFHSKITMRPGSTFCFGTISSVADGEGVLRRLADLPEQKSPPTNSENAGKTLPPALRNKIVSGEAGARSSLTRKTPLSTSPTKEWTQIMRRKEIKERPVDLPVPPTSKENGKKVAAAAIPLYPDVLFIGRAESPAVSDDEPTAPGEEPPQRESRRRRNRRRNVRRHHAAGERDPEQPVSRDEVSEIGETPEERVFRERRNSRRRDRRRTQEQAEQDARQRRENPLFGRNLNPDFARAMNTPSEVGGVLARIADGLPRTPDAEGYRRLFTQAANHLLPQAPDQEVERVEEGHAYPVQHPVYFISEVLGPSKKKYPQVQKLLYAVLLTARKLRHYFDDHKVIVVTGFPIGDILHNKEAIGRIAKWACELGSHDIEFRPRTAIKTQALVDFVSEWTEQQVPDNPETAEVWRMYFDGSLKLQGAGAGILFTAPGGEHLKYALQLLFPASNNAAEYEALIHGLNIAISLGVKRLMVYGDSLVVISQINKEWDCSSDSMGRYCAAVRKLEDKFEGLEFHHIERDRNTAADVLSKLGSGRTQVPPGVFMQEINQPSISTDQIEECNIIDQPESDSDDWRQPIIKYIKNEEEPDDKNSAERIARQSAHYTLIGEVLYRRGASGVLMKCVLPSTGKQLLEEVHAGQCGVHAASRTLVGKVFRSGFYWPTAKNDAAELVQRCEACQYLSKQQHMPAQQLQTIPVTWPFACWGLDMIGPFKKAQGGYTHVLVAIDKFTKWIEFQPIASLTSAKAVEFIQNIIFRFGIPNSIITDLGSNFTRKWIRELPYVVWSLRTQPSRALHGNTPFFMVYGSEAVLPADLKFGAPRLIFESIAEAEATRLEDIDVLEEERLNAVIQSARYQQTLRRYHDKAVRQRFFSMGDLVLRRILTGEGRHKLSPLWEGPFIVAEVTRPGSYRLTQMDGTEVGNSWNIEHLRKFYP

SEQ ID NO: 350330 - protein, 856 aa, Zea mays
  Clone ID: MRT4577_82672C.1.pep
MSFGLKNAGATYQRAIQTCLADHWGKRVEAYVDDVVIKTENPENFIEDLQLVFNSLRRYRWKLNPEKCVFGVPAGKLLGFIVSHRGIEANPDKIEAIMKMEAPRSQKKVQRLTGCMAALSRFISRLGEKGLPFYKLLKKVDKFQWTSEAQEALDALKKFLTTPPVLKPPRRATPTQPAEDLLLYISCTTHVVSTALVVERVEEGHAYPVQHPVYFISEVLGPSKKKYPQVQKLLYAVLLTARKLRHYFDDHKVTVVTALVDFVSEWTEQQVPDNPETAEVWRMYFDGSLKLQGAGAGILFTAPGGEHLKYALQLLFPASNNAAEYEALIHGLNIAISLGVKRLMVYGDSLIVISQINKEWDCSSDSMGRYCAAVRKLEDKFEGLEFHHIERDRNTAADVLSKLGSGRAQVPPGVFVQEILQPSISTDQIEECIIIDQPESDSDDWRQSIIKYIKNEEEPDDKNSAERIARQSAHYTLIGEVLYRRGASGVLMKCVLPSTGKQLLEEVHAGQCGVHAASRTLVGKVFRSGFYWPTAKNDAAELVQRCEACQYLSKQQHMPAQQLQTIPVTWPFACWGLDIIGPFKKAQGGYTHVLVAIDKFTKWIEFQPIASLTSAKAVEFIQSIIFRFGIPNSIITDLGSNFTSSEFFDFCEQKSIQIKYASVAHPRANGQVERANGMILEALRKRVFDKNEKFAGKWIRELPYVVWSLRTQPSRALHGNTPFFMVYGSEAVLPADLKFGAPRLIFESIAEAEATRLEDIDVLEEERLNAVIQSARYQQTLRRYHDKAVRQRFFSMGDLVLRRILTGEGRHKLSPLWEGPFIVAEVTRPGSYRLTQMDGTEVGNSWNIEHLRKFYP

SEQ ID NO: 350331 - protein, 1355 aa, Zea mays
  Clone ID: MRT4577_82673C.1.pep
MDRGWMYNVPRPHPSYIRNLRSFIEAANKHANLRKSKEILCPCIDCDNKIAWRDIGVIQSHLLKRGFKNNYTIWSEHGELDPCEVSGNDERVVGILDLKVDGKVDNVDANQDFEEFDCEEMLRHMEPEMLSSVGSQKGLSKMEGLESASKEPLYDESKGCDKEFTTLRTVLELLKLKASAGWSDTSFTDLLNYLSQLLPKPNKLPTSTYKAKKLISPIALVCNVSRYKKSYNQDCVKKFPKKNKNKKSTIGPESDDDTFDDVDGKKKSKNPALVMWYLPVIDRLKRLFSNPREAELMRWHAENRKQNNKQIRHPADASQWKNFDLMYPEFAKETRNVRFALGTDGMNPFGEKRSVHSTWPVTLTMYNLPSWLCHKRKYIMLTILIQGPKSAGVDIDVFLEPLMEDMTKLWNEGVRIWDEYCREYFNLRAIIFVLSFLDCYSGYHQISLAKEDEEKTAFITPFGAFCYTSMPFGLKNAGATYQRAIQTCLADHWGKRVEAYVDDAVIKTENPENFIEDLQLVFNSLRRYRWKLNPEKCVFGVPAGKLLGFIVSHRGIEANPDKIEAIMKMEAPRSQKKVQRLTGCMAALSRFISRLGEKGLPFYKLLKKVDKFQWTSEAQEALDALKKFLTTPPVLKPPRRATPTQPAEDLLLYISCTTHVVSTALVVERVEEGHAYPVQHPVYFISEVLGPSKKKYPQVQKLLYAVLLTARKLRHYFDDHKGIVITGFPIGDILHNKEAIGRIAKWACELGSHDIEFRPRTTVKTQALQTPDNPETAEVWRMYFDGSLKLQGAGAGILFTAPGGEHLKYALQLLFPASNNAAEYEALIHGLNIAISLGVKRLMVYGDSLVVISQINKEWDCSSDSMGKYCAAVRKLEDKFEGLEFHHVERDRNTAADTLSKLGSGRTQVPPGVFVQEITRPSISIDQTEECNIVDQPESDSDDWRRPIIKYIKNEEEPDDKNSAERIARQSAHYTLIGEILYRRGASGVLMKCILPSTGKQLLEEVHAGQCGIHAASRTLVGKVFRSGFYWPTAKNDAAELVQRCEACQYLSKQQRMPAQQLQTIPITWPFACWGLDMIGPFKKAQGGYTHVLVAIDKFTKWIEFKPIASLTSAKAVEFIQDIIFRFGIPNNIITDLGSNFTSSEFFDFCEQKSIQIKYASVAHPRANGQVERANGMILEALRKRVFDKNEKFAGKWIRELPYVVWSLRTQPSRALHGNTPFFMVYGSEAVIPADLKFGAPRLIFESIAEAEATRLEDIDILEEERLNAVIQSARYQQTLRRYHDKAVRQRSFSVGDLVLRRILTGEGRHKLSPLWEGPFIVAEVTRPGSYRLTQTDGTEVGNSWNIEHLRKFYP

SEQ ID NO: 350332 - protein, 79 aa, Zea mays
  Clone ID: MRT4577_82674C.1.pep
SKKIYNYVYAKCTVLECSYNIISDFELERIIQAKLLCKRKYDYKILFAKMEHKNCSSILQKPLYNQTNKLVSNLLPVTE

SEQ ID NO: 350333 - protein, 170 aa, Zea mays
  Clone ID: MRT4577_82675C.1.pep
MDEEEVHIAVGKNSRKEKTNILWAAANFPRATIVLVHVHWPSKWMPFMGGKVLYKFADEKEKEMHRGREMKVMVNMLSQYKKMCGTRKVSAHYLTHDDTVAGVVNLIKKLKIKRIVIGSRNMSRQVVVRQCCQVWLVLNGKHISTSNDHLEYSENIGYGRGELRYFGIYT

SEQ ID NO: 350334 - protein, 860 aa, Zea mays
  Clone ID: MRT4577_82676C.1.pep
MPFGLKNAGATYQRAIQTCLADHWGKRVEAYVDDVVIKTENPENFIEDLQLVFNSLRRYRWKLNPEKCVFGVPAGKLLGFIVSHRGIEANPDKIEAIMKMEAPRSQKKVQRLTGCMAALSRFISRLGEKGLPFYKLLKKVDKFQWTLEAQEALDALKKFLTTPPVLKPPRRATPTQPAEDLLLYISCTTHVVSTALVVERVEEGHAYPVQHPVYFISEVLGPSKKKYPQVQKLLYAVLLTARKLRHYFDDHKVIVVTGFPIGDILHNKEAIGRIAKWACELGSHDIEFRPRTAIKTQALVDFVSEWTEQQVPDNPETAEVWRMYFDGSLKLQGAGAGILFTAPGGEHLKYALQLLFPASNNAAEYEALIHGLNIAISLGVKRLMVYGDSLVVIKRDRNTAADVLSKLGSGRTQVPPGVFVQEILQPSISTDQIEECIIIDQPESDSDDWRQPIIKYIKNEEEPDDKNSAERIARQSAHYTLIGEVLYRRGASGVLMKCVLPSTGKQLLEEIHAGQCGVHAASRTLVGKVFRSGFYWPTAKNDAAELVQRCEACQYLSKQQHMPAQQLQTIPVTWPFACWGLDMIGPFKKAQGGYTHVLVAIDKFTKWIEFQPIASLTSAKAVEFIQSIIFRFGIPNSIITDLGSNFTSSEFFDFCEQKSIQIKYASVAHPRANGQVERANGMILEALRKRVFDKNEKFAGKWIRELPYVVWSLRTQPSRALHGNTPFFMVYGSEAVLPADLKFGAPRLIFESIAEAEATRLEDIDVLEEERLNAVIQSARYQQTLRRYHDKAVRQRFFSMGDLVLRRILTGEGRHKLSPLWEGPFIVAEVTRPGSYRLTQMDGTEVGNSWNIEHLRKFYP

SEQ ID NO: 350335 - protein, 95 aa, Zea mays
  Clone ID: MRT4577_82677C.1.pep
GEGKTLSELLESVEKVWQPTCVRIEQDVETGYIVDLKTCIFGSVKTTGSMGLDCTVKKESWHVTLFSKEALPLIWSPNLFSIGGPNPPPQQKNPY

SEQ ID NO: 350336 - protein, 705 aa, Zea mays
  Clone ID: MRT4577_82678C.1.pep
MPFGLKNAGATYQRAIQTCLADHWGKRVEAYVDDVVIKTENSENFIEDLQLVFNSLRRYRWKLNPEKCVFGVPAGKLLGFIVSHRGIEANPDKIEAIMKMEAPRSQKKVQRLTGCMAALSRFISRLGEKGLPFYKLLKKVDKFQWTSEAQEALDALKRFLTTPPVLKPPRRATSTQPAEDLLLYISCTTHVWTEQQVPDNPETAEVWRMYFDGSLKLQGVGAGILFTAPGGEHLKYALQLLFPASNNAAEYEALIHGLNIAISLGIKRLMVYGDSLVVINQINKEWDCSSDSMGKYCTAARKLEDKFEESDSDDWRRPIIRYIKNEEEPDDKNAAERIARQSAHYTLIGETLYRRGASGVLMKCILSSTGKRLLEEVHAGQCGIHAASRTLVGNVFRSGFYWPTAKSDAAELVQRCEACQYLSKQQHLPAQQLQTIPVTWPFACWGLDMIGPFKKAQGGYTHVLVAIDKFTKWIEFKPIASLTSAKAVEFIQDIIFRFRIPSSIITDLGSNFTSSEFFNFCEQKSIQIKYASVAHPRANGQVERANGMIPEALKKKVFDKNEKFTGKWIRELPYVVWSLRTQPSRALHGNTPFFMVYGSEAVLPADLKFGAPRLIFESIAEVEATRLEDIDVLEEERLNAVIQSTRYQQTLRRYHDKAVRQRSFSVGDLVLRRILTGEGRHKLSPLWEGPFVVAEVTRPGSYRLT

SEQ ID NO: 350337 - protein, 80 aa, Zea mays
  Clone ID: MRT4577_82679C.1.pep
MVRLNQILALSPSSDPDSSKNRIYTDILSCAHKSAHSKHRRDTHDMIHKRIARGPHTYYDWPQSIDPLTAACCPAAQAST

SEQ ID NO: 350338 - protein, 73 aa, Zea mays
  Clone ID: MRT4577_8267C.1.pep
APRASAPSSPWSTGTRPCAWRASTSIHPSIHLNPSWLAANLPLIRPRPDTGSYTTTTTTHIATACMRNTTSIS

SEQ ID NO: 350339 - protein, 59 aa, Zea mays
  unsure (1)..(59): unsure at all Xaa locations
  Clone ID: MRT4577_82680C.1.pep
LYTPPPEGGPAAPTRKRPRVQELTQGAPPARGGVSXXISFXGGPLQRSFISAQCPNSRF

SEQ ID NO: 350340 - protein, 81 aa, Zea mays
  Clone ID: MRT4577_82681C.1.pep
PTQSPAAGLWAQVLATPALKKNRWRGPPYPLVPKKQGLVRAWSSGFPPPFKWGGNPPPIVKITQGPPYSHLGSFLPPFWGD

SEQ ID NO: 350341 - protein, 72 aa, Zea mays
  Clone ID: MRT4577_82682C.1.pep
DPVWVSLFEVFLPEEILPIGVGKFPPGKQRDFCICWVGQVYFPVDFWRVLHKKRVRYLVKVKKVIGGPRFFF

SEQ ID NO: 350342 - protein, 73 aa, Zea mays
  Clone ID: MRT4577_82683C.1.pep
DPLRPTHQVRRQLNELLHNLQRQRRIQRHTPPLSYMNSASSTTTKVIYSCTYNVSYHASPFTTLAARRQTPTH

SEQ ID NO: 350343 - protein, 285 aa, Zea mays
  Clone ID: MRT4577_82684C.1.pep
MRHTLQNCTDFKHSVGNDRHFQPLPPPPPRGGPGEPRQPQQQQEGGGGAFPRVDREVNIIFGGHGSQESKRQQKLNDRQILIATTGPPAPYRWSEHPITFTRYLLLVDPVIRESRVKKVLVDGGSSINVTFPRTLQGLGVPLKELHESDTPFFGIVPTEEEYPLGHIYMPVTFGTPENYRTEFLRFEVANFDCGYNAIIDRPGLAKFMAIPHYTSMILKMPEPQGIITVRADFQGAAECFRVAIQAALTTKPSATSSAQAISKPEEDLAVPANEAQAVTSIRPTE

SEQ ID NO: 350344 - protein, 53 aa, Zea mays
  Clone ID: MRT4577_82685C.1.pep
LPSSSNVLVDLQLVEGLDEVTYLELYDILTSNARIVKSLKSVTCESKGRYPFV

SEQ ID NO: 350345 - protein, 44 aa, Zea mays
  Clone ID: MRT4577_82686C.1.pep
GLIDDPHAGPINHGLQTLTNYHLYPRLSNMHLTTRFLIIFLKLV

SEQ ID NO: 350346 - protein, 88 aa, Zea mays
  Clone ID: MRT4577_82687C.1.pep
SSLFGTALSLSPFIFLNRHAQIRERPFTNFLNAIFYINNRTVSYQHEQSVLVFLSTLTTFLTSNLHAPNVPWKKTVFLFTKNKHFCYT

SEQ ID NO: 350347 - protein, 681 aa, Zea mays
  Clone ID: MRT4577_82688C.1.pep
MSAKLLSLVVLLLLIHVSVPSSSADVGHQFIYQGFAASDLALNGLAAVTPGGLLALTNATFQAKAHAFRPAPVHFLNASSSAAAATARARARSFSTCFVFAIVSAYEGLSDHGLAFVVAPTTSFSAAKAGQYLGILGAINGTASDPVLAVELDTILNPELSDIDSNHVGVDVNSLVSEQAMPAGYYDDAAGGAIRELQLNSRKPMQVWIDYDGQAGRLDVTLAPVRVPKPSRPLVSTAVDLSTIVGRGGPMYVGFSSATGVVATHHYVLGWSFGLDGPAPPLDMSKLPVLPRVGPKPRSKVLDVLLPLATALVVAAALAAISFAMWRRRRFAEVREDWEDEFGPHRFSYKDLFHATNGFDAVNLLGVGGFGRVYKGVLPASPALEIAVKKVSHGSRQGVREFVAEVVSIGRIRHRNLVQLLGYCRRRGELILVYDYMANGSLDKYLYDQHVPALSWHERYRIIKGVAASLLYLHEDWEQVVIHRDVKASNVLLDHEMNGRLGDFGLARLYDHGTDPQTTHVVGTMGYLAPELVRTGKATPSTDVFSFGVFLLEAACGRRPIDRDRQVVLVDWVIEHHRDGSVLDVVDPRLVGKYEAEEATLVLKLGLMCAHPLPNVRPSMRRVVQYLDSDQAVPDLSPNYTSYSIMSLIQNDGFDSYITSSHPYMTNSIVVSSASVLSQGR

SEQ ID NO: 350348 - protein, 54 aa, Zea mays
  Clone ID: MRT4577_82689C.1.pep
PTRPPTRPLTFAITLLDNWPGSSFTMDGYIYIHTSYNKLQYKSHIDLIIRKKKS

SEQ ID NO: 350349 - protein, 69 aa, Zea mays
  Clone ID: MRT4577_8268C.1.pep
NSSRFCKIVSLCVPYKWWFLRPLDPSRVFHGSITCDEISYRFETLLHLLNACYSHVGLLCNLPFKNGCG

SEQ ID NO: 350350 - protein, 242 aa, Zea mays
  unsure (1)..(242): unsure at all Xaa locations
  Clone ID: MRT4577_82690C.1.pep
MKLNIANPATGQQKSIEIDDERRTRIFYEKRMGQDVEADALGDEFKGYTFRISGGNDKQGFPMKQGVLTPKRVRLLLGEGHSCFRARRVGERKRKSARGCIVASDIAALSLIVIKQGENDIPGLTDTVLPRRLGPKRATKIRRFFNLTKEDDVRKFVVRREVKSAKNPDAKPYTKAPKIQRLVTPIRLQRRRHLRSLNRRRNEAQKAQLAEXQEVVAKRQAERKAKLAAVKSRKHAAAAAQH

SEQ ID NO: 350351 - protein, 102 aa, Zea mays
  Clone ID: MRT4577_82691C.1.pep
MSSNKERAKKALNAMKLLGFSKKQATPVLKELLNIFNNNWEPIEDECYRALADAILDRQDNKQTPPSQQGNQAAHAHSEHDRQQYVSAIHDDRGEDIMKRPW

SEQ ID NO: 350352 - protein, 187 aa, Zea mays
  Clone ID: MRT4577_82692C.1.pep
MKQPEQINDGGVRATGVGGIPAVINGAGAAIDQEAVVVRVAPAGAARGTNQEKPEPELELVEKEPCQRGPKWVVFQYSLLVRDGQKNISKNVPYNRRAMQVQPPSPAYRSSLAKSGDPIPPYARSKIDFPYAPGKIDFVWVVIGSNSRWAFGVNGTERDCASGLGMKRLRPVDFLERDCSGSEENIP

SEQ ID NO: 350353 - protein, 123 aa, Zea mays
  Clone ID: MRT4577_82693C.1.pep
TEWSLTKLTCPDTTCCSPLPPSVLKSLLGDDCYKRWESFALQKLLDTMPDLVYCPRCNAACLEDDNDAQCPECFFTFCSLCKERRHVGKDCVTPEEKIRILREKHQKYSLPEKQLLKEQREID

SEQ ID NO: 350354 - protein, 244 aa, Zea mays
  Clone ID: MRT4577_82694C.1.pep
MEGIQQLPADVLVSVISRAAAGPRDACIAATVSPAFRAAADSDTVWSRFLPADLAPLVYPTPPPRSKKELFLRLSETHALVEDGLMSYMIAARAMAIIWVDTPDYWRWIVREDSRFSTCAELLAVCWLDISGCMPCRMLSGDTRYAAYLVFKMADDCFGLDSPLQEASVSVGEGGTSTAHWIRLQSYHVGDEENGVTEEGAPPRLPHERPDGWMEVELGDWYNHGGDDDLVVRASVKEARFGGN

SEQ ID NO: 350355 - protein, 157 aa, Zea mays
  Clone ID: MRT4577_82695C.1.pep
GIQQLPADVLVSVISRAAAGPRDACIAATVSPAFRAAADSDTVWSRLLPADLAPLVYPTPPPRSKKELFLRLSETHALVEDGLMSAWLDRETGAKSYMIAARAMAIIWVDTPDYWRWIVREDSRMLSGDTRYAAYLVFKMADDCFGLDSPLQEASVS

SEQ ID NO: 350356 - protein, 45 aa, Zea mays
  Clone ID: MRT4577_82696C.1.pep
NWDDPKKTGGVTHVKRENKIPVISELMTHGKREKSDLRSSPRLSL

SEQ ID NO: 350357 - protein, 271 aa, Zea mays
  Clone ID: MRT4577_82697C.1.pep
MEGIQQLPADVLVSVISRAAAGPRDTCIAATVSPAFRAAADSDTVWSRFLPADLAPLVYPTPPPRSKKELFLRLSETHALVEDGLMSAWLDRETGAKSYMIAARAMAIIWVDTPDYWRWIVREDSRFSTCAELLAVCWLDISGCMPCRMLSGDTRYAAYLVFKMADDCFGLDSPLQEASVSVGEGGTSTAHWIRLQSYHVGDEENGVTEEGAPPRLPHERPDGWMEVELGDWYNHGGDDDLVVRASVKEARFGGNWKKGLIVQGLEIRPKN

SEQ ID NO: 350358 - protein, 120 aa, Zea mays
  unsure (1)..(120): unsure at all Xaa locations
  Clone ID: MRT4577_82698C.1.pep
MAGWCEEAVTLLQHLVVAEIVVDVLLCVVSIWATIMIGLVVDXSWHPRXTGLLFLDLHTRLRFIWVSPGLETRSLWFVCSVMPRLLSSAFFHFRGKQLDKASPDDDVVVIQGNRGCSDDR

SEQ ID NO: 350359 - protein, 122 aa, Zea mays
  Clone ID: MRT4577_82699C.1.pep
SRWPSGRQNTSSLPANDLGRRSGRCGVGVGDGGGGDGRARARPARTRPGSAPSAAYAFVLGGGVRVAYATSCAGTCTTCPLNAANIFVRGPPTSLSTRSLSRSLSLSFPPEQAEAADDDGRM

SEQ ID NO: 350360 - protein, 46 aa, Zea mays
  Clone ID: MRT4577_8269C.1.pep
SHGQEPVALDQLGMIELCCLCATQLLFTQLAASYLQEFLAYNQLAT

SEQ ID NO: 350361 - protein, 36 aa, Zea mays
  unsure (1)..(36): unsure at all Xaa locations
  Clone ID: MRT4577_826C.1.pep
FPSPTSRVGXKSCVRLDLLFSFRMLPNCRGCSSIES

SEQ ID NO: 350362 - protein, 106 aa, Zea mays
  Clone ID: MRT4577_82700C.1.pep
NSARGFEVGLRYNATVSGVISPGQIADISGVAAQDLFMWFPVHDIKVDIPSSGVIYFNVGVVKKHLPLAVFDAPPACTPDPLLQVISHPSLTLSMARALIHRSWDQ

SEQ ID NO: 350363 - protein, 67 aa, Zea mays
  Clone ID: MRT4577_82702C.1.pep
TLAMGKKRTAASGKGNRLESPVCGWFKFEGCFLTWSIVFVMTCKLCPLRRTMITSIARTQTHKGVDW

SEQ ID NO: 350364 - protein, 133 aa, Zea mays
  unsure (1)..(133): unsure at all Xaa locations
  Clone ID: MRT4577_82703C.1.pep
GTSCSFGAQHTHNQISPKSTRRHLRFKMQIFVKTLTGKTITLEVESSDTIDNVKAKIQDKEGIPPDQQRLIFGGKQLEDWRTLADYNIQKXEPFHLGLRLRGGLQILGKTLPGRIITLEVGSWTTLDTGRAKI

SEQ ID NO: 350365 - protein, 212 aa, Zea mays
  unsure (1)..(212): unsure at all Xaa locations
  Clone ID: MRT4577_82705C.1.pep
QIFAKTLTGKTITLEXESSDTIDNVKAKIQDKEGIPPDQQRLIFAGKQLEDGRTLADYNIQKESTLHLVLRLRGGMQILVITLTGKTISLVVESPDTTDNVKAKTQDKEGIPPDQQRLISAGKLLEDGRSLADHNILKESTLHSVLGPKGGTQIPAKTLTGKTISLEVESSDSIXTSRPRXQDMEGIPPDQQRLIFAGXHLEDGRTLADLYI

SEQ ID NO: 350366 - protein, 60 aa, Zea mays
  Clone ID: MRT4577_82706C.1.pep
AGPHEPTPLVFVKPLWCASWSQGTYVACVSSIEGHFPTSRCSRHASVIICDWSAFMACFV

SEQ ID NO: 350367 - protein, 271 aa, Zea mays
  unsure (1)..(271): unsure at all Xaa locations
  Clone ID: MRT4577_82707C.1.pep
MAEETQPEAAAAAAEAEVVVTEPAPAEAEVPAAAEAESVTETEKKADEAAVTADDAGKGTGSFKEESNLVEDLPDPEKKVLDEFKHLIAAALAAGEFNLPPPPPPPKAKEEPKAEETKTEESKTEDPAKEEPKAESAAEEPKAEVAANAPAEEVKTEVPPVEEAKAETVAEEAKPAEPEPQEKTVVVADEEPTTKTVEAIEESVVSADEEAAAPEPVLIWGVPLXDDERTDTAQMMGTPGAELGSELWRRVHPRRGGWVHRHCTEDKEGAC

SEQ ID NO: 350368 - protein, 70 aa, Zea mays
  Clone ID: MRT4577_82708C.1.pep
LKMSNSGGKGCRSRARSMPPEKQLGISSFLPEPPPPPPSTKGSTNGQPCMDDDEQDAESDPDVMNDYGEL

SEQ ID NO: 350369 - protein, 50 aa, Zea mays
  Clone ID: MRT4577_82709C.1.pep
LFHKRLNLRQVCIFLRLKVLSPLILTFLNEVVSYLVLCLILSALNTSQVS

SEQ ID NO: 350370 - protein, 58 aa, Zea mays
  Clone ID: MRT4577_8270C.1.pep
IMLMHISHSSFFLTNNMHSIGVAFMTWLTLTGWLHTGSKAHIHGYATTYRFYSTPQMK

SEQ ID NO: 350371 - protein, 43 aa, Zea mays
  Clone ID: MRT4577_82710C.1.pep
PVDPPPPPYQRWLILFHHQIMDECYYICGITQSMTSMLNYLSP

SEQ ID NO: 350372 - protein, 269 aa, Zea mays
  unsure (1)..(269): unsure at all Xaa locations
  Clone ID: MRT4577_82711C.1.pep
MKWNVNCINQYQEVLLCFVFEPRVVRSAHTHNQISPKSTRRHLRFKMQIFVKTLTGKTITLEVESSDTIDNVKAKIQDKEGIPPDQQRLIFAGKQLEDGRTLADYNIQKESTLHLVLRLRGGMQIFVKTLTGKTITLEVESSDTIDNVKAKIQDKEGIPPEQQRLIFAGKQLXDGRTLADYNIQKESTLHLMLRLRGGMQMFVKTLTVKTITLEVEASHTIYNLKAKIQDQEGIPPDQKXVIFAGKQLEXGRTXLADYNIQNERTLNLV

SEQ ID NO: 350373 - protein, 96 aa, Zea mays
  Clone ID: MRT4577_82712C.1.pep
RVQALLFFFFLFLFIIFFLNNLNENKKILYFFLIFNIKIFIYKILLYFWGGGGPIIFKYISPLLKLFTHHYINVSYNYTLLEDRNSFSVLIMAQLK

SEQ ID NO: 350374 - protein, 63 aa, Zea mays
  unsure (1)..(63): unsure at all Xaa locations
  Clone ID: MRT4577_82713C.1.pep
GTRVPNDGCLNYIEENDEVLIAGFGRKGHAVGDIPGVRXYKVVKVSGVSLLALFKEKKEKPRS

SEQ ID NO: 350375 - protein, 77 aa, Zea mays
  Clone ID: MRT4577_82714C.1.pep
IGYLEAGRATRGSSALRLRGCGGRRQRHYGALSQHQVAATATTSKWPAIHGFRRSAPRRRRPKPGVVISLVHCSVLS

SEQ ID NO: 350376 - protein, 142 aa, Zea mays; identical to SEQ ID NO: 210430
  Clone ID: MRT4577_82715C.1.pep

SEQ ID NO: 350377 - protein, 144 aa, Zea mays
  unsure (1)..(144): unsure at all Xaa locations
  Clone ID: MRT4577_82716C.1.pep
MGKTRGMGAGRKLKTHRRNQRWADKAYKKSHLGNEWKKPFAGSSHAKGIVLEKIGIEAKQPNSAIRKCARVQLVKNGKKIAAFVPNDGCLNYIEENDEVLIAGFGRXRKGHAVGDIPGVRFKVVKVSGVSLLALFKEKKEKPRS

SEQ ID NO: 350378 - protein, 86 aa, Zea mays
  Clone ID: MRT4577_82717C.1.pep
MHLLMDLGLIYPAPKLKNFHDNDWRLLLPTNSFFMDAICQLRYLINTVFNHSHTGGARPECHTVLGQPMSSTARLTDHCSLLKEVD

SEQ ID NO: 350379 - protein, 37 aa, Zea mays
  Clone ID: MRT4577_82718C.1.pep
HGCVCFCRYDYLFDPDEPDEFKVPCLCKSPNCRKFMN

SEQ ID NO: 350380 - protein, 142 aa, Zea mays; identical to SEQ ID NO: 210430
  Clone ID: MRT4577_82719C.1.pep

SEQ ID NO: 350381 - protein, 312 aa, Zea mays
  unsure (1)..(312): unsure at all Xaa locations
  Clone ID: MRT4577_8271C.1.pep
QLFLLCINYCEMTMSIVAAVLLLLLVHVHPRAAAAQPSPGYFPSSTVRPMAFSDGYDNLWGPQHQTLSQDRMALTLLMDRTSGSGFKSKRSYRNGYFGVSIKVQPGYTAGVNTAFYLSNNELYPGRHDEIDMELLGTVPGEPYTLQTNVYVRGTRRRRAPXGREMRFHLWFDPAADFHHYAILWNPDQIVFLVDDVPIRRYAAASAPFFPDRQMWAYGSIWDASDWATDGGRYRADYSYQPFLAGFRGFRTAGCEAAAPAQCRPVPASPAGAGLSVQQRDAMRWAQQTSMVYYYCQDYTKDRSLYPECSLAS

SEQ ID NO: 350382 - protein, 120 aa, Zea mays
  unsure (1)..(120): unsure at all Xaa locations
  Clone ID: MRT4577_82720C.1.pep
MVKGRTGQRVRLYVRGTILGYKRSKSNQYETTSLVQIEGVNTKEDVAWYAGKRMAYIYKAKTKSNETRYRCIWGKVTRPHGNSGVVRAKFKXYLPPESMGRKIVQVLNLWKLCQNLLSNG

SEQ ID NO: 350383 - protein, 112 aa, Zea mays
  Clone ID: MRT4577_82721C.1.pep
MVKGRTGQRVRLYVRGTILGYKRSKSNQYETTSLVQIEGVNTKEDVAWYAGKRMAYIYKAKTKSNETRYRCIWGKVTRPHGNSGVVRAKFKSNLPPESMGRKVRVFMYPSSI

SEQ ID NO: 350384 - protein, 71 aa, Zea mays
  Clone ID: MRT4577_82722C.1.pep
SATKRGSMITPKSHAPKGPIAQQTHQNTLTHTGIQQGPYHPERDKHPRMRHRLKIRVSLLDPLHFNKCKGS

SEQ ID NO: 350385 - protein, 110 aa, Zea mays
  unsure (1)..(110): unsure at all Xaa locations
  Clone ID: MRT4577_82723C.1.pep
RRPASGRPQPHRPRNADXSRQQKGGVLRXREGESYQDXDDSENXDEFDSDIMFSMNGPPISLASNSRPQATSAPGAREKVIAELFKGVXAQLRARGKCRVDIMPDHAKVQ

SEQ ID NO: 350386 - protein, 83 aa, Zea mays
  Clone ID: MRT4577_82724C.1.pep
SLLSTLLRISSRSHPASAQKTTVFQHIPNTYTSIYSGDNYNFTIYSTYTVIPMTHLHYINNQIIHLLTLYNSTYLIIATKISY

SEQ ID NO: 350387 - protein, 70 aa, Zea mays
  Clone ID: MRT4577_82725C.1.pep
KLHKDSSHTAAEECCVLCVVPKTLLQQYGLNPYEVQTSNFIRIQAILLQKSFGYNTEDTSNFIRIQAILL

SEQ ID NO: 350388 - protein, 134 aa, Zea mays
  Clone ID: MRT4577_82726C.1.pep
ENKTTINPPGKKQTKPSQFFKGSWKHFFYYKKIFFQPKTWELPKNGPFIFFLEQPFGTKSFYPHLKAPARVFFGPGVFLKAKKEEPPGITCQSKRPPFCWKEILPPKGRAIPGAWPLIQRDPLAWPPCCFQRGR

SEQ ID NO: 350389 - protein, 272 aa, Zea mays
  Clone ID: MRT4577_82727C.1.pep
MLAAAAMAVTVPRAASHCFPANTARKCRTCWSCRAARVEAGHSRLEVRKVTYRPPGTEQNLLNEINLSLQEKSFGLIFGRSGSGKTTLLQLMAGLSEPTSGSICIQKYDDTGNPIGLPELLTSQRVGIVFQFPERYFLADTVLEEVTFGWPRQKADLLLKEQLALNLQNAFNSVGLTTISLDENPQALSGGFKRRLALAIQLVQIPDLLLLDEPLAGLDWKARADVVNLLKDLKKHHTILVVSHDLRELYPLVDRSWRMEMGGSLKEEALPV

SEQ ID NO: 350390 - protein, 154 aa, Zea mays
  Clone ID: MRT4577_82728C.1.pep
LLLPDHTSSSSVSHRGSKNNLDDQEEAEEHDLLPPPGGDDVVDAHDDECKDIGVVPDDEAKKSSSVAPSAAGGDPTIASSEGAEEAKEPFQSPADAKATADDGGKFAAQVEQEDEAEDVMKEKDDKAARAPQCVVFSVGKLKVNGIGALCSFGV

SEQ ID NO: 350391 - protein, 217 aa, Zea mays
  unsure (1)..(217): unsure at all Xaa locations
  Clone ID: MRT4577_82729C.1.pep
LHPSVPQGSVRIHRIHRRICWPSRTRLLPPPSRTTWPGSASTSAAPPDGSSLRPPEPPAGPPPPPAPAPRRAAGPPRGQPRSRRPRRRTSTARRSRSPSASXXTPRTAAHAPPCRRRRFPCRHLPAPPPPPPPPAPEQQTCRRRRRWPWRHQGSGTAPSRPRRRPSXSPPAAXARRRRTSWPRRPARRRCPCTRRRARQRRRXPGAGSSRSSSSASS

SEQ ID NO: 350392 - protein, 314 aa, Zea mays
  Clone ID: MRT4577_8272C.1.pep
MENLSQMTLTIVIGKIVVDDLLFNTEGKCKERKDASHAGRRATSGTTVQTCPNPQRGGAKPRRLQVSKLEITLQTKMNLQGHATTNPHHAHHGHCTSALWQEVTTKIEQLESDVPSSATDDGLIKNNEKLKAKLASSQEAIENLLEKMEILSIHNNELTTKLEKIDSTLEVFLVEIPKIIEKDASTSCFDLIDDSNPCNQVLVENVVIETCSNEVSKENEQLRQEVARLGKALYGKKGKAKQIQTPQGNTTAGVNKPVEGGTVICRICHKEGHKFYQCKAKTGDKQKQKLKKKSNNKISNTYINKVDKRLLHHI

SEQ ID NO: 350393 - protein, 110 aa, Zea mays
  Clone ID: MRT4577_82730C.1.pep
LSEGLSRSLSVFSIYAEHADWLQIWADVELCSSQDKLKSEMEDETSWSCSGQHDQHGHMENSTKFILSTREDYQASSVCEFGIKTGLSMVERSRVLANRGMQIPYYRSFS

SEQ ID NO: 350394 - protein, 133 aa, Zea mays
  unsure (1)..(133): unsure at all Xaa locations
  Clone ID: MRT4577_82731C.1.pep
AATPNEHSAPIPFTFSFPTLNTTHCGARAALSSSSSFSLPPSSSSXAPXAATLPPSSAVALASSGLWNASFASSAPSEEAIVGSPAAALGATEEDFLASSSGTTPMSLHSSSCASTTSSPPGGGSRSCSSASS

SEQ ID NO: 350395 - protein, 72 aa, Zea mays
  Clone ID: MRT4577_82732C.1.pep
YPAMHHCRDDLRHIVACMTPYISRMHACTWTAGPLPVATISLPVLYVLSLYVCLYYICILDLNKWITSIIIS

SEQ ID NO: 350396 - protein, 167 aa, Zea mays
  Clone ID: MRT4577_82733C.1.pep
MDARQQDAWDWDWEVLLPDHTSSSSVSHRGSKNNLDDQEEAEEHDLLPPPGGDDVVDAHDDECKDIGVVPDDEAKKSSSVAPSAAGGDPTIASSEGAEEAKEPFQSPADAKATADDGGKFAAQVEQEDEAEDVMKEKDDKAARAPQCVVSGVGKLKVNGIGALCSGV

SEQ ID NO: 350397 - protein, 65 aa, Zea mays
  Clone ID: MRT4577_82734C.1.pep
ILDFFISFRCYVILIPPSCCLLLSIYEFLPTPTMHIELFLLIHSQPPPIVDMSKKGGCSIFHRQV

SEQ ID NO: 350398 - protein, 134 aa, Zea mays
  unsure (1)..(134): unsure at all Xaa locations
  Clone ID: MRT4577_82735C.1.pep
ERGTVRSRQGDPESLTARLGAPSAELTLFLDEEVASVNCTIPYTTLAHESRCDVMAAILCIAGSIAAHIFSRRSPRVCSVASSRTMRSKWPENFSGWERSSXXSTGAAADGAGPERESSDSEXSTSSSASTGAA

SEQ ID NO: 350399 - protein, 51 aa, Zea mays
  Clone ID: MRT4577_82736C.1.pep
KSKCDARVNTSQREQYGGTVHLFIGTEHSLCKITFMPFMLTIDLRTIYPGR

SEQ ID NO: 350400 - protein, 80 aa, Zea mays
  Clone ID: MRT4577_82737C.1.pep
NKGEPPFLFLLKQKYKVFQIVSTPPTQNTRKNPYKKALTNQSVWKTKKKRAPYQEKCHPWKFKNFNFKKFQNHMKIIIGN

SEQ ID NO: 350401 - protein, 417 aa, Zea mays
  Clone ID: MRT4577_82738C.1.pep
LSANQNFDHYAQPYNTSRILNPDYTVNLTAYKEYSPILLGPAFSLSYGMGFAGLISTLTHIALFYGPDVWRRSVDSRSEEPDIHLKLMRKYKEAPEWWFLAVFLVSFGFGLAACLGWQTHLPAWAYILCIIIGLFFFIPVGMVQAITNQQTGLNIITEMIFGYMLPGRPVAMMLFKSWGYMMTFNGLQYVSDMKVGHYMKIPPRSMFGAQAFAVIWLSIVQIASYNFLRGNIEGICTPHQAQGLTCPNARTFYNASVIWGVIGPKLVFGAGQLYSWTNYFWLIGFLCPFIQWLLARRYPRSPLRYVVFPALFGAAGMIPPATTWYLAQWCIIGLVFNWWIRRRWLGWWTQYNYVLSGALDIGTALCTVVIGLGLGLGNAEFPDWWGNSVVANNLDYNGAAVLKVAPTSGPGIGPSTW

SEQ ID NO: 350402 - protein, 236 aa, Zea mays
  Clone ID: MRT4577_82739C.1.pep
HPCADAWVHINIDTSNDITVKDVNITGPADVENTDGVHVGGSSNVRITNSTIGTGDDCVSIGPGSDGVMVNNITCGPGQGISVGCLGRYKDEKDVSDVTVRDCVLRNTTNGVRIKSYEDAESVLTASHLTFENIRMEEVANPIIIDQYFCPQKVCPGKRSNSSHVSIKDVTFRNISGTSSTPEAVSLLCSETQPCSGVSLIDVNVEYAGKNNKTMAVCSNAKGTAKGSLQALDCLV

SEQ ID NO: 350403 - protein, 254 aa, Zea mays
  unsure (1)..(254): unsure at all Xaa locations
  Clone ID: MRT4577_8273C.1.pep
MASLADLVNLDLSDCTDKIIVEYLWIGGSGIDIRSKARTVNGPITDASQLPKWNYDGSSTGQAPGEDSEVILYPQAIFKDPFRRGDNLLVMCDCYTPQGVPIPTNKRHNAAKIFNTPKVAAEETWYGIEQEYTLLQKDVNWPLGWPIGGYPGPQGPYYCAAGADKAFGRDIVDAHYKACLYAGINISGINGEVMPGQWEFQVGPSVGIAASDQLWVARYILERITEVXAGVVLSLDPKPIPGDWDGAGAHTTTA

SEQ ID NO: 350404 - protein, 195 aa, Zea mays
  unsure (1)..(195): unsure at all Xaa locations
  Clone ID: MRT4577_82740C.1.pep
MFGFSRRRMKLGRLKGHLHDPFHGPRSPAHPTKRSSHLTGEEPVVTSVSGRPDDLAWCCSSDTFDLNGRAFESSENWAVLSTDGDKPSPRFDHAAAMVGSKMIVFGGDSGNHLLDDTKILSLDKLTWDSVASKVRVSPGGHRVQFRPCKGHCLVPXGKTVILVGGKSEPSSDRISVWTFNTXTEIWSHMESEGDI

SEQ ID NO: 350405 - protein, 142 aa, Zea mays
  unsure (1)..(142): unsure at all Xaa locations
  Clone ID: MRT4577_82741C.1.pep
MASCQTVLHSIAGRSRAPVLFLSARYAHWMEEQSRQATELRAALQAHAPDVQLRVLVDAALAHYGALFQAKARAARFDXFFVLSGVCLNRAXRACFSWRAGPCRPAGVSGSPSTAWSTGPGLARARNQTGRAVVGPGQKTGP

SEQ ID NO: 350406 - protein, 55 aa, Zea mays
  Clone ID: MRT4577_82742C.1.pep
SLGSRVGRCVGNKQKHLDWCSRSASINHSANGIIDPSKSRVQETLLLFVLCKCFM

SEQ ID NO: 350407 - protein, 54 aa, Zea mays
  Clone ID: MRT4577_82743C.1.pep
IIGFLIQGNRILFWWKIKEKFKLREKGWKRWIVKKKEQNVLYEKDKSNDILKVS

SEQ ID NO: 350408 - protein, 331 aa, Zea mays
  Clone ID: MRT4577_82744C.1.pep
MATSTSQHALSSIKLLSTGCLHPDKRNCRVLSVSVGRRCPSARNLGLLCASNSQSSVIEPVQLPRSPKSGVAPKKSGESALILIRHGESLWNEKNLFTGCVDVPLTPKGVDEAIEAGKRICNIPVDVIYTSSLIRAQMTAMLAMMQHRRKKVPIILHNESEQAHMWSQIYSEETKKQSIPVITAWQLNERMYGELQGLNKQETADRFGKEQVHEWRRSYDIPPPNGESLEMCAERAVAYFKDQIIPKLVDGKHVMIAAHGNSLRSIIMHLDKLTSQEVISLELSTGIPMLYIFKEGKFIRRGSPAGPSEAGVYAYTKNLAQYRQKLDGIVQ

SEQ ID NO: 350409 - protein, 75 aa, Zea mays
  Clone ID: MRT4577_82745C.1.pep
SVLTQCGRSTRSGSSSTVAQAVKDDFPFYVYVSLSDRLAHCFHIGYLCIRSVIVWRPCHPVLIPSWMCMSQPFLA

SEQ ID NO: 350410 - protein, 68 aa, Zea mays
  Clone ID: MRT4577_82746C.1.pep
RKRRPIFGGGGELPFQQVCTKDKIEVFKFIGGPKTLKNGETLTYFRIFYREIKLNGFCGKGRLISQLE

SEQ ID NO: 350411 - protein, 202 aa, Zea mays
  Clone ID: MRT4577_82747C.1.pep
MTSLVPSRPFVLLLFLVCVAALLSRQPYFDRSHAHRITYADIRATQILPRLNFSRSHHEFYASEAARSLCDAHGYSVFKPRSDALDGRRKIYDLFMVNTELDFLEIRLKTLYNYIDYFVIVEAPLTFQGGPKNLTIHDNWKRFEAYHDKMIYHQLQYPKGFKPLRHWDREDLQRTPCSSKSSQNLPANKPLPGGTSFLVADV

SEQ ID NO: 350412 - protein, 85 aa, Zea mays
  unsure (1)..(85): unsure at all Xaa locations
  Clone ID: MRT4577_82748C.1.pep
RPRWCLRSSRCSASPASLALRASCASACCCRRPCLCLCRLGGRSFPFFCFSGVVSFVRPGLLVSPLPCPXSSDWHLILYGNPMLY

SEQ ID NO: 350413 - protein, 98 aa, Zea mays
  Clone ID: MRT4577_82749C.1.pep
TNQKTSSVFSKIFCMKSYPLVDELRFRYVQCPPRCCGLYLPSWSGHRQWFGCCLLIMKCLFCYSVMLRPMLTRRYDVARGGRATVSPGNKLGGRWGAC

SEQ ID NO: 350414 - protein, 165 aa, Zea mays
  Clone ID: MRT4577_8274C.1.pep
ELCPRSGMSWITPLSPHISPSVIPTRWPTIPSVLRISSFPFGWIPSRPRPDRPRVGAARRLLGVASHGASPDSSCLLRNKGRSSLLCPRPGPFPVPLLVAVLLPGGVVAFLCRCFSSAGLARAGMGRFEVAFGNNPRYRLLFYRSTNARVGSPRDSRARIPAGVP

SEQ ID NO: 350415 - protein, 236 aa, Zea mays
  unsure (1)..(236): unsure at all Xaa locations
  Clone ID: MRT4577_82750C.1.pep
LEAGRETVRKMITEAPYMDRTIVRRSADDXPMXPTNSRCFLLAQHLLSAQILVFLPEKDMRHYDELLEVAXAGKRDFXPSYKYDADKEPIVAGSDLIAFHDLMLNPNYKCDHLDRSDCIFNLGYSEPSYMPLPQRDXDLSVLLGAEDGFSITDLGTDATVPTESGXAEIRDTRHIVRNPPTTXCTLYAVYMFHKTLEDSMDEDHLQLLLHAMYMDDIDXSWLLKKLGCITPLTIPR

SEQ ID NO: 350416 - protein, 157 aa, Zea mays
  unsure (1)..(157): unsure at all Xaa locations
  Clone ID: MRT4577_82751C.1.pep
MELKAGVLTGEMLAIVGLSTPEAPKKPKSPPAPGSQVVLAPAPAPEPGGPNHVDLGDLLRGAGPFHTFLDYLKKTGVIETFQSQANDTKRGGITVFVPKDXGFAALKQTTFANLTQNQLRSLLLCHALPKYYSLAEFNRLSAXGPVATLAGFEVHAE

SEQ ID NO: 350417 - protein, 130 aa, Zea mays
  Clone ID: MRT4577_82752C.1.pep
RSWSPPPRCFSPSLVPDRFLCLFFFSRSYPPRSYNLLVSLLPGGISVLDLFTLAPPMFWPKKENAARPWPAALASTDAALLPPFGPLIRSPTGSLFRKEGPPLPHAQEGNGRFFFFPWPTRGKEGPSTPS

SEQ ID NO: 350418 - protein, 104 aa, Zea mays
  Clone ID: MRT4577_82753C.1.pep
SGSYISILEITVEKDNLFTCLKTDFCDFYECINKNIDGWNLFDSEWNNTITKQSDVHTNVVPICVKPGNKKCTKTPATKNFEVDGCSSAYAEVRNHPSRKLQMI

SEQ ID NO: 350419 - protein, 169 aa, Zea mays
  Clone ID: MRT4577_82754C.1.pep
MMASRQSENNAQEETSPLTTPNANIARIIPSLPLETRWPPFPLRRYANFWLPEVTLKEGVPGVHSCFEPRPTDVFLASFPKSGTTWLKALAFATLKRSTHPPFDDDHPLRHCNPHDCVRFLELGFNQQKDELEALPSPRVLATHLPYSLLPGRFTGDGEHSGCRIVYVC

SEQ ID NO: 350420 - protein, 206 aa, Zea mays
  Clone ID: MRT4577_82755C.1.pep
MALPHAPPQYSNVPSHIPIVHSQPQQPLQSPAIYNQQLQPPLPQLSRPPFPHQMHSQVPNSFGLTHANAPQHMLQQPMFHPVANPQTNFLPGQPPLPSQPPPQQLYQASSHYNTQNTTPMQVDRGAPWGRAPDAPTPGSHFPGQLPGLPGQMTQGIGGIQAGQAPLTPEMEKMLVQQVLGMSAEQINMLPPEQRQQVLQLRDMLRQ

SEQ ID NO: 350421 - protein, 156 aa, Zea mays
  Clone ID: MRT4577_82756C.1.pep
MVASRQSENNAQEETSPLTTPNANIARIIPSLPLETRWPPFPLRRYANFWLPEVTLKEGVPGVHSCFEPRPADVFLASFPKSGTTWLKALAFATLKRSTHPPFDDDHPLRHCNPHDCVRFLELGFNQQKDELEALPVPACGHAPPLLPGARQHHRG

SEQ ID NO: 350422 - protein, 76 aa, Zea mays
  Clone ID: MRT4577_82757C.1.pep
DAWRTRGGNLNDEVPDSEDCHHVNRNLVDEFRKPRQDNVQGDGTSDDEDETIWQYVSDDESPTILVEPDDDDLFAW

SEQ ID NO: 350423 - protein, 244 aa, Zea mays
  Clone ID: MRT4577_82758C.1.pep
MGVSPIAIHDAAPAESIFSISNCATVGAAAIGERNATSLPAPTRPAATSPASSSVVLSGAPNNPSSFLTASQGWGLKTVAVSWGWGLFQAAASNWTMMASRQSENNAQEETSPLTTPNANIARIIPSLPLETRWPPFPLRRYANFWLPEVTLKEGVPGVHSCFEPRPTDVFLASFPKSGTTWLKALAFATLKRSTHPPFDDDHPLRHCNPHDCVRFLELDFNQQKDELEALPSPQVLATTSLLP

SEQ ID NO: 350424 - protein, 159 aa, Zea mays
  unsure (1)..(159): unsure at all Xaa locations
  Clone ID: MRT4577_82759C.1.pep
MWRRLQTLAPSLRRAAASSSPASARAVPLSTVPVAAFRRTSTLLSSPGDKPAPSKVEDVMPIATGLEREELEAELQGKKRFDMDPAVGPFGTKXVIESYYNKRIVGCPGAEGEDEHDVVWFWLEKDKPHECLVCSRYFVLKVIGDGGDPDGHDDEDDHH

SEQ ID NO: 350425 - protein, 60 aa, Zea mays
  Clone ID: MRT4577_8275C.1.pep
STISAHYRDGSQNGRHRCISRRGLTGGSGRLRCYRYPGRHPHLIQISESPARQDRSGRGN

SEQ ID NO: 350426 - protein, 66 aa, Zea mays
  Clone ID: MRT4577_82760C.1.pep
FRVLSLRSPHLMWRPQTHSTKGNPTAILAHPRVCLWVGSSGLVCYIMVSPPPQLHGTRKNASLSQL

SEQ ID NO: 350427 - protein, 44 aa, Zea mays
  Clone ID: MRT4577_82762C.1.pep
GAPSKGLSGHQMAIAMRPLTKPRQYPGTVMVTQRGHFFFFFLHV

SEQ ID NO: 350428 - protein, 83 aa, Zea mays
  Clone ID: MRT4577_82763C.1.pep
ISHSAYIISIDVMHASLYTQPKEAEDDFQLRLLNRQMSVVFKHFFFAFALWMQELNTLRIIGVHYCTCSTMLRLNMSAFLLSF

SEQ ID NO: 350429 - protein, 50 aa, Zea mays
  Clone ID: MRT4577_82764C.1.pep
ESQDDHANACNIQFISLLMITGWSHTAYGDKETNLLQILVFCKIIYFMGI

SEQ ID NO: 350430 - protein, 101 aa, Zea mays
  Clone ID: MRT4577_82765C.1.pep
RSWSENFFFLKKWQELCLSVKIGKMLCTCLELKRSTLPTGNRAALKCKRNQGKTLRFYSSQVKALCRCSMSSFTLEATCTVVLKTPLKILLFRSFQMFQIV

SEQ ID NO: 350431 - protein, 44 aa, Zea mays
  Clone ID: MRT4577_82766C.1.pep
NLRFRCVPWIAVILSCRLAESDTQVRGESENLIFAILLLMSRLS

SEQ ID NO: 350432 - protein, 106 aa, Zea mays
  Clone ID: MRT4577_82767C.1.pep
ILTPGRRRPLGCLSNLSPVAAGRLHHGVLNKFFHPTRVDRWPLVYFFVLLNKISPGVAVPLLLLGSIFVPRRPCFCFFRVSQKKKKNKKKPGSFEKGPPPLACLVF

SEQ ID NO: 350433 - protein, 51 aa, Zea mays
  Clone ID: MRT4577_82768C.1.pep
IKLHANRPIFSSQNPTRHGGSSLCRYRTNLTTLTDHMNTLSYYKIHASYSV

SEQ ID NO: 350434 - protein, 176 aa, Zea mays
  unsure (1)..(176): unsure at all Xaa locations
  Clone ID: MRT4577_82769C.1.pep
SPPSVGPGYPPIFPPKGSKVGEPNPPNFGGDXPENQAGFPPWGKKSPGGXAGRDQIRSIGSFWPPNGAGSPKGRGGFPPAQGKGVPPGAWAKSFFGPPQGGKGSPPPPPGSGPWVFQPPPKNGGGRGETRPVPNQRGSFFSPPPKKKNPGVYVKRRPIFFSPKNWLGSLFRALFFP

SEQ ID NO: 350435 - protein, 58 aa, Zea mays
  Clone ID: MRT4577_8276C.1.pep
GVIYTLKGKSKPRENLATHIYTNYGTNTYPLDSNNVKPDEIPQLKILTPPHYNIGKEI

SEQ ID NO: 350436 - protein, 75 aa, Zea mays
  Clone ID: MRT4577_82770C.1.pep
MSIFASNGSAVVAMVGKNCCPIASDRRLGLPLQTIFTGFQGVFMVLDTLSIGLCGLGAVGHALLLRLVVGPQLYL

SEQ ID NO: 350437 - protein, 88 aa, Zea mays
  Clone ID: MRT4577_82771C.1.pep
RAWRVGRLRLLALLGLSKLEVEAIRVEGECAFPELRRLQTRGFPRLKRIQMRPARGQQGTVRIECDKHWWNALQWAGEDVKACFVPVL

SEQ ID NO: 350438 - protein, 100 aa, Zea mays
  Clone ID: MRT4577_82772C.1.pep
VHNGSASFIMQKSLPLLKIRVAAACRGLVASCLLGTEQELHSPAWSKLWPRDRGPKSQPTSYTGASCGVGREVRFSSRDLVPQFLHLQNGDANDASHRAG

SEQ ID NO: 350439 - protein, 98 aa, Zea mays
  Clone ID: MRT4577_82773C.1.pep
MRSLRITPVHGQAGALGAAASVAILSVCLTVYGVASFNEGDPSTAPSLTLTGRKKEGDKLQASDCWAKFTGGFVCCGISGVLWAYFLLYVLDVPYFFK

SEQ ID NO: 350440 - protein, 112 aa, Zea mays
  Clone ID: MRT4577_82774C.1.pep
CGSLHGDEFGPRPKLLSPSGSSLDSPAKILAVKKPVCHAPHEFPVGNLECLPDVCFPPSECYVHLSTGLWHWFFHATLCQKHFALLSATCLSWLAPLGLLGVIFANMKLLFM

SEQ ID NO: 350441 - protein, 81 aa, Zea mays
  Clone ID: MRT4577_82775C.1.pep
LVRMKQIRLTAVGAVIMGDVCCSTLAVGSDRLGDVFQGLTAALRVVYDGSCTAVTPRLCSSSSIQAINFSYLPSIRLRVRG

SEQ ID NO: 350442 - protein, 53 aa, Zea mays
  Clone ID: MRT4577_82776C.1.pep
PPLMALWQIQLHPQVHLINQLMVSHSTLMVVLLSRVVSQQTDPYGEVLRKQPE

SEQ ID NO: 350443 - protein, 60 aa, Zea mays
  unsure (1)..(60): unsure at all Xaa locations
  Clone ID: MRT4577_82777C.1.pep
ITPEITFSLLLFTIHNSKXPRGTLQGPPASPAAXLTEFXFFSSSAVVTILMALFTMVTAI

SEQ ID NO: 350444 - protein, 57 aa, Zea mays; identical to SEQ ID NO: 290561
  Clone ID: MRT4577_82778C.1.pep

SEQ ID NO: 350445 - protein, 91 aa, Zea mays
  Clone ID: MRT4577_82779C.1.pep
TNKQNPGNPCEEGFCFPNRTTLVKLKPKCHFFVRQKPRPNKDSFSLSWKFETARHHLGKNLVQTKTGRVWEGETPFYSWGLTENRSYLMGG

SEQ ID NO: 350446 - protein, 105 aa, Zea mays
  unsure (1)..(105): unsure at all Xaa locations
  Clone ID: MRT4577_8277C.1.pep
MSRSSKAGLQVPVGRIARILKVGRDAXRLTAVAPVYLTGALKYIAAEVLPLAGNTAXTSRRRRXGTRHIQVDVTDDEEVSRLLRTGTISSGGVLPNMTQPGGEPD

SEQ ID NO: 350447 - protein, 101 aa, Zea mays
  Clone ID: MRT4577_82780C.1.pep
MPPPPPQVPSVSAASSASLERERLPQWSHAETAAFLAVRADLDHSFLTTKRNKALWEAVSARLHAQGFARTPDQTTHARPTPTRSSSVVHKLKKASYLHHA

SEQ ID NO: 350448 - protein, 57 aa, Zea mays; identical to SEQ ID NO: 290561
  Clone ID: MRT4577_82781C.1.pep

SEQ ID NO: 350449 - protein, 65 aa, Zea mays
  Clone ID: MRT4577_82782C.1.pep
SRSSHSLSTRIYTPTVTIPYTIYHHTIWISFSSITIILIFMTSFLASSNPISRCYNSLNITSHIL

SEQ ID NO: 350450 - protein, 57 aa, Zea mays
  Clone ID: MRT4577_82783C.1.pep
NLILNLERFLKNVFFFALIKFYPLKKRLMCRQKMGKNWHACKQKIKKGYKNCVISCP

SEQ ID NO: 350451 - protein, 61 aa, Zea mays
  Clone ID: MRT4577_82784C.1.pep
SSSLQRGSASSPSRDQSAFVISGPWYLDMYSRICGVDHLPEMYSLAHRLSEGERTGLSDSR

SEQ ID NO: 350452 - protein, 49 aa, Zea mays
  Clone ID: MRT4577_82785C.1.pep
PQNGVRGSPEHSRCGLCTLVVKVPRLSGTACWGEEEMGGASEQAGDAVT

SEQ ID NO: 350453 - protein, 103 aa, Zea mays
  Clone ID: MRT4577_82786C.1.pep
RPNTPSQRRTTINRSLHNIANMQMILKLTRCIGRNSGGGLHKCAHVHCNAQQQDCNSKHGREQARRARHQLRMYELPWFTILLIPNREEPPLDLVELVCLNHR

SEQ ID NO: 350454 - protein, 72 aa, Zea mays
  Clone ID: MRT4577_82787C.1.pep
GVSCAASGVNRPSSCKHVCIISIACRVHGTQWLIGASACNMGRTSGACLRVVSDNQPIGSQRWAWFLEDRSN

SEQ ID NO: 350455 - protein, 66 aa, Zea mays
  Clone ID: MRT4577_82788C.1.pep
TPLYYKPFKGGFPPWPLWNTALFGGLQNVRGGEKNTIWAFPNRKSPLGVIFERNAKPPQKGPKSPP

SEQ ID NO: 350456 - protein, 80 aa, Zea mays
  Clone ID: MRT4577_82789C.1.pep
SFNTHTHTKEKRTHLRVKPFLCNLTIERACTQSIVQVVEEVLSQEICYIIYLQPRTTLDAKSACELISNVHSSIHAERAT

SEQ ID NO: 350457 - protein, 150 aa, Zea mays
  Clone ID: MRT4577_8278C.1.pep
KGKSKKVSIVVAIAVSITAALAVLLAITGFYIWRANKTKARKSGSSIWAAGSHNKDGSEGKDNGDDLELPVYDFETIAAATEGFSAENKLGEGGFGPVYKGKLEDGQEVAVKTLSRTSRQGLEEFKNEGVYQSTRCMYTHDISQSKRCIL

SEQ ID NO: 350458 - protein, 59 aa, Zea mays
  Clone ID: MRT4577_82790C.1.pep
TYALAWDRRGDFSNHSLKLAFTGTRTQDLRSANQTSAFKPRPVLTLLDAIVQDHTLQDT

SEQ ID NO: 350459 - protein, 49 aa, Zea mays
  Clone ID: MRT4577_82791C.1.pep
PTPAANLNKIHLQTHLTKPGRATLTGGRAIYYTHLPLSYPFKSPQISLI

SEQ ID NO: 350460 - protein, 229 aa, Zea mays
  unsure (1)..(229): unsure at all Xaa locations
  Clone ID: MRT4577_82792C.1.pep
DKXEGDGGKEXAAKVYECRFCSLKFGKSQALGGHMNRHRQERETETLNRARQLVFGNESLAAIGAQAQMTMTFRDVNMAGAAPPTVLGGNFRGGASATGGSSVGDPCLPFRPVHPGLSSQPSYHYLYTAPSTLHPMSYPPATYPGPPRQPAVGDYVIGHAVSAGGGDALMQSTHRSSFSCFGAPLTAPPAAAAAGAAAAAMNVQADKLNCNCSFGCGGPSRNNNVNAST

SEQ ID NO: 350461 - protein, 301 aa, Zea mays
  unsure (1)..(301): unsure at all Xaa locations
  Clone ID: MRT4577_82793C.1.pep
LVRRAPWLLPVAAASYFLSLSRDPLSPLPSLCTDFCGSGGDAMGPVGLAAVLCYGDTVTQLHIVGAAGAGAPPLPRNFSIGVVVTTLSRLPDLKVLTLSGLELWXPLPGKLGRLASLEIVNMSGNYLFGEVLRGVSRLAGLQTLVLDDNMLGGEVPTWIGAQPSLAVLSLRNNTFQGVVPESLGSAPSLRSLVLASNNLSGNLPDMSQQANLQVLDVGGNSLEPAFPKLGRKVVTVVLARNRFVAFLQNPQLVQEFRPDKQYNIHMLQERYQIGPDQIEALYQCAKFQFECGNYSGAARVM

SEQ ID NO: 350462 - protein, 402 aa, Zea mays
  unsure (1)..(402): unsure at all Xaa locations
  Clone ID: MRT4577_82794C.1.pep
MATPSHLLLVVFTALLALLPGTTQLQPSQVWTLIKIQQLLNAPPMLSHWRRSTDFCGGGGGAMGPAGSAAVLCYGDTVTQPHVAGAGAPPLPRNFSIGAVVTTLSRLPDLKVLTLXGSGLWGPLPGKLGRLASLEIVNMSGNYLFGEVPRGVSRLAGLQTLVLDDNMLGGEVPAWIGALPSLAVLSLRNNTFQGAVPESLGSAXSLRSLVLASNNLSGNLPDMSQQANLQVLDVGGNSLGLAFPKLGRNVVTMVLARNRFGGGLPAELSSFYLLERLDVSWNRFVGPFAPALLSLPSIRYLNIAGNRFTGTLSDKAPCGDNLRFVDLSLNLLMGSVPTCLRSPGRKPDTVVLVSTNCLDDSDGSQHPSPFCQNQALAVGIVPGKERKSVACQAGFVAGVVVA

SEQ ID NO: 350463 - protein, 122 aa, Zea mays
  Clone ID: MRT4577_82795C.1.pep
RGRNHTLWWSTVRRAASAFGCRRRIQLPVRESCSCSRDRAGLGVGSPCSHERVTRHVLNLHCHVPNAGSTWFSMFWLYAEACVGVVVEPQLCAECIAWARFKRSGAPWSQMLRLQKIAEFRS

SEQ ID NO: 350464 - protein, 38 aa, Zea mays
  Clone ID: MRT4577_82796C.1.pep
APPPPRREPSFLEGCLTALCCCCLIDKCCCDPSVIFVS

SEQ ID NO: 350465 - protein, 194 aa, Zea mays
  unsure (1)..(194): unsure at all Xaa locations
  Clone ID: MRT4577_82797C.1.pep
MVRKLALASLFFFNXAAREASAFPPRRPRPPPPXSAVSWQWPSCTQARTRSFRGDTSPXSCPCATTPAAASERSRRRGRTITTTTTRXMNPAYVHDDCSAADADCYSSIGLSAATQSLTLSNEDEAIIHGLRSSTTRRILFEPESTSSIMKKTKKKAAAFDGATALSIESADPYGDFRRSMEEMVLSHGADDWV

SEQ ID NO: 350466 - protein, 62 aa, Zea mays
  Clone ID: MRT4577_82798C.1.pep
RLGGSQTCRQIIPLITRLCIKSSSIASPNHRSQRVPTEGSPSGLSNFPVTAGLYLKKLPFWI

SEQ ID NO: 350467 - protein, 123 aa, Zea mays
  Clone ID: MRT4577_82799C.1.pep
TSAYAVNMRRIHDQHMEFWIGPCPTNSLTPISERTTHRLYFNVHTYRLKKTSSITNRGAKCMRTHTDTRMHATCLLGWDGGMHVLRTAAGSAHEYDRRVAAALVYEAAAAQSGETAFMCPRVK

SEQ ID NO: 350468 - protein, 574 aa, Zea mays
  unsure (1)..(574): unsure at all Xaa locations
  Clone ID: MRT4577_8279C.1.pep
KRPPSVRPSVPRSVGGAWALYWYAPKDQCDALSPCGPNGVCDTNKVPACSCLPGFTPRSPASWAMRDGRDGCVRATPLDCANRTDGFLVLPHAKVPDATRAVVDFNSSLEQCRQRCLRNCSCTAYASANLTAAPGRRGCVMWTGGLEDLRVYPSFGQELYFRLAAADLASKGKSKKVSIVVAIAVSITAALAVLLAITGFYIWRAXKQKQENQDHPYGQLVHTIRMXEGKDNGDDLELPVYDFETIAAATEGFSAENKLGEGGFGPVYKGKLEDGQEVAVKTLSRTSRQGLEEFKNEVLLIAKLQHRNLVRLIGCSISGPEKILIYEYMENKSLDFFMFDTTRSKLLDWQTRYRIIEGVXRAQGVCILTRSVRAKEEICRVVEWHLFLCYLYXICFLQDSRYRIIHRDLKTSNILLDKDMTPKISDFGMARMFGSDDAEINTLRVVGTYGYMAPEYAMDGVFSVKSDVFSFGVIVLEIIAGKRNRGVYRYSGHLNLLAHAWSLLNEGNGLDLVDENLNGSFNSDEVLKCLKVGLLCVQENPDDRPLMSQVLMMLASTDTASLPTPKQPGFAARA

SEQ ID NO: 350469 - protein, 156 aa, Zea mays
  unsure (1)..(156): unsure at all Xaa locations
  Clone ID: MRT4577_827C.1.pep
GPPPVPPRVWGLFPPPQEGPWGGVRGGVPSPXPKPPVQGDGTPRDPRDSPFGGVEXPPPSLLXGAHTLVVVPPPKGGLGGRPLGPKWAPGPKPGPGAGFLGPTQVGVAPPRPPPGPGGGXLLVGPGSPPPPPGGGGGPPAPPGCFPGQKKKKKGPQ

SEQ ID NO: 350470 - protein, 70 aa, Zea mays
  Clone ID: MRT4577_82800C.1.pep
MSDRRYGYSYPPPQGYYNNGPPVMAPPPYQYAAPPPPRREPSFLEGCLAALCCCCLIDECCCDPSVIFVS

SEQ ID NO: 350471 - protein, 77 aa, Zea mays
  Clone ID: MRT4577_82801C.1.pep
MRWRRANSQHQEVVTPTSRSGRRRGDGDTTTPVGTPRGEALTPTSAWRAAEQLAKVAVMRKSMNRVSDLHGFENARF

SEQ ID NO: 350472 - protein, 70 aa, Zea mays; identical to SEQ ID NO: 350470
  Clone ID: MRT4577_82802C.1.pep

SEQ ID NO: 350473 - protein, 34 aa, Zea mays
  Clone ID: MRT4577_82803C.1.pep
AALTFSLIHSVMHLEFYIYSTFLRTLKLNCPFDH

SEQ ID NO: 350474 - protein, 57 aa, Zea mays
  Clone ID: MRT4577_82804C.1.pep
GVVRTKLNVYLLKDILFWRTKKNNSSQFGQYSVILESQTLGNTHVSRPKKWCVFRPP

SEQ ID NO: 350475 - protein, 113 aa, Zea mays
  unsure (1)..(113): unsure at all Xaa locations
  Clone ID: MRT4577_82805C.1.pep
MLCVDILMAPAPCGHTLQMVLHLHMGKSEGNKNMNELLGDKGANLPDIASIRLSEPTWFIVSTEACQHYQXAGRALPPSLWSEVLNRLRWLKYYITSSLRHPRCPLLLSNRSG

SEQ ID NO: 350476 - protein, 77 aa, Zea mays
  Clone ID: MRT4577_82806C.1.pep
IENSDTITFEMGLTLTKLWGHHSDPETMSGHAAKRALHKGGLGVCPPNDVFEPRPEIFDLKRAGLQGIFTGLFYLKK

SEQ ID NO: 350477 - protein, 60 aa, Zea mays
  Clone ID: MRT4577_82807C.1.pep
ELAIKPRTISVKTNVLMLLSNHSMSNLLRDLFQAVLSRSILVVDGLRICRCTRRSGGSGT

SEQ ID NO: 350478 - protein, 54 aa, Zea mays
  Clone ID: MRT4577_82808C.1.pep
SMNFSLHFLLFWPIVFTRYDATDETAQSPVSLLCTQGRLSIRRTRGGRGADAGR

SEQ ID NO: 350479 - protein, 128 aa, Zea mays
  Clone ID: MRT4577_82809C.1.pep
LNRGRKKKRRSQTPPERGQPPYFYLRAGGEPNFCWLRRRGQNAGGLASHLFPRGKTPPSPIYVGAPGAQEGTRAPVLEQGGRNTGSRHGTRGWSHPPVRPGKQHRRLHWEPGNPPPRASIGPPTFFPF

SEQ ID NO: 350480 - protein, 73 aa, Zea mays
  Clone ID: MRT4577_8280C.1.pep
LVGARRVAQHQARAEAEQVRDDGRADAPRRARHDRHAHRQRLGAAAARRSHLGLGGGGDVTGVNHRTASRTRG

SEQ ID NO: 350481 - protein, 51 aa, Zea mays
  Clone ID: MRT4577_82810C.1.pep
DIGPQHHILLPASTTEPNYGTKGGQALNIKNRIRDYGTMKRYNRYTSSNQG

SEQ ID NO: 350482 - protein, 60 aa, Zea mays
  Clone ID: MRT4577_82811C.1.pep
GIGEPGRWCGVRMLVSFLVYLLCLRSINLSLSPLFLKTFLPPRRRFFYLRQDYLPTPCLS

SEQ ID NO: 350483 - protein, 58 aa, Zea mays
  Clone ID: MRT4577_82812C.1.pep
LSHKKMTWVFKTYTQGVTTTVSPEIETTIRYYWYHVGGVLKRSMHQMDTYAVGIFFLF

SEQ ID NO: 350484 - protein, 73 aa, Zea mays
  Clone ID: MRT4577_82813C.1.pep
FVLERAESLLKLVVVLANGDQASVDEMLAKLKSLTTVKRASDFPTLLAVAREGDSAWYFERASDLSVTDPFNL

SEQ ID NO: 350485 - protein, 195 aa, Zea mays
  unsure (1)..(195): unsure at all Xaa locations
  Clone ID: MRT4577_82814C.1.pep
MVSLRSYANGCRYKVYVEGNAWSVSEKYILACDSPVLFVTTLFQEGHPVSRGLVAGNHYWPXINREHMCKSINFAVGWGNEHPVQAQLIGEQGSRFVREELSMDYVYDYMMHLLTEYAGLLRYKPAVPEKAVEICTESVACPAQSLHRDCMMDSMESHVAGFDLCTLPPPFTDEEAKAIADREAEVLRKVEKMED

SEQ ID NO: 350486 - protein, 132 aa, Zea mays
  unsure (1)..(132): unsure at all Xaa locations
  Clone ID: MRT4577_82815C.1.pep
PYFIQHSYEPXIQDELAAFLQQPSPLLQQLPMEHXIAHNIKAHQLQHHVLGNLAVYSQQHQPLPFNQLPALNSAAYLQQQLPFNQLASAYPQQLLSFNQSSALNSAAYLQQHQLPSFIQLSNVSPVSFFTQQ

SEQ ID NO: 350487 - protein, 120 aa, Zea mays
  Clone ID: MRT4577_82816C.1.pep
DNTMESKTCLQLPNLCSAEAVAYEAVDWIHALGYSVAIEICMSIHGGAGSDDEEEVIIHTNPGIYRHRRTCFVALRPPELHVLWLTITLLNRTTGCPHAMCSTWCRLYTGLTSPWQNDPM

SEQ ID NO: 350488 - protein, 68 aa, Zea mays
  Clone ID: MRT4577_82817C.1.pep
GGVIGRRVLQLGGDWPCLYGRPFLPLDRDTPPDGMVKGSSFSHFRCNNLLWVRLWSSLYKIGIGCLAC

SEQ ID NO: 350489 - protein, 118 aa, Zea mays
  Clone ID: MRT4577_82818C.1.pep
MQVAMATSSSSLVTGLRCRTGAAVALTRLTSAAGDRRGWRTTASGHGARRGRVTVAAACKTCKGKGAVECPGCKGTGKNKKNGNIFERWKCFDCQGFGLKSCPTCGKGGLTPEQRGER

SEQ ID NO: 350490 - protein, 74 aa, Zea mays
  Clone ID: MRT4577_82819C.1.pep
SLVKEEAITTFFNRNTLCCNKHTTTHYCLRCCLSQITTNLHWRACSRTRCTTPRVHPLVCSAPGAQYPNLKSSI

SEQ ID NO: 350491 - protein, 67 aa, Zea mays
  Clone ID: MRT4577_8281C.1.pep
RRFKASSPPMVCHRASAVSLNAMLKAVSSQHAFPTGSGLPMWIKCTPSGVVVRDERRPRGIGRRKKV

SEQ ID NO: 350492 - protein, 119 aa, Zea mays
  Clone ID: MRT4577_82820C.1.pep
MQVAMATTTSSSLVTGLRCRTGAAVALIRPTSAAGDRRGWRTTASGRGARRGKVTVAAACKTCKGKGAVECPGCKGTGKNKKNGNIFERWKCFDCQGFGLKSCPTCGKGGLTPEQRGER

SEQ ID NO: 350493 - protein, 49 aa, Zea mays
  Clone ID: MRT4577_82821C.1.pep
LYRTYLLAMRLAQGPSVLGSPSSSRPSRKPEISGRLAYLLRITSARGAP

SEQ ID NO: 350494 - protein, 81 aa, Zea mays
  Clone ID: MRT4577_82822C.1.pep
PEVFPLAPPHVKGKFPSPWAGPGQKQGWFPWGYSFPFFWARPQNQPKKGKNPFFSKLNPFRISFSEGKTGPDWAMGKPSGE

SEQ ID NO: 350495 - protein, 89 aa, Zea mays
  Clone ID: MRT4577_82823C.1.pep
GGEPLFSLLGKHLPWPKGDTIYKRVGRHKKAHFFYKRVKPPPPPPKKKKKIGGPPKRGPPQIKKFLFLFPKSPHQGPNLWKGLGGFLNS

SEQ ID NO: 350496 - protein, 124 aa, Zea mays
  Clone ID: MRT4577_82824C.1.pep
AGKKKKEKKKKKKKKKKKKKKKKKKKKKKKKRVKKKKKKKKKGLKKKGKKKKKKKRSLGRTPFRGNFWNFPSPWGPLGLPFRGPISPFGGWFYISLAGFLHRGVWKNLGVPHFIGFAEFPFFPG

SEQ ID NO: 350497 - protein, 211 aa, Zea mays
  unsure (1)..(211): unsure at all Xaa locations
  Clone ID: MRT4577_82825C.1.pep
LLSGHRPHRLAAAAPQQLAATASFHSTPPLQRKRKTQWQHRFNFYAKRRRNRDTKRTMIRNMSEYAEQLFNSWRDEDEKXDASSGPSWFRGHRWVRDSRNNGFRSHEFYYDTVKSRGGFEFCTSDDDDEPETVFRNAFRGNQHTYYWSFESDDFPRRNSRRSHSESSGHWSYETDDEGEISTQTEVSVACKALGLSTSGPLKLEDVKSAYR

SEQ ID NO: 350498 - protein, 83 aa, Zea mays
  Clone ID: MRT4577_82826C.1.pep
GRTSRHTFCPCRSADWMQLGINTSDKKIGNSKLGTYLSGKNQGSSLSAKNRGGEKQAAGQRMCSAGVLRAAASLAARGLRPHA

SEQ ID NO: 350499 - protein, 53 aa, Zea mays
  Clone ID: MRT4577_82827C.1.pep
IVFFFFGMVFRFVTRLYFHRRCGVKACHSLVGSCSVGSCPWFPWSKLTDFMFG

SEQ ID NO: 350500 - protein, 76 aa, Zea mays
  unsure (1)..(76): unsure at all Xaa locations
  Clone ID: MRT4577_82828C.1.pep
MAAINISFKVFIFWFRSRTXYDIKGAGANHELFDAYDDCMRMHPRSSFMAFFEVVKWXVLPAKMFXMYAIHSLLLI

SEQ ID NO: 350501 - protein, 144 aa, Zea mays
  unsure (1)..(144): unsure at all Xaa locations
  Clone ID: MRT4577_82829C.1.pep
GALLAGAAGAGAQQGXXSNXTRPKXQSXXSHRGDSGXQGAXXTXDAXXEAASRGGGXGTTGDEQTRRREXAAXXGQTXHETTXGXATXPXGPXAXGDRRXKEQKQTDPPXXGRXPXSXRXRTTTGTPGXXNXNXXGDPDPGARD

SEQ ID NO: 350502 - protein, 105 aa, Zea mays
  Clone ID: MRT4577_8282C.1.pep
AFRVRVAILKIRKKRCITNSSMPGILYLAFPISLVYSPRPIALRFPVRAVACSVLKFRLALATKGKLYSAPFSSEPVADGVALFTCSARVIVQCVLVQINSPPTG

SEQ ID NO: 350503 - protein, 44 aa, Zea mays
  Clone ID: MRT4577_82830C.1.pep
QASVAALRRFISTSNATTRAPRISALPVPILCSMMMTDSAPGRV

SEQ ID NO: 350504 - protein, 193 aa, Zea mays
  unsure (1)..(193): unsure at all Xaa locations
  Clone ID: MRT4577_82831C.1.pep
PVQHFHAQLEQWLASTMAISSTAMAVTPIKVDSFGEGRITMRKTVAKAKAAASGRPWYXGPDRVKYLGPFSAEAPSYLTGEFPTDYCXDTVGLSVDPETFANNREXLEEIHSRWAMLGELLCVFPDLLSRNGLKFGDALXFKDVSQIFIEGGLHYHRNPSLIHVHSILDICAXCHVELMYAVEAYRIAGGPLG

SEQ ID NO: 350505 - protein, 68 aa, Zea mays
  Clone ID: MRT4577_82832C.1.pep
AFSKSIKTMCRSLFCSIYCSITCLIKKMASMVDLLGMKPNWFKKLLVIPLRQCSITLSLIPLYYASST

SEQ ID NO: 350506 - protein, 43 aa, Zea mays
  unsure (1)..(43): unsure at all Xaa locations
  Clone ID: MRT4577_82833C.1.pep
LMKDSGLVRVGRHSFLKTVGLALGTGGGKEEAVWAAASXGRVR

SEQ ID NO: 350507 - protein, 50 aa, Zea mays
  Clone ID: MRT4577_82834C.1.pep
TRKKKKKKKKKKKKKKKKTKKKIKKKGRKTKKLQKSNKKKKGGAAQKVQT

SEQ ID NO: 350508 - protein, 177 aa, Zea mays
  Clone ID: MRT4577_82835C.1.pep
MAARCPYFAVEESSRGIRSGESPAAALRRILATPGAHQAPCCYDALGARLVERAGFPIGFMGGFCVSAARLGLPDVGLISYGEMVDQGRLINEAVSIPVIGDGDNGYGNSMNIKRTIKGYLSMAGFGELMREDQDALVAIKDGGVPPPSVLPSFQEIKDTLGFNRYYKEEKQYQVDK

SEQ ID NO: 350509 - protein, 169 aa, Zea mays
  unsure (1)..(169): unsure at all Xaa locations
  Clone ID: MRT4577_82836C.1.pep
MGQIQYSEKYFDDTYEYRHVVLPPEVAKLLPKNRLLSEVNACSSTCISVDCVLAMLVWLSDAWMIFFFWWGDFSPSLLXNEWRAIGVQQSRGWVHYAIHRPEPHIMLFRRPINYQQQQEAAAAXAGQVSPRWLGRRPGTFRTLTPFPSLKGRRCSVDQFLYAVSWKLRV

SEQ ID NO: 350510 - protein, 311 aa, Zea mays
  Clone ID: MRT4577_82837C.1.pep
MAARCPYFAVEESSRGIRSGESPAAALRRILATPGAHQAPCCYDALGARLVERAGFPIGFMGGFCVSAARLGLPDVGLISYGEMVDQGRLINEAVSIPVIGDGDNGYGNSMNIKRTIKGYINAGFAGIMLEDQVAPKACGHTEGRKVISREEAVMHIKAAVDARKESGSDIVIVARTDSRQAISHDEALWRVKAFADAGADVLFIDALASVEEMKAFCAVAPEVPKMANMLEGGGKTPILSPAELEEIGFRLVVYPLSLVGVSMRAMQDALVAIKDGGVPPPSVLPSFQEIKDTLGFNRYYKEEKQYQVDK

SEQ ID NO: 350511 - protein, 48 aa, Zea mays
  Clone ID: MRT4577_82838C.1.pep
LPRLSLSRILRSNRLVRLPTDVHSIVSEVRLLDWSAIVQVDAAPFKQS

SEQ ID NO: 350512 - protein, 81 aa, Zea mays
  Clone ID: MRT4577_82839C.1.pep
MTEGTARGGDILIAIILPPLGVFLKFGCKVEFWLCLLLTFLVYLPGIIYAIYVITKDYPASADIPRQGERASRSHSVRNGD

SEQ ID NO: 350513 - protein, 92 aa, Zea mays
  Clone ID: MRT4577_8283C.1.pep
PGVANQLQAPGGGESPPVPGGGAHVVAPQMGLNQNKFPPRQFFFSPESPSTKISVPKGNEEKRPGCYVCKSPPNQGPWFPKLPPSQGTIYRT

SEQ ID NO: 350514 - protein, 89 aa, Zea mays
  Clone ID: MRT4577_82840C.1.pep
MDFCLVSVLISAIYFEQYDGIASVKGFSGSPWNFIGVFNALWDRPKMLSQFFWFRNPTNFGNEPLFVCHNRHKLYPSMYSLSHSRSKKK

SEQ ID NO: 350515 - protein, 157 aa, Zea mays
  Clone ID: MRT4577_82841C.1.pep
KLDSSLTPHCPSENMLPADTSSTMAPIFRKGQHCEDTDIALEQLKEIMMSKAIDYFRQYTEATVYQILWKAIHGTAYIHFEKPAMEAPGARRSFRGARKRKLVQPMDQDVQHRTRMISHLLDLWAPHAPVRLRGLILDWIQKEKESQLAAPVHHCCT

SEQ ID NO: 350516 - protein, 65 aa, Zea mays
  Clone ID: MRT4577_82842C.1.pep
KKKIYRFPRCLRKTMFPRSRIHFIDIIPVRRLVVYCCYSDEKLLVLITLVPILLSQMFLLILLCS

SEQ ID NO: 350517 - protein, 66 aa, Zea mays
  unsure (1)..(66): unsure at all Xaa locations
  Clone ID: MRT4577_82843C.1.pep
LIPFNQQGVWQFIVYRQQRQQFFNPLAVPIPLVXANFIQQHQLLPYSQFSLMNPSLQQPFFEGAIF

SEQ ID NO: 350518 - protein, 56 aa, Zea mays
  Clone ID: MRT4577_82844C.1.pep
LFFELNVFQGIHPSMDAYVRKFVNRVSGNRATKRGVVLKKFTSSGDLIIKGGLLDP

SEQ ID NO: 350519 - protein, 54 aa, Zea mays
  Clone ID: MRT4577_82845C.1.pep
THIPYPQVRRLGHLIGPDFSNAALVTSIENPKRGVSLKRARWIRERSHLCSHLF

SEQ ID NO: 350520 - protein, 56 aa, Zea mays
  unsure (1)..(56): unsure at all Xaa locations
  Clone ID: MRT4577_82846C.1.pep
VEGVGAPXGVERRSLAARRARRRSRRAAASXXGAHXSPSLACGKAVARQGXRGRFX

SEQ ID NO: 350521 - protein, 69 aa, Zea mays
  Clone ID: MRT4577_82847C.1.pep
ATRAIGGSDIILVARLVLICVTVSVVISRRIVVHLLNTERGAYEPMHYLMRDEDNHILKEKHYEAVRQV

SEQ ID NO: 350522 - protein, 92 aa, Zea mays
  Clone ID: MRT4577_82848C.1.pep
LAGDAPASASAGGGSVPSEADLAQLSTAISAGEDLGPFVRRAFACGRPEPLLSSLRAVARDRESEIEELWHAHYHDFIRCVQDLRSLHRRWQ

SEQ ID NO: 350523 - protein, 63 aa, Zea mays
  Clone ID: MRT4577_82849C.1.pep
QHTRTDSNDVRDHKGFPKGASMLCGTYIAGGRYLWPVLEVMKRCLEAHTVYESRLMITSPPGA

SEQ ID NO: 350524 - protein, 57 aa, Zea mays
  Clone ID: MRT4577_8284C.1.pep
WRCHEAIDYVLRAIGRRMYISNSVLRSARSVPDSSDATSSCADVTRRYEESSARSSR

SEQ ID NO: 350525 - protein, 83 aa, Zea mays
  Clone ID: MRT4577_82850C.1.pep
EALWEDPPPPHCFTPALRPKAMCFAWQAPNSARKTLCFFFLGKPRTPPVFSLTYLAARIIHVVFFLSHFWGGQDIKKPRPVWS

SEQ ID NO: 350526 - protein, 62 aa, Zea mays
  Clone ID: MRT4577_82851C.1.pep
GYFLSTAVLGLTHSQPGHQCSISITEYCLMVSSLMNLVRILSLLLSFVICNMGTNTRTKTFY

SEQ ID NO: 350527 - protein, 491 aa, Zea mays
  Clone ID: MRT4577_82852C.1.pep
MAAKHYQQHHFLIVTYPAQGHITPARHLARRLGSACPGARVTICAPLSAFRKMFPGAAGVTVTEEECGDGDAKVKYVAYSDGYDGGFDIAVDSYARYMEQARMAGSRSLAGVLRRLRDDGRPVTCAVYTLLLPWVAGVARDHGVAATAVFWIQPATALAAYYHYFRGHRDAVVAAAASGDPCAEVGLPGLPPLRVRDLPSFLAVTSDDDPFAFVLPEFGELVDALERDDGSSEPPTYVLANTCDAMEPDALASLRPHVDVFAVGPVLSFLHEADDGRRAPSPPRDVFDHDKCGYLGWLDTKPANSVVYISFGSSSVMCKDQVAEITDAMAQVKRPFLLVLRKDNRKGHDDDAAAAADADSAGGMVLEWCDQARVLSHPAVACFVTHCGWNSTLESAACGVPTVAVPRYSDQGTAAWLVAERMGTGVRAAARADGVVEAQELRRCVEAAASGAVAARAAAWKRNAWAAVADGGSSHRNLTEFLRQIGHGRGD

SEQ ID NO: 350528 - protein, 90 aa, Zea mays
  Clone ID: MRT4577_82853C.1.pep
MMQVLRRNRYGCSYRGLHRVVLRPSRSAFRSGAPVTGDELPWIFGSAHYHCFPEHAAIHLTERLQSHWGFWMVAEANDVDDGYPSPFLPL

SEQ ID NO: 350529 - protein, 95 aa, Zea mays
  Clone ID: MRT4577_82854C.1.pep
MALPNEGTVDYPGFKLHVLGDGGTGKTTFVKRHLTGEFEKKYEPTIGVGVDPLEFTTNWGEMTSYCSNTAGQKKATGLRAGYYIHGQTAIMMFDM

SEQ ID NO: 350530 - protein, 99 aa, Zea mays
  Clone ID: MRT4577_82855C.1.pep
LLSRSIYLVFEFTIISLVTLAWLFIIFLLSNFSPFSFLLLSMGPYIQTITFFGQRAIPLPLSIQSQLLFLFQYIHKKLRGIRIQYIAQTFFLCGNKKKK

SEQ ID NO: 350531 - protein, 44 aa, Zea mays
  Clone ID: MRT4577_82856C.1.pep
TLNTNPLIVIIRGKYYKQTQVFPPTTTYLKITPSPLLKKILQKT

SEQ ID NO: 350532 - protein, 129 aa, Zea mays
  Clone ID: MRT4577_82857C.1.pep
RPQQPRGGGYGLEHQILHTQTLDTILRGSDTTPDHRGAHGAPSSALATFTSTLWRSAKSWALELDHTGLLDRAIFLIARVIEITMESLILVCTGITTVLLHELGLGTTEVMCNWKICMINATVRLVRYL

SEQ ID NO: 350533 - protein, 341 aa, Zea mays
  Clone ID: MRT4577_82858C.1.pep
RGRDGSYQLFLEYAPGGSLADVAAARSGGRLEERAVAAYAADVAAGLAYVHAAGLVHGDVKPRNVVVGADGRAKLADFGCARRAADDDAALPIGGTPAFMAPEVARAEAQGPPADVWALGCTVLAMATGRAPWAAAAGDVLAAVRLIGYTDAVPEVPQWLSAEAKDFLGRCLARRPGDRSTAAQLLEHPFVASKSTLDLDGAKGTWVSPKSTLDAAFWESESDSDSDDDHRHHHDVDVDAVSAQSTADRIGALACPASALPDWWDSDEGWIDVLSAPAEASSDATVDEGPCVGDGGAGTEEEERADQAAEPLDTDADGAHNAGEADASPPDREWPLRVSSP

SEQ ID NO: 350534 - protein, 100 aa, Zea mays
  Clone ID: MRT4577_82859C.1.pep
PWARSGVGPRGAGGAPPAKALRQFACPGAPQLPGGPPLPEPKVPVIAAFGISLVPRSRGFQGAPPPRRQLWLLGLLGALAPGVLVFVGVWFVFFSFSAVA

SEQ ID NO: 350535 - protein, 79 aa, Zea mays
  Clone ID: MRT4577_8285C.1.pep
RKRARIPVKKKRIPKKKSQVAEYQKLLVHRLKEQRFRRTKSLAKGRSKLSIFPSGLVLAPLLYNIQCFGIYVRFNPLHR

SEQ ID NO: 350536 - protein, 416 aa, Zea mays
  unsure (1)..(416): unsure at all Xaa locations
  Clone ID: MRT4577_82860C.1.pep
MEHCTAFICTSAQWPHSITTTRRVAYHRSANSSFSAPQRRRRSTLYVMNAASTSAPISPQNITQLPRTNSTVIKSISSDKPSSAMEQLDIERGVCIPFRKYTPEMVRKEVLDSRGSILSLASRGVEIIWKLGFYWSSLVYDFLVGQDEEIVPYRARQLRNLLCDLGPSFIKAGQVLANRPDIIREDYMNELCILQDDVPPFPNQVAFSIIEEELGQPIERLFSKISSETIAAASLGQVYRATLRETGEDVAIKVQRPGIEPIIYRDLFLFRTLASFLNGISLQKLGCNAELIVDEFGEKLLEELDYTLEATNIEDFLENFKDDPTVKIPQVYKQLSGSRVQVMEWIDGIRCTDPQAIKEAGIDMEGFLTVGVSAALRQLLXFGLFHGDPHPGNIFAMRDGRIAYVDFXNVAVLSQQ

SEQ ID NO: 350537 - protein, 54 aa, Zea mays
  unsure (1)..(54): unsure at all Xaa locations
  Clone ID: MRT4577_82861C.1.pep
ELPFFASXVRLGKNGVEEVLGLGELSDFEKEGLEKLKSELKSSIEKGIKFANEN

SEQ ID NO: 350538 - protein, 179 aa, Zea mays
  unsure (1)..(179): unsure at all Xaa locations
  Clone ID: MRT4577_82862C.1.pep
SCLQDETSCGVXIAALKAVGSFIEYVNDGGDIVKMFRDFVPSILNISRQCLANGEEDVASIAFEIFDELIESPAPLLGDSVRSIVQFSLEVSANQDLEINIRQQAIQIISWLVKFKASFLKKHKLVVPILQVMCPLLTETANEDEDSDLAADRSAAXEVIDTMAINLPRHVLAPVLEFA

SEQ ID NO: 350539 - protein, 214 aa, Zea mays
  Clone ID: MRT4577_82863C.1.pep
RPKKKKKKKKTQSQVADLPTPAVPLPSSLSCHRRRRLPQPLSHPSRPHPLPPPPSSPRLGWCGADGRRSADLGLRCVIATPAEGVKMIDMVSAVEELSGLSSKELNEMLKESDNFVLQSKAEGGGPKQTLVDMEKLVSSLPLHLIAVCLELRQGPDLTYVLRGMRFLHSLSDLASRHTRLEQVLLDDVKLSEQVMDLIFFLLSILAEQKKVSMG

SEQ ID NO: 350540 - protein, 81 aa, Zea mays
  Clone ID: MRT4577_82864C.1.pep
YLPTSNRAATAMIARHADSLTSPRRQEAPPCTLCEYDPNYEAKSPARETFLRPSPGGAHLTIDPILHRNNLASSVSWPTTA

SEQ ID NO: 350541 - protein, 109 aa, Zea mays
  Clone ID: MRT4577_82865C.1.pep
FFFFFFFFVVGFFFFFFFFFFFFFFFFFLRPQKLLGFLEIFGTGLLRIQNKWVGPQKKWGLEPFNWGWGGEHIVLQRGDMKKHGPFCFYFGALNIKNTWTHELGHCPFY

SEQ ID NO: 350542 - protein, 87 aa, Zea mays
  Clone ID: MRT4577_82866C.1.pep
GDWVPRGRPGDLDPTIYQRTQRARGAHMQLCMIMSSAEEDGGLHDLLVSSGGGVSRSVASRSSSVQLRLLLLDEYECDNEMQSIRPR

SEQ ID NO: 350543 - protein, 67 aa, Zea mays
  Clone ID: MRT4577_82867C.1.pep
TTDFETALNQSTSLKTRFIVQKLFICPNKNDGLKGRSTVTSPFQSSFGFPKQKTLLSPHLFLINKPF

SEQ ID NO: 350544 - protein, 41 aa, Zea mays
  Clone ID: MRT4577_82868C.1.pep
NYNLFRLYNLTNYKLSVNIKLARMYNEQIRPKKITHYMCEQ

SEQ ID NO: 350545 - protein, 824 aa, Zea mays
  Clone ID: MRT4577_82869C.1.pep
TRPVIDMIYSDVYLEIDGYNKQRLSYIYGILSACHSYLKRTNEIELRYPVHVHTHKLEPFQYYKVLEEECKKVCFIDGLNFKNIAGLDNLNFEHFNDEVCKNIHASTVTAIADMVQSLVSMYVDVLAKGLISQQGVYKHYVLGLLASLEGRSEAQSNNTDYEKLQASLCEFELNYDSCREYIQALPATDISYIVRRYCTLCFPSNLARSHPQEPSWRKPLATLLEFWSKVVDDIPGDSIDACSYGRTDYLNSNRLSLCMRAFRQLLIIDEIALHQGWDAISMYVKDCLRNGKMMETPCFCRAMILSGCSFESVVEVYFGGQGQLGSENADPSNYLDLLELYNAATEKCLSDLSEESCEYRILLHNLLSSLSRSTGKHAGALEMVRSGVWGKLIRYSEDMQLESQLRVYALQLMQCITGRNLKSLPNEMVCQVEPWESWYEHGAGAAIADESINSSSSITGTLVALRSTQMVAAVLPDANITPENLATLDSAVSCFLKLSERASGVSVAVFEAVLEEWEQLFSPKEEHVAPHESPKETSDWSDGWDDGWEALPEELESPKNKQEGVLLSVHPLHSCWMEIIRKRVELGELHKVLELLDRASLKHSVFLEEEEAHSLVELVSALDCFMALKTVLLLPYESLRLQCLQMVEVKMREGIVSTSSNADDQELLALVLSSGTMQKIITEEAYSKFFSYICHLVGHLARSFQTDLLVQWNEATSKINRSLLFARVLFPCFVSELVLGGQYLLAGFVISRWMHTHPSLGLMDITETSVRCFLQGQVAQLDEVGGSDAALTDGEVCVRHTISTLQPKLVSLLQSALALSNKEL

SEQ ID NO: 350546 - protein, 50 aa, Zea mays
  unsure (1)..(50): unsure at all Xaa locations
  Clone ID: MRT4577_8286C.1.pep
EDLGIPVSLRRARRIQGLXADDPIEAVIQDQPIKDSHGVDLVDVGEYELA

SEQ ID NO: 350547 - protein, 511 aa, Zea mays
  Clone ID: MRT4577_82870C.1.pep
MAAPGGLDQDCAQDAAIKLFGRSIPVLHSSVFAATAAAESEVSTKLANDVRSKDGMPCLPNMSLIVKTNPFPSKSNMKNGLQAISSQHGKMEADSNSEEAKNSLQAIISQPGKRYDSKSEEAKTESGGSGQEKVLKKPDKILPCPRCNSMETKFCYFNNYNVNQPRHFCRNCKRYWTAGGTMRNVPVGSGRRRNKDPSHHHHFTKVCDYTIATNGDVSDATQRQSVAAKLCLLQGSGKQNETACKSVSPVSNIKEQNNADLISLVSGDNKEEKSCASSAVVSGSSENWMPENTVKKEEDNTSAYGNGVKLPDHKMQSHHAGPVSVFSRNPAAVMATNQCSEDGIHTPGNGTVSPLSLPPLPMVPTPGICAPAVPFPFPLVPAFVSCIPGWPSGLWGAPWPGSSAPTLLSLPPNGLAGSNSGVLGKHTRVANLQEEQKAEKKFWVPKALRIDNPEEAAKSSIWASLGIKPDDRIIFKSFQSKDLKNSATKMPESLQANPAAFSRSQTFQERA

SEQ ID NO: 350548 - protein, 108 aa, Zea mays
  unsure (1)..(108): unsure at all Xaa locations
  Clone ID: MRT4577_82871C.1.pep
PVRWGYPDPGAQGALPTGLVSRVQVRLXGALKCPWSAREGWEKWAAGYPPTRVFVGVVASPKADKDPYLFQKALYYNVLQFAQKAPNSGGLMFWDRYSPKMTPYFSSS

SEQ ID NO: 350549 - protein, 143 aa, Zea mays
  unsure (1)..(143): unsure at all Xaa locations
  Clone ID: MRT4577_82872C.1.pep
VPTSHFPQSPHPLSQDRQPPKKDQSPLSPRSPRQKYGAGPLCQSQITHLYPHSINQPRPQHICIYRQDRPAHDMLXXXGLPPPKQARAXHNQPTRXTLVRQGAHASPAXXKHTHSQQPEQXPPPXXQKQIQPAPPKKKKKKAA

SEQ ID NO: 350550 - protein, 74 aa, Zea mays
  Clone ID: MRT4577_82873C.1.pep
KKKKKKKKKKKKKEKNFISSKFTYSFLQRHIFFIVLPKFILLPDFLKRPDLKNLGVSKLNGFIVHIRLVTWHII

SEQ ID NO: 350551 - protein, 68 aa, Zea mays
  Clone ID: MRT4577_82874C.1.pep
ARHGGLHGGLYMGTHKPGIGVHEWLHAPSSVKKPEKVCIAQNKKFLRAVDFLNGGERTPWGGAIWVNI

SEQ ID NO: 350552 - protein, 102 aa, Zea mays
  Clone ID: MRT4577_82875C.1.pep
TVRLNTLSNKKLTPPDQNSPFSKISTGYKKACMLKQELLKKLGIGKIGVVFALGGLPKFIFEPPHFFVTRGTHSLKRPVCKTAQIKPPPPRAVFPLNLGSGN

SEQ ID NO: 350553 - protein, 61 aa, Zea mays
  unsure (1)..(61): unsure at all Xaa locations
  Clone ID: MRT4577_82876C.1.pep
FRCVGQGAKEMLGVQEKESLCTSSRKSMGSTRYTLGGGGRXXENNQLLMMHRSMVQCGKYA

SEQ ID NO: 350554 - protein, 175 aa, Zea mays
  unsure (1)..(175): unsure at all Xaa locations
  Clone ID: MRT4577_82877C.1.pep
MGRDIDTSALIAERGPLMTFICTSSTSTSATSSATLSCILFQRAGKTTLEELAEKRRDCAQTEVAIHDGDQDYRNPNMIMLMVIHMIEYPXTRFRHMERLQLIDDGGFAKNCIRYLXLMVLLDQRQEVLMLATNSLQQDXTHSNQXIAGLALXCALGNICSXDMXRDLAPELERL

SEQ ID NO: 350555 - protein, 548 aa, Zea mays
  unsure (1)..(548): unsure at all Xaa locations
  Clone ID: MRT4577_82878C.1.pep
MEGRGNPPHTTTDAVIKKPRSVASRKPRSTEQLTYEYNGICPPSWSAPHDDDTGVGAGGHRRKELHLNSPEMKGSMAHRSDVPRKIRRDDRSGGDHDGHGRSSKAKDAAKHGSENVLALECTARNNGSPDNPQLVPRDDSMPCENRSRKVKLKVVSRTLHAKNGQDAGGSGIPATLDGSIHQYKQKDSGGHTNKETHGNRVEGKHGNGHEIFPSSDLVRKSKRIPKKKTLDGDSDDEDGELRYLEKLKGAKVAPDPVNTSHKGYDFGXCSQEKEAXKLSRNKSTPYEVDDDFRMSRSGRDGRKKLNLGDDNEFIEEEESEMDEKNGLKEPDSPQGVKIETPGLTTRQRALQGRGGNGESFIEFPDGLPAASSRKQKEKLSDMEIQAKKAEAALRRKMQVEKAEKEQQAEAMRKILGIDSEKKKEEKKLKEREEREKQARLEEYRKNCVQTVMGPTGTVITFPESMGLPSIFNSKPVSYPPPREKCAGPSCTNPYKYRHSKTLVPLCSLACYKAVEDRPPAQGSEGGGGQGSDAGQGTDAAQESAGKQA

SEQ ID NO: 350556 - protein, 152 aa, Zea mays
  unsure (1)..(152): unsure at all Xaa locations
  Clone ID: MRT4577_82879C.1.pep
MASPSTEAPPLPTLRXVIAHDDDDDHFIAEEEEDEEWDDMSKRMSRLSMEGSEAGDADDEDDGGEDEGEEDDDEFDDVRSDVNAAATYRAWPPRDEPQQAPSAASLPGTPDRGAQAPWWPGPSAKVYASETEARRPPGADGPRCRRKRQQMA

SEQ ID NO: 350557 - protein, 197 aa, Zea mays
  Clone ID: MRT4577_8287C.1.pep
VLFLFALALTPTYVFTERLLLLLGQTPELSRLAGEMSVWLIPQHFAMAMLLPLTRFLQSQLKNWVTAATAGVTLALHVLVTYLLVTRFQLGYAGVVVAADVAWWLVVLGQFFYVVCGGCPLSWRGFSVEAFADFWDFIKLSTASDVMLCMENWYYRVLVLLTGYLPNAEIAVDALSICLTINGWEMMIPLGFLADTG

SEQ ID NO: 350558 - protein, 37 aa, Zea mays
  Clone ID: MRT4577_82880C.1.pep
PTLDTTTFPCVCADVAPPPTPPVLRSPACAGSCGAAE

SEQ ID NO: 350559 - protein, 70 aa, Zea mays
  Clone ID: MRT4577_82881C.1.pep
ERPPGQVQAFFFFFFFFIFLKRNVFCLVLETKHDERLLQLQTISNLNLVHSRSTETSFLRHPLFPKKSQL

SEQ ID NO: 350560 - protein, 61 aa, Zea mays
  unsure (1)..(61): unsure at all Xaa locations
  Clone ID: MRT4577_82882C.1.pep
VPLFRVFPLGARSFPLHNPPGPWGWFMLNCNSGCTLPLLQPEGFSTCVPLLXPFKNQKSKX

SEQ ID NO: 350561 - protein, 101 aa, Zea mays
  Clone ID: MRT4577_82883C.1.pep
GGRIHPIELRGGRTAGGHGYQATTYSIKEPRSCVDMLPPPWYDSTLKSTQLPRGPLIYLYTMSSTIHSSATCGLAICRWIRSADKLCKTGVCVDHRPNPPV

SEQ ID NO: 350562 - protein, 88 aa, Zea mays
  Clone ID: MRT4577_82884C.1.pep
MSGSPASPTVASFSRDPTLVRPLTMEAMEDLSQLDESMRQALSLTSYDDPSDDAAPRHHTSFLNAVDLYNVCTDKSAVLNSLICHPFL

SEQ ID NO: 350563 - protein, 98 aa, Zea mays
  Clone ID: MRT4577_82885C.1.pep
KRPPFFFFFFFLKRNRTTTGWITIDVGSKGPFATYNAPTRFKLSAKDSANRPFGKEVLGGPPRRVGRAGLTNGPGPWGPNPPTLVRAGGQQKPRLSNL

SEQ ID NO: 350564 - protein, 121 aa, Zea mays
  unsure (1)..(121): unsure at all Xaa locations
  Clone ID: MRT4577_82886C.1.pep
QRKIITLEAKSXDTIHHXTSKIQHKEGIPPXAKTVIFAVYQVXYARNLAEYYIPYDDTLHLTLTLTAGIIDASLQALCLMYKHYNMICRICYARLHPSIAYCRKNKCAHRNHLMPLNNMNN

SEQ ID NO: 350565 - protein, 74 aa, Zea mays
  unsure (1)..(74): unsure at all Xaa locations
  Clone ID: MRT4577_82887C.1.pep
XWLXTSPPPQSMLRMQLQFFSCSAPAKGGAGRPGHRRRQRRPPRRRHEREKEISWGRRCTKKKKQAHRCSVQAA

SEQ ID NO: 350566 - protein, 143 aa, Zea mays
  unsure (1)..(143): unsure at all Xaa locations
  Clone ID: MRT4577_82888C.1.pep
AQGTNKGSQKHRRHXGXTARXATATXNPQXTQAPKXTXXPPNHTPAETTEGENRRXQPKRNQQAXAXGNKPETPRNHQQTTAQTQQRPKEQGEAQNKRAQQPQQQEQANQXANTEQQQRXANNQQXARNXDRRKQQQQQPSRQ

SEQ ID NO: 350567 - protein, 306 aa, Zea mays
  Clone ID: MRT4577_82889C.1.pep
VCPPSSICGCSEPASFPALIWSGSSISGMASSPVSYWCYSCSRFVRVSPSTVVCPECDGGFLEQFTQPPPRGGGGSGRRGTMNPVIVLRGGSLSGFELYYDDGAGEGLRPLPGDVQHLLMGSGFHRLLDQFSRLEAAAPRPPASKAAVESMPSVTVAGGGAHCAVCQEAFEPGAAGREMPCKHVYHQDCILPWLSLRNSCPVCRQELPAAATPDAEADAGLTIWRLPRGGFAVGRFAGGPREQLPVVYTELDGGFSNGVGPRRVTWPEGDGQVDGGEGRIRRLLRNLFGCFGHGSWPASSSQSRSG

SEQ ID NO: 350568 - protein, 57 aa, Zea mays
  Clone ID: MRT4577_8288C.1.pep
TAQWTAVYATSTCRATYIANALSDGEQLFTYTTYELVMLTQVTRDCMPCTIGEIRQF

SEQ ID NO: 350569 - protein, 278 aa, Zea mays
  Clone ID: MRT4577_82890C.1.pep
MDSSPVSYWCYSCSRFVRVSPSTVVCPECDGGFLEQFTQPPPRGGGGSGRRGTMNPVIVLRGGSLSGFELYYDDGAGEGLRPLPGDVQHLLMGSGFHRLLDQFSRLEAAAPRPPASKAAVESMPSVTVAGGGAHCAVCQEACRPGRAGREMPCKHVYHQDCILPWLSLRNSCPVCRQELPAAATPDAEADAGLTIWRLPRGGFAVGRFAGGPREQLPVVYTELDGGFSNGVGPRRVTWPEGDGQVDGGEGRIRRLLRNLFGCFGHGSRPASSSQSRSG

SEQ ID NO: 350570 - protein, 75 aa, Zea mays
  unsure (1)..(75): unsure at all Xaa locations
  Clone ID: MRT4577_82891C.1.pep
ITSSDWLPDSRLTRWXSMYRIIYPYRHGEVVRILQWHRHPRRKTSSSATSQARDKKQDKDPIPRDHEKPLLERKP

SEQ ID NO: 350571 - protein, 142 aa, Zea mays
  Clone ID: MRT4577_82892C.1.pep
KLKNPKTLEKAKGAPKGSPNGREFQPKGGNPREGNFFLVSNQKKFRGVWKNLKAGPKVGKKATLLKPPRGGPPEKDPRPKPRGGFYRKKKRGRNSPHPNKVPGFPRGVSPGFAKWEQKDPGLTQTQAGRKKPRGPRRGGRQQ

SEQ ID NO: 350572 - protein, 69 aa, Zea mays
  Clone ID: MRT4577_82893C.1.pep
IYYREDPEQSDGLPCIARVHTGTSLCTAPGFGHLCISIPQFGEVDVGLSGDIKECPVICSIFLHMRAED

SEQ ID NO: 350573 - protein, 57 aa, Zea mays
  Clone ID: MRT4577_82894C.1.pep
TVLTILSYLAMAQTVELNDATICNVFMRAIKPVHDEMRRFIFYIRIHHEPDGYRECH

SEQ ID NO: 350574 - protein, 109 aa, Zea mays
  Clone ID: MRT4577_82895C.1.pep
PPPPPPPPPPPPPPPPPPPSFFLFFPFFFFFFFFFFFFKKGRGAKLLLFTKAPPGGGGEKPPQTPQGGFLLGFPPRKGNMGPPQFFFFQKIFPRFSGGFSGKNPGQKPS

SEQ ID NO: 350575 - protein, 91 aa, Zea mays
  Clone ID: MRT4577_82896C.1.pep
SHPVSRAFPQLFLRVSPASVRGGSRRAYSPPPANIEQGGKAQPLNAPKGDKKEFQQTDLAYLRKKKDQGKALKELKGQAQNGAIGGSGLKK

SEQ ID NO: 350576 - protein, 93 aa, Zea mays
  Clone ID: MRT4577_82897C.1.pep
EAHTEAAPHPQGVFRVTAPTAAIWCFTQESHAGAFMWIQNIIVCDPVYVITQSVFSVKFRVTQLKHRRNSVISRVTFKQIGGGHQRYWEAKCV

SEQ ID NO: 350577 - protein, 72 aa, Zea mays
  unsure (1)..(72): unsure at all Xaa locations
  Clone ID: MRT4577_82898C.1.pep
KVLALVRSVGFSANTTIYLTETWWQKGXNDLKEEFPNTYIKVRKLLQFNECKLYSIFPSISFIDFSYYRSCQ

SEQ ID NO: 350578 - protein, 81 aa, Zea mays
  Clone ID: MRT4577_82899C.1.pep
ANCLLTNGFSRQLCLPSRTSCTLFASTKRAVKRWILKTTLFVFQNFLQFLAGTKRIQEQKCVSVFVRESTLHSITPCVLQC

SEQ ID NO: 350579 - protein, 70 aa, Zea mays
  Clone ID: MRT4577_8289C.1.pep
DRSFPALMVMTLSSHSLFSLWQPGHCCFRLLAQYPNAICLRLLLKVDSCRFLVLAFFFHSRLPAPLGLSA

SEQ ID NO: 350580 - protein, 104 aa, Zea mays
  Clone ID: MRT4577_828C.1.pep
HANGGSLRYHTVTALPSYQAHMHQLLPLTASDGCARVPGNLTRLSRVQQLELIIPRISHIHAYYSNHTRYTHTSEIERKTLQNIFYISKAQVLQHKKNCNYYKS

SEQ ID NO: 350581 - protein, 288 aa, Zea mays
  unsure (1)..(288): unsure at all Xaa locations
  Clone ID: MRT4577_82900C.1.pep
DSDSVWYEIGRWHAPLLLVLTLTAIPYATKLAGGMRMPSWFDIHDAPITSRSVRGEEDVLRAVQIVHTMIDREIASGTGPEDVFVFGLSQGGALSIASVLLYPKTLGGCAVFSGFLPFDSSSSSSFAARVTDEAKKTPVLWIHGGADSLIPVQEGXGRDGVKFLRGLGMACEFKEYDRLGHTLAPYELEHCERWASETVLGVGEDEHGRRQGPGKKKKKGGPSGDGDGDGEQEQVVVLRGLQSLLQIAAAAAACSCSYCSDKPSCDFFICLLLEVLIFMCKFCTISVG

SEQ ID NO: 350582 - protein, 37 aa, Zea mays
  unsure (1)..(37): unsure at all Xaa locations
  Clone ID: MRT4577_82901C.1.pep
KNVLNSDVDVIRKGNGALGRTHRVEHKSVGGVXVNAC

SEQ ID NO: 350583 - protein, 226 aa, Zea mays
  unsure (1)..(226): unsure at all Xaa locations
  Clone ID: MRT4577_82902C.1.pep
MEHDAHAEAPPHAVPPPEVATVDDWARDDAEPMSVESGVAAAELTAADSGADAPLAPAPSAAVAAEGVKEIQSSLQSLELKTNVATQEGAHVVEDDVDETKRHLNVVFIGHVDAGKSTTGGQILFLSGQVDDRTIQKYEKEAKDKSRESWYMAYIMDTNEEERVKGKTVEVGRAHFETEHTRFTILDAPGHKSYVPNMISGASQADIGVLVISARKRDXRTGYERG

SEQ ID NO: 350584 - protein, 116 aa, Zea mays
  Clone ID: MRT4577_82903C.1.pep
PTAMVQNLHMKIRTSSKKANKEITRRFVTAVGTKTSGGAGYLEKRLKAPQNNDLLLLPIPGQPPIFFFPGPCRRPCSPSPTPRTVTDAHRSQCSSSYSARVWPSLSYSCARRPCRV

SEQ ID NO: 350585 - protein, 359 aa, Zea mays
  unsure (1)..(359): unsure at all Xaa locations
  Clone ID: MRT4577_82904C.1.pep
INDDPRVALNTYSWTKMASLLLVDSPAGVGYSYADHEDDYTTDDTSRVADLYDFLSKWFAEYAEFLSNPFYVAGCSYSGVIVPVLAHEIIKRNEESGGVKINFKGYSLCNPAIDVDIENNAHAPYAFRMGLISDELFQSLVTTCNGKYWNNSNPSCQENMEQFYTQIKGINMEHILCPPCRYKMGIXPINSLNMILXQMFESLSKTSKHGLECNDQELALEKLFDTRSGREKLHANKVEVSGPWKRCPRRVLYTRDILTLIEYHLNITSKGYRVFIYSGDHSLLVPFTSTLEWLKKLNYKEIEKWHPWYLENQIAGYSIRYENNILFATIKGAGHVPSDYLPFEVFAAYQRWIDGAASL

SEQ ID NO: 350586 - protein, 90 aa, Zea mays
  Clone ID: MRT4577_82905C.1.pep
PGNWDGQNQSSTSVIIRLQGEVISLKDAQRRLEEEVSRHVEGKKVPQHELSHLKDSQGDIDRKQLSVKGPIPGVDFHVGSVQSVAPEVRG

SEQ ID NO: 350587 - protein, 132 aa, Zea mays
  Clone ID: MRT4577_82906C.1.pep
RVLPHSRSSSPWSCSAMPFFPRPVSRSSSSPHPSSIHGCSSLYRAPLPNSPTPGRAPPSLLLPWPSSPPARSSPISPWPNAPPARVQHPLLSYCNTQNCIQGIYSGLLIFFVCHVFITTRGHLYLRMINQNK

SEQ ID NO: 350588 - protein, 81 aa, Zea mays
  Clone ID: MRT4577_82907C.1.pep
GQGSRHPWQDSPTASKLFPMSLSAITSRAPSTRVSCVSQKVQTGLAGWLEGYKTGSPIAGPGAEERSDPWPRISTATHSLV

SEQ ID NO: 350589 - protein, 87 aa, Zea mays
  Clone ID: MRT4577_82908C.1.pep
AFRVIAAQQKFPNFSFDCWVDSPGLEARLGGVVAAVGADGVDGVRIDPHLRIIVAAGQEPKPHLDCPLLQMQSTRTSGTEEEEARIR

SEQ ID NO: 350590 - protein, 125 aa, Zea mays
  Clone ID: MRT4577_82909C.1.pep
KNGLGAPFKASTKSQGPNNGLGAQHRQFFYEKNNPTFCLFTLPPKAKNHLFPYGREKVSLQNGVFLTITNPHLGKFGGALFVAIKKGLFIHRIFFNKGGKNRVLQQGFCHLGAEKGPFYHPKKFF

SEQ ID NO: 350591 - protein, 43 aa, Zea mays
  Clone ID: MRT4577_8290C.1.pep
IKGWLIPDDGPYGCANNAPELKLCTWLGPSRGYLLGAGPLNFF

SEQ ID NO: 350592 - protein, 429 aa, Zea mays
  Clone ID: MRT4577_82910C.1.pep
MRLRLLACCYNDPEMRIDPDTVYPIRPDCRDDAPKTRFKPRPGLTLSPKRWKLLHNEEGCVDIAGMIKRVQRGGVHPTIKGEVWEFLLGCYDPKSTTEQCNQLRQQRRLEYEQLKAKCREMDTAVGSGRVITMPVVTEDGQPIENPNGGASGSEQKNSGAPLPKEVIDWKLTLHQIGLDVNRTDRLLVYYERQENLARLWDILAVYSWIDKDIGYCQGMSDLCSPISIILENEADAFWCFERLMRRVRGNFKSTSTSIGVRAQLTTLSTIMKSVDPKLHEHLENLDGGEYLFAFRMLMVLFRREFSFVDTMYLWELMWSMEYNPNLFSMLESDTGTSSASTKDESVLGQCGKFERKKLQAAKKDDQIPLSVFVVASVLEARNKKLLGEAKGLDDVVKILNEITGSLDAKKACREALQIHEKYLKTVKAS

SEQ ID NO: 350593 - protein, 108 aa, Zea mays
  unsure (1)..(108): unsure at all Xaa locations
  Clone ID: MRT4577_82911C.1.pep
LVGRPVQSAVCRSSGRKAPFLXRASSSPPAKQGAXRQVWFACKQSLCYLDGTLPGDYGFDPLGLSDPEGTGGLIXPKWLCYGEEINGRYTMLGAVGAIGPGHLVRDGG

SEQ ID NO: 350594 - protein, 278 aa, Zea mays
  Clone ID: MRT4577_82912C.1.pep
NSARGSFLPFLLPFSVFLHRATGGESRTPLTSPISSPPRREPIVTTTASGRGSHPRVAPWPSRSTASFSRPVFRVSATCFYVESSGPAVATAESCCTRRSRGTRTACGSLAPPPSRCVVTRWRGKWQTGIRCCRVDCPLPTLRAKPTHDRKSYVVVFFPRTKTYSWVDMLLVLPIEECPLPLVNGTHRKWRKLVKDLNIPRRLNMQNLAVFMINLIDELHIEAVVDDARKATTWKEFALEASCCRDYTDLGKMLLKFQNVNPRTLFHVDISGSVTPTF

SEQ ID NO: 350595 - protein, 86 aa, Zea mays
  Clone ID: MRT4577_82913C.1.pep
KRDLAVQIQHEGPPQLEDPAVGYTGLVLLDQHRRSAHCAGTVLCPLDMLLRNIAQDVRERSGNQSRRRVPALIHGQAGLHGGADRG

SEQ ID NO: 350596 - protein, 122 aa, Zea mays
  Clone ID: MRT4577_82914C.1.pep
MPFLLSAASASTTTNPHPLSPFPRSQNNSRVHRLQLPARRLPSFPAVAPGASFAPLPQRLGMASLAASAAAAAEVTHLTQRDAAEIDEQLMGPLGFSVDQLMELAGLSVAAALAEVYKLNEH

SEQ ID NO: 350597 - protein, 50 aa, Zea mays
  Clone ID: MRT4577_82915C.1.pep
SGGLWRPACPPSASAFPWCSCAFCGSSLAGRFLLLVLVLALGVARALSVL

SEQ ID NO: 350598 - protein, 92 aa, Zea mays
  Clone ID: MRT4577_82916C.1.pep
YHRNRSKRERERIHDHEGRQERRGRRAGEHTSMILHLIGDPTTAMHCPLRRHGAVSDGSLVTTPNEHHACLSLCGTRRETCKYNGCLTPACS

SEQ ID NO: 350599 - protein, 63 aa, Zea mays
  Clone ID: MRT4577_82917C.1.pep
DPHHVAHGLQSIHMLVPPKSLALFLYRRLICSYFLPKCDFSVTVWQCSGLQSLQSFPGATTTI

SEQ ID NO: 350600 - protein, 112 aa, Zea mays
  Clone ID: MRT4577_82918C.1.pep
LDKRLCVPDNGRLLHSVSTARDIRTPRSRNGKTSRSRRAGTHVVGRPARVAMDGTLGSVWYRCRCSAESRAHASNDPVCSPTWDVAKHAAACLLGPTSARCSGPVTRRTATG

SEQ ID NO: 350601 - protein, 54 aa, Zea mays
  Clone ID: MRT4577_82919C.1.pep
KSFLELCCRRPWSNLCSHIRQTGYASCQCCTSIQHQISWRPAHLRACSKRVCLA

SEQ ID NO: 350602 - protein, 155 aa, Zea mays
  Clone ID: MRT4577_8291C.1.pep
GTWAKKKFPMPTPQQGGRHPGLRTKSMERKKTRRTARVGGGRGPKGKHSQYKGPPPTKQPPPRGGPNRPICGAGRLLAGPGLSLTGRWLTRHYQPGQYLKGRDCRGRAYVPGDEGKGNPPQGKQSPALGRKGLPWEGGGDKAYWGGPTLTCRPRS

SEQ ID NO: 350603 - protein, 65 aa, Zea mays
  Clone ID: MRT4577_82920C.1.pep
AHGRPSQQQWSAKINGNGSSVGRFRSRWLCPFIRLAASSMVFKGTCHQLRAVRVVGTKRYFTISI

SEQ ID NO: 350604 - protein, 64 aa, Zea mays
  Clone ID: MRT4577_82921C.1.pep
ILSHRIMRTVYSLWSSAPDLIQSISCSHVGPMPHGKTFCDFTPKLKIGCRKVCQPSTIYICVCF

SEQ ID NO: 350605 - protein, 53 aa, Zea mays
  Clone ID: MRT4577_82922C.1.pep
ADQLSHLLQILQLDTINALKIAFALLALAPSSISNTSYCCGCQTPPHHLPSPF

SEQ ID NO: 350606 - protein, 59 aa, Zea mays
  Clone ID: MRT4577_82923C.1.pep
NLDKSSHNFSTEYLMSSIAASTKGRHDSKVADHRHGFERADPRRCLCLDCIQALRVVSR

SEQ ID NO: 350607 - protein, 42 aa, Zea mays
  Clone ID: MRT4577_82924C.1.pep
TTRTNHSLSLLHYTFALHGHLNHLGPRFTLTLLVTQLPSFPL

SEQ ID NO: 350608 - protein, 68 aa, Zea mays
  Clone ID: MRT4577_82925C.1.pep
ETVGKRTERPACPRSGSPQLRFLRRLGSATARCPTECRELPVVAGAAERARYLPVGRTGLRRPTWAAT

SEQ ID NO: 350609 - protein, 79 aa, Zea mays
  Clone ID: MRT4577_82926C.1.pep
IQKKKKKKKKKKKKKKKKKKKKKKKKKKKKKKKKKKKKKKKKKKKKKGGGGLNPLRGKFWKIKQKCGGFEQSLKGPKSP

SEQ ID NO: 350610 - protein, 89 aa, Zea mays
  Clone ID: MRT4577_82927C.1.pep
ECFSILSSYRPFFPFLDLDPFTVFPGRKTKGSKRGRRGVCSIDALRVSDCSPPWTIVKFFSRGISPTTELKCVSLLRSVGHLVKRNFQP

SEQ ID NO: 350611 - protein, 76 aa, Zea mays
  Clone ID: MRT4577_82928C.1.pep
IRCVRRAFRWPRTPSWKASVQTAHCADSGGDRDNGHGMDGGLGRRRAGRRGRRPPARRRHRSAPDGPAGAPRVRGR

SEQ ID NO: 350612 - protein, 49 aa, Zea mays
  Clone ID: MRT4577_82929C.1.pep
RRILPYLSIHFGAFLFHHTTDHGPIAPSNGGVLQPPGLPELFVHARILN

SEQ ID NO: 350613 - protein, 54 aa, Zea mays
  Clone ID: MRT4577_8292C.1.pep
LTKRDILRFHEGTNNDVQGLSDRLFFFWERRFHQAYRLFFVGRRLFYLLVKWGP

SEQ ID NO: 350614 - protein, 93 aa, Zea mays
  Clone ID: MRT4577_82930C.1.pep
GGTEAPPGPVQELGFGDLLTRPQGSAGSRPPARPQGRGVPPGLAKGPICPSSHWGRKVIFRQVPLSGRDFGQWPLFRGGNMKTGSWPLFNVWF

SEQ ID NO: 350615 - protein, 84 aa, Zea mays
  Clone ID: MRT4577_82931C.1.pep
AADWWDAEIKSPYGRIQRGRIAYRSAYEFKAHTDKNGVPLDAHEKFSKPKQVEKPVIDPSKKDLGLALNGNQKIVLEALEAISE

SEQ ID NO: 350616 - protein, 76 aa, Zea mays
  Clone ID: MRT4577_82932C.1.pep
ELPSRSSSRPQQVSEARGEACIFRTFDIQFGSNLIFLALLQDMSKGFSIMVGLSLNCRHLHVQRCLLLYFDVICLV

SEQ ID NO: 350617 - protein, 170 aa, Zea mays
  unsure (1)..(170): unsure at all Xaa locations
  Clone ID: MRT4577_82933C.1.pep
THWNNHHAESKTTPTLTRGKNSPQLPVPGNIPRPSHAVSKGLPQLCQSQLTYGQRXSGAMRAAXKLAARGTDITATRRQPSIYYNXEIDEASHKKMIARETYPSPLXYHGLTKSICTXSMTCVCHGLLDFFQLHYGNNIYNDVNVILNGHHVGIYKTFDCVQHHDSIKHF

SEQ ID NO: 350618 - protein, 61 aa, Zea mays
  Clone ID: MRT4577_82934C.1.pep
TKANSLSDQIATMMHQAQLKYIPKLCTKQAQREKITQEKGSTLRAELKTDMLKRHHPLMPS

SEQ ID NO: 350619 - protein, 123 aa, Zea mays
  unsure (1)..(123): unsure at all Xaa locations
  Clone ID: MRT4577_82935C.1.pep
FSISSLDYWRNILMGILIVXSLIGSFAAGRTSDXIGRRYIIVFVVVIFFAGTFLMGFVVNYQMLSGARPHTWCSACPSRAQWLVMKGCLADTNVVLGKTSDTPEEDLRNKEEIINRNEAFIPA

SEQ ID NO: 350620 - protein, 149 aa, Zea mays
  Clone ID: MRT4577_82936C.1.pep
MDSCFTLFLLLNTNAYFFHTDLLCTDVVEQREQKIFYQDSHVMIFSFQLLGDMLLDRSNAAVMMRYVSSKDNLMILMNLLRDSSKNIQIEAFHVFKLFAANKNKPPEVVNILVTNRSKLLRFFAGFKIDKEDEQFEADKEQVIKEISAL

SEQ ID NO: 350621 - protein, 120 aa, Zea mays
  unsure (1)..(120): unsure at all Xaa locations
  Clone ID: MRT4577_82937C.1.pep
GRRLTHSITHSHTLALPYFNSSSNDQHLSRLETIMKCKVSEAKLLXKLADDASYEVHSYHQILLTKTHKLYDEYATNVANLLFHETDEKRTYKVEELXTLDNSHYDYHKIKLRMQTEMQG

SEQ ID NO: 350622 - protein, 418 aa, Zea mays
  Clone ID: MRT4577_82938C.1.pep
MDTVCVLCGYGGGAMTRALKTKNILKSLLQGLMNLERSEYYVDSLGNASSECTSLQNPVDSAHGDNIMNAKNITSNSWTSGKYYSSLLGPQPMQWVHMVCGLWTPGTKCPNDTTMSAFDVSGASPAKRNTACSICDRTGGSFVKCRAVNCLVFFHAWCAHQRGLLQSEPEGEHNENIGFYGRCVSHAIVFSSHVNPKKEYFRNNNWTCARTEGFKGRKGEGFSDSSHKKYEEYSGEFGVSQEQINAWLRINGSKPCGRGQKEYIHYKQLKGWKHLVVYKSGIHGLGLYTSVFIPRGSMVVEYVGEIVGQRVADRREIEYQSGKRQQYKSACYFFKIDREHIIDATRKGGIARFVNHSCQPNCVAKIISVRNEKKVMFFAERHINPGEEITYDYHFNREDEGQRILCFCRSRYCRRYLN

SEQ ID NO: 350623 - protein, 103 aa, Zea mays
  unsure (1)..(103): unsure at all Xaa locations
  Clone ID: MRT4577_82939C.1.pep
IYFQDSNSPVIEHLNFLHDHTIIILCIITLVVSISLYNALTNSHFNRFFXENQEIEYFXTSLPLLILIFLALPSIKILYMTEEYTNPXLTVXTIGHHDTDLWY

SEQ ID NO: 350624 - protein, 57 aa, Zea mays
  Clone ID: MRT4577_8293C.1.pep
FSLKSEPPNSFHVSPQAPCLSGKDIKIGPGNVISWRDVHKDLHWVFHYGLFFYLMCK

SEQ ID NO: 350625 - protein, 75 aa, Zea mays
  Clone ID: MRT4577_82940C.1.pep
MYGFIFIQFVHSWLNQPNCVAKIISVRNEKKVMFFAERHINPGEEITYDYHFNREDEGQRILCFCRSRYCRRYLN

SEQ ID NO: 350626 - protein, 52 aa, Zea mays
  unsure (1)..(52): unsure at all Xaa locations
  Clone ID: MRT4577_82941C.1.pep
RGXSDSSNNLNNXCYAAKVGKTVGKLSAVLSSSYSIKRSPEKRSCSGHNQIL

SEQ ID NO: 350627 - protein, 43 aa, Zea mays
  Clone ID: MRT4577_82942C.1.pep
STHLLSVNYKYIHLFVGMLICHMLVCSYPVRQKTAVFIYARQL

SEQ ID NO: 350628 - protein, 99 aa, Zea mays
  Clone ID: MRT4577_82943C.1.pep
SLNLRPIGLFPLAYLPCLNLSRSFHTVLRHLCCQREDMVRKGVGPHIGLDLVPTYYCGCERTAIRLDHRRRPESRPHPLRSFTAPTPLRDDCTTSTSDP

SEQ ID NO: 350629 - protein, 189 aa, Zea mays
  unsure (1)..(189): unsure at all Xaa locations
  Clone ID: MRT4577_82944C.1.pep
GESVLKHSKGLQGHQGGGGPNSTNKSHTQTQKTKGREGHPDGGAGPPQHRARASGEGWGPPQXAGRRAGPRSPGGRAAAPATGRTGPGPAAEGSGPRGPPRAGXPRGPXHGRPRGKLQPEGTRPSRKRGPRQKGNGPGRGERLAPGREQANKPPPRKKEGGQAGPGGKPKPXPERGPRNPQRPRGGRAP

SEQ ID NO: 350630 - protein, 82 aa, Zea mays
  Clone ID: MRT4577_82945C.1.pep
ITRVGTVPLSDAAHHGALHWQFHCVSSSEASLKREVGTFHALDPQPLQQRLLVLLPILLPPPDLLPSHPPPPLPPPDPPPQL

SEQ ID NO: 350631 - protein, 120 aa, Zea mays
  unsure (1)..(120): unsure at all Xaa locations
  Clone ID: MRT4577_82946C.1.pep
WSSWAFSCGRITPLLVFNTSRPPVNRPVTTGALQHRRAPSPAPVQRPVERSVPPAPSAPLFLFRSSAQAPPRPRLCLALVRALRCAPAPCLAECWILGGEXSGAVTVVERAPXEKNPRPI

SEQ ID NO: 350632 - protein, 70 aa, Zea mays
  unsure (1)..(70): unsure at all Xaa locations
  Clone ID: MRT4577_82947C.1.pep
MPRKIEEIKDFLLTARRKDAKSVKIKKNKDVVKFKVRCSRYLYTLVITDKEKXEKLKQSLPPGLAVKELK

SEQ ID NO: 350633 - protein, 62 aa, Zea mays
  unsure (1)..(62): unsure at all Xaa locations
  Clone ID: MRT4577_82948C.1.pep
SSILTAAAESDPVCLQFQILPLAKTHRTRINSGSPDVPSRMNGQTEDGASVCKSXXGASSGR

SEQ ID NO: 350634 - protein, 97 aa, Zea mays
  Clone ID: MRT4577_82949C.1.pep
VTSGPSAWDECPLSNYIIGSAWCAPNTNSGNHMAESAKMESASGPTAVVDHCLRVHGLQRLRVIVNSIQREITSGNTQARAYLIGYKGAAMILEDNE

SEQ ID NO: 350635 - protein, 64 aa, Zea mays
  Clone ID: MRT4577_8294C.1.pep
KLLCLEDSILVCQEGAQEEVYRAFGVLKTHFHILASLGRSFHHYVCGVIMCVCIILYNMIIKDE

SEQ ID NO: 350636 - protein, 92 aa, Zea mays
  Clone ID: MRT4577_82950C.1.pep
FFFFVFFFFFCFVFFFFFFFFFFFFFWAWAFLGFYVRNFFRRFQTSQPIHVQIPIRVKARRFCPIWVLGLTPKTWGFPGWQDNKDCAPVQGE

SEQ ID NO: 350637 - protein, 77 aa, Zea mays
  Clone ID: MRT4577_82951C.1.pep
PTATLGHSTTPNERPIHASHPALGGCIILIPYSIIIINSSFYHTFLYIWLITFTFIFLASSVYTLILIGVIVIFFFL

SEQ ID NO: 350638 - protein, 78 aa, Zea mays
  Clone ID: MRT4577_82952C.1.pep
LKNSLLRSFLSPYFSIPVNTDCYNPCIQCYMTQHAISTSILPLSSLIIQQPSTLLQHLPYAHLLAQNIFVQQLQHLAL

SEQ ID NO: 350639 - protein, 93 aa, Zea mays
  Clone ID: MRT4577_82953C.1.pep
GPPGPAGYRGHPGAPGPSGSPGLPGVPGSMGDMVNYDELKRFIRQEIIKMVDERMAYYTFRMQIPMEMAAAPGRPGPPVKDGAPGSPGAPGSP

SEQ ID NO: 350640 - protein, 89 aa, Zea mays
  Clone ID: MRT4577_82954C.1.pep
QTQLDPLQRPPFSFSFFFFFSFFFHLLFFCIYFFYLNTSSYLFLSFHFTLIYLPSKKKKQTIFTPQLKNTTHHFPHNTSPSKTLTPPLF

SEQ ID NO: 350641 - protein, 51 aa, Zea mays
  Clone ID: MRT4577_82955C.1.pep
SPLNYTHSDGRYDGPYMPHIKAAGFTITHILKHYIGKTLTPSPLKNLPCFL

SEQ ID NO: 350642 - protein, 194 aa, Zea mays
  unsure (1)..(194): unsure at all Xaa locations
  Clone ID: MRT4577_82956C.1.pep
RALPQSLPPPPDSPRLLDAPPSPLMPRPPPMAPRPRPSPPXPEPXADPPPPAPPPXPLRPSPPPPLPPRRRRCPPRSGRPRPRPTPXSPPPPPAQQHPXAPPPXWKHRPPPPHPPPPPRRRRLNFGESARDRLRRRGYRNAGRPRRLPRAARVAAAAARQGRGVLLHAPHLTTVSPPEARRVHQSGPRFICDLI

SEQ ID NO: 350643 - protein, 90 aa, Zea mays
  Clone ID: MRT4577_82957C.1.pep
LTGAMVLLALPLIIPAWSSCSDGPDPAYDDPHKPLLISQMESNARMQKPKENQMQVKGRLATLGEEHSAKKLIRCVDFWLYYTAYFCGAT

SEQ ID NO: 350644 - protein, 107 aa, Zea mays
  unsure (1)..(107): unsure at all Xaa locations
  Clone ID: MRT4577_82958C.1.pep
LLDIGVKQPTWYFFARGKKVFDPPKFMAVIFAISPLFEVEEARGGYASRRKPLCLGVAPLVSDDQKMVAGPMXKLLDVVFGPPLRGLTTVGKFLLLEEEMLEFYMFG

SEQ ID NO: 350645 - protein, 254 aa, Zea mays
  Clone ID: MRT4577_82959C.1.pep
MDGGGTHRTPEDVFRDFRARRAGMIKALTTDVEKFYQQCDPEKENLCLYGLPNETWEVNLPAEEVPPELPEPALGINFARDGMDEKDWLSLVAVHSDAWLLAVAFYFGARFGFDKESRKRLFVMINNLPTIYEVVTGTAKKQTKEKTPKSSSKSNKAGPKPPRQPEPNSRGSKMPPPKDEDDSGGEEEEEEEDHENTLCGSCGDNYGQDEFWICCDACETWFHGKCVKITPAKAEHIKHYKCPNCSGSGKRARA

SEQ ID NO: 350646 - protein, 92 aa, Zea mays
  unsure (1)..(92): unsure at all Xaa locations
  Clone ID: MRT4577_8295C.1.pep
ETFLLTGRSXAHRGVTVENLNKQGFHDWXKLILRAAGDRXKTXTVYKSEKRDEMEQEGYRILGNSGDQWSHLLGSSMSXRSFKLPNPMYYIP

SEQ ID NO: 350647 - protein, 62 aa, Zea mays
  Clone ID: MRT4577_82960C.1.pep
GAPLSMLCVRSLAVASSVHDSKENSLSVSFMSSRGLPAALVERPPLLKKTPLAVGWRGRSIS

SEQ ID NO: 350648 - protein, 232 aa, Zea mays
  unsure (1)..(232): unsure at all Xaa locations
  Clone ID: MRT4577_82961C.1.pep
MKYAYALLALAAAVSAAPAPVPEAAPEAQPDAAPAAXAMGNMPTTASTLLLRAVTESTQTTESTEQRTSERQRPALTAMASTPITANTHRPRVAMENTQTTASTEQRTRGRPRPALTATESTPITAITLLPRVAMESTPTMANTEPRTSVRPXPEAEPEANPXTATANTPTTASTLLPRVATEAMAHTSAKPPPKQSPKPTPMATASTPTTASTLLLPAATASTQTTGSTVP

SEQ ID NO: 350649 - protein, 70 aa, Zea mays
  Clone ID: MRT4577_82962C.1.pep
GKRAQWLRISSCDVNGRSQSHYMPTDAHGITNDRTHRPTSRRLERHRPRHHHCSRHRHRRQLHCHQLTQR

SEQ ID NO: 350650 - protein, 55 aa, Zea mays
  Clone ID: MRT4577_82963C.1.pep
EDAAKECFLMDLNHSNHHRRAWQNTVNPNNTHQMPEVQRRQSIVPSRTQLYAEFP

SEQ ID NO: 350651 - protein, 58 aa, Zea mays
  Clone ID: MRT4577_82964C.1.pep
LGKCILSFHFIFIGTFGLYFCHYFQKSNLYSIYHHFDVFYYTCRFYASFTYFLSIICY

SEQ ID NO: 350652 - protein, 217 aa, Zea mays
  Clone ID: MRT4577_82966C.1.pep
YTLQSSARVGLLKRETTDTRDGSELSILSDDETARRSLPETGESHAFRNTEERDFSYVFDMLAALGIHAANEDDLLDNCYLLECSAGLDLYDDLEQKYDSLILWPVHERKLLFDITNAVLGDMITSVMNGCSKGLMARCSPGWNREEFAELVWQRVVQLRQEIEFNQEALLLSVEWAGSEDGASLVGRDIGNMLQDDLVQEIIADFLGATKSAKLRG

SEQ ID NO: 350653 - protein, 81 aa, Zea mays
  Clone ID: MRT4577_82967C.1.pep
IVSSQPFTYICIQNTLLWSLVGPLQILPRLVSDAHQHEHEMDVAPPLAIDLPGLFICAFSRIRQRWSWIWVHVECSCAGPA

SEQ ID NO: 350654 - protein, 114 aa, Zea mays
  unsure (1)..(114): unsure at all Xaa locations
  Clone ID: MRT4577_82968C.1.pep
PXPAGSXPXRVPLXPLLCWCRXSSSXXCVWXGXXPFWXXXVFCLFCXXXXXXAPPPRXXLAVGXXXLAVXPARXXXPXLXRARRRLPRAXRRPVVARXXPPVRSTPLHXLLKRK

SEQ ID NO: 350655 - protein, 101 aa, Zea mays
  unsure (1)..(101): unsure at all Xaa locations
  Clone ID: MRT4577_82969C.1.pep
MSTEEAVVAEVPVTEVPAEVPAAHVAXAPKAKKARQENKAPKEKKLFADNKPAAHPTYSEMIVQAIAVFKERNGSSSVAIIKYFXGKHGGKLFHQLTQACY

SEQ ID NO: 350656 - protein, 138 aa, Zea mays
  unsure (1)..(138): unsure at all Xaa locations
  Clone ID: MRT4577_8296C.1.pep
MMLTPQVETPTKVYSHSKDKVFTWHFRSHNFTLMALXTKFLVEESERXDQCHIXVEMHDIHLDKLDEILAADLLEINILVIXVPDSYSGGKYLYEGGKLIGCXCIYCSEDNITSFDVTSAVQMALRSALNNLNNCQEC

SEQ ID NO: 350657 - protein, 74 aa, Zea mays
  Clone ID: MRT4577_82970C.1.pep
LLFCLICPSTLSPTCPVQAGAHCAVGLFDPPAAMAAQPSWASLKKKGPMPKGGHAMYHPQDDGHMGGHTECIRT

SEQ ID NO: 350658 - protein, 160 aa, Zea mays
  unsure (1)..(160): unsure at all Xaa locations
  Clone ID: MRT4577_82971C.1.pep
MRQPRSGPGKRRGRGPRIPAATLQKQKTALANVDQITGAKIPKSFVFSRGKLPSTLRHLQQDLRKVMLPYTALNLKEKKRNNLKDFVNVAGPMXIEEYSLAADIANSQKRPRCPPGIFKNSPLVVLGGLTGLGNPFRSLVEYFQHMFPSVDPTTVKLATC

SEQ ID NO: 350659 - protein, 107 aa, Zea mays
  Clone ID: MRT4577_82972C.1.pep
SVNSVKKLVLHKKYTTGCCNLNWSVPSQFHADANPTCDNFHASPFVIHCQLKAFGRTSIPRGVNTEASLLATWFLLTAGDTIPWGELESTSDTRGRSCPQAASANVF

SEQ ID NO: 350660 - protein, 345 aa, Zea mays
  Clone ID: MRT4577_82973C.1.pep
MRQPRSGPGKRRGRGPRIPAATLQKQKTALANVDQITGAKIPKSFVFSRGKLPSTLRHLQQDLRKVMLPYTALNLKEKKRNNLKDFVNVAGPMGVTHFLILSNPQSLPHLRFAKSPQGPTFTFQIEEYSLAADIANSQKRPRCPPGIFKNSPLVVLGGLTGLGNPFRSLVEYFQHMFPSVDPTTVKLATCQRILLLKHDKEKDVIEFRHYSIKLQPVGVSRRIRKLMQNNQVPDLGEFEDVSEFVKKAGYGSESEADDEAAMVSLPSDIDKLNRASRKSAVRLQEIGPRMTMRLVKVEAGLCSGDVLYPWPVEKEVVGKKGTETGEVEGQEDDSEATDESEDEMV

SEQ ID NO: 350661 - protein, 90 aa, Zea mays
  Clone ID: MRT4577_82974C.1.pep
CTWRCFRLQNQTRRHSLLLDDDERCSRCRKEHTTEGVRVPVICAPLQLQFQVDAVGDVGLDLAQGPLTANWTNRQRHEVVERPQRRRRRR

SEQ ID NO: 350662 - protein, 270 aa, Zea mays
  unsure (1)..(270): unsure at all Xaa locations
  Clone ID: MRT4577_82976C.1.pep
NSARGFPEAWSYCNIHKVVLSRVWHFLQNGCYGSKQVSYPLLVQFLDSMPPKAVMGQQFVFDFLHNLWAGRNQRQLSAADSLAFCGAFKQSFLWLLKNASRYSTGDSSDDIPIKLITDVLAKIVWRDYLLLSGDTIGGGVLLSRKTSGLAANMHYPTYYLQDLKKCIIEILDVIADTENHLLNISCQSLLSDCLDIIQQGEKXSKFQNHVEQLVSFFLSLDQIVVCKGELWPLERLAXPLVEQSLPAIKXMDTPCLXKLFSVWLXIFGPT

SEQ ID NO: 350663 - protein, 36 aa, Zea mays
  Clone ID: MRT4577_82977C.1.pep
KYSQTLSHDLDVRTLASSAVMTVGGAPAIRIVNRAV

SEQ ID NO: 350664 - protein, 78 aa, Zea mays
  Clone ID: MRT4577_82978C.1.pep
LVFLAELVAGISGFVFRHEIKDTFLRTYTDAMQTYNGNDERSRAVDHVQRSLSCCGVQNYTNWSTSPYFLEHGIPPSC

SEQ ID NO: 350665 - protein, 75 aa, Zea mays
  unsure (1)..(75): unsure at all Xaa locations
  Clone ID: MRT4577_82979C.1.pep
MMATKILSLLMILALSACVANATTFPLCSLAPIASLLPPXLPSMIASVCVDPALQRYRLQQAIAAINIPVSPCCF

SEQ ID NO: 350666 - protein, 84 aa, Zea mays
  unsure (1)..(84): unsure at all Xaa locations
  Clone ID: MRT4577_8297C.1.pep
ISSKGRRHKDLKAKISNLGLGRRLXPXATYVSTLVVRTXRYLDPEYAIRGPVTNXSESYXIGRFSMXIVTDRCNTXNTRIPIED

SEQ ID NO: 350667 - protein, 69 aa, Zea mays
  Clone ID: MRT4577_82980C.1.pep
GINNGDIILERNQSVASSRELCSSVRPPVFYSIRGGLSIKLASPRRAIQYCIKRSNDPNGKLGAKRHQI

SEQ ID NO: 350668 - protein, 242 aa, Zea mays
  Clone ID: MRT4577_82981C.1.pep
MCLPTVCYSSNSMEKVYAISSPSKKRKSQYELSDPKLLPLKCKFRKRLYCQDDESATTESLGYDGIFMNKTSGTDMVSIPEELDSCENTISLFCGCIEVDSKNGIQEQSLRKMFEIRTSASSSSSNNFSSEAFSSSHSSGTRDTDSWAMDDIERHHPYVMLKPHNDDLERIFNVLEQYDDLMEDELMAGDVFGSAAQVMDEKLYSNSVDDFQILPTGQTGYHGEKKLTIDQEFEQYFANLML

SEQ ID NO: 350669 - protein, 68 aa, Zea mays
  unsure (1)..(68): unsure at all Xaa locations
  Clone ID: MRT4577_82982C.1.pep
MISQGGLQTIYEKYTXRLYSQRLMTLTGEYRFWKYVNILQMSXTRGYIQMLYALKYRSLARQVPLGLD

SEQ ID NO: 350670 - protein, 90 aa, Zea mays
  Clone ID: MRT4577_82983C.1.pep
MYRAKRAALSPKVKRRVGKYELGRTIGEGTFAKVRFAKNTENGEPVAIKILDKEKVKRHRLVEQVSIRPLFLSETMHWLASCYIHFPSVP

SEQ ID NO: 350671 - protein, 63 aa, Zea mays
  unsure (1)..(63): unsure at all Xaa locations
  Clone ID: MRT4577_82984C.1.pep
MAASFANVNADAGLKKLDEYLLTRXSYMNGYEASNDDLADYSSFMDDPSSKYINAARGINHID

SEQ ID NO: 350672 - protein, 87 aa, Zea mays
  unsure (1)..(87): unsure at all Xaa locations
  Clone ID: MRT4577_82985C.1.pep
ERXFGSCXPPPWNXLWAQPWVARSIGDXGGXQWXWDPLKAYAPFHGCNRDAHXLRVSRXPTTSRGRRGRGTRGFRARDIPSRARVPA

SEQ ID NO: 350673 - protein, 51 aa, Zea mays
  Clone ID: MRT4577_82986C.1.pep
IEISRPSRRLITISRQTRGYGQLVTIVWASKPPSIMWVGPPYVRNTNVSFS

SEQ ID NO: 350674 - protein, 48 aa, Zea mays
  Clone ID: MRT4577_82987C.1.pep
LIITIRPPTDTINYRYIESTSSPHTTSSSVQSYQSSPTTSARLTTLDT

SEQ ID NO: 350675 - protein, 116 aa, Zea mays
  Clone ID: MRT4577_82988C.1.pep
KMAAGKKQKKALESINTKLALVMKSGKCVLGLKQSLKTLRQGKSKLVIIANNTSPLRVSEIEYYAMLSKTDVFQYSGNNIELGTACGKYFRVATLSITDPGDSDIIKTIPTDQANQ

SEQ ID NO: 350676 - protein, 150 aa, Zea mays
  unsure (1)..(150): unsure at all Xaa locations
  Clone ID: MRT4577_82989C.1.pep
GRHRGTERLQRHRRHTCLSQLSAAEPRFHGLRGYAAPSAAVVTLPSVRATMKRPSSQGISCDYIGSATKLIMMTTTTLMLFAEWFTLAPSVNRMAISLLNLXARDYELETYDHAEITHYDMIYWGSASHIVGVEIKHLLRYIVVIHLSNT

SEQ ID NO: 350677 - protein, 71 aa, Zea mays
  unsure (1)..(71): unsure at all Xaa locations
  Clone ID: MRT4577_8298C.1.pep
DDXXAPWRSAXRRRRRQADXXFFIRGPKVEKRRTRRKRKREFLAPKXXIEAGRKXXDRGKGFGGFEKPSDG

SEQ ID NO: 350678 - protein, 61 aa, Zea mays
  unsure (1)..(61): unsure at all Xaa locations
  Clone ID: MRT4577_82990C.1.pep
SPIHFSNLSIEPXSPRLAQWFFMGFVGHKQHLRKKINGRSFAIPSLAQKIFEGCHIILSFR

SEQ ID NO: 350679 - protein, 131 aa, Zea mays
  Clone ID: MRT4577_82991C.1.pep
HHGSHAAGLFRGLVLIPVKSFRPDHPRLICFCSRKRTILHKKGPPCSLPCHASSSVTLLPLLHNTRYGALSYLLHVVDRGPRLCAWMRVRPHSVRPILCTSHAHATTVANILAASGLCIRSSQRQQQNQGQ

SEQ ID NO: 350680 - protein, 200 aa, Zea mays
  Clone ID: MRT4577_82992C.1.pep
MGCSSSVPARNTGGLNTISNDSSPDASSKDLRAKLVLLGDSGVGKSCIVLRFVRGQFDPTSKVTVGASFLSQTLALEDSTIVKFEIWDTAGQERYAALAPLYYRGAAAAIVVYDITSPESFSKAQYWVKELQKHGSPGIVMVLVGNKADLHDNRSVSSQDAQDYAEKNNMFFIETSAKTADNINQLFEEIAKRLPRPTAS

SEQ ID NO: 350681 - protein, 126 aa, Zea mays
  Clone ID: MRT4577_82993C.1.pep
FFWPATTNPLGAFPSARGLSSPWALAKITPWRLAPWNTAARQRMAFPWLRAPSPGERLQQGVVSSMARTNYLPAGKQQPPQLLLWRPVCMHDRDPSVPMFPMAELAPWTWLLGSSFTYAPSPTCST

SEQ ID NO: 350682 - protein, 63 aa, Zea mays
  Clone ID: MRT4577_82994C.1.pep
SSAPLKEARKVRAKRTRKVAPAPAQPKPKPARAPAFGAGKKVNKASALLTAAVLVPPRGPPCF

SEQ ID NO: 350683 - protein, 134 aa, Zea mays
  Clone ID: MRT4577_82995C.1.pep
QKYQNTPHVWLHAGLLPDLGRTRARLLPSLPPPPPISSNFFRKKERSWWMLEMRMGQRGRRAPAPRNPWGPLAADSVLARVRPAHAAHREQATRRHCLLAPEMVSCHPGQLLPWPPFVMVSPQQLLLLWGYLFC

SEQ ID NO: 350684 - protein, 77 aa, Zea mays
  Clone ID: MRT4577_82996C.1.pep
FAGKRFFSLGALLLYGRLLRLGRLGHMARRDDARHVGSRAVRRKDVRPSTSRIANGVPTPPGSYSMVLSVGGGAGGL

SEQ ID NO: 350685 - protein, 42 aa, Zea mays
  Clone ID: MRT4577_82997C.1.pep
PVTSSYHQSAWAKIGRTVNPYIDRYAPFLQTPISMVQRWWLR

SEQ ID NO: 350686 - protein, 99 aa, Zea mays
  Clone ID: MRT4577_82998C.1.pep
WSHVPHASWERLFDRVRCGQLDVERVRHGSYCHLVPHCGPAQEPQHLDPRARERGSHGLLFRSLGMSSAVEDERQILAQRGSRQPYRLELAGGDLSGGA

SEQ ID NO: 350687 - protein, 174 aa, Zea mays
  Clone ID: MRT4577_82999C.1.pep
MKRMSRMPTRKAHSWWWDSHISPKNNKWLADNLEEMDKQVKEMLKLIEDEGDSFAKKAEMYYQRRPLLVTHVENFYRMYRALAERYDNVTGELRKNMPSSLKSQGSGISESDSEAQSTPASPESEKKTSKEKGKKGSDGSSSSSSSDSDSEVDEANQENGNGITHALNERVIEL

SEQ ID NO: 350688 - protein, 116 aa, Zea mays
  Clone ID: MRT4577_8299C.1.pep
ILSRTPSAAARTPPTARHLHHAVTCLLHPPAPPLLRRRTLVTLRWSSGRGQGAVVDAAIPLRSGAERGREGGREGEVGHLRERALAPSLVSRHPGAATTATTPWASSDLRSPVRLK

SEQ ID NO: 350689 - protein, 122 aa, Zea mays
  Clone ID: MRT4577_829C.1.pep
HWSRFHLHKDQFLFLVFQPAQLQAKPAHSDSAYSPRLQHRARPRFLCACRRLPTSMVLSRNDDAVEFPTMVEQALATHHRADQPQITHATGPRQGLPRRDRSQRRSPAAPRRSRRDTDGRGE

SEQ ID NO: 350690 - protein, 119 aa, Zea mays
  Clone ID: MRT4577_82C.1.pep
PRSSHIYTCFSWKMRQHIREISQDFIKDYLLVQRNDGSLHRDSTQKRTHSTKPGPYDRVSVKPAHFVYLHPLNHHHCNLHFVCRQIQTFGNRSCSISNVLLKLVYIKSCVAKSFRDWVK

SEQ ID NO: 350691 - protein, 83 aa, Zea mays
  Clone ID: MRT4577_83000C.1.pep
MSLARLSHPAVAAAGSGKSLFPAGPTVQSVDFPNARLPVTAVVSAATAAVHAEDRVSSLTHVSGVLRVAFGDEGKGMLVDVLA

SEQ ID NO: 350692 - protein, 42 aa, Zea mays
  unsure (1)..(42): unsure at all Xaa locations
  Clone ID: MRT4577_83001C.1.pep
TPYLTREDDETRGVLIKGLIXRPPSRCFLYSMCYRFVSLFLT

SEQ ID NO: 350693 - protein, 193 aa, Zea mays
  unsure (1)..(193): unsure at all Xaa locations
  Clone ID: MRT4577_83002C.1.pep
MALVSASSSSPPPSRRSPGMGSSGRXLXXXXXLXSEVVXLVAVXXPFLXXXFXTWGGXXXXVSRPWXXXXFXLRGSXTLLFGXXPVAVFGFXXPEEXPWGEAGAEYVVESTGVFPXXDKAAXHLKGGAXKVVVSAXGXXXPMFXVGVXXGXRPWGGXFVCXAXCSAXWLAPLAXVLGGXFWVAVGSVGAVVAL

SEQ ID NO: 350694 - protein, 564 aa, Zea mays
  Clone ID: MRT4577_83003C.1.pep
LWGCRADKSSTGGWASAALAVGIELCERLSTMGIAVNLVTYLTATMHLPSAAAANVVTDFMGTSFLLCLLGGFLADSFLGRYLTIAIFAAVQASGTGLLAVSTEVSQLRPPPCGPGAAEPCEQATGLQMGVLYVCLYLIALGTGGLKSSVSGFGTDQFDERDARERAAMGLFFDRFFFFVTFGTLLAVTVLVYVQDHVGRSCAYGICAGAMLVAVAVFLSGTRRYRYKRSSGSPIVHILQVLVAATRKRNIVMQPLTAAALYEDHPEHARIPHTAQFPCLDGAAVMAGDDDNEVGHDGRPTMNPWKLRSVSRVEEVKMVARLMPVWATTILFWTMYAQMITFSVEQATTMDRRMAGFEIPAASLTVFFVGAIMLTLAFYDRVFVPLCRSLMTGRQGLTNLEKIGIGLVLSTFGMAAAAISEKKRLAVAATSVAAGHGSLPISVFMLTPQFLLVGSGEAFIYTGQLDFFIMRSPKSIKTMSTGLFLTTLSLGFFLSSALVSLVKSCTRWLGDTINHSRLDYFYWLLAVLGVVNLVAYIVCAMWAAAPASSQAEQPQHAMAADEKC

SEQ ID NO: 350695 - protein, 72 aa, Zea mays
  Clone ID: MRT4577_83004C.1.pep
KTSNPHQFHSQNNNPYMSCSGNQPSLKCRQLLEVRLCRVFLKLTNLNCLVVYFRNNKSTLVTVTFCVKGEGK

SEQ ID NO: 350696 - protein, 261 aa, Zea mays
  Clone ID: MRT4577_83005C.1.pep
YVQYNVYGNLLEVSAKYVPPIRPVGRGACGIICAAVNARTREEVAIKKIGNAFDNQIDAKRTLREIKLLRHMNHENVISIKDIIRPPRRENFNDVYIVYELMDTDLHHLLRSNQQLTDDHCQYFVYQLLRGLKYVHSANVLHRDLRPSNMLLNAKCDLKIGDFGLARTTTETDFMMEYVVTRWYRAPELLLNCSEYTQAIDMWSVGCIFGEMVTREPLFPDDTSLGFLRSDHARRYVRSLPQHPKQQFRVRFPTMSRTDAW

SEQ ID NO: 350697 - protein, 76 aa, Zea mays
  Clone ID: MRT4577_83006C.1.pep
GSQSSHHRLKFCPFQSDIYVDEALCHPYLASLHEINDEPVCPAPFSFDFEQPSLTEEDIKELIWRESLKFNPDPVR

SEQ ID NO: 350698 - protein, 329 aa, Zea mays
  unsure (1)..(329): unsure at all Xaa locations
  Clone ID: MRT4577_83007C.1.pep
FISYIHNTSVHICNRATNSFSLQVISIKDIIRPPRRENFNDVYIVYELMDTDLHHLLRSNQQLTDDHCQXSIQIQRCCCAVLCSLFLTLFFSFFFYDDRPVQYFVYQLLRGLKYVHSANVLHRDLRPSNMLLNAKCDLKIGDFGLARTTTETDFMMEYVVTRWYRAPELLLNCSEYTQAIDMWSVGCIFGEMVTREPLFPDDTSLGFLRSDHARRYVRSLPQHPKQQFRVRFPTMSSGAMDLLERMLVFDPSKRITGKSILLLLFLPWNHIAVDEALCHPYLASLHEVNDEPICPAPFSFDFEQPSLTEEAIKELIWKESLKFNPDPIH

SEQ ID NO: 350699 - protein, 308 aa, Zea mays
  unsure (1)..(308): unsure at all Xaa locations
  Clone ID: MRT4577_83008C.1.pep
PAGKGSSRPPRRENFNDVYIVYELMDTDLHHLLRSNQQLTDDHCQVVDPNPTLLLCRPLFSVPNPFFFLSSFTTTGRXYFVYQLLRGLKYVHSANVLHRDLRPSNMLLNAKCDLKIGDFGLARTTTETDFMMEYVVTRWYRAPELLLNCSEYTQAIDMWSVGCIFGEMVTREPLFPGKDYVHQLRLITELVGSPDDTSLGFLRSDHARRYVRSLPQHPKQQFXRVRFPTMSSGAMDLLERMLVFDPSKRITVDEALCHPYLASLHEVNDEPICPAPFSFDFEQPSLTEEAIKELIWKESLKFNPDPIH

SEQ ID NO: 350700 - protein, 71 aa, Zea mays
  Clone ID: MRT4577_83009C.1.pep
DVHPFSNSLVTLKDDSHRRSTPSPQTSRLPNPPTRKPNPTDDTLPAPKAAEPPQPPTLHSRRSPGVLYTPG

SEQ ID NO: 350701 - protein, 94 aa, Zea mays
  Clone ID: MRT4577_8300C.1.pep
RRISRDHPRIPGFEGTHIENRQAIATAMNRCLLLLACIAKTTQPTYRGYHATGVKRIIRHGHEEPYYMHTQHMYNLHFMKPTAINVTPILAGSG

SEQ ID NO: 350702 - protein, 175 aa, Zea mays
  unsure (1)..(175): unsure at all Xaa locations
  Clone ID: MRT4577_83010C.1.pep
EIKKLYGVDMGVLTKPFXEEQEKYFIQPAMWNDLNPQQIIGTPTIVKEMDCLTASVSEIEEVRSNVTSVINMEHTRLCGFGGWFDVQFSGRKKDPAQQEIELTPAPSEQPCTHWGQQVFIMSNPINVEEGDNLNLGLLMSRSKENPRLMEIELNCEIKKAFGNPKESFKKTYFIE

SEQ ID NO: 350703 - protein, 60 aa, Zea mays
  Clone ID: MRT4577_83011C.1.pep
MELPSNAGDSELLPLEEHKERVLRHLHRRSKRPLEEFVAVVANVAEQLVSVYLDLGAEWR

SEQ ID NO: 350704 - protein, 52 aa, Zea mays
  Clone ID: MRT4577_83012C.1.pep
SYFMTKKTKKIKIKKKKKKEKLKLKRCNGSPLYNLNHATLYSLYSSYLPSLC

SEQ ID NO: 350705 - protein, 102 aa, Zea mays
  Clone ID: MRT4577_83013C.1.pep
RHCGVVVAPTIRRVHHPTIRRVHHLGDSATRDPAVALTPAGQRPRGEWQLTDRRYPYGVCFSSILRFSSSSNSFPSTDRELEILVLGFLGPCGLLMSSYVVA

SEQ ID NO: 350706 - protein, 139 aa, Zea mays
  Clone ID: MRT4577_83014C.1.pep
MALLVHPECAQTEWVLDMLCRLFRWDAPAFGGRICAGAILSGKLTAREFVLFVFNLPSGLVLPILPFSARGARPRGGDALPPVLSFKDVHQPCGGGERARLRLRLPHELETSLFLQHSEERMITSLVKVGGELRLHGTG

SEQ ID NO: 350707 - protein, 55 aa, Zea mays
  Clone ID: MRT4577_83015C.1.pep
INHFHINNHNIFIKITPTSTLTAGPFSMVIPFNTPPFPHFNLLFGSPNLHPIPVF

SEQ ID NO: 350708 - protein, 798 aa, Zea mays
  unsure (1)..(798): unsure at all Xaa locations
  Clone ID: MRT4577_83016C.1.pep
MAQSNWEADKMLDVYIYDYLLKRNLQTTAKAFMTEGKVAADPVAIDAPGGFLFEWWSVFWDIFIARTNEKHSEVAAAYLEAQQIKAREHQQQMQMQQLQLMHQRHAQLQRTNANHPSLNGPINALNSEGILGPSTASVLAAKMYEERLKHPHSMESEGSQLIEASRMALLKSATNHAGQLVPGTPGNVSTTLQQIQARNQQTIDIKSEGNMGVPQRSLPMDPSSLYGQGLMQPKPGLSGAGLNQGVSGLPLKGWPLTGIDQLRPNLGAQMQKPFLSTQSQFQLMSPQQQQQYLAQAQAQGNLGNSTNYGDIDPRRLTALTRGSLNGKDSQPAGTDGCISSPMQSSSPKVRPDQEYLMKMQQTSSQQPQEQLSXQQNQQQQQSQQQMQQNNRKRKQPTSSGPANSTGTGNTVGPANSPPSTPSTHTPGDGLGMGGNMRHVPKNLMIYGADGTGLASSSNQMDDLEQFGDVGSLDDNVESFLSNDDGDPRDIFAALKRSPAEPSPAVSKGFTFSEVNCWRTSNSKIVCCHFSSDGKILASAGHEKKAVLWNMENFQTQYTPEEHALIITDVRFRPNSSQLATSSFDRTIKLWNAADPGFSLHTFTGHNGQVTSLDFHPKKTDLLCSCDGSGEIRYWNVTQFACLRAIKGGSAQVRFQPHVGQFLAAAAENVVSIFDIETHGKKYTLQGHNTDVQSVCWDNNGEYIASVSQDLVKVWSMSTGDCIYELSSNGNKFHSCVFHPSYSNLLVIGGYQSLEVWNMVKNQSLTVQAHEGLIAALAQSPVTGMIASASHDNSVKVWK

SEQ ID NO: 350709 - protein, 170 aa, Zea mays
  Clone ID: MRT4577_83017C.1.pep
GSSEGHRSNKRPRMSPPPPGEEPAPACLERLHDAVSENPHRVIFMEGVEQADRDCQLGIKEAIESGVVRNRAGVEVGVGDAIVVLSCESFGSTSRSRACSPPSKKVKVEMEEAEERTGDHEHNGDGGSSSSPCIDLNVEMESDQADEGSLDDDVCLLTAVDRTLFFRRQG

SEQ ID NO: 350710 - protein, 112 aa, Zea mays
  Clone ID: MRT4577_83018C.1.pep
QIRSRGESSQVTLCDERPWTGILVTADAGALALMMVPLLVRVHDRTPVDGSASVPWHQPSPPVEAPVLNICLRHLDPFYREADRLRTSRSRPRTGGGGEASPPLRKLPAGLE

SEQ ID NO: 350711 - protein, 154 aa, Zea mays
  unsure (1)..(154): unsure at all Xaa locations
  Clone ID: MRT4577_83019C.1.pep
MEMESSELTRCFATAEARDKICRAIQYGSKFISNGEPGPAQNVDKSTSLARKVFRLCKFVNDLHALISPPAKGTPLPLILLGKSKXNAMLSTFLFLDQIVWAXRTGIYKNKERAEFLXRIAFYCFLGXNTCTXIIELAELQRLVTSMKXLEKEL

SEQ ID NO: 350712 - protein, 113 aa, Zea mays
  Clone ID: MRT4577_8301C.1.pep
KRVQTLVWACIPHQLGIFSGQAHAGHFLALKHLLKCGQRLSSSQICSVLTVPCRSMRPASVSSELGQLFLLWNPAPLSLGTEAPHYQLKLSPSLACVSGCIIARVGRPRYSGP

SEQ ID NO: 350713 - protein, 36 aa, Zea mays
  Clone ID: MRT4577_83020C.1.pep
RHGEVGLRRLRSVQAAAFHRRRAETLISAHEASCRN

SEQ ID NO: 350714 - protein, 235 aa, Zea mays; identical to SEQ ID NO: 348972
  Clone ID: MRT4577_83021C.1.pep

SEQ ID NO: 350715 - protein, 93 aa, Zea mays
  Clone ID: MRT4577_83022C.1.pep
TDRAGTRSPTVTTRHGAEDGVDRPSWAAFTNKASRDGSLVVRQPPAPDGALPIPRWVATVGPVRRGVLVSMLSIRSVRPSDSQAGLLPVRSPR

SEQ ID NO: 350716 - protein, 103 aa, Zea mays
  unsure (1)..(103): unsure at all Xaa locations
  Clone ID: MRT4577_83023C.1.pep
YDFGDAQITAXYYSXYGQREFTRGFVQFRVFNNERAANALCAGMRVTGCNTEHHCIGGGGYFPEASPQQCGDFSGFDWSGYGTHVGYSSSREITEAAVLLFYR

SEQ ID NO: 350717 - protein, 157 aa, Zea mays
  unsure (1)..(157): unsure at all Xaa locations
  Clone ID: MRT4577_83024C.1.pep
MAGTATVPGSTTASTPLLXDELDIVIPTIRNLNFLXEMWRTFFQTYQLIIVQDGDSTKTIKAPEGFDYELYNRYDINRILGSKASCISFXLRAARCCGYMGSKNKNIYTIDDDXIRCXDPSDXDINARDQHIWNLVIPCTPCFCNSLDXPYREGAEF

SEQ ID NO: 350718 - protein, 141 aa, Zea mays
  unsure (1)..(141): unsure at all Xaa locations
  Clone ID: MRT4577_83025C.1.pep
MGDNMFGLLMLLGISASADTATIFPQCSQAPIASLLPPFLSPTAASVXENPIRQPYRIQQAIATSNLPLSHLFFEQATALSLAHSLVQTIRAEQXQQLLLPVISQVALAILSPYYQKHQFLPFNQLSILKPAAYLQGQQVL

SEQ ID NO: 350719 - protein, 136 aa, Zea mays
  unsure (1)..(136): unsure at all Xaa locations
  Clone ID: MRT4577_83026C.1.pep
HILSPTSPASPVSVASSPLLTSPATGMIHIGTNGFRRIAQAXASVAPRSEDAQLVPANDPFITPELMTXYMFKYXTVHGQWKHSDITLKDSKTLLFGQTPVTVFGIXRTPQEIPCRRGWPHTMSWMSTRCLHCQRT

SEQ ID NO: 350720 - protein, 80 aa, Zea mays
  Clone ID: MRT4577_83027C.1.pep
RKGLDAVVVLAHRRVIRKNPVGSVDLLDLSKERESSSRVWTRGGGAANRARPASTAPRRRSGAGQTAGDGAHINARRPPR

SEQ ID NO: 350721 - protein, 130 aa, Zea mays
  Clone ID: MRT4577_83028C.1.pep
RGCETHGGGHSPRAGPFSEPPPPARWPVRERCVRARFFVWGPSFGLPAFFVCSFAPLAARGCVPSATGPGQGGFVSPPTSPPGTRYGQGGAPVGAGPAHGAGAPLPAPAPNQKKKKKKKKKKKFKKPPTP

SEQ ID NO: 350722 - protein, 88 aa, Zea mays
  Clone ID: MRT4577_83029C.1.pep
TRNDSWFVFIYSLAEHNTLGRGAHRTAQGGGGDHQTLNRTRPPQTYQSRATTGPHTRGGALKPKTRPRDPNATRPFTSGPCFFQPEIW

SEQ ID NO: 350723 - protein, 79 aa, Zea mays
  unsure (1)..(79): unsure at all Xaa locations
  Clone ID: MRT4577_8302C.1.pep
KKKKKRKTKKKXKKTEPKKKKKDKKKKTKKKKTRQNRNPLKNKKXNRLVPKRTTHKDNNTNKAKNTIKVHNIHNSNNRS

SEQ ID NO: 350724 - protein, 70 aa, Zea mays
  Clone ID: MRT4577_83030C.1.pep
QVSNRQVNTKNLRLQFQQGYINKMTHGSTPNTRNTLTKSELTSLHQYHITRSYIPSERPVKTVQKLEGKP

SEQ ID NO: 350725 - protein, 248 aa, Zea mays
  unsure (1)..(248): unsure at all Xaa locations
  Clone ID: MRT4577_83031C.1.pep
MSSSSPSLLSSRLLSPAILFTKKPASLRSISSATARHGVRVVVAAASAAAASPVSAARVRPSAAEVARTVVELAASGTLSMVGPDGWPLGVGAHFVADSAGAPALCLSAARVAAPDAPASFHVEFRQSGARTPQCTMLGALTKPSDESVLKDGMWVVPSDYTSAEPDPLRNFAEHIVEEFNNKNAEDVRRIYNIYVESDLQVADVKMIWVDRLGFDLHAHSAEGVLAVRVPFXPREVSDEKGVKSSFT

SEQ ID NO: 350726 - protein, 74 aa, Zea mays
  Clone ID: MRT4577_83032C.1.pep
FILSIQDGMWVVPSDYTSAEPDPLRNFAENIVEEFNNKNAEDVRRIYNIYVESDLQVADVKMIWVDRLGFDLHA

SEQ ID NO: 350727 - protein, 299 aa, Zea mays
  unsure (1)..(299): unsure at all Xaa locations
  Clone ID: MRT4577_83033C.1.pep
IGYLEAGREGLLRWYTENXMDFGVAQEGALRAYFLAAASVYEPCRAAERLAWARAAILANAVSTHLRNSPSFRERLEHSLRCRPSEETDGSWFNSSSGSDAVLVKAVLRLTDSLAREAQPIHGGDPEDIIHKLLRSAWAEWVREKADAADNDVCNNGSSAVEQEGSRMVHDKQTCLLLARMIEISAGRAAGEAASEDGDRRIIQLTGSICDSLKQKMLVSQDPEKNQEMMSHVDDELKLRIREFVQYLLRLGEKKTSSSETRQTFLSIVKSCYYAAHCPPHVVDRHISRVIFEPVSAAK

SEQ ID NO: 350728 - protein, 323 aa, Zea mays
  unsure (1)..(323): unsure at all Xaa locations
  Clone ID: MRT4577_83034C.1.pep
TSNFSALSSSSPSLLSSRLLSPAILFTKKPASLRSISSATARHGVRVVVAAASAAAATPVSVARVRPSAAEVARTVVELAASGTLSMVGPDGWPLGVGAHFVADSAGAPALCLSAARVAAPDAPASFHVEFRQSGARTPQCTMLGALTKPSDESVLKKLSTRWQKKFGEEIDQDLLYLISVDRILHMEDFNEXFILSIQDGMWVVPSDYTSAEPDPLRNFAENIVEEFNNKNAEDVRRIYNIYVESDLQVADVKMIWVDRLGFDLHAHSAEGVLAVRVPFPREVSDEKGVKSSFNMMSHHAWEVEKSYASPEFEKVQFLKKVR

SEQ ID NO: 350729 - protein, 370 aa, Zea mays
  unsure (1)..(370): unsure at all Xaa locations
  Clone ID: MRT4577_83035C.1.pep
MRIRELRDGLEVEDDEREEQGSEVGSGYGEVVAVVRLRAKRAIVGAGARVLFYPTLLYNVLRNRFDGEFRWWDRIDKYVLLGAVPFSSDVLRLKQLGVRGVVTLNEPYETLVPTSLYQAHGINHLKIPTRDYLFAPSLEHICRAVDFIHCNEVQGGSTYVHCKAGRGRSRTIGTSRLIKYRNMTPEVALDHARSVRPRVLLAPAQWQAVKMFSKLNARCLSIQSSNXLAQHYLXESSELSSTMSSRCLRIQSSNEVSITCEESNEASFGDPEVDGYTTTEFDTEHFVLPRCRSMLSRPTSPTGCSDAVFITEEDLEGYETYADDGKDVVEVQVVVRHKPIMRKLSCFLGSLKLTGNCEPPPGRLTEVRAC

SEQ ID NO: 350730 - protein, 114 aa, Zea mays
  Clone ID: MRT4577_83036C.1.pep
MSGYSNVGNRGVYEAGDQRNVSEAERKAEESDPYNEGKENSHNNLDSKDERSIANRLAAEEKKSESGDDTETAQLKKDPTLPARAHGNEPSKGAKIDAQLQAEEEEELKRKGKA

SEQ ID NO: 350731 - protein, 50 aa, Zea mays
  Clone ID: MRT4577_83037C.1.pep
NYPTPVCYSTMGNTRGLQHSKRQTDHERTSTSSHHDDSCKHTFQVKYTIY

SEQ ID NO: 350732 - protein, 196 aa, Zea mays
  Clone ID: MRT4577_83038C.1.pep
NTHALSLLPISHACHGVEFHSLHLLPALAFGFLVHVLLCHALTPSRCSIGSSRRPVFKLGRFRVLCRCQPRVPFCHQQTRRPCSLPSCVCGRRACQLPRARLTRLSSPTFASTLSFLVLNTGFAIGPCYNIGSPWPGRVFLSIAPAMQIFPSRSDLAIVPLALVAVKTIQHRLVSMVCWSAWVVVWLRVEFDRSRK

SEQ ID NO: 350733 - protein, 113 aa, Zea mays
  Clone ID: MRT4577_83039C.1.pep
PLERAPLVFYSPPFLLFLKNPETYRGSGEENNPRGCPSLRSNTVVLHRCTKFFKEDEDIGVEQKKKGQRHVSLIWSLNKRQLVPERIVQKKFYENNMFYFVPAIFFLSDFYVF

SEQ ID NO: 350734 - protein, 107 aa, Zea mays
  Clone ID: MRT4577_8303C.1.pep
MATALKSFLNSPVGPKTTHFWGPVANWGFVIAGLVDMNKPPEMISGNMTAAMCVYSGLFMRFAWMVQPRNYLLLACHASNESVQLYQLSRWARSQGYLEKKEPEAKQ

SEQ ID NO: 350735 - protein, 79 aa, Zea mays
  Clone ID: MRT4577_83040C.1.pep
EGWAIHIHGFGLQCKQAKTSTGLLQNRANPGRGSPPKSLLNLTITSFCALLATNYSTSVQLHHHLPDPWRRDHQKKALL

SEQ ID NO: 350736 - protein, 60 aa, Zea mays
  Clone ID: MRT4577_83041C.1.pep
IKLCLPFHGHSASDILSEAQCLHIQLICKFPCSAHSCMSHYITEPCYKIPHVTVRSFVKN

SEQ ID NO: 350737 - protein, 79 aa, Zea mays
  Clone ID: MRT4577_83042C.1.pep
MKSMLFWVTSSRLRMKKLFMVEFETLKAQLPVESLPNAPVSEVSPEKKIKAPAAPKTVPEAIDEAIEPPDVPPKAPKRP

SEQ ID NO: 350738 - protein, 229 aa, Zea mays
  Clone ID: MRT4577_83043C.1.pep
MAVSFANLNTEAGLKKLDEYLLTRSYITGYQASKDDLAVYTSFSSAPSSKYINVARWFNHIDALVRLSGITAEGQGVKVESSAVPSAPTPDVAEAQAPVAEEDDDDDVDLFGEETEDEKKAAEERAAAAKASGKKKESGKSSVLLDVKPWDDETDMAKLEEAVRSVQMEGLLWGASKLVPVGYGIKKLQIMMTIVDDLVSVDTLIEDYLCAEPVNEYVQSCDIVAFNKI

SEQ ID NO: 350739 - protein, 310 aa, Zea mays
  unsure (1)..(310): unsure at all Xaa locations
  Clone ID: MRT4577_83044C.1.pep
MAVSFANLNTEAGLKKLDEYLLTRSYITGYQASKDDLAVYTSFSSAPSSKYINVARWFNHIDALVRLSGITAEGQGVKVESSAVPSAPTPDVAEAQXTQPMVWLIVQIPYDFWLKIVSCFTSSHPHSYFVLIADLNHYWSLKLLSTVWFNIRKMKLVQLYTTXLHSLVTEIHFLKPQAPVAEEDDDDDVDLFGEETEDEKKAAEERAAAAKASGKKKESGKSSVLLDVKPWDDETDMAKLEEAVRSVQMEGLLWGASKLVPVGYGIKKLQIMMTIVDDLVSVDTLIEDYLCAEPVNEYVQSCDIVAFNKI

SEQ ID NO: 350740 - protein, 176 aa, Zea mays
  unsure (1)..(176): unsure at all Xaa locations
  Clone ID: MRT4577_83045C.1.pep
FGPPALVLGRFLAVLWLLAWGVLLASLSVLPSVACCPVGVGPAXXSSPVLCLRLSRRSRLWSSLAXSAPPSGALLVLSFGXCSSRVWLSRRSGGLXSRSVXPPRACXXLSXSFLSRCFWVGAPRVLWFRCFGVWASPALLVCLPLPFXXXWPPVPAFLCLXGVLCLVFWVFWXFWV

SEQ ID NO: 350741 - protein, 82 aa, Zea mays
  Clone ID: MRT4577_83046C.1.pep
GQGEYKMDQVHDHQPSLVEQSAPLKLDIKGTGIGRGRPCLPVFVCTSKDKTTAWEWSMGASTELRRRRSSCSRRRRTRTLAG

SEQ ID NO: 350742 - protein, 68 aa, Zea mays
  Clone ID: MRT4577_83047C.1.pep
PAAATAAGTPTAQLSGRSHRPFPGGRVLDPFCTRLDPTMVEALVCTKDWIAGARKGYIVVPYIYLQFN

SEQ ID NO: 350743 - protein, 91 aa, Zea mays
  Clone ID: MRT4577_83048C.1.pep
PARVRVRRRRLQLERRRRSSVDAPIDHSQCLLYLILEEQTVQPKMAGGRVLDPFCTRLDPTMVEARVCTKDWITGARKGYIVVPYIYLQFN

SEQ ID NO: 350744 - protein, 81 aa, Zea mays
  Clone ID: MRT4577_83049C.1.pep
GSCPAVAAAAGTPAAQLSGRSHRPFPEEQTVQPKMAGGRVLDPFCTRLDPAMVEALVCTKDWIAGARKGYIVVPYIYLQFN

SEQ ID NO: 350745 - protein, 68 aa, Zea mays
  Clone ID: MRT4577_8304C.1.pep
IHCLLSPHACLSNIRAGLKLLWSLVVRRRTMQVLMRKSNVSCPVQIAHVHWNANDRTFIMRTGYYPRI

SEQ ID NO: 350746 - protein, 108 aa, Zea mays
  Clone ID: MRT4577_83050C.1.pep
LAKKLISFQQSLMSQLGQQQAGQERTQSGSGAGNVNLNTLMNMFSGLGAGGGLGVPNAPNVPPEELYATQLAQLQEMGFFDTQENIRALAATAGNVHAAVERLLGNMG

SEQ ID NO: 350747 - protein, 51 aa, Zea mays
  Clone ID: MRT4577_83051C.1.pep
NTSLQMLDCFSSYKEGSPELCQPESAKCCLVHPPIAIVIWLSTIVTEVSFT

SEQ ID NO: 350748 - protein, 88 aa, Zea mays
  unsure (1)..(88): unsure at all Xaa locations
  Clone ID: MRT4577_83052C.1.pep
AWVPFSRWLAKERAPRNXLVKFLCIKGIAFFPFGQGFALDVLSQAGGVQSPHFWRDVEHIQEGIQNVRVTLERGVLSVIHQVACQGAP

SEQ ID NO: 350749 - protein, 68 aa, Zea mays
  Clone ID: MRT4577_83053C.1.pep
FICIFQCLLYLILEEQTVQPKMAGGRVLDPFCTRLDPTMVEARVCTKDWIAGARKGYIVVPYIYLQFN

SEQ ID NO: 350750 - protein, 135 aa, Zea mays
  Clone ID: MRT4577_83054C.1.pep
GSHCLHQRLIVSAPVQFVIRQLTSPETLQQLISFQQSLMSQLGQQQTGQERTQSASGAGNVNLNTLMNMFSGLGAGGGLGVPNAPNVPPEELYATQLAQLQEMGFFDTQENIRALAATAGNVHAAVERLLGNMGQ

SEQ ID NO: 350751 - protein, 82 aa, Zea mays
  Clone ID: MRT4577_83055C.1.pep
GSCPAAATAAGTPAAQLSGCSHRPFPGLVLPHPVLLHVSMAESLSFSSHARHVVKSITGFSSRDLINSKTNSLHTMPLWHGV

SEQ ID NO: 350752 - protein, 93 aa, Zea mays
  Clone ID: MRT4577_83056C.1.pep
KKGGGDTDIFHYCFGGGGNDLFNNIVGGNGGWLLGGGGGVFFAFCFWHGGGRKYQQRAAGVRPAPVVFLSRGVTSMTLLDAQGFIEGQKKPAA

SEQ ID NO: 350753 - protein, 88 aa, Zea mays
  Clone ID: MRT4577_83057C.1.pep
NKLFFFFFFFFFFFFFFFFFLLKPNFLLTQHILLAIQQIMGWPPLLNWDQQRQKGRDRGDDQNKRNHPRGGKAEETPKGGGRQQGMGP

SEQ ID NO: 350754 - protein, 96 aa, Zea mays
  Clone ID: MRT4577_83058C.1.pep
FVSVVLMQRLMQLNNKLLFNRNNHQSINRLLIRQRVLLIDPHNLSMSSIRRLHKGTKLSLQLIKKYLCFKFTLLLSLSLSFMHNDISHTVGRIVYF

SEQ ID NO: 350755 - protein, 68 aa, Zea mays
  Clone ID: MRT4577_83059C.1.pep
GKGRKKREFSNCLGKRSPLGMFILGKNCLNPSFKKTPPFRAPRKEIAGQKIVIPPSFYFFLKKGKINS

SEQ ID NO: 350756 - protein, 132 aa, Zea mays
  Clone ID: MRT4577_8305C.1.pep
RPGWEENDGWGHCCGVGSSWSWGHVGGVIGNYLYRGVAPLKAKRLPLFKMIVEAPLVGIRLSALPPATRRSLASSWRPWNFAKARMEPASHMFSRFQVALQCVLSQASWSFPPLRCYGTTSIPCQKAWRRRR

SEQ ID NO: 350757 - protein, 51 aa, Zea mays
  unsure (1)..(51): unsure at all Xaa locations
  Clone ID: MRT4577_83060C.1.pep
FILPGKNLPIFGVVGGXSXNKSCPVSIGLICTYLYHLSSLMLTGQVGRQIL

SEQ ID NO: 350758 - protein, 250 aa, Zea mays
  unsure (1)..(250): unsure at all Xaa locations
  Clone ID: MRT4577_83061C.1.pep
MKTDTWLQPWRDHGYSLFLSEIWSVDMPLPPDDSEACAGAADRALRAAGATLPRPTGGNNGTCDVAFCYCGVRLRRLTCGXAGSRGRAVGXADDAAARRLERDCAQPGVPGCSKCLLALTMIKNTSPGGGAAAEAASKEKQAAVRSGESDRDCELMGLMWLLQRNATRYGATATAVIQALMAVDEASAAGVAVAADAGPAAACSLPVDDMPLPAEYAQVGGASDAPRGVCCFFCLLVLFSVLSFRSVYSL

SEQ ID NO: 350759 - protein, 79 aa, Zea mays
  Clone ID: MRT4577_83062C.1.pep
TSKGNAYAVLCESIGVRQLQSESACLISVAQHGNAILVIMYKYRVTEYSKGNAYAHVAIVTNDVYKIAETNHLTTKELG

SEQ ID NO: 350760 - protein, 472 aa, Zea mays
  unsure (1)..(472): unsure at all Xaa locations
  Clone ID: MRT4577_83063C.1.pep
MGSWQQGELQGAAMDGAAAAATGSGGGHRVVGSRNEEHGKYLSESSCCPRCGHKLDPKLDWLGLPAGVKFDPTDQELIEHLQAKVWPASAAAPSHPLIDEFIPTIEGEDGICYTHPERLPGLTKDGLSRHFFHRPSKAYTTGTRKRRKIQPPXPMPHHPPPCPRSSSISSSSGXETRWHKTGKTRPVVVAGRQRGCKKILVLYTNFGKNRKPDKTNWVMHQYHLGDKEEEREGELVVSKIFYQTQPRQCGVAAEPAATAASSDTVEEAADPPAPEGLVVPPPPDVAGAFQGAAGIDEFSFAQFRSSFEEVDVGASVQVSMRDEEEMHAAHLNLHQDHNLHRNQFGNQEHRRRMAATAAAFHINTPVEPITTMITSSPVVHGSAILQHPEAYGHGSSTYCHHQHQMEEDEQLHQQPQNFDGRRSTSGLEEVIMGCSSRRSKRAEASGPGGNKESRGWQYPSFWPSGSQQDHHG

SEQ ID NO: 350761 - protein, 89 aa, Zea mays
  unsure (1)..(89): unsure at all Xaa locations
  Clone ID: MRT4577_83064C.1.pep
SPKITKAIKNQNNNGTTSTYGTYVDVDRSSQKDKLTQKSGNIHVNPNNTWTCVPCLPPLPLDGPARQWMDPHLPWLDLLDAPXYIYPEP

SEQ ID NO: 350762 - protein, 62 aa, Zea mays
  Clone ID: MRT4577_83065C.1.pep
EPIAAAVIRWHVIHWCDQLPFSLFCLQQPFRIISRRFPIGPLLVSKPASDIFTIRPPRLTIF

SEQ ID NO: 350763 - protein, 129 aa, Zea mays
  unsure (1)..(129): unsure at all Xaa locations
  Clone ID: MRT4577_83066C.1.pep
LRGTTCLEEIGTITGGRAMLLLLGSWLXVNIRAYDPLMYEPLDEDFEGRWIXSKTDEYQGVWKHAXSDGHDDYGLLVRDMARKYAIIKELDEPLTLNDGTVALQYEVRLHNGLECGGAYIKYMRPQRCW

SEQ ID NO: 350764 - protein, 121 aa, Zea mays
  unsure (1)..(121): unsure at all Xaa locations
  Clone ID: MRT4577_83067C.1.pep
THLHGWGKIQKKSHVAAGGEEGRSTVAWDPVRDVQGAAHPPRPPPLFRSSTPRTPPPPASWAAATPPPYRSTPPRTSPPSAATPCSPAPPTTPSPTTSARPTTSXTTPPSVCSSRHPTRAI

SEQ ID NO: 350765 - protein, 87 aa, Zea mays
  Clone ID: MRT4577_83068C.1.pep
CTNSGTLKYFVLLMPPWCFTASCLIPTTHFSHRCITQPYYMLSPFSPTVSSSHNWGSIGDEEQHHILTHSYRYTNEANQQRRDIIYL

SEQ ID NO: 350766 - protein, 140 aa, Zea mays
  Clone ID: MRT4577_83069C.1.pep
MSFLRPMSMLRSAALRPALSAAPRARVQVRFATSDYGSGKGNPAGESPEKQGQNPSENLEHPGPAPPKVAQGQSSSSPNKDGNSNQNESPKPSSESPAPSSNKSGKREFSTFARQMKESKEPAVKQGQDNKPSPNEVKGA

SEQ ID NO: 350767 - protein, 107 aa, Zea mays; identical to SEQ ID NO: 350734
  Clone ID: MRT4577_8306C.1.pep

SEQ ID NO: 350768 - protein, 71 aa, Zea mays
  Clone ID: MRT4577_83070C.1.pep
GVYRLTAVWHTTATQRHLLRKRRGQAACQGHPRNWVSMAWTTGGLFQQGGEYVAGSPAHPRARERENLFPC

SEQ ID NO: 350769 - protein, 202 aa, Zea mays
  Clone ID: MRT4577_83071C.1.pep
MAPRKKLKSAPPVTVSTTVHDLPDSLLQHVLSFLPAQTAVRTCVLARRWRHLWRSTTGLRIVGLDDDEENVPVQDLRKFVEHLLMLRERTDLESVEMKFYSCSEGEMPYVNLWIRFAVICKVRVLTLHIPEDDYLPLDDLPLVSLHLKTLDLYGLILQKSFLDFASCPALENLKMNDCKINGWKISSLSLKHLSITSCFCPD

SEQ ID NO: 350770 - protein, 53 aa, Zea mays
  Clone ID: MRT4577_83072C.1.pep
FFRRRLPQPLRCSQKRVDELTSLPFPPRTRQQHSVNIPCVDGRGRFFLSTIHF

SEQ ID NO: 350771 - protein, 58 aa, Zea mays
  Clone ID: MRT4577_83073C.1.pep
ASIQGQRKLLRGGESKSSPIKTFLLIWKSNSNWKTGDMARFLKNWQLKKNGSIATFLY

SEQ ID NO: 350772 - protein, 38 aa, Zea mays
  Clone ID: MRT4577_83074C.1.pep
VLLKKFHSLKKKKKKKKKKKKKKKKKKKKKKKKKKKKK

SEQ ID NO: 350773 - protein, 59 aa, Zea mays
  Clone ID: MRT4577_83075C.1.pep
DSEKSSITSNSCAGDDYRDIGWGDESGSCNCEDKTVSEALESGANERPLEKTMVPNERK

SEQ ID NO: 350774 - protein, 58 aa, Zea mays
  Clone ID: MRT4577_83076C.1.pep
PVEHHVQMFLIFNINYIYVYTFFVNKNIIVSGRTSTMGRGYSPSTTRRSWLLQALGRF

SEQ ID NO: 350775 - protein, 363 aa, Zea mays
  Clone ID: MRT4577_83077C.1.pep
MPADLLAAADCGGIHGHALFFDALVQLIPPRFYLPSGDEDRPWHQGLSKAAKAALKAKSRANTKAARRARLNPSTPPASTLDLLKKSVAGQAAEEEEEKSEEESGASGDEESSEDDIDEEAGDQEDEMPIAPAAVVSEDRSVTYEELRERLQRRITVLRGNRCTRPEFLNKPRKEKGKKSKAKNEKKGKGEGMKRKRDDGTEDVDVKDGKKVKKEAEEKPDIMYANVFVDPKEARRRKKRRVKNKKKALEQAKRLQEAKKDPEKASKIAWDVARRRAAGEKVHDDPKLIKESLKKEEKRQQKHAAQWKERQKTVDKQRKDKQKKRTENIRDRAQQKKMRKIEKREKKLMRPGFEGRKDGYVNE

SEQ ID NO: 350776 - protein, 62 aa, Zea mays
  unsure (1)..(62): unsure at all Xaa locations
  Clone ID: MRT4577_83078C.1.pep
KEYLYVLIQQPHGLNXLTTVHKLKMEFSYTNIIKDLKIDDCCNGTLVHDPELGXQVIQIHSD

SEQ ID NO: 350777 - protein, 91 aa, Zea mays
  Clone ID: MRT4577_83079C.1.pep
TVRLLMYCHCRDTVSFFLGFESTSSNLTMLILVDLASELQVIRMITALKMILADAATIGRPSLAHHPFCEDESQFMQETCIRTRSTHEDHF

SEQ ID NO: 350778 - protein, 50 aa, Zea mays
  unsure (1)..(50): unsure at all Xaa locations
  Clone ID: MRT4577_8307C.1.pep
RRXHHANSNRSMRQGQPMGWMARREIESHLVGRRSGARARRPHQQGPGQS

SEQ ID NO: 350779 - protein, 40 aa, Zea mays
  Clone ID: MRT4577_83080C.1.pep
RIHDEILVSIKKKWVRIHSPKNLLLPTSKLYCIEPCSLGD

SEQ ID NO: 350780 - protein, 58 aa, Zea mays
  Clone ID: MRT4577_83081C.1.pep
PRVRNTSLLKSCYACRRVSVWILVLFTENLKDARNAEHDLSICMSIHGSQMIIETPDL

SEQ ID NO: 350781 - protein, 171 aa, Zea mays
  Clone ID: MRT4577_83082C.1.pep
KTPPPCSFVNLDGFFITWKPMMSPVPIALGCSTIFARLHGLISGIVDYAVLSSSVLKQSKALPWPLLGLLLPHGWASSRERSLTPPLPASSWCRCVVSWRLAASIGVLKSPVCRRGSLPVPEPQGKVAGATTEQIKRRRTRIQRRRTQIKCLLAQQHLLAQKPHSSSPYGV

SEQ ID NO: 350782 - protein, 120 aa, Zea mays
  Clone ID: MRT4577_83083C.1.pep
HTHSLFCIRCLLRSGTPYTILLALKEEQLKNSHAFYISSPRRSSRTLTRRRNTRKAHTINSMKCSWSAKFVLNQYIAPVMFLRTYWIHEHLSTFTNDLTDYLIRLQYALIRLNVVFISHM

SEQ ID NO: 350783 - protein, 98 aa, Zea mays
  Clone ID: MRT4577_83084C.1.pep
YQPVQALGIIGQSVVQAQGYAQKVDGHGQTTPSPAVACSRHPLCRRVRGRPSGWQGEVPGSVMPPSLLACPMPICPMVCRATFLARQGKKTVWMPRAE

SEQ ID NO: 350784 - protein, 96 aa, Zea mays
  Clone ID: MRT4577_83085C.1.pep
VARKNSLEAHLQTRPERSELVEKNILPESTAAPGLQAHQKELKRHMLEDQLNDKISHRPNPEALIKEGVLQEDPRSPEEKYKEAIEDEYAKREGGA

SEQ ID NO: 350785 - protein, 80 aa, Zea mays
  Clone ID: MRT4577_83086C.1.pep
VEDLPHTFAGARFFMTHLPVSPGLVPVLLRRRSLPRSRPSSLPIAKCVATCPVRAHGRLPCARAGYKQGGRRQPGSMEQS

SEQ ID NO: 350786 - protein, 122 aa, Zea mays
  unsure (1)..(122): unsure at all Xaa locations
  Clone ID: MRT4577_83087C.1.pep
MVSARSVDRQLDACFSNLMVSSGGGRGQAETGGAVPMLSGWKDLPMELLMRIISVAGDDRIVVVASGVCTGWRDALGWGVTNLSLSWCQQNMNNLTISFAXQFTKLQVLTLRQNQPQLEDSA

SEQ ID NO: 350787 - protein, 90 aa, Zea mays
  unsure (1)..(90): unsure at all Xaa locations
  Clone ID: MRT4577_83088C.1.pep
PPGPARGGTPNDRNKPSEEKPPKKGPLGXXAALPSQARPRTREPGPGAAAGPSSHRMLTGNARTCGGQTRGRASRALARPETGPRRNPQT

SEQ ID NO: 350788 - protein, 66 aa, Zea mays
  unsure (1)..(66): unsure at all Xaa locations
  Clone ID: MRT4577_83089C.1.pep
GDLPKPPRDNATVAVALGVSKRLVGSXEFAKLEYHMGPVLAXVITAHPMWYGPCPFVQKXTIRAFL

SEQ ID NO: 350789 - protein, 72 aa, Zea mays
  Clone ID: MRT4577_8308C.1.pep
VSKFDQRCACPNPLFLTPPFPRDQQKKSANLTQKKGEARDLQKISPLSSPQETRRRLHHPNFNHNLRAHSGG

SEQ ID NO: 350790 - protein, 67 aa, Zea mays
  Clone ID: MRT4577_83090C.1.pep
SGQAPKRSINYARRGKLPPGKGGPLQSGRSALLNLLFGKGPPRRREVPPPFKGFFCLKCSFSPAMPP

SEQ ID NO: 350791 - protein, 126 aa, Zea mays
  Clone ID: MRT4577_83091C.1.pep
MQASDRFNINSQLEHLQAKYVGTGHADLSRFEWAVNIQRDSYASYIGHYPMLAYFAIAENESIGRERYNFMQGSDIYSILVKEPFVYRTESTDLLVRKCCFLVASLLREMKIEELLHSFSVSNDHL

SEQ ID NO: 350792 - protein, 55 aa, Zea mays
  Clone ID: MRT4577_83092C.1.pep
VVKEKNQLVLCSTIPTSFLGSWPKTKNLPKSPEKLVEIRIGLGFRTSFLKTPVCG

SEQ ID NO: 350793 - protein, 258 aa, Zea mays
  unsure (1)..(258): unsure at all Xaa locations
  Clone ID: MRT4577_83093C.1.pep
MVDFVRRLASALLKCCDLDIPNRPKGLEDPERLARETVFNVNEIEALYELFKKISSAVVDDGLINKXVGSKLLVXVAVNDNFVSMKSLCLISPWSFDVLSXDEFQLALFKTNRKDSMFADRVFDLFDTKHNGILEFEEFARALSVFHPSAPIDDKIDFAFKLYDLKQQGFIEKQEVKQMVVATLAESGMNLSDDIIEGIIDKTFEEADTKHDGKIDKEEWRSLVLRHPSLLKNMTLPYLRDITTTFPSFVFNSQVEDA

SEQ ID NO: 350794 - protein, 223 aa, Zea mays
  Clone ID: MRT4577_83094C.1.pep
MVDFVRRLASALLKCCDLDIPNRPKGLEDPERLARETVFNVNEIEALYELFKKISSAVVDDGLINKEEFQLALFKTNRKDSMFADRVFDLFDTKHNGILEFEEFARALSVFHPSAPIDFKIDFAFKLYDLKQQGFIEKQEVKQMVVATLAESGMNLSDDIIEGIIDKTFEEADTKHDGKIDKEEWRSLVLRHPSLLKNMTLPYLRDITTTFPSFVFNSQVEDA

SEQ ID NO: 350795 - protein, 64 aa, Zea mays
  Clone ID: MRT4577_83095C.1.pep
CFFANASIHMFGLLEGGTHFFVAGKNINFLLDRVLACKLVSLISMINDLIATGYRLSPTTEKVF

SEQ ID NO: 350796 - protein, 67 aa, Zea mays
  Clone ID: MRT4577_83096C.1.pep
VVAVKVLKNYLVLCSQGKVETAFFFFWGLSPQPEEGNKMIILPDYNPAGLCLIWLPQMPSPIPLDLI

SEQ ID NO: 350797 - protein, 274 aa, Zea mays
  unsure (1)..(274): unsure at all Xaa locations
  Clone ID: MRT4577_83097C.1.pep
MAPHPLHSSSGVSDMDEMAAXLTPTPTPTPARAQVVVLPSARPSSPPRASIPVSSSAYAPPQTAATKLPFSAAVSAPTSASGSITVAIASSGLGPEPSTLTEPVWDTVKRDLVRIVSNLKLVVFPNPFREDPGKALRDWDLWGPFFFIVLLGLILSWSATAKKSQVFAVAFAVLAAGAIVLTLNVLLLGGNIIFFQSLSLLGYCLFPLDVGALICMLKDSVILKMVVVTVTLAWSSWAAYPLMSAAVNPKRKALALYPVFLMYISVACLIIAID

SEQ ID NO: 350798 - protein, 45 aa, Zea mays
  Clone ID: MRT4577_83098C.1.pep
QNHLLLSCILTYKHSFIILHTYNFTPLTFQPISMTNSVNQQFLSY

SEQ ID NO: 350799 - protein, 36 aa, Zea mays
  Clone ID: MRT4577_83099C.1.pep
WNCLDSSEDYRKTKVSAARRTQTTGLHRSHPDISYL

SEQ ID NO: 350800 - protein, 82 aa, Zea mays
  Clone ID: MRT4577_8309C.1.pep
IWSHNEPARRMDGVKWASRKENIQSARLALCTTESNLFFVLAPSPPKKKKGICSDDRHRYFHTDPPTLLDFIAHASNKKWQG

SEQ ID NO: 350801 - protein, 99 aa, Zea mays
  Clone ID: MRT4577_830C.1.pep
LDGSIHLMNRHWSRLLFSNHFILNLHSLFWELQPAQLQAKLAHSDSAYSPRLQHHARPRFLCACRRRPTLTVLSRNDDAVEFPTTVEQALATHHRADQP

SEQ ID NO: 350802 - protein, 269 aa, Zea mays
  unsure (1)..(269): unsure at all Xaa locations
  Clone ID: MRT4577_83100C.1.pep
LSSVPGTALDPGSPRLVHLSISSLXSLTCRATDGARTPTVMCEETKAKDDAKSESEVSKEMFSRQNSGEATSKLRIHEEVSPENCSALQSSKEAAPDACGVEDSVDVEKGKGSHQDSKDDVPVSERCEQWLHVLNKNDAESMSEKHKLVEQIRILLKNDDELRNYAGANGITEPLIHFLKMAIHRGGVQSQEVATMALFNLAVNNDXNYPMLFRLHKYPXSSTTMADLSAGVIPLMEQMIQKHETCEAAIRMYLNLFCIPEXQAIIGSS

SEQ ID NO: 350803 - protein, 88 aa, Zea mays
  Clone ID: MRT4577_83101C.1.pep
YHAYACMHASICCYILHSTVASSKVLTHVGVYVMHAWYVWYDGLAWWRAGWAWTRPRWRCASRGLPWRRTFASAVAPSRRCSTPSSTP

SEQ ID NO: 350804 - protein, 105 aa, Zea mays
  Clone ID: MRT4577_83102C.1.pep
WSRAAPAVAPVAVDTPTRAGPGVLRRWGPRGQVILFVPVLFTLVHECLSPFVSCLLWPICALPPGRSVSVVRAVFILGSSSPMHQLSMDCGSMGASLPPSGFIVG

SEQ ID NO: 350805 - protein, 53 aa, Zea mays
  Clone ID: MRT4577_83103C.1.pep
SEQMQEYEPQLSSASQQVEALVKAQLRMANTIGPHRLAFDRLTQIDTAEAMYD

SEQ ID NO: 350806 - protein, 66 aa, Zea mays
  Clone ID: MRT4577_83104C.1.pep
RLEDPWAQGLENLATRMDGDMTRTYWASAVTQLHRRRDHWARIALGLGPSYLQSKLEGVGQGLKLC

SEQ ID NO: 350807 - protein, 115 aa, Zea mays
  unsure (1)..(115): unsure at all Xaa locations
  Clone ID: MRT4577_83105C.1.pep
KRVRSXKXILXELXDLHIGPDQTSGSLSAVGEDMFHWQVIIMVPSDKTFAGGVFLVNMHLLADYPIKPSNVCFRTKDVHMNIFMDGLLXLTYLNEQWSAAITMXKVLLSICSLLT

SEQ ID NO: 350808 - protein, 52 aa, Zea mays
  unsure (1)..(52): unsure at all Xaa locations
  Clone ID: MRT4577_83106C.1.pep
XXXXSTXDXXXXLXXLXPXXXXXTXCXXGXYXNRXSXSRISELYVRVXTTXX

SEQ ID NO: 350809 - protein, 487 aa, Zea mays
  unsure (1)..(487): unsure at all Xaa locations
  Clone ID: MRT4577_83107C.1.pep
MACCSAVLHHPLGFSLTPCSASRAPPRIQRVGVATPSVASVRPLSRARISPRCTYSGGASAAPGPGELPAAALRRVLEMPGAHQAPACYDALSARLVERAEFRACFTSGFSISAARLGLPDVGLISYGEMIDQGRLITEAVSIPVIGDADNGYGNCMNVKRTVKGFINAGFAGIILEDQSXNACGHTAGFLEVLTRIXAIMRIKAAVDAGFGMLLLIQTTPRMVKYCLILRTPWEIGSRCLLHELMVYLLECSCTANSGCMDVSSSIRVHASCYWRNPIXVELDNLDIDYXGELVFTNDRLVPIXSRLGMEDALIAIRGGRIPPPSSLPTFEEIKNTLGFNHYYEEDKRYAVTPAQSLYGTGYDNYTSEPNSPGDSRSRAEKTQEPVIDILPQLYDIGSSDSRGPSTGMWSRTLRLKITGRDGIQKIDARIPAGFLEGMTRIIPGLAGANIMERLRNAPVDTDNPQNGQILLDFEDAMGDRIQVFIA

SEQ ID NO: 350810 - protein, 161 aa, Zea mays
  unsure (1)..(161): unsure at all Xaa locations
  Clone ID: MRT4577_83108C.1.pep
GAAPRERGPGSPSACCLAXGGLGLGGAGAAPCGPGRGGPATAARVTARSAASPAARARGAPGCACCPXGHVPRRPGLGPLRRAGVAGQGRGPHGAXQPSHGPPRLAGWRAAAPGPGSSVDAAATHGAGASARSGGVPRSWPHAGRVPRTPSTTVQRHGCQC

SEQ ID NO: 350811 - protein, 68 aa, Zea mays
  unsure (1)..(68): unsure at all Xaa locations
  Clone ID: MRT4577_83109C.1.pep
GKGSATHLRLCTGELEMLVSVAVTRAVDWWRKHEVDAMDPNFQSRLXFLLRLPDSVRPVEEKSVPAGS

SEQ ID NO: 350812 - protein, 363 aa, Zea mays
  Clone ID: MRT4577_8310C.1.pep
MDGPRWTEEVDDLVDAGDVDGAIALLESVVSDLSTSAAPPATDLRLATALGDLAGLHASRGDTLRADELRARAIALRSRATVPGTGTLGDQELSEKCPSQECATGSKDSEVSANTNKSNEDEEDDWEAIADSGALDDTLVRSLEQGARVSSCSSPEKSSTPSSGPKRRGRGSFLYNKSVLYSDQCGSERELDNKQSKPQVGSKDHVNEPENNAVTAATQFGTRHVLVFYDFPPTTRTTDLGRDFEKVGDHGVAIRWINDTSALAVFRTPSAANEAQACIPPRYKVRSLKPDDDLLTKIDGRDLDPPKPRPKTSARTAQRLIAHGMGLKQFTNFGSDELKKQEGERKDRIAARQAMRDEAWGSD

SEQ ID NO: 350813 - protein, 125 aa, Zea mays
  unsure (1)..(125): unsure at all Xaa locations
  Clone ID: MRT4577_83110C.1.pep
GPNKKRPLWGHFFQNTQGFFFFVDNKKKGPVXKQRISFPQILXKEKVPEPVLLVFFKKQNXPNLLKPLRTLKKLGXDFICQGYWGIXKTXGSTGEGFYKSLGWVFNNISTKFLIFQRGLGYLRAF

SEQ ID NO: 350814 - protein, 308 aa, Zea mays
  Clone ID: MRT4577_83111C.1.pep
MASSNGEAEQQWIENIKSGGTVPCLAPENCPNGWATPPGDSFMVRGPEYLTNKVKIPGGEYLLKPLGFDWIKGPAKICEILKDSNHRVRKAIDDEVSRSNQPFVWAFNLQLPKDNFSAIFYFVSLEAIPEGSLMDQFLKGDDAFRNSRLKLIANIVKGPWIVRTAVGEQAICILGRALSCKYVQGSNFIEVDVDIGSSIVANAIVHLAFGYITTLTVDLAFLIESQTEPELPERLIGAVRFSELNPGSAGLFERRSEEHQESTQSRPVGFWQGFSQLLNNQGNTREPSPNLQNTNGTLRKEEANEDAK

SEQ ID NO: 350815 - protein, 131 aa, Zea mays
  unsure (1)..(131): unsure at all Xaa locations
  Clone ID: MRT4577_83112C.1.pep
HSFTRSVMVCGKMSTKVGGEQMLNLLINIYYYFSYYFLNSMKSSVCDIAPIVLTMSFTFVGNSTCIXDMIHHMIQHFTDMFTSMAMLHCYTHXGIDEMMVTMAXSDMNNLVNDHQHYHDATDDDDDYDEED

SEQ ID NO: 350816 - protein, 113 aa, Zea mays
  unsure (1)..(113): unsure at all Xaa locations
  Clone ID: MRT4577_83113C.1.pep
ITPKIRVGRNAQSPVCFIPGLGFPKKCWGTRSPFLTPVLGPLNFKKAPXYSFPPPKKRGEAEAFPRVPLLGFPDFRRPVQLLPMGSTCEFWKLCFCLGYGTKGPPKFLCFLVG

SEQ ID NO: 350817 - protein, 66 aa, Zea mays
  Clone ID: MRT4577_83114C.1.pep
RITDLTIFLADRRIYPNALLVILSMHAFIDSDRNSVANRKFIFITHGLSQVLGNFHSQVIYMRATL

SEQ ID NO: 350818 - protein, 71 aa, Zea mays
  Clone ID: MRT4577_83115C.1.pep
PGRKSPVSPQRMPLTGCATSLAMMSRPTPVEVSAYRRRAVAVVGPNFSWSKLQLLARSPDAFLLPHSMLDS

SEQ ID NO: 350819 - protein, 211 aa, Zea mays
  Clone ID: MRT4577_83116C.1.pep
AIDAARAAAVATAEARCAALVAEKEARAAVESATIAADKVQLAVSAVKYRRFVEDDSMVESQEHVDLKYHVSIKNSLRYAIQEMRRQSSLLHNINRLCCSIPEVEGGKVGKLASHLKEVCKSLEKTSIVCEEDLENKCPGWDLDHPPSDVEDHSNPSDVEDQVDGYVSEDLELWEMVFEDMKWEENKVVVSLFEHCRIMGYDYDQIYDRTI

SEQ ID NO: 350820 - protein, 88 aa, Zea mays
  Clone ID: MRT4577_83117C.1.pep
HGGASVLRLSSRQTFYASAAAGFHNQNREGGIALGGNAVADAHRKAEEHGMLDGRLCIAYKEPFPPYERAATTKGYIYATNKKPTHLP

SEQ ID NO: 350821 - protein, 108 aa, Zea mays
  Clone ID: MRT4577_83118C.1.pep
GPRAGGTSIKPLPPPATSSRLLALLFHPHLLLDAATVVSPDELSVNHNVHPPSPSPLKNIIALARADDARLLFLSSKEDSSGGDTSAPVASGQTPPSYVFREALGTQV

SEQ ID NO: 350822 - protein, 56 aa, Zea mays
  Clone ID: MRT4577_83119C.1.pep
FVFVCEPYMYFFYSCSLVAFAWRFLSHFIVFFISMFDSVTSVVNSPAAFFFSIHIM

SEQ ID NO: 350823 - protein, 130 aa, Zea mays
  unsure (1)..(130): unsure at all Xaa locations
  Clone ID: MRT4577_8311C.1.pep
KRVHRCRPHPGRMHHHDKAGGGLPAVALAQXLGLAAAVGAAATISGXHVNPAVPFGPLLAGRSASXPSLVYWXAQLLXAVAAXLVLRLATEGCIXPSTPLXGGVSGLNAXVXXXXHAFGLMYAYFAXVMD

SEQ ID NO: 350824 - protein, 91 aa, Zea mays
  Clone ID: MRT4577_83120C.1.pep
MFNDINTQLDVNQTYYGKLGELRCLFAYDVAIWSPVTRSLAKVRLPQHQLVEDYYLGKHRLSHAQSMIGISGLPHGAHGSPRRIPDCRRAG

SEQ ID NO: 350825 - protein, 195 aa, Zea mays
  unsure (1)..(195): unsure at all Xaa locations
  Clone ID: MRT4577_83121C.1.pep
TTGVLLYILNMVLSKTSYMIVFDDIRAYRHDDDDAQGCWYSNLTLXXPAEGEWGDRLAYGLPKTKHRGAVLVTCRKEDDAKTMARTGLVVRPPKLEGDDAWKLFRREYDQAKDDKRNKDGGGKEGSKGEEEDLLLKQLQEMKKEIVGKCLGLPVAIIEAARGFADLEPLPDDTSPLKPVSSKDMDKDKQLSQANK

SEQ ID NO: 350826 - protein, 78 aa, Zea mays
  Clone ID: MRT4577_83122C.1.pep
DYIQGPIRQGVTKVIAGVTAQIIITFSETMSEALHSDEGELYKHPPLQNQHLQTSACYPGFEPAIELIKWPCFMRQPK

SEQ ID NO: 350827 - protein, 174 aa, Zea mays
  unsure (1)..(174): unsure at all Xaa locations
  Clone ID: MRT4577_83123C.1.pep
TPQXYISSMVSTYVQHIDALYKLGARRLGILDVPAIGCTPGSRVPMANGGCNDAANSMAQNFNKLLRLEVAKAVASSMPGMRYSIASTYNFVTDLMDSQTCAPSXTTYCSDRDDYMFWDMLHPTQATNERGVVAIFYGPQEYADPINFAQLAAATANDDGDINTAMTAGVYAAI

SEQ ID NO: 350828 - protein, 62 aa, Zea mays
  unsure (1)..(62): unsure at all Xaa locations
  Clone ID: MRT4577_83124C.1.pep
GPPPPPTKIGGTRTKNQALGGSKSVTPRTRVRERRFWTFGTRKPCAPVPHRXEKTPPPGRGE

SEQ ID NO: 350829 - protein, 82 aa, Zea mays
  Clone ID: MRT4577_83125C.1.pep
CQHLGLPFVPIVCTVRPVLCRLALCSRATEVVSWCHLQKQQSGVFFSRSLVSYDSYQWWLAPGAVLFAYVPCYGTANPPGRA

SEQ ID NO: 350830 - protein, 101 aa, Zea mays
  Clone ID: MRT4577_83126C.1.pep
MDSHLVAGLRVVDRACCGSGKLNAAVMCAQPNTTYCSDRDDYMFWDMLHPTQATNERGVVAIFYGPQEYADPINFAQLAAATANDDGDINTAMTAGVYAAI

SEQ ID NO: 350831 - protein, 390 aa, Zea mays
  unsure (1)..(390): unsure at all Xaa locations
  Clone ID: MRT4577_83127C.1.pep
MGTNDRAVISLVLLVCIASRSSLGAAETDVEQKRSSVPLMFVFGDSLVDVGNNNFLPPPAPRAASPYGIDFPAGTPGAVSGRFTNGYNLADLVARRLGFKMSPPAYLSLTPXQSLTCSRAXIGANYASGGSGILNTTGNGTLTLQKQITLFSKTKARMSWGRCKLSSMVSRSLFLISAGGNDFSAFSEMGMGEQDAPAYISSMVSTYVQHIDALYKLGARRLXILDVPAIGCTPGSRVPMANGGCNDAANSMAQNFNKLLRLEVAKAVASSMPGMRYSIASTYNFVTDLMDSHLVAGLRVVDRACCGSGKLNAAVMCAQPNTTYCSDRDDYMFWDMLHPTQATNERGVVAIFYGPQEYADPINFAQLAAATANDDDDINTAMAAGVYAAI

SEQ ID NO: 350832 - protein, 228 aa, Zea mays
  Clone ID: MRT4577_83128C.1.pep
MATAAEHNNTRGPSMEKTTNGTSSLDHANNVPKQRTPYDYGGNPLAHIATNASGPRLAAFGGEFQPGSYAPPNRKFANPAPLGLSAFALTTFVLSLINVNTRNIPGPNIVVALAFGYGGLVQLLAGMWEMAVGNTFGATALSSYGGFWISFAIVLIPGPVNIETQLAAKSEAAFLNSFGLFLMGWFIFTFILLLCTLRSTVAFFFLVLTLTMAFLVLGIGYLQTMAHP

SEQ ID NO: 350833 - protein, 163 aa, Zea mays
  Clone ID: MRT4577_83129C.1.pep
SLASRARPRHDDDERGSERAAVGQPPARQAFESYLSKSIMSSSPTSTLLSSPPKSPPSESPPLSPDGAASFRRGSWPGVGSPVNDVLASLRQLRLAKAQASPSGGWSGYPTSPAAYGSPKGAGLYSLPTTPMGTQTSASSFMANLEPLNLRFIDDEEPVQRVE

SEQ ID NO: 350834 - protein, 191 aa, Zea mays
  Clone ID: MRT4577_8312C.1.pep
SGTVEFLTAIFSHFETLVLARARRPRAPWYYLNLTGISLGAKALPISPGAFSLKPDGTGGLIIDSGTTITSLANAAYQQVRAAVKSQLVTTLPTVDGSDSTGLDLCFALPAPTSAPPAVLPSMTLHFDGADMVLPADSYMISGSGVWCLAMRNQTDGAMSTFGNYQQQNMHILYDVREETLSFAPAKCSTL

SEQ ID NO: 350835 - protein, 277 aa, Zea mays
  unsure (1)..(277): unsure at all Xaa locations
  Clone ID: MRT4577_83130C.1.pep
FLLLYFTTVQNKGSYHIIYIYVCLTLVQGGKFDHAVRLFQSIEKRYINSLSNTSDVKEHPPVLFYVRPRVWPLENSNSYHXGVKQDGEPIGDVALPPWAKGSPEEFIHINREALDSEYVSSNLHNWIDLIFGYKQRGQPAVEAANIFYYVTYEGAVDLQNXDDMLHKSAIDDQIANFGQXTPIQIFRTKHPRRGPPIPIAHPLXFAPQSLTLTSSVCGAASHMCAVLFISLLENTGVLMNGGTLSSGKLGLASHLQSGGNFTYSGPRXTFFGLVLCF

SEQ ID NO: 350836 - protein, 42 aa, Zea mays
  Clone ID: MRT4577_83131C.1.pep
APPPISPLYNRIIRSFTPHSSSGIREYYYEQDPIELPFTLSV

SEQ ID NO: 350837 - protein, 54 aa, Zea mays
  Clone ID: MRT4577_83133C.1.pep
NVKKIFSVAPGKYLQLFFCVKSFGGVLFDKGVAPLPCHFTWLEFFRLSLLRQTK

SEQ ID NO: 350838 - protein, 44 aa, Zea mays
  Clone ID: MRT4577_83134C.1.pep
IWSWTGPLRLYVHLGIAPPRAYSAYFLPAVFKPLSHYNRIQSRV

SEQ ID NO: 350839 - protein, 113 aa, Zea mays
  Clone ID: MRT4577_83135C.1.pep
TNKLKSLEKRNETLDEHLRELKSRTTDMSNAVLQERNQLVNELTGLTNTIGEVIYGGESMMSNLRRIMQKVNEEPCNDRLTSEKTNGRSSSPLIRHKSGHVLDRRSPLKENNY

SEQ ID NO: 350840 - protein, 71 aa, Zea mays
  Clone ID: MRT4577_83136C.1.pep
SAKWNKWLFHIALVQSSLAPIIVVHFTKLFVPHNDPTVMLYNEGLVCNKQWLNVTTSSRIARLDPRVLNII

SEQ ID NO: 350841 - protein, 106 aa, Zea mays
  Clone ID: MRT4577_83137C.1.pep
WYIEHDLFEQLIKETSSDTEQTSQIDHSISATSCNTVQYITSLVTPHYATTLSSRGGTLISRNRTTQRARRQQRTIMIRTRAFRRRAARYRALRGGCRSRRRAKPP

SEQ ID NO: 350842 - protein, 40 aa, Zea mays
  Clone ID: MRT4577_83138C.1.pep
RKKKKKKKKKKKKKKKKKKKKKNKKIKKQKKKKKKKKKAC

SEQ ID NO: 350843 - protein, 73 aa, Zea mays
  Clone ID: MRT4577_83139C.1.pep
SHDHKIGAPYLWVDVNMYPPRSISHFKRGLIQVQPCIASVQCCRYSFSLILFISSQLFIQVIAHTDTATHGNA

SEQ ID NO: 350844 - protein, 158 aa, Zea mays
  Clone ID: MRT4577_8313C.1.pep
HSCSDLEITQSVNPNESGMSGELVVLVDILGLSAAAGIAFTSYTYYVRTTYGTSGFVYVMMAAYSSGFKGPISCKSVTHCKESLELETASLFIPRTLVPCFGRQTWLSSSSADSCPPSTYRAYSLVVYTNQLSVSMVPVTCNSFFGGLLKFCLRIDSY

SEQ ID NO: 350845 - protein, 98 aa, Zea mays
  Clone ID: MRT4577_83140C.1.pep
PPPRLPKNPSNRFFFFLSPPPGGPALSKFFFNQFFSKNPLFLKTWFLGDKFPSARERPPFLQPRVSPQHNLLPGFGEVGFWPRFQFLDFPVCFPPGPF

SEQ ID NO: 350846 - protein, 61 aa, Zea mays
  Clone ID: MRT4577_83141C.1.pep
RPRSFVSMTVTDKPDAKAWLRHNDTAAELLAKDANNNGKADPGTYTPCPANPIKMQTSYEL

SEQ ID NO: 350847 - protein, 262 aa, Zea mays
  Clone ID: MRT4577_83142C.1.pep
MKNVAKCDTWCELQNPANHRVFERKLRPKPSGGGHVCLGVTHLIPNSSSASLPPKSNPHRSVYMATLTMQPIGPTPAPAAQQDPSKGENPPTVDGSDLGDIDSGWVILKNSDVVSADLAAAAVCGGQRLGSSTIPSWARWVLGGVVYTVVPFYNRVRHLEDETVGFVENAVEVVEHIAEVTEKLAANVAKQLPEDGSLQKAAEDVEHIAEVVDDDAEKFEAVAEKIDKVCDEIDAAVEPVIEELEKELDQSTTSEKGVDTKN

SEQ ID NO: 350848 - protein, 199 aa, Zea mays
  Clone ID: MRT4577_83143C.1.pep
MATLTMQPIGPTPAPAAQQDPSKGENPPTVDGTDLGDIDSGWVILKNSDVVSADLAAAAVCGGQRLGSSTIPSWARWVLGGVVYTLVPFYNRVRHLEDETVGFVENAVEVVEHLAEVTEKLAANVAKQLPEDGSLQKAVEEVEHIAEVVDDDAEKVEAVTEKIDKVSDEIDAAVEPVIAELEKELDQSTTSDDGVDTKN

SEQ ID NO: 350849 - protein, 144 aa, Zea mays
  Clone ID: MRT4577_83144C.1.pep
EPVICPVTKMAMQSKTLRSNLPLKSTIAEWITRNEATRVRIARTALSMATTEAMVLEAIHELKVLARLRRKNRDQMHKIGITKFLARLLDHKDALIRCDSLDLLCLLVEDDTGKEIIAKTRAVSRTIKLLSSSSTDERHASISF

SEQ ID NO: 350850 - protein, 152 aa, Zea mays
  unsure (1)..(152): unsure at all Xaa locations
  Clone ID: MRT4577_83145C.1.pep
NQGLGNPPPPKKKNPPGGGPHYKKKLSPPPSPPPKCNNPFQGKPKKCKIAFKQNSLPKNSKTTTPNNPNPSPXERNPLSPPRMGRTHPFSSLPKPPQRQKPPNRVNVTGPINPLPLPLPLPPPFPPPPFSPPPPPPPFPCPFLPLPLPPLPL

SEQ ID NO: 350851 - protein, 56 aa, Zea mays
  Clone ID: MRT4577_83146C.1.pep
SVESTSGGFNPPVLPVLFGDKDVGVPGMDVEPGDPVCPAVLQTRITMNLQKKNKIP

SEQ ID NO: 350852 - protein, 71 aa, Zea mays
  Clone ID: MRT4577_83147C.1.pep
PKPDAGMDSGARKPRCPTAPRSRSCSCAGAHERRRHGARLGGAAAELERGRGRGVAVHEALGQGRRGGRVG

SEQ ID NO: 350853 - protein, 114 aa, Zea mays
  Clone ID: MRT4577_83148C.1.pep
RYSPCPAHVSSLIGRRAESRPPPRTSMLQSVAGQPRRHAPRALRTAAGALLSSTPSFDAAAPGFLCARPWQLHPSRHHCHAQIVMKAREIWLDGERDAHARTHKYPGIKGGAHY

SEQ ID NO: 350854 - protein, 381 aa, Zea mays
  unsure (1)..(381): unsure at all Xaa locations
  Clone ID: MRT4577_83149C.1.pep
MDATGDAGGGRRPNFPLQLLEKKEEQPCSTSPAAAVGAGAAGSGEMQMKKVAPPKRTSSKDRHTKVDGRGRRIRMPAICAARVFQLTRELGHRTDGETIEWLLQQAEPAVIAATGTGTIPANFTSLNISLRSSGSSFSIPAHLRAAGSPGPRFSGARGDPWERVVGLGFGGAEGPPSATSSPLLLSFXTPAASALTCHXPSSSSAAANSDLSKKRRWEQEMQQQQQQQYQQQMAGYTQSQMPGTVWMVPSSNAQAAAAAGGGGSSSNESIWTFPPQPGSGDGGAAPVYRGVPSGLHFMNFPAPMALIPGGQQLGLGHENGGSSSGGEGHMGVLAALNAYRAHAVTVAAPAAQNGAEGGSSQQQQRGGGERQDSMSPSDDDS

SEQ ID NO: 350855 - protein, 111 aa, Zea mays
  Clone ID: MRT4577_8314C.1.pep
DRLMSIVVVGHSQHLRRGREQVSHYEPMLGHDLCGSSPAQVIRIVVHHHGLSHYAQHRHPMECPSLVGLSQPTSKVINSTGGLVTGCAVTLRVSRSAEQSRYSENWSRPPL

SEQ ID NO: 350856 - protein, 82 aa, Zea mays
  unsure (1)..(82): unsure at all Xaa locations
  Clone ID: MRT4577_83150C.1.pep
DGWNWNGWERDLSMEMTPPQLTPRATHITDEIDRVSRSVVSRQSQRVVGMQGEVRLVGLGELGELDGAHVVDLFWCCAQXRG

SEQ ID NO: 350857 - protein, 38 aa, Zea mays
  Clone ID: MRT4577_83151C.1.pep
DPPKWIHSTGAGRGIQVQIRYLLLAVDRIYANAYSSRC

SEQ ID NO: 350858 - protein, 118 aa, Zea mays
  unsure (1)..(118): unsure at all Xaa locations
  Clone ID: MRT4577_83152C.1.pep
AWPRWPPSPRRPARRRAPAAGPAPRPPPPPSPRAAAPPPPPAPLPAGSAPPPPPLLPPDPTWATAPATAPAXPPLQGPPRXATGPRPDPWRHEVSGRGGGGTRVCQIASPDPAAVGSS

SEQ ID NO: 350859 - protein, 117 aa, Zea mays
  Clone ID: MRT4577_83153C.1.pep
AWPRWPPSPRRPARRRAPAAGPAPRPPPPPSPRAAAPPPPPAPLPAGSAPPPPPLLPPDPTWATAPATAPAASASGTAATATGPRPDPWRHEVSGRGGGGTRVCQIASPDPAAVGSS

SEQ ID NO: 350860 - protein, 205 aa, Zea mays
  Clone ID: MRT4577_83154C.1.pep
MGSCEMTATEVAALLDLKPHPEGGFYAETFRDSSVSLSTAQLPPQYKVGRAVSTAIYFLLPSGSVSHLHRIPCAETWHFYKGEPLTVFELHDDGHIDLTVIGPHLDAGQRPQYTVPPNVWFGSFPTLDVESFASDGSHLVNSRKRDPEKHYSLAGCTCAPGFEYEDFEMATFDDVKSIAPKAEPFPQLPYSFQEVSRIRDVHIAC

SEQ ID NO: 350861 - protein, 140 aa, Zea mays
  unsure (1)..(140): unsure at all Xaa locations
  Clone ID: MRT4577_83155C.1.pep
QKQSRKRARGESGGERGGWGASCAESATTYSSWGATCSTSADLCTRLSNRATPTHLHVPARTAGVRTGIGDSXRSVTLHHFVRXELGCLILTXQRLKSLGDERNMVWRGISQGKLVDPMLERLKEWDGKPLPINIESKNA

SEQ ID NO: 350862 - protein, 105 aa, Zea mays
  unsure (1)..(105): unsure at all Xaa locations
  Clone ID: MRT4577_83156C.1.pep
TASGSDVNRKRKRGAAGAKIPTFSQKNQLRSCSHWTSPRPPKXAAASTRDTLLSLLIGXKXXERGPPHHQRQVVRHNRNQRQNHSRNQIFTPNKSRLXCAXAIXX

SEQ ID NO: 350863 - protein, 64 aa, Zea mays
  unsure (1)..(64): unsure at all Xaa locations
  Clone ID: MRT4577_83157C.1.pep
NFLAGNDTNSTGTSYATDDDGDEAERPXRKGTTRRSPPTTGHETNPEEIAAGVSCAINRGYHSW

SEQ ID NO: 350864 - protein, 200 aa, Zea mays
  unsure (1)..(200): unsure at all Xaa locations
  Clone ID: MRT4577_83158C.1.pep
MGPFVKKXDIEPRAPEFYFCQKIDYLKDKVQPSFVKDRRAMKREYEEFKIRINALVSKALKVPEEGWIMQDGTPWPGNNTRDHPGMIQVFLGHSGGLDTEGNELPRLVYVSREKRPGFQHHKKAGAMNALVRVSAVLTNGQYMLNLDCDHYINNSKAVREAMCFLMDPNLGPQVCYVQLPQRFDGIDRNDRYANRNTVSF

SEQ ID NO: 350865 - protein, 167 aa, Zea mays
  unsure (1)..(167): unsure at all Xaa locations
  Clone ID: MRT4577_83159C.1.pep
MRGILTALGCSDWPQAKRARILACSRRMKHRGPDWTALYQXHEGNFLAQQRLTVISPLSGDQTLFSEDRTVVAAASGEIYNHKNVRKKVTGTPNFSTGSDCEVIIPLYYKYEENFVDTLDGEFAVVVYDTRDRTYTTDRDAIGVKPLYIGCGSDRSGCIAAEKNALN

SEQ ID NO: 350866 - protein, 38 aa, Zea mays
  unsure (1)..(38): unsure at all Xaa locations
  Clone ID: MRT4577_8315C.1.pep
DEGVFSCASVVVSFLSATLGXPVSGPVCRRARCPIDVV

SEQ ID NO: 350867 - protein, 97 aa, Zea mays
  Clone ID: MRT4577_83160C.1.pep
SGTGSSRIRSHGRAALGDPIMCSVQPSWCVVVLAVAPRSASACPAPAAVGTGGSGTQLGTAGLGTEGRLGRSYPPLESQGDDLLVRRASSTTTAPWN

SEQ ID NO: 350868 - protein, 105 aa, Zea mays
  Clone ID: MRT4577_83161C.1.pep
WRGRPAGWLPLEAWTFYMPVCASRAGAGSLAEVDADRSRWLNPTTCRGPVSRLLPRLLLQLVRLVGADRVHPVFRSRSTMRGSTIPFPGTPFDAWFAPSLALELE

SEQ ID NO: 350869 - protein, 39 aa, Zea mays
  Clone ID: MRT4577_83162C.1.pep
PDQIVSSSVRHNLPGSKRTAIFFEKKKKKKKGRPPTSEL

SEQ ID NO: 350870 - protein, 100 aa, Zea mays
  Clone ID: MRT4577_83163C.1.pep
ARNSARGTFAPIFSPPRPAATQGGFYEALRFFYPRHTIAIHASHEIPGDSTTPLEGRETTREKPKQGGGCPCQMQRNRCQQRHRKTEKINPLASHQTPKY

SEQ ID NO: 350871 - protein, 57 aa, Zea mays
  Clone ID: MRT4577_83164C.1.pep
DISCMIMLIRVIRLMYIGIYLGEAQSLVGVLVFWLHNKFVLTGHFILNVVPFMNSRL

SEQ ID NO: 350872 - protein, 47 aa, Zea mays
  Clone ID: MRT4577_83165C.1.pep
FREKGVAKLSVTLSVELFQLTEIGCAAVFALLWDIITFSLYGISLGV

SEQ ID NO: 350873 - protein, 46 aa, Zea mays
  Clone ID: MRT4577_83166C.1.pep
ELIINGKSRIVPCICSIWLTKREFLKKQTKANLYLNQANNFARKKM

SEQ ID NO: 350874 - protein, 162 aa, Zea mays
  unsure (1)..(162): unsure at all Xaa locations
  Clone ID: MRT4577_83167C.1.pep
PTVSAEYSEAVEKARRKLRALIAEKSCAPLMLRLAWHSAGTFDVSSRTGGPFGTMKHQSELAHGANAGLDIAVRLLEPIKEEFPILSYADFYXNPLVFDNSYFKELLSGDKEGLLQLPSDKALLSDPVFRPLVEKYAADEKAFFDDYKEAHLKLSELGFADA

SEQ ID NO: 350875 - protein, 196 aa, Zea mays
  unsure (1)..(196): unsure at all Xaa locations
  Clone ID: MRT4577_83168C.1.pep
QRPRTRGAWHSAGTFDVSSRTGGPFGTMKHQSELAHGANAGLDIAVRLLEPIKEEFPILSYADFYQLAGVVAVEVTGGPEIPFHPGREDKPQPPPEGXAFLMPLRMGLSDQDIVALSGGHTLGRCHKERSGFEGAWTTNPLVFDNSYFKELLSGDKEGLLQLPSDKALLSDPVFRPLVEKYAVDEKAFFDDYKEAH

SEQ ID NO: 350876 - protein, 133 aa, Zea mays
  Clone ID: MRT4577_83169C.1.pep
GTMKHQSELAHGANAGLDIAVRLLEPIKEEFPILSYADFYQPPPEGRLPDATKGSDHLRQVFGKQMGLSDQDIVALSGGHTLGRCHKERSGFEGAWTTNPLVFDNSYFKELLSGDKEGLLQLPSDKALLSDPV

SEQ ID NO: 350877 - protein, 52 aa, Zea mays
  Clone ID: MRT4577_8316C.1.pep
RYAQSTCQTSVASFGAAMRLPRLSLARDSRAIMMAGQGSAVRSSSHTRVCES

SEQ ID NO: 350878 - protein, 216 aa, Zea mays
  unsure (1)..(216): unsure at all Xaa locations
  Clone ID: MRT4577_83170C.1.pep
MASRAPNGDAEAPLLAATGDAPTTTAIGKALNSTADLAKHLPTGAVLAFEMLSPSFTAYGTCNAANRALTGCLIGACALCCFVLCFTDSYRDTATGALRYGFITPSGRLLSIEGGGSSSGPGPGAPPPRDDRYRLTVRDVMHGLLSFAVFLAVAMVDRNVVACFYPVESASTRQLLAAVPVAAGAAESFLFAMFPSTRXGIGFPAAVRGGVLSPDE

SEQ ID NO: 350879 - protein, 250 aa, Zea mays
  Clone ID: MRT4577_83171C.1.pep
MAKNYPTVSAEYSEAVEKARRKLRALIAEKSCAPLMLRLAWHSAGTFDVSSRTGGPFGTMKHQSELAHGANAGLDIAVRLLEPIKEEFPILSYADFYQLAGVVAVEVTGGPEIPFHPGREDKPQPPPEGRLPDATKGSDHLRQVFGKQMGLSDQDIVALSGGHTLGRCHKERSGFEGAWTTNPLVFDNSYFKELLSGDKEGLLQLPSDKALLSDPVFRPLVEKYAADEKAFFDDYKEAHLKLSELGFADA

SEQ ID NO: 350880 - protein, 303 aa, Zea mays
  Clone ID: MRT4577_83172C.1.pep
MQIAGFNVHYRVGWFKKKKKKKKQAPQQLLRSSLSRVAPHRILRFEALCSQGTMAKNYPTVSAEYSEAVEKARRKLRALIAEKSCAPLMLRLAWHSAGTFDVSSRTGGPFGTMKCPAELAHGANAGLDIAVRLLEPIKEEFPTLSYADFYQLAGVVAVEVTGGPEIPFHPGREDKPQPPPEGRLPDATKGSDHLRQVFGKQMGLSDQDIVALSGGHTLGRCHKERSGFEGAWTTNPLVFDNSYFKELLSGDKEGLLQLPSDKALLSDPVFRPLVEKYAADEKAFFDDYKEAHLKLSELGYADA

SEQ ID NO: 350881 - protein, 355 aa, Zea mays
  Clone ID: MRT4577_83173C.1.pep
MPLVGQIAKVLTQRCRSWMLFYGEDVSVKMRLLFYILPCLLLSMDFLTLHPAMLGMEVILQGWMTGKAKKLMSFMIKGMSNGTFPTLPQPRRVASYDPKLSLLAAMAKNYPTVSAEYSEAVEKARRKLRALIAEKSCAPLMLRLAWHSAGTFDVSSRTGGPFGTMKHQSELAHGANAGLDIAVRLLEPIKEEFPILSYADFYQLAGVVAVEVTGGPEIPFHPGREDKPQPPPEGRLPDATKGSDHLRQVFGKQMGLSDQDIVALSGGHTLGRCHKERSGFEGAWTTNPLVFDNSYFKELLSGDKEGLLQLPSDKALLSDPVFRPLVEKYAVDEKAFFDDYKEAHLKLSELGFADA

SEQ ID NO: 350882 - protein, 332 aa, Zea mays
  Clone ID: MRT4577_83174C.1.pep
MYHSTYLCNSCGLPVSRNVSELFVSAMEKKKKKKKKKKKKKKKKKKKKKKKQAPRPSSYCGRPSAASHRIAFYDSKLSLLAAMAKNYPTVSAEYSEAVEKARRKLRALIAEKSCAPLMLRLAWHSAGTFDVSSRTGGPFGTMKCPAELAHGANAGLDIAVRLLEPIKEEFPTLSYADFYQLAGVVAVEVTGGPEIPFHPGREDKPQPPPEGRLPDATKGSDHLRQVFGKQMGLSDQDIVALSGGHTLGRCHKERSGFEGAWTTNPLVFDNSYFKELLSGDKEGLLQLPSDKALLSDPVFRPLVEKYAADEKAFFDDYKEAHLKLSELGYADA

SEQ ID NO: 350883 - protein, 165 aa, Zea mays
  Clone ID: MRT4577_83175C.1.pep
FHPTRPPTRPPTRPRTRGAVEVTGGPEIPFHPGREDKPQPPPEGRLPDATKGSDHLRQVFGKQMGLSDQDIVALSGGHTLGRCHKERSGFEGAWTTNPLVFDNSYFKELLSGDKEGLLQLPSDKALLSDPVFRPLVEKYAADEKAFFDDYKEAHLKLSELGFADA

SEQ ID NO: 350884 - protein, 143 aa, Zea mays
  unsure (1)..(143): unsure at all Xaa locations
  Clone ID: MRT4577_83177C.1.pep
ESPTAVPPPPTRDEPCRPSSSXDKPPXPHPSVPKSLSQPPWSPLPSLPSPPPSSHPPPPRSPLPSLPSHPQSSHPPPPRSPLPCLPAPPPSSHPLPPMPPLPSLPAPSSSSPPPPRSLPSPLPPPPSPSRSRLAPRRKPCFAR

SEQ ID NO: 350885 - protein, 233 aa, Zea mays
  unsure (1)..(233): unsure at all Xaa locations
  Clone ID: MRT4577_83178C.1.pep
MVDNAVVAVAVVVLLVVVSKLKSLLSSKPKLHLPPGPWTLPVIGSLHHLIGGPLIHRTLRRLSQKHGPLMMLRLGEVPMVIASSPEAAEEILKTHDTAFADRFTSATTAAMTYDPTNMALSPYGERWRQLRKICVLELLSAARVQSFRRIRQEEVARSWRRVAAAAAVRSSVDMSAXAKTFVYDTIHEGXVGSRSRHQDGYLDASHMAVXQTSXLSVXDXLVPSSRIMQMLAT

SEQ ID NO: 350886 - protein, 31 aa, Zea mays
  Clone ID: MRT4577_83179C.1.pep
IRPRGESQSSFYQVLLWLGGLTVLSRRDGGD

SEQ ID NO: 350887 - protein, 112 aa, Zea mays
  Clone ID: MRT4577_8317C.1.pep
DLSPFIPPFFRQHITISLVQLLMSHYFPIETIWFQMPSPFLQKLQLDAPAKLSRAQAPDPSSISPVCSAHELAACAALDPSSEPNSTMYTPATPIKNINNHQHSTSTMSKGQ

SEQ ID NO: 350888 - protein, 70 aa, Zea mays
  unsure (1)..(70): unsure at all Xaa locations
  Clone ID: MRT4577_83180C.1.pep
MADQVAGDQIAEFKEAFSLFDKDGDGCITXTKEVGTVMHSLRQNPMAAELQDMIIDVDANAHGTSDFPKF

SEQ ID NO: 350889 - protein, 111 aa, Zea mays
  Clone ID: MRT4577_83181C.1.pep
NPPPLPLGGLVSLSVFWKGSFRGGVLPSMQAQGVQIGPRAAVLGGPHHIWKFFPPLIFGSWFGARASPGPISSFIVDFLGFFFHAKFGCCRPWFRFCFSGLFSEPVWPSWV

SEQ ID NO: 350890 - protein, 59 aa, Zea mays
  unsure (1)..(59): unsure at all Xaa locations
  Clone ID: MRT4577_83182C.1.pep
WSFRTKEFWYNSKDRNQPGSRRPELKSXKNLIVEQTTFIENCPYKVLLIQHRGRNLFYQ

SEQ ID NO: 350891 - protein, 151 aa, Zea mays
  Clone ID: MRT4577_83183C.1.pep
MASGGYYYDQSAGYGGYSYSAAPRTTPSHLLVFLATVALLGATSLYSRYESAVESLVDQVRFAVVLSPLLLLLAVQYWAATAGSRRPRGGALPSLLAGDQPSWYAGGGGWGQRDGASSSPWGVALALALVLLLVSYQSCFRDMWFPLVTRR

SEQ ID NO: 350892 - protein, 192 aa, Zea mays
  Clone ID: MRT4577_83184C.1.pep
HPSAHASGAALAWRAAAFTSTRARATAGTGYSAAPRTTPSHLLVFLATVALLGATSLYSRYESAVESLVDQVRFAVVLSPLLLLLAVQYWAATAGSRRPRGGALPSLLAGNQPSWYAGGGGWGQRDGASSSPWGVALALALVSATCGSRWSPAGELTSVQARPFWRHVSPASCSAAGRRWRRIIKHQIGCCC

SEQ ID NO: 350893 - protein, 116 aa, Zea mays
  Clone ID: MRT4577_83185C.1.pep
ASGFGKFIFKSPLGVPVLCRSARVFSVREPASPFLFRVGHCFTPALVRFSRHQVGARAVFFVPRAAPARSPALPPWVATFFLLPRGGVRLFRVGSLGAAVFFFPETNVCSTTMNGI

SEQ ID NO: 350894 - protein, 94 aa, Zea mays
  Clone ID: MRT4577_83186C.1.pep
ADRPIGSTVVIAVYTKNTTMDYCTVIDSTIHRDVIINIITGTNHTDCAVLIIDSTTVGFEAGMSNDGPSRHHALLALTLGATDMTSCCNKMDAT

SEQ ID NO: 350895 - protein, 73 aa, Zea mays
  Clone ID: MRT4577_83187C.1.pep
SRGYSYTITDVSLIIVQQSCLLRGLHSGPGIAHGMYAAHSWIVVSTPSTINPLSPQLSPPECWILQDYPSLSR

SEQ ID NO: 350896 - protein, 139 aa, Zea mays
  Clone ID: MRT4577_83188C.1.pep
MSHRKFEHPRHGSLGFLPRKRSSRHRGKVKSFPRDDPKKPCHLTAFLGYKAGMTHIVREVEKPGSKLHKKETCEAVTIIETPPLVIVGLVAYVKTPRGLRTLNSVWAQHLSEEVRRRFYKNWCKSKKKAFSKYALKYDS

SEQ ID NO: 350897 - protein, 89 aa, Zea mays
  Clone ID: MRT4577_83189C.1.pep
SFAQTSIITHFFPPITKMAGEHPTLQAGGLQQPIPATLLQQPISYLQQQSLAHLTIQHHGTHHQHQFLPQLTHLAMVNPPVYFHQHSLV

SEQ ID NO: 350898 - protein, 429 aa, Zea mays
  Clone ID: MRT4577_8318C.1.pep
MSSEAECAAPAAAAPDGAGGGRVEIDTSAPFESVREAVDRFGGSAVWSSDLVRRMFAPSKKHEHSDQAAEAINAEEQAAQLENELAVKERETLDVLKELEATKKIIADLKLKIRKEATETSPEEAADQVSEAGAQQQKPENTNIDVVVDMEGVEENHSGSVPVDLEQAKANLNRATCDLAAVRAAVELLRNSIAKEKVLLERAREKLSSDTSSVSSLEDDLDQTAQKMETLKDLQRRRKDPSDIFVEIKKMTTEVQQLRSMADDSKSEAMVLAAEIEQVKASICTAEVRCIAARKMEDAARAAEALALAEIKALVSSGSSFEGDTASDGGGVTLSMEEYFKLCSRALEADESSRRKVENAMLQVDAADDSESESVKRLEDARVEVEECKKALQEALRRVEAANHGKFAVEEILRRWKSESGHKRASLGW

SEQ ID NO: 350899 - protein, 43 aa, Zea mays
  Clone ID: MRT4577_83190C.1.pep
ITFSFQFKGQEIKFSYKQPKLLTMCANQTNNLKVHPTYNCVYN

SEQ ID NO: 350900 - protein, 80 aa, Zea mays
  Clone ID: MRT4577_83191C.1.pep
LLRQGLIRLTIGKFGTPSGSRQKSCSICNILVLKTEILASLSNNFWYIILQFWKNNAVFSKTVVLYTKSCLKTEILASLS

SEQ ID NO: 350901 - protein, 81 aa, Zea mays
  unsure (1)..(81): unsure at all Xaa locations
  Clone ID: MRT4577_83192C.1.pep
MQSTDGIILDRGCAGRPLPSYVSGRHGAAACXSTGHSILWRWGLCLSRRACLLXPTDXLEEELRRCTLRRNVRLAGTGAAG

SEQ ID NO: 350902 - protein, 149 aa, Zea mays
  unsure (1)..(149): unsure at all Xaa locations
  Clone ID: MRT4577_83193C.1.pep
MDAVSCAGVAPQSALLSHTHSFADAAIARALHFSLSDHAAADPPATTTAAMLMQGAVAATDCTPTSAAASPSSFARCRLGPAGGHAGKRRRPRPSKRAPTTYISTDAATFRAMVQRVTGADEXPAAAAAGRARPRSTPAAPWCRAVSPA

SEQ ID NO: 350903 - protein, 348 aa, Zea mays
  unsure (1)..(348): unsure at all Xaa locations
  Clone ID: MRT4577_83194C.1.pep
HWVPRGRPGIFLIWFQIQIQCTFXFDTEPXNNAWGLDLPVSDSDGADELPALYAVTITFSSSAQFXGKIPSCHIPFILGEPPGSGMDIVPVDNQNREESGYCASVMIELEPREPSPGLIDVSVEANTENCHVLSGPLKPITVGFEDMFLKASVPPDTPREGVAMYYQDLFQALWQACDSSTNTGRETFPLSGGKGSAAINGTRSVKLLEVTPKVLIGSVERYLASFVVSVSGVSLVTILRGNGIIKNVMXEENVADASVGADALVPYSPDRNLQLQIIEDDEIGGGAERYGHGSKREMGIMRVMIFLPPRYHLLFLMEVGSASTLVRIRTDHWPCLAYVDEYLEALIS

SEQ ID NO: 350904 - protein, 103 aa, Zea mays
  Clone ID: MRT4577_83195C.1.pep
NNTEALPRASRRGCPPIASSGKKIMFVGTSVGHQNQTGSQVVGSRSQASFRTWSRVLEESSYLAVGKKRTVSRKSNSSRVPSFDLLVQRGGMYKDSVWANKNK

SEQ ID NO: 350905 - protein, 93 aa, Zea mays
  Clone ID: MRT4577_83196C.1.pep
MASKAFGNGLKELRFLFCQTSEHSAATRNFLTRSYPAMKKANPSIPIMIREASGTEPTVFARFDFGKERKLPLKGLDDKAIEQQVSELVQKGA

SEQ ID NO: 350906 - protein, 64 aa, Zea mays
  Clone ID: MRT4577_83197C.1.pep
RIRKSRMIPDTGRLSLLMIVSSTGADSYLQENVLVLALRKHIMNSQCWDRDGLSRMTLTMAPGL

SEQ ID NO: 350907 - protein, 92 aa, Zea mays
  unsure (1)..(92): unsure at all Xaa locations
  Clone ID: MRT4577_83198C.1.pep
FFFYDQRNSXGLGGISFPQGPFSVFGYPPHGKDVLSPIKARDKIRFSQLVQGQEPLFFPPLPPQKSFFFRSPAFSAFFFPDPAPPLLFIPAP

SEQ ID NO: 350908 - protein, 102 aa, Zea mays
  Clone ID: MRT4577_83199C.1.pep
SSRMSLRSVVFQWRSCGNDKTHLKPSPPPPLEHSFPRRGNFLKVFLFLLDLRDESPPPGSFLHLSSEILGVRIESMRSGPKSLLFPFGHCNWWEFSPKNEPI

SEQ ID NO: 350909 - protein, 106 aa, Zea mays
  unsure (1)..(106): unsure at all Xaa locations
  Clone ID: MRT4577_8319C.1.pep
PKCYKLTDKTVIGCSGFHGDCITLTKIXIEARLKMYKHSNNKAMTTGAIAAMLSTILYSRRFFPYYVYNIIGGLDEEGKGAVYSFDPVGSYQRDSFKAGGSASAML

SEQ ID NO: 350910 - protein, 346 aa, Zea mays
  Clone ID: MRT4577_831C.1.pep
GDIARKFIKDQELLSFIDAECFIVSTVNALQTPMINASMVLCDRHFGGINYPVGGVGGIALSLADGLVEKGSEIRYKANVTNVVLENGKAVGVRLSNGKEFFAKTVISNATRWDTFGKLLKEKELPEEEKNFQKNYVKAPSFLSIHMGVKASVLPAGTDCHHFVLEDNWNNLEKPYGSIFLSIPTVLDPSLAPEGHHILHIFTTAGIEAWEGISRKEYEEKKEMVANEIIRRLEKKLFPGLQDSIVLKEVGSPKTHRRFLARNDGTYGPMPRGKPKGLLAMPFNTTSIDGLYCVGDSCFPGQGVIAVAFSGIMCAHRVAADIGLEQKSPALDAGLLGLLRWLRTLA

SEQ ID NO: 350911 - protein, 35 aa, Zea mays
  Clone ID: MRT4577_83200C.1.pep
SDQCYKSPAAQSSPVYRGRRRIRENSARVASPWRP

SEQ ID NO: 350912 - protein, 63 aa, Zea mays
  Clone ID: MRT4577_83201C.1.pep
VTCIKSDCPSLLIATLRWWQHNFKFIVSNVCNAMEVNKNHKSNLNQCRSYKYVYKRLIFVLPF

SEQ ID NO: 350913 - protein, 47 aa, Zea mays
  Clone ID: MRT4577_83202C.1.pep
ANQVGVPAGCPLGSGPAVPYVKSLAHHFIPNEPRHANTNDHKKKQRN

SEQ ID NO: 350914 - protein, 48 aa, Zea mays
  Clone ID: MRT4577_83203C.1.pep
TTEMNDGTSSGGGACAVFIYLRGTFTQCSYNAHTLPSHKSHIYNEFNF

SEQ ID NO: 350915 - protein, 122 aa, Zea mays
  Clone ID: MRT4577_83204C.1.pep
NYKPQPPHQHLCKLARVCYIHREGEEEEGQVPAAAQIHPTTSINEESQVFPLLSCPLPHRTRSSLMYTSVFKMLLHLRDQNCAAITPIHSVTDSNLLAASASAQLGHAPAYGDRVGSNIPTC

SEQ ID NO: 350916 - protein, 75 aa, Zea mays
  Clone ID: MRT4577_83205C.1.pep
AEIKSSIMLRGSRGCGGERSAGGAPAAGRPAGPRRQGSRSPAPRSSKQLRRCHVGSRRATDTVRVICERRERRSL

SEQ ID NO: 350917 - protein, 279 aa, Zea mays
  unsure (1)..(279): unsure at all Xaa locations
  Clone ID: MRT4577_83206C.1.pep
MSKPPAVEKAADGSAERTEKVSRDGVPDVAKKEDKKSDRPEKKKRKEKDKHKERKKEKEAKKEKEKHNYKEHDKTRENNISYPVDSLNLKPXPSCSPTSXGGKSVVPDENLKKRKNHETNGYLQNHLEMRPTKLPRPAXPINLVENGTASHVAAPLSSVKPAGXIEKAERLHKEEKMNGNQQAERAPVDPVAAYENGITSRKSPHPDCKYLSQIYSVPEAPQMMELPGQEGEDWLFDRGGTKSRKPSSAAEADEAPQVWAQALKIDQADVIALPYVVPF

SEQ ID NO: 350918 - protein, 67 aa, Zea mays
  unsure (1)..(67): unsure at all Xaa locations
  Clone ID: MRT4577_83207C.1.pep
RRQHQTSAGAILPGRPVRAATATIIQPCXQAAIGFLFATAISTTESAACEIPIVKPYMIQHAIIDRI

SEQ ID NO: 350919 - protein, 70 aa, Zea mays
  unsure (1)..(70): unsure at all Xaa locations
  Clone ID: MRT4577_83208C.1.pep
LFIHTSPYTNLYLFEKKTASTTICIQDKKKQKTTPNNLTTNDVYNXHTIQXTTNXHSXTXXXLPNLXXXS

SEQ ID NO: 350920 - protein, 124 aa, Zea mays
  unsure (1)..(124): unsure at all Xaa locations
  Clone ID: MRT4577_83209C.1.pep
LPLSQRFTLNRVAYLQHQVLPFSQLAPAYCKHXRLLPFNQLAALNPSAYLHQQMLLPFSQLVAASRASFLTQQQLLPFYQQFAASPATLLQVQQLLPFVRLASPHPAASYQQHIIGGALFWIAY

SEQ ID NO: 350921 - protein, 270 aa, Zea mays
  unsure (1)..(270): unsure at all Xaa locations
  Clone ID: MRT4577_8320C.1.pep
MSFETTGTIASFGGKLLKLKHKSESTNTDMELNMFLPPQALKSGAKVPVLFYLSGLTCTGNNCSEKGFFQHGAAKHGIAVVYPDTSPRGLQIEGEDEAYDFGSGAGFYVDATKDPWSKGYKMYSYITKELPEALFSSFKELDSSKVSITGHSMGGHGALTLFLKNPGMYKSVSAFAPIANPINCPWGQKAFKGYFGEDQQQKWKEHDASELVKQWKGPLEVLIDVXTGDNFYKQXQLLPENFVKAAKESGNDKGISLRMQXDYDHSYYFM

SEQ ID NO: 350922 - protein, 63 aa, Zea mays
  Clone ID: MRT4577_83210C.1.pep
GVPKGRKWFCVGKSPRPYRAYSPGRQYFSRCWVGVFLWAIRVCKGFCLKNGQYRRRVAGGHKM

SEQ ID NO: 350923 - protein, 69 aa, Zea mays
  Clone ID: MRT4577_83211C.1.pep
GRFLGHGLPDFFPGKAERADFWRQGRSRADPPGRSPEESPPPLGRVNFGGNAAAAAGGLGRVWEMVRSE

SEQ ID NO: 350924 - protein, 49 aa, Zea mays
  Clone ID: MRT4577_83212C.1.pep
LDSWFGLWVYMPWVLIGSIIGVFVTYDVDPGGVVAPTGFGYCHEGLCLV

SEQ ID NO: 350925 - protein, 80 aa, Zea mays
  unsure (1)..(80): unsure at all Xaa locations
  Clone ID: MRT4577_83213C.1.pep
KKQDGLXKXQLXYQGRKGQXAXSAEXXEGTPAPHXXEEKKXAGDTPENEKTRSKGXRXTXSDNXXSSRXEENTAPGQPKK

SEQ ID NO: 350926 - protein, 127 aa, Zea mays
  unsure (1)..(127): unsure at all Xaa locations
  Clone ID: MRT4577_83214C.1.pep
MFVPRHSLKPFLPRTEPLQEGVGLEIAEAVIGALRGELAATAVNAPMVPAEVLSELSPYVVLAEKLGRLVVQLVAVGSGIKGVRVVYSSARDPDDLDTRLLRAMVTKGIGEPISSAFVNIXNADYVR

SEQ ID NO: 350927 - protein, 144 aa, Zea mays
  unsure (1)..(144): unsure at all Xaa locations
  Clone ID: MRT4577_83215C.1.pep
MPMAXATQAGAVTRHLGAATSAPEAKTRQQSTAAAQPTTTSRGPAPLRASTEEAEEAPKGFVAPQLDPSTPTPIFGGSTGGLLRKAQEEEFYVITWTSPKEQVNEKPTGGAAIXMREGPNLLKLARKEQCLALGTRLRSKYKNT

SEQ ID NO: 350928 - protein, 99 aa, Zea mays
  Clone ID: MRT4577_83216C.1.pep
KGFCAHREGVVFGPALVEGVGIVMIDDEVPSQTRRDSGPQRRRKGMEPAWKRRGSRWRLCLWREQDLGFCGRWRGRWWRKWLGLQIKPPHGQPRRPFPS

SEQ ID NO: 350929 - protein, 101 aa, Zea mays
  Clone ID: MRT4577_83217C.1.pep
GRVGRARIWRRRWPAARPGKGAAAAAAEEGAHPTCTSPMASHNKYLISPHQSSKQCLSFSFYISIQKMIFLYLFQLLYLLDWIFNLHCEDDGRVASYYSTI

SEQ ID NO: 350930 - protein, 95 aa, Zea mays
  unsure (1)..(95): unsure at all Xaa locations
  Clone ID: MRT4577_83218C.1.pep
TKPALRITASTGFAGVECVRTELRXRLPPEXQAPALHLGSLEHTLGRLHIRVLGHGSGRLLRGETEAGSGRVCDLEQHQGGEEQKWRRSKHSLTA

SEQ ID NO: 350931 - protein, 38 aa, Zea mays
  Clone ID: MRT4577_83219C.1.pep
LRVVTSTAFDLIYFSLFTAKDLSFKRTVNVISFDRPPG

SEQ ID NO: 350932 - protein, 122 aa, Zea mays
  unsure (1)..(122): unsure at all Xaa locations
  Clone ID: MRT4577_8321C.1.pep
STGGRPKPAESRVSVRNIDVERGPEXPRRTSTAFFVRMKELRKNYKEKRPNEKQCSXIAKADXDMWEILCDADKDPYVSXVDKMKADYTMKMDADCNNETVGGPTLYGDTDKTKYEDNDAPR

SEQ ID NO: 350933 - protein, 149 aa, Zea mays
  unsure (1)..(149): unsure at all Xaa locations
  Clone ID: MRT4577_83220C.1.pep
MDCLEAVVVTVLAQAVAAMYFAKLXDDXPCIRTQLQSLEESAESLRARCLNVHKGCRTFTDGLGDASYGNIALASILDTFEGGLNDPMSVAFGGPVLTKFTIALRELRTYMGVLGFQAWHMLDDRLLNFVDSALHDVXDAHKRFYKGSL

SEQ ID NO: 350934 - protein, 98 aa, Zea mays
  Clone ID: MRT4577_83221C.1.pep
MVLRRAATECPKKVAGLKDLVNLPTQLREFAGGRSQMSHISFFLSVWSYIKDNKLQDPTNKNIVKCDEKLKTVLLGRSKVQLSELPMIVKLHFPKLPK

SEQ ID NO: 350935 - protein, 98 aa, Zea mays; identical to SEQ ID NO: 350934
  Clone ID: MRT4577_83222C.1.pep

SEQ ID NO: 350936 - protein, 53 aa, Zea mays
  unsure (1)..(53): unsure at all Xaa locations
  Clone ID: MRT4577_83223C.1.pep
NXTPEAASSPLAAEHQGLHRRGLRWRQEVLAGSVRSQPGRSQEVFLEPHARTP

SEQ ID NO: 350937 - protein, 24 aa, Zea mays
  Clone ID: MRT4577_83224C.1.pep
RPIELLREVHSVHLRLTAGSPEPH

SEQ ID NO: 350938 - protein, 68 aa, Zea mays
  Clone ID: MRT4577_83225C.1.pep
MATSASSSLLKSSFAGSLLPAATLTTPASPVVATCSRCAGVGPICSSMSMSSSNPPYDLTAFRFSPIK

SEQ ID NO: 350939 - protein, 158 aa, Zea mays
  unsure (1)..(158): unsure at all Xaa locations
  Clone ID: MRT4577_83226C.1.pep
RVTELVAFFEXXGLNIQDXLVALSGAHTIGXATCGSVRPGLCKRRKARTLDRQYGDFLQRKCRAGGDAAEAYVELDGETPTAFDNQYYKNLLHGKGLLDTDQALLADSRTAGFVKSFAYQKPQEFAHQFAKSMRRLGEAQVLTGNEGEVRRKCSAVNY

SEQ ID NO: 350940 - protein, 131 aa, Zea mays
  unsure (1)..(131): unsure at all Xaa locations
  Clone ID: MRT4577_83227C.1.pep
KAHRRPALKGXAPVTYSGQGRITMRKTAAKSSXGAPGKPWYGAENLLGLGPMSGQPTNYLTGEFPCDYGWDTAGLPTDPETLAKNRQLXVIHYHWAMLGXALGCVFPLLFARNGVKFCEDVRFIVGSQIFI

SEQ ID NO: 350941 - protein, 106 aa, Zea mays
  unsure (1)..(106): unsure at all Xaa locations
  Clone ID: MRT4577_83228C.1.pep
EGIATDEERLRSTLISPVFLWGSRMTLLPFVISTXTWERRRHQHDSRDQGEREEARTAFTLGREAHHRAYXAGVWLLQVDGDQYPVACCGRSACGPGPARTRDRPG

SEQ ID NO: 350942 - protein, 106 aa, Zea mays
  Clone ID: MRT4577_83229C.1.pep
YESQTKAIPPRTSNALGYTLELLDLLRRRRLQPMPSARRQQGTETTPRTTTASPWVHKISSGTNGYIITKSVSSGTTGTGRTCTGRPSSTTLRKTTSTTRVSKEMT

SEQ ID NO: 350943 - protein, 89 aa, Zea mays
  unsure (1)..(89): unsure at all Xaa locations
  Clone ID: MRT4577_8322C.1.pep
TSCTKYHFGNEGLIMVXILSLEFWLDLXXFFRKSLTHSFSATKQQRECHVXPHLQQAQARXXHAQGGRACRPRTQGGADSQGLIRSWFG

SEQ ID NO: 350944 - protein, 197 aa, Zea mays
  Clone ID: MRT4577_83230C.1.pep
MGILEHRQNSSPRRHGHQEMTSLPIPDDLLPEIFLRLPTPCDLIRASAVCASFRRVVVDRPFLRRYHKLHSPPLIGFLDFRRVFHPAEPPHPSASAAKAVALAADFTLSFLPTPAGDWTISDICGGLVLLKRRDCAELVVCDPLHRRHLLLPPIPEFDEWVHSVDKPRTFGCQILLVGDEEASEEAFFRVIYVEFTL

SEQ ID NO: 350945 - protein, 77 aa, Zea mays
  Clone ID: MRT4577_83231C.1.pep
VWQLKILYLKLGTGQNVIPVVLMQNERWAGFVLLDAEGKVCWLWRDRMKGGDLFTFVGFDLLHGYSYVNHGGVKIAT

SEQ ID NO: 350946 - protein, 74 aa, Zea mays
  Clone ID: MRT4577_83232C.1.pep
LFKLCNSLNSQLDTFHIVRVIMNSCSLKNHHRPSKKAKSTMPAAKNKWHRAGCRPAPTKRGSRNHPRTRGRTRG

SEQ ID NO: 350947 - protein, 57 aa, Zea mays
  Clone ID: MRT4577_83233C.1.pep
LSGYYCSSFLRKNKSMTSIILGFVFTLLYGSKTIAVVILARSSVSVPNPPAVWSTYV

SEQ ID NO: 350948 - protein, 101 aa, Zea mays
  Clone ID: MRT4577_83234C.1.pep
GPITVGHSSSINRLILSDGLKSSPDRRPRAEEAASQVGQDSQGLAVLDHVVVYVIQRPVPELETFLHQLRRRQAHSRLLSRSPESRFVLTPYCGYLFVRKR

SEQ ID NO: 350949 - protein, 898 aa, Zea mays
  Clone ID: MRT4577_83235C.1.pep
MARVRSTARVDREGDETEAADTVPISKAMKRSGLVTPEDMSAAEDIPAAEDIPAAETERTAVEETNSEDDYSSAVPSKPSHLDFGKSTISEADFPKMVKLGYLSEAKKELIRFGGEETIPKPGKNEVVVFKSLFKAGLRFPLNKMIAGVLKKYGIYLHQLTPNAIVRLSVYIWALRSQGVEPFSEVDEDEDKLVQSPLELTFGETRPPCNMIRGSPSQIALAEFRVIADHIGTRDLVQEFLAFRVFPTMKEWEMPKLEGEKKKGELIRLPYHYKFKKHFKVPCQEWLDTIEVMCNEILGNYSKKEDQLMTAAFGTRPKRRLNRVMDAIGFEYPEYERLDKGAEGQKRKRVANALNKDDEDQSKKKKQKSEAKAFASKKRKDSSPKQKSIDEEEKTSATSCVAEIEKILKVMTETLPIKLSPLGLHLTKLFHKEKEPTETKTPRPKRQRIVTVTKVIETTPPKASAPKAPAIESVTATEAATSEAAEEAAGATEDINLESVALDIDKILLDMAAEEAVGATEEASAPEAEKKKEIAEETLEDENLNFQNLVGQELTKAEKEKLKEYAISCGYRPGALLFGGVDDEKLGCIRDQTGAKVISTLSKSIGFPKLEADISHYRQQHIVGSLFYSNFKVIRVQSMLLSKALRMQQDLEDKKHEVIIENLENKIKDQTTAFEKKEFELRTTEGLLSEAEAKITELNTKLLGSEQQKLKLNGKLEAEIQNGLALKKSLMDLQNKCLKFSNQCVQQLKKVFYSVGASSEEFIPSVEDLPGAFEHIEGEIDDLDDVIAGHDDFCALVASRGTAAAFLKSGCEHGKIINRPNLSLSPAILDDIPNLARSIANKFIKVIWTKGGREKAGDEARDHLKLLIILTYRLTKPKLKLQNRRKKLQRCCRSSSSL

SEQ ID NO: 350950 - protein, 557 aa, Zea mays
  unsure (1)..(557): unsure at all Xaa locations
  Clone ID: MRT4577_83236C.1.pep
MARVRSTARVDREGDETEATEIVPISEAMKRSGLVTPEDIPATEDIPAAEAERAAVEETDSEDDYSSAVPSKPSHLDFGKSTISEADFPKMVKLGYLSEAKKELIRFGGEEIIPKPGKNEVVVFKSFFKAGLRFPLNKMIASVLKKYGIYLHQLTPNAIVRLSVYIWALQSQGVEPFAEGFCRVHELHYQTKARGDGLHENFGCYNFAYRKTTKFPVISYRSKWSAGWKSEWFYVKIDEDEDKLVQSPLELTFGETRPPCNMERGSPSQIALAEFRXVFPTLKEWEMPKLEGEXKKGELIRLSYHYKFKKHFKVPCQEWLDTIEVMCNEILGNYSKKEDQLMTAAFGPRPKRRLNRVMDAIGFEYPDYERLDKGAEGQKRKRVASALNKDDEDQSKKKKQESEAKAVASKKRNASTPKQKSIDEEGETSATSSATEIEEILKVMTETLPVKLCPLGLHPTKLFHNEKEPTKTKAPRPKRQRIVTVTEVIEATPPRASVQRCXAIESTTATEAAPSEATDVEATRAEDINLESMALDIGNTCQASLDNCVNNEEICSS

SEQ ID NO: 350951 - protein, 63 aa, Zea mays
  Clone ID: MRT4577_83237C.1.pep
MANKSPNVVFLKVCVDEMNTIVEQLRVGAMPTFLFMREGDVKNRVVGAPKKELARKLYLHRAW

SEQ ID NO: 350952 - protein, 439 aa, Zea mays
  unsure (1)..(439): unsure at all Xaa locations
  Clone ID: MRT4577_83238C.1.pep
LGTSRPAGPGNPPRPQRPSTSSLSLTAAARLKVTVMTGDEQIVTLDVDRDESVENLKALLEVETRVPLRQQQIHFNGKEMQNTEKLSAAGVQDGDLVMMFSTSERPSQDGLRVNPDGTAVNPQAFQQHARGDSQLMAQLLQNDPQLAQAILGDDTTELQNILRSRHQQRTELKRKQEEELALLYADPFDVEAQKKIEAAIRQKGIDENWEAALEHNPEAFARVVMLYVDMEVNGVPLKAFVDSGAQSTIISKSCAERCGLLRLLDQRFRGIAVGVGQSEILGRIHVAPIKIGNIFYPCSFTVLDAPNMEFLFGLDMLRKHQCMIDLKDNVLRVGGGEVSVPFLQEKDIPAHIRNEEKLSKLGSLSQATGESSRTREXSQCATTNPSSRSSSXANPPQGGDFEAKVTKLVELGFDRASVTQALKLFNGNEEQAAAFLFGG

SEQ ID NO: 350953 - protein, 32 aa, Zea mays
  Clone ID: MRT4577_83239C.1.pep
AFSNNPALGKFAPLAFQPRAITNCVNQRFLSY

SEQ ID NO: 350954 - protein, 106 aa, Zea mays
  Clone ID: MRT4577_8323C.1.pep
RGASDIFSLTLYPPPSVTGIGVPMKRCRCRHAGSAALRIATTITLSLFRGYNETNSVPNQTIYYTPSTWWAGGGGDADDHHMGWHRGWTGLETLLLGWYRCWARST

SEQ ID NO: 350955 - protein, 40 aa, Zea mays
  Clone ID: MRT4577_83240C.1.pep
WHLKCIQMAFNGIQKRQKGTAESTSDAKRHLNILTKFNLN

SEQ ID NO: 350956 - protein, 210 aa, Zea mays
  unsure (1)..(210): unsure at all Xaa locations
  Clone ID: MRT4577_83241C.1.pep
ASPLKLCCYCFDLTLLVLGVCVYVCGQTRVPLRQQQIHFNGKEMQNREKLSAAGVQDGDLVMMFSTSERPSQDSLRVNPDGTAVNPQAFQQHARGDSQLMAQLLQNDPQLAQAILGDDTTELQNILRSRHQQRTELKRKQEEELALLYADPFDVEAQKKIEAAIRQKGIDENXEAALEXNPEAFARVXMLYVDMGVNGVPFEAFXDSGAH

SEQ ID NO: 350957 - protein, 60 aa, Zea mays
  Clone ID: MRT4577_83242C.1.pep
MRHNKTPPPGAPAANPPQGGDFEAKVTKLVELGFDRASVTQALKLFNGNEEQAAAFLFGG

SEQ ID NO: 350958 - protein, 125 aa, Zea mays
  Clone ID: MRT4577_83243C.1.pep
TPRKLAPTPPWPAHVARTSSPLQFNCIAVLESRSPPSYALPCPEKATPVILPHRVRRKIAICFQASRNRRSSFSDQMIQFFEFYEIEDPDHLFGEGCLWCYLCSSKEEGVEADLREFQDFGEFED

SEQ ID NO: 350959 - protein, 50 aa, Zea mays
  Clone ID: MRT4577_83244C.1.pep
ADALTLNQSVMTGSFGKPQGTCARVDIGQVLLSVRCKDNNAAHASEALRR

SEQ ID NO: 350960 - protein, 362 aa, Zea mays
  Clone ID: MRT4577_83245C.1.pep
MAEVHEGIYGTHQSAPKMKWLLRRSSFYWPNMIADCFKYYKGCQVCQKFGDLQLVSAAELHPIIKPWPFRGWRLDFIGEIHPSSSKGHRFVLVATDYFTKWTEVVALKNMTHKKVIEFITEHIIHRFGIPQTLTTDQGTSFMSKEVCEFAELYRIKLLNSSSYYAHANGHAESSNRTLVNLIKKKIFDNPKHWHKILSEALWAHIISKHSATKVSPFELVYGQEAVLPVEISLNAVRFARQNNLIVVDYYNSMMDNIDEVTDKRVIALRAIKKDKIMIARAYNKVKAKSFQVGDLVWKTILPLRNEDRKFGKWSSSWEGLYKVKQVISGNAYLLQTLQGKDLPKALNGRFLKQYHPSMWQDA

SEQ ID NO: 350961 - protein, 214 aa, Zea mays
  Clone ID: MRT4577_83246C.1.pep
WVERQALELQLTRAVALSDPFVYHHQARLMESIPIGQDSVESASARVLMAVLELQLTRGHSRQKWQQLYTGSYAAFKMMEMAKNRACTQAQERLEETKVQAEQVIGLKHQVIELQTQHQADQNRIKALEHQLANAHSKSKVLSQQQEEIRLGAIAISEDLKETLSFISHQDQAIQELNRAHPMEFQVAQRLVNHLQQAVHMLNVAFYPTPASAD

SEQ ID NO: 350962 - protein, 99 aa, Zea mays
  Clone ID: MRT4577_83247C.1.pep
VPGTLRRGLLVKTYRLSFTICYSLVRPLTLNHVEEIVPTAKKTKTKWPRILVDFNHKNLRYKRGSKACSNLYNVEATDWGYYLQCGLTKKLEGTSRHTF

SEQ ID NO: 350963 - protein, 74 aa, Zea mays
  unsure (1)..(74): unsure at all Xaa locations
  Clone ID: MRT4577_83248C.1.pep
AACSVVVARCPSFGLFALFFXVGFLXXRGWPLLPLASVWXAWAFXLXVXGSVSWXALNSSAGWAPWAGKKKAVV

SEQ ID NO: 350964 - protein, 82 aa, Zea mays
  Clone ID: MRT4577_83249C.1.pep
EKINRWGPRAKFFFFAPVIFTLVQRVYLRWCRVCCCPCVFLIARSLCVGCNPLYYPTVSADPCFNKHGLGIDVCCYPRQALF

SEQ ID NO: 350965 - protein, 112 aa, Zea mays
  Clone ID: MRT4577_8324C.1.pep
GRFFFFFFGFFFFFFFFFFFFLIIFFFFYFCLQQSAGKAHPEETTRRKPTHQKIKGPKKPRGHPALGPALTVTGDGAKALPYRNTRTGKADPHKPNPHAKLCPGPNQPPVGN

SEQ ID NO: 350966 - protein, 105 aa, Zea mays
  unsure (1)..(105): unsure at all Xaa locations
  Clone ID: MRT4577_83250C.1.pep
VLSGAKVQFELHYQEVKLRKLGSYEHRXYLQPGRLAKHLEVDVWVIEPQGLRFLHVPDTFEGHFDGVPVISKGQQKAHVSFKPTVAQREYXPSCGRXAVDGNGVL

SEQ ID NO: 350967 - protein, 69 aa, Zea mays
  Clone ID: MRT4577_83251C.1.pep
KTLLAIEYSPEYRWHRHVSGFHPVRHVAELQETDAVLDAVAEGIRPHVDLVHGHRSRSLSECRSKIMRG

SEQ ID NO: 350968 - protein, 96 aa, Zea mays
  Clone ID: MRT4577_83252C.1.pep
LSLFFLLFPPLSFLGLVFFYKIKKAPPTTSFFKMNPIFSKKNKINSLEKKKPPKKKKVVKPPPLKKLFKKQHRLPPFSFLKKTTAPCLPKNSFSPN

SEQ ID NO: 350969 - protein, 53 aa, Zea mays
  Clone ID: MRT4577_83253C.1.pep
RVLPTGLGNNKHSPCPLLVQNFDPGGLGKKRGVGVYWYGPRPSSVSPNLFLYT

SEQ ID NO: 350970 - protein, 115 aa, Zea mays
  Clone ID: MRT4577_83254C.1.pep
FLKLVALVHHRKIGPILAPLPRIISYAALLTIGSVGCKLVLNLYTGLSQERSSSQSPRSQTVAGAPFLWISVMDPVKMGTGVQAYISYRVITKVKMLFGLGCRTTQLPDAWVDPG

SEQ ID NO: 350971 - protein, 121 aa, Zea mays
  unsure (1)..(121): unsure at all Xaa locations
  Clone ID: MRT4577_83255C.1.pep
YKKKQKDRVQANFFFFFFLLFFLARLAVLLGFFWGFPSHWGPFGRAFGGAGVPFGGSCFVCLGAVFRPLGCLFPGVAPLXWLCWLPFLXTWGFCCGGCVCCFFWRLCFLVWALALPVPALF

SEQ ID NO: 350972 - protein, 120 aa, Zea mays
  Clone ID: MRT4577_83256C.1.pep
SSRDKHPEDHFMLIIDAFNHWCRCLVHRMPRCLWCFFHVVNIDYTHWLMYSIGGRKAHTIISQGNRYITPTNLASKQVTKHHDTPESVSKNWVWHFENDLFMDGTYFTVTGCHINRLFNM

SEQ ID NO: 350973 - protein, 50 aa, Zea mays
  unsure (1)..(50): unsure at all Xaa locations
  Clone ID: MRT4577_83257C.1.pep
MYPSGAMVGAAPAAPXSASSRVEKATSHLLMGPDWAVNLEICDILNADVW

SEQ ID NO: 350974 - protein, 64 aa, Zea mays
  Clone ID: MRT4577_83258C.1.pep
RRKSGIPEGRYGKRGCGNESFWVERRRRFSNSKPTQDSEPNSLEPGLNKRYVNGVPARPASRVP

SEQ ID NO: 350975 - protein, 622 aa, Zea mays
  Clone ID: MRT4577_83259C.1.pep
MYPSGAMVGAAPAARPSASSRVEKATSHLLMGPDWAVNLEICDILNADVWQTKDVVKAVKKRLQNKDPKVQFFALTLLETMMKNCGEYVQFEVAEQHVLQEMVKIIQKKNDMQVRDKILLLLDSWQEAFGGPGSKYPQYHWAYLEVKTTGVVFPKRPMDAPPIFTPPATHNSETYGSPRYSAGSLSDRMSSDVETLSLGDLNKIRNVTDLLNDMVYALNPSDRMAINDEIITDLVTQCRSNQQKLLQFVSSSGNEQLLKQGLETNDLLQSVLSKYDAVASGAPLAVEASVREAIEAPAVKSYAPPEHNDNVNEEEDEFAQLAQRKNKSVVSSSDDASSSTLGDLALVPIDQAVSESPSSVASNALVLLDPAPSTSTESKELDMIDLLSLTLCSPTPETSTDSSAQDQNGPQQPAVTHNQKGLQEPTVTNGQQYPSSVPQYPSNYQPHTANQAYAPQTSNYVAPWAQTGAYPPQPPAYASGYAYPAPPWVAPTHPVDSNPFLSVNYQDPRPAATSVAQTATYAPPPASYPPSISYAQFATPQSIQHSNSVASPSNGQIANQAQMNVNQQPKDSSAASSRPYYIPDNLFSDLIDAKSFGGGNKMGGPTTMGSSNGGQPMIGGKK

SEQ ID NO: 350976 - protein, 49 aa, Zea mays
  Clone ID: MRT4577_8325C.1.pep
PVMNRIYCRNICPLAWCAGRGDSCYFLSKRTDMHPAKLSLYATIDYIEH

SEQ ID NO: 350977 - protein, 58 aa, Zea mays
  Clone ID: MRT4577_83260C.1.pep
LSKDLCLLLPVGRSWPIAASRVFVSGRVNPHQVVPQLVQHHVVRSPLLPSHNPHHRTA

SEQ ID NO: 350978 - protein, 57 aa, Zea mays
  Clone ID: MRT4577_83261C.1.pep
EMVLPLITYLKGAPLFLNERPFFFFIFIFLFFLFLFFYLFFFFFIFFLFFFFFFIFF

SEQ ID NO: 350979 - protein, 78 aa, Zea mays
  Clone ID: MRT4577_83262C.1.pep
LLLVLERLLSWDSCSFCGLEAEHPHRAVHLLNKGPHPPFPKRVDKPTLLNEKAACWYHDRKIDLSQPAPEEGTTPSHG

SEQ ID NO: 350980 - protein, 60 aa, Zea mays
  Clone ID: MRT4577_83263C.1.pep
IVIHCHHLLDRSAKHGSGLYYHYQAARRALFLKECCTYYHLNSVQYLRRSWVLFNSPNVT

SEQ ID NO: 350981 - protein, 136 aa, Zea mays
  unsure (1)..(136): unsure at all Xaa locations
  Clone ID: MRT4577_83264C.1.pep
MAKLALGHXREASDAGXVRAVLAEFILTFLFLFGGVGSDMATRKLAGGGEDTVVGLTGVALAHTLVVDVMXGKGXLNVFCDHINPDVTLGLAGTDRIILFHYALYVGGHLHGSTLDWLLLALLAPDECGEPLHALG

SEQ ID NO: 350982 - protein, 83 aa, Zea mays
  Clone ID: MRT4577_83265C.1.pep
LVRQGYSIREPNFNNSIVSTSAIPEVKIDEKVLFRATHWLRFWAYLQRVEDQEIIKETCRRIEVASMQFFSYFGWSFTNMITY

SEQ ID NO: 350983 - protein, 110 aa, Zea mays
  Clone ID: MRT4577_83266C.1.pep
GGRRAGGHLTEFLKNIRGTIDDDEWGRGIGGGINVYSNKHKERPDRLIYMLINNHRGGLGCVGWGRLKRAFQIAPRRGRGADVQYGAHQGLHANALTGLGMCEQWLTQYM

SEQ ID NO: 350984 - protein, 87 aa, Zea mays
  Clone ID: MRT4577_83267C.1.pep
PGSGKKSLCRAVLTEIFGDSSLNVSHYLKSCNGQGSISVPILVPVSSSNNHVELHMRFQLKNAINALMTLANEMSDKCKITEPIVRK

SEQ ID NO: 350985 - protein, 68 aa, Zea mays
  Clone ID: MRT4577_83268C.1.pep
APECVLNMQHVVHDQVSITVPCLVFTSKHVYMIFSFMLYEHASHVSPCIISPLYKKLETFTNDYSLDQ

SEQ ID NO: 350986 - protein, 105 aa, Zea mays
  Clone ID: MRT4577_83269C.1.pep
MSKAVKCSSSHSEDSAINSFVSRFAPGIFSLNQEFSSESTCRSSATWPEEILPSRSIRAILDESQYKFLRNCFQSTPNSWGQVIVTAGWDGKIRSFQNYGLPAHQ

SEQ ID NO: 350987 - protein, 96 aa, Zea mays
  Clone ID: MRT4577_8326C.1.pep
GVPIYCRICISRRPIICTALIRASCPSPFRLRTEGQLPWLPRTLVTLVLSCFTGPRSQPQGCLWGSIWVRLGPHFHQFLRPSTGPEPQRRSSAKTS

SEQ ID NO: 350988 - protein, 98 aa, Zea mays
  Clone ID: MRT4577_83270C.1.pep
IRHEAGKWFWLTTPTSSGNSSENRTGAPSGTPILALFIHCRRQRVGEGLAPPSKKKKNRERRERMQSHFGWSKIILGLKKKKKKKKNKGEKQKPNKAL

SEQ ID NO: 350989 - protein, 111 aa, Zea mays
  Clone ID: MRT4577_83271C.1.pep
SRLPRKPTCLPQTRAEEAMSGRARGGKGLVKGGTKRHRKVLRNSIQGITKPAIRRLARRGGVKRIYGLIYEETRGVLTISLQNVIRDAATYNEHSRLMNGTAMDVDYALKH

SEQ ID NO: 350990 - protein, 273 aa, Zea mays
  Clone ID: MRT4577_83272C.1.pep
ILQGAVVGTITGNCRFYDASDNLLRFETQVAVSGKKKSSLKRITAFEFSPSNPSKLMVTSADSKIKILEGTTVTQNYSGLRTGSCQSLATFTPDGQHIVCASEDSNIYVWNHENQDEASLKHAKTIWSSERFYSNNAAIAIPWNGPKPRNPVSLASQILSPQGDNLWCMSKAVKCSSSQSEDSAINSFVSRFAPGIFNLNQEFSSESTCRSSATWPEEILPSRSIRAILDESQYKFLRNCFQSTPNSWGQVIVTAGWDGKIRSFQNYGLPAHQ

SEQ ID NO: 350991 - protein, 105 aa, Zea mays
  unsure (1)..(105): unsure at all Xaa locations
  Clone ID: MRT4577_83273C.1.pep
MVIVMTFGLAHWVFATEMEQNKGSLGTITHKAISFIARANTPEGSTFDRPFMNPAVYFCHSLVSLDWGYQRVYWVGPLIGGCLTGVIYXLVFIYHTHEQFPSTDY

SEQ ID NO: 350992 - protein, 86 aa, Zea mays
  Clone ID: MRT4577_83274C.1.pep
KSNQRQLRRLHRIADEEGVRRRKRSCVAVINSYESRRRHRTVTWMSSTAVDLWFDSRPGLKFFHGDWVWFTNTCGLNEQLALKPPA

SEQ ID NO: 350993 - protein, 62 aa, Zea mays
  Clone ID: MRT4577_83275C.1.pep
AGAPRRGSDRDGLDGLLSAPHARRLSQRCQWPPAQAWRDGPPEHAASPGQSSESRGVHRRAS

SEQ ID NO: 350994 - protein, 57 aa, Zea mays
  Clone ID: MRT4577_83276C.1.pep
FKLIKKVQNGVPKLYMCFEKTTTHTNLLSIIQQLTQTKISNHLMLKSETKLINNVLP

SEQ ID NO: 350995 - protein, 138 aa, Zea mays
  unsure (1)..(138): unsure at all Xaa locations
  Clone ID: MRT4577_83277C.1.pep
QGAWVCEXPNIQPYRIQQAIVDVLLPLSPLYGTTIIRLXLQQLPWVRXWHRNIRAQQLQQLELANLAAYSQEQQFLSFNQLDVLNFASYLXQQELRFSQLYDAXTXKFVTLKQLTALNSYDYLQXVQVLPFSQIDGVS

SEQ ID NO: 350996 - protein, 70 aa, Zea mays
  Clone ID: MRT4577_83278C.1.pep
RLPDVLPKTTGYSVCCKPHLMLRHRDGRADITLSYQRHVQCARKRSCCYMCRLTKILMHCTLLCTLRLYK

SEQ ID NO: 350997 - protein, 87 aa, Zea mays
  unsure (1)..(87): unsure at all Xaa locations
  Clone ID: MRT4577_83279C.1.pep
FALRCRDXLILIPIHDQMXVLINQRNDHITXLDAKCAKHELEIXEFKFARSMFYSGRRPGIKDDIGFXKGGKESGNAPHXRLSSFVK

SEQ ID NO: 350998 - protein, 106 aa, Zea mays
  Clone ID: MRT4577_8327C.1.pep
TTSELMRVLGSCSRAPSKKRCDKSVDTSCTGQCRSKSVVKADDSGGCVALGGCSLGRGSAFSEDRLRIGRRRFRRRRTGRCRRGSRLPRQAIHRPGRIVHRYHAAA

SEQ ID NO: 350999 - protein, 91 aa, Zea mays
  Clone ID: MRT4577_83280C.1.pep
PPHEKARSKASIPPNNPSVKKKRRSYRPHGVLGEKRPARGGHSGGWSPGRGPQFWLPPPPRVLQIGCNPAPRFFFLGRRGCPALFPFRHQN

SEQ ID NO: 351000 - protein, 93 aa, Zea mays
  Clone ID: MRT4577_83281C.1.pep
QIQAKYIHIFLLGTSRSSNLSGGGAGRCGGFTCHGLSLPERSLLASLGNSLGHSARGKEGRGGPAVVVKISCRRGEGEGGRGKDLSPAGPGGT

SEQ ID NO: 351001 - protein, 96 aa, Zea mays
  unsure (1)..(96): unsure at all Xaa locations
  Clone ID: MRT4577_83282C.1.pep
NSARGPAMPSSLAGAAAPIGGRVAGLSRWRRQSPPESSWIADNECLMAAEAGDVDSARCSSAELSKXXAHXXKXSWRRPQRICICSRLTSQTTTRH

SEQ ID NO: 351002 - protein, 158 aa, Zea mays
  Clone ID: MRT4577_83283C.1.pep
PAGPTCHSGEKRTWPRLPLRVYRRHRPPVYPHPTPSLSPGPDRSFPRPPSPSPSPAGDFHHHRRTAPTLLPSRAMAQTVVLKVGMSCEGCVGAVKRVLGKMEGVESYDVDIMEQKVTVKGNVTPDAVLQTVSKTGKKTSFWEAEAVTSESATPAGATA

SEQ ID NO: 351003 - protein, 126 aa, Zea mays
  Clone ID: MRT4577_83284C.1.pep
LGPSRGAGRHRSFPRPPSPSPSPAGDFHHHRRTAPTLLPSRAMAQTVVLKVGMSCEGCVGAVKRVLGKMEGVESYDVDIMEQKVTVKGNVTPDAVLQTVSKTGKKTSFWEAEAVTSESATPAGATA

SEQ ID NO: 351004 - protein, 138 aa, Zea mays
  Clone ID: MRT4577_83285C.1.pep
RGDANCRLYFPENTPSLSPSSDRSFPRPPSPSPSPAGDYHHHRRTAPTLLPSRAMAQTVVLKVGMSCEGCVGALKRVLGKMEGVESYDVDIMEQKVTVKGNVTPDAVLQTVSKTGKKTSFWEAEAVTSESATPAGATA

SEQ ID NO: 351005 - protein, 85 aa, Zea mays
  Clone ID: MRT4577_83286C.1.pep
MELRLCLHLHLHPHARPASAPTPPPCPAAVLLPASRPVRRLRIGGSCGVAQRRSTRRSHSAICGAEPDGAQGGEAVKERSVSVIL

SEQ ID NO: 351006 - protein, 144 aa, Zea mays
  Clone ID: MRT4577_83287C.1.pep
HSRPRGGRGRHRPPVYPHPTPSLSPGPDRSFPRPPSPSPSPAGDFHHHRRTAPTLLPSRAMAQTVVLKVGMSCEGCVGAVKRVLGKMEGVESYDVDIMEQKVTVKGNVTPDAVLQTVSKTGKKTSFWEAEAVTSESATPAGATA

SEQ ID NO: 351007 - protein, 164 aa, Zea mays
  unsure (1)..(164): unsure at all Xaa locations
  Clone ID: MRT4577_83288C.1.pep
HHPIRAWLAPSCQAHAPYSQPHPPPPLPPCRTRSSPRWRRSCRTTPPRSTRPPTPPPPPRLPRPHPLSSPPPHRHALPPPLLGPSTRWRSASSCPPRPDPAXAPRPPESAXPAAPPPWTCPRPNPSKXNQPRXPNPTTRPAEPPPRRASDRSAGTQEESRRAAE

SEQ ID NO: 351008 - protein, 115 aa, Zea mays; identical to SEQ ID NO: 209500
  Clone ID: MRT4577_83289C.1.pep

SEQ ID NO: 351009 - protein, 93 aa, Zea mays
  Clone ID: MRT4577_8328C.1.pep
RLSPPGRPATSGPCSRSVARCSSGRRGAATARPRGRWTGGGSTRWTPWIPTSKAACFSCFGCLTPVRPGRREECDPGRLRGTHSPPPPSPPPP

SEQ ID NO: 351010 - protein, 144 aa, Zea mays
  Clone ID: MRT4577_83290C.1.pep
PRLVLRGRGRHRPPVYPHPTPSLSRGPDRSFPRPPSPSPSPAGDFHHHRRTAPTLLPSRAMAQTVVLKVGMSCEGCVGAVKRVLGKMEGVESYDVDIMEQKVTVKGNVTPDAVLQTVSKTGKKTSFWEAEAVTSESATPAGATA

SEQ ID NO: 351011 - protein, 33 aa, Zea mays
  Clone ID: MRT4577_83291C.1.pep
KFQSRSSNSVESCGPSPRASGAPLLAPLGCSPP

SEQ ID NO: 351012 - protein, 84 aa, Zea mays
  Clone ID: MRT4577_83292C.1.pep
SQHGLEGTDFDSDQPFVLGGSPRKRLPPVRSLVEPVRPLCADAQLLRLLNLSALSVSVVCLLLSASLKFPVLYSSGCLRQMMRA

SEQ ID NO: 351013 - protein, 144 aa, Zea mays
  Clone ID: MRT4577_83293C.1.pep
GRGPAADATGRLYFPHPTPSLSPSSDRSFPRPPSPSPSPSPAGDFHHHRRTAPTLLPSRAMAQTVVLKVGMSCEGCVGAVKRVLGKMEGVESYDVDIMEQKVTVKGNVTPDAVLQTVSKTGKKTSFWEAEAVTSESATPAGATA

SEQ ID NO: 351014 - protein, 59 aa, Zea mays
  unsure (1)..(59): unsure at all Xaa locations
  Clone ID: MRT4577_83294C.1.pep
XCSRRPCXPVRRFXGCSCCSLXCLLXXLRELPRWCRLXLPSCPCLLLXLSSARVGRPGV

SEQ ID NO: 351015 - protein, 62 aa, Zea mays
  Clone ID: MRT4577_83295C.1.pep
NAMTDGWVGPLSALMVHAQFNPEPTTLNRGRAHAGKPWFGSVFERRIFSGETCLIGALYSSP

SEQ ID NO: 351016 - protein, 115 aa, Zea mays
  Clone ID: MRT4577_83296C.1.pep
PGTPLCPWFPQLLSGSPLGKLGPPPGPVRDFPVHPRVPPLGPPGGPKKLISLWFGLNSLFIVKHPPGYGVGTPGFWPFFPPVFGPLLSGSPLPARCLAPGGGWLSPRFFSRLAPL

SEQ ID NO: 351017 - protein, 105 aa, Zea mays
  unsure (1)..(105): unsure at all Xaa locations
  Clone ID: MRT4577_83297C.1.pep
QRPRRRRRRAPGCGTRWRSEDRLPSASTAGSPWRGFESAHNDHKTKKKKTKKTPKKKQNKNKQXLXREEKKKKKKKKHNKDKKKTYTNKRRTQXKKKKKKTKTNF

SEQ ID NO: 351018 - protein, 118 aa, Zea mays
  Clone ID: MRT4577_83298C.1.pep
VWTAPYSLRSALSRSLLPSAAVTNSPRRTCCPTPSYSSPSRALIPSVDLLAGSSRAGHGCPADRPCSPWPSLSVRRGRVAFVVKLGNGVFGRILAAILRDNGDNGEHEFILYRNPNVV

SEQ ID NO: 351019 - protein, 82 aa, Zea mays
  Clone ID: MRT4577_83299C.1.pep
RCLKWCGPCKVMAPKFQEMSEKNLDVVFLKLDCNQDNKPLAKELGIKVVPTFKILKGGKVVKEVTGAKIDELAQAIDTVKSD

SEQ ID NO: 351020 - protein, 78 aa, Zea mays
  unsure (1)..(78): unsure at all Xaa locations
  Clone ID: MRT4577_8329C.1.pep
PSSPHYCLKRHMPKHKRGCSDKTKKFXLPYKNVKGGNFKIETSPCKLNTTXKPEKGMSLXGGVFFFALRRKPWEEYSL

SEQ ID NO: 351021 - protein, 58 aa, Zea mays
  Clone ID: MRT4577_832C.1.pep
SLECLCVSLMERLHPSNYYNKLCTLGTIRTCNNYNSSYVVKLELCKCKICFVKSSALS

SEQ ID NO: 351022 - protein, 60 aa, Zea mays
  unsure (1)..(60): unsure at all Xaa locations
  Clone ID: MRT4577_83300C.1.pep
AFKKGVRSPTKFLQSKLKDSEFFVGESMKYNASMVFAYYKSGATXPTFLNILHGQNEIKC

SEQ ID NO: 351023 - protein, 88 aa, Zea mays
  Clone ID: MRT4577_83301C.1.pep
DSSVFINNICRCGPCKVMAPKFQEMSEKNLDVVFLKLDCNQDNKPLAKELGIKIVPTFKILKGGKVVKEVTGAKIDELAQAIDTVKSD

SEQ ID NO: 351024 - protein, 96 aa, Zea mays
  unsure (1)..(96): unsure at all Xaa locations
  Clone ID: MRT4577_83302C.1.pep
LGYSGGLDCEGNEVPRLVYRSSRQRRGYNHHEIARATHALARVSAVLTNAPYLLYFHCDHYIYNSRAIMAALXFMMEPXLGKKVCYVQFAQRFDGI

SEQ ID NO: 351025 - protein, 167 aa, Zea mays
  Clone ID: MRT4577_83303C.1.pep
PRGRPGSSSAACTGPRPPCSIFPSLAPQVPSAQLNSPARALSSTMCPARPWRQPQLGAPSASPGLRLLLAPAWSSLDLQLRRPAELPGCRALLSFAAHRCSSSRRPCFSLSSSTPAMARVSAPSPTACPSSSSRPRPRRGPSSPALLPAQLSSARPHLAALGPQLCP

SEQ ID NO: 351026 - protein, 98 aa, Zea mays
  Clone ID: MRT4577_83304C.1.pep
AGILVFHLSFMKDGPRCFVYGNKPLIASCRRTSEMWLFHSHSSPFCTSRSLRVIALVTKSKIAVFSKAACGTQSCKYVFNIWFWCSPLLLVWAVQVCA

SEQ ID NO: 351027 - protein, 64 aa, Zea mays
  Clone ID: MRT4577_83305C.1.pep
PDTGPLGLDPPCHQSSSGHGRQERPDRPGKQEAVHGCQLASSSMDRSMYGRTSCSKLSYRQRGG

SEQ ID NO: 351028 - protein, 188 aa, Zea mays
  unsure (1)..(188): unsure at all Xaa locations
  Clone ID: MRT4577_83306C.1.pep
AVGSIITRAMMQSMLIHREDRECQGXTFYTYNALIEVVMKCSGFCTTGDXYTRRRKICAFFGQTTHKSTVGXETAPDGPFDCGYCRLNEQIQTEPPYYGLGPIQLXHKYDYRLCGQVLNLNLVREPDLVWRDPVLHIKTAIXFWETPESPKTSCHAVMMREWRPSVTDRGELRLPGYRLTTNIINGVL

SEQ ID NO: 351029 - protein, 102 aa, Zea mays
  Clone ID: MRT4577_83307C.1.pep
TSHMVSDPATHSGGRWGGFHNIFHVLYPDYLLDYLLKYYFKHRYFRSFNRYLNTYGFTNVDTDRHEFVHEWQLRLLALLLPLIKHEENNAGAGARGLGQDLY

SEQ ID NO: 351030 - protein, 77 aa, Zea mays
  Clone ID: MRT4577_83308C.1.pep
GSADPKIRAGSAPGPRIQKSSVIKRTSVAKSSRRICRRKKRKKKKLSSREYVRNKQEYITKIFVRSSCKSLELAATK

SEQ ID NO: 351031 - protein, 149 aa, Zea mays
  unsure (1)..(149): unsure at all Xaa locations
  Clone ID: MRT4577_83309C.1.pep
MPPCVTTPTTNTITLHVQSSNSIDMVKAKIQDNRXSPPDAQGLIFAGKQLEDXRTLDNYNIHKETTRXLVLRXLATGYKNFTNKTHTKCLKIQHLCNKVXLCVIRLYKEDHLSGKVTLLRQGXDTTMIDARXLMVKHFDRHYCGESGLY

SEQ ID NO: 351032 - protein, 42 aa, Zea mays
  Clone ID: MRT4577_8330C.1.pep
AYADTLRRFSPFVRHITLSSTSSHVSRFAAYVKDSLKRACSI

SEQ ID NO: 351033 - protein, 37 aa, Zea mays
  Clone ID: MRT4577_83310C.1.pep
TLLFLLKKGFKSLVLYGIERGEIRCPFLHFAFLINFV

SEQ ID NO: 351034 - protein, 222 aa, Zea mays
  unsure (1)..(222): unsure at all Xaa locations
  Clone ID: MRT4577_83311C.1.pep
MGDSQYSFSLTTFSPSGKLVQIEHALTAVGSGQTSLGIKAANGVVIATEKKLPSILVDETSVQKIQSLTPNIGVVYSGMGPDFRVLVRKSRKQAQQYYRLYKETIPVTQLVRETAAVMQEFTQSGGVRPFGVSLLIAGYDDNGPQLYQVDPSGSYFSWKASAMGKNVSNAKTFLEKRYTEDMELDDAIHTAILTLKEGYEGQISANNIEXGVIXADRESSFN

SEQ ID NO: 351035 - protein, 39 aa, Zea mays
  Clone ID: MRT4577_83312C.1.pep
KRDRSSGVLIKGEGCRTKEKMDQVCWLVGIMAVDGGWVI

SEQ ID NO: 351036 - protein, 150 aa, Zea mays
  Clone ID: MRT4577_83313C.1.pep
FRSFFPSFMHCIYFLPCSVVHYRFFLSLRSLDAVEFLLGEFDRALSFRLSFIGCLSCRFRSPRFFRGLGSFFFHLFQVSVYMVPHRVSFVPDCVAFLRDQCSLVLVPVSCCLSVFAVVGVGSLFGERRRFKSSDHVVVDQNVSVILLILH

SEQ ID NO: 351037 - protein, 48 aa, Zea mays
  Clone ID: MRT4577_83314C.1.pep
KRKSKRSPYGLCLCGGVVLYTNGAGGLGFANGTVTVSPLHVSVSYLYP

SEQ ID NO: 351038 - protein, 58 aa, Zea mays
  Clone ID: MRT4577_83315C.1.pep
MMNGGGGQKRRNSKIIPYEYRVESDPKFFGKSWRKLHDAIREIYNHNSMSLSFEELYR

SEQ ID NO: 351039 - protein, 115 aa, Zea mays
  Clone ID: MRT4577_83316C.1.pep
CLLESNADTVACKIYPQYAATSRNIWFIGVPNSSLLRCGSLYLLHWQVWARIMLRLTGIARISDGKKRYDRYTLYLIPTLGNSPCESQWGSTCIVYCLRDGFREYFLTCMMVNHD

SEQ ID NO: 351040 - protein, 134 aa, Zea mays
  Clone ID: MRT4577_83317C.1.pep
CGARGGRVIDNPLPQDLLKQIHSHSALNSRICLTEVMAERFCLRTAAKRHRRVLRDNIQGITWPMIRMMSRMAAINCISAIIYDETRGVLKIFLENVILDDVTYTENVRRKTVTDMDVVYALKRQDRTLYAVGV

SEQ ID NO: 351041 - protein, 123 aa, Zea mays
  unsure (1)..(123): unsure at all Xaa locations
  Clone ID: MRT4577_83318C.1.pep
DHASGKERMLWASTHCALLRRQAXGAWGVGQLGEWLXRAALPSPRVSGAPGGPPVTVRRVRLRDGRHLTYEEFGVPKEVARYRIIFXXXFASSRFDSLRAXHEDSDELCVYMVGLNRAGYGES

SEQ ID NO: 351042 - protein, 76 aa, Zea mays
  Clone ID: MRT4577_83319C.1.pep
SKQGKDRREHPSVQAKTVRDRSFYLPLHSLICKARFHGRLLGMWVNESAANPTLAPPLSGLKDALFHPASDHRSQP

SEQ ID NO: 351043 - protein, 413 aa, Zea mays
  Clone ID: MRT4577_8331C.1.pep
MVFSSVPVYLDPPNWNQHQHQPQHEQQQAHHGQLPSDARGGGGGGVDAHAHHHQLPPMPPSAPGGALMAPRPDMAAVVAASGGSTSGGGGPTGGGSPIRPGSMTERARLAKIPQPEPGLKCPRCESTNTKFCYFNNYSLSQPRHFCKTCRRYWTRGGTLRNVPVGGGCRRNKRTKSSKSNSSSAASASSAGGTSSSTSSTATGGSGSAASIMPPHQGHGGQPQFLASLHHPLVGGDHYSTGASRLGFPGLSSLDPMDYHQFGAGAGGAIGLEQWRLPQIQQFPFLSSRPDAVQPPMSGIYPFEVEGHGGEGSGFAGHMLGDPKVSGSAGLITQLASVKMEDNPTSAAMASSSPREFLGLPRNLQLWGASGNGGASGNNGGGTGNAAGGGDTIPPGSSWVDLSGFNSSSSGNVL

SEQ ID NO: 351044 - protein, 68 aa, Zea mays
  Clone ID: MRT4577_83320C.1.pep
GKGTFITIRCPRHPQSLIHSIVKRPGVMTETKMHRYTRIHSSTMLKWCHYIQGFYLVHSNKMIIETRK

SEQ ID NO: 351045 - protein, 95 aa, Zea mays
  Clone ID: MRT4577_83321C.1.pep
STSAYRHYQPAMPKRKRRAKAYMLGARDRIVHGVAVNTMATLAATAYKRDLRPHHGVAHFLELDPPLPSVDLPLSTPGGQPSHRADLGGRPARAC

SEQ ID NO: 351046 - protein, 146 aa, Zea mays
  unsure (1)..(146): unsure at all Xaa locations
  Clone ID: MRT4577_83322C.1.pep
HGQIGNPGTNQEGWGNLSPXARQQQFFPTNQRLTMNPGGXKGQQLLPFSQLGRANSQQQQIFPFNQLAALNPAGYWQQQKLLPFSQLAAANRDSFLTQQQLVPFNQQFGANPATLLQLQQLLPFVQQALTDPGASHQQHIIGGALF

SEQ ID NO: 351047 - protein, 76 aa, Zea mays
  unsure (1)..(76): unsure at all Xaa locations
  Clone ID: MRT4577_83323C.1.pep
ECANSAVGGVSRECQMGKVRRNGVEATCGRFQHKLIESNRRRESLGVXRFHYPCSSRFWRCSVKVLNDLNAIHVCW

SEQ ID NO: 351048 - protein, 67 aa, Zea mays
  Clone ID: MRT4577_83324C.1.pep
TSILARSLQLQDWQNPSSSQLNFLGRQTPLTSLPNRQKKVTDLTFATVAKLVWPMVRALEGGIKRGG

SEQ ID NO: 351049 - protein, 353 aa, Zea mays
  Clone ID: MRT4577_83325C.1.pep
ASAPAPGGRVGHASGSPAPAAPPARARGRPPPAGSGAACSFDLADLLRASAEVLGKGSVGTSYKAVLEEGTTVVVKRLKDVAVQRREFDAHMEAVGRVEHRNVLPVRAYYFSKDEKLLVYDYLPNGSLSAMLHGSRGSGRTPLDWEARMRAALSAARGLAHLHTAHNLVHGNVKASNVLLRPDADAAALSDFGLHQLFAASTAARGGGYRAPEAVDTRRLTYKSDVYSLGVLLLELLTGKSPSHASLEGDGTLDLPRWVQSVVREEWTAEVFDVELVRLGASAEEEMVALLQVAMACVATVPDARPDAPDVVRMVEEIGAGHGGRTTTEESEGVRATSEEERSGGTPPAAPTP

SEQ ID NO: 351050 - protein, 121 aa, Zea mays
  Clone ID: MRT4577_83326C.1.pep
GGAPGGGSPGAPGPPIRGVGFPMRLGSPLPQPVPEGWNPFFFFVPGEGVFGGEGAPAPPCLVFGSGDGVRVWNRSPRPLRFVLPPGQPLGEPVGQPGPFVMNSPPQKHPALEDFSFGKNGF

SEQ ID NO: 351051 - protein, 100 aa, Zea mays
  Clone ID: MRT4577_83327C.1.pep
EDSFYFFNEMQKDHVQPSVVTMSVLLRACAGLALLAKGKELHCFALRRRAYDHDMVVATALIDMYSKSGNLASATRIFERIQEEKNLVSWNAMLTGLAAH

SEQ ID NO: 351052 - protein, 124 aa, Zea mays
  Clone ID: MRT4577_83328C.1.pep
CCRHRRPRSLLPWALPRSAQLQLVLGLILGLLVLSLGVGLYRLLSGVDLGLRRRSTGLLVRGFAAAQLGSLPSRCSSSSTPPRRDRQSGPGPRRRPLVQCSCTCVCTCALWSYRSYNESREALK

SEQ ID NO: 351053 - protein, 71 aa, Zea mays
  Clone ID: MRT4577_83329C.1.pep
PGTDRAEPADRPASTTGGLSMNPRAGKGTAGASGRGLQVNDSRQSTGRTAARRERSHRHAVEAVPVRRQEG

SEQ ID NO: 351054 - protein, 40 aa, Zea mays
  Clone ID: MRT4577_8332C.1.pep
GLEHILILFNYKVQAICSLFGLQATMQMTDRKMILATRIQ

SEQ ID NO: 351055 - protein, 102 aa, Zea mays
  Clone ID: MRT4577_83330C.1.pep
ARKNPRGRRALVAGGALFFFLVFFYSSFCFSQQCPYTSQIGKLHWACTRKNSQVPQEQTHGTHLQPGSTTRKRRPTQKQPRVQETLTREPNSFRDAGGTVGS

SEQ ID NO: 351056 - protein, 64 aa, Zea mays
  unsure (1)..(64): unsure at all Xaa locations
  Clone ID: MRT4577_83331C.1.pep
MASRTMALSCTAFGGQAVNVPSSGFGEARXTMRQARRAKGKRPAAXSGSPWYSPDRVVXLGPVS

SEQ ID NO: 351057 - protein, 59 aa, Zea mays
  Clone ID: MRT4577_83332C.1.pep
FSWLHIYITKARTIVGVHTTYYSKHKNPRNRCSTIYSFQPLKHITYNYNASQLHFLYFK

SEQ ID NO: 351058 - protein, 74 aa, Zea mays
  Clone ID: MRT4577_83333C.1.pep
GKKSPHFFLARDIILKALHPQNQHFPSFSKGVFMLPFIILSLPPSWITGKTKEGGLTLKRVYWQNIARKPDFNF

SEQ ID NO: 351059 - protein, 148 aa, Zea mays
  Clone ID: MRT4577_83334C.1.pep
FGTRHTRSPASSPPQAYAAALASLPSPRSPAPPPARPASLPPSASPSQLPPPKRAAPPAPTRLCRLPRHPSAGSHAHLLDCAKPPRRRRQGRLLRDRAPPLSTSSAAAPPPLCYIDQQLMKQRAFQRYDMIPQNALRVAEEGGTRKGL

SEQ ID NO: 351060 - protein, 67 aa, Zea mays
  Clone ID: MRT4577_83335C.1.pep
GWPERSSGLKGPGKNPWIPLKSLGGSQKGPTLFPFFLGKFGDSLKANSGAPPPKLFPPKLCCLKNPS

SEQ ID NO: 351061 - protein, 87 aa, Zea mays
  Clone ID: MRT4577_83336C.1.pep
GGGGGFFFLIFFFIPIPKRRTGNSGKIRGGARGFPILSRMKGGRAQGYKGHLWCMGELLIVPPGPEPEGSRGKNGGPGECPNSNKFP

SEQ ID NO: 351062 - protein, 41 aa, Zea mays
  unsure (1)..(41): unsure at all Xaa locations
  Clone ID: MRT4577_83337C.1.pep
YNTASKKAKADLRDGDEAEGSNKXKSRVEDDEHDGNEDADV

SEQ ID NO: 351063 - protein, 205 aa, Zea mays
  unsure (1)..(205): unsure at all Xaa locations
  Clone ID: MRT4577_83338C.1.pep
EFEETWAQMLCEFKLQDNKWLKKLYKLKQKWCSALNNCTFDGGIEYEPQCDSMSNMFNNVSDKLTSLCAIAVAVDKQTEDWREKELDEDARCFQRPPACIIKYSDILNHAAKVYTHRIYKLFETDFLDGCGXPQNSKSXCQDNNTYQFEMTMQGRGSRVCTVHFNMSMMQLSCSCSKFETMGLLCPHALKALSIKNICKIPESYI

SEQ ID NO: 351064 - protein, 150 aa, Zea mays
  Clone ID: MRT4577_83339C.1.pep
MAPAAALALSLLLAFLAIGPCAAADSIDLWPMPQSVSHGTQKLYVKKDITMSMVGSTYSDEKSILKDAFQRMLDLITLNHVVDGIDPGSSVLTCVNVVVRTPEDELSFGADESYNLTVPTTGDPLYAQIQAQTVFGALQALQVISTSCGS

SEQ ID NO: 351065 - protein, 354 aa, Zea mays
  unsure (1)..(354): unsure at all Xaa locations
  Clone ID: MRT4577_8333C.1.pep
KCDYITNNIAEVFNNWIKDYKDLPVCELADKIRCLVMDLFFRRKRIGDKLGGKILPIVINLLKTRTRGLGHLSIQKGDYYHAEIRDNNNIQCRHVVKAEQRYCSCLEWQHTGXKPCQHGLVVIIAQQMRDVGMEHFVDDYFSVDKFKKAYARRIESVGDKSFWPQVAIANEVNAPIGKRSVGRQRKNRMKSCLEGGAGKKKESIPQEEKEKKVLRGKIKCPNCGQLGHRKASPKCPLNGSKKRKRKPRKNVTKQWFPKNMAESPIHQDDNPPDVPGRTEVTAQGVDGGGDELYLTAEGVDVVPQESEGVAVGHLTAPRLLLGATTSVPDVGHLTPPRIKKRAIGKKLTPKKKNA

SEQ ID NO: 351066 - protein, 53 aa, Zea mays
  Clone ID: MRT4577_83340C.1.pep
ELLIPLHCHRVIEKKYGCLRCCFISEMLYIYPPVHLLASVKASRRIKKKNTQQ

SEQ ID NO: 351067 - protein, 163 aa, Zea mays
  unsure (1)..(163): unsure at all Xaa locations
  Clone ID: MRT4577_83341C.1.pep
MGWLPLPITWQPHAAGKKIHRGTKKTKEPRGGGKKQTRTFKGPAQWGKSPKPPAPGGPNPGPXXPKNPPKQIPHPEPKGPGEPPXPTAGPRTTPPHGPXNPGGPWPPKPPGPKRAYGGKPLPAPGDPRENPTPAPRGPGGPQXRPAKTWPKPGPNGNPGENAN

SEQ ID NO: 351068 - protein, 67 aa, Zea mays
  Clone ID: MRT4577_83342C.1.pep
ESQMMIKPEGGVVSRSPPQPPRGLLAANSVLSSDVLDQPGSRLAMCPAVLGPPPSKRILTLRPPFCV

SEQ ID NO: 351069 - protein, 117 aa, Zea mays
  Clone ID: MRT4577_83343C.1.pep
MASLSSLNFAAGVDGGVPAPDEDGDAHVAAPSTLRLGGGKAAFKASLVGQMMMASHGGNAALRCRSTSSLAAVMAQMLSYRTTHIWVTDGEDDVLVGVVGYMEIFNAVTKGVVLTPA

SEQ ID NO: 351070 - protein, 95 aa, Zea mays
  Clone ID: MRT4577_83344C.1.pep
VPQTETALAIMDNNERCVFWHHCKLQYRNHVNQTSNHILVRYLTPLINHFTYMQVCSVFNIYNVIWFKYKNAHHCPIRHRIGYKLSIALVYRYGF

SEQ ID NO: 351071 - protein, 119 aa, Zea mays
  Clone ID: MRT4577_83345C.1.pep
FFFFFFFFFFFFFFFFFFFFFFFLGANQNGRVNRRAFPAAPTGTRTIGGGDTPSITQPALFYQIPPLPLMPTKNLQRMTSPSPFQTSATIPKKKTGFSKTPGPIIHNFRAQFIGPFGLS

SEQ ID NO: 351072 - protein, 134 aa, Zea mays
  Clone ID: MRT4577_83346C.1.pep
PAGAGEKKKKSSHSQCSHLETLNSESESWSRCDSNHTWVTDRGASIDRERPAHFDVHPRHDTHTHCSCFLHPHQRPVQQNVYTKPANDFKRRTRLQPRKISFGHASAIGSGLSGAPSPNSSTTTSSDSPTPSSG

SEQ ID NO: 351073 - protein, 156 aa, Zea mays
  unsure (1)..(156): unsure at all Xaa locations
  Clone ID: MRT4577_83347C.1.pep
RPGTKYRLDQPTCLPPADQKILGGIKKKRGRTHTPPKHTREPPTHKGPTRPPXPRRPPPKHPPRGKAPEEPPPKRVPNTPPHPSGATPSPPEKQNPQGRGGDPTEPTPRTKAPRPTHNQAQRPPKKGPPXPHRRPPKHPPPTPXPANPPPPRTPPP

SEQ ID NO: 351074 - protein, 322 aa, Zea mays
  Clone ID: MRT4577_83348C.1.pep
MMVPLDPSDKPTSQRCIADGDTVVVYERHDAMRAVAVRAGGVLQNRFGVFRHDDWIGRPFGSKVFGTGCGGGGGKGGGKAGSGFVHLLAPTPELWTLVLSHRTQILYIADISFVVAYLELVPGCVVLESGTGSGSLTTSLARAVAPYGRVHTFDFHEQRAASAREDFEKNGLSSLITVNVRDIQGEGFPEEYCGAADAVFLDLPQPWLAIPSVGLMLKKDGVLCSFSPCIEQVQRACEAMKTCFTDIRTFEILLRTYEVRDVALKSVTSDEAYVGPLPQKRRMPTTPGENTDCPQRTSSILVRPCSSARGHTGYLTFARLCV

SEQ ID NO: 351075 - protein, 120 aa, Zea mays
  Clone ID: MRT4577_83349C.1.pep
MLLHLPAGGSTVARAPVPPLPRQLAPRLTTRCSAKKKAANEAKDDRRAGDGAGVLSRTVMLRAGVALFALGFVDAGGDWSRIGAISKDTEELLKLGAYAVVPLSLALIIWLPEGDSDRES

SEQ ID NO: 351076 - protein, 125 aa, Zea mays
  Clone ID: MRT4577_8334C.1.pep
RDNDNDNSYGSGNNNNSSSYGSSGRDNSDSYGSSNNDSYGSSNNDSYGSSRRDNDNDNSYGSSGNSGLSGGNDSYGSSRRDNDNDNSYSSSNKDSDSYGSSNNDSYSSSRRDNDYDNSYGFSNTD

SEQ ID NO: 351077 - protein, 62 aa, Zea mays
  Clone ID: MRT4577_83350C.1.pep
NRPTKPLRQKTSDSDPREEGALKRLLMAPTPSDRKRLFFSSFSTRRCISTKFPLATSNFYHM

SEQ ID NO: 351078 - protein, 50 aa, Zea mays
  Clone ID: MRT4577_83351C.1.pep
QHKFRTVITSGILAADRAMQVNQACLCSHHLGQPLYMRSQIWRTCRKDMN

SEQ ID NO: 351079 - protein, 34 aa, Zea mays
  Clone ID: MRT4577_83352C.1.pep
AVAASSLLLGPGAAPRERPSLGRSSPSAQPRRRS

SEQ ID NO: 351080 - protein, 160 aa, Zea mays
  Clone ID: MRT4577_83353C.1.pep
MYKNQLQELAQRSCFNLPSYSCIREGPDHAPRFKATVNFNGEMFESPVFCSTLRQAEHAAAEVALNELSKRGPSSTLAAKVLDETGIYKNLLQETAHRAGLKLPIYTTIRSGPGHTPVFACTVELAGKAFTGNPGKTKKQAQKNAAMAAWSELKKLPRGR

SEQ ID NO: 351081 - protein, 120 aa, Zea mays
  Clone ID: MRT4577_83354C.1.pep
MYKNQLQELAQRSCFNLPSYSCIREGPDHAPRFKATVNFNGEMFESPVFCSTLRQAEHAAAEVALNELSKRGPSSTLAAKVLDETGIYKNLLQETAHRAGLKLPIYTTIRSGPGHTPVFA

SEQ ID NO: 351082 - protein, 97 aa, Zea mays
  Clone ID: MRT4577_83355C.1.pep
GRVGGRVGSEPPSDPAKYTAADVRITDQKLRLCDICGAFLSVYDNDRRLADHFGGKLHLGYMLIREKQKELQVNSCMLKPEIQVRYWRFMKQINVNT

SEQ ID NO: 351083 - protein, 144 aa, Zea mays
  Clone ID: MRT4577_83356C.1.pep
LPLPSPAGAPSLLVRPLLSPCPSPGSWPRLPFPLLDVSSVLDIFYAPCSSSLAARARPSSDPAPSSDLPPWLSSNSRTTCSPAFGPREWILCSAPCARSTSPTPLSPTARLSDAQRRPQLFFCQAPSHSSHSFVSLMLATPNRG

SEQ ID NO: 351084 - protein, 289 aa, Zea mays
  Clone ID: MRT4577_83357C.1.pep
MYKNQLQELAQRSCFNLPSYSCIREGPDHAPRFKATVNFNGEMFESPVFCSTLRQAEHAAAEVALNELSKRGPSSTLAAKVLDETGIYKNLLQETAHRAGLKLPIYTTIRSGPGHTPVFACTVELAGKAFTGNPGKTKKQAQKNAAMAAWSELKKLPRVGEPSSSSCPPDQDDEVQEQVVVTRTLASLNQANSGKVPHQKEKQQSNNRPSSRRCYPKPNTPFYRPFMQNQAYPSVPPDQAMYHLWHRMQVTANASLSSGTSYGQYKFLPTSSYAPHVPSFTSRAILQSG

SEQ ID NO: 351085 - protein, 72 aa, Zea mays
  Clone ID: MRT4577_83358C.1.pep
CSYAYVYVCLLVHVHLRFVLRLDRDSFLSFEESTIKHGDQVIELFEFYEIEDPEHLFGEGKCPLTHYVPFTV

SEQ ID NO: 351086 - protein, 139 aa, Zea mays
  Clone ID: MRT4577_83359C.1.pep
QGHISFPLLLNLSPFTGGASSAGPLAMNAQRDGQQALHLYRQLNMQANADVSSSSSSPPQLSRSKLYGLAAVVEHYGKCGGGHYAVYRRVASNPDPDDPGKPVAGLGKRWFYISDGYVSEVPEEDVLRAEATLLFYERL

SEQ ID NO: 351087 - protein, 82 aa, Zea mays
  Clone ID: MRT4577_8335C.1.pep
SHSFSMPMCSYPSCTVGEEILHFLRVECGHHVLLVVLLAEHEPHDVVERRPPQEAAHLFDENKRSRRAAGPRRCPRGRVGRS

SEQ ID NO: 351088 - protein, 44 aa, Zea mays
  Clone ID: MRT4577_83360C.1.pep
MVGPGPQVNWGPPRLKKKKKKKKKKKKKKKKKKKKKKKKKKKKK

SEQ ID NO: 351089 - protein, 215 aa, Zea mays
  Clone ID: MRT4577_83361C.1.pep
MASRLTAMEKLVLFHKLESDLFHRLVRDLAQDPVPMRWVIAFWLWLESDGHHDFIRRVSALPGPVVLRLVEEAIECLRRLAAGRERCLLPPCPCTNALLAPNKRIDDAGCFQGHREVLDGVTYQYRSVCLAVCDVSSARVLAAPPMVGSPVLAAPTAVASFPLNPMASPWIRLQSPPPDDYRSLFVTFSRGYPVSRENIVEFFNSVYGPCVEAVM

SEQ ID NO: 351090 - protein, 78 aa, Zea mays
  Clone ID: MRT4577_83362C.1.pep
VDDASDRQPVSGAWASSFMRSCVRPRFPGGRVHVAGARSALSAMIGGGPGPHALPSVILLLEQLNVCERNCSCRGPSS

SEQ ID NO: 351091 - protein, 117 aa, Zea mays
  Clone ID: MRT4577_83363C.1.pep
SDMAVVLVGVAVEHAVQFRAAAVEFREPKPIPAGRSPVRPCLPPSADRSPPPIWMPTASAGCCTFIVSYSAWATTSAVLLPATTDSMAQSLPFPMLYDRGGSQLGLIMLRLSSPSGT

SEQ ID NO: 351092 - protein, 165 aa, Zea mays
  Clone ID: MRT4577_83364C.1.pep
MAGGDDLKLLGAWPSPFVTRVKLALALKGLSYEDVEEDLYKKSEFLLKSNPVHKKIPVLIHNGAPVCESMIIVQYIDEVFAGTGPSLLPADPYERAVARFWVPYVDDKLVAPWRQWLRGKTEEEKSEGKKQAFAAVEVLEGALRECSKGGGFFGGDSVGLVDVAL

SEQ ID NO: 351093 - protein, 100 aa, Zea mays
  Clone ID: MRT4577_83365C.1.pep
LNLAFCGIYPDEGFDSIQESPKSSCLRLRFNPRNEISRVLVSILSPFITFDWRWIGSRFDDSLGSLDGRTRDPLEGCSVWREAMGAICFARMGDPTATEF

SEQ ID NO: 351094 - protein, 62 aa, Zea mays
  Clone ID: MRT4577_83366C.1.pep
RVCPGCSRGKGFRPFFWVWRRSQKKCWWGGSRLLTLQGQGSQKSALCSFGTRMIFSGLQKNP

SEQ ID NO: 351095 - protein, 103 aa, Zea mays
  unsure (1)..(103): unsure at all Xaa locations
  Clone ID: MRT4577_83367C.1.pep
GKKPGGLRRQVHPVHLPPPAGSPERHNFSGASAXLLFSPSXXXIPGGGGFXIXXXTXXXKRGRRTGXXPPPGRXTTXXRKSRXAAXAAKSTRTTRAPXRRGRR

SEQ ID NO: 351096 - protein, 85 aa, Zea mays
  Clone ID: MRT4577_83368C.1.pep
RHTNGPEHEDGGHLPGGPSGGGYCASAHRHLVQSDTTTATSGTPTARRTTPSALRCASRRDGPPTWAPATQRLLRSTPIYMDIAR

SEQ ID NO: 351097 - protein, 61 aa, Zea mays
  Clone ID: MRT4577_83369C.1.pep
VYSFPLSHDDDLAHTQNNLWILEIPKHVYAGMMHLGHIMMVNLHKNFLDYILPYLHNVFYK

SEQ ID NO: 351098 - protein, 750 aa, Zea mays
  unsure (1)..(750): unsure at all Xaa locations
  Clone ID: MRT4577_8336C.1.pep
MKLDKDPFPINVIDFESKRVLVRTDQADTTKGKNVVISDDLKLKMIIPKSPEVGVWKVNERKRVQPVFKPTSEFLLNKYTSQWKRNEFQHFRGFKRPRSPEGAGGGLFGQRGGPLNWRSRGVCAHAESRDLFSQREFPKRPYLETERKHGVWSRLGRSMGSRPRAVAISKGPEELRSQMQKKWSPRNPADARELCMGVDGQNESLGKSEGPQAEMAKQNGQVVVTKNYTKNSEEVAAKPNIGQGHITAAGSNRLQESRPQNGGGQGMRSKRMKLDVVVTRQMSNVASWDRKHRTEMIANQRVVGPGVVMDGHYRGEHHTWAEQPGCSNQRTARVSNAGPVSRASIGGVLDGRGRKNRGSVAPGTKPTPRWCPPRLSRTQKRHVQRLRTMEMTEKMREEERDRWFYEDRPMVIPKKTWREKRLAREEKDDDSSSGSDKEESAEAQGDMDINMVFVLPTEFRAGEGDVAELTLGAECAVFEKTNEQGSHLKPLYVRGHIDGKPMGGXMLVDGGAGEPLQAKGIMSVELTVGIXREVEVIEGDTAMCVALMETPMEWQHGLSRELVEHRLPIKHGFRPHKQPPRRFNHDIHDRVKEQVDRLLKANFIRPCRYAEWVSNILPVEKKNTGKIRICVDFKDLNRATSKDEYPMPIADELVNQASGNKIISFLDGNVGYNQIFMAEEDVSKTTFRCPRFVGLFEWVVMTFGLRNAGATYQRVMNHIFHDLLGIILEIYIDDVVVKSTRFNDHVADLR

SEQ ID NO: 351099 - protein, 219 aa, Zea mays
  Clone ID: MRT4577_83370C.1.pep
MSRGCCWGVSTGGGVGVQTTAAAVPDLSLHISPPSPPAGGVEVLPEPRLLLGLGLGPGPGLELDDDDAAVATKKVDDDDDAAAAAREHNLHAQRLRLQLHQPSQTAHGFKKSSSGTAAGGGRRSSRAPRMRWTPALHAHFVHAVELLGGHERATPKSVLELMNVKDLTLAHVKSHLQMYRTVKGSTDRSCVAAAAGHGGHAGDMVILRRRGAGEGDGGY

SEQ ID NO: 351100 - protein, 107 aa, Zea mays
  Clone ID: MRT4577_83371C.1.pep
MASKALLVVALLLAATFLAASANEQAQAAKEEKKAEVQDWHGGGGYPGHGGGGSGGYPGHGGGGGGGYPHCRWGCCNRGYHGGCRCCSHPDQIPEPMYRPELVEVHN

SEQ ID NO: 351101 - protein, 87 aa, Zea mays
  unsure (1)..(87): unsure at all Xaa locations
  Clone ID: MRT4577_83372C.1.pep
MDKSRRGKHSXTKGLGKXATVIRRSECVKWRDVIVPYGKPVPSSVTSSELLHNHYNVYNASQVHRMNCRKGFTFLATHKYLGLSFLI

SEQ ID NO: 351102 - protein, 80 aa, Zea mays
  unsure (1)..(80): unsure at all Xaa locations
  Clone ID: MRT4577_83373C.1.pep
IDVNEYHWDNFLRNIKSKXKKKKKKKKKKKKKKKKKKKKKKKKKKKKKKKKKKKKKKKKKKXGGGAFLKKQIFFPGVGRV

SEQ ID NO: 351103 - protein, 76 aa, Zea mays
  Clone ID: MRT4577_83374C.1.pep
CTSVSMSTSSKSSSSKLICMVRHAFRPREQLYIMSASRQTKESHLSTASLVHSRGMSQTAVSLSYRDRNIGLAVTI

SEQ ID NO: 351104 - protein, 372 aa, Zea mays
  Clone ID: MRT4577_83375C.1.pep
SPRVRPRVRGRVGAPPLRNYFLGDRHNRFLCPRRTPVRHRASDADRVACLACDLDEIYSAAFNGDRTPYSPAKFLYSWWQHASNLASYEQQDAHEFFISILDHIHENIKDDQQKSYAQGHGDCCIAHRVFSGILRSDVTCTSCGFTSTTFEPCMDISLDMDAGDNSSFGVANTKSHVRNGERGLAGVNSKVLTLMRCLERFTRSERLDAEQKFFCEHCNERQESLKQMSIRRLPLVSCFHIKRFEHSSVKKVSRKVDHCLQFPFSLDMAPYLSSSILRSRYGNRIFPAEASDADAVSEVSSEFEIFAVITHSGKLEAGHYVTYLRLNNHWYKCDDAWVTRVEEHTVRTSQAYMLFYVQKTFYYKACERAATV

SEQ ID NO: 351105 - protein, 100 aa, Zea mays
  Clone ID: MRT4577_83376C.1.pep
MASKALLVVALLLAATFLAASANEQAKAAKEENKAEVQDWHGGGGGYPGGGGGWHGGGGGYPHCRWGCCNRGYHGGCRCCSHPDQIPEPMYRPELVEVHN

SEQ ID NO: 351106 - protein, 106 aa, Zea mays
  Clone ID: MRT4577_83377C.1.pep
MASKALLVLTLLLAATFLAASANEQAKAAKEEKKVEVQDWHGGGGYPGHGGGGGGYPGHGGGGGGGYPHCRWGCCNRGYHGGCRCCSHPDQIPEPMYRPELVEVHN

SEQ ID NO: 351107 - protein, 105 aa, Zea mays
  unsure (1)..(105): unsure at all Xaa locations
  Clone ID: MRT4577_83378C.1.pep
MAYMFXYVPVHGQWKHPQVKVKNSSTLLFGGEEATAFGPWTPXEAPRGSVDTQYVAEYHGLFSDQEKGAARLXGGENKVVISASRKXGIMFAVGVSDQGRTVALR

SEQ ID NO: 351108 - protein, 51 aa, Zea mays
  Clone ID: MRT4577_83379C.1.pep
RAPGGVGYRLPPFSHGVWFLLVKLKNNVSNIIHSAFLLKKQKCCKIPSPTQ

SEQ ID NO: 351109 - protein, 271 aa, Zea mays
  unsure (1)..(271): unsure at all Xaa locations
  Clone ID: MRT4577_8337C.1.pep
DACRFRSGIPGSTHASAGDTGCGKTXRIPQLLLERYVTEGRGARCNVIITQPRRISAVSVAQRVSHELGPSLRRNVGFQVRLESKPPARGGALLFCTVGILLRKLQSNPSLEGVSHVIVDEVHERDVNTDFLLILLKGLQRLNPALRLVLMSATGDNERFSRYFGGCPVIKVPGFMYPVKEHYLEDILAKLGKHQYPHRHWHHESEDECALDLDLVTDLXLHIDARXEPGGILCFLPGWAEIXRSAQRLQGAPGMHXXQYLILPVHSNIPM

SEQ ID NO: 351110 - protein, 73 aa, Zea mays
  unsure (1)..(73): unsure at all Xaa locations
  Clone ID: MRT4577_83380C.1.pep
HAXAHAFEFLCLKHLIVRLSLGTTITQAFDYFSLVSFLDASPSLETFILNVRCWHCQFIRSCKFILPFCPFSL

SEQ ID NO: 351111 - protein, 173 aa, Zea mays
  Clone ID: MRT4577_83381C.1.pep
KITIKLPPLSPPPSSQLPSPVLQHWSAQPPLHLRQMEYAALHLFDVKDAGMDAVGRAEKPPRAPDAPPHALRAWLGYASTTSGLTRRCEASHASATVDDEMHLATKLWLGTASCALETKETAHVLLQMTNPWLGAVGPRRSGELRGGARQSEGADERQRAWASASRDDEAFYG

SEQ ID NO: 351112 - protein, 128 aa, Zea mays
  Clone ID: MRT4577_83382C.1.pep
PGSQAYSSQQILVPITAGSIGSRPAARKEYPSAAPTPRLGHQSSSIAVSHRSNRHRPRMVVAVAARSSSSATSSSSELGSLFAAFDADADGRISAAELRECVRATLGPDAAAVSSEEAYALFALSCPC

SEQ ID NO: 351113 - protein, 261 aa, Zea mays
  Clone ID: MRT4577_83383C.1.pep
LLPFVGRTVVDVVDKWHDMAAAASGEVEIDVSEWFQVVTEDAITRTAFGRSYEDGKAVFKLQTQLMAFASEAFRKVFIPGYRFLPTKKNTTSWKLDKEIRKNLATLIGRRQEAADDEKLSGCAKDLLGLLINAGSNGGKVSPITVNDIVEECKTFFFAGKQTTSNLLTWTTVLLAMHPEWQELARQEVLQVCGARDIPSREQLTKLKTLGMILNETLRLYPPAVATVRRAKADVELGGCLIPRGTELLIPIMAVHHDARLW

SEQ ID NO: 351114 - protein, 104 aa, Zea mays
  Clone ID: MRT4577_83384C.1.pep
TSGMEAVGAEGTGLSGRCHGGGVRKADLLPTQGSSSVVLAGIRGASYVTARRGSSKAREGWPPVFLSRLLRASRAIELPADHVSVLPHLRDMARGEQVAEHDFR

SEQ ID NO: 351115 - protein, 99 aa, Zea mays
  Clone ID: MRT4577_83385C.1.pep
VYPSLVSERHYRSKNDNTTSGLDSVPSAASPQSSSSPLLPSHFHFLLITTMPIRRTAALPAERDRNKDLFTITTSNEDNATSRNYESAKHINQPKVPEP

SEQ ID NO: 351116 - protein, 120 aa, Zea mays
  unsure (1)..(120): unsure at all Xaa locations
  Clone ID: MRT4577_83386C.1.pep
DTVHGQWKHHEDKVKDSKSLLFGEKEVAVXYGCTNPEEIPGVLVGAEYVDDSTGVFTDQEKAAAHLKGGANNAVXLSAPSLDAPIACRWWNEKGTCPARASVPNKVSSVAINKMKAPALL

SEQ ID NO: 351117 - protein, 102 aa, Zea mays
  Clone ID: MRT4577_83387C.1.pep
LHRSTVADVTHTRGIFKLRWWLICLIRALLLFLRPPHCITTITAPTCSQVYAFRLPIHYIGLCTTRTHPSNRHMDPYYSNYRNHVPYPYYAPARWQIPSGHA

SEQ ID NO: 351118 - protein, 46 aa, Zea mays
  Clone ID: MRT4577_83388C.1.pep
RCHRRARRPGGHGDLHRAPLHQPRACSRRTGLSRAASRSRGGSPRT

SEQ ID NO: 351119 - protein, 208 aa, Zea mays
  unsure (1)..(208): unsure at all Xaa locations
  Clone ID: MRT4577_83389C.1.pep
MFYVLLRTTIFPQCSQAPIASLLPPYLSPVVSSVWENPILQXPTENQQAIADGILPLSPLLLQQSXRLLQQLPLVHXLAHNIMAQQLQQLTLAXXXXXXAVRGRPPFXXNLEDYSKQHPFLPLKQQTSVNSXXYEXHPHHLPSNQVGVAYPRKKQQYXNQLPAWNFHAKLRGQQQLPFSQLAGVSPCCLLDKPQLLPVNQXTAPKAGT

SEQ ID NO: 351120 - protein, 184 aa, Zea mays
  unsure (1)..(184): unsure at all Xaa locations
  Clone ID: MRT4577_8338C.1.pep
TGPEGPGRPTRPPSRPKKHAERGGDRRKRTYPKDGPNQERNDRQQANETPLEEATKHHTQPTNEKAEQAKRQAEAPEEAPDDEEPEADKPPEDPKPSEDSGEKGKDRPEKEGATPRSKXTGKTNRTDPENPRNNKKPEAAQAKTGERATQNXQQEKRTTENRGRARTTERTSQPNNTRTKRPTD

SEQ ID NO: 351121 - protein, 74 aa, Zea mays
  Clone ID: MRT4577_83390C.1.pep
SRGAPLGKDIQDFMIVTSYAYLIQGYSLTKTTRPNTVLYIYYMTLVRITGIPATYTINSLKKLPEMGYDPLGIP

SEQ ID NO: 351122 - protein, 60 aa, Zea mays
  Clone ID: MRT4577_83391C.1.pep
QQNFYIALDAHSLKKTNNLITLVEINPKTRLPPASLGKKQPDHLLQTLSGSQNQLLRTRG

SEQ ID NO: 351123 - protein, 62 aa, Zea mays
  Clone ID: MRT4577_83392C.1.pep
FKNWAPQKFGPRGTSTNLIKPPHTLFQAGAISCSLKRATKTKFGNCLGKREKILKWAQTPNA

SEQ ID NO: 351124 - protein, 96 aa, Zea mays
  Clone ID: MRT4577_83393C.1.pep
LRSRAPQAWWSRETVAVVTGANRGIGHALAARLAEHGLTVVLTARDGERGEAAAAPLLARGLAVVFRRLDVSDAASVAEFAAWLRDAVGGLDILVN

SEQ ID NO: 351125 - protein, 67 aa, Zea mays
  Clone ID: MRT4577_83394C.1.pep
SRLDCCVAPSLSLLDTNNTSSCLFIPCTLSPNVGTLLQLQQLLPFDQLTLTNPPVFYQQPIIGGALF

SEQ ID NO: 351126 - protein, 546 aa, Zea mays
  unsure (1)..(546): unsure at all Xaa locations
  Clone ID: MRT4577_83395C.1.pep
MNPGPVVLTWSSIVRVLLPSDLVADVPPDFEPEPRGFLPHVHSPEARAWALEVHALWKRLARRVAPDVAARPDRHTLMPLPGRAVVPGSRFREVYYWDSYWVIRGLLVSKMYDTAKTIVLNLVYLLEKYGFVPNGARSYYTNRSQPPLLSSMVLEIYRATGDVEFVRTVFHSLLKEHSFWMSEIHNVAIADNHGRVHNLSRYQARWNKPRPESATIDEELASKLNSMAAKEKLYCEIASTAESGWDFSSRWMRXMFVILKKELTSXSSAAFALVKTSTAIEDTKLPDHYEFIFAPCTTHRLFLTTFTVLFRNSTDMTTLATTYIIPVDLNTFLFKMELDIGALAKVVGDNATSEFFLNASKARHIAIDSILWNSEMEQWLDYWLPGDADCQEVHEWKPNSQNRNIFASNFVPLWLNAYHSXRVMASLKASGLLHAAGIATSLTNTSQQWDFPNGWAPLQHLIAEGLLHSGSEAKKLAEDIATRWVRTNYAAYKATGAMHEKYDVEACGESGGGGEYKPQTGFGWSNGVVLSFLEEFGWPEGKEIAC

SEQ ID NO: 351127 - protein, 403 aa, Zea mays
  unsure (1)..(403): unsure at all Xaa locations
  Clone ID: MRT4577_83396C.1.pep
LSLLRSHIGLLVSKMYDTAKTIVLNLVYLLXXYGFVPHEARSYYTNRSQPPLLSSMVLEIYRATGDVEFVRTVFHSLLKEHSFWMSEIHNVAIADNHGRVHNLSRYQARWNKPRPESATIDEELASKLNSMAAKEKLYCEIASTAESGWDFSSRWMRNSTDMTTLATTYIIPVDLNTFLFKMELDIGALAKVVGDNATSEFFLNASKARHIAIDSILWNSEMEQWLDYWLPGDADCQEVHEWKPNSQNRNIFASNFVPLWLNAYHSEFVRFADEAKSNRVMASLKASGLLHAAGIATSLTNTSQQWDFPNGWAPLQHLIAEGLLHSGSEAKKLAEDIATRWVRTNYAAYKATGAMHEKYDVEACGESGGGGEYKPQTGFGWSNGVVLSFLEEFGWPEGKEIAC

SEQ ID NO: 351128 - protein, 122 aa, Zea mays
  unsure (1)..(122): unsure at all Xaa locations
  Clone ID: MRT4577_83397C.1.pep
MLDALLIAKSNVMASLKAFGLSAGIATSXSQQWDFPNGWAPLQHFXEGLXHFGSEAKKLAAXRWVRTNAYKTGAMHEKXDVACGEFGGGGEYKPQTGFGWSNGVVLSFLEKFGWPKGKEIAC

SEQ ID NO: 351129 - protein, 105 aa, Zea mays
  Clone ID: MRT4577_83398C.1.pep
YFFNHYFESCTFFLAPLQHLIAEGLLHSGSEAKKLAEDIATRWVRTNYAAYKATGAMHEKYDVEACGESGGGGEYKPQTGFGWSNGVVLSFLEEFGWPEGKEIAC

SEQ ID NO: 351130 - protein, 62 aa, Zea mays
  Clone ID: MRT4577_83399C.1.pep
VIGVSCVICPWRCFTRITNIFVSPFEENTNQSYDLNHFTIYEFKSWLQVTLLMHQHNITLQS

SEQ ID NO: 351131 - protein, 61 aa, Zea mays
  unsure (1)..(61): unsure at all Xaa locations
  Clone ID: MRT4577_8339C.1.pep
PEWDEFKPLDYQKIFANMQKPXLVFDGRNMVDPEKLREIGFMVYSIGKPLDAWFKDMPPVV

SEQ ID NO: 351132 - protein, 42 aa, Zea mays
  Clone ID: MRT4577_833C.1.pep
GKYVLKKINVSAHDNTTIVITIYDNNMIRLKNVLCYMSSITL

SEQ ID NO: 351133 - protein, 42 aa, Zea mays
  Clone ID: MRT4577_83400C.1.pep
PRGHNCQLANGCRPTAPAAVEPYPPAGPLRPARAIAVLDHRR

SEQ ID NO: 351134 - protein, 43 aa, Zea mays
  Clone ID: MRT4577_83401C.1.pep
TPISALSIFLLVPRRSQYRGTRKSRYLVTNRHSSHSEEKEQSS

SEQ ID NO: 351135 - protein, 423 aa, Zea mays
  Clone ID: MRT4577_83402C.1.pep
MAGRRESPLMRGGGAGPPLSRGSRIAAAVVVGVALGCLCAFLYPDGLFHRAPDSAIHWPRRVESVACDTSREVAKLKSRLVLLERKNAEFKKQINELSMKLQLAGQGKNEALYKAGPFGTVKALRTNPTVTPDLSINPRLANILEQVAVKKELIVALANSNVKEMLEMWFTNIKRAGISNYLVVALDDSIENFCKSNDVPVYRRDPDDGIDNIGKTGGNHAVSGLKFRILREFLQLGYSVLLSDIDIIFFQNPFDYLYRDSDVESMSDGHNNMTAYGFNDVFDEPSMGWARYAHTMRIWVYNSGFFFIRPTIPSIELLDRVAYRLSHEPKSWDQAVFNEELFFPSHPGYEGLHASKRTMDIYLFMNSKVLFKTVRKDAYLRNLKPVVVHLNYHPDKSDRMKAVIEFYVNGKQNALERFPDGSE

SEQ ID NO: 351136 - protein, 63 aa, Zea mays
  unsure (1)..(63): unsure at all Xaa locations
  Clone ID: MRT4577_83403C.1.pep
VPWFTLLYPNNGSQNHGIFGAEENRSIASAIAKYSIVKTMILKNTVAKQALYDNTTPPSIAXS

SEQ ID NO: 351137 - protein, 190 aa, Zea mays
  Clone ID: MRT4577_83404C.1.pep
STRPLKPSKALPPVVLRSCPHNSSTCGRLRVAHCGDQTHTIVKGGVQTLEKDLLQLHLIWVTPIHISLALQQVLRSRVEILAVFARVLEEVKADTLSGGYRGCHGNLLGRHKLESHAVRRQWVLQPEWAQLRGWCLGTVLSLIPAGGLLLRRRWRRRGRDSRHQGRGPFSPKRRSDAMQTKIRISSSRTD

SEQ ID NO: 351138 - protein, 92 aa, Zea mays
  Clone ID: MRT4577_83405C.1.pep
NSARGAGVRAAGPATTDAGGCAAASAAGDPHVRHASPADAWGLLLRADDPGVGVLCAYGERSGFAVKEHQAGAAGSGDARGRRREDRAGGFG

SEQ ID NO: 351139 - protein, 113 aa, Zea mays
  Clone ID: MRT4577_83406C.1.pep
PKNRVYTSVRTHAAFTERTDNKIRSRNDRGNTAYPSARRETKERKTQTSVAPRTYPTKSAPPPEPPKNERHPSNITLNQRRPTDLFSAGEELLPQLSTPLPRTQNPTTQRSIH

SEQ ID NO: 351140 - protein, 118 aa, Zea mays
  unsure (1)..(118): unsure at all Xaa locations
  Clone ID: MRT4577_83407C.1.pep
YKQKKLEFVCSYLADLSLLDYDCISYLPSVVAAACLFVARFTIQPKTRPWNLTLEQNTGXRVFDLQKSIYVIHELQLTIRCSDQEVPRKKXKDPKFGCVSTMVSPREIPTSFLEDCHK

SEQ ID NO: 351141 - protein, 70 aa, Zea mays
  Clone ID: MRT4577_83408C.1.pep
RQEIVVEIQTCHWGCLFNDSWFGGTNDYTLFLIRLWVIYRSRLRLFLCGGGAIIYGVEGGFYSRFGGVWF

SEQ ID NO: 351142 - protein, 123 aa, Zea mays
  unsure (1)..(123): unsure at all Xaa locations
  Clone ID: MRT4577_83409C.1.pep
GGRPXGYRXXGXGENQHPXXRRKXPXEXQRTGQKAKRXGXQAEGXQPQXXXPEQGXRRRXEXXRKGGRGPAEAAGEAGXAGXKERXRXXXGETQXGKRXPPRQTERAAAGXKDAERDREEGRK

SEQ ID NO: 351143 - protein, 314 aa, Zea mays
  Clone ID: MRT4577_8340C.1.pep
MSTESLVFKGSLVGHKDGITAIATSSENPDMILTASRDKTIIMWTLTRDDSSFGYPKRILHGHNHFVSDVVVSSDGQFALSSSWDKTLRLWDLNTGLTTRRFVGHTSDVLSVSFSADNRQIVSGSRDRTIKLWNTLGECKFNIQEDGHSEWVSCVRFSPNPMNPVIVSAGWDKVVKVWELSKCKLRTNHFGHTGYITTVTVSPDGSLCASGGKDGITMLWDLNEGKHLYSLEAGDTINALVFSPNRYWLCAATQSCIKIFDLESKSIVDELRPDFNITAKAREPECTSLAWSSDGSSLFAGYSDSVVRVFSVVA

SEQ ID NO: 351144 - protein, 709 aa, Zea mays
  unsure (1)..(709): unsure at all Xaa locations
  Clone ID: MRT4577_83410C.1.pep
KGRIRHEVVYLLRKVVQEIERRLCIQAEHIRSQNVIMKRREQKYCSKIKVLEMLGNGTHEENQMAINRLQIVKNEKSKIEEKKELCEKDVQRLMKEKEYSKSIIMNLTKDMEAMNRLHEQQLEQIGRKAKEMEEQLTTRVKEVEYLLLQSNKKVEELEIASRLKSQLWDQKENIFQSYMDNQQLVIKDIRILSQSYENDMYALQMQWRNEISNLGSGLKCLVDAAENYHKVLTENQKLFNEVQELKGNIRVYCRVRPFLSGQDKKSTTIDYXGENGELLISNPFKQGKDGHRLFKFNKVFSPFASQAEVFSDIQPLIRSVLDGFNVCIFAYGQTGSGKTYTMSGPSTSKQDWGVNYRALNDLFDISLSRRNAFSYEVGVQMVEIYNEQVRDLLSNDIAQRRLGIWNTSQPNGLVVPDASLHSVKSTSDVLDLMEIGQANRAVGSTALNERSSRSHSILTVHVRGMDLKNGSTSRGCLHLIDLAGSERVEKSEVTGDRLKEAQYINKSLSALGDVIFALSQKSAHVPYRNSKLTQVLQSSLGGQAKTLMFVQINPDVESYSETISTLKFAERVSGVELGAARSNKEGKDIKELLEQVASXKDTILRKDMEIEQIQVIKDKVKSPNLLLDRNVPGLTKTTANQPSQLLSGERMLKSSDRVLSDRQSYGEVNVDPNHHVMDTAPVSIDEAGYENNASDDGLSGETENDNSSC

SEQ ID NO: 351145 - protein, 125 aa, Zea mays
  Clone ID: MRT4577_83411C.1.pep
VLWFPKKKIKIKGRGKIKRNNKNNKLKQKTRLGGVSWGSNFPSPCMRLLYFFFRAPFNSFHCSLVGPLFDWPIPGPPQLNDFFLFSPLSKVALALIGPPWAAFTTGCSPLLSLGAPPFFPLFAWC

SEQ ID NO: 351146 - protein, 82 aa, Zea mays
  unsure (1)..(82): unsure at all Xaa locations
  Clone ID: MRT4577_83412C.1.pep
LACCLEVEVPILAYEYIHDGTLSNLMHGNHXHRVSLNTRLRIWYQSAEVLDYLNWCTYTTFLQGDMKSTTMLLDGDYSRQGV

SEQ ID NO: 351147 - protein, 69 aa, Zea mays
  Clone ID: MRT4577_83413C.1.pep
VVQGVFDAVGERLVENFGGFVLPVSFFCPGFSCGFFIREKKFLCGFLGSSFFPFFIKGGIFVVTYVFTL

SEQ ID NO: 351148 - protein, 145 aa, Zea mays
  unsure (1)..(145): unsure at all Xaa locations
  Clone ID: MRT4577_83414C.1.pep
HHKTSSRGPSFHSLRGGRGANLQHQLWGSKNHEAGAGAGSASGPGSPLPSPPLLXGXLAFVLXPXWGGRGLNFFFSXXPPXXLVVVPDGGPPPPLKVPVGFGSGLYSRNGFGRILGPGAAGVSCGASACRCLGFLALRRGGLCPF

SEQ ID NO: 351149 - protein, 51 aa, Zea mays
  Clone ID: MRT4577_83415C.1.pep
PKAYSAAKAEPNAARVKHKPAAKKAGHGGKDIKTSGMDTTRKLVSPAKIDR

SEQ ID NO: 351150 - protein, 52 aa, Zea mays
  Clone ID: MRT4577_83416C.1.pep
VLCSCTPPIGRGGFLKRWGVLTLLQLHPIVYGHAGGHLHTEVFHKTAIYQIN

SEQ ID NO: 351151 - protein, 56 aa, Zea mays
  Clone ID: MRT4577_83417C.1.pep
LPFTFSPTKLIFHLILNSLYHSPHSSNLKHPLSTLSTTQFTTFTHQFHSTTSFYIT

SEQ ID NO: 351152 - protein, 87 aa, Zea mays
  unsure (1)..(87): unsure at all Xaa locations
  Clone ID: MRT4577_83418C.1.pep
LGGGEGHTRWXSWGRVSRNTLQLPIVSVRXTRPRQVVDLTDCELSLTLDSHPWLSYARRGSRGGSLCAAGGXDGVTLLWDLAEGKRL

SEQ ID NO: 351153 - protein, 158 aa, Zea mays
  Clone ID: MRT4577_83419C.1.pep
LCQIPFTADLPGVLLTGPFMPESVRQKLKVSAQNNPDLTILPYFSEPTMLMWAAERVITMGGYNTTCEILSFQKPALIIPRIKPRQEQWLRATRLKQLGLVDVLHPDQVNAQNLTAWLHSAPTNQYNKPVLNLRATQQLPLVLGQLLSTRNCFMSQAC

SEQ ID NO: 351154 - protein, 64 aa, Zea mays
  Clone ID: MRT4577_8341C.1.pep
HRTSYGSAARRLRRRRCIGRIIASNDVRTNVDDPSCSIRSYPMTWSYVACLLQLLLITVVNVLP

SEQ ID NO: 351155 - protein, 116 aa, Zea mays
  unsure (1)..(116): unsure at all Xaa locations
  Clone ID: MRT4577_83420C.1.pep
GGGXGGGGGGXXXGXXXGXGPHEPLKPTEXESTPRDFSDLTFLANSATAPLRYRAVDDHGLRVPASFARSWTRTRHTTTATASRLHPAAGARAGVRSLAARGAESLVTCLFPTPRT

SEQ ID NO: 351156 - protein, 80 aa, Zea mays
  Clone ID: MRT4577_83421C.1.pep
DVRARNLCLLRSEAASESSLRTSLLFILVWYEHSYKKFRRLKSRYVVAIVAADAVAEQAWVGDRSGRSCLLSSVHSARSS

SEQ ID NO: 351157 - protein, 259 aa, Zea mays
  Clone ID: MRT4577_83423C.1.pep
GGPYGDHDGGSSSSGPAGDGHGGSGGNGEMVARRPRGRPAGSKNKPKPPVIITRESANTLRAHILEVASGCDVFESVSTYARRRQRGVCVLSGSGEVTNVTLRQPSAPTGAVVTLHGRFEILSLSGSFLPPPAPPGATSLTIFLAGGQGQVVGGNVVGALYAAGPVIVIAASFANVAYERLPLEEEEAAQQAAPPGLQMQPPSSGVDGAGGMGGGPFPPDPSAAGLPFFNLPLNNMTGGGSQIPPGADGHGWAGARPPF

SEQ ID NO: 351158 - protein, 66 aa, Zea mays
  Clone ID: MRT4577_83424C.1.pep
VLSQGHLAHVSVALGPCGEANTVGCPNILDVLHKLVTMLACIFIIQHSVFIFSSIQASVYIMVASP

SEQ ID NO: 351159 - protein, 34 aa, Zea mays
  Clone ID: MRT4577_83425C.1.pep
SLPLTHPVTVSSTVTNIYSCAHTFTLKSSTPPKT

SEQ ID NO: 351160 - protein, 40 aa, Zea mays
  Clone ID: MRT4577_83426C.1.pep
IGVMPDVSSMSLPSCLHNAYASIGYFSARMPLLGLSFITY

SEQ ID NO: 351161 - protein, 61 aa, Zea mays
  Clone ID: MRT4577_83427C.1.pep
IKLQIPLLSYVVTWPVATWVRNRCNIPISTARPCPTPAVPLAGGHLPTCTHQATLRVRPSS

SEQ ID NO: 351162 - protein, 124 aa, Zea mays
  unsure (1)..(124): unsure at all Xaa locations
  Clone ID: MRT4577_83428C.1.pep
NTFLLNRGKYSFHSKTHQAEVTILILSTPAYNTLYILALIALFVIPPHPFIIPQCSLPPNAIIPHFLPQFTTMIFXHPAVQTYCLQQSLYVNFLKLPYSQLQQQSLTHLTIQTIATHHQLSLFH

SEQ ID NO: 351163 - protein, 540 aa, Zea mays
  Clone ID: MRT4577_83429C.1.pep
MYFVKPLRFDAIFKLRRVMVLGRTIDLRSIITQRMNKIFRENIDFLLERFENGDLCGVVELQQLLDILELTHQSISRFLELDSYSLMLSEMQENLSLVSYSSRISSQIWSEMQTDFLPNFILCNTTQRFVRSAKGTHHSSHRSSASTGKPYFYCGSHDLTMAYQGLAGLYRDFFGVPHMFAVVKLLGSRSLPAIIRALLDHISSKITGLLPKINALQEALPKSIGLLSFDGGIAGCQKIVHEILTWEAKSEVKTEVLHDLKEIGSALYWMSILDIVLRQIDTTQFMQSAPWIGLVPGNDGQVKHAYSDSTPYTTILTAAGKDGTASPTRPNPSTRPMSKQAEAATLLYKSNVRSGSVLEYALAFTSAALDRHYSKWSATPKTGFIDITTSKDFYRIFSGLQYSYLEDSINNPSKKQEMLGDSVAWAGCTIMYLLGQQQHFELFDFSYQFLNVAEVESATVSHYQSSERTKSSNFLQGYEGILEAMRKARRLNNHVFSMLRARCPLEDKVACAIKPSGAPLHRMKFMNTVSAFETLPQRVT

SEQ ID NO: 351164 - protein, 86 aa, Zea mays
  Clone ID: MRT4577_8342C.1.pep
KHLQVNCLTSETSHLLSSITYIRIVVSHNILEYHLPYKNRSKGYTSRCPHLPFIILGLHLHLHLHLHLPNIRPLQLPCRHMNEKMG

SEQ ID NO: 351165 - protein, 55 aa, Zea mays
  Clone ID: MRT4577_83430C.1.pep
RRDWGVGFSLPRLMTCRFCSLSLARSFFLSIWPDARQGQASYHKAKKIKRLRETN

SEQ ID NO: 351166 - protein, 180 aa, Zea mays
  unsure (1)..(180): unsure at all Xaa locations
  Clone ID: MRT4577_83431C.1.pep
MALDVLLRLLILAAVASAMPVPGPTDPAAAGLAIGFYNKTCPKAEELVLEEMRDIVHEDRTLGPALLRLLFHDCFVRGCDGSIMLKSRSKKGERDAMPMSYSLRGFDEVERIKAKLEDECPLTVSCADIIIVAAXDAVYLSNGPRFPVETGRRDGKVSLCIDAENDLAPPHANIVDLKTY

SEQ ID NO: 351167 - protein, 94 aa, Zea mays
  unsure (1)..(94): unsure at all Xaa locations
  Clone ID: MRT4577_83432C.1.pep
MGWRSIPTMMGDDSNELLMKXALRYVXIFKIPEKQKHVLVEKTSCTTESYDDFSASLPEKDXRYALDEFDFVTGDNVLQSKXFFIACVPSTSRI

SEQ ID NO: 351168 - protein, 56 aa, Zea mays
  Clone ID: MRT4577_83433C.1.pep
LSKVFLMACIRFMFLVHAYLRKEEMSINSSTGICGSRDNKNSALRLLEEHFIKRQI

SEQ ID NO: 351169 - protein, 57 aa, Zea mays
  Clone ID: MRT4577_83434C.1.pep
IFLIFFFFFFFFFSKPFFWGGGAPFTQIWDNKGGGGGDPPGVPPEKTCGKSNIFPSR

SEQ ID NO: 351170 - protein, 106 aa, Zea mays
  Clone ID: MRT4577_83435C.1.pep
PLFLFHVERLSYPWSLYYRHTLCFSIMTRIEDACIGYRYPERSVLFQTRMVVVKVGSPSKGVDARSESGSGSAGSRSRRWEPTHPSLIDLSVFVVVLVVVVDDLVR

SEQ ID NO: 351171 - protein, 96 aa, Zea mays
  Clone ID: MRT4577_83436C.1.pep
SSRATCRVSPCPQVGAVAVGQIQSLVHRQQAQSMARENVVLWLLRRPRAQGGNLESVGFAHPESLMTARALVSPMCALHLSPEPVCVRGRTRGGAV

SEQ ID NO: 351172 - protein, 65 aa, Zea mays
  Clone ID: MRT4577_83437C.1.pep
LFSNHTAYKNPKKRRKLRKTNQETQLRHKTMITIHNIQALHMQIELLHIASQFVTRASLRPQERA

SEQ ID NO: 351173 - protein, 136 aa, Zea mays
  unsure (1)..(136): unsure at all Xaa locations
  Clone ID: MRT4577_83438C.1.pep
MKMGIALVVRLALPAASASAMHMPCPCAGLQGLYGAGAGLTTMMGAGGLYPYAEYLRQPQRIPLVAVPYYAGCGQPSAMFQPLRQQCCQQQIRKMDVESVTPQLQTMMHLXEVAFAASSRLVELVMMHQQTELLAT

SEQ ID NO: 351174 - protein, 156 aa, Zea mays
  Clone ID: MRT4577_83439C.1.pep
MRFSTVAFAATFAFAAAQDLSQVPSCAIPCFATAIQGSGCGLSDIKCQRTTGAEKIAASLATCAPQKCSESEIAKLEPAVKGLCSAAGVDVSIPANVATSAAAKPSGSAASASATSNATMSRPASSSATVAQSTGAASANGVAFGAVAMGLAAFAL

SEQ ID NO: 351175 - protein, 82 aa, Zea mays
  Clone ID: MRT4577_8343C.1.pep
SPVILGTLSALFLHDQYHVGSVVGGVTIISGLYVVLLGKAEYATVGQVGSKETADEYGIVVTVNTQTNLLEPLLPRVVDPVF

SEQ ID NO: 351176 - protein, 70 aa, Zea mays
  Clone ID: MRT4577_83440C.1.pep
FQLRPGPRFFPGLLNGTFLFPRPDRPVFVFVSDFPFFSRCLDPVKYGSPYPIFLFKCQLLWVIPPRADIQ

SEQ ID NO: 351177 - protein, 133 aa, Zea mays
  unsure (1)..(133): unsure at all Xaa locations
  Clone ID: MRT4577_83441C.1.pep
MKMVIVLVVCLALSAASASAMQMPCPCAGLQGLYGAGAGLTTMMGAGGLYPYAEYLRQPQCSPLAAAPYYAGCGQPSAMFQPLQQQCXQQKMMMNNMQYAQRNVNIWMSACLLYWRIYRIAKSNKDIKALGET

SEQ ID NO: 351178 - protein, 134 aa, Zea mays
  Clone ID: MRT4577_83442C.1.pep
KKTPPGADYPSALSRGGGGFFFSVGPPGFPLGKGAVGPPHFLWVGSPFGPPGFYLFCFGFVFFLDFWGDTIFPREPVLPFFWPGFFSPPFRESWLACGFGSGFSGLPPGSGVLEFCWVVQFFSPIRFWLLFPSP

SEQ ID NO: 351179 - protein, 66 aa, Zea mays
  Clone ID: MRT4577_83443C.1.pep
LVPAPCDLHVRCQTWVSILDFRYIRSSPMMLTISRFLFCYTRNPHRSYNKKNPKKKKKAGRRIVSS

SEQ ID NO: 351180 - protein, 193 aa, Zea mays
  unsure (1)..(193): unsure at all Xaa locations
  Clone ID: MRT4577_83444C.1.pep
TRPPIKQEAADAVFFQKRSAPAAAVEPELMLGGSFRRAYTCGNVQCSHSSSAHGFMDRNARNAHQYSCMFNNSVGQTAALGGLDLDLPLDGQRSLGELMDMYEANVXRGHGRPRPRSAAARSVPDAVPIWRHHQQXIQQSAAAVYVRDDDAQFGGDIAAASPGLRFGSGLDVAGGGGLQQPHKSTGSNASWFY

SEQ ID NO: 351181 - protein, 52 aa, Zea mays
  Clone ID: MRT4577_83445C.1.pep
GYPVIGFVGELIEMAILDGDYRCLLTDSPVPPTTTGYTTPSSPTARHSSPRS

SEQ ID NO: 351182 - protein, 68 aa, Zea mays
  Clone ID: MRT4577_83446C.1.pep
TVLFSLTTHPLPPNPYTTFNLRMEENKEIPLDHFFFIDHIHTRAKLIMRSTLELEPSLLLYYSTPHSS

SEQ ID NO: 351183 - protein, 56 aa, Zea mays
  Clone ID: MRT4577_83447C.1.pep
LQSGCYILPLLRPCLAIRAAPDPVLRPRDVAEYFSVGSSVGETPDEEVLLLVQLVH

SEQ ID NO: 351184 - protein, 108 aa, Zea mays
  Clone ID: MRT4577_83448C.1.pep
HASEDAWVSTSSLLLSTQLAFTLVLAAIIVRHPLTFYNLNAVVLLTLSSVLVALRSYDSGERPHGGSRARYFAGFAVTLGAAGLFGVYLPVMELVYPKAVSRGFPMAG

SEQ ID NO: 351185 - protein, 78 aa, Zea mays
  unsure (1)..(78): unsure at all Xaa locations
  Clone ID: MRT4577_83449C.1.pep
TYTNLNRLVSQVIXSLTASLRFDGALNVDVNEFQTNLVPYPRIHFMLSSXRSVISVKGYHEXLSVASHTALEHFMMAV

SEQ ID NO: 351186 - protein, 114 aa, Zea mays
  unsure (1)..(114): unsure at all Xaa locations
  Clone ID: MRT4577_8344C.1.pep
HKLNKPPGGLKALVPTQTHTPPPPHXGGGRAPLKPPKTQGGGEQKLVAPPPGQGPGGPVGPPGPMAGHEQEGGKGPXPPPGETGPKGTLPQXPPRDGEGPFALPPPLHQGPGPI

SEQ ID NO: 351187 - protein, 37 aa, Zea mays
  Clone ID: MRT4577_83450C.1.pep
IMLPRNRLSGAQSRMHKCPGTCINHHYLCALSSFIYI

SEQ ID NO: 351188 - protein, 211 aa, Zea mays
  Clone ID: MRT4577_83451C.1.pep
MANVKRSTPVTVPAPAPAPAPLDPGATAAMAKKSASTGAAITATKSPAAASPLIVIEIPSSPDASTGGRRSTTKARKRPALWPLVLDDEIEMWTPREKRRLDEDCQILAGDPLASNIEVAPAAASDEIAVVAERGKIACRDYPHPRSACAKHPFSRTPHERYCDQCFCYVCDIAAPCVFWKGAGGHCDASDRDKQWKAFERMMQVTKAKAS

SEQ ID NO: 351189 - protein, 128 aa, Zea mays
  unsure (1)..(128): unsure at all Xaa locations
  Clone ID: MRT4577_83452C.1.pep
MASVGGAVAGGVGAPTPHVLAVDDSSVDRAIIAAILRSSRFRVTAVESGKRALELLGXPNVSMIITDYCMPEMTGYELLKKVKESSKLKQIPVVIMSSENVSTRIRRCLEEGAEDFLVKPVRASDVSR

SEQ ID NO: 351190 - protein, 112 aa, Zea mays
  Clone ID: MRT4577_83453C.1.pep
MTSGGTLVGPIAECGGTRQCALADDKEGSTFTTAATVELEFVARGTRTMLALRDSGPMRLLMAVRQGEVAPPCAEVNRHQGCLEHLSAHPVADARGGQWGHGPTLVFINSYT

SEQ ID NO: 351191 - protein, 193 aa, Zea mays
  unsure (1)..(193): unsure at all Xaa locations
  Clone ID: MRT4577_83454C.1.pep
PPPPPSPRPPPSPPPPPSPPPPLPSPPPPPLRPPPPPXWPSPPGPPXPATPPPXPCPPSPTPPPPPLHPRSRSPPPSRPTLWPPTSPSSXPAPPGPTPPPXSPAPQEPPQPPPGGPXSPPPSVPPTQSGSPPCPRTSSSRPASRASAPSRFGSGPPSPLMEVLSFARHGCVTPPPCCFQEVRLSLCADVHGGL

SEQ ID NO: 351192 - protein, 68 aa, Zea mays
  unsure (1)..(68): unsure at all Xaa locations
  Clone ID: MRT4577_83455C.1.pep
FPEKFNQFFFLRAVCFNFVDKCPVRGQATGAKSIQKSSPSFQPALSSCIGEFCLPGXLPXXHLNRPXP

SEQ ID NO: 351193 - protein, 60 aa, Zea mays
  Clone ID: MRT4577_83456C.1.pep
AKMQWEHPPVSMLNCHKASPPGGPPLGFLRLNPLTFPKMDLKGRSRTRVPAFTPCDHFGG

SEQ ID NO: 351194 - protein, 95 aa, Zea mays
  Clone ID: MRT4577_83457C.1.pep
VKRSHLISNTLLPAKHLHRRYNLDYPTYTGYYTPYLSPRTWGSTTCIIPCAAKIDSLPKVLLSRTSAGCLIYTKHTNTRRGDYTTLSIYVIARCC

SEQ ID NO: 351195 - protein, 31 aa, Zea mays
  Clone ID: MRT4577_83458C.1.pep
DKARPGLCIYIHGPHDVMTTLSFLFTIISLV

SEQ ID NO: 351196 - protein, 151 aa, Zea mays
  Clone ID: MRT4577_83459C.1.pep
RPGSRHAHAPAGAAQDVAPSAHLPLPCLEELLPCTAYLKTTKHPSPTCCTAMHNAAAAEMPCMCRLFADPELLATFNVTREQMFKLPARCGLPVGCRTGASHEPVVEAPPPPAPAQQHHHGASSRGVQFSSIWSLVASFVLGQMIPMAAPF

SEQ ID NO: 351197 - protein, 130 aa, Zea mays
  unsure (1)..(130): unsure at all Xaa locations
  Clone ID: MRT4577_8345C.1.pep
VFLLIADSIPGTDTRQPTTLIMRCRPTRPQRLTLSTRRRPPLPCQPREDTAQRNDNDSLRSANFRIRNHQDHHLLLCPRHINITSRIPTLTIAALRTNGLVSSTALRQPTTTINXMRLSPSERAQVYENP

SEQ ID NO: 351198 - protein, 82 aa, Zea mays
  Clone ID: MRT4577_83460C.1.pep
DIHKAKNKKQPLRFERQGIGPGLENSTTQWPPQRPGTLNIGVVPINQPHETQGTLNYLLKTLGEGTVTLGENSRAPKNLFAG

SEQ ID NO: 351199 - protein, 269 aa, Zea mays
  unsure (1)..(269): unsure at all Xaa locations
  Clone ID: MRT4577_83461C.1.pep
MAAMNTGMGGLGGRPIHPQANPFGPALQGAGPGLIRTGLETYGGRILDSSSEFMQSNITQYLSDPQYYFQVNSQYVRNKLKVILFPFLHRGHWTRITEPVGGRLSYKPPVQDINAPDLYIPLMAFGTYIVAAGYALGVLGRFTPEALTLQFSKGILGWFLQVVLIKGLLYSLXGSGEAPLLDIVAYAVCCFAGTSLAMVARIFWSYLYYFIMPWFCLXCTGVFLVKNMKRVLLGGPRSYERHPGRNHYFLIFLAVVQFPMLFWLGNICG

SEQ ID NO: 351200 - protein, 55 aa, Zea mays
  Clone ID: MRT4577_83462C.1.pep
MAAHMAAICHLDTSNWQKAHPAFEMVHTQPGGVPVCHFMSYGNLLFGEKAVAATR

SEQ ID NO: 351201 - protein, 634 aa, Zea mays
  Clone ID: MRT4577_83463C.1.pep
MPVARPEPQEPRVIAHVDMDCFYVQGRNFGRNGCAYSVFRSMRGDEAKRVCPGINLVQVPVARGKADLNLYRSAGAEVVAILASKGKCERASIDEVYLDLTDAANEMVLQAPPDSPEGIFMEAAKSNILGLPADASEKEKNVRAWLCQSEADYQDKLLACGAIIVAQLRVRVLEETQFTCSAGIAHNKMLAKLVSGMHKPAQQTVVPSSSVQDLLASLPVKKMKQLGGKLGSSLQDDLGVETIGDLLSFTEEKLQEQYGVNTGTWLWKTARGISGEEVEDRLLPKSHGCGKTFPGPRALKYSASVKGWLDQLCEELSERIQSDLNQNKRIAQTLTLHARAFKKNEHDSMKKFPSKSCPLRYGTGKIQEDAMRLFESGLHEFLESQNTGWSITSLSVTASKIFDIPSGTSSILRYIKGPSSAAALTIPDSPSSAAALAIPDSSFVPEDPSLDNDVFVEPIHEEECQPSTSEKEDDNNTHSASAFSAKKCRANEEKRISKKLPGVQGTSSILKFLSRGQSTLHEKRKSDGLICSHQGTGSSSEAYKAGAHNVPAEAEDRNNTNSCAEPSGSNTWTFNLQDIDPAVVEELPPEIQREIQGWLDGTSENGEIRRFLNPKSYGPFIFLRKDFVKSLKST

SEQ ID NO: 351202 - protein, 154 aa, Zea mays
  Clone ID: MRT4577_83464C.1.pep
EQPKDNNTHVASAISAKQCQAIEEKRISKKLPGVQGTSSILKFLSRGQSTLHEKRKSDGLICSQQGPGSSSEAYKAGAHNVPAEAEDRNNTNSCAEPSGSNKWTFNLQDIDPAVVEELPPEIQREIQGWVRPSKHPITKRRGSTISSYFPPARS

SEQ ID NO: 351203 - protein, 149 aa, Zea mays
  Clone ID: MRT4577_83465C.1.pep
RRFRVQGSKAGHEFACAPLGTMLRLRNCPRMEFTPAQLSCCSQAQGRGLGQRNHNGVHPSAQLAFTTEKDDCSRTEGHCCCRRAPTGFGSYYDPGKPARSVPPNSWRLWIRRLQLIKSPALPCPCQPPAPLCMLSCSQSQKGQAPRVWP

SEQ ID NO: 351204 - protein, 94 aa, Zea mays
  unsure (1)..(94): unsure at all Xaa locations
  Clone ID: MRT4577_83466C.1.pep
RNETPSPRTLPSAGGWCPYPPALGVRRGEGSGASGEGPLVVKIXEAASEAGAQLGAXAGRDLRVAPPLFFVYLPAAAPHPRRSEVSPWVLLPPS

SEQ ID NO: 351205 - protein, 229 aa, Zea mays
  unsure (1)..(229): unsure at all Xaa locations
  Clone ID: MRT4577_83467C.1.pep
MPKAKAKAKAALSMKLYIDRKAQRLLFAEASKDVVDFLFAILALPVATAVEVVGKEAMVGCVGNLYASVEKLDSTYLQAGVAKVDLLCPIVVSSCANTXQIPPLSXPPPKNLYRCGKAVAGSTXTAYLSSEAVPSNCSAQVAAPQSAAGGIVQGVVTYMVLDDLTVTPMAGVSSVATVLNSFAVRDIGDLQEKTVELGCKEGLAILKASLKSKSVLTDVFVHANNSSVA

SEQ ID NO: 351206 - protein, 62 aa, Zea mays
  Clone ID: MRT4577_83468C.1.pep
RNQLRTSKGRRRPNNEWQHRVVADTACSFCKSSYCYQCSTMPTRAYRSPACPIPPTSTSCYG

SEQ ID NO: 351207 - protein, 116 aa, Zea mays
  Clone ID: MRT4577_83469C.1.pep
KKTLSKKKQMGLPPKQARGAKPPRGGWFTPLAALGQAPTYLPSLSPLGGGGGQTPGQLGTPPFILLLGGKNPLGFPPPSQAWGILAPHENRAGAKPVFPPPLMKGNRGGPPPEHFY

SEQ ID NO: 351208 - protein, 82 aa, Zea mays
  unsure (1)..(82): unsure at all Xaa locations
  Clone ID: MRT4577_8346C.1.pep
SGHSDDPQNSSSIALRRTHAIAGAKDRGQLHWLEHGIQADGQMPGDKTIGGGDDAFXTFFXETGAGKHVPRAGYGDNDIFVT

SEQ ID NO: 351209 - protein, 96 aa, Zea mays
  unsure (1)..(96): unsure at all Xaa locations
  Clone ID: MRT4577_83470C.1.pep
QGRRRLEMEVREHSLVMGAIEPMDLXRRCYRMIGGVLMERTIREVMSAVKRNKEGLEXVIDRMHEALERKNKDIAEFELKYKIRIRKADSDSEDEG

SEQ ID NO: 351210 - protein, 321 aa, Zea mays
  Clone ID: MRT4577_83471C.1.pep
MCVSIYCVHFVTFCHCKQVTTFPFSSVKCNWLLPVVPLSLCRRQLESNSSHGDDGSDRLVGKGDLRLKLMRKGLLPRSNGSAEQNDIDLREKLSRNHKLPNYDSRGHAAESRASYDMRDEPPELSSRYSSREDVLGSRHSSVVSRVPYARSVDDLLKLDYSRKSYPSWTDDGLRHRSPERMLKVRSDMYPRIAYDQIRPMPPLRSAGSSRPQSFITRDAPDTSRSQPYAGKSTISIDTVQRTNGITPSTAALPKAPVMDEAPLTVTGLLNSLGLEKYVVLFQAEEVDLSALRQMGESDLKDMGVPMGPRKKILLAVGPQSK

SEQ ID NO: 351211 - protein, 82 aa, Zea mays
  Clone ID: MRT4577_83472C.1.pep
PQPVSFSKKTCGIKGFAFVLILARRSSPVVPPSVLTPYQIKQCYHNRVANEPRLRVKHLSKSCFVSLSADGVYFSLFLSRVG

SEQ ID NO: 351212 - protein, 142 aa, Zea mays
  Clone ID: MRT4577_83473C.1.pep
LVNSLGLELKISGTTYSVELACKIFEDRLVGKGDLRLKLMRKGLLPRSNGSAEQNDIDLREKLSRNHKLPNYDSRGHAAESRASYDMRDEPPELSSRYSSREDVLGSRHSSVVSRVPYARSVDDLLKLDYSRNPTRHGQMMV

SEQ ID NO: 351213 - protein, 46 aa, Zea mays
  Clone ID: MRT4577_83474C.1.pep
EGELHVRWSLPISGVFLGPDLNWECMSHPGAAVVLDPELECARDQP

SEQ ID NO: 351214 - protein, 88 aa, Zea mays
  Clone ID: MRT4577_83475C.1.pep
KLMAPWSCTQVEACSSSRKGLHAAVPCCSCRGSMAMVLMLARAHDLLRDGWLQRHIFIVEAGEKKRRLLIHGILNSRARPLRKRPRLA

SEQ ID NO: 351215 - protein, 63 aa, Zea mays
  Clone ID: MRT4577_83476C.1.pep
KDGLPTDLEGTNLASQRIIDDLTLAKYKMLKDGTLHLEWDLTGGTQINVKTFNGTRTTLEMRE

SEQ ID NO: 351216 - protein, 208 aa, Zea mays
  Clone ID: MRT4577_83477C.1.pep
MVKHNNVIPNGHFKKHWQNYVKTWFNQPARKQRRRIARQKKAVKIFPRPTSGPLRPIVQCQTRKYNMKARAGRGFTLEELKSAGIPKKLAPTIGISVDHRRKNRSLEGMQSNIQRLKTYKAKLVIFPRRARKVKAGDSTPEELANATQVQGDYMPIARGEKRSVEVMKVTEEMKEFKAYGKPRVERMNQRQLGARQKKAAEAEKEEKK

SEQ ID NO: 351217 - protein, 45 aa, Zea mays
  unsure (1)..(45): unsure at all Xaa locations
  Clone ID: MRT4577_83478C.1.pep
LIDDYSMVKFIXXDLRPESIIQYVLSSIYTCIQYGEYSYFKVRYF

SEQ ID NO: 351218 - protein, 80 aa, Zea mays
  Clone ID: MRT4577_83479C.1.pep
VMLISVAEPLRRRHIRLLVRVVVLVEVEPVPLHAHTPCRLWRGGSLHFHHDMRRHRLHHVQHEVEEEATTAHTPCRLWGG

SEQ ID NO: 351219 - protein, 55 aa, Zea mays
  Clone ID: MRT4577_8347C.1.pep
GSKRCPVHKVVKMLLRAYFLTYAVVCFLISQSPHYEKLTPKGVLTVLLGHDPLLV

SEQ ID NO: 351220 - protein, 85 aa, Zea mays
  Clone ID: MRT4577_83480C.1.pep
QEAPSQPHVTCSTPRHQLQQALSSLQQASPAASSFPSQLQTSSSWRSSYPLHASCVLSCRVRPGLVCSQSAQRRPVLLKLDVAKS

SEQ ID NO: 351221 - protein, 79 aa, Zea mays
  Clone ID: MRT4577_83481C.1.pep
QRGPCRTSDQRKLFFRLYAPSGEVRAAVLQNVVVTCRQTAQVLIGRDQPGSEPNAPASGSYGLHCLGRLSEFELRRCIC

SEQ ID NO: 351222 - protein, 53 aa, Zea mays
  Clone ID: MRT4577_83482C.1.pep
MNKLSTIKKKKKKKKKKKKKKKKKKKKKKKKKKKIKKKKQKKKKNYIIKTQKN

SEQ ID NO: 351223 - protein, 110 aa, Zea mays
  Clone ID: MRT4577_83483C.1.pep
RRPRHRQLTNRILLNLPRLPPITLRLHPLSTLTPLRQRHHSITNTTRINSHRRIRMLIPNSNMPSTTLLYTYRPTVKSKRSTNLLLHSLRRHKRTRIRILLQQLTPLILK

SEQ ID NO: 351224 - protein, 120 aa, Zea mays
  unsure (1)..(120): unsure at all Xaa locations
  Clone ID: MRT4577_83484C.1.pep
MARTQSAVAVAAAAAGLLLAAAATTSGAAITCGQVSSGIAPCLYYARGTGSGPSQGPRWSGLRXNLRSADGTASNRRAYCMCLMNADRGVKGLNAGNAXADFPHNRCVKVPXYSICTSTH

SEQ ID NO: 351225 - protein, 85 aa, Zea mays
  Clone ID: MRT4577_83485C.1.pep
VYTRLSQRITGTRSQHDGCTECTFTAAGAEQTAEGEIICQECNKKYALFVCRACLLTRTVVTFTYVASIVISFDTCGTVIVSHSA

SEQ ID NO: 351226 - protein, 142 aa, Zea mays
  Clone ID: MRT4577_83486C.1.pep
FSELHNLKILFLFWKRWGRQIPFLNKKKTPCFMTTKNFYKAPLKKILFLFKKELYFWGLGGTPYFFIFFSTAPKGAHLFGLCHFGGAGGGGLQLYPTSIQGKMASPRFTKKGGKAPPFFFFFLKGDRPFLAGWRTWEGPFYK

SEQ ID NO: 351227 - protein, 64 aa, Zea mays
  Clone ID: MRT4577_83487C.1.pep
KIYLAKPKVIIIHLIKNCSSTNTPSWSCRSTLYIEVFCTSKHQSIFRHQSLLRNSMCCIPSSSD

SEQ ID NO: 351228 - protein, 89 aa, Zea mays
  unsure (1)..(89): unsure at all Xaa locations
  Clone ID: MRT4577_83488C.1.pep
CRRWRLAPTAPNRGCYPYTDKDPFXVESCPHVYFVGNQDKYETRLLEGQEKQKVRLISIPRFSESGVAVMLNLRNLECSTLSFSTSFDA

SEQ ID NO: 351229 - protein, 78 aa, Zea mays
  Clone ID: MRT4577_83489C.1.pep
EVDAVVGTVGPADGRPPQLVVVAHVQYRRPEHVHRRWPSLVGGGDGADDRRLHTYHLAKQMTNPHLHRCLAACFSATL

SEQ ID NO: 351230 - protein, 52 aa, Zea mays
  Clone ID: MRT4577_8348C.1.pep
TTTFQHLKPLLYITYSPCNTFPFRPFTYYLPGPYPSPFPTLSHPLLSTLTPL

SEQ ID NO: 351231 - protein, 435 aa, Zea mays
  Clone ID: MRT4577_83490C.1.pep
MPVPKPMERKQAAYSNLDERYAIQGEKYQGQQYSHIYFTRLHHMRNLLHALVPSWKPQLPVTTVLGLEEGKDCIIVGTLYKHMKLKPSILDEYAKERSAIPLVKPHNFMHPDDHLILEDESGRVTLAGAIPPAAFVTGVVVALHGKETSAGNFLVEDVLEAGLPPQTALSSAEEDKYVVFISGLSVGSDTFNPLQFQLLIDHVTGHLGDENEQSIASNIVRIVVVGNSVHISPRFVNGQTVPSKDQSRIAEPIKELDIMLTQLVASLPVDMMPGCHDPANFSLPQQPLHRCLFSGASTYNTFSSCSNPHQFELDSVQFLGTSGQNIDDLYKYSDAKDKLEFMERTLRWRHLAPTAPNSLGCYPYTDKDPFLVESCPHVYFVGNQDKYETRLLEGQEKQKVRLISIPRFSESGVAVMLNLRNLECSTLSFSTSFDA

SEQ ID NO: 351232 - protein, 297 aa, Zea mays
  unsure (1)..(297): unsure at all Xaa locations
  Clone ID: MRT4577_83491C.1.pep
MARKCSHCGNCGHNSRTCGRETMLCEAGDARNGGGGLRLFGVQVRIGGGVGAGSASMKKSYSMDCLQLAAPIGCSASSCQSPSXPSSSSSLLLMSIEEGSERGAPNGYLSDGPHGRAVQERKKGVPWSEEEHRQFLSGLEKLGKGDWRGISRSYVPTRTPTQVASHAQKFFLRQSSLGKKKRRSSLFDMVPICENSASISDPLSSEGASTSLSLNVPRHGVTSVSERAALDLNSTEEDDSGADASSASASGAGTRPPFPAAQTEPLQPSSLGRGRGHHCSPLDLELGMSLPAPSIGT

SEQ ID NO: 351233 - protein, 240 aa, Zea mays
  unsure (1)..(240): unsure at all Xaa locations
  Clone ID: MRT4577_83492C.1.pep
MKQLRLRDTSASLHIIESLLGWSVAADVSKQKQYSGYIPTTAGVPWSEEEHRQFLAGLDKLGKGDWRGIARSYVPTRTPTQVASHAQKFFLRQSSMGKKKRRSSLFDMVXMQAPTSLSFFSVRNCLSFDNRVQRQVPICENSASISDPLDVARHGVASADSERAAVDVDLMNSTTEGDDGRSRDVVSSASGAGTALRFPAAAAQTEPLHPSSSHGHGRGHHCSPLDLELGMSLPAPSVGT

SEQ ID NO: 351234 - protein, 37 aa, Zea mays
  Clone ID: MRT4577_83493C.1.pep
LYSEHNILECKFTLKYTARNTSERDYIHDPYHVLDHL

SEQ ID NO: 351235 - protein, 142 aa, Zea mays
  unsure (1)..(142): unsure at all Xaa locations
  Clone ID: MRT4577_83494C.1.pep
RSKRVSSREHLPSXATPPVPRSWCCSMVKSAEKLAVRLVCGHDGAAAAGASAATSNAPARSESRGSAPPPAGGGGPTDRDLGRQVVEGSGSGGVGLAGWVSGGGMEGGQRCGVLPVLAEATGRRVDIRSRRGRSGSGRRSRP

SEQ ID NO: 351236 - protein, 80 aa, Zea mays
  Clone ID: MRT4577_83495C.1.pep
THASATHSSVRLREHLSWFHICSSEPTHLLPLILYRVSTTLCLTPSLETPQDTTTITIGYAIIYIPSFILTNVQDNTNIS

SEQ ID NO: 351237 - protein, 97 aa, Zea mays
  unsure (1)..(97): unsure at all Xaa locations
  Clone ID: MRT4577_83496C.1.pep
LAPXASSSRCRRXVPXGXGWXXRGRRGRXPRRPPRXPSPVXRGXRPLPSWCSRPRLRXRGCRPGRGPGWSSSAAPSWVGXXGRRPAPPRGGPKARRP

SEQ ID NO: 351238 - protein, 120 aa, Zea mays
  unsure (1)..(120): unsure at all Xaa locations
  Clone ID: MRT4577_83497C.1.pep
EPVANAAAARNYGQVXHAQHEGAPTTENVISXSLNTASAAFYTYGAAGQDFPVATQRRDIQAGGSNPISPSSMKMDDNSIFHTGSLVRGRTAMDYGGRDWYDAAGPGGLCSGRVLTASLN

SEQ ID NO: 351239 - protein, 58 aa, Zea mays
  Clone ID: MRT4577_83498C.1.pep
IYGHDKGLKARAPHRDKILSDALVMADNNPEVNKALLNKGYSNLMTQMGRRTYIPFKV

SEQ ID NO: 351240 - protein, 198 aa, Zea mays
  unsure (1)..(198): unsure at all Xaa locations
  Clone ID: MRT4577_83499C.1.pep
MELPQLASFLGVVLATVLFLKAVLRRRRRQYNLPPGPKPWPIIGNLNLIGTLPHRSIQALSKKYGPLMQLQFGSFPVVVGSSVEMAKFFLKTHDVVFTDRPKTAAGRYTTYNYSDITWSPYXAYWXQARKMCLTELFSAKGLESYEYLLREEVLVLLDHLHRVVWSPFFSSFLPSSFLCLPFYICPLPPVSSVIPIHS

SEQ ID NO: 351241 - protein, 42 aa, Zea mays
  unsure (1)..(42): unsure at all Xaa locations
  Clone ID: MRT4577_8349C.1.pep
VIVCPFKSPYPTSFNPEVDIGDETGKRIYIXMKLIQKLELTD

SEQ ID NO: 351242 - protein, 82 aa, Zea mays
  Clone ID: MRT4577_834C.1.pep
VCTSNKSKFVECMVPNTHPLLPTKGNVIICVLHGAQLRHTSLLSCTWKWGAGVSQFLLPSKHSKPVLSCNWYWLDIRLKKHM

SEQ ID NO: 351243 - protein, 60 aa, Zea mays
  Clone ID: MRT4577_83500C.1.pep
KLAASARNLAWPPRSARTCPSGPAPRLCVRSWALLTACIVPARRLSRGCVPFIVSLFTCA

SEQ ID NO: 351244 - protein, 379 aa, Zea mays
  Clone ID: MRT4577_83501C.1.pep
QIAEAEILEDQLLVALGHRILELVDKLEDFDLILLPSFELERPLQLAKEAIGIRYLSPYEVGTCPICREEKLGSQMIKAGCSHTYCYNCLTGYVEEKLLTSKLPIRCPQLRCKYIISASECKSFLPVSSYDSLERAFAEAGTSGMERFYCPFPNCSVLLDLSQHFSRASSSSQSDLSCVECPECHRDICINCGVPWHIMMGCDEYQSLPAEERDAGDLSLHRLAQNNRWRRCQRCRRMIELTQGCFHMTCWCGHEFCYSCGADYASGVQTCQCVFWDDEAMEPSSAARSTQAASEIWAWDTFDCMPTAVEGYSEQERAQLALIQRFLAGGFSLGENPCQSPPRCADSYIVDTMKDLHQLPWLERFVSVISDTYNDDYMQ

SEQ ID NO: 351245 - protein, 145 aa, Zea mays
  unsure (1)..(145): unsure at all Xaa locations
  Clone ID: MRT4577_83502C.1.pep
RRGGSHISEASKAKLLDALRHSQTRAREAEIAAKKAXTXKDHVIKLLFRQASHLFACKQWLKMLQLENICLQLRFREHQIATMFPELPWMVTKEKVAPSQEHSDRKKGRRLNRKGGLRDAVAFAVGVGIVGAGLLLGWTLGWLLP

SEQ ID NO: 351246 - protein, 83 aa, Zea mays
  Clone ID: MRT4577_83503C.1.pep
KPARHKQHLGPLLGETSTFSRRTVTAHLSGVPSSSSVSNATFVLLLQSLLTRVISTDFRKECGHLRSHPMLRLTSLMVFHRVT

SEQ ID NO: 351247 - protein, 99 aa, Zea mays
  unsure (1)..(99): unsure at all Xaa locations
  Clone ID: MRT4577_83504C.1.pep
LFXEKAKPQFFFTGTTGKTKKQPNMIKKITGYKXLKMGKKKRYKLKKMFKRHIKELLVNTTKKGQCHNRGGYKPFPVRGAPLQGAPPNIQKKETFKPPP

SEQ ID NO: 351248 - protein, 70 aa, Zea mays
  unsure (1)..(70): unsure at all Xaa locations
  Clone ID: MRT4577_83505C.1.pep
GVCRSLPSGLAXGVVPGHETVVRSATGDLREPRFGMEVGRAGGAPPPRPSAPPRSRSARVRTGAWVAPGS

SEQ ID NO: 351249 - protein, 68 aa, Zea mays
  Clone ID: MRT4577_83506C.1.pep
IWIEADHSPVIIQHNANKRGVIHSQVNLTSWIQSQEEKEEETTIEEPQEESADHIKRSDILHETLKHR

SEQ ID NO: 351250 - protein, 164 aa, Zea mays
  Clone ID: MRT4577_83507C.1.pep
LKEKDNGRSPESSPLKDKTTADDDSYQCLLGSASDVPGPITTPVWFLLISLPNQKEDPQLPQLSKSYMRIKDRSLQISSVQRYIMKKLDLANENEVEIICHGEPICPSSTLHGLMELWHRRQPAEPVEALVGAPAKEFVIELGFRRRRHPYLAPGTVAVPPEPS

SEQ ID NO: 351251 - protein, 386 aa, Zea mays
  unsure (1)..(386): unsure at all Xaa locations
  Clone ID: MRT4577_83508C.1.pep
VWRLEQIGKDGSFHKRLNKSGLSTVEDFPQKLRSVXVCGCVINLLLLYFHFYVFQFMTINXFCXILGSGMSNKMWDALVEHAKTCVLSGKYYIYYSDESRSIGAIFNNIYAFCGLISGEQFYSSESLDDSQKLFADALVKKAYDNWMYVIEYDGKGLLNLKPKKKAASTGQAETHASAGGSTSYQQHLSSTSMPGSSPSGGTDSVGYGVDQSATHLSQLQSSSTNLQTPYDDTFSFLPPNLLTGSANDAMGLELGQLHQVISQGQPIQPANVGYVDWPRNRDSQYADDFTEDIRVKSHQMLESEDMQQLLRVFSMGGASGSLSDDTFNFQPYMPSPLPNPGFESERSHSSGKAVVGWLKIKAAMRWGIFVRKKAAERRAQLVELED

SEQ ID NO: 351252 - protein, 79 aa, Zea mays
  unsure (1)..(79): unsure at all Xaa locations
  Clone ID: MRT4577_83509C.1.pep
MSRIRRGCAFDAFTRELWDTFXGFHVGSGSRSSSRQCSSFGCSTSSETVVLGGVRVXWYDTTEAQVCKSEVPVLNKEDV

SEQ ID NO: 351253 - protein, 293 aa, Zea mays
  Clone ID: MRT4577_8350C.1.pep
NYLRASDFLCSLRCLLTKRSNWVSLLFWLNCFVQVIDFLSTIIDNQDVTTILLQPLIKVGLINHTISLLASEIEKLSNEGNGDRSDSLDLILNFVEELSAIDSCSGVMSESDQLIQVLESIVKLPDKFEVTTYCASVVIVLANILADGKHIVPRLSHDLPFMEGLFDILALVSDDNQARNALWCILPCLLAQAQQMDMNSSSLEQFVSLLLGRFTHIKDDLESHRVDKKEELTAEDAYLKHGVSASLRAICCVMERWIVEKSSLGEDEDDAPPTESTVEDARHLLNYCQNYDL

SEQ ID NO: 351254 - protein, 219 aa, Zea mays
  unsure (1)..(219): unsure at all Xaa locations
  Clone ID: MRT4577_83510C.1.pep
MRQPEPLHCLLLLTAASLCGLARTVAAGDDGGMPLVTAITKDAATSLYTAPLRYTRPLVLDLSGPMVWTTCDGPSHDTLDCSSDACTRAHRFQPPNCPQTGYGEHDARNRCKCTAHPHNPVSGYTASGDVTRVTLSANATDGKNPLYEVSFTAVASCAPALLLAKLPAGAAGVAGLARSGVALPAQVADTQRVGNKFALCLPSAGSGAGVAIFGXGPLF

SEQ ID NO: 351255 - protein, 57 aa, Zea mays
  Clone ID: MRT4577_83511C.1.pep
MFLNLDREPVYLGVLIKLFAPPIRLNTFYMSKPSPCKVKITPKPRNFWGIPTPLFLL

SEQ ID NO: 351256 - protein, 331 aa, Zea mays
  unsure (1)..(331): unsure at all Xaa locations
  Clone ID: MRT4577_83512C.1.pep
MASPVAIGTAVFQRGPLRVEARHVDYSQVPSVPKPLMVVAPTDAGVYPVAVFLHGCNTVNSWYESLLSHVASHGFIAVAPQLYCVTLNMNDLKDIDATRQVTAWLADKQQGLAHVXPTSSSSTAXPDLSRLALAGHSRGGDTAFAVALGLGPAASDDDDNNADAGTSPAALPLKFSALIGVDPVAGLSKQAQVEPKVLTFRPRSLDPGMPALVVGTGLGPKHVGGPPCAPAGVNHAEFYDECAPPRYHVVLRDYGHMDMLDDDGVPYVINNCMCMRNTKDTKDLARRAIGGAVVAFLRATLEDDDEDLKVVLENRPGLSPAVLDPVGHDLA

SEQ ID NO: 351257 - protein, 90 aa, Zea mays
  Clone ID: MRT4577_83513C.1.pep
SLSGAFFFFFFVKTTYFDGVEHRIKYHGLGRKVHQPGTLCIHFLISLFGNVLYLEMAAMKSCGVAIFAPGIVWLLRHLSLCWYRLLLKLL

SEQ ID NO: 351258 - protein, 64 aa, Zea mays
  Clone ID: MRT4577_83514C.1.pep
YAGMYYLRTRAAADAIKFTVDSTLLKENGNGMNDGKPTEDDVEAKMAQMVCSFNNREECLACGS

SEQ ID NO: 351259 - protein, 92 aa, Zea mays
  unsure (1)..(92): unsure at all Xaa locations
  Clone ID: MRT4577_83515C.1.pep
SWFGFFSCRPGLPPLGGGGPLRHXMGRFGRGYARWDLIVGNKPGGGKGAPPQSRGLGNPSGGGGFCRGFSSVGWVPCGPPHWPQIIIPGIFL

SEQ ID NO: 351260 - protein, 127 aa, Zea mays
  Clone ID: MRT4577_83516C.1.pep
MGKPVPSLLMLLLSRGRVPLDSPTRWQDGRPSHSSNHVLQRTCKNYATSKAEYTNTQLDLPDYNGSSSLISCEKQTIRIEFLSLQVTALVPTITGMGDHVSGRVRGYVCGQVHSGFNNIMLKEEKLS

SEQ ID NO: 351261 - protein, 147 aa, Zea mays
  Clone ID: MRT4577_83517C.1.pep
MRASAGRNGAMEGAAPWGNGARRPWSFCPCARIGNREKRLLLGHTIEPRRKGAMGAGLAPCWLLAAVGAREEEGRLLQGCRAPEQRADHGREASALGGREPSSLRWGRRAPWLGRVEQGSLVAAAALRKDEEGAWERRRREWRLEIF

SEQ ID NO: 351262 - protein, 59 aa, Zea mays
  Clone ID: MRT4577_83518C.1.pep
KISTYPRVLDLLMKARGLDNTPDLGDNRGPWLRRPSFHLGAGATNLFNPTPTDMGWKTP

SEQ ID NO: 351263 - protein, 120 aa, Zea mays
  Clone ID: MRT4577_83519C.1.pep
SARDPTHHLLFVTARSKHGGGAPFLIGRGLPMCGRLARDGSVLCTQSGSDTQQLPDDIRDIQTIRFLHPDHYPTMWQIGHPWKEGLATHLGACKIAVRWNINRRFKYALLIHGLMVKTRP

SEQ ID NO: 351264 - protein, 76 aa, Zea mays
  Clone ID: MRT4577_8351C.1.pep
NLPPFKTPFTGQGFLTPPWVFIFPALYFFLIKKAKGPVKGLSFARVAQFSKFEAQGFARSFFSPPIRFFLGVPPAA

SEQ ID NO: 351265 - protein, 141 aa, Zea mays
  unsure (1)..(141): unsure at all Xaa locations
  Clone ID: MRT4577_83520C.1.pep
SALLLINLFAHRRLLDPLAFPIRPRILQEPAWSWSRPNLLPSTSRARQPSASVSLTRQAGHDELQGTRGVRSGVRSRDEPGLPWRRACRSPAAVGGRGPSCCPASRRPGPPEEXPXXAQXQXGPGASQGTPDPAPAKGGTP

SEQ ID NO: 351266 - protein, 194 aa, Zea mays
  unsure (1)..(194): unsure at all Xaa locations
  Clone ID: MRT4577_83521C.1.pep
MVFPAILPKVAARWLFTFYRAARKLRRHAFQLYYRNTTAAKPSSAAAAAVSQQQTGAAATAALKTGAAIPDAAGRTVVCEMHGALLRSTALFPYFMLSRLSELIAPIKTVRLTRDRARDAETMPVGLAQXXLAVCPEGTTCREPYLLRFSPXLFAELADDMEPXVALDAQVTTLYGTTASGHKWSNPVAFFANP

SEQ ID NO: 351267 - protein, 363 aa, Zea mays
  Clone ID: MRT4577_83522C.1.pep
MAADAVVGLELQHVNVGRRRYFTGLLSSSGHATGPELRQKAIREALLGAEDDPIAVVGIINDSSPLDDELFVPYCKEVYVVSRESAKNDKLSRVKYPKPLIFHDGRLAFLPTPAAMLAFFLFLPLGVILSVIRINIGIVLPYKVNFVAAAIFGVRFRASGLRAPPADGEQRRGVLYVCTHRTLVDPIMLTTALQKPVPALTYSLSRLSELIAPIKTVRLTRDRARDADTMSRLLKQGDLAVCPEGTTCREPYLLRFSPLFAELADDMEPVALDAQVTTLYGTTASGHKWLDPVAFFANPVPSYRVEFLGAVPREWTRAGGRTGVEVANWVQRRLGQALDFECTGLSRRDKYMMLAGNDGVVAK

SEQ ID NO: 351268 - protein, 473 aa, Zea mays
  unsure (1)..(473): unsure at all Xaa locations
  Clone ID: MRT4577_83523C.1.pep
RARSPAALLRALPLLHGRGLRGRQPSARHAAALRLPSRLGTRGAPRRRWRRPGDGVRHLRGAQAQGHGPRGPRRPAQALHGAAQRAGVRQPVAPGQEEGGGDRRAAGDVRVVPQGVPGRRRSGRPRAAARHGRPLPVLHGIAVRPRDGAGAEAHTSGSTLWRSSPTRCPRTGWSFWVPFRGSARAPGAGQASRWLTGCSGGWARLWTSSAPGCLGRLATLPTPAAMLAFFLFLPLGVILSVIRINIGIVLPYKVNFVAGAXFGVRFRASGLRAPPSDGEQRRGVLYVCTHRTLVDPIMLTTALQKPVPALTYSLSRLSELIAPIKTVRLTRDRARDADTMSRLLKQGDLAVCPEGTTCREPYLLRFSPLFAELADDMEPVALDAQVTMLYGTTASGHKWLDPVAFFANPVPSYRVEFLGTVPREWTRAGGRTGVEVANWVQRRLGEALEFECTELTRRDKYMMLAGNDGVVAK

SEQ ID NO: 351269 - protein, 148 aa, Zea mays
  Clone ID: MRT4577_83524C.1.pep
SPPLSPTSSTRSSCSGRARLPSPCCSGRCASSGPTSAQLPPALASAASPGCGTMRPPCEVPRTTSAPATFLSRKGRLATVTATRSVSASRGYGSPTHPLPPQALLAPLTPKNPDALPAGPLTLTSCPRLRSTYIVRIHVTWDTEVIEL

SEQ ID NO: 351270 - protein, 187 aa, Zea mays
  unsure (1)..(187): unsure at all Xaa locations
  Clone ID: MRT4577_83525C.1.pep
MVFPAILPKVAARWLFTFYRAARKLRRHAFQLYYRNTTAXSRRPPPPPPXQQQTGAAATAALKTGAAIPDAAGRTVVCEMHGALLRSTALFPYFMLVACEGGSLVRAMLLLCAFPLVWALGERRGAGVRXVMAFVTFAGLRPRDVDLVARAVLPKHYMEQLSALAYGSLWLXXRGXVAVTSAPRVMS

SEQ ID NO: 351271 - protein, 518 aa, Zea mays
  unsure (1)..(518): unsure at all Xaa locations
  Clone ID: MRT4577_83526C.1.pep
MAYTTSPSTSTSTAAAVAWAFAAATCVKLLLVPTYRSTDFDVHRYWLALTHALPVRQWYTDTSSQWTLDYPPFFAYFSRLLSLPAPLVDATLVSIPVRDATPFAHLIYLRLTVAFSDLLLLGSVLLLARDAQRKQRPFLALALVVWSPALLAVDHVHFQYNGFLIGLLLLSLHFLEQGWDLIGGVVFACLLCSKHLFLVAAPVYFMYLFRHYCCGRGVVKGLGRLVLMGSGVAAVFAAAFVPFVYYGQMQQLISRLFPFGRGLCHAYWAPNFWVFYIILDKILAFLLRRLGFNIAIPEASFTGGLVGDSSPFAVLPKVTPIATFLLVILAMAPCLIKAFSNPQPKHIIRWVSYACTCGFMFGWHVHEKASLHFTIPLALIAMDSLNDARHYFLLSIVSCYSLFPLLFENQEYLIKVLLLLTYAALMWVGFTVHXLQSLTWKERKXSVRQHSEEEWHHWMDWFXYLLGIAGIELWSQVFHHHVFGDRLPFLPLIMVSFYCGLGMMYSWVWQLVHIVRHT

SEQ ID NO: 351272 - protein, 45 aa, Zea mays
  Clone ID: MRT4577_83527C.1.pep
FTRTASVAGIGGCIGVMDSYNASITRALGEWDSMITSGMYRRRDY

SEQ ID NO: 351273 - protein, 69 aa, Zea mays
  Clone ID: MRT4577_83528C.1.pep
LKNIFFFIESLVGGLGGTRILVLSIGGTPTTHFTLFISWDGGLNLRLRVQKEMKCGRGVRVQFTPLFFA

SEQ ID NO: 351274 - protein, 228 aa, Zea mays
  unsure (1)..(228): unsure at all Xaa locations
  Clone ID: MRT4577_83529C.1.pep
MTYVNPDPQPLAAATADDSATQHQAAVTAAPQSTRGALGFFATAEPKQGATMVAPSSPQGVPGLAPQQGAPVMAPPQGVTMMAPQQQHFAPAMVPGSQQVMQMLLQALQAQAQAQAQAMVAHQPAQGMAPSQXAHVPSVHXMEMQQAQAGHVTAPPPVPLGPSLMMQQQQQQPSQADTVIMAQPPLPLDPPLMQQQQQPSQADTVIMAQPPLPLGSAMLQQQPSQGGT

SEQ ID NO: 351275 - protein, 34 aa, Zea mays
  Clone ID: MRT4577_8352C.1.pep
AHHSGARHIDVDVSESVNHVQFRRCHYGNPANCS

SEQ ID NO: 351276 - protein, 106 aa, Zea mays
  Clone ID: MRT4577_83530C.1.pep
FTNHKGRKKAVTILHTGLSKKLKKRYHARSGVFQQEWLNEHPSRACLCSLQKNKWSFTDGQFPHHHHSYRVPTFQSGYVWCVHCISLFKLLLHAEFRFRLYKTYPK

SEQ ID NO: 351277 - protein, 76 aa, Zea mays
  Clone ID: MRT4577_83531C.1.pep
WYDQIVLGQVREHVGGLGEFMIMSERYKVHTFRRRHQPDLPAHSFRDRWGFPFLVNEKLVAKPIKRARFVCTFGER

SEQ ID NO: 351278 - protein, 98 aa, Zea mays
  Clone ID: MRT4577_83532C.1.pep
GWDMEGVGSDGDSPEGKPALSTPTASLANQVQSPSVISHCAAVNACCGCWQRVGLASTERGWETRVEATRAKNLMLFLQYLVQNIYAIPNVEGWACYP

SEQ ID NO: 351279 - protein, 199 aa, Zea mays
  unsure (1)..(199): unsure at all Xaa locations
  Clone ID: MRT4577_83533C.1.pep
ATAGSNGHGLLLSSHQDGKIMAWRTXGAAGRTGPRASSXAVLPTCVDRLRTFLLPWSYVQVRRHRWRTWVHHVDAVAALAVSPDGALLYSASWDRSLRVWRLPGFRCVESVAPAHDDAINALAVSPDGHVYTGSADNKIKAWRRHPERRHRHSHVLVLVQTMERHRSAVNALALGADGRVLYSGACDRSVVVGSGPTAP

SEQ ID NO: 351280 - protein, 70 aa, Zea mays
  unsure (1)..(70): unsure at all Xaa locations
  Clone ID: MRT4577_83534C.1.pep
CXXCLASNXXLVLVPPWVXKKKRKEGRLCXLEXXHSFIVSRVYAICHXALLIVSXXXFNSNWPXRFTNPS

SEQ ID NO: 351281 - protein, 89 aa, Zea mays
  Clone ID: MRT4577_83535C.1.pep
ALTPRGPLSAKITVTNCTEHSHQKPAYHGITPGPIRVAVAASRMSLIRGQTYHLNDGIRHNRQKHHRLTTLPTGQGRTIDNMKPSLLDI

SEQ ID NO: 351282 - protein, 40 aa, Zea mays
  Clone ID: MRT4577_83536C.1.pep
ASALSFLNIHIFIYIFFKQTKPKNIILNPSKIIQIITYYL

SEQ ID NO: 351283 - protein, 67 aa, Zea mays
  Clone ID: MRT4577_83537C.1.pep
LRQRDTRRMCREHATHERWIGTGALCSLKCSVLSSAYTRTSASDNSSLNSTLGTFTEKCPGRPRGTQ

SEQ ID NO: 351284 - protein, 372 aa, Zea mays
  unsure (1)..(372): unsure at all Xaa locations
  Clone ID: MRT4577_83538C.1.pep
MGRSFSTAAPVRPAALAAPPLLLFLLSLGLLEAAAANVGDSCSTSADCGAGQWCFDCEPELSGSHCVRSAATNPFQLINNSLPFNKYAYLTTHNAYAIVGEPSHTGIPRVTFDNQEDTVTDQLNNGVRALMLDTYDFKGDVWLCHSSGGKCNDFTAFEPALDTFKEIEAFLAANPSEIVTLILEDYVHAPNGLTNVFNASGLLKYWXFPVSRMPPSGQDWPLVSDMVATNQRLLVFTSVSSKQSAEGIAYQWNFMVENNYGDDGMDAGKCSNRAESAPLNDNTKSLVLMNYFPSVPAKFTACLQHSQSLVDMVSTCYGAAGNRWANFVAVDYYKRSDGGGAFQATDLLNGRLLCGCQDIRACSQGSGVVCSA

SEQ ID NO: 351285 - protein, 156 aa, Zea mays
  unsure (1)..(156): unsure at all Xaa locations
  Clone ID: MRT4577_83539C.1.pep
MGSLANNIMVVGAVLAALVVGGSXMPPKVPPGPNINTKYIXGSWXTTSRTWYXQHTGAAAPDXCDACGINKRNLTPYTRMTPRGNVDIFKDHQGCGSWXQVRCEEKPECSRNPRTAVISHMNYQAIAPXTSELKGXDFGYLAKPGLNHQHPHCGIM

SEQ ID NO: 351286 - protein, 61 aa, Zea mays
  Clone ID: MRT4577_8353C.1.pep
SWPNHMPARLHLEQSQRVSVMGTRATGTTFMVNQYRYHELTRTHMHLPNIVSICAFERPGA

SEQ ID NO: 351287 - protein, 54 aa, Zea mays
  Clone ID: MRT4577_83540C.1.pep
ASEWSREKTTQNVVFTGPFSLGNPGPDPLGSLFLRAWGIWQRNFCLETPVTNTF

SEQ ID NO: 351288 - protein, 221 aa, Zea mays
  unsure (1)..(221): unsure at all Xaa locations
  Clone ID: MRT4577_83541C.1.pep
SVFQDKLLGGLLSAAFDESSCQSRYKSNLYRKPSPFPLSPYLVQKLRKYEARHKKCGPRTKRYRRAVKLLKAGRNTDDSECKYVVWFPCNGLGNRMLTIASTFLYALLTDRVLLVHVPAEQEGLFCEPFPVSSWVLPGSFPQNNPHKLHIGAPESYANMLKNNIVAASVRLPXTWSSSXLKLSDXTSXCDEDQVTLSKFNWMLLKSDSYFXPGXLFLTPMF

SEQ ID NO: 351289 - protein, 40 aa, Zea mays
  Clone ID: MRT4577_83542C.1.pep
RTMSLNWSPVRKMRAFRALLWHAHVSFVSFARAPSPRALD

SEQ ID NO: 351290 - protein, 478 aa, Zea mays
  Clone ID: MRT4577_83543C.1.pep
GKPGRGLLSAAFDESSCQSRYKSNLYRKPSPFPLSPYLVQKLRKYEARHKKCGPRTKRYRRAVKLLKAGRNTDDSECKYLVWFPCNGLGNRMLTIASTFLYALLTDRVLLVHVPAEQEGLFCEPFPGSSWVLPGSFPQNNPHKLHIGAPESYANMLKNNIVRNDDGPGAPASSSLPPYVYLHLEQFQLKLSDNVFCDEDQVTLSKFNWMLLKSDSYFAPALFLTPMFEAELAKMFPRREAVFHHLGRYLFHPTNRVWGIVRRYYEAYLARVDEKIGFQIRIFPEKPIKFENMYEQLMRCVREQRLLPELGPAEPPTNATADAGDGKVKAVLIASLYSGYYEKIRGMYYESPTKSGEIVAVFQPSHEEQQQYTSNDHNQKALAEIYLLSYCDKITMSAWSTFGYVAYSFAGVKPWILIRPDWNRETSDVACVRSTSVEPCLHSPPILGCRAKTDVDVAAVKPYVRHCEDVGFGLKLFDS

SEQ ID NO: 351291 - protein, 56 aa, Zea mays
  Clone ID: MRT4577_83544C.1.pep
LPGAYYGGGHLSLRLFHLLLTSAAWVPDESQVTLNSAICVLSTVLIMKFRIGGSIC

SEQ ID NO: 351292 - protein, 62 aa, Zea mays
  Clone ID: MRT4577_83545C.1.pep
WSSGQWPDQDNQPTVLNNLCGQMHLHSIICGGVPAHNKLPSVSYYERRFGIQNYMTHILWGP

SEQ ID NO: 351293 - protein, 115 aa, Zea mays
  Clone ID: MRT4577_83546C.1.pep
GPPVFQNRVFSRPFWKWAPLRGGSPKAALFLTSPFLKNLPHGPFPFWRAPFKKLRGGPNGALIRGRKTGFFCLKKKKKGFFPLKTPFPICFGPGFFGGPPLTRFLPLPLKIWGPP

SEQ ID NO: 351294 - protein, 153 aa, Zea mays
  Clone ID: MRT4577_83547C.1.pep
SRPAGPGYLRNRSERERESILPSMKGEQERIVRRVAAHTAASAPHDSSTEGHGSTARRTESSRIDSLCTTAIGDNVVFHVALQWRRDENTLGGSLVLAPVTIEIGDATSYLLVVLDDIPRTDNSYMKAATDHHVVSRGASRSSDRCCKASMDA

SEQ ID NO: 351295 - protein, 58 aa, Zea mays
  Clone ID: MRT4577_83548C.1.pep
GTSFARSIEYSLRAYTGYFFITTVTMSGGKTMMCCYIKTDRRRYLSVKYEKKKKKGRT

SEQ ID NO: 351296 - protein, 201 aa, Zea mays
  unsure (1)..(201): unsure at all Xaa locations
  Clone ID: MRT4577_83549C.1.pep
MVTAPCSDGEEDDGRMWHRKFHDPKHRSLCFLPRKRSSRHRGIAKPFPSDDPQKAGHLTAXFLGYKGXMTXFVREGEKAESKLHKNETCERCSIIEXPPLVIARIVXYVYTPRGLRTINXSVWAPHLNQQPRTTLYKNXWRHNHKKAFTKHVLEYENDAGKKEDQLHILRRSKXILLTVIAAVAHTHNKNMNDVIHKNDHL

SEQ ID NO: 351297 - protein, 123 aa, Zea mays
  unsure (1)..(123): unsure at all Xaa locations
  Clone ID: MRT4577_8354C.1.pep
RSAVKLAVLAPPLGTRGXGAGRKLRPERPEWAVKPQKAIETGKKPXRGSVRKGIVPEKIGYQAKQTNSAILNCAPSHLLNNAKKTADIVPNDGCLNYIIENDEALIAEDESQRVIAVGDVNQR

SEQ ID NO: 351298 - protein, 77 aa, Zea mays
  Clone ID: MRT4577_83550C.1.pep
KLLLLLSMVGSPGISPSNVNTMLGTVKAHKLAFTGMHGRLGRCAIVYALLHGVSRLSLFLLLTPGSTWNNLLVKLIC

SEQ ID NO: 351299 - protein, 99 aa, Zea mays
  Clone ID: MRT4577_83551C.1.pep
GLKLFYWLKIKPKPAELTNNKKVFGGQTEKKMSVCKEKMGPGLGFNPYGPIPIWDGLGGHPLFFLGELSPHEGRRGPRKNGCQGFPNQFCFLRAPHFFH

SEQ ID NO: 351300 - protein, 123 aa, Zea mays
  unsure (1)..(123): unsure at all Xaa locations
  Clone ID: MRT4577_83552C.1.pep
DLSRKKKKKKKKKKKKKKKKKKKKKKKKKKKKKKKKKKPKKKKKKSPPRRPLKGKIPQPGGRLKGNPTRDQTWGKKGKKXSRGKMVSRKKSQKKKNRKKKGENPGGPKGGPTPINGGGPNAPF

SEQ ID NO: 351301 - protein, 127 aa, Zea mays
  Clone ID: MRT4577_83553C.1.pep
MHSPIFYFHQGPQDAKVTMLGLVPSIVRTWKNTDCTAGLDWSSIRCFSSSGEASSVDDYLWLMGRAGYKPVIEYCGGTEIGGGFVTGSMLQPQALSAFSTPAMGCNLFILDSSGNPLPQDSVGIGEL

SEQ ID NO: 351302 - protein, 94 aa, Zea mays
  Clone ID: MRT4577_83554C.1.pep
GDKWPLGGNQGNSCSRGKIEIGYNSKKNTTRKQKGKSWGGQRRELTQINWVGLTASFRVEKPDVPGALMNGPTPGKRGLAYGGVFRFQVNGKGA

SEQ ID NO: 351303 - protein, 721 aa, Zea mays
  unsure (1)..(721): unsure at all Xaa locations
  Clone ID: MRT4577_83555C.1.pep
MATTLHKPLGAITVDDLAAAAPGSDATALHAALRRALDSHGPTEVWGELCRSVLCPSVPFAVHRMLYYGCFAGFPSPTPPAWTPDPKEAVLTNVGRVLEARGRDFIGDAYKDPITSFPDLHKFSNENPEAYWKMVFEDMGIQFSVEPSCIWRENTAYPGGEWLPGAELNAAANCLTAKPGRSSDGPAIVWRDEGKDSDPLNFMSLEELRKKVCLVANAIDALELPKGSAIAIDMPMDVNAVVIYLAIVLAGYVVVSIADSFAAPAISMRLKLSEAKAIFTQDYILRDDKELPLYSRVVEAKAPMAIVIPVRGSLLIKGLRVDDLSWQDFLGRVNYTEAENYTAVNQPAYAFTNILFSSGTTGEPKAIPWTHITPLKAAADGWCHMDIRKGDVVAWPTNLGWMMGPWLVYASLLNGASMALYNGSPNSSGFAKFVQDAKVTMLGLVPSIVRTWKNTDCTAGLDWSSIRCFXSGEASSVDDYLWLMGRAGYKPVIEYCGGTEIGGGFVTGSMLQPQALSAFSTPAMGCNLFILDSSGNPLPQDSVGIGELALDPTLFGSSTTLLNADHQEVYFNGMPEWHGKILRRHGDEFERTSDGYYRAHGRADDTMNLGGIKVSSIEIERICNRVHDAILETAAIGVPPVGGGPEQLTIAVVLKXPELSNXDLNQLKLACNMALKKLNPLFKVSSVVIVPSLPRTASNKVMRRVLRKEFSQAAQAKHSKI

SEQ ID NO: 351304 - protein, 239 aa, Zea mays
  unsure (1)..(239): unsure at all Xaa locations
  Clone ID: MRT4577_83556C.1.pep
MATTLHKPLGAITVDDLAELNAAANCLTAKPGRSSDGPAIVWRNEGKDSDPLNFMSLEELRKKVCLVANAIDALELPKGSAIAIDMPMDVNAVVIYLAIVLAGYVVVSIADSFAAPAISMRLKLSEAKAIFTQDYILRDDKELPLYSRVVEAKAPMAIVIPVTGSLLIKGLRVDDLSWQDFXLGRVNYTEAENYTAVNQPADAFTNILFSSGTTGEPKAIPWTHITPPKAAAXDGWCHM

SEQ ID NO: 351305 - protein, 51 aa, Zea mays
  Clone ID: MRT4577_83557C.1.pep
KVWFGLNSQEKGGIVVCVKPKHGGSTNNRFGLPPSLGQKPCANTIYVCMGH

SEQ ID NO: 351306 - protein, 63 aa, Zea mays
  Clone ID: MRT4577_83558C.1.pep
MDHPNKIPHGNDEKKKEHEKQVEQSKTDRTREKNPIKEPEPKPKNEFEVPKPIPRMSRQGMRE

SEQ ID NO: 351307 - protein, 105 aa, Zea mays
  unsure (1)..(105): unsure at all Xaa locations
  Clone ID: MRT4577_83559C.1.pep
PFQLHLLRGTAPPAYTSCRVGRSPPPPPRRTDLPRRKVTADASSSXQVSLCCSRCGRWLASPTTSLSRSSPVSPSSRSAAACASPGPGGASSRTRTTAGSCPRPS

SEQ ID NO: 351308 - protein, 76 aa, Zea mays
  Clone ID: MRT4577_8355C.1.pep
SYFTFTPFRCRSPSRPSAGLRMSEEENADVSTNSCRIHSTIRSSRTAYCDRSRESGPPKVQMTRKLKQINTTRKKR

SEQ ID NO: 351309 - protein, 122 aa, Zea mays
  unsure (1)..(122): unsure at all Xaa locations
  Clone ID: MRT4577_83560C.1.pep
LVVVCVIRGHRSVSANLSLAQCYISVQLQLAQKXALHQLAEYIXLRDFFHKLSQDYSHLLADHDGQRKKVLRSNLSARLIWXLPCTAQLRPPPSLXYICASQTQAXIITIVRGWKTTNPEDI

SEQ ID NO: 351310 - protein, 67 aa, Zea mays
  Clone ID: MRT4577_83561C.1.pep
VMQAYEDVRLDVMEHLESLIVGQVIGGCMVFEVIPIHEIVRAHVEDAHLDEIVLKWEDFVSDVEHAC

SEQ ID NO: 351311 - protein, 155 aa, Zea mays
  unsure (1)..(155): unsure at all Xaa locations
  Clone ID: MRT4577_83562C.1.pep
SIAPDVRKTQRRRPCDDHAAFAHPARLLPAPRLLHGHGPHRQXPLRPLDLEATRTAVATVERVLMEGRPRPGGIGLARVRRWRPRGGQRNQKRVWWVVDARPMVRGCGRGVSRSRGGEDARPMGPACHGNHYGKQASYATEPTADAPAPAQRTNK

SEQ ID NO: 351312 - protein, 746 aa, Zea mays
  unsure (1)..(746): unsure at all Xaa locations
  Clone ID: MRT4577_83563C.1.pep
LEPAGKIVPSSLIFLLTSVAALAVAAPPATATPWPPRCTSPWEAITVDDLAAAAPGSDATALHAALRRALDSHGPTEVWGELCRSVALSVCPLRRPPELYYGCFAGFPSPTPPAWTPDPKEAVLTNVGRVLEARGRDFIGDAYKDPITSFPDLHKFSNENPEVXSYYYCTFDSVCCLPTRPSKERLWQFVSATRRGSCYIITSMDHPXRSPTATTRRRRSTRSRSSKARPTGRARRTQSRSRSXQAEERIRSPKTHPENEPPRHVEGVVISSTLIRLGLGDQCIHCSIDIYRSYIGPRLRSSGPAAIRXVPLRTEKMVXGYGYPIQRRAILHLEREHYISWXEWLPDAKLNAAANCLTAQPGRSPGTTGKMMFDNFLTCLAHMQXRETKAIPWTHITPLKAAADGWCHMDIRKGDVVAWPTNLGWMMGPWLVYASLLNGASMALYNGSPNSSGFVKFVQDAKVTMLGLVPSIVRTWKNTDCTAGLDWSSIRCFSSSGEASSVDDYLWLMGRASYKPVIEYCGGTEIGXXFVTGSMLQPQALSAFSTPAMGCNLFILDSSGNPLPQDSVGIGELALDPTLFGSSTTLLNADHQEVYFNGMPEWHGKILRRHGDEFERTSDGYYRAHGRADDTMNLGGIKVSSIEIERICNRVHDAILETAAXGVPPVGGGPEQLXIAVVLKXPELSNXDLNQLKLACNMALKKLNPLFKVSSVVIVPSLPRTASNKVMRRVLRKEFSQAAQAKHSKI

SEQ ID NO: 351313 - protein, 156 aa, Zea mays
  unsure (1)..(156): unsure at all Xaa locations
  Clone ID: MRT4577_83564C.1.pep
MRTVASLTDDLLVEILSRLPVKSLRRCMCVSRTWQGTISHPHNRRQLPQTLEGFFYVPVSKPAXLPVSPTSPGQAALWSLLSXFLPQHQSIFLLSCCNGLLLCRCWEGQDDFHYVVCNPATEGWVRLPGSVDAGTKCMARLGFDPVVSHQSMRLSS

SEQ ID NO: 351314 - protein, 87 aa, Zea mays
  Clone ID: MRT4577_83565C.1.pep
KVGILYLSTASTMADQGMFPLLMFACSYLHVIAILYNFSLNASQSSYIFPFFSPYLSINYSYMYYKTQLFIPIVSNMQSYHATYLYH

SEQ ID NO: 351315 - protein, 95 aa, Zea mays
  Clone ID: MRT4577_83566C.1.pep
WASERRRNAARNAALANSRINALHDHLKMALDCFFAVWVVVGNVWIFGGRSSADDAPNLNRWRIEFLTMRCIEYATPGILCAMRGCCLPCIICSM

SEQ ID NO: 351316 - protein, 124 aa, Zea mays
  Clone ID: MRT4577_83567C.1.pep
PLLFFFFFFFFFFFLVFFFFFLVFLFFCHGGIHPRGFFIYPQGPSRGSKKRGISHQQMGGRELVKPKNGEKQRDTTQEGGGGPPEKRGPDSLNFDPGHIQRPPGPKRVGRKNKGHPVQGTKGGG

SEQ ID NO: 351317 - protein, 65 aa, Zea mays
  Clone ID: MRT4577_83568C.1.pep
EGRFSINIVRDCLRTTFFQEISFFFWENELISLFKIKYPLEKWCYQTMPYIILIQALGRWVLKFT

SEQ ID NO: 351318 - protein, 111 aa, Zea mays
  Clone ID: MRT4577_83569C.1.pep
GRRQFAGGRASAETMATEKLAIKGERNPPEPRLSELGVRQGPKGGGKKSKFPGTYSAKETCYLLQGKGKGSPEGHGEEFGEIGAENLVVFPKGMSCTWDVAEAVNKHYNFE

SEQ ID NO: 351319 - protein, 61 aa, Zea mays
  unsure (1)..(61): unsure at all Xaa locations
  Clone ID: MRT4577_8356C.1.pep
RIVSLVAALLVLLALVAVSSTSSAXQESVADYSGMXAGGIKDVPANENDLELQELSCFAVN

SEQ ID NO: 351320 - protein, 50 aa, Zea mays
  Clone ID: MRT4577_83570C.1.pep
PNSAQNIPSYCLILNLSSLFLLYFPYFKTFFFFHFSFKIIPFPVNLIFFF

SEQ ID NO: 351321 - protein, 218 aa, Zea mays
  unsure (1)..(218): unsure at all Xaa locations
  Clone ID: MRT4577_83571C.1.pep
MAPVIVRVACAAMADRKPSTLAPHLMPSSPRRAQLHTSASSTLKSVPTMAYQGSSDFHEVDDDPEDPLHDVTGAYHMDSSPAKDDLRSTAYRIHERIPVMINVSRXSMQIASINNPGMXREYLPITLLADSNRLRAWLISGAEWPAIHEKRGATVQSLSGCGTISVXLKLFEXYCHKRTIXIPQLDWXNLPTVITLXAGLCRSCQRYYDPATCMPHFT

SEQ ID NO: 351322 - protein, 49 aa, Zea mays
  Clone ID: MRT4577_83572C.1.pep
YMLHSGKKYHYALDTFHNYKDINTHDSSNCKTYIYFKNTIYYDLEHIQN

SEQ ID NO: 351323 - protein, 55 aa, Zea mays
  Clone ID: MRT4577_83573C.1.pep
IPLPKTDLQCSSRGYTITHTLAISTGALASTILLIPSLSLPIRRTFNVSTTLNST

SEQ ID NO: 351324 - protein, 783 aa, Zea mays
  Clone ID: MRT4577_83574C.1.pep
MGCGQSKIDQEEAVFRCRERKRLMADAVASRNGFAAAHTGYTVRLKSTGGALSDFAQGEAPDPSLVSSHTHHAPAVATSSVSTPPGPSAASVNSPSPPPPPFADFSHSSLQRSSSTPNIPMPEPRAAAKNRPPADASIREEDEDEDEEEQDGHIKIDSDDDSDDDSDEDDDHHEHDDVSVDDMVHGQQSKRILMSSVGSSPVTPPPPPRLNHTPPTLATATPPPPVLESQMATWDYIFGPTPTPPPTLEQPAADTLWMERRDKEPVAEVKAPVAKTVVSKPAATEERPPETAVEKDKAIEEMMANLPPSKPIVRKPPKAPGPSQEAAHYQHASSMGAVEIRKGKVMVASGTASLLQIVTRLDDNFLRASESAHDVSKKLEATRMHYHSNHADSRGHIDHSTKIMHVITWNRSFKNLPDHEDLNDNFEIDDRFETHAAVLDRMLAWEKKLYDEVKAGELMKTDYQKKVSLLQKQKKRGVKLETLEKTKAAVSQLHTRYIVDMQSMDSTVSEINRLRDRQLFPKLMDLVDGMAKMWSSMYRHHRSQFLIISGIRGFEIPPIPRETTDSHYIQTCELRDIVREWHTQFEKLMDNQKAYIRALNAWLKLNLIPIESNIKEKVSSPPRLVDPPIKHLLHAWHDELERLPIELAKTAIKTFAEVISTIVHLQEEEVNLRRRCDETRRDLNRKKAQFEDWHQKYLERQTAETQNIDPVEDRKRTIEELEIRLREEEGHHLRHARQVREKSLANLRTHLPELFRNMSDFAYFCKDMYNNLRKTAALSKDEV

SEQ ID NO: 351325 - protein, 81 aa, Zea mays
  Clone ID: MRT4577_83575C.1.pep
PRSCRRFSGLPTSFSTVHAFVSTCYRVVVSLPNRCSWKTSFPQRSLTSAPNNTWYRLKLDCFSVSPFSNGSTSDDLDSVDD

SEQ ID NO: 351326 - protein, 437 aa, Zea mays
  Clone ID: MRT4577_83576C.1.pep
SNTTTSLQSLVAEVSQWREIHLGGGAAAAHGVRPSTVVAWALSFLAASVSSAGGVGGGSLFLPILNLVAGLSLKRATAYSSFMVTGGAASNVLYNLACTGGGGRGRLIDYDIALLFQPCLLLGVSIGVVCNVMFPEWLITLLFSLFLAFCTAKTCRAGVKIWRSESSGCGSRARSSRGGHSHSKEPLLPRGTSDGDAEGGGGNGAGFPWGDVALLVIIWLCFFALHVLIGDKHGKGVIRIRPCGVAYWLITFFQLPAAVAFTGYIVYAKRKKRAVHSESQEDGSKADLADAGVEALPLPTLPLAAFVTGALSGLFGIGGGLLLNPVLLQIGIPPQTAAATSSFMVLFCASMSMVQFILLGVEGVGQACVYAGVCFAGSVAGVVVIERAVRKSGRVSLIVFLVTAIMALSAVIVTCFGALDVWMQYTTGEYMGFKLPC

SEQ ID NO: 351327 - protein, 194 aa, Zea mays
  Clone ID: MRT4577_83577C.1.pep
VSPRAGFIRFPPPQLNTNSLLASPAAFSASEAASPASSAALNTIASTAASSASVSCMKVSASSKKKLSSDAWVSAASVSWRTYSAALRATASGASRAASSASVSWRTNSAIRRDKASSASNTSSSASAASVCRGRRTDSAIFRVRRCWRKMQDRLSSTSRRGLEDEQERSVQMKKTGKQEEEILGIYTPSAFSI

SEQ ID NO: 351328 - protein, 43 aa, Zea mays
  unsure (1)..(43): unsure at all Xaa locations
  Clone ID: MRT4577_83578C.1.pep
VDGIIDVFLLNLFPSLPAFPPVMRPPKRQXXAWSYDVGERCGR

SEQ ID NO: 351329 - protein, 180 aa, Zea mays
  Clone ID: MRT4577_83579C.1.pep
MAAPAPAPKQEELQPHAVRDQLPSVSYCLTSPPPWPEAVLLGFQHYLVMLGTTVIIPTALVPQMGGGNEEKARVVQTLLFVAGINTLVQSFLGTRLPAVMGASYTFVAPTISIVLAGRYSGIADPHEKFVRIMRGTRGAFIVASTLQIIMGFSGLWRIVHKLLSPLAAAPLSALGRIGLC

SEQ ID NO: 351330 - protein, 123 aa, Zea mays
  Clone ID: MRT4577_8357C.1.pep
SFLPVFLPLQRITVASAFFVGHNPPCHFQLHVDVIPRHCHASGTTSSATSTFSKRRDGLLLIDHDISVLCDTKDVLICLRPLLGSSTTDSRHSRLDRSRECQRRHSLRYSTVPDPYVSHHESR

SEQ ID NO: 351331 - protein, 121 aa, Zea mays
  unsure (1)..(121): unsure at all Xaa locations
  Clone ID: MRT4577_83580C.1.pep
ANRNTQPQPTDTAAQGTEEKDYKEPPPPPXLGSEKXTTFSFYXXXIAXLXATFLVLYISILTVMGVSKSSSNSATVGIQGITWSFRGMMFALVYCTAGISGGHINPAVTFSLFLAPKLSFT

SEQ ID NO: 351332 - protein, 529 aa, Zea mays
  Clone ID: MRT4577_83581C.1.pep
MAAPAPKQEELQPHAVRDQLPSVSYCLTSPPPWPEAVLLGFQHYLVMLGTTVIIPTALVPQMGGGNGEKARVVQTLMFVAGINTLIQSFLGTRLPAVMGGSYTFVAPTISIILAGRYSGIADPHEKFVRIMRGTQGALIVASTLQIIIGFSGLWRIVVRLLSPLSAAPLVALVGFGLYELGFPSVAKCVEIGLPQILLLVALSQYVPHLVPLLSTAFERFAVIMSVVLIWLYAFFLTVGGAYKNAAPKTQFHCRTDRSGLVGGAPWISVPYPFQWGAPTFDAGEAFAMMAASFVALVESTGAFIAVSRYASATPCPPSVMSRGIGWQGVGILLGGLFGTANGTSVSVENAGLLALTRVGSRRVVQISAGFMIFFSILGKFGAVFASIPGPIIAAIYCLLFAYVGTAGVGFLQFCNLNSFRTKFILGFSLFMGLSVPQYFNEYTSVAGFGPVHTRARWFNDMVNVVFSSKAFVGGAVAYFLDNTLQRRDGAVRKDRGHHFWDRFRSFKTDPRSEEFYSLPFNLNKFFPSF

SEQ ID NO: 351333 - protein, 106 aa, Zea mays
  Clone ID: MRT4577_83582C.1.pep
VAIYDAFLAHNCRKALEKTLAWLAPMAHNTVRWQAERNFEQQQIVMKGNVMMLQTLYFAVRETTETVLCNLLVGLNCICRYEQQQDALLECSNSLDLDDCVEWQVQ

SEQ ID NO: 351334 - protein, 77 aa, Zea mays
  Clone ID: MRT4577_83583C.1.pep
SPDILQMSGLLHLMPVNNRRKKISMLGPHTDEETSITRDRLTFLDPEQAGLHIYAPGVRPIMGGDWHYMNLSDLHSP

SEQ ID NO: 351335 - protein, 125 aa, Zea mays
  Clone ID: MRT4577_83584C.1.pep
MAAPPPKQEELQPHAVRDQLPAVSYCLTSPPPWPEAILLGFQHYLVMLGTTVIIPTALVPQMGGGNEEKARVVQTLLFVAGINTLLQSFLGTRLPAVIGGSYTFVAPTISIVLAARYSGITDPHE

SEQ ID NO: 351336 - protein, 60 aa, Zea mays
  Clone ID: MRT4577_83585C.1.pep
RKSVIGRFNHDKTRFVSLLSTRSCGLGINFTTANTVIIYDIDYNPHADIQAMNKAHKIGQ

SEQ ID NO: 351337 - protein, 529 aa, Zea mays
  unsure (1)..(529): unsure at all Xaa locations
  Clone ID: MRT4577_83586C.1.pep
MAAPAPKQEELQPHAVRDQLPSVSYCLTSPPPWPEAVLLGFQHYLVMLGTTVIIPTALVPQMGGGNGEKARVVQTLMFVAGINTLIQSFLGTRLPAVMGGSYTFVAPTISIILAGRYSGIADPHEKFVRIMRGTQGALIVASTLQIIIGFSGLWRIVVRLRSPLSAAPLVALVGFGLYELGFPSVAKCVVIGLPQILLLGALSQYVPHLVPLLSTGFERXAVIMSVVLIWLYAFFLTVGGAYKNAAPKTQFHCRTDRSGLVGGAPWISVPYPFQWGAPTFDAGEAFAMMAASFVALVESTGAFIAVSRYASATPCPPSVMSRGIGWQGVGILLGGLFGTANGTTVSVENAGLLALTRVGSRRVVQISAGFMIFFSILGKFGAVFASIPGPVIAAVYCLLFAYVGMAGVGFLQFCNLNSFRTKFILGFSLFMGLSVPQYFNEYTSVAGFGPVHTRARWFNDMINVVFSSKALVGGAVAYFLDNTLHRRDGVARKDRGHHFWDRFRSFKTDPRSEEFYSLPFNLNKFFPSF

SEQ ID NO: 351338 - protein, 137 aa, Zea mays
  Clone ID: MRT4577_83587C.1.pep
SNFRQSAQIRHLTVVNLISNSARESNKCRVVFHIWKFAAHSASANKEWPREQRPEHRRPCRSDQRRPEACARPFATTGRPRRSDLPPSPPSPPLHRRIGAEIGRSKIRVWGEEAARGNRGAPDRTPLAGLGSPARPA

SEQ ID NO: 351339 - protein, 88 aa, Zea mays
  Clone ID: MRT4577_83588C.1.pep
IRSHQLFVFHGLHTSSSGAPFLSAPDLHPLLWAPARHTEDQHGTAIGRRHLPEHRFKLTELVPKTRHVASAPPPTPCASGSRPRTHSS

SEQ ID NO: 351340 - protein, 139 aa, Zea mays
  Clone ID: MRT4577_83589C.1.pep
RTVGENKMYPGAPEEKALPRRAGRLIATPGPLGFPARKLAVTVPQLMRVRSASRPPREFPISLGTVGFTEVSSGALFLPDWEKPPISPSFHQVPSKPQGYARLPLGPVPAPTRAGRLASQTMPEAPHHPKQSLPPLQPP

SEQ ID NO: 351341 - protein, 149 aa, Zea mays
  unsure (1)..(149): unsure at all Xaa locations
  Clone ID: MRT4577_8358C.1.pep
TNQALSAGGHGGKDGRRTRRRRRGGTSGGRRAQGRXRRAAXXXXXRXXRARGAAGAFXFAPXAXRRTXXAEGXHRPGRGXXQRXSXAAAXESPHKKNQXNXTKXXXKGNXXXXAXGKTPPTXDXXTGEXXXXXXEXDAEDXNXAAXAAR

SEQ ID NO: 351342 - protein, 124 aa, Zea mays
  unsure (1)..(124): unsure at all Xaa locations
  Clone ID: MRT4577_83590C.1.pep
MMMTTSSGLRSCNDVLVTSLVGASCRAGRLAPFFLNATTSVRXTSTTEWMXGHSRPADLERSSPGDLGLDPLXLPIVPRELRRXKEIQAYYCRCDMLAIPEILVPETTGLVNWVNTHDWMLGPG

SEQ ID NO: 351343 - protein, 123 aa, Zea mays
  unsure (1)..(123): unsure at all Xaa locations
  Clone ID: MRT4577_83591C.1.pep
GGQEKRRAPXKXDNTRDYENXGXXKDAXQEDXKKAXRKAAXKNHPXKGGRPGEXKEXXQXXEXHXEPEKREKXEQXXEXAXKEGXGXXGGKHEPXDXXQXXXXXGSXXGXXGSXRGRRQRRGE

SEQ ID NO: 351344 - protein, 53 aa, Zea mays
  Clone ID: MRT4577_83592C.1.pep
GRSSRFVTNVVLRDILQFTPIMHIRVLSDLCRFRFSLKGLNMPRAVHRWSDVK

SEQ ID NO: 351345 - protein, 139 aa, Zea mays
  Clone ID: MRT4577_83593C.1.pep
FFFFCFFFFVLFFLWVGTDRSIKNKWKKGNTIHGHKRQNEENKHKPRKSTQKQENKQKNERQTTQPPTPRTAPPPRMRRGWTRKKNRHTAEPTWTQQQKPPDETNPTLKQGVRPKARHRTRTTRGRTDARAKPAPSPGT

SEQ ID NO: 351346 - protein, 74 aa, Zea mays
  unsure (1)..(74): unsure at all Xaa locations
  Clone ID: MRT4577_83594C.1.pep
EKEPKFLKNGQPGMVKMVXPLRPRGVEAFSXQYPPLGRRAARDMRQPVAAGVNKSVEKKAPAGAKVTQAAPKKK

SEQ ID NO: 351347 - protein, 65 aa, Zea mays
  unsure (1)..(65): unsure at all Xaa locations
  Clone ID: MRT4577_83595C.1.pep
LLHIFRPSQAPHLTMSSVRIGPASPFLVTKTTLGAPLATHXISPIPLKVVIFHLRPYAPTYPTPL

SEQ ID NO: 351348 - protein, 780 aa, Zea mays
  unsure (1)..(780): unsure at all Xaa locations
  Clone ID: MRT4577_83596C.1.pep
MEGRARLSLVHAAAALVVLLQLHGGAVVVASEPPYTCGAGAPPNIPFCDAGLPIDRRVDDLVSRMTVAEKISQLGDQSPAIPRLGVPAYKWWSEALHGISNQGRGIHLDGPLRAATSFPQVILTAASFNPHLWYRIGQVIGVEARAVYNNGQAEGLTFWAPNINVFRDPRWGRGQETPGEDPTMTGKYAAVFVRGVQGYGLAGPVNSTGLEASACCKHFTAYDLENWKGVTRYVFDAKVTAQDLADTYNPPFKSCVEDGHASGIMCSYNRVNGVPTCADYNLLSTTARQDWGFYGYITSDCDAVAIIHDAQGYAKTAEDAVADVLKAGMDVNCGSYVQDHGASALQQGKITEQDINRALHNLFAVRMRLGLFNGDPRRNLYGDIGPDQVCTQEHQDLALEAAQDGIVLLKNDGGAGALPLSKPNVASLAVIGFNANDAIRLRGNYFGPPCVTVTPLQVLQGYVKDTSFVAGCNSAACNVTTIPEAVQAASSADSVVLFMGLDQDQEREEVDRLDLTLPGQQQTLIESVANAAKKPVILVLLCGGPVDVSFAKTNPKIGAILWAGYPGEAGGIAIAQVLFGEHNPGGRLPVTWYPQDFTRVPMTDMRMRADPATGYPGRTYRFYRGPTVFNFGYGLSYSKYSHRFATKPPPTSNVXGLKAVEATAGGMASYDVEAIGSETCDRLKFPAVVRVQNHGPMDGKHSVLVFMRWPNATDGSGRPASQLIGFQSLHLRATQTAHVEFEVSPCKHFSRATEDGRKVIDQGSHFVMVGEDEFEMSFMA

SEQ ID NO: 351349 - protein, 59 aa, Zea mays
  unsure (1)..(59): unsure at all Xaa locations
  Clone ID: MRT4577_83597C.1.pep
XGSNGDSXGXGWTTTXXLLTEVXSEVLSALVCSYGMLVCKLLQEKXHNISAKVQEFQDQ

SEQ ID NO: 351350 - protein, 100 aa, Zea mays
  Clone ID: MRT4577_83598C.1.pep
HPEIPVHEDGGDTVRYVAKPHHKGKKHPVHSLKEEYEKKRAEEEKAKEERDAMVQAKREHREKSEAKRKELREKMFKKTRSGQPVMRYRIEHLLETALSK

SEQ ID NO: 351351 - protein, 260 aa, Zea mays
  Clone ID: MRT4577_83599C.1.pep
SKVSMAWILGLGPSLGLVRVPGIGFVYTELASGVPHIFSHFITNLPAIHSVVVFVCVKYLPVYTVPAEERFIMKRIGPKNYHMFRCVARYGYKDIHKKDDNFEKMLLDRLLIFVRLESMMDGYSDSEDFTIMEQKAERSSRSLQLIEKAGGNTLSSIGDLSYSSQDSIVPAKSPLTGNSLTRYSSQTFGDELEFLNRCKDAGVVHILGNTVVQARRDSGFVKKVAVNYVYAFLRKLCRENSVIFNVPHESLLNVGQIYYI

SEQ ID NO: 351352 - protein, 90 aa, Zea mays
  Clone ID: MRT4577_8359C.1.pep
RSHAWGTAPCFLLSSFGNQQHRKAVSPRVVPSMSVTPGLLLTKDRARGRVFIHPSPAPLGPSGPYIHQLLSTAYTFLLLTSLGQAWGKKK

SEQ ID NO: 351353 - protein, 666 aa, Zea mays
  unsure (1)..(666): unsure at all Xaa locations
  Clone ID: MRT4577_835C.1.pep
LEAGRGPWLALASVPRLRLLPPDPPASRPPRFPPPPPSRQPRDDPRPRPTKTHTHGHAPLHSLPPPAHNPNATVPSSAPPCRRSPRASTPRFSSPPPPSPRPATRLCAASGPRGVGGFRRGALASEKAAAVAVAEKAGGEGGGGEGEGPYDAIVIGSGIGGLVAATQLAAKGARVLVLEKYLIPGGSSGYYRRDGFTFDVGSSVMFGFSDKGNLNLITQALEAVGRKMRVLPDPSTVHFHLPGDLSVLVHRKYEDFINELVSKFPHEKEGILKFYDTCWTIFNSLNSLELKSLEEPLYLFRQFFQKPRECLTLAYYLPQNAGDIARKFIKDKELLSFIDAEXERFCFIVSTVNALQTPMINASMXHFGGINYPVGGVGGIAISLADGLVEKGSEIRYKANVTNIILENGKAVGVRLSNGKEFFAKTVISNATRWDTFGKLVKEELPEEEKNFQKNYVKAPSFLSIHMGVKASVLPAGTDCHHFILEDNWSNLEKPYGSIFLSIPTVLDPSLAPEGHHILHIFTTAGIEDWEGLSRKEYEEKKEVVANEIIRRLEKKLFPGLQDSIVLKEVGSPKTHRRFLARNDGTYGPMPRGKPKGLLAMPFNTTSIDGLYCVGDSCFPGQGVIAVAFSGIMCAHRVAADIGLEQKSPVLDAGLLGLLRWLRTLA

SEQ ID NO: 351354 - protein, 100 aa, Zea mays
  unsure (1)..(100): unsure at all Xaa locations
  Clone ID: MRT4577_83600C.1.pep
KSKEWKKHRLHQVTHDKKCMDSLXSSELASYDLMQPEYAGLINTVFDKNDKTSNHIVLKLQRQNCRDYSHHTIKRCNDFDNGGDQNGEGASLCEASRARV

SEQ ID NO: 351355 - protein, 93 aa, Zea mays
  Clone ID: MRT4577_83601C.1.pep
HARTRGARYVPKPHHKGKKHTVHSLKEEYEKKRAEEEKAKEERDAMVQAKREHREKSEAKRKELREKMFKKTRSGQPVMRYRIEHLLETALSK

SEQ ID NO: 351356 - protein, 93 aa, Zea mays
  Clone ID: MRT4577_83602C.1.pep
NPSTIQIVKGGVKAQTRQALKTLKAVVKAAGASTPSVLKTTVFLKNMGDFAKVNPIYEEFFAPHKPARSPVKVGCLPKNALVEIECIAAVTEA

SEQ ID NO: 351357 - protein, 73 aa, Zea mays
  Clone ID: MRT4577_83603C.1.pep
SNSRARRQSVLVSNLIDAPRTSCSYELTSYGSSQPSTLIFLFSQRSSRRKEWNSSSYSSMRRWGSHMLPMSGT

SEQ ID NO: 351358 - protein, 105 aa, Zea mays
  Clone ID: MRT4577_83604C.1.pep
THSSSSSYSTPRSKRRLSQSRLALLFDPSSVPGISIDEQDFSGCGGLLLLDKSERKGCFLTRSPMARAGARARAGEGGYKVPAPGRGLSHRMVVASPGRRNAYGP

SEQ ID NO: 351359 - protein, 339 aa, Zea mays
  Clone ID: MRT4577_83605C.1.pep
MTSASTFLSLRLPTPSHATSSPSFPPSLLRQARGGVASSTLVARAGGPTGAAGAPSPLFNPRGDPFLSTLAAASPEDLAAAAGGERRGEDHLPFLEIFQNTKLMASPAQVERSSSSYSQHRPRRPPPDLPSLLLHGRIVYIGMPLVPAVTELIVAQLMYLEWMNSKEPVYIYINSTGTARDDGEPVGMESEGFAIYDAMMRMKTEIHTLCIGAAAGHACLVLAAGKKGKRYMFPHAKAMIQQPRIPSYGMMQASDVVIRAKEVVHNRNTLVKLLARHTGNPPEKIDKVMRGPFYMDSLKAKEFGVIDKILWRGQEKYMADMLSPDEWDKVAGVRHPDLM

SEQ ID NO: 351360 - protein, 94 aa, Zea mays
  Clone ID: MRT4577_83606C.1.pep
TKAACFYARSLVVGVASAEKLEMYFYGVMRRHATMTYGEGPVDEHFSFTKAACFYARSAFLLLEPLEEVAAMSTSITSSSLSSSLSSLPASAGS

SEQ ID NO: 351361 - protein, 44 aa, Zea mays
  Clone ID: MRT4577_83607C.1.pep
MPAPVGRLLLLRSAVAVGLALPVAPDIKNDAFREAPPSPIMVPQ

SEQ ID NO: 351362 - protein, 104 aa, Zea mays
  Clone ID: MRT4577_83608C.1.pep
LNLRICRHKVTINKNSITICLISHAKKQLAYYSHMQHKKSTSMSNKRRCAANWCPTSLTDVRSCPTGLCAANCYPPESLMASARSVSGMSYETMRKKLLSDKHT

SEQ ID NO: 351363 - protein, 64 aa, Zea mays
  Clone ID: MRT4577_83609C.1.pep
AGFRKSLNPQPNSLTTSIATPSHCIPPSSLLVIMLPLMCTALILVHCTDANYLKTCVYKNTFMS

SEQ ID NO: 351364 - protein, 77 aa, Zea mays
  Clone ID: MRT4577_8360C.1.pep
VKRITSKTAGSIAFQSMLGPSPGRLTCRFQLRTEWSSVLVSVDASKPTKALCGRWSLRLRATPSMAACPARPPPPAR

SEQ ID NO: 351365 - protein, 56 aa, Zea mays
  Clone ID: MRT4577_83610C.1.pep
HALLPRRRRRIPAIHYQASVVSPLSATPRWAQKRRTNARARLISRWIWVCRVTCTL

SEQ ID NO: 351366 - protein, 38 aa, Zea mays
  Clone ID: MRT4577_83611C.1.pep
LRENRTAFQTSVPQIRGDSAIWLPFNLLTYSVIKYLQN

SEQ ID NO: 351367 - protein, 93 aa, Zea mays
  Clone ID: MRT4577_83612C.1.pep
RTRGGAYRGTSGGKAMLISGYSDGKCQVPVVASAQKPEACATMGAMTHSFITAVERELEGVTYGRLLTSMKAIMTNFGGCAVQGPYWRRRGRP

SEQ ID NO: 351368 - protein, 108 aa, Zea mays
  Clone ID: MRT4577_83613C.1.pep
KPPLRSEQLKGQNKVWEGLLGGKGEHGPTGFFTYGGKGLQTKPGGSKKDYLNGGTKGGHFFSQGKKGTSGPGFWFSTRKDSLDFKFHKRGLFGRVIWPKFSIKQQQRP

SEQ ID NO: 351369 - protein, 60 aa, Zea mays
  unsure (1)..(60): unsure at all Xaa locations
  Clone ID: MRT4577_83614C.1.pep
ILPFFPFFLXPLXLLLVGLFSLWGDKNLHPFFQLYFPFNHLLTPNHQGKVRETLPFLTPY

SEQ ID NO: 351370 - protein, 67 aa, Zea mays
  Clone ID: MRT4577_83615C.1.pep
NKGALFLSLRFELFPSFKGCCSRICFFQYLGKACFPRFSKKKKKKKKKKKKKKKKKKKKKKKKKKKK

SEQ ID NO: 351371 - protein, 198 aa, Zea mays
  unsure (1)..(198): unsure at all Xaa locations
  Clone ID: MRT4577_83616C.1.pep
MLWVDKHRPKTLDKVIVHEQVAQNLKKFVAEQDCPHLLFYGPPGSGKKTLIMALIKQMFGAGVEKVKMENKTWKIDTGTRTFDLELAMLSSSHHVEMNPSDAGFQDRYVVQEVIKEMAKSRPIDAKGKRAFKVLVLNEVDKLSREAQHSLRRTMEKYSASCRLILCCNSSXKVTEAVKSRCLNVRVNAPTEDQIVQVL

SEQ ID NO: 351372 - protein, 66 aa, Zea mays
  Clone ID: MRT4577_83617C.1.pep
GYPPAGYPPAGYPPPAQGYPPQGYPQQGYPPQYAQPPPQQQQSSGPSFMEGCLAALCCCCLLDACF

SEQ ID NO: 351373 - protein, 71 aa, Zea mays
  unsure (1)..(71): unsure at all Xaa locations
  Clone ID: MRT4577_83618C.1.pep
MRSKDVERDIRFELLARLCPNSTGAEIRSVCTEAGMFALRAWRKIATEKDXLRSVNRSQSYAXFSATPATD

SEQ ID NO: 351374 - protein, 404 aa, Zea mays
  Clone ID: MRT4577_83619C.1.pep
MASAATTLLKSSFLPKKAEWGSKPQLVAAHPRPATVVVSMVARASAYADELVQTAFAILLIIFLQKTIASPGRGILAMDESNATCGKRLDSIGLENTEANRQAYRTLLVSAPGLGQYISGAILFEETLYQSTVDGKKIVDVLSEQGIVPGIKVDKGLVPLAGSNNESWCQGLDGLASREAAYYQAGARFAKWRTVVSIPNGPSQLAVKEAAWGLARYAAISQENGLVPIVEPEILLDGEHGIERTFEVAQKVWAETFFYMAENSVMFEGILLKPSMVTPGAECEEKATPEQVAEYTLRLLRTRIPPAVPGIMFLSGGQSEVEATQNLNAMNQSPNPWHVSFSYARALQNTCLKTWGGRPENVKAAQDALLLRAKANSLAQLGKYTGDGEAAAAKEGMFVKNYSY

SEQ ID NO: 351375 - protein, 123 aa, Zea mays
  Clone ID: MRT4577_8361C.1.pep
PTLSYITAEVRVLLLLLLIVLDHSYIHDDYYDINYQVHLMFPLSYYDQTTSRITKHTTGGASNIYFYIKLYTIHNTTTNTKVNRFSNKSFYDPNLYTSIQCQNNNSSNITCPTNNYYINWNNA

SEQ ID NO: 351376 - protein, 53 aa, Zea mays
  Clone ID: MRT4577_83620C.1.pep
PDAAAYNALIDALVDKALIDMPRKYDEEMLAKGLSPKPRKELETKLLAADESQ

SEQ ID NO: 351377 - protein, 76 aa, Zea mays
  Clone ID: MRT4577_83621C.1.pep
PIAIGFIVGANILVGGAFDGGSMNPPVSFGPALVSWEWGYQWVYWVGPLIGGGLAGVIYELFFFSHTHEQLPSPDY

SEQ ID NO: 351378 - protein, 62 aa, Zea mays
  Clone ID: MRT4577_83622C.1.pep
LSTFSCTFKETWLVTKTFPLLKLWLLSLRKVPFTVVMQHKHEVELVRAYDKPFPDHDNVLIN

SEQ ID NO: 351379 - protein, 119 aa, Zea mays
  unsure (1)..(119): unsure at all Xaa locations
  Clone ID: MRT4577_83623C.1.pep
HMLTSQYVHRWYHEDVGITLGSLXPGCIATMGLYREHIPLFRVLFPQLHKFVTKGXVSEQESGNRLGQVVMTTSLTKLGVYWSCNKALVSFXSHLWQKTSDPEKGKKLWQIREKLVGYA

SEQ ID NO: 351380 - protein, 54 aa, Zea mays
  Clone ID: MRT4577_83624C.1.pep
RPNKQHKKHNFLPTIQHKQRRGFIIFGRSARVPTATIKPQCSQAHINLLLPSYL

SEQ ID NO: 351381 - protein, 238 aa, Zea mays
  unsure (1)..(238): unsure at all Xaa locations
  Clone ID: MRT4577_83625C.1.pep
ESLQALLPRAGRLEEGQRVQLYTSGLLPPLSHQVRIHAPETLAAAMSLARALELVELDRTTPXPGKAAARALGPPPAPHPGVLAALPTPIQQAPVVQALPAPXGTATGNTSATXPRGGGKRLSTEEQVERRCLGLCYNCNEPYSRGHNRVCRRIFYTDDVELVEDEPAEEAPVYSLHAVAGVPVGGTLQIEVQVGAATLIALIDTGSTHYFIGEVAAQRAGMPIAPRLTATVANGEQI

SEQ ID NO: 351382 - protein, 88 aa, Zea mays
  Clone ID: MRT4577_83626C.1.pep
GLSSKYLKHETVDPEVAFLSDLSGGIGSGAIDRIVVVLLVVQKLLFIDVVIFGLSNHVWICRLESGPSVGELGGDGCGRGRVGLPLHD

SEQ ID NO: 351383 - protein, 51 aa, Zea mays
  Clone ID: MRT4577_83627C.1.pep
VTFPRIRCYISSLKFTKLNRLSTTFTTGKTRKTTELTSTLNDMQHYPSLRR

SEQ ID NO: 351384 - protein, 63 aa, Zea mays
  Clone ID: MRT4577_83628C.1.pep
VNLPPAHILLQTKTEEVVTNASGQNRSAGTTRLTSLYPFILSRRERRPVVSAGFAKKREPTRP

SEQ ID NO: 351385 - protein, 62 aa, Zea mays
  Clone ID: MRT4577_83629C.1.pep
GKNHFFGFAPLKVGGLCIFLAFAFPLLGFVKPRKLGGPPFFFWDQPPSGRLNVFEPPVSHPL

SEQ ID NO: 351386 - protein, 144 aa, Zea mays
  unsure (1)..(144): unsure at all Xaa locations
  Clone ID: MRT4577_8362C.1.pep
MAGGLSQCDGPLGRRRPSVGRGGRGAEAPVASLDFDLEALSHNGGDGRLGLLGFQVSSETYCVNERLLWDYVELLSRSWNELGXKLNLYHXGVKAGHVTYCXVSNPGLGELWFRLIEKSXDVEGSKSSVDMNAWLGQAIYRVGE

SEQ ID NO: 351387 - protein, 107 aa, Zea mays
  unsure (1)..(107): unsure at all Xaa locations
  Clone ID: MRT4577_83630C.1.pep
GFHILKTVKTMGIFLSPRTKLELGGPRGGYFLETNPGPFHLVPQKNGGGWPPMFLEKAPAAGPYFLRPGICLQRFVHVFSPQKKFFVWGKKRDXXPQKGTNLKKKNK

SEQ ID NO: 351388 - protein, 58 aa, Zea mays
  Clone ID: MRT4577_83631C.1.pep
MGAAGVFASQLRITLSRSKPKPVCLRAAGLPLAKAFAGSGELLARAASSALAGDSPVH

SEQ ID NO: 351389 - protein, 48 aa, Zea mays
  Clone ID: MRT4577_83632C.1.pep
RLLTHILAHGCCRYPHPTCDQRPSTNLPKLVHNSNKLHRSSCHYLTTP

SEQ ID NO: 351390 - protein, 176 aa, Zea mays
  unsure (1)..(176): unsure at all Xaa locations
  Clone ID: MRT4577_83633C.1.pep
PLTMASDELAKAVEPRKKGNVKYASMCAILASMASVILGYDIGVMSGAAMYIKKDLNITDVQLEILIGILSLYSLFGSFAGARASDRIGRRLTVVFAAVIFFVGSLLMGFAVXYXMLMAXRFPPGVGAALLGLTPPRLPPPLPPPPPPPPPPPPPPFPPPPPPLPPPPSPPPPPPP

SEQ ID NO: 351391 - protein, 131 aa, Zea mays
  unsure (1)..(131): unsure at all Xaa locations
  Clone ID: MRT4577_83634C.1.pep
PLTMASDELAKAVEPRKKGNVKYASICAILASMASVILGYXPRTLSFTVKIFSFFLLLRVRRXFFFVLLFTNAVDIGVMSGAAMYIKKDLNITDVQMMILIGILSLYSLDGSFSGAXTSERFERTLTVMVS

SEQ ID NO: 351392 - protein, 265 aa, Zea mays
  unsure (1)..(265): unsure at all Xaa locations
  Clone ID: MRT4577_83635C.1.pep
RCCRSSVTGTSQQLHPKLLSDTEKFKSIFRDISDDEDDPLDHALDNYRRPQVLSRKPCILVPKRQVVQLPVPVXKKTRFWQXRVTSTRRLQPPKLGSWFRNILEMDYFAVVGLSSPEIVRKPALKEVPVCFDSPAQYVEIFQPLVLEEFKAQLQNAYVETPPDDMMCGCVSILAVERVDDFLIVRARPEHSQSIKFRGCTENDLVLLTKDPLKNQGQQVHVLGKVERRESDKNKALIFVMKFFLSSDNARLNKXERFLVERSKWS

SEQ ID NO: 351393 - protein, 73 aa, Zea mays
  unsure (1)..(73): unsure at all Xaa locations
  Clone ID: MRT4577_83636C.1.pep
CYHIIFFFXFNISFNFLLXFILFIFLLLYLFIFXYFFIFIFFFFLFYLFLLFIYLFFFLLFIXYIFLFFFYFF

SEQ ID NO: 351394 - protein, 263 aa, Zea mays
  unsure (1)..(263): unsure at all Xaa locations
  Clone ID: MRT4577_83637C.1.pep
MLRPASIFALGALLFLSLLDSVSAATAGCGKTPRLNSGVHTITVNNKQRRYTLRVPQNYDNKRQYRFIFGLHWLNGDMNAVASGAAPYYGLAALAGESSFFVAPHGLNRGWGNQNGEDIAFLDAVRKQIDDEFCVNEKLRFSLGFSYGGAMSFSLACSKAADFRGIAVLSGATLSGCAGGNTPIAFYGQHGVKDSVLPISSGKQIRDRFVQLNGCQSKNAPDPSPNSRQRVKTVYDGCKYPTQWTSFDGDHVAXPGDAGNDGA

SEQ ID NO: 351395 - protein, 163 aa, Zea mays
  unsure (1)..(163): unsure at all Xaa locations
  Clone ID: MRT4577_83638C.1.pep
IFTFWGEKKKNRGGTLAKQEGGTSKHXGGGGKFLKKGPRPPGKPENRPKLGQRPQTDCETQPKGGGERNPKQGKAPPVGGGGPENLGGGGENHTGGGGNPPKGEPKXPSSLGPGPGTGNGGPGPXLRGPGPQPQKPGGPWPKRGRRAPWKERQGVRESPQKPR

SEQ ID NO: 351396 - protein, 1200 aa, Zea mays
  unsure (1)..(1200): unsure at all Xaa locations
  Clone ID: MRT4577_83639C.1.pep
MATGEDEKAAGRVALHRLFVFADRTDAALMAVGAVAAVANGMVQPIMAFIFGDVIDAFGSGATDGVVRRVVQVSCWTIAGERQAARIRAMYLKAILRQDIAFFDMEMSAGQAVERMAGDTFLIQDAIGEKVGKAIQLLSTFIGGFIIAFTRGWLLALVMLSSVPPIAIAGAIVSKLMTGLSTRMQANYSDAGNVVEQTLGAIRTVVSFNGENQAITKYNMFIRKAYRSSLQEGAVNALGFGSVIAILFSSYGLAVWYGSKLIVERGYNGGMVISVIMSVMIGAMSLGQATRSVTAFAEGQGAAHRMFKIIERKPDIDIDDNTGIILEDVKGDVQLKDVYFSYPTKQEPALFATTTYDNILYGKDGATEAEVVEAAKLANAHSFISSLPEGYKTKVGERGVQLSGGQKQRIAIARAIVKDPAILLLDEATSALDVESERVVQQALNRVMRNRTTVMVAHRLSTVKNADVISVLQDGKIIEQGAHQHLIEDKNGAYHKLVSLQQQQQXDAAELIRRHLNKIVRXYLAVALSFLGFCKRSALVIFSMKGSVQNYRMKHYWVLIPDSRKKIYILYIESCNVILLHGSQCLVPTSDSSSFGQSIPAPLGSPDPTEVSGAPDTEEGATDRVKVGRSQKKASIARLFKLNKPETLVLALGSIAAVAHGTIFPIYGTLISTAIKVFYEPPQELLKGSRFWAGMFALLGACAFVLIPVQYFLFGLAGGKLVERIFIYLLTDTISLQTCVSGSICARLSTDALNVKRLVGDNLALNVQTASTIMSGFTIAMVANWKLALVITVVIPFVAFQAYAQMLFLKGLNRNAKLRYEEASQVATDAVGGIRTVASFCAESKVMDAYENKCESPRRQGMKEGVVGGLGFGFSFVVFYLTYALCFYVGARTVASQVFFVLALATSGVSQTSAAGADSAKANDSAVSIFAILDRESKIDYSSEEGVTIASVRGDVDFQKVCFKYPLRPNVQIFKDFSLRIPSGKTVALVGESGSGKSTVIALLERFYDPESGKIFIDGVELGTLKVSWLRQQAGLVAQEPVLFNDTIRANPTRPPTRPVVSEEEVVAAAEAANAHGFIAALPDGYDTVVGERGSRLSGGQKQRVAIARAVVKDPRLLLLDEATSALDVESERVVQEALDRVMVGRTTVVVAHRLSTIRGADVIAVLKDGAVLEKGRHEELMQVKDGAYASLLELSSSSA

SEQ ID NO: 351397 - protein, 48 aa, Zea mays
  Clone ID: MRT4577_8363C.1.pep
SFGRRVEELIGLFFSCGVRKTLFSPPLVMLYVKVNVIKSATLCRTRGP

SEQ ID NO: 351398 - protein, 59 aa, Zea mays
  Clone ID: MRT4577_83640C.1.pep
MQVACNHTAEAHPSGFVVSSMEVQAHTSCNRRAGYYVRETAPPLAPIPRLLDCGTGAAT

SEQ ID NO: 351399 - protein, 97 aa, Zea mays
  Clone ID: MRT4577_83641C.1.pep
MDDAGSSSSPLRVVIVPWLALGHLLPYMELAERLASRGHRVSYVSTPRNLARLPPPAPRVELVALPLPRVHGLPDGAESTNDVPAHQRELHWKAFDD

SEQ ID NO: 351400 - protein, 117 aa, Zea mays
  Clone ID: MRT4577_83642C.1.pep
APSAVGSPTAQASQPSMFQQMAATAGGVAVGSAIGHTVGHAVTGLFSGGSDSKAEVAPAAQPAYQDSTYQQSQQPQTGPCSWEIKQFLQCAENQHDLTLCQGFNEAMRQCKTANNMI

SEQ ID NO: 351401 - protein, 63 aa, Zea mays
  Clone ID: MRT4577_83643C.1.pep
KTWRIPSPLFSAWATKVCNQWSNVVRGLCVGAQFYGYVLGGESKCLKKPVGGFMPPERVVKIP

SEQ ID NO: 351402 - protein, 98 aa, Zea mays
  Clone ID: MRT4577_83644C.1.pep
LTYNRTRQAFIITELTEIISGASALDGYVDRLSSLVPLYPFAFLSHVRYYSSGGSHSTLIVSLGLDTRILTLDCRYADNDSYYARALFAYCKKNVLHL

SEQ ID NO: 351403 - protein, 52 aa, Zea mays
  unsure (1)..(52): unsure at all Xaa locations
  Clone ID: MRT4577_83645C.1.pep
HQLLNPLSEPNPXGPAFLQHQQMLPFNRFCLINPVSFRQQPIVXGALFLFLL

SEQ ID NO: 351404 - protein, 128 aa, Zea mays
  Clone ID: MRT4577_83646C.1.pep
FEHGGPLRLIGGAGSRDRGSPRLATRPSSLPLAQGEISACPVTIAGECFPPLARAAKEGKNYPEGPVSLVSRATGLLVPGIASRSPREFVNPVRLGQRGLGVVFGLQARFHACASLHSMIGCDVPQKA

SEQ ID NO: 351405 - protein, 73 aa, Zea mays
  unsure (1)..(73): unsure at all Xaa locations
  Clone ID: MRT4577_83647C.1.pep
PSAHLGGVSAHRCEGLVVFLAWGSDHDSSFTGPCSLLFMVYPVXWGGGGLCVCLSLLAGVVPTLTCSVVFWMP

SEQ ID NO: 351406 - protein, 116 aa, Zea mays
  unsure (1)..(116): unsure at all Xaa locations
  Clone ID: MRT4577_83648C.1.pep
MAGGITCGSLLQKLQLVWDEVGESDEDRDKVLYQLDQECLDVYKRKVDQATNSRDLLIQALDDSKIELARLLSALGEKAVARTPEKTSGTIKQQXAAIAPTLEQXNKKKNERKREF

SEQ ID NO: 351407 - protein, 43 aa, Zea mays
  unsure (1)..(43): unsure at all Xaa locations
  Clone ID: MRT4577_83649C.1.pep
VLFISFVVVRWQHSPRRECINSYRGSATTTWCHSKTHPTFTXX

SEQ ID NO: 351408 - protein, 64 aa, Zea mays
  unsure (1)..(64): unsure at all Xaa locations
  Clone ID: MRT4577_8364C.1.pep
FGSLTTTTVSTSRKFMSLVVSSVISGNPLSLNQSGNVEMVLLGLPIRISRKWXEIQGTERKNYP

SEQ ID NO: 351409 - protein, 131 aa, Zea mays
  unsure (1)..(131): unsure at all Xaa locations
  Clone ID: MRT4577_83650C.1.pep
TRQQQWRFIWSSRISTCCPPLPSWACLDQKFNVIFIFXDYMSDTGNLRVNDPPADLTLIQPSYGENIFGRSTCRCSEGRLDADFLDEKLGMPLLKTWKHGDSEFKQSACMGIFGETTMNSEVLSRLWASPT

SEQ ID NO: 351410 - protein, 75 aa, Zea mays
  Clone ID: MRT4577_83651C.1.pep
DDSLKNYFKQLCDNLRSLVQCTENIQSLSIMTCCSLVFMDDLGENWTPQCLQKLEVGCSAFDILPSWFGSLSSIS

SEQ ID NO: 351411 - protein, 83 aa, Zea mays
  Clone ID: MRT4577_83652C.1.pep
NPTTCLSQKKKKTLQPQTNHPWKALPIILYYVHKRLRHQCTTLTYHQHSSKIHKRNSRTYLSLETQKEVPYLPYKHTHDPTTI

SEQ ID NO: 351412 - protein, 47 aa, Zea mays
  Clone ID: MRT4577_83653C.1.pep
VKFFLIFMDIGLSFLYIYNHSSVAESCLLNYWISLSKKNRMSGSSRV

SEQ ID NO: 351413 - protein, 168 aa, Zea mays
  unsure (1)..(168): unsure at all Xaa locations
  Clone ID: MRT4577_83654C.1.pep
MATSGHAAVVVDIDEPASCGGNADAAGTRQLLPPVVLPPVTYVLRFTDLSYSVKKRGGGLGCLLPRRRPSNRLASSDAPAPAPSDTTTKTLLDGISGEARDGELLAVMGASGSGKSTLVDALAXRIARGSLRGGVTLNXEPLQGRRLRAIFAHVMQDDLLHPMLTVRE

SEQ ID NO: 351414 - protein, 105 aa, Zea mays
  Clone ID: MRT4577_83655C.1.pep
MHPKARIHADPVREVDHFDCLPDSLVLLILNKVEDVRSLGRCYAVSKRLCGLVPLVHDVYVKIDRVVAVDGDAEDALNLSSPKPRNIFSHFLKLMLFTIIKPFHT

SEQ ID NO: 351415 - protein, 150 aa, Zea mays
  Clone ID: MRT4577_83656C.1.pep
ASREKWQKWQKWHAVKQTCMAACVRSAIINQQEPQIENCNKQIEEWCTSITATAVATPTQAGKLSSKLYRPHQKPDLSPEQTRIRRRIAQVRTWAAKPLARPLGETASIGWSKHRRDAKFRQTEHGSAPACSWNIGGLPIGGLLLRIQRG

SEQ ID NO: 351416 - protein, 52 aa, Zea mays
  Clone ID: MRT4577_83657C.1.pep
QLEHKHHQNIHYSPTEPTPSQLYIAQWKTHTHTHTDGSTTHHLCLTSHNLLT

SEQ ID NO: 351417 - protein, 56 aa, Zea mays
  Clone ID: MRT4577_83658C.1.pep
SLRECQNKRTRRLKMLTPLESIHLLHLNSHIHTNSSIINIRKKSIIVYIRNLVHNI

SEQ ID NO: 351418 - protein, 78 aa, Zea mays
  Clone ID: MRT4577_83659C.1.pep
MGGLSPKLFVVPPLLVCYPGTQGGPVTMVSARKFQSQSFRFKGPCWRDAKCANVCLTKGFPGGVCKGLRPPCFCTREC

SEQ ID NO: 351419 - protein, 100 aa, Zea mays
  unsure (1)..(100): unsure at all Xaa locations
  Clone ID: MRT4577_8365C.1.pep
HPGCEKGGVRSYFFIIAAAVVAVVLALIPAGATGAXLKVGXYXKTCPXXEXLVQKAVAXXXKNNXXXXXXLXXLXXHDXXXRGXEGLVLXDFEXNNTXEK

SEQ ID NO: 351420 - protein, 107 aa, Zea mays
  Clone ID: MRT4577_83660C.1.pep
GRRCHIPLGAISRGFHHHRGGQGHGFEHPGSTQGRGEEHAGVGRVQQGRVLHHSHRQIFGRPRSWQGVLKGRAPYFLKVLLPEGSGPPPEVQKFTLFFQTLRVWCRP

SEQ ID NO: 351421 - protein, 89 aa, Zea mays
  unsure (1)..(89): unsure at all Xaa locations
  Clone ID: MRT4577_83661C.1.pep
AFFGEIQXSHKKKWKGLEERPSKHNGYDPQQGQGAEIHTPWTNIRPQNESHALLAPAPPKSSITTRLCGDMLDFRNTTPPLAPDLNNHH

SEQ ID NO: 351422 - protein, 253 aa, Zea mays
  unsure (1)..(253): unsure at all Xaa locations
  Clone ID: MRT4577_83662C.1.pep
MSSSSSSGPARGSSASAGESLRNSCNDFARTLSRLPASIMEGLSRSIPRRAPRRSHPSVPHHLLPPPPPPPQLVPDELFFFSVFEQQYGGHHPFFYGCRFADALRAARREGKLVFVYLHDPGHPYTEPFCRRTLCSDVVVEFLDANFVSWGAVSGSGEGPGMVASLQPGSFPFCAIVAPVSDESIAVLQQIEGPVSPSELVEILQRTIDEQRATFGPSGPVDQPAAARSAEEERXRRSAQRLRQEQDAAYMES

SEQ ID NO: 351423 - protein, 43 aa, Zea mays
  Clone ID: MRT4577_83663C.1.pep
GVCNSWLTQRQLKQKQWGARAPSARRCSSHGDGRMEASCRQLA

SEQ ID NO: 351424 - protein, 71 aa, Zea mays
  unsure (1)..(71): unsure at all Xaa locations
  Clone ID: MRT4577_83664C.1.pep
MANLCTYSQQQQFVAFNQLAALNSTAYXQEKQLLPFXQLAGVSPGTFLIQPQLLTLXQNAXHKDGXMLQME

SEQ ID NO: 351425 - protein, 95 aa, Zea mays
  Clone ID: MRT4577_83665C.1.pep
GRKKKYKQALGLKLSNVHRVKIPLPQYTPGFLQNFWTIYNLAHFLRKQRKRGSLNPGLGRGNLALQKGVLPVYPPEPHKHRGVYHNCIDKPIKTG

SEQ ID NO: 351426 - protein, 68 aa, Zea mays
  unsure (1)..(68): unsure at all Xaa locations
  Clone ID: MRT4577_83666C.1.pep
EPQRRRRAWRTARGGGHXTPSLFGXNGREERESKLVLRKEDEGGEERFGKSRGFWHWGSEYLCEDCNR

SEQ ID NO: 351427 - protein, 139 aa, Zea mays
  Clone ID: MRT4577_83667C.1.pep
SRLKRWSSSAPAAGIRYSDQVVEQLVEQEAEPGARPGRGSVHGSVQRVDDAEAVAVAVVVEASLVACRGRSNTRCYAGCLAGRSAWRSRAPPIPREVAFPRACSPARTASPAASRCSCSASCAAAPARAPTVPPFRTAG

SEQ ID NO: 351428 - protein, 89 aa, Zea mays
  unsure (1)..(89): unsure at all Xaa locations
  Clone ID: MRT4577_83668C.1.pep
GRSVVRILGVTDDXAAAFVRLLYSGVFGEDEDDDXRSXAVQVLVLAHAYQVPWQKRACEFSIGSLLTADSVVDVLQLAGLFNAPRLQLR

SEQ ID NO: 351429 - protein, 68 aa, Zea mays
  Clone ID: MRT4577_83669C.1.pep
PTRPPARPNTHMKNILPHITPGKYENFKKAERLQKIQNAGTLTDHHAKHIIPTTEITSYTQPLNTHIP

SEQ ID NO: 351430 - protein, 124 aa, Zea mays
  unsure (1)..(124): unsure at all Xaa locations
  Clone ID: MRT4577_8366C.1.pep
MVGAPRGRRRRLQVDNIDESDLFDDMVQEMEQILLNSGEPRESGPSTDNRVNNAHQNQHFRDGSTTASTSGTDDAYVYPLSRNLSEIDSVEVVXAKQRTXDVSFGERMVGVKEYTVYLLKSESG

SEQ ID NO: 351431 - protein, 85 aa, Zea mays
  Clone ID: MRT4577_83670C.1.pep
SYQKSNPLPPKNISTYQQQQLQQFLPAPSQLTILNPTAYLQQQQLLSSNPLTINKAPTYLQQQLLQQNIPSLTQLTFANPSSHLQ

SEQ ID NO: 351432 - protein, 70 aa, Zea mays
  Clone ID: MRT4577_83671C.1.pep
SSGNNAEYRDRWPCLFFIRRLVALPGLTIKTPNSGSNLKKKFHSGKKEQYRIRLPKQGGGKKKYSALLPL

SEQ ID NO: 351433 - protein, 54 aa, Zea mays
  unsure (1)..(54): unsure at all Xaa locations
  Clone ID: MRT4577_83672C.1.pep
MAKPRVFFDMTVGCTSAVRIEMELYAIXVPKTAENLCSLCTGDKAVGKSGKPVH

SEQ ID NO: 351434 - protein, 63 aa, Zea mays
  unsure (1)..(63): unsure at all Xaa locations
  Clone ID: MRT4577_83673C.1.pep
RGMRERDPRDLMTSCGCXPAPRAAALGWMGAGQGRVEGRSLCFACACVCGADYRLPAGLEVPN

SEQ ID NO: 351435 - protein, 158 aa, Zea mays
  Clone ID: MRT4577_83674C.1.pep
AVVQRVLSASVEVEGRIVSAIGPGLLVLVGVHEADTDSDADYICRKVLNMRLFSNDKTGKAWDQSVMQRNFEVLLVSQFTLYGILKGNKPDFHVAMSPAKAKPFYASLVEKFQRSYSADSVKDGVFGAMMKVSLVNDGPVTMQIDSPSLQGAAQSSWI

SEQ ID NO: 351436 - protein, 90 aa, Zea mays
  unsure (1)..(90): unsure at all Xaa locations
  Clone ID: MRT4577_83675C.1.pep
AEDDDDLDLFGDETDEDMEAADERADADKAFSKKKESGESSVLMDVKPWDDETDMKKLEEAGRSAQMEGLTXGASKLVPAGYGINKMTVM

SEQ ID NO: 351437 - protein, 177 aa, Zea mays
  Clone ID: MRT4577_83676C.1.pep
MRAVVQRVLSASVEVEGRIVSAIGPGLLVLVGVHEADTDSDADYICRKVLNMRLFSNDKTGKAWDQSVMQRNFEVLLVSQFTLYGILKGNKPDFHVAMSPAKAKPFYASLVEKFQRSYSADSVKDGVFGAMMKVSLVNDGPVTMQIDSPSLQGAAQSSNGYDDLVADGEARVAKETC

SEQ ID NO: 351438 - protein, 61 aa, Zea mays
  Clone ID: MRT4577_83677C.1.pep
RLIDLLRKKGVNWKALQVSLVNDGPVTMQIDSPSLQGAAQSSNGYDDLVADGEARVAKETC

SEQ ID NO: 351439 - protein, 47 aa, Zea mays
  Clone ID: MRT4577_83678C.1.pep
PRFDPRRALMMKAGTDWRKASRQYSRQRFSNLSLKLQKDGSLSAETR

SEQ ID NO: 351440 - protein, 89 aa, Zea mays
  Clone ID: MRT4577_83679C.1.pep
QGKLAKATAAPARRKRTDRDRRGRQPAVEQRAPPRPRRGREGGRLKMGERGEPEKMLARKRGNGKATKGRGGEVREGRGGVAWGMRCLL

SEQ ID NO: 351441 - protein, 230 aa, Zea mays
  unsure (1)..(230): unsure at all Xaa locations
  Clone ID: MRT4577_8367C.1.pep
MQRILSRAARRCTNSSAAFNSPHAQANAASVHSEDAPTCSNMITENDDFTWKTSFVRPMQSEXVNALRTGDRQRASLILSNFHHTKESLTKEDFSYILEYCAEAPDPLFVMETLELMEEKAIGMSKSIYRYVIRALSRGGYAKEALHWLALLGEKESTHATTPIFNIFLNACGRANLKDAENCLEILENLFLGKSEIHTVSFXELAVLQGNLPAAYDIWKECSRYYSPSI

SEQ ID NO: 351442 - protein, 64 aa, Zea mays
  Clone ID: MRT4577_83680C.1.pep
VQIYRQRQTSVPLNLRWAQPWCLDIAIDKIYKCGPLPLSPLHSVTVLTISVCVLVDNTRVRVRV

SEQ ID NO: 351443 - protein, 116 aa, Zea mays
  unsure (1)..(116): unsure at all Xaa locations
  Clone ID: MRT4577_83681C.1.pep
RLSNAFVLNNLLKDGGRCQCGLRYATGSIMSPANIAKSTLLNHTLRTNXSLMDAFRXMSHTSKRISLAKAHXNIDPCTLVMXSQGTDXRERGEDDTVFDKQSALLALAVSYIVVIN

SEQ ID NO: 351444 - protein, 81 aa, Zea mays
  Clone ID: MRT4577_83682C.1.pep
GGGKPTPVWVHICGKRQDKLSISGHGGGGTSLSGTNGFFFLATFRGLRVGAIRFFFYRQSNPPKKGRGARVLYPFSGEPQL

SEQ ID NO: 351445 - protein, 41 aa, Zea mays
  unsure (1)..(41): unsure at all Xaa locations
  Clone ID: MRT4577_83683C.1.pep
MFCNCGSSCGCGXSCKGGRKSPDLEETSTAGQATVVLGGAP

SEQ ID NO: 351446 - protein, 93 aa, Zea mays
  unsure (1)..(93): unsure at all Xaa locations
  Clone ID: MRT4577_83684C.1.pep
GGGPTPGAYPGAPRGGVPPPAGPWGGPPPPRQSXVPRRGGPPPSPAXPGPPAPVAGPPXPGVPPPXWAPPRPCPAHSWDRLPKGKKPKSPGPF

SEQ ID NO: 351447 - protein, 74 aa, Zea mays
  Clone ID: MRT4577_83685C.1.pep
VLPRSPRGGAPTQTGGVNALKGICPCHGMVQKKKSPISLINYGRGGCFRPFFMERRENFSCFKFETLGGVLLPI

SEQ ID NO: 351448 - protein, 84 aa, Zea mays
  Clone ID: MRT4577_83686C.1.pep
ERGGSPPSPLEKIGGVGETGKVSTTSLGESLPFPWGWPWAPLKKFKKSLLAKRPQPENNGATGFLKELFFSPGPPGKKSKKFLI

SEQ ID NO: 351449 - protein, 83 aa, Zea mays
  Clone ID: MRT4577_83687C.1.pep
FGPPGEKGPAPFGQCLRVKNLSTGVSLFGRVLGLFHTGGLALEFEPVFQKFGPPGPGFPIGPPPVEYPFFFFLAPNPRSIPPG

SEQ ID NO: 351450 - protein, 417 aa, Zea mays
  Clone ID: MRT4577_83688C.1.pep
MAMSASSSSRALLRRIGGALLRRSFSSSSAAAAAGYHVAGGPSYMRGAVFWEPGRPLTLEEFRMPRPKAGELLIKTKACGVCHSDLHVLKGELPFSTPCVVGHEITGEVVDHGTHTPAEIINRFPVGSHVVGAFIMPCGNCFYCVKGQEDLCESFFAYNRAKGTLYDGETRLFLRGNGKPVYMYSMGGLAEYCVVPANALAVLPDSLPYTESAILGCAVFTAYGALRHAAEMRPGDSVAVIGVGGVGSSCLQIAKAFGASQVIAVDVLDEKLQNATTLGATHTVNAAKDDAVERIKEITDGRGVDVAIEALGKALTFSQCAKSVRDGGKAVMIGLAATNVMGEVDITRLVRRQVKIIGSYGARARQDLPQIVKLAESGAFNLQNTISRKCKFEEANGAYEDLNQGKIVGRAVVEIME

SEQ ID NO: 351451 - protein, 71 aa, Zea mays
  Clone ID: MRT4577_83689C.1.pep
NDPLVRDQTYSFNNLRRHIFNGIKRIGSKALLSCGQVSVLIACMFSGGILRSDTVSDLGDYMLPLADSNHK

SEQ ID NO: 351452 - protein, 73 aa, Zea mays
  unsure (1)..(73): unsure at all Xaa locations
  Clone ID: MRT4577_8368C.1.pep
AWAIIPRALLPDIISCRQIFPVTLQASXAHSMLFQTSQEKDFPVSLDSFRRPSDLLYHRHLERYXKIFFFFFF

SEQ ID NO: 351453 - protein, 73 aa, Zea mays
  Clone ID: MRT4577_83690C.1.pep
EYDQGIISLPCGVTCMVKQPGCPANKDEPLEAHLTLTPVKGYNEQYREECQPDLSHMQKQQYLEILYMPEQLN

SEQ ID NO: 351454 - protein, 131 aa, Zea mays
  unsure (1)..(131): unsure at all Xaa locations
  Clone ID: MRT4577_83691C.1.pep
EHGVIPAPKXNANTSLDYVFQSQVKGKIPMVKPKFLIPNQLEHGNIKFHQRRVTCLEFHPTKNSVLLSGDKKGLLGIWDYVKLHEKITYDSVHSCILNSMKIDTTNDGMIYTASSDGTISCTDLDTGIGSP

SEQ ID NO: 351455 - protein, 83 aa, Zea mays
  Clone ID: MRT4577_83692C.1.pep
NFGQKEPVFNFRGHPCMELVLSQTYIFLGPPPGKNALERVLKIWPLFLIFLGRNKKKKKKKKKIVKKKKKNKKKPPALKTPPN

SEQ ID NO: 351456 - protein, 72 aa, Zea mays
  Clone ID: MRT4577_83693C.1.pep
PTRPPTRPPTRPPTRPPTRPPTRPPTRPSPISEVGRGRKFASHFENNKLLCGRCFAFLACNNTLCTRNTLVL

SEQ ID NO: 351457 - protein, 44 aa, Zea mays
  Clone ID: MRT4577_83694C.1.pep
MEEGRRGTRTLRVRNISDLAGEREVRESFSFSGEIDHVDITPDG

SEQ ID NO: 351458 - protein, 42 aa, Zea mays
  Clone ID: MRT4577_83695C.1.pep
MKKVINLLKKKKKKKKKKKKKKKKKKKKKNKKKKKKKKKVFK

SEQ ID NO: 351459 - protein, 108 aa, Zea mays
  Clone ID: MRT4577_83696C.1.pep
YSGARSPTIPPFRADISASRSLLTPIFMVLIPAYLSDREHRKRADNFRADEHGLSDVAADAPLLQWDLDRFTTRYARPRRRTSPEYALTTTSPAPDVALTSASGHRER

SEQ ID NO: 351460 - protein, 615 aa, Zea mays
  Clone ID: MRT4577_83697C.1.pep
MTHETTAVSVSRCYWTALSALTSTDALIRMLGPAVAFPKAADPDDDPTKWQPENSAEHLACETKDGAPEEGKGKQPPRPRPFRSTSTRAQRSRRRMRMRMGKGPSSRAGSRHRQFRARAMTRVDDLQEVFSGLQSARKDSRSADAAVLEAQLQQMLREWRSELSDPSPASSLQGNARELSDPPSDTLRLLQLVVAEEEDDATSKMVEQQQQQPPPPLPANRSQGHAHVVCQGMKPEPREEAVDVAVDQPQLLSQGVLPNGAATASAMFHDQLYYVNQELTVEDFLYPNAYLDMNCCGQSAGAVFLHMPDLLTSMTSSPSGFLKPKCPVLNCSRPAVGAEFWHNSCSLSNTDLAVHEDRTPSTMPWIRPRPIDLKDGRLFDGSMYHADLAVQEEGPPGTMPVIRPRGIDLKDGPLFTALSAKVQGKNVGVPICEGAATAKSPWNAPELFDLYIFEGESIREWLFFDKPRRAFDSGNRKQRSLPDYNGRGWHESRKQVMKDFGGLKRSYYMDPATSKVGCCQLNEIQQQMDRLSADSPVDTKRTARSRTEPNPIDVNTNIYSVPNTTVQTDVPNAYQPGSQVDQMTYLNGSVVYGPHLPYGYSTERSDFYWNSNDGT

SEQ ID NO: 351461 - protein, 69 aa, Zea mays
  Clone ID: MRT4577_83698C.1.pep
KKHLCGWGWGQVYKKYPRSPQHSKNLFQEEGHLGGSNENPINLSGGNNHPMEPRQCRQFNFSNRTLCFF

SEQ ID NO: 351462 - protein, 110 aa, Zea mays
  unsure (1)..(110): unsure at all Xaa locations
  Clone ID: MRT4577_83699C.1.pep
FFSFFFSYRLVELLIVTRRRRNIKGGKEVPLLCPSAPCGKSSEYPKLNWPVLRGGPRPLPILDQFHSTSTKTGQGTLKSLEPWQEPSSCIVTPNGLTPTQGGTPXATLEF

SEQ ID NO: 351463 - protein, 165 aa, Zea mays
  Clone ID: MRT4577_8369C.1.pep
IRHEGSVRRQTQRSLPRPPAKGAHLPSSLSAMQRILSRAARRCTNSSAAFNSPHAQANAASVHSEDAPTCSNMITENDDFTWKTSFVRPMQSEVVNALRRGDRQRASLILSNFHHTKESLTKEDFSYILEYCAEAPDPLNSIWSFSNTSSLLWKLWNSWRRRPLA

SEQ ID NO: 351464 - protein, 114 aa, Zea mays
  Clone ID: MRT4577_836C.1.pep
HDDQLDGSIHLMNRHWSRLLFSNHFILNLHSLFWELIEQTNPRSRTQPAPNKVCHGEIIPSGVHRRHRGVPNETLMAGESKHRREHEPQHSHDALSLELKNEKRLHCPGPAATR

SEQ ID NO: 351465 - protein, 388 aa, Zea mays
  Clone ID: MRT4577_83700C.1.pep
MELCPDQLSYVWEELTVEDFLYDDDYKIDLSGSNLDVINNLEGIVQLEYPDHNLPQGLAPNAYLDMNSCGQSAGAVFLHMPDLLTTMTSAPSAFLKPKCALWDCPRPAIGSERWHNYCSMYHADLAVQEEGPPGTMPVIRPRGIDLKDGPLFAALSAKVQGKNVGVPICEGAATAKSPWNAPELFDLYIFEGESIREWLFFDKPRRAFVSGNRKQRSLPDYGGRGWHESRKQAMKDFGGLKRSYYMDPQPSNSYEWHLYEYEINECDAFALYRLEFKSSDAKKIAKSKLACNPLNEIQQQMDRLSADSPVDNKRTARGRPQANPIDVDTNIYSVPNTTAQANVPNAYQPGSQVDQMTYLNGSVVYGPHLPYGYSTERSDFYWNSADGT

SEQ ID NO: 351466 - protein, 463 aa, Zea mays
  unsure (1)..(463): unsure at all Xaa locations
  Clone ID: MRT4577_83701C.1.pep
MRMGKGLSSRAGSRHRQFRARAMTRVDDLQEVFSGLQSARKDSRSADAAVLEAQLQQMLREWRSELSDPSPASSLQGNARELSDPPSDTLRLLQLVVAEEEDDATSKMVEQQQQQPPPPLPANRSQGHAHVVCQGMKPEPREEAVDVAVDQPQLLSQGVLPNGAATASAMFHDQLYYVNQELTVEDFLYDDDYKIDLSGSNLDVINNLEGIVQLEYPDHNLPQGLAPNAYLDMNSCGQSAGAVFLHMPDLLTTMTSAPSAFLKPKCALWDCPRPAIGSERWHNYCSMYHADLAVQEEGPPGTMPVIRPRGIDLKDGPLFAALSAKVQGKNVGVPICEGAATAKSPWNAPGKLFLHDLCLHTVLMNVFTNRXHSVSXELFDLYIFEGESIREWLFFDKPRRAFDSGNRKQRSLPDYNXRGWHESRKQVMKDFGGLKKVYYMDPXPSNSYEWHLYEYEINDCDAF

SEQ ID NO: 351467 - protein, 96 aa, Zea mays
  Clone ID: MRT4577_83702C.1.pep
PEKKQILFKNKMGLKNFFHTDMLIGGNPTDHLKVDTYLFKLVQHGGTLEGKMLTDEKFLKQKPGLGGSQNNQTTTTKLGPFKINNLKTTDPWVNPG

SEQ ID NO: 351468 - protein, 75 aa, Zea mays
  Clone ID: MRT4577_83703C.1.pep
WSACCSFCLLDHVGFGNLCFTAFNYSHCNQVWFEQRPSRCSALSATVVGSALVSTLSERPSSIRYLDILLRSVGT

SEQ ID NO: 351469 - protein, 100 aa, Zea mays
  Clone ID: MRT4577_83704C.1.pep
LNRNLRTQLKKRNPRAIQLLPHQSQSQRDKLYPVACHRRPKESLPLLCISPLLALMELDWMEPGSSLDWGERSMICLQEADDPRNPILLESILFHLSAAY

SEQ ID NO: 351470 - protein, 104 aa, Zea mays
  unsure (1)..(104): unsure at all Xaa locations
  Clone ID: MRT4577_83705C.1.pep
TASQTPPPPCCFQSPLGPGNLRLANPSRCHGISSSXPPPLPSAPPSTXPPLPGAVPFSPPPSKPSPVLHIPGGPPSGWPTPTPICSPTLCPGSCAHSGGGRRSR

SEQ ID NO: 351471 - protein, 542 aa, Zea mays
  Clone ID: MRT4577_83706C.1.pep
MAASARTTSSLPYLVAVSSPAAHRHGASHPIRASVGEATMDVVSEAELREKGFLGMRKTKLVCTVGPACVEALPALARGGMGVARINLCHGGREWHRAAMRSVRRLNEEGGFCVTLMVDTEGSQLLVADHGGATSVKAEDGSEWIFTNKKADEAHQFTMHVNFDKFSEGILVGDELVIDGGMATFEVTEKIGNDLRCKCTDPGLLLPRAKLSFWRNGKIVQRNFGLPTLSTKDWADIEFGIAEGVDCIALSFVNDANDIKQLKAYLSRRSLEHIKVFAKIESLESLKNLKDIIEASDGVMVARGDLGVQIPLEQIPAIQESIVKLCRHLNKPVIVASQLLESMVEYPTPTRAEVADVSEAVRQYADAVMLSAESAIGAYPQKALSVLRAASERMESWSREENMQKLLPRHQLAIALPDRISEQICSCAVEMANNLAVDAIFVYTKHGHMASLLSRNRPNPPIFAFTDNANSRKSMNLYWGVIPLHLPLSNSMEDNFNKTISLMRSKGSVKPGDTVLVVSDSDLNQPCAATSVFQSIQVRLVE

SEQ ID NO: 351472 - protein, 50 aa, Zea mays
  Clone ID: MRT4577_83707C.1.pep
FRPVNIGYRATTHPCFLGFGVKHLYHSFYQLVRSFSSPSVRSLPPLAWVH

SEQ ID NO: 351473 - protein, 56 aa, Zea mays
  Clone ID: MRT4577_83708C.1.pep
RKLGIRLEGHYPKFFRAQCPLTHKGVFNESQVYDKPRAHTQHMLRTGVQKLIRLRH

SEQ ID NO: 351474 - protein, 59 aa, Zea mays
  Clone ID: MRT4577_83709C.1.pep
HINAWIYTNSHKVNYTLHICIHDTLKYLSNYTSLQYSKSTTTLYKCQNYYSLTNATLTN

SEQ ID NO: 351475 - protein, 380 aa, Zea mays
  Clone ID: MRT4577_8370C.1.pep
MGSSEKTVTAYGEYTYAELEREPYWPSEKLRISITGAGGFIGSHIARRLKNEGHYIIASDWKKNEHMTEDMFCHEFHLVDLRVMDNCLKVTQGVDHVFNLAADMGGMGFIQSNHSVIMYNNTMISFNMLEAARINGVKRFFYASSACIYPEFKQLDTNVSLKESDAWPAEPQDAYGLEKLATEELCKHYTKDFGIECRVGRFHNIYGPFGTWKGGREKAPAAFCRKAQTSTERFEMWGDGLQTRSFTFIDECVEGVLRLTKSDFREPVNIGSDEMVSMNEMAEIVLGFEDRKLPIHHIPGPEGVRGRNSDNTLIKEKLGWAPTMKLKDGLRFTYFWIKEQIEKEKTQGVDIAAYGSSKVVSTQAPVQLGSLRAADGKEGL

SEQ ID NO: 351476 - protein, 71 aa, Zea mays
  Clone ID: MRT4577_83710C.1.pep
PGARPHRVDRTDRASASARSSSRTPPAGLRLGDNLMTTPPEAIFKTPIRNSPTRARLPTHPKQGTMTCRRM

SEQ ID NO: 351477 - protein, 143 aa, Zea mays
  Clone ID: MRT4577_83711C.1.pep
KKKKKKKKKKKKKKKKKKKKKKEREKKKKEKRKKKKKKKKKKRGRPFKRTKVYFPGLPTKNLFYGAPKIKFPARGLKTSELEKPWLTQIKSLGKKSPFPKVGKKQKAPPLSPFQKFAHPKWKREPPFYRPINPGGLGVSPKGT

SEQ ID NO: 351478 - protein, 47 aa, Zea mays
  unsure (1)..(47): unsure at all Xaa locations
  Clone ID: MRT4577_83712C.1.pep
KTFVNYTTPPAXHIIFQNFHPTPYHFSNNIKPLSHNNXFLLLNKLPK

SEQ ID NO: 351479 - protein, 82 aa, Zea mays
  Clone ID: MRT4577_83713C.1.pep
RFSISVLQGAPGISPINIINGSFGWPCHTMLYPLCQKSGDLLSAPHGCRQTSSGEPSPTLRPLRKQILESRYRFSPFLSQSP

SEQ ID NO: 351480 - protein, 257 aa, Zea mays
  unsure (1)..(257): unsure at all Xaa locations
  Clone ID: MRT4577_83714C.1.pep
MSTNSEEEKKPAGRVESAIVTGTSVKYHNKFGALRLRHPETNQIILIPTPTDDPNDPLNWSKSYRVYIAVLVSFAIFFSNFLAAGPTVAILDTTTDFFGPADDDLDDNIAKIAYFFTTTALLQGMSNLVWMPLMAKFGRRPIYVISFTLYTAFSAWAGGATTYGSALAARIMMGAASGAAECLAPLTISDLFFAHVRGAIMGIYTTALSAGVGCGIIVAGLITKDLDWRXIYWVSGAVIGSCTLLIIFTCPETGYDR

SEQ ID NO: 351481 - protein, 163 aa, Zea mays
  unsure (1)..(163): unsure at all Xaa locations
  Clone ID: MRT4577_83715C.1.pep
MAAKSEKKPRRTSGARIDPRTTTQPAENNPNVEKRXPRGNARCQGRRLRXSAEKKAKKSGETYXIYIFKVLKQAHPYIAISSSAMCIMNSFINDIFEKLAAEAAKLARYNKKXSITSREIQTSVRLVLPGQIDKHAXISDATEDVTEVASTYYCAAAACMILS

SEQ ID NO: 351482 - protein, 148 aa, Zea mays
  unsure (1)..(148): unsure at all Xaa locations
  Clone ID: MRT4577_83716C.1.pep
VIKPPRPGGRQGQSPKAGKKTNSAGKPGTPGRPPXNPGPAPAGGPADPRGRRSKAGRKEGQSXPGGNRKPGTKPQNKQPGSKKGKAGGAKRGSEPRKKARRKTPAAQRENQSGHPQKETGQRPGRGGWPIGPQGGVNSNQGNGQKPRA

SEQ ID NO: 351483 - protein, 103 aa, Zea mays
  Clone ID: MRT4577_83717C.1.pep
ETAELPMQGSGASTFGRVLLPRPVLALLKLMVAHPLLVHPMRPSWKGRELKATDGLFRFSYLFYPAKMPWAPFVSFRKMLRDPCFLVKQVRAKGGLVPCSRHL

SEQ ID NO: 351484 - protein, 129 aa, Zea mays
  Clone ID: MRT4577_83718C.1.pep
GRKPWSLPIVGTSNPLPTSHSVLYCVPLKQIAAEASSSILPKSCTGSIAQGVPDCYHTSAGPDPAPSNYYRYYPTHKPITGQPQHSASLPIAFTMELLSERAYHGMEPPMKLIGTYLFGVQDPSLRLGK

SEQ ID NO: 351485 - protein, 106 aa, Zea mays
  Clone ID: MRT4577_83719C.1.pep
RKQPQGQKPKKTAFKGGARLTLMAQLKRLNPPDQWGEMGGTKPRPGPPKKGLHLGPPYGGQGLRRGFFRVNLFKTRPESGGPANAVKTGPGLGLGRGRNFALPFAG

SEQ ID NO: 351486 - protein, 45 aa, Zea mays
  unsure (1)..(45): unsure at all Xaa locations
  Clone ID: MRT4577_8371C.1.pep
LSSILSIYSGSDSWRPGTFQLVLDAEHPIKVQAATXXCEASLLTL

SEQ ID NO: 351487 - protein, 63 aa, Zea mays
  Clone ID: MRT4577_83720C.1.pep
EPHILLPLMVHWPNCAGVGPSLMQPSHVISHLEHRLKSAENCGFYPVRRSHHRDFLLEDLKDN

SEQ ID NO: 351488 - protein, 100 aa, Zea mays
  unsure (1)..(100): unsure at all Xaa locations
  Clone ID: MRT4577_83721C.1.pep
LLAQSVLIPGHMILVLEVGDIEEETNVLLRASLHRQMLSDMVDNGAGDLSLHGLNTVNERVKXHCRVAKAFSRTTWCLLLCTIAGNDVLRIAFPTYVLAW

SEQ ID NO: 351489 - protein, 101 aa, Zea mays
  Clone ID: MRT4577_83722C.1.pep
FCFMLSFAFSGSLDGRFFSPSPMYYLRMSFSFGCCLLLVSLSCGFSFRPPGCFFFALMCRLAIFFSSLASCCPPSAFCTLWEGRAGLSYSIPPSSVCCLGR

SEQ ID NO: 351490 - protein, 121 aa, Zea mays
  Clone ID: MRT4577_83723C.1.pep
PRARGANILPAFVGPSGADARRGDFRPPAGGTWGTGAGSQPGGHLGLGGFWVAYPQQFLPFNQLAALNSPAYLQPQQLPPFSQLAGVSPATFLALPQLLPFYQHAVPNPGTLLQLRHIAAI

SEQ ID NO: 351491 - protein, 234 aa, Zea mays
  Clone ID: MRT4577_83724C.1.pep
MEAEKKPPAVSDVGAWAMNVVSSVSLIMANKQLMSSSGYAFAFATTLTGFHFTVTALVGWISNATGYSVSKHVPLWELVWFSLVANTSITGMNLSLMLNSVGFYQISKLSMIPVVCLMEWVLNSKHYTTKVISAVIVVAAGVGICTVTDVEVNAKGFICACVAVFCTSLQQITIGSFQKKYNIGSFELLSKTAPIQALSLIILGPFVHYYLNGRSVLNYPSSGGASCFSCRSCR

SEQ ID NO: 351492 - protein, 73 aa, Zea mays
  Clone ID: MRT4577_83727C.1.pep
PSLFKSRQVLGYSSMAVAFVHQISADGLMHASTHHPTSDNTDRSMFDLQHSPYQKLRGPSSLVLADEAKQEPA

SEQ ID NO: 351493 - protein, 93 aa, Zea mays
  Clone ID: MRT4577_83728C.1.pep
HRIPRQPKRPPSSLRSIRSRKRTEKKSTNARAQRPGRRPAPNRGVFRITLPNSMSPVNQETHLCRSRSAAAAEDARVQGGAAAIAIDPAVNGV

SEQ ID NO: 351494 - protein, 76 aa, Zea mays
  Clone ID: MRT4577_83729C.1.pep
RPGLGHIVRDTKRLSNEDPLSHNMSNDARARYFCLLMLRCVFLHDVGNAHTFPPRAQASYSFPSSPIASMRESFSM

SEQ ID NO: 351495 - protein, 37 aa, Zea mays
  Clone ID: MRT4577_8372C.1.pep
HFSFLPNIKPQVKTAYKYIPIYERFFYNNLSPKKIHA

SEQ ID NO: 351496 - protein, 108 aa, Zea mays
  unsure (1)..(108): unsure at all Xaa locations
  Clone ID: MRT4577_83730C.1.pep
MSGGDVIVFCSGLERRRNRATTNEMYRSLLVKVTWTKQALVAVLLFLPPIECLSVDXXXPKKKKKKKKKKKKKKKKXKKKXKKKXKKXKKKKKKAPFKKSNLTYPSFQ

SEQ ID NO: 351497 - protein, 71 aa, Zea mays
  Clone ID: MRT4577_83731C.1.pep
FASRIYTLFALLSKVCGGGSIPGLVIGHFTNALGGISTPSAIAPPLIAVNRWDTKKETEQITTSRIPSLRT

SEQ ID NO: 351498 - protein, 61 aa, Zea mays
  Clone ID: MRT4577_83732C.1.pep
HSETALQGQPSPRATDQTCMVPDAQFKSGSHENSTGDGRFQAPALNHCLVYNQWAAVLEPN

SEQ ID NO: 351499 - protein, 115 aa, Zea mays
  unsure (1)..(115): unsure at all Xaa locations
  Clone ID: MRT4577_83733C.1.pep
LGFGSHHQVHDAFKWIWKSSCQHRHEVXFWLLSNDRPIARNIRRNMVLDSFDCVLCQQTIAETAEHLFLRCPFATSCWSFIXLHIPSQGSFPEVAEDLKAQLHQGFSMNIIILTL

SEQ ID NO: 351500 - protein, 79 aa, Zea mays
  unsure (1)..(79): unsure at all Xaa locations
  Clone ID: MRT4577_83734C.1.pep
GILDISVSRIESRVGEMKIEKWVKSLLLSGEGFLRKRIKEVFMYLXRRMDAVLIERRDVVYLIRVKLFDVFGIKKRTRM

SEQ ID NO: 351501 - protein, 150 aa, Zea mays
  unsure (1)..(150): unsure at all Xaa locations
  Clone ID: MRT4577_83735C.1.pep
ALDLWADLCAWIPVLGTSAFTSHTRFAILDNDSSFHILAADDVYKVGSETHVVDPVNDPITSHNHSPDLPVEHSPPTDNGVPLADGAPIDPLTIFLEVAGRPSNSNISKTDYVKFSATLYNGVSGDHLDRIDXVHEKVAVDGVDATDRFA

SEQ ID NO: 351502 - protein, 270 aa, Zea mays
  unsure (1)..(270): unsure at all Xaa locations
  Clone ID: MRT4577_83736C.1.pep
MDGVTQAVENLKKEWGQAVSQLDENITAIKSCGKTGKGTEEANSLPRLNGSAQDALQLLKSLQFQLDLLAQQLPTFDEVQSGQATLKSWDEQYKKLRISLRNANLEAKDNIRQAAEEERALLLGGGEESTIRRRNLQTKAGMTSAAESITESLRRSRQMMVXDESTGVLQKAEGEYQGHRSLLMRTRGLLSTMQRQDVFDRIILTIGFTIFSLAVLYVVSRRIGLLTLQRKLADAIRSGSLSAEDIVAKAQHGPAPGNVPAPAPRVYDEL

SEQ ID NO: 351503 - protein, 47 aa, Zea mays
  Clone ID: MRT4577_83737C.1.pep
LMSSLLAAVFIKFFNPISLFFSSNVKLPPCSMVQTSVVQDTLNALII

SEQ ID NO: 351504 - protein, 219 aa, Zea mays
  Clone ID: MRT4577_83738C.1.pep
MDGVTQAVENLKKEWGQAVSQLDENITAIKSCGKTGKGTEEANSLPRLNGSAQDALQLLKSLQFQLDLLAQQLPTFDEVQSGQATLKSWDEQYKKLRISLRNANLEAKDNIRQAAEEERALLLGGGEESTIRRRNLQTKAGMTSAAESITESLRRSRQMMVQEVERSASTLATFDESTSVLQKAEGEYQGHRSLLMRTRGLLSTMQRQDVFDRIILTIG

SEQ ID NO: 351505 - protein, 34 aa, Zea mays
  Clone ID: MRT4577_83739C.1.pep
TSCGSRCPGACSTPPRRPGPPSSRFWRERGPRWR

SEQ ID NO: 351506 - protein, 68 aa, Zea mays
  Clone ID: MRT4577_8373C.1.pep
QSHLNFFPTVLLTTQVSCPSPCSYILFASCAEFPSLTQTHIHSRTAHCDVCAEYSCPDIQWLGIMRLS

SEQ ID NO: 351507 - protein, 138 aa, Zea mays
  Clone ID: MRT4577_83740C.1.pep
TRNALSPRLCQFLRPPPVSTPSHRPFLLPSAPLQRARPPASLPWPRRPSLHAPALGCAAVRPRCAGLRSSSASPSTESPRPCAATCSPRPCQGLLRTPTSSPSPATVSKVMIHSACPRAHRMDHIWAHTGARRSASSS

SEQ ID NO: 351508 - protein, 56 aa, Zea mays
  Clone ID: MRT4577_83741C.1.pep
IESGVVMEAVSTDHTLELLIPQRRQMQPIHAATVGGRQSCEKRASYDAGVVMMCYQ

SEQ ID NO: 351509 - protein, 187 aa, Zea mays
  unsure (1)..(187): unsure at all Xaa locations
  Clone ID: MRT4577_83742C.1.pep
HRRAQERPLSTLVPISSPSTSEHAKPPPLPVAQRPPAARPPXPASLPWPRRPSXPCTCFRLRRRAPSLCRPTSPRPDPVIVPASSPRHAPPXGVVITYAVVAMPWAPHRPSASSLCSPVSLPPXSPRRSAAPNPPHFPPQAAAAFAPALPRHRLSPHVPARRRARPGPAKDSCELQPHRLAPPPFLK

SEQ ID NO: 351510 - protein, 51 aa, Zea mays
  Clone ID: MRT4577_83743C.1.pep
TSRSDSRTWSVVFLNICLFNRGDRSQGSARLARRTIRIGAVSAYAQEHRRR

SEQ ID NO: 351511 - protein, 101 aa, Zea mays
  Clone ID: MRT4577_83744C.1.pep
EQGAIMSSPTSSTVAERRSLELSQTPCARSVSPLPQRALWDGGQFSNPSEHQQHDWDLGAALSSSRRYFSLASVGLPRLSRHSGWTECSLIRCGMRVLTQR

SEQ ID NO: 351512 - protein, 98 aa, Zea mays
  Clone ID: MRT4577_83745C.1.pep
FRIPPPPTPHRSSTGHRCLTNERTPRGCRRRRCRSDHRPSAFHHPLLRSQGFVRWFAKASNVHRLLVLDPSGLYSVLLYDQLTIHYLRLMALINNSKN

SEQ ID NO: 351513 - protein, 41 aa, Zea mays
  unsure (1)..(41): unsure at all Xaa locations
  Clone ID: MRT4577_83746C.1.pep
DPGRSPDSSVPSWRWXYARRNDTRSCLKEKXGPAARRCSAP

SEQ ID NO: 351514 - protein, 119 aa, Zea mays
  unsure (1)..(119): unsure at all Xaa locations
  Clone ID: MRT4577_83747C.1.pep
TRKASYPQPPKNKGKSPTKEKHISXEPPKQNCHWAPKTPQPHALPPINSKKKKKNPPPPPKQRDTPHGNPAKPTAQNKKRQPPPKKTPQKPPYSSPKKPTPPPGGTTKHPATSATPKPH

SEQ ID NO: 351515 - protein, 86 aa, Zea mays
  Clone ID: MRT4577_83748C.1.pep
GAGPRFPCGKKWGWGPPFLGARGGFSCFSQGGVFPHPPPWGPIFSPPFLAGFTPRKGFFFSPFGLPREPKYWGWPPPVGFFCPLFG

SEQ ID NO: 351516 - protein, 162 aa, Zea mays
  Clone ID: MRT4577_83749C.1.pep
QETGKAPKTQTPSPRGGGVLLKKGARKVFPLKKGQWAPPNKWGLAPPLGPPGFSLFVSGSFFLGNFEGKTFSPGKQFCPLFPQIGAQAGIPKKRPPGGGNSPFQRPPRGGKKKKKKKKKKKKKKKKKKKKKKKKKKKRGGGMYSTMVPSYRHVFPRNNQYID

SEQ ID NO: 351517 - protein, 217 aa, Zea mays
  Clone ID: MRT4577_8374C.1.pep
MSKISVAGVRTNVQQLLEYSNETKKRNFLETVELQIGLKNYDPQRDKRFSGTIKLPTLPRPRMSICVLGDQHDIDRAKHHGVDAMSTDDLKKLNKNKKLIKKLAKKYDAFMASDALIKQIPRLLGPGLSKAGKFPTPVSHNEDLANKMNEVKSTIKFQLKKVLCMGVAIGNVGMTEDELIGNIMLAINYLVSLLKKGWQNVGSLTIKATMSPPKRLY

SEQ ID NO: 351518 - protein, 73 aa, Zea mays
  Clone ID: MRT4577_83750C.1.pep
SSGNNAEYFFFFFFFFFFFLNNKGKPRCKRLNPKSCQVSLWQLEDELVLKGGGDVMGIIGSERQQLGWDKARE

SEQ ID NO: 351519 - protein, 51 aa, Zea mays
  unsure (1)..(51): unsure at all Xaa locations
  Clone ID: MRT4577_83751C.1.pep
NLRKQMIRKKIIKSTGHSYFYLLHGENVNLSISIDVHKXEAVASLISERPA

SEQ ID NO: 351520 - protein, 90 aa, Zea mays
  unsure (1)..(90): unsure at all Xaa locations
  Clone ID: MRT4577_83752C.1.pep
LTVTDMECIHXLVPYEGDTVSENLADPEEYIFWRCDHPYVDLTVTLPGXGTLRHTYALEKTTXQSYSSKLPKGGMYNLCFHNPHVAPKTA

SEQ ID NO: 351521 - protein, 81 aa, Zea mays
  Clone ID: MRT4577_83753C.1.pep
ESTPLYCIIVKEVGLFRPRVCGGYIRPGAWWCGVICLLVCHQSISGWSGALAGCQRESVGSRELDARRQERRKEELKVRYR

SEQ ID NO: 351522 - protein, 92 aa, Zea mays
  Clone ID: MRT4577_83754C.1.pep
GGPCYGQKGTALPLNLESGIARTFPIPRLAPVIHPALPLTLFRNGGPRESRVQSPLTAVANFKKRKAATAARAKKKSRRSLFWPPSGHGRIF

SEQ ID NO: 351523 - protein, 145 aa, Zea mays
  unsure (1)..(145): unsure at all Xaa locations
  Clone ID: MRT4577_83755C.1.pep
GLPPVPGVSAPVFPPVQAGGPPAPGPGAKGGGPAVLPAATPPGGAPGAXGAPGGPPLAGFWGFQFHQPGPPPFNPTPGGVFFLGXWPGGIMEWAPCPPPXGAKLVPPFTGGGDRGVPPPXGAGWAMPRIPPFNGKGFFFGEKGVW

SEQ ID NO: 351524 - protein, 83 aa, Zea mays
  Clone ID: MRT4577_83756C.1.pep
LRVGGHADRRGGVLFIAVAFAPPETESILKDISERAMGKGNFLYRRTLCRARALGPLACKLRTIATLETVNMSGNHLLGEVLR

SEQ ID NO: 351525 - protein, 66 aa, Zea mays
  unsure (1)..(66): unsure at all Xaa locations
  Clone ID: MRT4577_83757C.1.pep
GFSELQGIFGPQRXLETXKAYGSPNHLPSGXTCFNQLNLPEDTSKKQLQERVLLAIPEAKKGFGFG

SEQ ID NO: 351526 - protein, 49 aa, Zea mays
  Clone ID: MRT4577_83758C.1.pep
SRSFRTQRPSRRLTLDPGPAMVFRLGRLLAPSIRLPPPGRLGRRGAVRA

SEQ ID NO: 351527 - protein, 86 aa, Zea mays
  Clone ID: MRT4577_83759C.1.pep
WKIMHQEPPKNGKLAHKQLKTQANVPGFLKMAQDRWKLIIKYSNTWDFFVERQSKPAGCAYHPIIKGIHAGSQHVSHMQHLEIASQ

SEQ ID NO: 351528 - protein, 255 aa, Zea mays
  unsure (1)..(255): unsure at all Xaa locations
  Clone ID: MRT4577_8375C.1.pep
RTRPRTRGLTRGFLGKMVWANXYRELIDLLSKHKNDLEGFMIDVYGNGEDSEAVQNAARKFDLNINFFKGKDHADDSLHGYKVFVNPSVSDVLCTATAEALAMGKFVVCADHPSNDFFKSFPNCLTYRTSAEFVARVKEAMATEPQPLTSEQRYSLSWEAATERFMEYSELDKVLNRNRHPGRNGKVNKARKIPLLPKLSDVVDGGLAFAHHCLTGNEILRLATGAIPGTRDYDKQQCMDLNLLPPQVQHPVYGW

SEQ ID NO: 351529 - protein, 630 aa, Zea mays
  Clone ID: MRT4577_83760C.1.pep
MAAGRAPWLAAGLVAVLMVVAARARFVVEKSSVRVLAPEHIRGHHDAAIGNFGVPDYGGTLTGVVIYPDTKPTGCDDFDAKFKAKSRRPVILLLDRGECYFALKAWNAQRAGAAAVLIADSVDEQLLTMDSPEASPGTEYIDKINIPSALVNRAFGESLKKMAQKVAGAGSEEVVVKLDWRESMPHPDERVEYELWTNSNDECGARCDEQMAFVRGFRGHAQLLERAGYARFTPHYITWFCPEAFRATQQCRSQCINRGRYCAPDPEGDFGAGYEGKDVVVENLRQLCVHRVANETGRPWAWWDYVMDYKIRCSMKEKKYTKTCAEDVVTALGLDLKKVLECMGDPEADVDNAVLSKEQEDQIGSGSRGDVTILPTLVINNVQYRGKLERTAVLKAVCAGFKEGTEPGVCLSHDIETNECLHRNGGCWRDEATNVTAGQDTYRGRVCECPVVNGVRYEGDGYTDCKAIGPGRCALNNGGCWSATRGHQTFSACTETALTGCRCPPGFHGDGHKCEDLDECREKLACTCPDCQCKNTWGNYECKCKGNQLYIRGEDVCIANSMSKLGWFITIAAVACVLGVGVAGYVFYKYRLRSYMDSEIMSIMSQYMPLDSQNNENQPLRQHDSEALRH

SEQ ID NO: 351530 - protein, 39 aa, Zea mays
  Clone ID: MRT4577_83761C.1.pep
LFKSYMDSEIMSIMSQYMPLDSQNNENQPLRQHDSEALR

SEQ ID NO: 351531 - protein, 148 aa, Zea mays
  Clone ID: MRT4577_83762C.1.pep
MAAGRAPWLAAGLVAVLMVVAARARFVVEKSSVRVLAPEHIRGHHDAAIGNFGVPDYGGTLTGVVIYPDTKPTGCDDFDAKFKAKSRRPVILLLDRGECYFALKAWNAQRAGAAAVLIADSVDEQLLTMDSPEASPGTEYIEQINIPS

SEQ ID NO: 351532 - protein, 70 aa, Zea mays
  unsure (1)..(70): unsure at all Xaa locations
  Clone ID: MRT4577_83763C.1.pep
RSPPXRGAFLLLATTISTHTTITTPTPFPMFPTSSSYTFSPPESTIKQPAFISFITHRSTTSSFPTLPST

SEQ ID NO: 351533 - protein, 176 aa, Zea mays
  unsure (1)..(176): unsure at all Xaa locations
  Clone ID: MRT4577_83764C.1.pep
MAAGRAPWLAGLVAAVLMVVAAPVPARARFVVEKSSVRVLAPEHIRGHHDAAIXANFGVPDYGGTLTGVVIYPETKPTGCDDFEAKFKAKSRRPVILLLDRGECYFALKAWNAQRAGAAAVLIADSVDEQLLTMDSPEASPGTEYIDKINIPSALVNRAFGESLKKMAQKGAGAGS

SEQ ID NO: 351534 - protein, 86 aa, Zea mays
  unsure (1)..(86): unsure at all Xaa locations
  Clone ID: MRT4577_83765C.1.pep
NKCXRKHLEETVNLVLGLVSQPGCNFVRXLEALSSXQQAPLHVGHGLFFHPQELAEXTLLQVGVVPQPMDFFRPTWLPSRWLFRLR

SEQ ID NO: 351535 - protein, 91 aa, Zea mays
  unsure (1)..(91): unsure at all Xaa locations
  Clone ID: MRT4577_83766C.1.pep
KSSVLLDXVKPWDDETDMGKLEEADRSVQMEGLFWGASKLVPVGYGSKMLQFMMTIFDDLVFXRTLIEDYLCAEPVNEFVQSFDIFAFTKI

SEQ ID NO: 351536 - protein, 83 aa, Zea mays
  Clone ID: MRT4577_83767C.1.pep
QAEIKRSYLFNYHSSDCVDTRQRNRWIEQHHPSPIKCHKNQVHGPTIQLTTVIFLNYRYSLYGHAVKHWLQLYISQVPQVPDG

SEQ ID NO: 351537 - protein, 37 aa, Zea mays
  Clone ID: MRT4577_83768C.1.pep
GVCIHATCIIFPFASAEWMSTDAAAASMLELAGYLAS

SEQ ID NO: 351538 - protein, 99 aa, Zea mays
  Clone ID: MRT4577_83769C.1.pep
CSRTCRSADDASLLRLHFHDCFVQGCDAYILLNDTCVEQTRNAYHVSYLLRHATPNKPKRTRAQRIPPCEVPPLTPLRANKKKTETPKMETSLTQSLHM

SEQ ID NO: 351539 - protein, 62 aa, Zea mays
  Clone ID: MRT4577_8376C.1.pep
AWIGVISLVHNFIEHTQQLGVFGVKAGAFVDKYHYASHKPTTFPREGRAPPSNTHETPREHL

SEQ ID NO: 351540 - protein, 92 aa, Zea mays
  Clone ID: MRT4577_83770C.1.pep
ETERDNSPVSSRCTTTRLFYLCLSCLPGCRSTAASTTTTCWTSWKTRSSWPLYNPRLITITATRMFATKPLLTQLKGCLILLSIPGHGARNL

SEQ ID NO: 351541 - protein, 75 aa, Zea mays
  Clone ID: MRT4577_83771C.1.pep
AAFFFFFFFFFFFFFFFFFFFFFFFFFFERGKILLPNFTSYKNFIFFYGGGYKSLSWKYWGAKRAPPKKKYRGVS

SEQ ID NO: 351542 - protein, 77 aa, Zea mays
  Clone ID: MRT4577_83772C.1.pep
DHNLLTMFRLQKHVDCGPMSIHALPITSSGYILKLPYFKSRFTTTQEPSPYAGYVSQKVKCYSVRTLNWGGMCTAPG

SEQ ID NO: 351543 - protein, 140 aa, Zea mays
  Clone ID: MRT4577_83773C.1.pep
GGAGFSRGSPRFFSPLSLGFPGRPSGSGPVFPAPPPGLLAGPFGPPFGGFFLGPFFRRAAQICLPGFLYPPCHLGPGVFAVFGVPKMFWAFFVWGALWPLRARVSGVRPPPFFCGPGLRGVDPFVPFPLKKKKARPPNFE

SEQ ID NO: 351544 - protein, 49 aa, Zea mays
  Clone ID: MRT4577_83774C.1.pep
MMVEGPNFAGLIGGHDNGGNFCDMAYYRKLGEGSNMSIDSLNSMQTSTH

SEQ ID NO: 351545 - protein, 79 aa, Zea mays
  Clone ID: MRT4577_83775C.1.pep
ALVSLHTFLWILLDQLQGNNFFICLAGLHCAQLAGVPNEVVQRAGIVLEDMHSKKPTRRVTSEKLTATDKQYQDAVTKL

SEQ ID NO: 351546 - protein, 63 aa, Zea mays
  Clone ID: MRT4577_83776C.1.pep
FAFSKKKKKKKKKIMTRYWDPNPKIRPTFTEVVRMLEHAVVEGVSTVRKARFRCCISQPMTTD

SEQ ID NO: 351547 - protein, 76 aa, Zea mays
  unsure (1)..(76): unsure at all Xaa locations
  Clone ID: MRT4577_83777C.1.pep
MVEGPNFAGLIGGHDNGGNFCDMAYYRKLGEGSNMXIDSLNXMQTSTHGXSIAMSVDNSRVGSCSSHTRMLNHPGL

SEQ ID NO: 351548 - protein, 415 aa, Zea mays
  Clone ID: MRT4577_83778C.1.pep
MMVEGPNFAGLIGGHDNGGNFCDMAYYRKLGEGSNMSIDSLNSMQTSTHGGSIAMSVDNSSVGSCSSHTRMLNHPGLKGPVVGNYSVGGHSIFRHGRVSHALSDDALAQALMDPRYPTETLKDYEEWTIDLAKLHMGMPFAQGAFGKLYRGTYNGEDVAIKLLERPEADPERAGLMEQQFVQEVMMLATLRHQNIVKFIGACRKPVVWCIVTEYAKGGSVRQFLAKRQNRSVPLKLAVKQALDVARGMAYVHGLGFIHRDLKSDNLLISGDKSIKIADFGVARIEVKTEGMTPETGTYRWMAPEMIQHRPYDQKVDVYSFGIVLWELITGMLPFANMTAVQAAFAVVNKGVRPAIPQDCLPTLGEIMTRCWDPNPDVRPPFTEVVRMLEHAEVEILSTVRKARFRCCISQPMTTD

SEQ ID NO: 351549 - protein, 88 aa, Zea mays
  Clone ID: MRT4577_83779C.1.pep
PSSGFSIMGRGSCPPTCTKTGALLFFSRFSGTNWPDGAKGTPSPPCFLLRDTLICFCPLEMCKPPHVNCNVCKIMRVGPHKGYTPGRV

SEQ ID NO: 351550 - protein, 52 aa, Zea mays
  Clone ID: MRT4577_8377C.1.pep
IFLPSSSIRASLLSQLWLAVEIESYACGLIIVPRFVSLSIPEYKGPVTSMFD

SEQ ID NO: 351551 - protein, 143 aa, Zea mays
  Clone ID: MRT4577_83780C.1.pep
NGGGEGLITYRAKLKGGATTTMTGGGKTAEGGGRKKKEKGSSLLLARTIQYTVLWDRPSKSPSLAGGHGQVQPVRAGGGKRNEDPPRGPKGKGRGCAEKKALHFTSFGPPKQQGQDLGRLAGAGGGILPVPAGPPRRFPPGPG

SEQ ID NO: 351552 - protein, 415 aa, Zea mays
  Clone ID: MRT4577_83781C.1.pep
MMAEGPNFAGMIGGHDNGGDFCDMAYYRKLGEGSNMSVDNLNSMQTSTHGGSIAMSVDNSSVGSCDSHTRMLNHPGLKGPVVGNYSVGGHSIFRHGRVSHALSDDALAQALMDPRYPTETLKDYEEWTIDLAKLHMGMPFAQGAFGKLYRGTYNGEDVAIKLLERPEADPERAGLMEQQFVQEVMMLATLRHQNIVKFIGACRKPVVWCIVTEYAKGGSVRQFLAKRQNRSVPLKLAVKQALDVARGMAYVHGLGFIHRDLKSDNLLISGDKSIKIADFGVARIEVKTEGMTPETGTYRWMAPEMIQHRPYDQKVDVYSFGIVLWELITGMLPFANMTAVQAAFAVVNKGVRPAIPQDCLPTLAEIMTRCWDPNPDVRPPFTEVVRMLEHAEMEILSTVRKARFRCCMSQPMTTD

SEQ ID NO: 351553 - protein, 36 aa, Zea mays
  Clone ID: MRT4577_83782C.1.pep
SCCDSKQSSLFQVGRQVQERFHLTHRLHLRVPRTLP

SEQ ID NO: 351554 - protein, 81 aa, Zea mays
  Clone ID: MRT4577_83783C.1.pep
YIKRPTRLGKGVPRTKEPKNVGAKIPTKTNPPFVHLSGFPKETVGDFKKHPPPGITSHLSHFVEREEKQININPHRQETPP

SEQ ID NO: 351555 - protein, 57 aa, Zea mays
  Clone ID: MRT4577_83784C.1.pep
ILFSHLKFLHKKLISILLALLLFSYIGGFLYLYSHFFIFEFIPTVQPYLSLNSNMLP

SEQ ID NO: 351556 - protein, 70 aa, Zea mays
  Clone ID: MRT4577_83785C.1.pep
ALEGDPRNFLFKPVKRPGAKILVVGTHGFGPIKRAVFGSVKEYCAHHGPCPVIIVKKPKQPKPCSMPLDP

SEQ ID NO: 351557 - protein, 96 aa, Zea mays
  Clone ID: MRT4577_83786C.1.pep
SILNPRLMNFICTLYCWLLNCGYFCPISWPNFGDALSFFEHILHNVSAIQISKALCVAQNCMDIIQLLPAFVAPFRKISMLAYSLLPSPHIPWENS

SEQ ID NO: 351558 - protein, 47 aa, Zea mays
  Clone ID: MRT4577_83787C.1.pep
SCSQIIQNQNLVQQGNKKKFLSLMILTYPPCRCTSAPYALSLTVRVV

SEQ ID NO: 351559 - protein, 115 aa, Zea mays
  Clone ID: MRT4577_83788C.1.pep
SLAGLRFLSILSGSLACCTGAPSLSFHCICLSLTVQTDTWCTPWSVLVRAVSPSFVCHSDHGMDLGSYGRPHTGKVVKLVTRTGSSTAFYRAIAAHRPMTHAWKKRRQFGLPRAE

SEQ ID NO: 351560 - protein, 71 aa, Zea mays
  Clone ID: MRT4577_83789C.1.pep
KAIVDSAREQYLSSELVQMPVRIYLQDHMVRTWQDSLILIVLMLLYLILTHLSRHLYFMVHIIIICSCMRE

SEQ ID NO: 351561 - protein, 106 aa, Zea mays
  Clone ID: MRT4577_8378C.1.pep
TVIVWSLGNRKCIGLLFGHTGSVRSLPCHSSNPDHVLRVWTVMLPFSQTSIYDQLQARCGLAVGMRITKVVSSLFSMFQCRVFQIRLLSGVCWFAWNRSGLAWIHE

SEQ ID NO: 351562 - protein, 197 aa, Zea mays
  unsure (1)..(197): unsure at all Xaa locations
  Clone ID: MRT4577_83790C.1.pep
MATTAYAPMASQVMKSSPVHSRPRGLSGAALTRPRPRFSVVKAAIQPEKATYQVVQPINGDPFIGSLETPVTSSPLIAWYLSNLPAYRTAVSPLLRGVEVGLAHGYLLVGPFALTGPLRNTPVHGQAGALGAAGLVAILSVXTAPTLTLTXRKKEADKLQTADGWAKFTGGFFFGGISGVLWAYFLLYVLDLPYYFK

SEQ ID NO: 351563 - protein, 35 aa, Zea mays
  unsure (1)..(35): unsure at all Xaa locations
  Clone ID: MRT4577_83791C.1.pep
VIQSPQTLLGRXXHRSFSLDITRLNLLTFLGRRKP

SEQ ID NO: 351564 - protein, 133 aa, Zea mays
  Clone ID: MRT4577_83792C.1.pep
MASGSTENDQDDGFDQADRSPDDSVHKQNLIYGSTTLSSLEGRSCKRYKYTKTPRSGDVGATLEYLQKVQHDNPSFFYAVKSDDDGNFTNFFWADSKSIVDFFHFGDVVCFDSGYALQGYDRPLAFVTGVNHH

SEQ ID NO: 351565 - protein, 212 aa, Zea mays
  Clone ID: MRT4577_83793C.1.pep
MATTAYAPMASQVMKSSPVHSRPRGLSGAALTRPRPRFSVVKAAIQPEKATYQVVQPINGDPFIGSLETPVTSSPLIAWYLSNLPAYRTAVSPLLRGVEVGLAHGYLLVGPFALTGPLRNTPVHGQAGALGAAGLVAILSVCLTMYGVASFNEGDPSTAPTLTLTGRKKEADKLQTSDGWAKFTGGFFFGGISGVLWAYFLLYVLDLPYFFK

SEQ ID NO: 351566 - protein, 213 aa, Zea mays
  Clone ID: MRT4577_83794C.1.pep
MATAAYAPMASQVMESSPSPVHSRPRGLSGAALTRRPRFSVKAMAIQPEKATYQVVQPINGDPFIGSLETPVTSSPLIAWYLSNLPAYRTAVSPLLRGVEVGLAHGYLLVGPFALTGPLRNTPVHGQAGALGAAGLVAILSVCLTMYGVASFNEGDPSTAPTLTLTGRKKEADKLQTADGWAKFTGGFFFGGISGVLWAYFLLYVLDLPYYFK

SEQ ID NO: 351567 - protein, 212 aa, Zea mays
  Clone ID: MRT4577_83795C.1.pep
MATTAYAPMASQVMKSSPVHSRPRGLSGAALTRPRPRFSVVKAAIQPEKATYQVVQPINGDPFIGSLETPVTSSPLIAWYLSNLPAYRTAVSPLLRGVEVGLAHGYLLVGPFALTGPLRNTPVHGQAGALGAAGLVAILSVCLTMYGVASFNEGDPSTAPTLTLTGRKKEADKLQTADGWAKFTGGFFFGGISGVLWAYFLLYVLDLPYYFK

SEQ ID NO: 351568 - protein, 25 aa, Zea mays
  Clone ID: MRT4577_83796C.1.pep
FLKPESHGLNSSYGSFSSVLHMLSI

SEQ ID NO: 351569 - protein, 64 aa, Zea mays
  Clone ID: MRT4577_83797C.1.pep
NNYLFKTGILCWLANTRLIIKHADIENTLRLFLKIGKKLVPKPPLNTGAGDASHKRRRTYNIMV

SEQ ID NO: 351570 - protein, 141 aa, Zea mays
  Clone ID: MRT4577_83798C.1.pep
GIHTFMFSTESSVRTYLELSSAIVPLYLCIINETSYYVGPFHESRTWHVFAGDPVHKMSVLFTYRFSVVSPVHLVLVILIHFSFIFVVHVDAVLAHALLVVAEDDCGDHFVVRGRAFASVRFSMTTSAAAGSAMSEVEASS

SEQ ID NO: 351571 - protein, 120 aa, Zea mays
  Clone ID: MRT4577_83799C.1.pep
CLHCNKLSSDMYIGIDGTADMSRSKIPMLNGAQVFSVVKCSPVKGCSNLSQLSSKQDGTLSFYKLKIGAPRVVRVLLCLAAALARFVVEPFSLRQTTSARGYCLLQCTGLLVAPPLAFWD

SEQ ID NO: 351572 - protein, 36 aa, Zea mays
  Clone ID: MRT4577_8379C.1.pep
VGVGARRVRSLFQAAKKKAPVIFFIDEIDAMGSTRK

SEQ ID NO: 351573 - protein, 51 aa, Zea mays
  Clone ID: MRT4577_837C.1.pep
GSIHASSKGNLHLATKLAIIGLTSVMGRTCNEISKLGAEELKTAHKADGIA

SEQ ID NO: 351574 - protein, 101 aa, Zea mays
  unsure (1)..(101): unsure at all Xaa locations
  Clone ID: MRT4577_83800C.1.pep
KKKKKKTNEKKKKKEKKTPPPPHHRKSDXTHATKQKRNKKPTQXATQDNKQRTQHKRTRQCVQPHVNNNAPTPRHANPGPPYPCNEAAQEKTTVTQTSRAR

SEQ ID NO: 351575 - protein, 39 aa, Zea mays
  Clone ID: MRT4577_83801C.1.pep
KKKTKTQFKIKKKKKKKKGKEKKNKYTKMQRCYSSIKIP

SEQ ID NO: 351576 - protein, 96 aa, Zea mays
  Clone ID: MRT4577_83802C.1.pep
GRGHAALGVAVARRGGAGFQIRGDGRRVVAADELVAPNRPRYRTPAAARLRQRPFIGRSSSAHEHKPGAAGNTYRIQQLQQVRDKMRRGRCGAPLT

SEQ ID NO: 351577 - protein, 136 aa, Zea mays
  Clone ID: MRT4577_83803C.1.pep
MARTKHQAVRKTQERAAGTGGRAASGGDSVKKTKPRHRWRPGTVALREIRKYQKSTEPLIPFAPFVRVVRELTNFVTNGKVERYTAEALLALQEAAEFHLIELFEMANLCAIHAKRVTIMQKDIQLARRIGGRRWA

SEQ ID NO: 351578 - protein, 187 aa, Zea mays
  Clone ID: MRT4577_83804C.1.pep
MARTKHQAVRKTAEKPKKKLQFERSGGASTSATPVSACVRGSVPSFCLFCGLLLLACKLFDGMQERAAGTGGRAASGGDSVKKTKPRHRWRPGTVALREIRKYQKSTEPLIPFAPFVRVVRELTNFVTNGKVERYTAEALLALQEAAEFHLIELFEMANLCAIHAKRVTIMQKDIQLARRIGGRRWA

SEQ ID NO: 351579 - protein, 51 aa, Zea mays
  unsure (1)..(51): unsure at all Xaa locations
  Clone ID: MRT4577_83805C.1.pep
GYLHVNPMQQEISTFLSXDMLQREVVFFILFHYHLSFILTFDMIILLLNIF

SEQ ID NO: 351580 - protein, 85 aa, Zea mays
  unsure (1)..(85): unsure at all Xaa locations
  Clone ID: MRT4577_83806C.1.pep
MQVARDEAVDMARTQSAVAVDEVAAGLLLAAAATTSEAVITCGQVSSDIAPXLSYARGTGSDPCESCCSGVKNLKSAVSTVVDRR

SEQ ID NO: 351581 - protein, 35 aa, Zea mays
  unsure (1)..(35): unsure at all Xaa locations
  Clone ID: MRT4577_83807C.1.pep
TSVSPLSLRGSLLVGSRPVRQWCGYGRSSVPRAXT

SEQ ID NO: 351582 - protein, 58 aa, Zea mays
  Clone ID: MRT4577_83808C.1.pep
FLFSFFFFFFFGFFFIFFGVFNPTPTHKQNGPNQTILFPQAPAHHVKITPTWTLWRLQ

SEQ ID NO: 351583 - protein, 59 aa, Zea mays
  Clone ID: MRT4577_83809C.1.pep
RPGPKFAITSPILRQSTAASDFSPDATTTSHQRCVDRRRRTPRRSRSAKSASRPSAVMN

SEQ ID NO: 351584 - protein, 96 aa, Zea mays
  Clone ID: MRT4577_8380C.1.pep
GRCLAIPPIRREQELDWNIKISKYHVLRVWTVMLPFSQTSIYDQLQARCGLAVGMRITKVVSSLFSMFQCRVFQIGLLSGVCWFAWNQSGLAWIHE

SEQ ID NO: 351585 - protein, 134 aa, Zea mays
  Clone ID: MRT4577_83810C.1.pep
TMIGASRCRRASLRGADTACTSRIHRRMRASQICRCSRVRGATTFELALDVPPSCAPQVTAVAVRPRGAAAIPRVYGIHRCRSRLEEVDAVAPTSDARRRVPSRNRRHAHIGREGRHRSCIVVGVSPRSHYPGR

SEQ ID NO: 351586 - protein, 291 aa, Zea mays
  unsure (1)..(291): unsure at all Xaa locations
  Clone ID: MRT4577_83811C.1.pep
DEGTPGCQPXVQTYSILIKSCLHAYDFEKVKSLLADMARAGIPPNTVTYNTLIDAYGKAGRFAEMESTLLKMLSQNCKPDVWTMNSTLRAFGSSGQIETMESCYEKFQASGIVPNIKTYNILLDSYGKAKMYEKMGAVMEYMQKYYYSWTIVTYNVVIDAFGRAGDLEQMEYIFRLMKSERIKPNCVTLCSVVRAYGRAGEVKKIKTALRIIENSDITLDIVFFNCLVDAYGRVGCLAEMWDILDLMKEHRCKPDKVTCTTMIKWFLIKGIDDHRVQYLRDLKDGRAKDDT

SEQ ID NO: 351587 - protein, 81 aa, Zea mays
  unsure (1)..(81): unsure at all Xaa locations
  Clone ID: MRT4577_83812C.1.pep
MALSRLLLPLFLRRGASIPSRALSTAVAPAEVASEEDXXVTVKGVRISGRPLYMDMQATTPVDPRILDAMLPFYLSCYGKP

SEQ ID NO: 351588 - protein, 176 aa, Zea mays
  Clone ID: MRT4577_83813C.1.pep
MRGPSPGTTLLGAHADGVLGVLARDFPDGPPPSGTAMSVGTKLKKLSYNSVVEIVLQNPAAVPTENHPIHLHGFNFFVLAQGMGTFAPGSVAYNLVDPVARNTIAVPGGGWAVIRFVANNPGMWFFHCHLDPHVPMGLGMVLLEDRGTTPSLVSCVLSSFSFFFVNTRPSSWEALA

SEQ ID NO: 351589 - protein, 145 aa, Zea mays
  Clone ID: MRT4577_83814C.1.pep
PPPPPPPPPPPPPPPPPPPPPPSPPFFFFFFFFFFFFFFFGRTRGGFWELKEQIGREKPWVFWKQAPPQRTQGSVNKGFLPPVKAQKGPVFRALFMGGPTNGGQHAPPQILSKGPPGKNFGPAKPKSFKGKFQKSPPPGKPPPNL

SEQ ID NO: 351590 - protein, 57 aa, Zea mays
  Clone ID: MRT4577_83815C.1.pep
LPGFAGGPIPGLIIAGDNGLLMNLISGPPRKGPHMNKLMFHPPVMPDGMAPAYPVSP

SEQ ID NO: 351591 - protein, 99 aa, Zea mays
  unsure (1)..(99): unsure at all Xaa locations
  Clone ID: MRT4577_83816C.1.pep
GQCAKFLRVQFRPXTARPYCLPQGQSFRQQCCHQLRLVEPQLRDQAIFGLVPQTIRQHQPQSGQVAGLLPAQIAQQVPAMCGLQQPTPCPEAAAGGVPP

SEQ ID NO: 351592 - protein, 142 aa, Zea mays
  Clone ID: MRT4577_83817C.1.pep
SPGHKVPRLQGAPGPRPPRPRPHPPRSENTQNNNEPKKKKRTKNKKKQKKKKTPEKEGERQRREARRKPERREPQRGRERRGQERQRANPEGGGERRGRRGGQREAGRGGEGERGRGARRGETPRGERGRRRPRQNPGGAKQ

SEQ ID NO: 351593 - protein, 115 aa, Zea mays
  Clone ID: MRT4577_83818C.1.pep
DKKKNLVFIYNKTGGQRILFTQRPSPHRHRTWRTYGFAPGKSLSGTHYSGFSPPPTRKLCNPRSGALSGGALRGMPCAFIPKRHQQGLQTPPSRFSHSTNFPWMYFAPPYSAHRM

SEQ ID NO: 351594 - protein, 79 aa, Zea mays
  unsure (1)..(79): unsure at all Xaa locations
  Clone ID: MRT4577_83819C.1.pep
MLLLLQTLNGTTQRXIVMCLLGFYWNXINKRQGMLIXWQLTSNLLLIAVEGLATPALYDELQILFAQIIGYNRCILFPP

SEQ ID NO: 351595 - protein, 93 aa, Zea mays
  Clone ID: MRT4577_8381C.1.pep
ALISLKKNYCATLFHKMILRTALVAQFNIRVSHFLISHMHSATNDFFMALHSILEHRNKATVGSGSGSGGNKRYCISVCSFMFTQQMCLKEGG

SEQ ID NO: 351596 - protein, 93 aa, Zea mays
  Clone ID: MRT4577_83820C.1.pep
GTRAGSFHLGGAFKALLTPTLPPMGMRDTFFLYHRRLMSQLSCLPGGFLQHIVSSKGDTARCNVWAWSRLLLAAHRRQLLRFLRRWQHPNPGP

SEQ ID NO: 351597 - protein, 70 aa, Zea mays
  Clone ID: MRT4577_83821C.1.pep
LSPLLKNASYDEEAALVAQSQKCCFGLSPLLENESDDEEAVLGAQSTLEDPIFLTTIEGWTSHSMGEDNA

SEQ ID NO: 351598 - protein, 53 aa, Zea mays
  Clone ID: MRT4577_83822C.1.pep
LPPASSSRCFQRSGNMYSPIYDTIILLLVSGPRDHSVICPITIAYYIAPGTVF

SEQ ID NO: 351599 - protein, 74 aa, Zea mays
  Clone ID: MRT4577_83823C.1.pep
PPRRHRLGSSYLHFSFWTSNSKKIMASLFLALIYGGVGRSSFFLKWLPTCAQSMYHSCMCIILCSRCHVSTRAW

SEQ ID NO: 351600 - protein, 67 aa, Zea mays
  Clone ID: MRT4577_83824C.1.pep
DRPPFFVTKGRLLDKLQFPPNNLNFLSSFPRDSKKLARGPELANYCCSPFPKRLVYCAASGTPPVQK

SEQ ID NO: 351601 - protein, 224 aa, Zea mays
  unsure (1)..(224): unsure at all Xaa locations
  Clone ID: MRT4577_83825C.1.pep
MAADAAAAAMSATSLCDDLEPATVRTRIRDVLAAGAARAGDRVVVGGWVRTGREQGKGSFAFLELSDGSCAATLQAIVDAAVHPLARLTATGTSVLVEGVIKEPPEGTKQNVELKVSRVLEVGEVDAAVYPLPKGKVKLTLEKLRDVVHLRSRTNTIGAVARIRHQLAYASHRFFDENGFLYVHTPIITTSDCEGAGEMFQVTTLFXQAEKTEEELRENPNLSD

SEQ ID NO: 351602 - protein, 78 aa, Zea mays
  unsure (1)..(78): unsure at all Xaa locations
  Clone ID: MRT4577_83826C.1.pep
VFLVKSSDEHLKVEEVDVSKYIKVKRAMDVHKKAGXSVRDRYGAREVVKHWRYDKRVYVLAYEMSRYKMLKGERRCSY

SEQ ID NO: 351603 - protein, 561 aa, Zea mays
  Clone ID: MRT4577_83827C.1.pep
MAADAAAAAMSATSLCDDLEPATVRTRIRDVLAAGAARAGDRVVVGGWVRTGREQGKGSFAFLELSDGSCAATLQAIVDAAVHPLARLTATGTSVLVEGVIKEPPEGTKQNVELKVSRVLEVGEVDAAVYPLPKGKVKLTLEKLRDVVHLRSRTNTIGAVARIRHQLAYASHRFFDENGFLYVHTPIITTSDCEGAGEMFQVTTLFSQAEKTEKELRENPKPSDSEIEAAKVLVKEKGDVVAQLKAAKASKQEISTAVDELNRAKEIVSKLEERFKLKPGIPRKDDGSIAFENDFFKRQAFLTVSGQLQVETYACALSSVYTFGPTFRAENSHTSRHLAEFWMVEPEIAFANLQDDMNCAEKYVQYLCKWLLDHCQEDMEFMVKNYDKSAIERLELVSSTPFVRISYTKAVELLKNVTDKKFDNKVEWGIDLASEHERYLTEDIFKKPVIVYNYPKGIKAFYMRLNDDDKTVAAMDVLVPKVGELIGGSQREERLDVLKQRILDAGLPLEPYEWYLDLRRFGSVKHSGFGLGFERMILFATGMENIRDVIPFPRYPGRADL

SEQ ID NO: 351604 - protein, 62 aa, Zea mays
  unsure (1)..(62): unsure at all Xaa locations
  Clone ID: MRT4577_83828C.1.pep
YRANETPPQAYWQTTMNDLIILLNSRTVPTKKTLISTXGNGSRAKTTDWLIYQYTMEDYESI

SEQ ID NO: 351605 - protein, 132 aa, Zea mays
  unsure (1)..(132): unsure at all Xaa locations
  Clone ID: MRT4577_83829C.1.pep
MAAAEWDSRSVASPTGDWPPAAAASPIKGKAALPESDGGASASGSSEGKVDDGNIQEAESSLREGLSLHYEEARALLGRLEYXRGNVEAALRVFDGIGLQAGIQRFQPSLSDIPLSKRSNTLRADSSNSGSQ

SEQ ID NO: 351606 - protein, 53 aa, Zea mays
  Clone ID: MRT4577_8382C.1.pep
KTPLGFWRKKDRLTCFFYYKKKTRRQEKFFWGFWQKKGTWKVKMLKGAGLVTF

SEQ ID NO: 351607 - protein, 69 aa, Zea mays
  unsure (1)..(69): unsure at all Xaa locations
  Clone ID: MRT4577_83830C.1.pep
GGKKAWILAGVMNHAAAQXDLRSHLVGPKNERSSRHQLPYCSPQSNRRRSKLIFTTRSGGGGSQHGAQK

SEQ ID NO: 351608 - protein, 118 aa, Zea mays
  Clone ID: MRT4577_83831C.1.pep
RSSEFGSAQSTPVQMSARPTSQWVSSASTASCRYLTVSGRPLGPALVNLSMNLPLRQSRSTCEGRLSDYERFCVLGHRNSGTVYKARYPRSSDALALKYLRGQGLLRCARGRDPHARL

SEQ ID NO: 351609 - protein, 134 aa, Zea mays
  Clone ID: MRT4577_83832C.1.pep
AFLSDSYWGRYVTCAVFQIIYVMGLVVLSLASWLLLVKPSGCGGVKAHCDGPSAPGVALFYLSTYMIAFGNGGYQPSIATFGSDQFDETDPEEARSKVAFFSYFYLALNVGSLLSNTVLVYYEDSGRWVMGFWV

SEQ ID NO: 351610 - protein, 104 aa, Zea mays
  Clone ID: MRT4577_83833C.1.pep
GRIRINLSVSGGESLASIYPFLRPHSVADGLIWLSMARAIPWPSSLPQKPLLRGSFDLDSSSQLLASPASAAAGRRRPLSNSLYSPARVRRLPCRARCVCTSRF

SEQ ID NO: 351611 - protein, 125 aa, Zea mays
  unsure (1)..(125): unsure at all Xaa locations
  Clone ID: MRT4577_83834C.1.pep
VTFSKTELDRLLVSVPAQADDYEKNYXHMKPNRIPGRIHGLLHGHLQAQGQDLPKGISESAVCPAGRGPAVRRLYVQGNENNGAVINASFAARXDVDERAAEGALGGSVAXGAALTSATTLEPAY

SEQ ID NO: 351612 - protein, 162 aa, Zea mays
  Clone ID: MRT4577_83835C.1.pep
MRRNSPPTASGNRLAVIASHLSLPPLGSPAAICGEKEAALATDLNSTPTIFDKIIRKEIPSQVVYEDEKVLACRDISPQAPTHIIIIAKVKYGLSRLSKAEEGHVELLGNLLYAAKVVAEQEGLADGFRIVMDDGPRGSQSVYHRHLHVHLLGGRQMNWPPG

SEQ ID NO: 351613 - protein, 83 aa, Zea mays
  Clone ID: MRT4577_83836C.1.pep
VKCGKLGSEPNRPLQHQLTPVANSSAVPREDERVGAGGRPIELRANRRQKNQSKPHSPTRAPTRWVLLESVNCTHILWAHSSR

SEQ ID NO: 351614 - protein, 71 aa, Zea mays
  unsure (1)..(71): unsure at all Xaa locations
  Clone ID: MRT4577_83837C.1.pep
XXXXFFFFFFFFEKQIILRNENFLYYLSSVHKIIGTASTDDYLCNPNSKLQMTAYYEILTSEQHMPHEVIA

SEQ ID NO: 351615 - protein, 124 aa, Zea mays
  Clone ID: MRT4577_83838C.1.pep
KGGDLVWSWDLKNPGYNNRFGSLGAGKKIAPGQNKRGARFILQKGGQIQHTGKGKNFRGPSFYGHLTLPKINLPWRQQTSLEKGLGDSLANMARAQAGVPKEPFGNNKGLKAKYWVDKFLPLVK

SEQ ID NO: 351616 - protein, 162 aa, Zea mays
  Clone ID: MRT4577_83839C.1.pep
MRRNSPPTASGNRLAVIASHLSLPPLGSPAAISGEKEAALATDLNSTPTIFDKIIRKEIPSEVVYEDEKVLACRDISPQAPTHIIIIAKVKYGLSRLSKAEEGHVELLGNLLYAAKVVAEQEGLADGFRIVMDDGPRGSQSVYHRHLHVHLLGGRQMNWPPG

SEQ ID NO: 351617 - protein, 73 aa, Zea mays
  Clone ID: MRT4577_8383C.1.pep
VLYNQNYVSRFKLTGYMRQILAPSNHTWDTLKSTVSLTQRSSSATANDRVLNWDQFLRETSLTSLTQEYPAFQ

SEQ ID NO: 351618 - protein, 84 aa, Zea mays
  Clone ID: MRT4577_83840C.1.pep
EVRTQPKSSALIGSWGDMIHGQGHPGRWRPQSRRLACRSTGVPWGPLYCHVISRNPISEFWDQVGLGLTSASSCSLCDQVTHSF

SEQ ID NO: 351619 - protein, 78 aa, Zea mays
  Clone ID: MRT4577_83841C.1.pep
DRNPALTYAFVHTCRVVEVLWNLRLALLWALNLLREQMILNILELHHRRMFLQDHTDASSLMMHTRLVLGLNKVMLTW

SEQ ID NO: 351620 - protein, 86 aa, Zea mays
  Clone ID: MRT4577_83842C.1.pep
RLGCWIRGYLLSGSLLRHEDVLSVSKVTVGSDTVETPGHGTGLPTMEFGRRREIAHGPRVPPSNCGHGRLPEALATLLGHTPRTET

SEQ ID NO: 351621 - protein, 49 aa, Zea mays
  Clone ID: MRT4577_83843C.1.pep
ASCGGSRFVPCGACCGSHRRFSDKTGGFRVCTSCNENGLVRCAACSSGS

SEQ ID NO: 351622 - protein, 60 aa, Zea mays
  Clone ID: MRT4577_83844C.1.pep
IGSRVGTTRRLDLAQNQVMRLMPKQSRLASASCRASPRATSETHVWHRPVIMSDRPMPLA

SEQ ID NO: 351623 - protein, 48 aa, Zea mays
  unsure (1)..(48): unsure at all Xaa locations
  Clone ID: MRT4577_83845C.1.pep
XKGKLAVIASNHVFTGYQLQKFSLRNTSPWVGPFTKHMCTVAILAKWD

SEQ ID NO: 351624 - protein, 120 aa, Zea mays
  Clone ID: MRT4577_83847C.1.pep
ISQVEGEAKVRVALTDREEPNGMVRTRRSCVGTRELWGSVIEFNFPSPEFAPPRLSNCRALLAVLPPVSSSSSGVGDPAAFSTSRPRTQLLSVALVVGWHRTLSRRRRTATIRGSNSERR

SEQ ID NO: 351625 - protein, 671 aa, Zea mays
  Clone ID: MRT4577_83848C.1.pep
LGHADDAMKIAEVNAGEVEILSNEVVRLKGLLDSSAASEESKSREAELLVKNLESEVSSLKGKLEEAKVLEDRLADAEKMIEELKSEIANAQKVEEDIRQQLEEWKQKSVSLEMKLEEVTLSEKFKSDSLVSTTEELYKIQSILQDRESEIEVLKGKTTALEIEVTRLLADVTDSNEHLDASQQEVFGLQTTIDVLKNKLEAAELAASEALDNERTATTKIEVLTEEKTNLISELDDARDREEREKRAIEDLTAALDKVTGEAQEAHDRCQKKEDDYEHALAQIGDLKMALKTMEECYRVMLDEAKHDITGLRETVEKLEAEVSKCREECECKELDLITATKQSEQEIAALKEEAQHLSASLQVAEHELEAVNEERERFQEKLARTESAVAEANDAVQEAKAENERLQEKLAHVESEVAEANMAAEESKNEIERLQEKLTYTESAVAEANKTVQEAKAESSQLKERLLDKENALQSITQENDEFRMREADAMKKIEELSALLAEAMTKKHPEEEEKLVVVDEAHNSGREAIRSVAENEDTEETDHKKPKLEADAVDTNSNGEPKHDEKDDSKVEEEELKTELSLQESDRASSEKEAQSENRRQETEPSNDELDPKKDSSTESANGTAVPEDTAATTTKAATSPTKPQQPQQKKNKPLLKKFGSLLKKKNSK

SEQ ID NO: 351626 - protein, 127 aa, Zea mays
  Clone ID: MRT4577_83849C.1.pep
RGRTRGERFQEKLACTESAVAEANHAVQEAKAEKERLQEKLAHTESEVAVANMAAHESKIEFDRLQEKLTYTELVVAEANKAVQEAKAESSHLKERLLDKENALQSITQENDEFRMREADAMKKIDE

SEQ ID NO: 351627 - protein, 91 aa, Zea mays
  Clone ID: MRT4577_8384C.1.pep
VEGRSWYTPHRGRLWIAATAKKPSPQEVSELQATYRLLRGKDVEFPNDYPSGCLLGCVDLIDCLSQKQFKEQFPDISQESDSPFVFICKNP

SEQ ID NO: 351628 - protein, 663 aa, Zea mays
  unsure (1)..(663): unsure at all Xaa locations
  Clone ID: MRT4577_83850C.1.pep
IYKFRREAELLALLESAQEDLKKAKDQLAFILGERDRLVGELNEAKRVADETHEKLQDALMAKRWAEEATEIEKFRADELEQAGIDEAHRREDEWQREIECVRGQHAADLESLVNTTEEVERLMRDLSMANEAKKAALGHADDAMKIAEVNAEKVEILSNEVVRLKGLLDSSAASEESKSREAELLVKNLESEVSSLKGKLEEAKVLEDRLAEAETSLEEPEPELDKVNEERAGICQQLAGXKDEVGEAEQALEVVTAEEERLXEXLAPTTEELSVIHMILQDRESEIEVLQGKITAMEIDVGRQIENGTDXMRMAMSSHKXICDLKXTEDVLGHKLGAAEVDESKALHNEETANAKIEGLANHKNKLICELDDARDREEREKRAIEDRXVLLQKMEIRKKLLIKSQSLKLKQSXKSNGQSKHEEKDDSKVEQEELKTELSLQESKKVSFDKDTWTKNKKQETESPNDELGSKKXQQHRERKQGHYTXIRRLKCQXSNETTASKKEKDSAXLEGKLARTESAVAEANDAVQEAKAENERLQEKLAHVESEVAVANMAAEESKNEFDRLQEKLTYTESVVAEANKAVQEAKAESSHLKERLLDKENALQSITQENDEFRMREADAMKKIEELSALLAEAMTKKHPEEEEKLVVVDEAHNSGRAG

SEQ ID NO: 351629 - protein, 111 aa, Zea mays
  Clone ID: MRT4577_83851C.1.pep
LVLPNVSNIKNYCSMLETKAKYHKQHPQQPPQHKQQQEPPTQQKQQEHPQQQQVHREPRKQHHHKQLRLHNNNNNRRTTTNNSDSRHNNNINEKATSTNPTRTRTSTTART

SEQ ID NO: 351630 - protein, 103 aa, Zea mays
  Clone ID: MRT4577_83852C.1.pep
MLHLPVLHESVPTVDFDEMQGDVPLPGMPLVPPDSMPCPVADNRSPNYACFVRLGDRFMNASGVIANTSNELEPGPLTAVARGRCVPGRPALAGVPDRPRAVA

SEQ ID NO: 351631 - protein, 56 aa, Zea mays
  Clone ID: MRT4577_83853C.1.pep
RTSLGKLNESPIGVRQFSNNYLMSAFSCFPLYIFSTDPTRREVLGLFSQTRDGCLS

SEQ ID NO: 351632 - protein, 86 aa, Zea mays
  Clone ID: MRT4577_83854C.1.pep
MNRMDREEHLYTAFQYFDKDGSGCISKEELEQALKEKGLLDGRDIKDIISEVDADNDGRIDYSEFVAMMRKGTAEPNPKKRRDVVL

SEQ ID NO: 351633 - protein, 69 aa, Zea mays
  Clone ID: MRT4577_83855C.1.pep
DKNPNQSAHDQIKIPPPRRDRWRTAAHAGDGEAELHRGALELAPRRLREGPRVAAPVLQVGVQGHEHLE

SEQ ID NO: 351634 - protein, 62 aa, Zea mays
  Clone ID: MRT4577_83856C.1.pep
CSSMVSEKKITDRGLVRQRSNDPFSRPYAPPPVPSPYARFRRWRSHPALTSSPKCGCRIFKC

SEQ ID NO: 351635 - protein, 38 aa, Zea mays
  unsure (1)..(38): unsure at all Xaa locations
  Clone ID: MRT4577_83857C.1.pep
RGVDELVXFSTERGRKARPNSKVGICGEHGGEPHDVAY

SEQ ID NO: 351636 - protein, 262 aa, Zea mays
  Clone ID: MRT4577_83858C.1.pep
MAVLLRGTSAAASTAGPSSALLATTFRRSRGCLLPRAAPQRRLYVARASAQPLEVCAKESITIPGRLGDCPFTQRVLLTIEEKHLPYDLKLVDLANKPDWLFEINPEGKVPIVKLEEKWIGDSDVITQALEEKYPEPPLATPPEKASVGSKIFSTFIGFLKSKDPSDGTEEALLNELTSFDSYLKDNGPFINGGIISAADLSLGPKLYHMEITLGHYKNWSVPDSLSYVKTYMKSIFSMDSFVKTQALTEDVIAGWRPKVMG

SEQ ID NO: 351637 - protein, 91 aa, Zea mays
  unsure (1)..(91): unsure at all Xaa locations
  Clone ID: MRT4577_83859C.1.pep
MKMVIGLVVCLALSAGSAFAMQMPCPCAGLQGLDRACAGLTTMMGAGRLYPYAEYLRHAQSNPVAAAPYYARXRQTSAMYQPLRQQCCQQH

SEQ ID NO: 351638 - protein, 79 aa, Zea mays
  unsure (1)..(79): unsure at all Xaa locations
  Clone ID: MRT4577_8385C.1.pep
RPGASDLRVHVKPVIVSKPKEEKQSLKELPGELFSARPDLAHAAKIESYPEAXKQFAPPQYALDEVLCPATPDGSQGMG

SEQ ID NO: 351639 - protein, 129 aa, Zea mays
  unsure (1)..(129): unsure at all Xaa locations
  Clone ID: MRT4577_83860C.1.pep
MLATGPFTQRVLLTIEEKHLPYDLKLVDLANKPDWYLXKTCLTFLFRLLLAVFLVDSSMAVSPLTIMLLSCFIRLFEINPEGKVPIVKLEEKWIGDSDVITQALEEKYPEPPLATPPEKASVYVIFPVP

SEQ ID NO: 351640 - protein, 194 aa, Zea mays
  Clone ID: MRT4577_83861C.1.pep
NVVDFVRNFLGHSISGIHIQSPLLCMSNGKLLRDSGLISLVANFLDWFNMQVFCHPWQIKNPSPGGGPPPEAASKENQAPVRSGESDRDCELMGLMWLLQRNPPRYGATAPAVIQAFMAVDEASPPGVPVAANPGPAPGCSLPVDDMPLPAEYAQVGGANNAPPGVCCFFCLLVLFSVLSFRSRVLPVAILWFN

SEQ ID NO: 351641 - protein, 120 aa, Zea mays
  unsure (1)..(120): unsure at all Xaa locations
  Clone ID: MRT4577_83862C.1.pep
FKHPYRSXIHVRKELHEPASXRCWMHLPFDISSTDLVYETKNHVFVYAENSVHTIYQVERLLNLSPYTFFYIHADAKYPSPRIRQSSLTPPFSSPCTLPTXLLPYTDTNQPHPNKLLLIH

SEQ ID NO: 351642 - protein, 42 aa, Zea mays
  Clone ID: MRT4577_83863C.1.pep
GSTARSCTSAASSAAPDSDPAPSARLCRGHARTPELACPAER

SEQ ID NO: 351643 - protein, 123 aa, Zea mays
  Clone ID: MRT4577_83864C.1.pep
GKDFTVFSDASLVGLGCALMQKGKVVAYASQQLKPHEGNYPTHDLELVAVIFALKIWRHYLYGEKCIIYTDYKSLKYLLTQKEMNLRQRRWIELLKDYDCSIKYHLGKANVVADALSRRDCGG

SEQ ID NO: 351644 - protein, 65 aa, Zea mays
  Clone ID: MRT4577_83865C.1.pep
TFSMMRPRGPCFFHRSLGCKNNIVVASKLVKLAMSMARIILCLEPFYVVAIVEHIQHDRFQIRDS

SEQ ID NO: 351645 - protein, 78 aa, Zea mays
  Clone ID: MRT4577_83866C.1.pep
TPHLYARLRDPAQQVRKTAGLVMTHLILKDMVKVKGQVSEMAVLLIDPEPQIAALAKNFSNELSHKGNAIYNLLPDII

SEQ ID NO: 351646 - protein, 68 aa, Zea mays
  Clone ID: MRT4577_83867C.1.pep
ANHRQGYQDPMSFLCYSPWSGGLFLAAGGEIEKLNDMPTYSTFPKLLHDTNDLGASNHVQTDTPLAVP

SEQ ID NO: 351647 - protein, 58 aa, Zea mays
  Clone ID: MRT4577_83868C.1.pep
AGRGNSRPPVSPPCGFQCNASVSPSNYDQLPLFLVTIVVSAIVASMVQPSQTRSDPPS

SEQ ID NO: 351648 - protein, 90 aa, Zea mays
  Clone ID: MRT4577_83869C.1.pep
PGRPASALAPSGQFLCTHRSLTGLPCLRWLLALPSRAPCTAAPVHSSSSAARWPSRSRFPSAAAAGWARGRVRRPTELCVVGSPKHQRYL

SEQ ID NO: 351649 - protein, 95 aa, Zea mays
  Clone ID: MRT4577_8386C.1.pep
FIFDNFNRAYTYNHYEIYKGTLIMFAKQTDMKSTKESMEPIKESKEYKINWFAKTKFVPMSCGENMWQLRSTSMAERRALECATYLQTYVKYVGH

SEQ ID NO: 351650 - protein, 50 aa, Zea mays
  Clone ID: MRT4577_83870C.1.pep
HQALPTNQQLFLFPISSLADAYTVRPQLQQLEALHVEPGTESPLSSLYLT

SEQ ID NO: 351651 - protein, 175 aa, Zea mays
  unsure (1)..(175): unsure at all Xaa locations
  Clone ID: MRT4577_83871C.1.pep
SSEFGSRQPDQHSFAFHSKGSHHGAGATTATAGTPTKEGAHGEGRNTTRKTEGKPKEAATGSPRHGPDRDKHHGPHTGEPPSHHTGENPGDHGRDTDGPTADPETXAKNREQEENHSRWAMLGALGCVFPELLSRNGVKFGEAVWFKVGFHIFSEGGLDYLRNPSLIHAQSILVI

SEQ ID NO: 351652 - protein, 44 aa, Zea mays
  Clone ID: MRT4577_83872C.1.pep
FQQQRPGLNFCFRCKHKSLTGIFICIIRRSAIPLMCTHQTRMTQ

SEQ ID NO: 351653 - protein, 81 aa, Zea mays
  Clone ID: MRT4577_83873C.1.pep
QGPARKPVPFGAPPPFLAGKHAPVPPCKHAVVMKKIIAVPMSGGVDPKVAKALFIFLKFKAPVIPTFGCVYPMGVALGRPS

SEQ ID NO: 351654 - protein, 96 aa, Zea mays
  Clone ID: MRT4577_83874C.1.pep
VPIKKKKKKKKGGEGGGEKKKKKKKKKKKKKKKKKKKKKKKKKKKKGRAFLKGPNFFSPSFQTYYFWGGGPFFNSIARFLKTGGLENPWVSQIYSL

SEQ ID NO: 351655 - protein, 298 aa, Zea mays
  unsure (1)..(298): unsure at all Xaa locations
  Clone ID: MRT4577_83875C.1.pep
GLAKSVLDSSKPQTDSLDGQVTNDLKKAGSLRFYKPKFKYIFCDMDGTLLNSKSQVSARNAEALREARSRGVNIVIATGKARPAVIDALSMVDLSGXGLGLLVYGLEGRRIYKRNLDQEVCREALSYSIENKIPFVAFSQDHCYSMFDHPLVDSLHYIYHEPKAKIVPSIGQLLETAEIQKVLFLETPERISSALRPYWAKAIEGRAHVVQAQPDMLELVPPATSKGNGVKVLLNHLSISPDEVMAIGDGENDIEMLQLASFGVALANGSDKTKAAANVIGATNDEDGVAQAIYEYAF

SEQ ID NO: 351656 - protein, 306 aa, Zea mays
  Clone ID: MRT4577_83876C.1.pep
MNLFEACLNPDSLDGQVTNDLKKAGSLRFYKPKFKYIFCDMDGTLLNSKSQVSARNAEALREARSRGVNIVIATGKARPAVIDALSMVDLSGRTGIVSESSPGVFLQGLLVYGLEGRRIYKRNLDQEVCREALSYSIENKIPLVAFSQDHCYSMFDHPLVDSLHYIYHEPKAKIVPSIGQLLETAEIQKVLFLETPERISSALRPYWAKAIEGRAHVVQAQPDMLELVPPATSKGNGVKVLLNHLSISPDEVMAIGDGENDIEMLQLASFGVALANGSDKTKAAANVIGATNDEDGVAQAIYEYAF

SEQ ID NO: 351657 - protein, 95 aa, Zea mays
  Clone ID: MRT4577_83877C.1.pep
LHRRDLERILLTLGIRLSAEQAKQLVSRVVTQNICQYRSLQYSRQEGLDGGLPEEVLFGNLDLLPPPGKSTKPGAAPTEHKALVSHNGSLINVGS

SEQ ID NO: 351658 - protein, 40 aa, Zea mays
  Clone ID: MRT4577_83878C.1.pep
KKKKKKKKKKKKKKKRKKRYKKQEKKKNKIKNKKRGGRFT

SEQ ID NO: 351659 - protein, 82 aa, Zea mays
  Clone ID: MRT4577_83879C.1.pep
PPPRTAGEWEPLIKAYEKDHVSRGEAVHIMGHDANYDIPYHRKQMHDTQHQVRHLDRREADPKRLEALAATRYVEACQDLGL

SEQ ID NO: 351660 - protein, 142 aa, Zea mays
  unsure (1)..(142): unsure at all Xaa locations
  Clone ID: MRT4577_8387C.1.pep
MTSLGGVSVKPGAIKGLAGSSISXRKLGLARASDRCIPMPRAAAVVAKYRNKSVXLDLDDVGNTSGQWDLYGSDATVPYNPVQSKFFDTFAAPCTKRGLLLKFLVLGGGSLMAYVSESASPDLLPIKKGPQYPPSDXPRDKI

SEQ ID NO: 351661 - protein, 137 aa, Zea mays
  unsure (1)..(137): unsure at all Xaa locations
  Clone ID: MRT4577_83880C.1.pep
RSSTASTLSKYEIQTDTTSQGSAEKITKQIPHLEEHLLRNLDRNGVVRLGSWVETGDILVGKLTPQIASESSYIAEAGLLRAIFGLEVSTSKETSLXNLPIGGRGRVIDVKWIQRDPFDIMVRVYILHEREXKVGDK

SEQ ID NO: 351662 - protein, 113 aa, Zea mays
  Clone ID: MRT4577_83881C.1.pep
MQRWTRNGMLDFSQPSASSPYGFYNAGQGASSSRGRSHGCRSQDKEQRNLEKNLTKVRKEWMKVKEEMGYARLLSEHLSETVTEADRKVAAMLEELDRTDKYMQDILSSSLQK

SEQ ID NO: 351663 - protein, 249 aa, Zea mays
  unsure (1)..(249): unsure at all Xaa locations
  Clone ID: MRT4577_83882C.1.pep
KPANQERKRPENQKPKRTKEPKQKKKKPDHDTQKTRRSQTKKKSQNQKKKEKKPKRKPTTKKKKTNKKEKTKKQKKRKKEKRKTKKQIKKHTTKKTKTKQKKQKKTKQKTTPQKQQHTPKKKKKKKKHKKKKKHQPKKKKKKTTQKTHTKKPKNKKKKNTHKQKQKQKKKNKKKKKKPKHKXQQQNKTKNKKKKKPKKNQNKKKQTKQKKAINTKKHQKNKQKKNKKTKIKKKKKAQNTKKKTIKTKKN

SEQ ID NO: 351664 - protein, 96 aa, Zea mays
  unsure (1)..(96): unsure at all Xaa locations
  Clone ID: MRT4577_83883C.1.pep
ARTLRPGAVESRHERESGRHWLVPGCVPPSRKDGGGLSPPPGGVIIXGAVPPPPRSKIFKRISSSNNRKPEPENVWALSCSGPTRVGLSGPTKGES

SEQ ID NO: 351665 - protein, 162 aa, Zea mays
  unsure (1)..(162): unsure at all Xaa locations
  Clone ID: MRT4577_83884C.1.pep
LLCLLLLVYISFLPISAAARATGRTXLRSACPFQXMRCSMRKQGLYPVIYEDAKVYCIGELVLVTGGTKHGTHTGDVRSGXNHTYYVGETSALGGMDXSIEKXRRKWSHMMEYWLEDHRSXMHPDRNPRVEPEGGQLIDGYLSYSPGAWSPVPGYIWALEWN

SEQ ID NO: 351666 - protein, 117 aa, Zea mays
  Clone ID: MRT4577_83885C.1.pep
IIKGRGQPPLFEKERTRKGGQGPHLQVSWGQGGTKKPANGNSTKKSQGEGTAPQIKGGKKGEIYKKWKKSASGFPLINHKKFQTWGPGKMAAPGEKNAEGANKGGKKRAAIEDTRGI

SEQ ID NO: 351667 - protein, 489 aa, Zea mays
  Clone ID: MRT4577_83886C.1.pep
MAGGQHQLVGGASLELRRGRKTEYLDIPLKDSIKGWRFEWFIVENHCKSLPPRSGRQPDVRTPSWVESPTPLEIAEAKVLLAEPLKDTAYPAYLYSGINDSTWVTNKRISTENLVSRLDMISRGRVSNVGALVAYSAWNLSPYKSFSEFVSNPPASDGGLGLRVRPSPEDIEALIDSLRNLPNDERQVHFEMPISPSDAEISAMLDMLAEDSSDSVPAETIAVATIREPGKTLNAQKSDSTRPKRLRPANHPIASAEGKKKKKRRLRRVSCLDQDASPSAPAAEEVPVKLFTGADPNGCDPANADPNGCDLADADPNGCDLDDADPNGCVVRIVDEDEEEEEEIPLIRKNSRRYLVGGESSDIPSPALSALVGLKELSITNFDQALEDVVPEDLLSEPIDGGMMDVCSDILDVGLSLSQVASCASSTLECGPRSQEAGQGCSIPMEVTENSSALEVAVAENPVPKDGASIYPAPRVLPLQPSPRGCCRW

SEQ ID NO: 351668 - protein, 76 aa, Zea mays
  Clone ID: MRT4577_83887C.1.pep
NFPSARGSPPGYTAFLFAFALTVFLTRLVTFFPSPLCPYFFIFNKSHNNTLSIMKFFPSKNQLLDAGGGSPPPKIY

SEQ ID NO: 351669 - protein, 156 aa, Zea mays
  Clone ID: MRT4577_83888C.1.pep
LSQSSRCASLTWAVPVLFSSRQSVSYITLQQQIKKTEDQSQSVSSPLIDYTGVSRNTITVEEILTIDEKPGWKKATKITSRRSGSRDAISRSRRTSCSSSARIRTRFHPWRQRCGSGPENHSVGGPDGVRSARGDAERGRRGGPGRPCESQFAHRS

SEQ ID NO: 351670 - protein, 54 aa, Zea mays
  Clone ID: MRT4577_83889C.1.pep
KEKATDKQKQMCVHPKTKCCPPTQSLLHIISDCKHFPTIDISDKTTSMLSFYDR

SEQ ID NO: 351671 - protein, 107 aa, Zea mays
  Clone ID: MRT4577_8388C.1.pep
GGSKLPHIFSAGHRHEFCLSKPVNFVLFRFFNWFHALFGTFHVSLLCKHYQRALVDFVMVICICPIEKKKKKCKKRSACRCRFSKCICLPSNSLVNMFGYNNGTGRN

SEQ ID NO: 351672 - protein, 314 aa, Zea mays
  unsure (1)..(314): unsure at all Xaa locations
  Clone ID: MRT4577_83890C.1.pep
MSWLLASPEESLPFILADRGFDVWIANNRGTRWSRRHVSLDPSSRGXWWRWRPSRRAGWXEPAEIRGAAXTPVAYLAHITTPIGILLAKAFVGESLTGALGLPRHGRVRPASVRNVPRSRTPPTADGCRHAAEXXPDLTXDLTCSARRAGXVTNLIRAFCRRPGMSCYDLVGSITGKNYCLNSSAVDVFLKYEPQPTSTKTMVHFAQTVRDGVLTKYDYVLPERNIASYGQAEPPVYRMSGIPPSFPLFLSYGGRDSLADPADVRLLLQDLRGHDQDKLTVQYLDKFAHLDFIIGVCAKDYVYKDMIDFLNRFN

SEQ ID NO: 351673 - protein, 172 aa, Zea mays
  Clone ID: MRT4577_83891C.1.pep
MGTLVALAAFSEGRVVSQLKSAALLTPVAYLAHITTPIGILLAKAFVGEVLSDFLGMAEFDPLAPPVTNLIRAFCRRPGMSCYDLVGSITGKNYCLNSSAVDVFLKYEPQPTSTKTMVHFAQTVRDGVLTKYDYVLPERNIASYGQAEPPVYRMSGIPPSFPLFLSYGGRDS

SEQ ID NO: 351674 - protein, 51 aa, Zea mays
  Clone ID: MRT4577_83892C.1.pep
GSAPSGRSTYPMCPPVSCPPGPACFSGSPPMAPAVRTRPIQKRGTVLRYAW

SEQ ID NO: 351675 - protein, 42 aa, Zea mays
  unsure (1)..(42): unsure at all Xaa locations
  Clone ID: MRT4577_83893C.1.pep
XXXRHDVSPHLLDSTSQTPVSHNSVTYSAXSLQIATTPLSPL

SEQ ID NO: 351676 - protein, 355 aa, Zea mays
  unsure (1)..(355): unsure at all Xaa locations
  Clone ID: MRT4577_83894C.1.pep
MSWLLASPEESLPFILADRGFDVWIANNRGTRWSRRHVSLDPSSRLYWNWSWDDLVVNDLPAMVDFVNTQTGQKPHYIGHSMGTLVALXLLGGPGGGPAEIRGAAHAGGLPRPHHHPHRHPASQGLRRRXSRTSSASPSSTRXVRTASSGSHLQAAVPALQIDSDYSSLRFWITRFVCCDQLTCCSADCAGXVTNLIRAFCRRPGMNCYDLLGSITGKNYCLNSSAVDVFLKYEPQPTSTKTMVHFAQTVRDGVLTKYDYVLPERNIASYGQAEPPVYEMSGIPAGFPLFLSYGGRDSLADPADVRLLLQDLRGHDRDKLTVQYLDQFAHLDFIIGVCAKDYVYKDMIAFLNRFN

SEQ ID NO: 351677 - protein, 626 aa, Zea mays
  unsure (1)..(626): unsure at all Xaa locations
  Clone ID: MRT4577_83895C.1.pep
MVNFGKKLMADQIPEWKGYYINYKLMKKKVKQYGQQLQQGEKDRRRVLKDFSKMLDDQIEKIVLFLLEQQGMLASRIEELGKQRAILQDQPDISGIAELREAYREVGIDLIKLLKFVDLNATGIRKILKKFDKRFGYRFTDYYVTSRSNHPYSQLQQVFKHVGVGAVVGALSRNLAELQERQGSYLSIYDQPSSALKDPIIDMINSSVDKLTRSTNFLRFLGQHALIVDEESPSTAGEEEIEDQKYHFMSLMLNLVNTFLYMVNTYIIVPTADDYSXMGSARAVNRRYISDCVPARIRMQASAGFVSASALGMACGPALAGLLQWKFKIYMVTFNQSTLPGWVMAVAWLLYLIWLWVSFKEPNRATEVNEAPQNPASGQTVDIGQVENGLAQPLLMDSVDKQNEDEDEEVDESEEAADDSRKPATSIGSAYRLLTPSVKVQLLIYFMLKYAMEILLSESSVITNHYFSWNTSAVAIFLAILGLTVLPVNAVVGTYISNMFEDRQLLMVSQITLLVGIIFSFKVTSTYSVVQYVVSALVTFVSAEVLEGVNLSLLSSVMSSRLSRGTYNGGLLSTEAGTLARVVADCTITAAGYLGVGKLLNVTLLPSLVICVASIACTFLTYNSLF

SEQ ID NO: 351678 - protein, 176 aa, Zea mays
  Clone ID: MRT4577_83896C.1.pep
SLLSPQLHPPLLARRPPARATRWSWTQTRRRQPSWTSYYRHSPPHRLALTEMNLDTSMFTFESREVYRPSAIDAHVAISSLPGTVDHQDCTPCDLPPRQGAPSGGHASVYRSSRRHIHHRSARTVARTIKLLPLISICCHTPAAFFMPNDMIHLNYDNYTTHDSCDRRISVNGIHA

SEQ ID NO: 351679 - protein, 193 aa, Zea mays
  Clone ID: MRT4577_83897C.1.pep
LIPYLFSYSSPQDRPGQVNHIFLDLKINLEERHLQGVCRIALTPVRAGIEQLTLDAVDLKIAWVLIKGVSQSFDYDGEKLTINPLQPLGTEPVTLEIQYELKNPRRGIYFIQPDRHYPDKPVQVWTQGEDEDSRYWFPCFDYPGQLATSEIRVQVAKPHRVISNGSLIEQKDLGNEQIFHWSQSQIHPTYLMT

SEQ ID NO: 351680 - protein, 56 aa, Zea mays
  Clone ID: MRT4577_83898C.1.pep
SSNSSLSASGLKLRNSTPASVSSTKLAQMLSTYSLEHHTLFFSPPIIHTPFTSLYS

SEQ ID NO: 351681 - protein, 59 aa, Zea mays
  Clone ID: MRT4577_83899C.1.pep
YTRNIESFIFLNRISRVTVHKSHLASTSLHPVSACVAHCTKSPPSAEKQKRRRVLRRRE

SEQ ID NO: 351682 - protein, 583 aa, Zea mays
  Clone ID: MRT4577_8389C.1.pep
PRVRSKVVYIALNVIQVSMIEAYLRANKMFVDKHEPETERVFSSYLELDLSEVEPCVSGPKRPHDRVPLKEMKSDWHACLDNEVGFKGYAVPKEQQGKVVKFDFHGRPAEIKHGSVVLAAICSSTNTSNPSVMIGAGLVAKKACELGLEVKPWVKTSLTPGSVVATEYLKHSGLQDYLNQQGFHVAAHGCATCVGNSGDLDGSVSAAITENDIVAAAVLSANRNFEGRVNPLTRANYLASPPLVVAYALAGTVDIGFEEEPIGVGKGGKEIFLRDIWPSNQEIDEVVESSVQTHLFKKVYDSIMERNPRWNQLPVPKEALYPWDDRSTYIRKPTYLEGMSMTPPGPPTVTEAYCLLNLGDSITTDHISYSGKIPEGTPAAKYLLEYGVEPKNFSSYGGRRGNNEVVMRGAFANMRIVNKLLNGEAGPWTIHVPTGEKLYVYDAAMKYKSEGHDMVIIAGSEYGSGSSRDSAAKGPMLLGVKSVIAKSFERIHRSNLVGMGIIPLCFKAGEDADSLGLTGRERYTIHLPTSTAELSPGQDVTVTTHDGRSFTCTLRLDTQLEVTYFNHGGILPYMVRNLAAQMK

SEQ ID NO: 351683 - protein, 36 aa, Zea mays
  Clone ID: MRT4577_838C.1.pep
LFLSLLLTNPTSFLPTTWAARILRVLPRLDLGGHWV

SEQ ID NO: 351684 - protein, 249 aa, Zea mays
  unsure (1)..(249): unsure at all Xaa locations
  Clone ID: MRT4577_83900C.1.pep
MDRHSLLYQSLIFSVVTIALIRVLKLFLTTRAPKVRLPPGPGKLPVIGSMHHLMNALPHRALRDLARVHGPLMMLQLGGTPLVVVSSKEMARKVLKTHDANFANRARLLGGDIVLYGWSDIVFSPTGEYWRKLRQLCIAEILGPKRVLTFRHIREQEMAAEVARIRAAGPSTPVELNAMFINLANTIVARASFGNVQGNAENFLSAISAGVVLTSXFTVPDLFPTWRPXLAAVTGMRHALEQVHRTVDT

SEQ ID NO: 351685 - protein, 51 aa, Zea mays
  Clone ID: MRT4577_83901C.1.pep
DACSYDQTASLPRQQLWRCPCERIIGPDIEKAPKSALSGSELSPVSHSSIL

SEQ ID NO: 351686 - protein, 50 aa, Zea mays
  Clone ID: MRT4577_83902C.1.pep
PHTGGYEFLTPCFLNPLFSTKTYQRYDSIFIFSKYLQQIMSRLLLIFKEI

SEQ ID NO: 351687 - protein, 247 aa, Zea mays
  unsure (1)..(247): unsure at all Xaa locations
  Clone ID: MRT4577_83903C.1.pep
MVVALGPGRFYGSGLPRPRFFPGDRVDPPASVTDPLLEWAREAHWSMGGISVKRLRLQGRIEGSVDKLRRRAHRDARVKAKAKARAAGHMPASLAALXVRRRRLQXGDSEDEQEVAARERALKRELVDDDEDSDGSGESEEDEPLAAIVTAAKKRRARKLSDEFDRIAAEQQQQLVLESKQKPGAATPATTSTKRKATVPRASPKRKASVPAAGAPARASPKRKAAATAAAPLSAAGSRRTSPRNKH

SEQ ID NO: 351688 - protein, 55 aa, Zea mays
  Clone ID: MRT4577_83904C.1.pep
RRSFCRHVAVISMSGCGPNRDALDFQGSRMCAPYTARCSALVRAVYPTSGRNKIE

SEQ ID NO: 351689 - protein, 89 aa, Zea mays
  Clone ID: MRT4577_83905C.1.pep
AHPNSCPASATARDYHQHACTPLHTVQTCPHCPVGSVSLGHGRPQHRILNSGSHIGKDVTSHLVITLLMCSSVESHDDIRLEHTQALTI

SEQ ID NO: 351690 - protein, 56 aa, Zea mays
  Clone ID: MRT4577_83906C.1.pep
VSPMKISFSLTRALEGGMCNLAACHVLSCLLRSDAQRHVEPVQGREPHPREGNRSL

SEQ ID NO: 351691 - protein, 139 aa, Zea mays
  unsure (1)..(139): unsure at all Xaa locations
  Clone ID: MRT4577_83907C.1.pep
PAKIQVGVFFATMPPDALEVXRKFMIEPVRILVKRDELTLEGMKQIYVNEYMEDCKLHTLCDLFETLVITHSVMYANTRSKVDWLTDKMKSRDHTVSDSHGDMDQTTTDIIMREFRSGFLRVLITNELVACGIDGQQGV

SEQ ID NO: 351692 - protein, 201 aa, Zea mays
  unsure (1)..(201): unsure at all Xaa locations
  Clone ID: MRT4577_83908C.1.pep
MEIAEALQAYTGLTPAAAATILALMVATYLLVSPLFVXPPPPPPXAPLPKPPQQQREGEKAQEEEEEEEPMPFVYPDPVEVGELTLEQLSAYDGKDPAKQILIAIRGQVYDVSRGRLFYGPQGPYSLFAGRDATRALALMSFDPNDLTGDLDGLSADELEVLQDWEEKFKERYPRVGHLACQDATDSGQTTAGLHHEEGDA

SEQ ID NO: 351693 - protein, 55 aa, Zea mays
  Clone ID: MRT4577_83909C.1.pep
ECVMEALRARERVHGRRSRSSVPGVTSVRARDGSYKRWEGLEASLRWWWPPPRLS

SEQ ID NO: 351694 - protein, 65 aa, Zea mays
  Clone ID: MRT4577_8390C.1.pep
VSVRRFEWRTCGVMQHAFVFVILSSRFGVHVHHSRQLCLTYMVSSAVGIQTESNKQGSCARRVEM

SEQ ID NO: 351695 - protein, 94 aa, Zea mays
  unsure (1)..(94): unsure at all Xaa locations
  Clone ID: MRT4577_83910C.1.pep
GDHVMLSSTAKNATDHFEHVGHGSPGRAIMDEYLVGEIXAARFPSRVKYAPRKHPHYNQNKTPQFVIKLLQFLVPLAILGLTVPVRFYAKSGSA

SEQ ID NO: 351696 - protein, 164 aa, Zea mays
  Clone ID: MRT4577_83911C.1.pep
HPLAPARTPPPWRARPQLPTMVLAQARRHPWPQFPRCCQLWLPRRRQLWLAGLRARWRWHITSKTYNLVLLDVDSHDRFLKSVCCKHDEVLLIIKVYFKRTGAEWRLERIRNTFKGDRGIPHVALSDEDSMLRAYRPDSDSRGGGCSFRKKDGRHFSNAQLHVL

SEQ ID NO: 351697 - protein, 519 aa, Zea mays
  Clone ID: MRT4577_83912C.1.pep
MSPSSGSTPSSKRKPGPSRSPYVWTTSTWSVSGPPAGCGGSSARTATPTSSTTTPSGSVLGAGTRTSSVVRASTGAATLQPLDPNQDVLSLREARSQKRKAASPTPPEDDLDQEIQNLEILQQQVQRKKEKTARLADLQRQIDEASEEATPWPQSYKPPQLPMFDGHTDPKQFLMSYEATISSYGGNTAVMAKSFVMAVKSVAQTWYSSLRPGTITSWQKLMDMLITSFQGFQTKPVTAQALFQCTQDHEEYLQAYVRRFLRLRAQAPTVPNEIVIEAMIKGLRPGPSAQYFARKPPQTLEKLLQKMDEYIRADNDFRQRREEAFRFSEMTRGFGGRFHPRHVRSIHNSAQTDDRGSQQQRPQYSSQASGQQQSSVRPPAPRGRGARGFGGRFGDQPRRIYCLFCGEDKGHTTRMCHVTIQKQKEIAEAAAQQSQPKQVMHTASYHSPYIPEYVGNHSAASVASASQPQASWQQPPPPPPTQRGQQPEGSQHTHLQRDFREESEARTVNSTVPESKHIY

SEQ ID NO: 351698 - protein, 494 aa, Zea mays
  unsure (1)..(494): unsure at all Xaa locations
  Clone ID: MRT4577_83913C.1.pep
MPPKKASATGAATLQPLDPNQDVLSLREARSQKRKAASPTPPEDDLDQEIQNLEILQQQVQRKKEKMARLADLQRQIDEASEEVRHLVQDDQNRRPPRRELHQEGFYNEDDWYEDFHHGNFAFDDASPLSTELQVTPWPQSYKPPQLPMYDGHTDPKQFLMSYEATISSYGGNTVVMAKSFVMAVKSVAQTWYSSLRPGTITSWQKLNDMLITSFQGFQTKPVTAQALFQCTQDHEEYLQAYVRRFLHLRAQAPTVPNEIVIEAMIKGLRPGPSAQYFARKPPQTLEKLLQKMDEYIRADNDFRQRREEAFRFSEMTRGFGGKFHPRHVRSIHNSTQSDDRGSQQQRPQYSSQASGQQQSSARPPAPRGRGARGFEGRFGDQPRIIYCLFCGEDKGHTTRMCHVTIQKQKEIAEAAAQQSQPKQVMHTASYHSPYIPEYVGNHPXVSIASASQPQASWQQPPPPPPTQRGQEPEGSQHTHIQRDFREEPEARTD

SEQ ID NO: 351699 - protein, 198 aa, Zea mays
  Clone ID: MRT4577_83914C.1.pep
DAWGSRSRAAARDLEDGELLNHQSTSESEECFMAFARVFSGVLHAGQKVFVLSPLYDPVKGDTVQKHVQEVELQYLYEMLGQGLKPVASVGAGNVVAIQGLGQHILKSATLSSTKNCWPFSSMMFQASPMLKVAIEPSNPADLGALVKGLRLLNRADPFVEYTVSQRGEHVLAAAGEIHLERCIKDLEERFSKSNWWS

SEQ ID NO: 351700 - protein, 503 aa, Zea mays
  Clone ID: MRT4577_83915C.1.pep
MPPKKASATGAATLQPLDPNQDVLSLREARSQKRKAASPTPPEDDLDQEIQNLEILQQQVQRKKEKMARLADLQRQIDEAFEEVRHLVQDYQNRRPPRRELHQEGFYNEDDWYEDFHHGNFAFDDASPLSTELQATPWPQSYKPPQLPMYDGHTDLKQFLMSYEATISSYGGNTAVMAKSFVMAVKSVAQTWYSSLRPGTITSWQKLKDMLITSFQGFQTKPVTAQALFQCTQDHKEYLQAYVQRFLRLRAQAPTVPNEIVIEAMIKGLRPGPAAQYFARKPPQTLEKLLQKMDEYIRADNDFRQRREEAFRFSEMTRGFGGRFHARHVRSIHNSTQSDDRGSQQQRPQYSSQASGQQQGSVRPPAPRGRGARGFGGRFGDQPRRIYCLFCGEDKGHTTRMCHVTIQKQKEIAEAQQSQPKQVLHTASYHSPYIPEYVGNHSAASVASASQPQASWQQPPPPPPTQRGQQPKGSQHTHLQGDFREESEAHTVNSTAPESKHIY

SEQ ID NO: 351701 - protein, 474 aa, Zea mays
  Clone ID: MRT4577_83916C.1.pep
MCHVTIQKQKEIAEAAAQQSQPKQVMHTASYHSPYIPEYVGNHSAASVASASQPQLDPNQDVLSLREARSQKRKATSPTPPEDDLDQEIQNLEILQQQVQRKKATPWPPSYKPPQLPVFDGHSDPKQFLMSYEATVSSYGGNASVMAKSFVMAVRSVAQTWYSSLRPGTITSWQKLKDLLLTSFQGFQTKPVTAQALFQCTQDHEEYLQAYVRRFLRLRAQAPTVPNEIVIEAMIKGLRPGPSAQYFARKPPQTLEKLLQKMDEYIRADNDFRQRREEAFRFSEMTRGFGGRFYPRHVRSIHNSTQNDDKGSQQQRPQYSSQASGQQQSSFRPPAPRGRVARGFGGRFGDQPRRIFCLFCGENKGHTTRMCHVTIQKQKEIAEAAAQQAQPKQVIHTASYHSPYIPEYVGNHPAVSVASASQPQASWQQPPPPPPLQQGQQPEGSQYAPHQRDFREQSEARTVNSTVPESKHIY

SEQ ID NO: 351702 - protein, 214 aa, Zea mays
  unsure (1)..(214): unsure at all Xaa locations
  Clone ID: MRT4577_83917C.1.pep
LEAGRAGTSHHFLAVLLLTLPPPPTRLPLPPLAMTHHAAPPGLTSHLVPCNSSLFTKNALPPSSPRXDEPPCTLAFTTHSARPVILKAFQKQNSSPIPRMDWYPYDFXTFLAMTSMSQIYAGXKEHERVLSMWDHLCDNHQTGTLLLLQSQLASNSYHMHMNHGILLTESCMNAYTLSISWTTTLPNATRERVITAXALMHYRYLXNLLLYLEY

SEQ ID NO: 351703 - protein, 128 aa, Zea mays
  Clone ID: MRT4577_83918C.1.pep
HDHIGCLSRHMVISLSLRAYLVVSCSIFVVCNSPPCRYEPALSTPYVFHEMASCACRHGPGTCPCSSFHMQSSFFMSRCCTASSLGVACSASVPGVPLHRRLAWRWLPPGVPLPLAALPSLHSHRHPI

SEQ ID NO: 351704 - protein, 93 aa, Zea mays
  unsure (1)..(93): unsure at all Xaa locations
  Clone ID: MRT4577_83919C.1.pep
FPAGRXPXXALVSPVSSXXXGXAPXRXALAVLCXXLPXLPPAPRLVAPFPXGRLCXPVRGVGVWVXGSXSSGRAXXXCSRPVSAXVAVPCAAP

SEQ ID NO: 351705 - protein, 722 aa, Zea mays
  Clone ID: MRT4577_8391C.1.pep
MSQDKKVVAETKLTEEEKLFEQKKAANPYIAGFLESMAKSNMDKITKEILEGLSEDTGDSDNYDAESGGEDSEDRPWRPSHVIFEKSTIKQSHLESMSGRYFRDISIVRAGGDDNTPAPEENEVVIFRSFFKAGLWFPLSRPGKKRLNRVFDAIGFVYPDYCYPLRGQGKKRKIVASAKTAASATPDEPTPKSKKLNVLTHRPCYIEPAVVPEFGGETSSAAEPKETAPPTQKIDEPTVMSKAPLTELIETKVDEDKAERPKTEEAIKMLEILSPSTEVTVLKAEKCSATTPRRKRIVNVLDILETTDSKCPAPLKKVAEAVKAQTGTDTKQIEVEAATIEAEVDTGPSKLAEKEFAKVEEVASEEKVTEQISTEKITTPAPEALKESIDYIICHASGKVLSKEEEQEAYHYAQKLKYPKGALPDNKEISVSREIGRSFGFPKLEDGLSVLSKDELADSLAYNSIKGLILSNALRAQKNIEDEGCTIALNNLRSEDKILILLVNKIKEDEANSKVKAEAQKSEIEDLWRQLAEAKEKCAVAEANRDANEYWSNYLEKTVAELHASKEICFEKFVECVKKMKTSFANVGAYSNEDNFIRGDPEGVIEWISGEVEAFEEILSDRGDVYAFSGVRGVAAVLERAGCDHVKILAQAEAAFSVDTTKDPSAEASFMGGIFFTDIWENGGREMAHEIIKKSEKDIHEAREVAKKAEEAAERERRICIV

SEQ ID NO: 351706 - protein, 73 aa, Zea mays
  Clone ID: MRT4577_83920C.1.pep
SPPLALFLVVFSVWGRTWPLPHASATTAATLSCLSLAFLETESSSTMGSTPTARPRDITGNRRWQLVATLRAG

SEQ ID NO: 351707 - protein, 65 aa, Zea mays
  Clone ID: MRT4577_83921C.1.pep
LGKTAWNSKWILSEWRRRLSRTGGKLLIIHNYATQYSCMCSAYLGFAISVDCIEYTATGQVTRAR

SEQ ID NO: 351708 - protein, 68 aa, Zea mays
  unsure (1)..(68): unsure at all Xaa locations
  Clone ID: MRT4577_83922C.1.pep
LGRRXCXRXXCXVGFGPFXVVLSXAAXGXCAPPFXAPCXRAXCXFVXVCRCAXXCFCXFGAGVLXXSF

SEQ ID NO: 351709 - protein, 76 aa, Zea mays
  Clone ID: MRT4577_83923C.1.pep
VRDNYIDVASRQSRSRRGSERSRTHQFPHTKGFHGIISACTSDAIRGCRQGRLWSEVSPAVDDGEPMMRVLMSCGA

SEQ ID NO: 351710 - protein, 160 aa, Zea mays
  unsure (1)..(160): unsure at all Xaa locations
  Clone ID: MRT4577_83924C.1.pep
ADRPEFLGLTRVLGRVGGRVGGRVGERMTRVQEATLPIILQGKDVLAKAKTGTGKTVAFLXELANQLAAEARKLLKYHRSLGVQVVIGGTRLPQEQRSMQANPCQILVATPGRLKDHLENTPGFSTRIRGVKVLVLNEADRLLDMGFRRDIEKIITFIPK

SEQ ID NO: 351711 - protein, 547 aa, Zea mays
  unsure (1)..(547): unsure at all Xaa locations
  Clone ID: MRT4577_83925C.1.pep
GGRRRATEGHEXGPALPRVVATSTRGGGAIEQGADGMEGSASNADRSVHEAVGVDGTYLTETRFDQCAISPLSLKAIKDAGYERMTRVQEATLPIILQGKDVLAKAKTGTGKTVAFLLPAIEVLSALPRSTSINLLVMCPTRELANQLAAEARKLLKYHRSLGVQVVIGGTRLPQEQRSMQANPCQILVATPGRLKDHLENTPGFSTRIRGVKVLVLDEADRLLDMGFRRDIEKIITFIPKDRQTLLFSATVSEEIHQISHLAMRKDYDFINAVQEGDEETHAQVNQTYMVAPLGLHLPILYDVLKKHVAEDAEYKVIVFCTTAMVTRLVAEVLSQLKLNIREIHSRKTQSARTKVSDEFRKSKGLILVSSDVSAQELGYPDVTGNQQVGYWXSDVSARGVDYPDVTLVIQVGVPADREQYIHRLGRTGRKGKEGQGLLLLAPWEKYFLGAVKDLSIAESAVPPVDSSVETEVRNAVRKVEMKSKECAYQAWLGYYNSNKTIGRDKSRLVHLAEEFSQSMGLAVPPAIPRNILRKMGLNNVPGLRSS

SEQ ID NO: 351712 - protein, 224 aa, Zea mays
  Clone ID: MRT4577_83926C.1.pep
MAKGEGPAIGIDLGTTYSCVGVWQHDRVEIIANDQGNRTTPSYVAFTDTERLIGDAAKNQVAMNPTNTVFDAKRLIGRRFSDPSVQSDMKLWPFKVIPGPADKPMIVVNYKGEEKQFAAEEISSMVLIKMREIAEAFLGNSIKNAVVTVPAYFNDSQRQATKDAGAIAGLNVLRIINEPTAAAIAYGLDKKATSTGEKNVLIFDLGGGTFDVSLLTIEEGIFEV

SEQ ID NO: 351713 - protein, 57 aa, Zea mays
  Clone ID: MRT4577_83927C.1.pep
SCGRCRELLESGARAGRGNRFWPTGTLVKNNCRQAGCVTNQFEQLLASDVSDLAKEA

SEQ ID NO: 351714 - protein, 138 aa, Zea mays
  unsure (1)..(138): unsure at all Xaa locations
  Clone ID: MRT4577_83928C.1.pep
HRISIRLLCPSVLSVRSSSHELVAAPGLAAALLLLAARDGTASAELSXGDVTSAAAPRLRYAMRSAAPPSALRCSALRSLTSRASAAPDRHLTLPCLHNMTARLGGHDGLRHPANLPVKCLRSGGQPIHPTVDCDQIN

SEQ ID NO: 351715 - protein, 100 aa, Zea mays
  Clone ID: MRT4577_83929C.1.pep
IPATLSASLLPKKYITLTDNLCILVFAFAKQMEIYQLSYNSKSIVLCCLTGVRSQRFLSLEQSLIGQLFTLRLLASYLSSLGELLLLCRLLPCDAGTIVS

SEQ ID NO: 351716 - protein, 42 aa, Zea mays
  Clone ID: MRT4577_8392C.1.pep
RTCSLATQRAEAANQLIFRHELLHKETMAAKGGHYPTGADTN

SEQ ID NO: 351717 - protein, 50 aa, Zea mays
  Clone ID: MRT4577_83930C.1.pep
VGPGTTHMGHIITIYYIEPSQISSMGKCPGGIRYPSQFPCVHRVFGLQII

SEQ ID NO: 351718 - protein, 100 aa, Zea mays
  unsure (1)..(100): unsure at all Xaa locations
  Clone ID: MRT4577_83931C.1.pep
EAFVGFKAVVVATVAYAVSNLVSVRMMPWAKANINPAXKALIVSTVXGMVXXXGGXKKIPPLVRKHSYEKEWEHIKETSFKGTGCPQPGLLMALRERASN

SEQ ID NO: 351719 - protein, 175 aa, Zea mays
  Clone ID: MRT4577_83932C.1.pep
MLPKMPSVRWISASLLVILLSLHPIADAFYLPGTFMHTYEAGEEIAAKVNSLTSIETELPFSYYSLPYCKPPEGVKKSAENLGEVLMGDQIDNSPYHFHVNVNESLYLCTTDPLTKEQAELLKNRARNLYQVNMILDNLPVMRFTEQNGMTIQWTGYPVGYNPMGSSEDYIINHL

SEQ ID NO: 351720 - protein, 78 aa, Zea mays
  unsure (1)..(78): unsure at all Xaa locations
  Clone ID: MRT4577_83933C.1.pep
LKLHLXLQTFKSIFGFLLSSXPLKTLNDTELEACCSEFAKTFSSQASSDIELFKVKIVEXLYKVQHHWRMEPNAITDP

SEQ ID NO: 351721 - protein, 213 aa, Zea mays
  Clone ID: MRT4577_83934C.1.pep
QDSLMLPKVDRPMEPNNGSFVPSTNQVWFGAASREPSHSGSSTAMTTYSAGFEMCDELPPAGQAMSICESSRKNAANGTTIGRSKGKEYRERVQQDNLKDERKMSSTNTSGASKADNGDPMKKRRVERSRKMAEAKERSSTPVIPSDMQAVLKRCETLEKEVRSLKLNLSFMNRKDSEQTKQIEELQQKNEDLAEEKERLLEEIERIVSDPNT

SEQ ID NO: 351722 - protein, 91 aa, Zea mays
  Clone ID: MRT4577_83936C.1.pep
SLVARAWSSIVDVGGFHRSRGGRAFFSVVCRQPLFLGGGRSFATPGSLPGRVLAARVRAAGRPGPLAYSHTLHALLRPVSFASSVALLSLL

SEQ ID NO: 351723 - protein, 58 aa, Zea mays
  Clone ID: MRT4577_83937C.1.pep
PRKKRVLPVHPMRPGPADTSPRFLRFFFKRVVIAAWDRTCSAPGSGVCESGGHPVSLN

SEQ ID NO: 351724 - protein, 67 aa, Zea mays
  Clone ID: MRT4577_83938C.1.pep
VIRTAAECVHVRTIAKYADRAQSQSYIRHAGWQERAWMPAARAAQLALARKLSLRSWTSPLQVLMSS

SEQ ID NO: 351725 - protein, 78 aa, Zea mays
  Clone ID: MRT4577_83939C.1.pep
PWRPPPSPPPSPSYPAPPPVLPPLLLTSESRRTSSQEAARGGRRQGVYRVTLGIRGLLFFSLVSFVCIPNLLYPHYRS

SEQ ID NO: 351726 - protein, 57 aa, Zea mays
  Clone ID: MRT4577_8393C.1.pep
KKNKKKKNMGKNIEKKIIFYTEKNKGSWGSAHLNLLNCHIGKNLKTWKNHRDNILIC

SEQ ID NO: 351727 - protein, 58 aa, Zea mays
  Clone ID: MRT4577_83941C.1.pep
QIMFARFKSSSMTLCSICALGTRFAHCLPCYSLGYRYVQVMHKSGLAGPVSSEYILRI

SEQ ID NO: 351728 - protein, 132 aa, Zea mays
  unsure (1)..(132): unsure at all Xaa locations
  Clone ID: MRT4577_83942C.1.pep
KEHPTTKKKGPGKRNKGGPGGTNPRKPPGPPHPGTRKPGQTPKRTRGPTPAPPKSMKNAPKGLGGPPNDPKGGPQKNPTKGPGGPXPRPXQEKPAPGGENLPQGTPGKPYXTKNRGSPPPGRPRPKRXEGPP

SEQ ID NO: 351729 - protein, 42 aa, Zea mays
  Clone ID: MRT4577_83943C.1.pep
NHWPLFLLRVRILIIVLYHKVLLVYNVTLIFYRQQNHLFLGS

SEQ ID NO: 351730 - protein, 136 aa, Zea mays
  Clone ID: MRT4577_83944C.1.pep
MASSAAYPDADENLEAIITRIEQKSRKIETLLKQSKPVEALKTALEGSPLKTRDERCKSANWIVVHRALMAIRDVDGMFNSLDPEYYDILMKYLYRGLSTGDRPTCDQCLKIHEKLTEKAGLGCILRSLADTVNTV

SEQ ID NO: 351731 - protein, 174 aa, Zea mays
  unsure (1)..(174): unsure at all Xaa locations
  Clone ID: MRT4577_83945C.1.pep
MASSAAYPDADENLEAIITRIEQKSRKIETLLKQSKPVEALKTALEGSPLKTRDERCKSANWIVVHRALMAIRDVDGMFNSLDPEYYDILMNYXDKMTMSCMTQYLNKQIGELDGCISCLILVMTXQMNMYLYRGLSTGDRPTCDQCLKIHEKLTEKAGLGCILRSLADTVNTV

SEQ ID NO: 351732 - protein, 212 aa, Zea mays
  Clone ID: MRT4577_83946C.1.pep
MAQDEVPESSSPSSAAAGRLNAAAPEFTPRSAAPHQAHPHRRGPHHHHHHHHQPHHQHQHQYRHQHHHQGEDEGDAAAVVDNAQLVLPEELARRVVKQVEFYFSDVNLATTDHLMKYITKDPDGFVPMTVVASFRKIRELIDRSLLPGALRTSTELVVSDDGKMVRRRVPFSDVDAEEVQSRIIVAEKLPEDHRYQNLMRIFSTAGSVKSIR

SEQ ID NO: 351733 - protein, 81 aa, Zea mays
  Clone ID: MRT4577_83947C.1.pep
GAIAGCCAEAATYPFEVVRRQLQMQVKATRMNAFATCLKIVDQGGVPALYAGLIPSMLQVLPSASISYFVYELMKIVLKVE

SEQ ID NO: 351734 - protein, 85 aa, Zea mays
  unsure (1)..(85): unsure at all Xaa locations
  Clone ID: MRT4577_83948C.1.pep
QVTVSSSISMSLHRYRFMWKIFGVEQRVIVTTSNAXSRRSIIHRVGEGSYQWYVSVTGVLIPQRIGRLNVQGHPCTMMHHAYATA

SEQ ID NO: 351735 - protein, 156 aa, Zea mays
  unsure (1)..(156): unsure at all Xaa locations
  Clone ID: MRT4577_83949C.1.pep
LTEVNGVFSKKAGPRHPTRPGQKARGPKGQKGAGPATEKKAGGGQPGGARNPNKPPGRPNRGEKMAQTGWPSKHQKPRGGXQGLGAPPXTGKHPNPPGXNGGGTPPPRGEEEXPKTKGPAPENPRGTWETPSSSLSGGGGDPTXIGPGGQPGKPGP

SEQ ID NO: 351736 - protein, 607 aa, Zea mays
  unsure (1)..(607): unsure at all Xaa locations
  Clone ID: MRT4577_8394C.1.pep
RDARFDVTGAADLYGEEGLGNLQGVTKRLDKNPNPVWRQTFAFSREHLQSNLLEVAVKDKDMIKDDFVGRVLFDMTDIPQRVPPDSPLAPQWYRLADRSGEKLRHGEIMLAVWIGTQADEAFPEAWHSDAHSLPFEGLSNTRSKVYYSPQLAYLKVVAIAAQDVVPAGSEKGRPLAPVIAKIQLGWQVRRTRPGQPQGSANPVWNEEFMFVAADPFDEPLVVTVEERVAAGRDEPVGRVIIPVQLPSYVPRNDVAKSVEAKWFNLSRALTADEAAAGVTAAKALSEKTTFSSKIHLRLSLETAYHVLDESTHYSSDLQPSAKKLRKSPIGILELGILSARNLVPMKAKEGRLTDPYCVAKYGSKWVRXTRTLLNTLAPQWNEQYTWEVFDPCTIVTVAVFDNGYVLGGGEGSKDQRIGKVRVRLSTLEIDRVYTHFYPLMTLTPGGLKKTGELHLAVRFTCTAWANMLGMYGKPLLPKMHYSHPISVLQLDYLRFQAMQMVAARLGRAEPPLRREVVEYMLDVDSHMFSLRRSKANFYRITSLFSGAVAVAKWMEGICKWKNPLTTVLVHVLFLILVCYPELILPTVFLYLFMIGMWNYRRRPPPRW

SEQ ID NO: 351737 - protein, 143 aa, Zea mays
  Clone ID: MRT4577_83950C.1.pep
FQIRTKMDAPGGEALGGVIGVARHMIQTEGFFSLYKGLVPSLISMASSGVVFYGVYGILKMAYLHSLYGAIAGCCAEAATYTFEVVLRQLQMQVKATRMNALATCLKIVDQGGVPALYAGLIPSLLQVCILSAENLLPHICQW

SEQ ID NO: 351738 - protein, 116 aa, Zea mays
  Clone ID: MRT4577_83951C.1.pep
HSPEGKKRVSMMKQQKQEANALDQLELGTVRTLLYGAIAGCCAEAATYPFEVVRRQLQMQVKATRMNAFATCLKIVDQGGVPALYAGLIPSMLQVLPSASISYFVYELMKIVLKVE

SEQ ID NO: 351739 - protein, 61 aa, Zea mays
  Clone ID: MRT4577_83952C.1.pep
GIHGVSVLDIQLVSVTSSIAQTSVCHNECCVEVHPSVRQGCGQPYASTLQKPWNEWPLEPN

SEQ ID NO: 351740 - protein, 54 aa, Zea mays
  Clone ID: MRT4577_83953C.1.pep
ATRMNAFATCLKIVDQGGVPALYAGLIPSMLQVLPSASISYFVYELMKIVMKVE

SEQ ID NO: 351741 - protein, 270 aa, Zea mays
  Clone ID: MRT4577_83954C.1.pep
GLEYIVRGEQRNLFELMHAIATTQGLKGFWKGNFVNILRTAPFKAVNFYAYDSYRKQLLKWSGNEESANFERFIAGAFAGVTATIMCIPMDTIRTKMVAPGGEALGGVIGVARHMIQTEGFFSLYKGLVPSLISMAPSGAVFYGVYDILKMAYLHSPEGKKRVSMMKQQKQETNALDQLELGTVRTLLYGAIAGCCAEAATYPFEVVRRQLQMQVKATRMNALATCLKIVDQGGVPALYAGLIPSLLQVLPSASISYFVYELMKIVLKVE

SEQ ID NO: 351742 - protein, 49 aa, Zea mays
  Clone ID: MRT4577_83955C.1.pep
LWSGAALTGRNMAAMAPGYDLTKVTRIGFAIEYAVCALMVEVIVDIGHI

SEQ ID NO: 351743 - protein, 142 aa, Zea mays
  unsure (1)..(142): unsure at all Xaa locations
  Clone ID: MRT4577_83956C.1.pep
PPARSHQGENSEMGKPACGLLTTTAGAFISNTAFGIHCASSHCLGQNSANMWGITCDNEKGVRDKAWQSSWAYTTTLIGRMVMTHGDYKSLTLPPKVAPIHVIVIPVPYKDADTSXFYXACESTXHTSINLGIRADQDTRQN

SEQ ID NO: 351744 - protein, 42 aa, Zea mays
  Clone ID: MRT4577_83957C.1.pep
FLYVIVALMLYAASTASDGMNMGKKCMGMPKDLHLGLMHHDV

SEQ ID NO: 351745 - protein, 80 aa, Zea mays
  Clone ID: MRT4577_83958C.1.pep
PSLCLHAFDRPELGCFLRRVNAHQPHCHIGSYHLCPSDRLHLKLRPCVHRSLPLQIQQELVLCIVPTLALQLHREFAQLQ

SEQ ID NO: 351746 - protein, 160 aa, Zea mays
  Clone ID: MRT4577_83959C.1.pep
MPTATATAAPRHAALFLLLLLGLHATFAAAARAGVAVDAELTSTKPSPVPKKPSVKPPGPGAASPTFPGFGIPGMGGFGIPGMGAGGWGGGYGGPAGGYARGGVVAPTVTCSEKGPCYRKKVTCPKKCFSSYSGAGKGYGGGGGGGSCTVDCKVKCTAYC

SEQ ID NO: 351747 - protein, 101 aa, Zea mays
  Clone ID: MRT4577_8395C.1.pep
SSGPPHEGGVSFHRPQGGPFFLPRGAGGLIPIYNGVPRGVRVPGLAPFPPWHNLKVGFLPLQLGELGIFPFVFLHTGGCGLPGKVGAGFFRFWFGTRIRIL

SEQ ID NO: 351748 - protein, 245 aa, Zea mays
  Clone ID: MRT4577_83960C.1.pep
PAGHLRAPTGLATTSQRTEPSTGVRGVLLPNYWFTVLISRPLATPGAEASPTTGRPHAQRRRSARPLPSRGPVVLLAGFFQTPASSALAWPCARRREYTPQIGDCCHLLLLRTKKWCRTPSQRLSGSRRQAEEMAPCHPFSINQIQLQIRLVLADERLAVPEGKGGRNEDEEEEREALARARVDHAAWRSARDPNATRGLHSPDRGKGEGQQRRKLLDEEVVVGGEAKRRRRGPLRDRLQVERKG

SEQ ID NO: 351749 - protein, 82 aa, Zea mays
  Clone ID: MRT4577_83961C.1.pep
ARSRGDGGQDIIAVGCAIRIRRQAQAPAQFADDAIGWTRGARLSSHSTTADTTPERTAGNLAGLTTEPADSNWAAPTGRSEA

SEQ ID NO: 351750 - protein, 46 aa, Zea mays
  Clone ID: MRT4577_83962C.1.pep
SSAYCSGYAVLLVSTLAWMARPSSNRYAPRCTCLSWRMKTCERTRG

SEQ ID NO: 351751 - protein, 155 aa, Zea mays
  Clone ID: MRT4577_83963C.1.pep
MRFTSFATALTTLSAASARIIGIEAPSTLAPNSIFNLTLLTENYIQSVADISVAWGYSLAPGYPTTLGSFTQSSYLGPNKSFTLENITVEATVPAALDSDVYNGSLILSAGVYSLYGASSGPVVTGFNVTVHVGEETSEETVKSNGTAWTINSQS

SEQ ID NO: 351752 - protein, 164 aa, Zea mays
  Clone ID: MRT4577_83964C.1.pep
GDASYPSSPLQPVPERPAASPLRLTTHHHLLIQQLSPLLPLPFAAVRAVQPPRCIGVPCRSPGRVIHPCSSKRLALLFFIFVAATFAFWDRQALVSEYEVRPSHPTGGPLIRDGEFSDRDLISPVAPCFAFRFVASLICSWIWLIENGWHGAISSAWRLLPLRR

SEQ ID NO: 351753 - protein, 65 aa, Zea mays
  Clone ID: MRT4577_83965C.1.pep
IGPPRLMFIQGGHTTKIFDFSWNPCKDWVVARVPKNNTPQIWQMAENFSHDENVLPISVKPAKTS

SEQ ID NO: 351754 - protein, 95 aa, Zea mays
  Clone ID: MRT4577_83966C.1.pep
GGAPRGGWAPFPFFLPSTRGGAVVYPIFRARCGPLEGFGRINYFPPPFLRHVRPQPVFWSAPYCLGVGFSFFLAESPKKKKKNPKKKKKKKKKKE

SEQ ID NO: 351755 - protein, 71 aa, Zea mays
  Clone ID: MRT4577_83967C.1.pep
CSTFYSHSYQILHLIHVLDLLSRGEWINLDVNYSLLHTRVLPINTHQPILIYNASRSITAYIISLKSYHST

SEQ ID NO: 351756 - protein, 34 aa, Zea mays
  Clone ID: MRT4577_83968C.1.pep
HLQDLSDTLHYVDPMLLKQNTADPNMRNSTKLIE

SEQ ID NO: 351757 - protein, 56 aa, Zea mays
  unsure (1)..(56): unsure at all Xaa locations
  Clone ID: MRT4577_83969C.1.pep
GPGRFGGYSHPRPELCKVNXPEVGFTLAEEGLRPFYLPPFSSQDNLRHVEIVYKGL

SEQ ID NO: 351758 - protein, 117 aa, Zea mays
  unsure (1)..(117): unsure at all Xaa locations
  Clone ID: MRT4577_8396C.1.pep
TQWQTQQLGRPESLSVLQLETRGPSWCSSETEAXELAASRVWSVASSCCSLRPILDWIRRSWLFRLVCVRSLAWAMQSRRRETGVDESAADHRRVTGRVGELYDTRCLFSVCFAAPV

SEQ ID NO: 351759 - protein, 80 aa, Zea mays
  Clone ID: MRT4577_83970C.1.pep
MDRSYSVPHCWSSSSRQKQKRALPSWTPYSQIVWFECTMVGSSSNATTVRLSTTSARTPRPPAFAALRRLARCIARARRC

SEQ ID NO: 351760 - protein, 96 aa, Zea mays
  Clone ID: MRT4577_83971C.1.pep
SLSAFAVAVSPSLRFGVVCLSFSHYGPWCLRPVRVALCRVVSFCSRGLRRFFFCSCSLLGRLCRLARWRPSCSCPCSGCSLVFLPGFSSLSCSLVV

SEQ ID NO: 351761 - protein, 119 aa, Zea mays
  unsure (1)..(119): unsure at all Xaa locations
  Clone ID: MRT4577_83972C.1.pep
GLALILLRGFSSSLSVFFVLLPLLPWDSLADFGWRFLGARLFVCVCSSFPRCVDGFSVCGVCCCVCCLLCFFASLLVCVCVCVCVWWGXIPHGCFKCPWXPGXSVGLAMVFLKCGCVSV

SEQ ID NO: 351762 - protein, 86 aa, Zea mays
  unsure (1)..(86): unsure at all Xaa locations
  Clone ID: MRT4577_83973C.1.pep
XXYIYAXKXKGTSPQPIPNRTHGPGSRPHRYNRESNVLPRSRNSSQNVLRPDRNSENTEEGRPSMKILANYEVIEAWRSRTSLMAT

SEQ ID NO: 351763 - protein, 190 aa, Zea mays
  unsure (1)..(190): unsure at all Xaa locations
  Clone ID: MRT4577_83974C.1.pep
MHSFGLRTLVLITILTPFYNIFKNGIFETCTVGIGGLVAYRKTPRGLRTLISVWAQHLSEEVRRRFYKNWCKSKKKAFTKYALKYENDAGKKEIQLQLEKMKKYASVIRVIAHTQIRKMKGLKQKKAHLMEIQVNGGTIADKVDYGYKFFEKEVPVDAVFQKDEMIDIIGVTKGXGYEGVSTSRGLTGLT

SEQ ID NO: 351764 - protein, 50 aa, Zea mays
  Clone ID: MRT4577_83975C.1.pep
MAASLQAAGALMPGKIGSRAFSSRPSSHVARAYGVDAGAWITCSLQYYIK

SEQ ID NO: 351765 - protein, 98 aa, Zea mays
  unsure (1)..(98): unsure at all Xaa locations
  Clone ID: MRT4577_83976C.1.pep
MSPTRLFLGDCSIVXFKLPVXLRLVDSXPYGXLKILSGVXCGSKNMSYDSANLTTPDIKWLGVRPSDLYNVRLPEHCRLPMTDHYIKVGKELLYEDYL

SEQ ID NO: 351766 - protein, 284 aa, Zea mays
  Clone ID: MRT4577_83977C.1.pep
MPSMTVHGASLPPFPWSHSQAGGCRQGVDCGKHGSSRSNSQWQWVRVGSNLTSLDHEDTSVHRIDDLLQEMDAAKLCILDPCDGQHNLCGTESTSGSLVQNIHSRKIGGEHGSQQLQPQDHLDSLDGFQKHDIDYSLLKTSQVSPKIQCAAEILCDMRRSTESWIGQGYSNGTIKWPKSPPEKAMKARKPSSQFGTTESSSGSRNNEATWNGSSHSTKKIVDRNNDSARLNNPGKGTIRWPVPVKAHCFSCQVRAGSYGRHEAAPWKWRKASGPGVITEHWQMS

SEQ ID NO: 351767 - protein, 86 aa, Zea mays
  Clone ID: MRT4577_83978C.1.pep
VKLVTKKKRVEKRDRLGVEGPGRRLSAWRSPTAHISKRPGAARGACRRPLTRLDMISPGARRIRSFRRPRTSGPPPPGAALVQKER

SEQ ID NO: 351768 - protein, 49 aa, Zea mays
  Clone ID: MRT4577_83979C.1.pep
APPAPVLFRVRIVLRRYAFFPKADLDGYLAQTSTATSSSTSPGPRTTTP

SEQ ID NO: 351769 - protein, 122 aa, Zea mays
  unsure (1)..(122): unsure at all Xaa locations
  Clone ID: MRT4577_8397C.1.pep
MVDQANHPTALHKLGGQLNQRSNFSXEGARXRDICPSVSPKDRIFVTRNYMTDSLWGPSMPDTEASNVDTMPTPIFANAPAEKGGKNFMIDFMMDGDTPAAANNATAPIEHAKLLTHNLDEM

SEQ ID NO: 351770 - protein, 29 aa, Zea mays
  Clone ID: MRT4577_83980C.1.pep
MNSINGFTQNRYHHLIQQLPELTRTQLSV

SEQ ID NO: 351771 - protein, 88 aa, Zea mays
  unsure (1)..(88): unsure at all Xaa locations
  Clone ID: MRT4577_83981C.1.pep
VIRKEPFSKKFELFTLVVSSWKLCPINWPMEGIFPVQIVYAVXNKVSGFKFLXGPFGRLNADCWAKPXNRPNWQEILNRLVDWEYTVN

SEQ ID NO: 351772 - protein, 60 aa, Zea mays
  Clone ID: MRT4577_83982C.1.pep
SFVPVRLASGFSWSHSDCRRAMSSYLGHELLPRETSGPPAPSIHQLCAHELIIFSQQHHR

SEQ ID NO: 351773 - protein, 201 aa, Zea mays
  Clone ID: MRT4577_83983C.1.pep
LGGAPPVFFLKKKKKGGRPGFFKIKKGAKTPGGKKRALSRKKWGRPTGGGGFFFFYSTQGKKRGTTHLWIFPFYTPGGVPTRKEVSIIWGGPHEGFFPPHRGGKKILFLGGGGKKRGKKKKKKRFFPRGGGVFPPFAKIIGKKKCVGGKIGKGGKKAPRGKFFFGKKKMWGGKKAPYKKFWGGVEKTGKGPFGAPSRRVGG

SEQ ID NO: 351774 - protein, 242 aa, Zea mays
  unsure (1)..(242): unsure at all Xaa locations
  Clone ID: MRT4577_83984C.1.pep
MRTSTPPPCGWGGKRVRPSLKLKRLVLEHTTGVLLYKYKYPWRVGVGLSRNRGVFFLLRKFVVDPASERADRRLTAEGEMAQGTLEVLLVGARGLENTDYLSNMDPYALLQCRSHEQKSSVASGKGCEPEWNETFVFTVSDGAAELFIKLLDSDGGTDDDFVGEATXSXRLSSSAYLSTSLYLNSILHGLYQLLILVLSQIPLEAVYTEGNIPPTVYNVVKDEEYRGEIKVGLTFTPEDQGF

SEQ ID NO: 351775 - protein, 124 aa, Zea mays
  Clone ID: MRT4577_83985C.1.pep
KNFKKKKKKRERKKKKKKKKKKKKKKKKKKKKKKGGGLFGGSIFSSSFLLPNCFFLASPTWGLLAVFLQLPWVEPPLASPNLLRLAALPFFAGWGINRGGPPCCVFPNSCACFVPFGPPLFAVH

SEQ ID NO: 351776 - protein, 70 aa, Zea mays
  unsure (1)..(70): unsure at all Xaa locations
  Clone ID: MRT4577_83986C.1.pep
SIKIHLGLKRRRRKHEIHSLIKAVVVVVMVNRSFGHILGQLXVDSDLGHGFEDIQEQIFGSAVTSAVTLP

SEQ ID NO: 351777 - protein, 130 aa, Zea mays
  Clone ID: MRT4577_83987C.1.pep
LLFSAIPRTEPATHLSLSPQEQSMAAAALICPVRASPATRWTPTDSPRLPLPFPPIYFIRRRQKRRHHSILARPDSGPVGLPPAAAATTSPCLHPPPAQPHTRGVQPRASGVCGFTGATRSHGSAANGVD

SEQ ID NO: 351778 - protein, 93 aa, Zea mays
  unsure (1)..(93): unsure at all Xaa locations
  Clone ID: MRT4577_83988C.1.pep
STLPRARKTPLSSKEVNQGRGMCLLIRGGSFXXFLQFFCLAPGGYAFIVVRPRGSSFISFCSHPKLKSFCKLETRILVPKPQNLLFLSPIFSA

SEQ ID NO: 351779 - protein, 114 aa, Zea mays
  unsure (1)..(114): unsure at all Xaa locations
  Clone ID: MRT4577_83989C.1.pep
HTIHTTHPSVIIQIFGFLRRVGFPARAXTATIFPQCSQAPIASFLPPYLSPAVSSECENPILQPYRIQQAIASCILPLSPLYXLQQPSALLQXQLPIVHFVGTKTSMAHQLLTT

SEQ ID NO: 351780 - protein, 125 aa, Zea mays
  Clone ID: MRT4577_8398C.1.pep
ELLSRRVHFTNKVHPGRAKRLQEANVSSQALENPFALLLFSQKPSSRAEVHPQVATAELITTEASFLHLHLALDLPFLGRRLFLHLHRKTALLVVGHRSQCRPRPFFGRLRLIVLTYRGRRCDDV

SEQ ID NO: 351781 - protein, 61 aa, Zea mays
  unsure (1)..(61): unsure at all Xaa locations
  Clone ID: MRT4577_83990C.1.pep
GVTPHPPARTGAPPKSHRSGRRRRSNAVPHHLSNAGSERPSSAXAGQASDSRIPHHRSLSG

SEQ ID NO: 351782 - protein, 58 aa, Zea mays
  Clone ID: MRT4577_83991C.1.pep
FLNIYLRCGLSPPHRSRKSRHFSRATRLLGIEPPTSPSHCRPQPHMYPTLPLRLGRVG

SEQ ID NO: 351783 - protein, 59 aa, Zea mays
  Clone ID: MRT4577_83992C.1.pep
TSSLFSTTAFVCNILAPNMNTKTCQIQTTRYMSQRFVAHPRHAFKSCLHPFILKELKHI

SEQ ID NO: 351784 - protein, 314 aa, Zea mays
  Clone ID: MRT4577_83993C.1.pep
IPFNGAHRNLPSRSRSCPSSSTSPGCIFLMTLLHYVPPRSSAARSLAPLRRSPVPFPQARVPLLLFPYRAAPSLAEFPCALWSSPLQAPMAPSSPSSDDAQLPAFPLSSLFPGHASSEPSLLPISIAAPLKLGRELSSSLVRGSLLAPGAARAALRSALLLPARVNQLGPSALTFACRSASSPARPLPPAKVVAPISLALARIPLGALTPAPIAASSLPISLLGKLPCELQLGFFSLAARFLRLSPVRSTSGSGVELCFGVLGGWSGADGFFDGTPGGGTLLLGGSDSFGNSNIGARQVLNKTPETKVRRHRSR

SEQ ID NO: 351785 - protein, 127 aa, Zea mays
  unsure (1)..(127): unsure at all Xaa locations
  Clone ID: MRT4577_83994C.1.pep
EAELGGVQQVGPTGLLGITAVTRANTLAGEKTGHKLAWLLLIFLGASYILLFALGKGGHSHAHNYPREKMAVAGLALVPALXPGEKTLPVFFGVGNFSXRMNLAKMGLLFSTIKVIKSLGGPLISRG

SEQ ID NO: 351786 - protein, 77 aa, Zea mays
  Clone ID: MRT4577_83995C.1.pep
MKATPLDKVNMDGAPYLSKVDLMAYSTYKDLSLALKRISGTCTLCGNNHNQGRLLDPASDTVDIDTTHDDVDRDGTL

SEQ ID NO: 351787 - protein, 95 aa, Zea mays
  unsure (1)..(95): unsure at all Xaa locations
  Clone ID: MRT4577_83996C.1.pep
KIYNHTYHDMYMKPQGNMLKNKRVLMXNIHKSKAHNAIXKTLSDQFDAXRANSKAIRERNISRMVERLAHGPMEPAASPVTTTDPLAAAPKKAKN

SEQ ID NO: 351788 - protein, 57 aa, Zea mays
  Clone ID: MRT4577_83997C.1.pep
APNQICNISYVTSKTMKLVLVVLAIIALMLSDAWTHTVGFIMMHHHDHAQQYQSPNM

SEQ ID NO: 351789 - protein, 66 aa, Zea mays
  Clone ID: MRT4577_83998C.1.pep
RYTSTPMRLKPCDLLWCLGEASSPQLHATSTLQAATAQLRNANETTFGTGCASKSRNYIPTSSIFR

SEQ ID NO: 351790 - protein, 125 aa, Zea mays
  Clone ID: MRT4577_83999C.1.pep
GPLSRLKTKISSYPIHQPNKHKQKFFLPRPRRPDITRRARDFGVKRYIKPWGRDTWGLRFHPPTKITPMSNRGAAARGRGLTTTGKQAREPTTKNRAKNSQEGQKFWDWVFRHERRTGIHSLLRP

SEQ ID NO: 351791 - protein, 45 aa, Zea mays
  Clone ID: MRT4577_8399C.1.pep
GWGTSHPNLFFLGINKPLHTLGRYGGKKAYWEGDTGQFGNLPDAW

SEQ ID NO: 351792 - protein, 110 aa, Zea mays
  Clone ID: MRT4577_839C.1.pep
MHRQLSLSASPKQQQPPPDGTSTGGGDAAAKAMAAAEDESSASHSSSKASRGWSARDERAIHLVPLLTFLCFLLLFLCSHDPSPADMSSFAGGGGGGGGARSGNRRLRML

SEQ ID NO: 351793 - protein, 109 aa, Zea mays
  Clone ID: MRT4577_83C.1.pep
TRRREEGDRDHPEPEAERIKTFYPGPVFFPREGKGNWPFLTGVALPGFFIPKRGATFPEEDPKNSKFVQEPKKRWPTGGSGPNRLRMKKKPPIFRGFFLSRGGPSIVIM

SEQ ID NO: 351794 - protein, 73 aa, Zea mays
  Clone ID: MRT4577_84000C.1.pep
CPNDTHSRYYGIFSSPMAPDTECSNMREKRYPDVCHALRCPDALCTPTVGASEVLFCGSRIVETTSHHRQPSL

SEQ ID NO: 351795 - protein, 53 aa, Zea mays
  Clone ID: MRT4577_84001C.1.pep
GLCIDACPYQVTCLDHHTNIKYRLLAVSCPRLPTLAYEHMLLLYCRQHLFSMT

SEQ ID NO: 351796 - protein, 99 aa, Zea mays
  unsure (1)..(99): unsure at all Xaa locations
  Clone ID: MRT4577_84002C.1.pep
RPEEVNAGMNKAASSGTSLNTKRLDDDTENLAHERVPSDPEKNLMAARVGXKVAQAPVGRVDHGKPQGVPEVGARKGIPNPPNIGQPERGLGTKPRGQE

SEQ ID NO: 351797 - protein, 80 aa, Zea mays
  unsure (1)..(80): unsure at all Xaa locations
  Clone ID: MRT4577_84003C.1.pep
KVPGLQQPPXHXSNHYDSHQLSDHQYAPFFPTSLHLSPHYKLIFSTMHLNTINIHHHYHHTHVQTTPDHTHPCLHSIHPK

SEQ ID NO: 351798 - protein, 201 aa, Zea mays
  Clone ID: MRT4577_84004C.1.pep
MAGALVFVAVLLAASVGATTATTLTIHNLCPHPVWPLVTPSSGFPSISTNTARLGPNALLSLSFPPTFWAGRVAARTGCDAAASGCWTGTTPPATVVQVTVHDGGNLDQATYSVSLVDGFNVPMVVSPQAVGGGQCPALGCPINLNCDCPPQNRTAEGAACRGPPEYFKNRCPLTRNHVHRLRARAAKMPRPGGALGHPLP

SEQ ID NO: 351799 - protein, 64 aa, Zea mays
  Clone ID: MRT4577_84005C.1.pep
NTNNENGNLARTRAKRSIIHNRSNFDVSSSLCSIMFALSCDTNITVSVSSSLSAYAVQTRVQNQ

SEQ ID NO: 351800 - protein, 132 aa, Zea mays
  Clone ID: MRT4577_84006C.1.pep
ALLLKLACAELVVSLDTAAAAVARLGLRCGLDFGGVYACLKAGTPDARLDPLLAKGLRVKAKKMERLVAATAKLCSEMETLDELESADRKLNVRGWSRLSGPIPQQPQAAAQQQQQQLAGDSPGAESLQQEL

SEQ ID NO: 351801 - protein, 706 aa, Zea mays
  Clone ID: MRT4577_84007C.1.pep
MCWFLIGFAKKKKKKKKKKKKKKKKKKKKKKKTAGRGTTPPENGDGGGGKGQTGGRPGFLRAATSCPKPYHHLSLHLLRVSPSSPFSFRSPLHNEALVSRDMASGLEEKLAGLSTGGDGQNPPPAGEGGEEPQLSKNAKKREEKRKKLEEERRLKEEEKKNKAAAASGKPQKASAADDDDMDPTQYYENRLKALDSLKATGVNPYPHKFPVGISVPEYIEKYRTLSEGEKLTDVAECLAGRIMNKRTSSSKLFFYDLYGGGMKVQVMADARTSELDEAEFSKYHSGVKRGDIVGICGYPGKSNRGELSVFPKRFVVLSPCLHMMPRQKGEGSAVPVPWTPGMGRNIENYVLRDQETRYRQRYLDLMVNHEVRHIFKTRSKIVSFIRKFLDDREFLEVETPMMNMIAGGAAARPFVTHHNELNMRLFMRIAPELYLKELVVGGLDRVYEIGKQFRNEGIDLTHNPEFTTCEFYMAYADYNDLMELTETMLSGMVKDLTGGYKIKYHANGVTNPPIEIDFTPPFRRIDMIKDLEAMANLSIPKDLSSDEANRYLIEACVKYDVKCPPPQTTSRLLDKLVGHFLEETCVNPTFIINHPEIMSPLAKWHRSRPGLTERFELFVNKHEVCNAYTELNDPVVQRQRFEEQLKDRQSGDDEAMALDETFCTALEYGLAPTGGWGLGIDRLTMLLTDSQNIKEVLLFPAMKPQE

SEQ ID NO: 351802 - protein, 140 aa, Zea mays
  unsure (1)..(140): unsure at all Xaa locations
  Clone ID: MRT4577_84008C.1.pep
AHASAHASAHACGSKKSESERVTLRXKHKVLRKVKEHHRKTRKEVKTEGKAGQLKKVEKDPGIPNEWAFKEQELMALNARRAQALQELELMMEARTERARKTKLGXLEDEEIANLASAASAHGSEFAADDAAYDKAALTV

SEQ ID NO: 351803 - protein, 91 aa, Zea mays
  unsure (1)..(91): unsure at all Xaa locations
  Clone ID: MRT4577_84009C.1.pep
AYPQQFLPFNQLASLNSLAYFHQQELLPLSQIVGVSPGAFLIQXQLLLFYLYDEPKAGTFLKXKQLLPLNXLXLPXPAAFVSKPIIGGALY

SEQ ID NO: 351804 - protein, 47 aa, Zea mays
  Clone ID: MRT4577_8400C.1.pep
YNGLCFNIFVYLQYILGTIVIESPYFVGYIWALIIRFKFSALLYILD

SEQ ID NO: 351805 - protein, 51 aa, Zea mays
  Clone ID: MRT4577_84010C.1.pep
KITIWWSSVAYYLNQPTMCFVYQFALLVVHGSLCSAWFPWIWVPWLVFSLG

SEQ ID NO: 351806 - protein, 314 aa, Zea mays
  Clone ID: MRT4577_84011C.1.pep
VVDSMVVERARGESQSTSGSLQSLCWGSSAFGGIVSAYFSGSLVDTYGVRFVFGVTAFLPLMTSAVAVLVNEHGIPSGEHNTFLSGSGFIESSKQHVRQLWTSVKQPNILLPTLFIFLWQATPQSDSAMFFFITNKLGFTPEFLGRVKLVTSFASLLGVGLYNYFLKEVALRKIFLVTTIIGSALGMTQVLLVTGLNRQLGISDEWFSIGDSLIITVLGQASFMPVLVLAAKLCPPGMEATLFATLMSISNAGSVTGGLVGAGLTRIFGVTRDTFGNLPLLIVVCNLSSLLPLPLLGLLPEGSGDTDNGETKNN

SEQ ID NO: 351807 - protein, 89 aa, Zea mays
  unsure (1)..(89): unsure at all Xaa locations
  Clone ID: MRT4577_84012C.1.pep
NIAPLGGGKLAAGXNPSPHAIISIGHGHNTNPWSHKQHKTSNLPKELLSLDKPDPNTLISSHIKYSNTQPLKGWANHKCRNGWSYHVNH

SEQ ID NO: 351808 - protein, 232 aa, Zea mays
  Clone ID: MRT4577_84013C.1.pep
RRHATSVNKDLESKLKNASTLLVKLQDEFSSYLKGECTQEVSIDGDAERQPLVFIKMKLANARKELEDMRADIKKFKDDVRKLWNVAATFRADIDREEAGLLALEHKEHLASISVSSHQEELSNITYELNIIHERTKATKMPIELQQATEVVEQAKAKALMAHYEVAKAREDADQVKSQLNVIKLRLEAASREILAVNASKEIATTSANALQEYKDEAHIEPQDEQIRNNYM

SEQ ID NO: 351809 - protein, 192 aa, Zea mays
  unsure (1)..(192): unsure at all Xaa locations
  Clone ID: MRT4577_84014C.1.pep
MSFTPVPRFRGAAYSQLCPQSSSCAEHLVNVDGASAKDLSVDPSTFCIPQDANQGFCSRALQYTSSVSKQGFAAQGLPVNAAEFGLNNDSSLVGGYQQFDYLLGPPQTEVCEGMWMKNINTSIIHRRRPSNASCLDHTEELTSYENDEGAISFGSSCSTGIASYPYSTPLQRNSHISXTGDGNWDALVQMQK

SEQ ID NO: 351810 - protein, 89 aa, Zea mays
  Clone ID: MRT4577_84015C.1.pep
RRRCHRVCVYAPVSDTAKHEKHCSFTGAGHSSRRGPRLTARPREGPRRRPAPDPPRSGCPLQSHGWIGGCFGRWAGQCRTSDGIVTTLG

SEQ ID NO: 351811 - protein, 247 aa, Zea mays
  unsure (1)..(247): unsure at all Xaa locations
  Clone ID: MRT4577_84016C.1.pep
PRVRLLLLRSRRRRRSQQQQHLLPSSSAHHNDDDDLFLTDDQILDNILTLIIAGQVTTASAITWMVKYLADNKVFQETLRSVQLELKQQXAGRRQIMXLQHLNSMELAYMTVKESLRMASIVSWFPRVALEDCQVAGFHIHKGWIVNIDARALHYDATLYHKTXMFDPSRFKGEHSMHTKQPYSFLVFGAGGRTCLGMNLAKIMMLIFLHHLVTTWRWEMADDDPSLEKWAMFPRLRNGCPIHLARI

SEQ ID NO: 351812 - protein, 120 aa, Zea mays
  Clone ID: MRT4577_84017C.1.pep
MTSHARVRKLGIRLELTSRGSSRPTLVLQSTVRTKPQRIKDSMVMAPVAAQQQRRRDAVAELNLSPGLRFHPTDEELVAHYLCARASGQSPSVSMIAEVDLYRFDLWDLSERALFGRREW

SEQ ID NO: 351813 - protein, 97 aa, Zea mays
  Clone ID: MRT4577_84018C.1.pep
GSAGLGLAGELIEMAELDDVYQCFCISLAWTTDDHSMHNTFTTYGEVLECKIILDRETQRCRRCGYITFCTEDAKQNAIDGMNGKELDGRNITVYEA

SEQ ID NO: 351814 - protein, 103 aa, Zea mays
  unsure (1)..(103): unsure at all Xaa locations
  Clone ID: MRT4577_84019C.1.pep
LDGDDDETXTRISPLQQDXAAAVDSDDDDEEEEAEVTLGVLSIPKHPGLLLRHLFPSKAGGIPAWLDPENLSSGKSSCCXFCGQPLQSALHIYAAVEDQVAAF

SEQ ID NO: 351815 - protein, 96 aa, Zea mays
  Clone ID: MRT4577_8401C.1.pep
REALPYRCILTSHRLFILVSPLHLQPKGALFVGYNPLYIGCMWVLISHACDYSHSYFMTDGTFRGLTWRSILINCLQHNVITVNHLHHPDPRFLRK

SEQ ID NO: 351816 - protein, 36 aa, Zea mays
  Clone ID: MRT4577_84020C.1.pep
PTTSVGLYWVGRAKITHNSVKVYQDAGLLFTYPLYF

SEQ ID NO: 351817 - protein, 93 aa, Zea mays
  Clone ID: MRT4577_84021C.1.pep
RYHVIEDCSRTEIRNESRNESRSEIRNDRMGRSRGRVPELPEKGSRGSRGSQIDSHSSNSNYHDSWETRSSYPERDRYPERDNRDQASDSSFE

SEQ ID NO: 351818 - protein, 198 aa, Zea mays
  Clone ID: MRT4577_84022C.1.pep
LLSGLQRRAQPSYQPPPPPPPPPSDPQPVPPSCAGTTFLALPNPGSSEPPAAAPQAPFPPPALSAPPPADPQPPPPPPRLLSSPPPPPPQEEPPLPPVPMLSVHLPLLPPPPPPLQPPPALSSSPKLPRPRPRPRPRPPELFLESNLPPDLPEKGRSLSLLPSPLQPPCATAPPPEPQAEFFIGTIAATFRIDGPASG

SEQ ID NO: 351819 - protein, 209 aa, Zea mays
  unsure (1)..(209): unsure at all Xaa locations
  Clone ID: MRT4577_84023C.1.pep
MKRCIAAVLLVLSLAAGRLAADDHVDTIRLPSNGLADEVATAATEIGAEKKRPWKCCDSPLCSRSIPPRCRCMDAVEQCDEACTRCEASKSDPSKRICNDRYHGWPGPNCXARRRRRPXVQVRWSLLIKKRWRRRRGGGGRCCDRPLCTTSVPPACRCLDNVDRCAPTCKRCVVSIFDPTDHSCDDIYHGEPGPRCTKADRNGDISSGD

SEQ ID NO: 351820 - protein, 85 aa, Zea mays
  Clone ID: MRT4577_84024C.1.pep
NKQSFNKRKRLTYLVTRSEILQEEISSPIAAHILNFYDGGLGDDLFEAATTASGPFPATDDDVSSSTTTTPPICGYSDDAPAAAG

SEQ ID NO: 351821 - protein, 103 aa, Zea mays
  Clone ID: MRT4577_84025C.1.pep
GATLGVASVETVDRREGKGKGEARGLDQPSKCEVCAGSQGRSQAGVLRGVSRTAVVVWGVTVSESRCTAIGEPGRSVALTSRGRLCPRYYHRRRTGGRGGALQ

SEQ ID NO: 351822 - protein, 82 aa, Zea mays
  Clone ID: MRT4577_84026C.1.pep
SSICVCYFGLESLSYVSAGYAISAPDIPEHVRYWCGQLSAIGVVYRFVNALLCCASVVRVAFASVAQPVLFCRFSICLVSPN

SEQ ID NO: 351823 - protein, 97 aa, Zea mays
  unsure (1)..(97): unsure at all Xaa locations
  Clone ID: MRT4577_84027C.1.pep
ASPFGLFPLVLAGSFPLRFRFLXCVVRXPVLPLVWLXAWXXACSPFAGRXAARLRWXXGRSPAPGRPAAPCCPRXWSAARLRLRRRXXLVGRVGRPG

SEQ ID NO: 351824 - protein, 197 aa, Zea mays
  unsure (1)..(197): unsure at all Xaa locations
  Clone ID: MRT4577_84028C.1.pep
DGRERGEDDTAFESXSSLLALAISDIVLINMWCHDIGREQAANKPLLKTVFQVMMRLFSPRKTTLLFVIRDKTRTPLEHLEPVLREDIQKIWNSVAKPEAHKDTPISEFFNVQVTALSSFEEKEEQFREQVQQLRQRFSNSIAPGGLAGDRRGVVPASGFLFSSQQIWKVIRENKDLDLPAHKVMVATVRCDEIANE

SEQ ID NO: 351825 - protein, 82 aa, Zea mays
  Clone ID: MRT4577_84029C.1.pep
TACVEATVTQTDRSDQWSSIHKHDVPSGVSARILNETWGKHWFPKEERVCCAYKYELLPLEDTLCYLKIHNKIHMRPACTHC

SEQ ID NO: 351826 - protein, 47 aa, Zea mays
  Clone ID: MRT4577_8402C.1.pep
FPQQSSTALIQDLCTNAISLCFPQPQPLKSLRDQHLQCLLPRAPPQK

SEQ ID NO: 351827 - protein, 97 aa, Zea mays
  unsure (1)..(97): unsure at all Xaa locations
  Clone ID: MRT4577_84030C.1.pep
KTKTKPTPAPHVLLDSQPLPSPXRRAPPSAPPPTRTSSPPSVPPPAHTSPXPSVPPPNRTSSPPNAPPXTTPPPPSALPPXPAPAPGPPVMHRLSPP

SEQ ID NO: 351828 - protein, 156 aa, Zea mays
  unsure (1)..(156): unsure at all Xaa locations
  Clone ID: MRT4577_84031C.1.pep
MAIQPGYGDGGCDSRCVGGXACGSGMAIEAGYDGGGCGSGCGGGGGCGSGMAIKAGCGGGGCGSGCGGGGGCGSGMAIEAGCGAAGCGSGCGGGGGCGSGMAIEAGCGGGGCGSGCGGGGGCGSGMAIEGSKANHAKSGGCGSGSGGGCGTLFSXS

SEQ ID NO: 351829 - protein, 131 aa, Zea mays
  unsure (1)..(131): unsure at all Xaa locations
  Clone ID: MRT4577_84032C.1.pep
MFYGRMKNLTGAALTQAVEDSLKSVNLFHSGFGDKSVSKYSGGMKRRLSVAVALIGSPKVVYMDEPSTGLDSRSRSDLWSIIRRAKKDCTIILTTHSMEEAEQLCDRIGIFINGSFHCIGIPRSLKAXYCG

SEQ ID NO: 351830 - protein, 113 aa, Zea mays
  unsure (1)..(113): unsure at all Xaa locations
  Clone ID: MRT4577_84033C.1.pep
LQSHNFFKGKQNSIPRAVVLQGRDWKNRGETKINGLEKHPLFARWKKKEKAHTNCLYKQLHTLNGKWHAPCTGQLSAGGVGFTRSVTFTFARALAPAXFKFYPXSFLARFGGF

SEQ ID NO: 351831 - protein, 69 aa, Zea mays
  unsure (1)..(69): unsure at all Xaa locations
  Clone ID: MRT4577_84034C.1.pep
LEPLLRQASDETLHLVLETLXSAIKSGGEQSTLIEPVISPIILDVWAQHIADPFISIDXIEVLEAIKNA

SEQ ID NO: 351832 - protein, 525 aa, Zea mays
  unsure (1)..(525): unsure at all Xaa locations
  Clone ID: MRT4577_84035C.1.pep
MGKDAGEAQQQPDGAGGGAGGGAGGNRGGRFCCWCGRGGGAARVIRLQCVAALVLGVAVLLSALFWLPPFAGRGGGKEGPDPGDEFGAAIAASFRLHKTVPELSGNKSQLVLDIXEEVGIPNSTVVVNMIHPLDGSNWTNIIFNIVPFPENVTISSTWLSILRSKFMSLVVRQSSIHLTEPLFGNASAFEVIKFPGGITIIPPQTAFLLQKPHATFNFTLNYPIYKLQDRTNELKDQMKAGLLLNPYENLYIKLTNSQGSTILPPTIVETSIVLEVGNHQPSVPRMKQLARTITNSSSSSGNLGLNHTVFGRVKQISLSSYLRHSLHSGRGSDAPSPAPMHHHGHHSHHHRHHHHSHDDNRHPAAPAPAPVHFPXRHSPXGAPPPSGGCPYSKNKPKKSGRAAPAAEPAANDHRSASIALPPHPSSPSPASWSQHAPSTPAVPPPPALPEPPLPTISFAHPRPPSERGTGTSPAPSEEATRAGPSGMSQVAPAPHSSYATRMQGDVPCCWVLFVLALCVLTSLLR

SEQ ID NO: 351833 - protein, 101 aa, Zea mays
  Clone ID: MRT4577_84036C.1.pep
MYGAPSEGLASNIHTARCMPHMCVKACAHERLGSVSLVFIPKTIRAGAVVENPRDWSHARFFFEPVSLDPPYMMVRHKIKSCAWVEYNFRQSKTIVSNYLS

SEQ ID NO: 351834 - protein, 120 aa, Zea mays
  Clone ID: MRT4577_84037C.1.pep
GGGSPEAGRRRNDPGSGAARTSAVRVDATADVIAHNTLIFGRRRDLYSRSGGMRQRDKTPPPARCRTTPLILQLVQYKLQLVRWHVCRAPAQRNPGMYAFKRSRPKRTGRYMLQLRTIFS

SEQ ID NO: 351835 - protein, 116 aa, Zea mays
  Clone ID: MRT4577_84038C.1.pep
FVRSRSAATTLVPATPAPPETHRWCHRRTSLHTFSPQETILPGRICYLPEIIPSQPCESVAGGGGFVWRQRDRYIFSRCESWAFLGQIDDYSSNGIFQFPQSHILWPPADSLFRQK

SEQ ID NO: 351836 - protein, 109 aa, Zea mays
  Clone ID: MRT4577_84039C.1.pep
SEPPGLARELLLLRLLLCFARCLQRLGVLSRRHLRYAGRGPSQDDGGVGLPGLIPYRGGLLGARWWASERDYLLDPPGRAGQAPWSTATGHHLSYLSFAFRLRYCRSNT

SEQ ID NO: 351837 - protein, 117 aa, Zea mays
  unsure (1)..(117): unsure at all Xaa locations
  Clone ID: MRT4577_8403C.1.pep
DEDDQGTAYISNLTCKGEYXSNDEYDGDVSTRSNVNDKDTTEGETSCRNYKEDNCCNIEDSSKTYEQNSGEDDTSSLVDGNEKYESMNTKDDDSSPGGEDTCNRYEPKVEGDENCVL

SEQ ID NO: 351838 - protein, 207 aa, Zea mays
  Clone ID: MRT4577_84040C.1.pep
PRVRDQQIEATVNAIRQELLERSVVMRTLEADKDQLSRSVQQYDKLLKKSLAKFQEYMNMVTRGEGVDSYLENLGLTGGQNLTWVCQMRYQCQMTRIQETCDSNSLKLLENITEMDRSIASLNREVEGLKNCRSIPDLNNGVEDDGEGKASLAMTLGASWTGEGDHVSNTTQGGKQLVGLVGKPDKRNDIRESMDLDGVRSGAKLRK

SEQ ID NO: 351839 - protein, 110 aa, Zea mays
  Clone ID: MRT4577_84041C.1.pep
KCPTFASTEYTSILCLHTKPPIAGQIHMAGTGLSRANSRCDREGSSPAERRCADWFVSGTTDASPVARVWPEEAVAADLDLRRVGAGDVGVVAAGVVGDAPARARRRLHG

SEQ ID NO: 351840 - protein, 139 aa, Zea mays
  Clone ID: MRT4577_84042C.1.pep
MRLCAVPPSSALAALAFALFLLNSGVATRRALGRGDAWVVAFVAAATVLVTALVATVRAHDRAREEGRRGLFRAVAWAQSAALTAMFAHRVAALPQAPAMACLVWTMAGGTIAGGFYCIFLRGRDGAVVGAGGRDARQA

SEQ ID NO: 351841 - protein, 306 aa, Zea mays
  unsure (1)..(306): unsure at all Xaa locations
  Clone ID: MRT4577_84043C.1.pep
MRKLFFSESACKETKLHCAPHSWLPLERGKLSKFSGHAADGSSIEALMKMPEPAVLPYFKPANYVDILAQIHEELESCPPDDKSSLYLLQYQVFRGLGEAKLSRRSLQSAWEKGSTIHEKLIFGAWLRYEKKGEEAISDLLSSCSKCLQEFRLLDFVLQVSTGSHVINYDGDDDEFRGSAVVHFRIRDDMVACDRRKLAALSTPLYAMLNGGFRESYLEVIDMSRNGISPIGMRAISKFSLSGRLPYLTADAILEILDXANKXCCKGLKDACERKLASFVSSGQXAIDFMECALELGCSILAASCL

SEQ ID NO: 351842 - protein, 79 aa, Zea mays
  Clone ID: MRT4577_84044C.1.pep
KSTTDTTTIGATFDINDEITGMNSIMVVSMVLRQDQVQGDVQGRIMTVLMPLLHDTVHDTVTMAHRNRHRSRHSTSCLA

SEQ ID NO: 351843 - protein, 37 aa, Zea mays
  Clone ID: MRT4577_84045C.1.pep
PSGSTNLFSPVFFILTNTTGAQLSLNSGNMTMQEQAK

SEQ ID NO: 351844 - protein, 72 aa, Zea mays
  Clone ID: MRT4577_84046C.1.pep
VVLLIKKGTLALGNHNRGTFCPGRHFWPGETKLSLGKPTTGGLNHPVFLGRHSFKGGEECVKLGRIYWLALI

SEQ ID NO: 351845 - protein, 232 aa, Zea mays
  Clone ID: MRT4577_84047C.1.pep
MSRSMSLNMRSASRRDLPPPQKTIERFEKMVEGGSYYEAQQMYKSTSARYITCQRYSEGLDILQSGATIQLKHGQITCGAELAVLFVDTLVKGQCPYNEETFDRVRKIYEAFPRINMPHFLGDDYDDDGQKLSEAISAAKVRSEGCSSFLRAALRWSAEFGTSRNGSPDLHVMLGEYIYSESPETDMTKVSSHFVRGNDPKKFASMLVNFMGSATPGEDDTAIARSVLMYLS

SEQ ID NO: 351846 - protein, 73 aa, Zea mays
  unsure (1)..(73): unsure at all Xaa locations
  Clone ID: MRT4577_84048C.1.pep
TKPAIRRLASRDGVKRISGLMXEDISGVLKIFLENVIRDAVTYTXHGRRNTVTTMHAVYAPKHQGRTLYGFVG

SEQ ID NO: 351847 - protein, 1504 aa, Zea mays
  Clone ID: MRT4577_84049C.1.pep
MEPHRLLSDHTSSCLKRRLVYNLCCRGGKIVLEPYKCPPAPLCDLLRFDGDSRARRFLRQIRSYNSLFAFTSLGAVVGRSINNGTAPYVFKINGVVHHRIGSLLPSHGLRPQFAQLYIYDTEHEVQNRLGMFENEADVHDRPDPEVARLLLNMLDEHNKLVTAFRFAKERLDEEGNQKVTLRLLGCNTRHDAQYNLPANGELAAVIVGDCLPSQYKYDVLVHAREGGLKHVSCLHPSYMALQYPLLFPYGDRGYHLGIKYTDVGEGDATCRKYVTMLEFVRHRSHYRLNEPNPFTCYGRLSNQLAVDAYSTIEASRLQFIADHQKELCCESVQGITDAIGRGLTSADSVGGRVIVPASFTGGRRYHVMNYQDAMAICRVYGPPDLFVTFTCNPKWKEIVDALGFEPGQLACDRSDIVVRVFHMKVDEFIADIRENKFFGPIRAETEACAIDAFICAEIPDVAIDPLGYALVDEFMIHGPCDDYNRRCPCMKNDRCSKKFPKTYQDETVIDAFGYTLYRRRNNCLFVVKGATSFVDIRTFQNTVYETFREACEARGLLEGDNEWNLLFDEAIVSASAFQLRQMFVTIVVHCPVCNVRALFDKYWIYFPDDIQRGLREALGNPHYTAPHEQLLTLLLRKLADTFANSGANIADYDLPILSSYCDLNADQRLIFEKLTKSALSCLPGVFFVCGHGGTGKTFLWNAILMHLRSQQKIVLAVASSGVASLLLPKGRTAHSRFKIPFDLDEGGVCGVKRGTMLSELIQRTFLIIWDEAPMTHRHCFEALDRTMRDILSEHRAENANIPFGGKPIVLGGDFRQILPVVRRGSRSAIVNASITSSPLWQHATVLKPRTNMRLSNPSLHGKERADLEQFSKWVLDIGDGALPAMTRGDESEPTWITIPEDLLIHTDGDATAALVSEVYPELLEKYMNPTYLATRAIVCPNNLTTDKINDYIVSMLPGHGVQCLSCDTISKASERIPDFDMLYPTEFLNSINAANFPCHKLVLKRGVTVMLLRNLNQTAGLCNGTRMLVTEVGQRVLKCVVLTPSGVDEEVFIPRIALNTTDVKCPFTLQRRQFPIRICYAMTINKSQGQTLSTVGLYLDRPVFTHGQLYVAVSRVTSRSGLRILIENPDGSCGSQTRNVVYREMGDILIPSLMVGDCSRTLCLRVSRLWEFLDPQDDSRLLHTDLVLLDEEGNNIHAQIYPPLCQQFSALLDEGGIYNLKYFLVRKANRFYKLVENCNMISFTKWTTVEVVLQIPPAFPVCTYNLTPIDQLQPRVDYKEYFTDVLGVVSVISRVSSLRTRGRQAEVMKRTITISNARDTGPTVDVVLWGERATAFPAEQVHRDSESSPQIIIFVGTLMRSYADNVSLSGGSSCKWYINAPVPEVNALRASAETNHLPVIWDQGKVVAESTVIAVPEHKKLKDIKYLHPFENKKKEWLVIVKVLKIDSSWWYNACKKCLRTTKPHGDTYKCTNNSCDNIGSPTPRCCMNAAVAEKAKYEKPGKA

SEQ ID NO: 351848 - protein, 73 aa, Zea mays
  unsure (1)..(73): unsure at all Xaa locations
  Clone ID: MRT4577_8404C.1.pep
MQRDSGGGVAGGMSDSVLRKGLLSYFYLEEWNFLCFSGIGYNKDILDPKMDNWPFPMSLTMGHMGXCSSLAGG

SEQ ID NO: 351849 - protein, 135 aa, Zea mays
  Clone ID: MRT4577_84050C.1.pep
FRERGKGERSAHVSLHHTAWPTRRSGSPSQSTVNGHRPPENADDDGVEDERAAVPSPERCEVLVSAIAGVLASTLREHDERVAIIVRLHDGDVAATDRLNGGRCFSPPQHRTILCRQLEYAYCIVESIQTKISVI

SEQ ID NO: 351850 - protein, 155 aa, Zea mays
  unsure (1)..(155): unsure at all Xaa locations
  Clone ID: MRT4577_84051C.1.pep
MAKAAAXVLDNTDGVEGTIFFSQQEDGPTTWLXGSVSXGLEPXLHGFHVNALXDTTNVCMSTGPHYNLVMKEHGAPXEDNRHADDLGNVTVAEHVAININDTDSPIPMTGPNSIIGTVGAVRDDFDDLAEGDIDVRKSTENAGDRVASVTLRLYR

SEQ ID NO: 351851 - protein, 53 aa, Zea mays
  Clone ID: MRT4577_84052C.1.pep
EATSPRQFRSESLIWRVSSVVCSLEGGSALLFSARWRERKQVPLARAEFRAYV

SEQ ID NO: 351852 - protein, 97 aa, Zea mays
  Clone ID: MRT4577_84053C.1.pep
VTVPDGPQATLKRIKASTVPSPANYFGRRKTSDTCHFTGRGHYRFLLRLDGTLKDDGGRPIIRRTQGDLWLPICVRRVAHVPSIETESWPSPPGHVE

SEQ ID NO: 351853 - protein, 61 aa, Zea mays
  Clone ID: MRT4577_84054C.1.pep
TFGLIYVLDDEAPTVGPGLQGYVAGDTVGARPKAAKALGALSSVSPKEKKEKLRLQTIPGS

SEQ ID NO: 351854 - protein, 214 aa, Zea mays
  unsure (1)..(214): unsure at all Xaa locations
  Clone ID: MRT4577_84055C.1.pep
MVKFSREYEASIIPEWKAAFVDYKGLKKLVKRIKIARRDRDARSTSNDHDDATTTSYGFSVLDPVRALASHFNNATPPXLARGRQRRRRLEDLXESDSGELVRATDKHEQEFVERADEELEKVNKFYAAQEADMLARGDALIEQLRILADVKRILADHAAASSRRGRARLARTGGNSSPPSVDGSNSGRHLLSSPFVASSPQSISERERGAAAG

SEQ ID NO: 351855 - protein, 58 aa, Zea mays
  Clone ID: MRT4577_84056C.1.pep
VVILFFVIYFLYINNFLFFHYYSIFTYSDHKPKAPTYSFSLNHDKLTRPIFPKKHFLG

SEQ ID NO: 351856 - protein, 125 aa, Zea mays
  unsure (1)..(125): unsure at all Xaa locations
  Clone ID: MRT4577_84057C.1.pep
MVEIYKLSFFPFFFIFLFLXYTYHIFYYFLYFFSFFDLFKMFYSYIFLFLTSFFIFKSFFFFIFILFFFFIFHYFXFLFFLFFYFTFIILFFSFCLFFLFFYYIIYLFFFXYFFFSFFYFFLFLF

SEQ ID NO: 351857 - protein, 113 aa, Zea mays
  Clone ID: MRT4577_84058C.1.pep
MVKFSREYEASIIPEWKAAFVDYKGLKKLVKRIKIARRDRDARSTSNDHDDATTTSYGFSVLDPVRALASHFNNATPPASPEGGSDDDALRTLESDSGELVRATDKHVCSARP

SEQ ID NO: 351858 - protein, 604 aa, Zea mays
  Clone ID: MRT4577_84059C.1.pep
MSDGSVQLQQARVAEGAAVAEEVMAALERNGVSFVGGGLGKAKKDGSGKQLMGRAALLQLPATVRIDIPPTSPGRAALKVAAAVRFKYAATPTHFWVWMVIAKSVEDTEKKIREAFLALYGGLDLKTKFISLNEKAFGKILKKFVKVSEQHRKVDLFSEKVKRSPFSSSDKVLQLADEVECIFLRHFAANERMLARKYLMQQQRKNTNMDSCLVSLSTGPFVSLFIIYSVLAHVAGIFSSTGNTAYMEIVYHVLSMFALISLHVFLYGCNLSMWKGTRINHNFIFDFSSTALTHRDAFLMSASIMCTVVAALVVNLFLRNAGATYANALPGALLLLSAGVLFCPFNIFYRSTRFCFMRVMRNIVLSPFYKVLMADFFMADQLTSQIPLLRHLEFTGCYFMAETFRTHAYGSCTSSSQYKNLAYVLSFLPYYWRAMQCLRRYLEEGHDMNQLANAGKYVSAMVAAAVRFKYAATPTPFWMWMVIASSTGATIYQLYWDFVMDWGFLNPKSKNFWLRDQLILKNKSIYYASMMLNLVLRLAWAESVMKLRLGMVESRLLDFSLASLEIIRRGHWNFYRLENEHLNNAGKFRAVKTVPLPFRELETD

SEQ ID NO: 351859 - protein, 420 aa, Zea mays
  unsure (1)..(420): unsure at all Xaa locations
  Clone ID: MRT4577_8405C.1.pep
GSLPPELQVRVFAPAPPNCRRFIVATNVAETSLTVDGVVXSKHNQFVIDCGYVKQRQYNPSSGMYSLDVVQISRVQADQRAGRAGRTRPGKCYRLYPISIYQNEFLEATVPEIQRSSLAGSVLYLKSLNLPDINILKFDFLDPPSRESLEDALRQLYLIDAIDENGQITDVGRVMAELPLEPSLSRTLIEANELGCLSQALTVASILSAEITLRSVSKDVVDGKRKRQELPDGSGWGDHIQLLQIFESWDQTGYDTKWCSHHDLQVRGMKLSKDVRNQLCQIIQKIAKGSTDVDARKSRKNDPDYRKLRRALCVGYGNQLAEXMLHHNGYHTVGYRSKLVQXQRNFCTVEQAWVQPILKKLDKLDINRLSGGSSAPGDFELLGDNKQVNSSKNDVGVKQSEVDSKIQAVRERYLARKGKK

SEQ ID NO: 351860 - protein, 142 aa, Zea mays
  Clone ID: MRT4577_84060C.1.pep
MQGLDLEWARASVTGAAAAAFAAGGNRFIGAPSLSGTSIDWAGGGGGGGGSASEASAMGVVEDQQQIELPLSPEDMPFAHVYRFVGDMFDADAPVPVEAHLQKLKEMDDITAKTVLLVLLNLENNLLAPQFEPVRSCCRRMI

SEQ ID NO: 351861 - protein, 80 aa, Zea mays
  Clone ID: MRT4577_84061C.1.pep
HISFTPPVPPFPCFLYDLYWPFFYPLLGFFLPFFLPSLVWVKPFLYFPLFPFLHITFFPIGVFSNRPPLMALVPPFFSCF

SEQ ID NO: 351862 - protein, 197 aa, Zea mays
  Clone ID: MRT4577_84062C.1.pep
TITEQPGGITPESGMLSTGWAFCRTSRARGAESSSRQRAANNDTLVQTFYRACLARDDEDIEVFTGFDDVTAEAAQIEDAAARDDTRRSPSSDVSPNTITNSQTWPRRSSAWNKDGDRGSASNTTAGEAVRARAEGGRAHAEESGSLQPGRDGVRGQRQGEAGGWRTSHGWQTVLEAGPTASTREKRGRRPGSRGRT

SEQ ID NO: 351863 - protein, 44 aa, Zea mays
  Clone ID: MRT4577_84063C.1.pep
DRLCLTLSCLEIPAPADYRELSYSVCVLARPTRISTRMSRGGMA

SEQ ID NO: 351864 - protein, 124 aa, Zea mays
  unsure (1)..(124): unsure at all Xaa locations
  Clone ID: MRT4577_84064C.1.pep
HSIFTTGYPFYPYWGRGLTFXPGHSNISYIIPNPFFAGLXISKNILVHXDILLASSEALTAQATQXNFYNGSIFPPFTNIKKSSAHISSSFASKSYKLRFATHLPPPIYLVKYSHSCMYTPIYS

SEQ ID NO: 351865 - protein, 53 aa, Zea mays
  Clone ID: MRT4577_84065C.1.pep
PIPLIREPKNDPRSVNQPKRGIPLFPCFSFNPLPPQRPKQQQPGSFFVPKTSF

SEQ ID NO: 351866 - protein, 34 aa, Zea mays
  Clone ID: MRT4577_84066C.1.pep
EVAWYSRVDSLKFYLHNFSNMKITCFQPPFTIVF

SEQ ID NO: 351867 - protein, 46 aa, Zea mays
  Clone ID: MRT4577_84067C.1.pep
IRRGADNTIKKKKKKKKKKKKKKKKKKKKKKKGKKKKKKAPRAKGP

SEQ ID NO: 351868 - protein, 72 aa, Zea mays
  unsure (1)..(72): unsure at all Xaa locations
  Clone ID: MRT4577_84068C.1.pep
WWVRRGRRAARAAMVDRRRGFYLASCVRRWTYNPLILMGGCGGLDFGEGKAXLHLQSSAVQASKKXTRQMQG

SEQ ID NO: 351869 - protein, 59 aa, Zea mays
  Clone ID: MRT4577_84069C.1.pep
CASVVAAPTAFSLMKLYDAYASARRPVLVIISALVCSSCRKNSPIGFLSLGTDCGRPED

SEQ ID NO: 351870 - protein, 95 aa, Zea mays
  unsure (1)..(95): unsure at all Xaa locations
  Clone ID: MRT4577_8406C.1.pep
PILPPTRPVKDMGSCNAMITGYSQHGMGKQAIEIFDDILKRGAKPDYISYVAVLSGCSHSGLVQEGKFYFDMMKRAHNISPXGLEHFSCMVDLFA

SEQ ID NO: 351871 - protein, 126 aa, Zea mays
  unsure (1)..(126): unsure at all Xaa locations
  Clone ID: MRT4577_84070C.1.pep
LNKDYRXRMTAAQALSHPWLRDEQQQIPLDMLVFKLVKAYLVSTPLKRAALKALSRAITEDELIYIRAQYNLLEPNSADGRICIDNFRMALLQNCTDAMKESRTLEILHALEPLAYRRMAPARERI

SEQ ID NO: 351872 - protein, 150 aa, Zea mays
  Clone ID: MRT4577_84071C.1.pep
PPGYAGPSPPLRVLFSAGAAPWGGSPLPPILWAPSVFPFSPTKFFFFFPAPLFLGGEKPVPPLAFFFSFSPPPFFLLVWAYPVLRVFCGKLAPTSPFALVLVLSTRFVSAGPFPVFFLLFLCSFFLKPPPSKKKTPQKKKKKKKKKKKKK

SEQ ID NO: 351873 - protein, 61 aa, Zea mays
  Clone ID: MRT4577_84072C.1.pep
NRHTRHEDIKKIINLCHHTRQEDQPANFFRNWISKIFIIIFFLKKVPHVLKIVMNIAPLYL

SEQ ID NO: 351874 - protein, 63 aa, Zea mays
  unsure (1)..(63): unsure at all Xaa locations
  Clone ID: MRT4577_84073C.1.pep
KITSPSNLKMFFVKPTXPFLDHHHQNIYIQYQTAQHIHFQTPILKKPKPFFSTRLLQLNPTTR

SEQ ID NO: 351875 - protein, 132 aa, Zea mays
  unsure (1)..(132): unsure at all Xaa locations
  Clone ID: MRT4577_84074C.1.pep
GEGGGEGQANRTRGGTAPGPGQNNTGANHNKETXNQTADDGRKNEDNXTEQGRGGGXXXDKGXDPHAGTNNETXXQGQDGPTNREADNNQQGTRNNKRHTEKRNPNGPTEQTKKEDKRGHKRNTDKKQDNGT

SEQ ID NO: 351876 - protein, 165 aa, Zea mays
  Clone ID: MRT4577_84075C.1.pep
GGRGPKRSPFLKKGSSGWGPPRLTKPVLGCFPSPQNLGLGTPRLPCPFWNMGGFFWGTFPLEAGLEGTVFGFSGPTFCPKKRRPWNWTGFFNLSRGGILVFQSPPKGGGGDLHGRAGNPIKNKNCLYWSFFIAKMAPPLYWVRRLGKKFARFWAQVKKKIFFIFF

SEQ ID NO: 351877 - protein, 143 aa, Zea mays
  unsure (1)..(143): unsure at all Xaa locations
  Clone ID: MRT4577_84076C.1.pep
HWVPRGQKSKTGKKTRPTHAACFPSETRWPATSPSPAPPLPPPALLVSPCSPPPXSSAGEPARRIIRRRAPPXSRALPQRPPRLPPSRPWRRCAAPSASPTTLRRPPHPWRRRTPRSWTSSLPRPSASRRASPSAASARPPSG

SEQ ID NO: 351878 - protein, 62 aa, Zea mays
  Clone ID: MRT4577_84077C.1.pep
PPHGLGQGHGQGLLLGSQQVGLPPKGGRPRLNLGQPVKVKGCFVKALCNPPPPPRGLGFPPK

SEQ ID NO: 351879 - protein, 426 aa, Zea mays
  Clone ID: MRT4577_84078C.1.pep
RSHHKRLSAAAWQKLFSKYGGGPTLSGDDFCMVCLKDGAINAVSADVYRDRKESFKNLAEAALAGSCSDSPSYFISKAWLTHWLRRKNAGILSDADNGPTSALRCRHGYLLPEHAPGAKRVSVPESLWLFLYQTISEKVDDVVTFPSDCQPCKICSQELSDVASVEGNLRAVKLEQRHKHEKLISGKNFALRPGEKYYLVPSSWLSEWRAYITTTGKNISSLPEPQSLEAVVSSLICEKHSRLLQKPLDLVCKRGSITQKTSNNDGLTIIPEYDWKLFSEEWSATPGKGISAEIAFSKDAQDKMHGSSEAMPITDGNLDQSLYGANDDFGAREPYVRTDPEVCEECVGERESCALVQKLNYQNEDIHVYFVHGKAPPKSIKEASKDVPVSDRRISKRLQLTLLWVICSWESHALTSDLLQSVVCDE

SEQ ID NO: 351880 - protein, 51 aa, Zea mays
  unsure (1)..(51): unsure at all Xaa locations
  Clone ID: MRT4577_84079C.1.pep
MSIFQGFFFCPEVASLLLHNLCVYHINPQGHXMGAAPMSSDVSVPSVADLT

SEQ ID NO: 351881 - protein, 55 aa, Zea mays
  Clone ID: MRT4577_8407C.1.pep
KERKHTCRHLPYFPASTHLFSFSPSLFLFCSGYINKCARSPLTYTFSSINNPMHP

SEQ ID NO: 351882 - protein, 87 aa, Zea mays
  Clone ID: MRT4577_84080C.1.pep
WAPPPCPSSRCSTPSPSLAASLSTLHNVLMVGVHAFICPESIARPRGLVSYSLGPFIYDASATSCHVPPKSPLTQQKTHALIELEPN

SEQ ID NO: 351883 - protein, 112 aa, Zea mays
  unsure (1)..(112): unsure at all Xaa locations
  Clone ID: MRT4577_84081C.1.pep
EHLVRMRCGSLTVAVYGDEDKPALITYPDVALNCXLSIEDFFLIHCQDLTLFISRCFLLAWADMSYFQGFFFCPEVASLLLHNLCVYHINPQGHGVSDAGSIPVTRCDASVF

SEQ ID NO: 351884 - protein, 47 aa, Zea mays
  Clone ID: MRT4577_84082C.1.pep
TPGLYAAFVVHFCWRRKCWDWLPASACGFLAGLPLLVWFLFAAKRFG

SEQ ID NO: 351885 - protein, 139 aa, Zea mays
  Clone ID: MRT4577_84083C.1.pep
VQYRVVGSVAALLLLLAVVVPFTQTQTQSARDKAAMAEDAGPLVGGISDSPMGQENDLDVIALARFAVSEHNNKANALLEFENVVKVKKQTVAGTMHYITIRVTEGGAKKLYEAKVWEKPWENFKKLEEFKLVEDVPSA

SEQ ID NO: 351886 - protein, 60 aa, Zea mays
  Clone ID: MRT4577_84084C.1.pep
TFETMLCTTMMGIFYMLLFHNLSVYACYLVVCSQVELQRVKQTIATDHQLSDIGQSVYLP

SEQ ID NO: 351887 - protein, 150 aa, Zea mays
  Clone ID: MRT4577_84085C.1.pep
RPRSGATAVARAQAPRAGPATIAGDPTEKVRGEPTVASCWWAAVARYLGAAAAREPAALKESARGAVRGSHRRRRRRRGARPRIKSLLPGTTLQVRLSCPRRLWTLRCRHRVGLTTACLWPDPRSYMSDPPSPTPDRGLQATARAHPSAG

SEQ ID NO: 351888 - protein, 126 aa, Zea mays
  Clone ID: MRT4577_84086C.1.pep
KKKKKKKKKKKKKKKKKKKKKKKKKGKKKKKKKKKKKKFFPLAAPPLGGIFAIFLPPGGLSTFLLGAPFPLLGGRFPFPWPGFSTVGPGKPLAFPTLFPLRHFPFFPVGLLAKRPPPFAFPTICPP

SEQ ID NO: 351889 - protein, 46 aa, Zea mays
  Clone ID: MRT4577_84087C.1.pep
ISAGPPVRGLGPPKRVDMFFAPPKELWFSPGKADLGNKLPQALFFC

SEQ ID NO: 351890 - protein, 106 aa, Zea mays
  Clone ID: MRT4577_84088C.1.pep
MIPREDERKRGNYTEDASVHPMLHGRVTVGADQTRGSGIAGDEHHEALGARNTVGYRGDPEPDMTLLDYSYAHAGSRPGRPGSTPSGEQQTGHPSALPRGGQTADA

SEQ ID NO: 351891 - protein, 53 aa, Zea mays
  unsure (1)..(53): unsure at all Xaa locations
  Clone ID: MRT4577_84089C.1.pep
MPPKLDPSQVVEVFVRVTGGEVXAASSLAPKIGPLGLSRIKIGEDIVKETVKD

SEQ ID NO: 351892 - protein, 95 aa, Zea mays
  unsure (1)..(95): unsure at all Xaa locations
  Clone ID: MRT4577_8408C.1.pep
LDVVQISRVQADQRAGRAGRTRPGKCYRLYPISIYQNEFLEATVPXEIQRSSLAGSVLYLKSLNLPDINILKFDFLDPPSRELRIIILKEEINKV

SEQ ID NO: 351893 - protein, 174 aa, Zea mays
  Clone ID: MRT4577_84090C.1.pep
MATSRLALVSVFAAAVLLGMASAATYNVGEPAGSWDLRTNYGTWVSSKRFHPGDQTVFKYSPQAHDVVEVNKADYDSCSIASPVATHNSGNDAIALASPGTRYFICGFPGHCDAGMKIQINVVPSANSLGPASAPAANSPVSPPPMSAPSSAATKATGFGALAAVMIAAGLMAY

SEQ ID NO: 351894 - protein, 57 aa, Zea mays
  Clone ID: MRT4577_84091C.1.pep
CGFCLAAGVHFIRCTTHARWVTSGPSEPIRFLNGRTRGGRPVFRIRAYVARPLSFIV

SEQ ID NO: 351895 - protein, 136 aa, Zea mays
  unsure (1)..(136): unsure at all Xaa locations
  Clone ID: MRT4577_84092C.1.pep
GRAANPISPRPCATPPPPSPLLPPPRTSQAPPTSRPPPPPPCTAQAPPTSRPPLPPPAAAGTSILRPPPPAAPATSXRLPWPLRRGHEDPDRRXPAPTPSAPPALPPPTLPSLPRPCPRPLPPLPRPQVSPRWPPS

SEQ ID NO: 351896 - protein, 65 aa, Zea mays
  unsure (1)..(65): unsure at all Xaa locations
  Clone ID: MRT4577_84093C.1.pep
PFQISFNAPVLVHLKGKTPPLXIPIKDLKAPKIPFPIKRYFPNGTYKAWGVTHLLLEDSWKPQVG

SEQ ID NO: 351897 - protein, 64 aa, Zea mays
  Clone ID: MRT4577_84094C.1.pep
TVPHASATVAEISVIKCFKFYPNTYNNILIYYVSSITLYLKFIFIIYLFRDINVIIFKINLTSF

SEQ ID NO: 351898 - protein, 80 aa, Zea mays
  Clone ID: MRT4577_84095C.1.pep
VSQNCARPKEDRQKHSRTGSRAMVFAGALTRTGRGTGPSHRRMSFNTSAPKTCSAARADCLGTRTSGRHFGDTHGYTSDR

SEQ ID NO: 351899 - protein, 66 aa, Zea mays
  unsure (1)..(66): unsure at all Xaa locations
  Clone ID: MRT4577_84096C.1.pep
SGKCFVILCFWGGIGYXVGGWXXGRSPPPPLAPVYLPPGKCCCMNCKPCWFAGVGAVSACLAMAPR

SEQ ID NO: 351900 - protein, 139 aa, Zea mays
  unsure (1)..(139): unsure at all Xaa locations
  Clone ID: MRT4577_84097C.1.pep
PAGALAPPALRHGDLLICQTTNILLYVAPKVGLAPKEGNGLYHLNQIALTIMDGLVNELHDTHHPIDIXAYYDDXKEEAXKRSSFFXXXRIXXYFKYMQRLVDXKTXVVGPCLHGDSLTYAXLELVQAVDGTKFAFPKS

SEQ ID NO: 351901 - protein, 122 aa, Zea mays
  unsure (1)..(122): unsure at all Xaa locations
  Clone ID: MRT4577_84098C.1.pep
DHPGSTNLIQDQSIHCIWAYKLVSXASIHGSRFEXGPLQKVVSPLYTDGSFXPIGPCQVASGHPXLKVKQLKKGRLAIFSKWEFIVQPIVQDQGPNKSLPDHLADPVXNQAWSYAXNFVPGK

SEQ ID NO: 351902 - protein, 73 aa, Zea mays
  Clone ID: MRT4577_84099C.1.pep
AIRAGAGTTGGGRAHLRDSPSQNEQQAATDAGAPEHVVIMDLSVVLLNVCYDAVTIAVYISQGKLPSVQHRNA

SEQ ID NO: 351903 - protein, 307 aa, Zea mays
  Clone ID: MRT4577_8409C.1.pep
FAGESLEDALRQLYLIDAIDENGQITDVGRVMAELPLEPSLSRTLIEANELGCLSQALTVASILSAEITLRSVSKDVVDGKRKRQELPDGSGWGDHIQLLQIFESWDQTGYDTKWCSHHDLQVRGMKLSKDVRNQLCQIIQKIAKGSTDVDARKSRKNDPDYRKLRRALCVGYGNQLAERMLHHNGYHTVGYRTQLVQVHPSSVLEGDEYGKFPMYVIYHELISTTRPYMRNVCAVEQAWVQPILKKLDKLDINRLSGGSSAPGDSELLGDNKQVNSSKNDVGVKQSEVDSKIQAARERYLARKGKK

SEQ ID NO: 351904 - protein, 187 aa, Zea mays
  Clone ID: MRT4577_840C.1.pep
METAAAVSLPRSAGRAALPFPAPLKLQGRVALPRRALSGAPGPRQRLVARCAAADNSAAAELPIEKRFAAFPTIMDINQIREILPHRFPFLLVDRVIEYKAGEYAVAIKNVTINDNFFPGHFPERPIMPGVLMVEAMAQVGGIVMLQPEVGGSQDNFYFAGVDKVRFRKPVIAGDTLVMRMTLTKYQ

SEQ ID NO: 351905 - protein, 91 aa, Zea mays
  unsure (1)..(91): unsure at all Xaa locations
  Clone ID: MRT4577_84100C.1.pep
MNLHYDYLFXVLLNRDSSVEEACLLLQFADGSYLESYIRTIGAVFIIRTDDLDGETIELQDWDTGGQERFMNITSCHXRGAHGGIAGNDAT

SEQ ID NO: 351906 - protein, 41 aa, Zea mays
  unsure (1)..(41): unsure at all Xaa locations
  Clone ID: MRT4577_84101C.1.pep
VFLHMLVVYAYTILQNNYPSFVFMPIEATAGAVEAXPKIWG

SEQ ID NO: 351907 - protein, 271 aa, Zea mays
  Clone ID: MRT4577_84102C.1.pep
KFTMFEAQVLALRADPATFTEEPEDSEGFGKWNALFSIDEMEEQIETVLHESPGLESFVERLVPSVVDYETFWSRYFFAVDKLKQAEDVRTKLVSRAMSKEEDEELSWDVDDDDVEDANTSDHKDSTNSLVDKKEEQAVEPVNCETEGSMEQEAAVENDLADDKEVALAAAKDGNGESSFEASTPKASNGTRQEEKIEAADSSKGGDFSVVPQPLVQEEDLSWEEIEDVGDEDQKNGVSKRSSSVSKVEDLRRRLNSVEDDDEDLSWDVDE

SEQ ID NO: 351908 - protein, 54 aa, Zea mays
  Clone ID: MRT4577_84103C.1.pep
PRVRGRVGLAHFSSYVTGISGCWHGAIVLWFQMFTALVLAFSYFSASMVLCASP

SEQ ID NO: 351909 - protein, 157 aa, Zea mays
  Clone ID: MRT4577_84104C.1.pep
MACSGLRLALLAAVLALLLLLLPCALASEPLNPEVQALIAIRQGLVDPHGVLRSWDQDSVDPCSWAMITCSPQNLVIGLGVPSQGLSGTLSGRIANLTHLEQVLLQNNNITGRLPPELGALPRLQTLDLSNNRFSGRVPNTLGRITTLRYLRLNNNS

SEQ ID NO: 351910 - protein, 72 aa, Zea mays
  unsure (1)..(72): unsure at all Xaa locations
  Clone ID: MRT4577_84105C.1.pep
GGSGGNIFGQLAVVFPPSVPVSPKERKALPRLXGMGFPRGLLLKVFFACPKGEELSAPSLLFFGPEFFDPPP

SEQ ID NO: 351911 - protein, 92 aa, Zea mays
  unsure (1)..(92): unsure at all Xaa locations
  Clone ID: MRT4577_84106C.1.pep
PIIAVADEGWHILMNKSDVLLLGNHGYDNALXDMHPIFLAHGPAFRXNFSKEAMNSTDLYPLLCHLLNITAMPHNGSSWNVQDLLNSAMPRV

SEQ ID NO: 351912 - protein, 114 aa, Zea mays
  unsure (1)..(114): unsure at all Xaa locations
  Clone ID: MRT4577_84107C.1.pep
GPWFYPPPVEDGIGQAVLNLPLEEQQAVLLGGVGRFLKAGSDGCPHLQRGFXVWWRRTFVRPDPQQPGNGSPPWLLLLFRGPLPLFNGCCLEKTKGPPTQFFSSFRRRRRKLLV

SEQ ID NO: 351913 - protein, 108 aa, Zea mays
  Clone ID: MRT4577_84108C.1.pep
FWGPTSSPGKNCSFWKNCQRGKGPSVTTKNIRPPGGKRWPNPLGGQTFVPFAWVWELGSKKPFVQMVKARNPLFYPACFLVFKFKGNGIKGVPTFGLFSIFPSGETRP

SEQ ID NO: 351914 - protein, 212 aa, Zea mays
  unsure (1)..(212): unsure at all Xaa locations
  Clone ID: MRT4577_84109C.1.pep
MAKVHPNVLLSSSSPAEGAAAAAAGGEGEETSLTVWRKSLLFNCRGYTVFDARGDLAYRADSYDAEAEVVLMDPAGRPAFTVRRRRLSLSGEQWLIYAGEXDAAPAYAVKRGGGGGKSVARVTPCAAVPAAAGAAALPAYEVEGSYARRRCVVYDAHQRRAVAEVQPKEAVGSDVFRLVVQPGVDVSLAMAVVVALDQLFGRPSLLRSWSSP

SEQ ID NO: 351915 - protein, 430 aa, Zea mays
  Clone ID: MRT4577_8410C.1.pep
AEAYSIFRSPTIDSVDESVQLDDTLSAKPACSGTGSGFEILCQGFNWESHKSGKWYVELGTKAKELSSLGFTIVWSPPPTDSVSPEGYMPRDLYNLNSRYGSMDELKELVKIFHEAGIKVLGDAVLNHRCAQFQNNNGVWNIFGGRMNWDDRAVVADDPHFQGRGNKSSGDNFHAAPNIDHSQEFVRNDLKEWLCWMRKEVGYDGWRLDFVRGCWGGYVKDYLEASEPYFAVGEYWDSLSYTYGEMDYNQDAHRQRIVDWINATNGTAGAFDVTTKGILHAALERSEYWRLSDEKGKPPGVLGWWPSRAVTFIENHDTGSTQGHWRFPYGMELQGYAYILTHPGTPAVFYDHIFSHLQPEIAKFISIRHRQKIHCRSKIKILKAERSLYAAEIDEKVTMKIGSEHFEPSGPQNWIVAAEGQDYKIWEASS

SEQ ID NO: 351916 - protein, 85 aa, Zea mays
  Clone ID: MRT4577_84110C.1.pep
GPHSHSTSTTPTGGAAAAAASPRNFRRSFSSASSAGHSHGGGGGGAKCVCAPATHARLLKCQLHRTNVQGLMHIHGMPYLDFERL

SEQ ID NO: 351917 - protein, 136 aa, Zea mays
  unsure (1)..(136): unsure at all Xaa locations
  Clone ID: MRT4577_84111C.1.pep
HTHTFWSPKTRGRRRXKKQXGGKTXXGKXNTXEGEXXDTXDNXKAKSQDKEGXPPDQQRXRGGGGEXXDGRTXXDHNNQKESTHHXGPRXKGGXQXXEKTXPGKTSTXRGEPXDTXDNAKAKNQDKEGGPPDQGGP

SEQ ID NO: 351918 - protein, 73 aa, Zea mays
  Clone ID: MRT4577_84112C.1.pep
KKKKKKKKKKKKKKKKKKGGGPILRITTIKTLTMIILTSIFLKTQFQSNAPNCNPSPLTQPPPYHFYLHWQVV

SEQ ID NO: 351919 - protein, 107 aa, Zea mays
  unsure (1)..(107): unsure at all Xaa locations
  Clone ID: MRT4577_84113C.1.pep
ICAADIAPVCEGAVQHIASKRLQIGGVDLTNLFSQELNXTNPWAYLDVSDVERLKEQYACCTEYQLAFEAIESSCRPKRDTLPDGQALRTGSREKQICLLQQSGHHL

SEQ ID NO: 351920 - protein, 206 aa, Zea mays
  Clone ID: MRT4577_84114C.1.pep
GVSNLLHHHQSFSKSSDHCSECSGIKLKINGGMGKPVPSFLMLLLSRGRAPLDCPTRWQDGRPSHSTNHVLQRTFTKQMLRVFDLVELEEFDHFVAMLDHRFLEAHKRIAISATTSASQIFLGDRRDERLCGHDMEGSSPESRGRLGAVRLWVSRTWARWVGRGSLEKMNRRLGSLVGEMRSYGAWHARWVPTGERGRASRQASRV

SEQ ID NO: 351921 - protein, 49 aa, Zea mays
  Clone ID: MRT4577_84115C.1.pep
SKIGTPLIASKQLFYKRHLEMFHQCFCLLKLLWDSLFSLISKKGLFSCP

SEQ ID NO: 351922 - protein, 81 aa, Zea mays
  Clone ID: MRT4577_84116C.1.pep
IAQVRVCAAPRAPQGQAGAWLAFQVQASGPGSTCLSSEQGPDDFPPWFAAVFKAPDNRSVPLQDALIDQCGKTTGLLSMVL

SEQ ID NO: 351923 - protein, 136 aa, Zea mays
  Clone ID: MRT4577_84117C.1.pep
MLLVRAPPSPAPLSAAANFPADLERPLRLRGLSSSRAGVTTATATAKPAASSLGGQKRKQVTSVANPLVKHCVKLRLSAAYRRSCRRLLLVGLAPILEVCSFELEAIDYLLLLDGVEAPEALREFSGDIFDVSAAV

SEQ ID NO: 351924 - protein, 61 aa, Zea mays
  Clone ID: MRT4577_84118C.1.pep
KKKKAPLCSQLKKKKKKKKKKKKKKTKKKNKKIKKKKKKKKKKQKKKKKKKKACTCPGGRS

SEQ ID NO: 351925 - protein, 63 aa, Zea mays
  Clone ID: MRT4577_84119C.1.pep
MNLYVNFCYTCIFVRPDGQASVEAQEFGLVKNMLIAAVEERYKDAASWKDKLMRLRSKRKNWA

SEQ ID NO: 351926 - protein, 84 aa, Zea mays
  unsure (1)..(84): unsure at all Xaa locations
  Clone ID: MRT4577_8411C.1.pep
XETRGRTHRGGALRARPREPPQEGGTQGGHQKDTRPEHRPGGPGRTRATTPRHAQRNRRTARPRSQQAPDHGEAANATGRTQEE

SEQ ID NO: 351927 - protein, 61 aa, Zea mays
  Clone ID: MRT4577_84120C.1.pep
IVDDPACNLSLDHQSVDGAYRIGQNKDVSVFSYLVCDVSRFQSLLISRSQVKMFPSRISSC

SEQ ID NO: 351928 - protein, 140 aa, Zea mays
  unsure (1)..(140): unsure at all Xaa locations
  Clone ID: MRT4577_84121C.1.pep
MPSGEEADLEAFQRHVASALAELLPAAEAGAGAGGDAAAEGAGEEFLCAAWTRRLLEAFVLCQEEFRVVVAQARRRAGALPPAAERLVAEFHERAVKVLDVCNAARDGVDQVRRWERLADVAASALRAXGEVHEGQLRRA

SEQ ID NO: 351929 - protein, 60 aa, Zea mays
  Clone ID: MRT4577_84122C.1.pep
NLYSNSTTNSNLFPHSVGHTSQVEYILLTHSITHSYFYTSYLYPTSFTYISKISSYSFIT

SEQ ID NO: 351930 - protein, 54 aa, Zea mays
  Clone ID: MRT4577_84123C.1.pep
VFVPGKAVLAPGEKMVLGGVFFLKPTPCFKSFQIFCRPIPSGGGPPIFFIPDMF

SEQ ID NO: 351931 - protein, 49 aa, Zea mays
  Clone ID: MRT4577_84124C.1.pep
SEITGISGKFDGGVNSCLGAFSEVINVPTLLPHIFVTWMFFSPCFIFLS

SEQ ID NO: 351932 - protein, 174 aa, Zea mays
  Clone ID: MRT4577_84125C.1.pep
ENRPKWRKKKGKKPKEPGLRAEKKKRAPWGEPPPPPRLKARKKGGPIPNKGGQMFGKGNGPGPFRKNPKGEKGKASKRKKWGTPGVSPIPPWKNTGQEMEKAPPKGEKGPLKKKPNPPQREGKMQKFPLKKAPPGRKKIFLFFFFFLGVVFIFFFFYFFFFFFFFFFFFFFFFF

SEQ ID NO: 351933 - protein, 388 aa, Zea mays
  unsure (1)..(388): unsure at all Xaa locations
  Clone ID: MRT4577_84126C.1.pep
MVVLGQQRTTPPTGGLLPEKSVQEQNSVSSSSSTRQMIGRGIQWWSRSLWVKSRAWIRNPMNMALSVWILAVGVSGAILFMVMTGMLNRVLPSKPRRDTWFKVNNQILNALFTLMCLYQHPGRFYHLALVCRWKAGDMHQLRQAYCKDGACKPNERKHMTAVILLLHLNCFAQYALCGLNLGYRRPRRPVVGVALTVAVAICAPAVAGMYNNLSPLGRDYEAPAPAEGMIISEEESQLQRKTPDTERRYSLVPRQGQGEEPQWVGGLWEDLWDDMSLAYLSLFCSCCVFGWNASRLGLGNMYVHVATFVLLCLAPFFILDLAAINVDDEAVRDALGLAGIFLCVFGLLYGGFWRIQMRRRXGLPEXRXCCGXRXLTDWLLWLCCYRAR

SEQ ID NO: 351934 - protein, 44 aa, Zea mays
  Clone ID: MRT4577_84127C.1.pep
CLKNSGLGAVIHLQVSKVGTKHPKTPARGKSPRQAPFGRVIGRH

SEQ ID NO: 351935 - protein, 156 aa, Zea mays
  Clone ID: MRT4577_84128C.1.pep
ARPGPATCSGSTLSTSASCPTLLLLTRRRPAARTSASAFCVLRCARSPCYRGATCLALRCRCSGVVIAQVLSALNSLPFCSPAVDSLLVSLLCHHSLSPSSTSTSPLLVSSKPSRLAGFLYAASRVPLASFTCRVVEQVWLFDSMYVWMRNKFQEK

SEQ ID NO: 351936 - protein, 42 aa, Zea mays
  Clone ID: MRT4577_84129C.1.pep
DHDSAQATAFAICPSCFSARPYRVILAPRRHRSVFTRSIPRD

SEQ ID NO: 351937 - protein, 165 aa, Zea mays
  Clone ID: MRT4577_8412C.1.pep
GTAGAFDVTTKGILHAALERSEYWRLSDEKGKPPGVLGWWPSRAVTFIENHDTGSTQGHWRFPYGMELQGYAYILTHPGTPAVFYDHIFSHLQPEIAKFISIRHRQKIHCRSKIKILKAERSLYAAEIDEKVTMKIGSEHFEPSGPQNWIVAAEGQDYKIWEASS

SEQ ID NO: 351938 - protein, 92 aa, Zea mays
  Clone ID: MRT4577_84130C.1.pep
PPFFFFFFFFFFFFYFYLRGNQQPLVYAIHHSKCQITVQKLQHFTLPFKDNLDIKLRRVVGLVTKRDPLWARANRPMKALSVGTKVKKRGGR

SEQ ID NO: 351939 - protein, 108 aa, Zea mays
  Clone ID: MRT4577_84131C.1.pep
TPTHPPTRPHLSNSLLTRLPSCTCLFSHCPSAYPYTSLTQSLYDQTHPFINTLPYHLFLFPCISLPTNLIHHMYCVPLTSLSNIILSSQAYMYLHHTRHFPYPHHLPT

SEQ ID NO: 351940 - protein, 203 aa, Zea mays
  Clone ID: MRT4577_84132C.1.pep
SPIPFSPLPPSPRLVSARRSLPHNLLLLGRLSYPHGIQLALRWDLPGRRRLARLAAKMDARQTAQVNQVVGAVGMPPPQSQTQDAWVDPQFVMMRSSIRDKIFEYIGRKQTSADWRRRLPELARRLEEILFRKYPSKAEYYNMMKQQIEPHLQFAIKQLSAQNQQRQQNQQLSRQIASSPGYGTMILTHGITQGASETSRMSY

SEQ ID NO: 351941 - protein, 92 aa, Zea mays
  Clone ID: MRT4577_84133C.1.pep
QSQYTLTLHENKQKHIHNYCLVITNGYLVGVVRVTFGTGPHALCVMCNCEPEARKRTSGCLTVVVSRRARVCLFVGGCRSVPFWIQSDSRRR

SEQ ID NO: 351942 - protein, 58 aa, Zea mays
  Clone ID: MRT4577_84134C.1.pep
LIVILVLYYQLVIFKIIVYLKKKKKKKKKKKKKKKKKGAAVLKVQGLLTLPSNFLPFL

SEQ ID NO: 351943 - protein, 90 aa, Zea mays
  Clone ID: MRT4577_84135C.1.pep
SKPGRDIPQAVVLSGRPYAEQQSGRTHSPGPPIIIDRHSPPQGLQCCWRGAYKGVETGHGRTILADLSAKVITIDSMRAQDCILRTRVIY

SEQ ID NO: 351944 - protein, 67 aa, Zea mays
  Clone ID: MRT4577_84136C.1.pep
FGAGKRMCPGTSFATAAIHLMLANLVYHFDWELPAESASKGIDMTESFGVTVPRTEKLLLVPVPVNL

SEQ ID NO: 351945 - protein, 279 aa, Zea mays
  unsure (1)..(279): unsure at all Xaa locations
  Clone ID: MRT4577_84137C.1.pep
GRTLDRLEHRRNIEHFKTTAIQVLKSAYRACVPAGEEIAALAAADFHASQTVYQEELQCLESWVKELRLQELEFARIMPLICFFPPAATLFPCEQHEARMAMSKHNILLTVVDDLFDVGGSREEMENLVKLVEMWDAHNRVGFCSERVEIVFRAIYDTSNHLAAKAAAVQKRNIIHHLAELWANTVRAMMAEANWAMTGHLPTFEEYMAAGEPSFGLGPIVLASLYLVGPELPEDVVTSQEYNEMFRHMNVCGRXLXDLQSYEREKGQGKXNSVLLLLA

SEQ ID NO: 351946 - protein, 124 aa, Zea mays
  Clone ID: MRT4577_84138C.1.pep
MLPAAMAVGLAWSRPMLAHGQGMTAREVGAMHDCVEELSDAVVELRKSLGEMKQLRGKDFDLKMNDIQTWVSAALTDEDTCTEGFAGKVMNGKVKTVVRGRILEVAHMTSNALALINSLAALHG

SEQ ID NO: 351947 - protein, 45 aa, Zea mays
  Clone ID: MRT4577_84139C.1.pep
AEQFNEVILNHELPARGTMVPNGYESANSRYNNSSGASRSCNDGE

SEQ ID NO: 351948 - protein, 102 aa, Zea mays
  Clone ID: MRT4577_8413C.1.pep
HILFYLPSNNLTRKATKILTLLALIALYEIATNAFIIPQCSLAPSAIIPQFLRPVTSMSFEHLTEQAYRLQQALAANVLQQPINQLQQQFLAHLTIQTIATQ

SEQ ID NO: 351949 - protein, 48 aa, Zea mays
  Clone ID: MRT4577_84140C.1.pep
DLRWPSRIKSPGLSPFVKVHFPQPAIGGWSLPLRSDVYGLNFRFQLSF

SEQ ID NO: 351950 - protein, 106 aa, Zea mays
  Clone ID: MRT4577_84141C.1.pep
LLSKGITLDIYHSKMQRYRYIAFCLLPSDKSILLSSSQFLYPFCPSQFLQDRGFSWQPLRRSVPRRLHISLAVAAASALSAAQSPHPHTFSIGDPYVSPSFLFFLC

SEQ ID NO: 351951 - protein, 161 aa, Zea mays
  unsure (1)..(161): unsure at all Xaa locations
  Clone ID: MRT4577_84142C.1.pep
KKRKKKKRGRRGSGGKKKGSGEKKRRGKSMKRGKKKGKKMRASGGGKGGEKRGKKEKKKKRGKKRGKRXKESKERETGKGKRQRRKKGKWTNSKRKRKKSRRRKHEKWMIETSDTRRTSWSMINAWYGWFMCAAAFFRSRSSLQIGRRRRKLFWMSTQAAA

SEQ ID NO: 351952 - protein, 83 aa, Zea mays
  Clone ID: MRT4577_84143C.1.pep
SARTRWRGTDTNWGSEFYLASTKDSHALLIGRQKDGLKTEAIKSSRGIKMVTTRRISIHQNDQGSKSGGTWCAVPWRRRKDAT

SEQ ID NO: 351953 - protein, 55 aa, Zea mays
  Clone ID: MRT4577_84144C.1.pep
CRLDFGLVFTYHFVSKNLMYAFKCFMCVCTCSSIFKLSRSTLLFKTSIFHLVHVL

SEQ ID NO: 351954 - protein, 332 aa, Zea mays
  Clone ID: MRT4577_84145C.1.pep
MESSFSSSLGNNSSRILVIGGTGMMGQHLVKASLAAGHPTAVLVRPASSSKLELLETIKASGATVIGGDIYDHESLVAAFHQVDVVISAVGHHGPHDLEDGQLRIVAAIKEAGGSVKRFVPSEYGCDVEQAARSAAVLEPARSIVLAKVRVRQAIRAAGIPHTFVCSYWAHGFVLPRLGDPHADGLPATRATVFGDDATRAIFVHEADMAAVTVRAVDDPRALDKTLYLRPPTNTCSLAHLVRLWEDKTGRALDKYYMPDEELVNRIRDSPLPLNFQLAMVHATVVAGVCDQTVDAEAGGVEATELYPDVNYVTVHDYLDGLKESLTRNVNS

SEQ ID NO: 351955 - protein, 181 aa, Zea mays
  Clone ID: MRT4577_84146C.1.pep
MGIPPRLPDHEEEEEYDDALFYEDIQAPKFVDLTAPDAGLPDDDPAWFCLRVGCDQSHEQVDPEALDRSLFVRVMAARSPNVRLQKVISRKNQSSMLKCPHSAPPKPPRARFARLSATTEAAEKAPAKPKPRLQRICALRASPIRIKAARVERPSERKKGLTTPRSKGVRARQELFHSVKH

SEQ ID NO: 351956 - protein, 106 aa, Zea mays
  unsure (1)..(106): unsure at all Xaa locations
  Clone ID: MRT4577_84147C.1.pep
TDLLHLYRMDIHYSAREKTASFLKMAAXLERQRALVKLFPICHSTMEEIVPNRSPVNLVAFNLGYRPGGDKTVITVPRAXLTXLQACSRNLSXGGLIRGLGYIGHP

SEQ ID NO: 351957 - protein, 78 aa, Zea mays
  Clone ID: MRT4577_84148C.1.pep
LRSLTTTISVALSTLSCRCSSCSPSASKCPWIVVKLPHLHHNQRQHAKQDCFTFQLDITLDDIQRVTQWNLDVNEHSE

SEQ ID NO: 351958 - protein, 93 aa, Zea mays
  Clone ID: MRT4577_84149C.1.pep
MGTLACPWRSGHLFAFITFAVLFFSTSFAGRQYSFLMDQDALRQQEGEGARTEQKEAVVPLVQARRLSVKTNDYSSYDPSPSMDKPHSKLIPN

SEQ ID NO: 351959 - protein, 88 aa, Zea mays
  Clone ID: MRT4577_8414C.1.pep
GPSAYVSLGQMRHRAQSWSKLSHSQSTMVLMVRMVTVYLSGVTFIQGCSMVHLYRVVLLLHNHRQSAASTQPRSLLLLRNSCLRVTEE

SEQ ID NO: 351960 - protein, 51 aa, Zea mays
  Clone ID: MRT4577_84150C.1.pep
RSSSLLPVFLSKCAYIKSHSKMEASPRAQSNLISCAWDLDQYMIDEMTLHE

SEQ ID NO: 351961 - protein, 52 aa, Zea mays
  Clone ID: MRT4577_84151C.1.pep
RHGRASGPSVRPMNAGQPKHRYFIKKCKSLDVRWSDDVPFSVLCTAHRAAEC

SEQ ID NO: 351962 - protein, 177 aa, Zea mays
  unsure (1)..(177): unsure at all Xaa locations
  Clone ID: MRT4577_84152C.1.pep
ARDPNGEAATPFDFGSGFMDPIKALSPGIIFDTHPEDYKSFLCAISRDDHSVHLISGDNSSCXPTERPXSATALNYPSITIPYLKQSYSVMRTMTNVGNPRSTYHAVVSAPPGISVRVTPEVINFKNYGEKRTFTVSLHVDVPPRGYVFGSLSWHGNGSDARVTMPLVVKLQTSGKA

SEQ ID NO: 351963 - protein, 389 aa, Zea mays
  unsure (1)..(389): unsure at all Xaa locations
  Clone ID: MRT4577_84153C.1.pep
PRGRPGVGLSGAIFTQLYRAIYGTDNDGTDLVLLMAWLPAAISLVFIPTIRIMPRNTAARGERKAFYLFLYASIVLAVYLLVMNVVELEVIHFPKPAYYVTAVVLLLLIFFPIVIVVKQELKTYLAPPEPATAAATSAAIVTITVNEKTRASSNNVAPESTDHRHQATAAAAANDDADSSPSCFQDVFRPPARGQDYTILQALFSVDMLVLFVATICGIGGTLTAVDNMGQIGQSLGYPQRSITTFVSLVSIWNYAGRVVAGFASEYVLARYKVPRPLALTVVLLLACVGHALIAFGVNNGLYAASVILGFCFGAQWPLLFAIISEVFGLKYYSTLYNFGAVASPVGSYILNVRIAGRMYDREXLRQAGQRGKDLXCIGVRCFRESFFI

SEQ ID NO: 351964 - protein, 80 aa, Zea mays
  Clone ID: MRT4577_84154C.1.pep
CLLGGDHLTTSLCFGNCSDYPSSGSSISITFRSRSCFTTSWGRLGSSSTSRDQLTYLMGCMMHMFEYQDKYRKIILQFYT

SEQ ID NO: 351965 - protein, 91 aa, Zea mays
  Clone ID: MRT4577_84155C.1.pep
LGYILLYLILNRKRLTSVGFLRVATLPPQPANHNPLVHLSPQSNEYNSRCLDKIHRFFDRNFQSSRQLVGSSDLGALHGAKEKGGKILPPL

SEQ ID NO: 351966 - protein, 98 aa, Zea mays
  unsure (1)..(98): unsure at all Xaa locations
  Clone ID: MRT4577_84156C.1.pep
LGQKPVRMVTDXYTRSTVDYFEATRARPSLASXLLITXXPRXXXXXXXXXXXXXVMSGPVSLPEKEVILFLAHGKQRKSMEVLSRLPARALYSLVAFV

SEQ ID NO: 351967 - protein, 124 aa, Zea mays
  unsure (1)..(124): unsure at all Xaa locations
  Clone ID: MRT4577_84157C.1.pep
PRGDATRSAIILQISSLVTTMGXERRVLQAYRLQLALAASVLQQPIAQLQQLSLAHLNLQTILTQQQQQFLPSLSHLAVVNPVAYLQHQLLASNPLALANVAVYQQQQRLQHVMPALIQLAMVN

SEQ ID NO: 351968 - protein, 119 aa, Zea mays
  unsure (1)..(119): unsure at all Xaa locations
  Clone ID: MRT4577_84158C.1.pep
LCLILEHQHTTXRAGYNYYSSNPNLKXNWQDSLKQQCSPXKMPCLQSRMIQPSNYQVLHQQCCHELRSNEPQYIHQAIYNMDQSIIHEEQQQQPCELCASQQATXKCGGHLDSSSIPTI

SEQ ID NO: 351969 - protein, 84 aa, Zea mays
  Clone ID: MRT4577_84159C.1.pep
MQNSIGPLFITQLCPMLVQFDGGGGFCYLQGGQNNKRWPSSTVLWIKTVQQIWVSLPGVLQDHIPAGPRCLFHHQNEHHTQSQS

SEQ ID NO: 351970 - protein, 265 aa, Zea mays
  Clone ID: MRT4577_8415C.1.pep
MRQPFYGRPPVQMKVQLVEQEGSKGMGSSGCSEIVELADDPKGARPAPHLRVRVKPVGHEDGARSCSLEDDLDQLIRSVNVRTSARASGQRSTDRWLIGLGKSPVSGSEIVESVSLKQALRKMCISQASEMAAMKRLSKPTGASTPSDSGAIKKLYGSVAVQANEEQGDKSKVGKVYMLPDKLAGSSVGEASEISKGQSKSSAKKNLRSASPTAVKVRKTRIQDVISNKSSEAVEDVSVGARLPRQRKGKSVKTSSPRAVPVGGS

SEQ ID NO: 351971 - protein, 280 aa, Zea mays
  unsure (1)..(280): unsure at all Xaa locations
  Clone ID: MRT4577_84160C.1.pep
MEAAASRKRAYSIIVPTYNERLNVALIVYLIFKHLPDVNFEIIIVDDGSPDGTQDIVKQLQQVYGEDFVVSSLKKYVPGPLEVFVHMMSVXYSVPWLNALSLTXMMXLLRARPRKLGLGTAYLHGLKHASGEFVIIMDADLSHHPKYLPSFIRKQKETGADIVTGTRYVKNGGVHGWNLMRKLTSRGANVLAQTLLQPGASDLTGSFRLYKRDVLEDLISSCVSKGYVFQMEMIVRATRKGYHIEEVPITFVDRVFGISKLGGSEIVEYLKGLVYLLLTT

SEQ ID NO: 351972 - protein, 130 aa, Zea mays
  Clone ID: MRT4577_84161C.1.pep
LNDKPDCTCKRTHLGCFCHQVTALIMTKHGNVNLHTLTRNIPFSSYRHVLLALEPFLQMLSAEEPPEEANQALGLEEGHLGGGARHHDEGGRAAVEHLHDPLHVLPLEPDTARRRDDHPEPGRQSPHHGI

SEQ ID NO: 351973 - protein, 51 aa, Zea mays
  Clone ID: MRT4577_84162C.1.pep
NNTNHCVLSHLYYTLSLRACDPITFVSRTIPFMEFIFVGPPCRRCRLYNKH

SEQ ID NO: 351974 - protein, 71 aa, Zea mays
  unsure (1)..(71): unsure at all Xaa locations
  Clone ID: MRT4577_84163C.1.pep
PAXXXXXXKKKKKKKKKKKKKKKKKKKKKKKKKKKKKKKKKKKKKKKKKGGPPFLLWGGHRPLKGGFPNWP

SEQ ID NO: 351975 - protein, 101 aa, Zea mays
  unsure (1)..(101): unsure at all Xaa locations
  Clone ID: MRT4577_84164C.1.pep
GSRAHPNKLRKWEEPTPGKQAGKLKAARGENERNWEGKAAGTWLNGSXCCPQKKAEFNDQPQHGGAPLLYFLGVKVQKKSFFPKKKKKKKKKXXXKKKKIK

SEQ ID NO: 351976 - protein, 46 aa, Zea mays
  Clone ID: MRT4577_84165C.1.pep
QYLRTKTCVYMKKVNPGRQGVGNIFNSVGKNVNPMDVKYNGKATFG

SEQ ID NO: 351977 - protein, 64 aa, Zea mays
  Clone ID: MRT4577_84166C.1.pep
LLGTFFGSRPCLRYSLRPFLSFAYSLFIDVLHALWVVVLFHARDHPMGILQGDMLLNTDGGNLI

SEQ ID NO: 351978 - protein, 120 aa, Zea mays
  unsure (1)..(120): unsure at all Xaa locations
  Clone ID: MRT4577_84167C.1.pep
RLLDPDWQAAADLVGPSGGENDPKDPXRHLPVRDLIKPKGRRKKKKAPVVMLDKSLVGSTAEGLNGLPLVQGGPLYLINCQAPFCVRDCLYCPILHRGKRMDVLSRPQAIFFRVVKRLGE

SEQ ID NO: 351979 - protein, 129 aa, Zea mays
  Clone ID: MRT4577_84168C.1.pep
NRRDSEWECFKPWRPTCPFQWRGSPSTPRGTGRRLSEAEAPLVGRPRRAYAHGRSYEAPTTGPSPRGSEDCPSSQVRSRRVTSSMWHITYSFACAGKYRESRSSTGNLTTRGPRGMQNRAGKADLWMTT

SEQ ID NO: 351980 - protein, 105 aa, Zea mays
  Clone ID: MRT4577_84169C.1.pep
MATTTTTILLLLIVAATAVSADDLSGYHNEHPAAQSPLESIIGLGRADDGRLRFVSSKEEHRPAWVTSARVASGQTPSLVGGAGGASAARSRNCSTGSTQEATLP

SEQ ID NO: 351981 - protein, 78 aa, Zea mays
  Clone ID: MRT4577_8416C.1.pep
TRPGGRRKGPKRAHWRAVPGDPTRAPNRAKKGAKGGPGGNGETPKNPQNKPTRSKKGKTGGAQGGKKTTLTAVPPLPP

SEQ ID NO: 351982 - protein, 65 aa, Zea mays
  Clone ID: MRT4577_84170C.1.pep
NKNGWLNGPLEGLKYIEGTPQGEAGASQHRLKYQTLIGACMHAFAGFGKRFFLTWTAPHMPGKNK

SEQ ID NO: 351983 - protein, 63 aa, Zea mays
  Clone ID: MRT4577_84171C.1.pep
TPLCGGAHVSALLAGCVMDQRQLWSEGVGLDLAWCSRHELGTAGGGRIWRRRCFGARSLWGRA

SEQ ID NO: 351984 - protein, 144 aa, Zea mays
  Clone ID: MRT4577_84172C.1.pep
RTGRPGTTHASSFARADARARGGSKRRTPHATGATSTRAPKKEKAPPPTAKPAKTGGGKQKKKKRSKGKQKEKVNNAERRDQATYDKQHSEVPKNKQNTPTSLSERHREKGSMARRATKDPTAKGPTRTASEQTSQQIHTRATN

SEQ ID NO: 351985 - protein, 340 aa, Zea mays
  Clone ID: MRT4577_84173C.1.pep
PRVREGSVLSLGIKDELTDCELPGLCENVSFSSRQRRKRKTSYSTEKTLKEDAYTVDEGVAYRSRRKRKKTATDSIEKALDEDAPGLLKILLDRGIGVEEIKLYGAEEDNEMIADSTESNFEDLENVIANIFPKRGKCHLLSAARYERGEKSIYCLSCLISLIEQSRYLRFRDCPVEWGWCRDLQSFIFIFRSHNRIVLERPEYGYATYFFEVVQSRPIEWQIRRLVVAMKLSGCGRTALIENRPLLVGTDLTEGEAHVLEGYGWLRNTGLGTMVNYRDRVVHDRWTEKSVSDWRSKIGKLLMVGYAEGQSITTLGPKKILDMLEATGDAEFEVKLEDPY

SEQ ID NO: 351986 - protein, 63 aa, Zea mays
  Clone ID: MRT4577_84174C.1.pep
LCRVGRGIWLRGAETPMGVEWEDRSIEVREGSWAYIGSTSSGGYAPGNFSLGNNWLSWRSPLL

SEQ ID NO: 351987 - protein, 111 aa, Zea mays
  Clone ID: MRT4577_84175C.1.pep
RPLFFFFFFFGFFFFFFFIGFLFFVFVDRKEGGRTLAGPLALFRPEGAQSVGGGGTHVVFGPPAMAPLSSAVRVEGPPATTSCCRRTARPSTVCAYKGKPCGGDVAACSWG

SEQ ID NO: 351988 - protein, 139 aa, Zea mays
  unsure (1)..(139): unsure at all Xaa locations
  Clone ID: MRT4577_84176C.1.pep
VLAALLFRGCGRAGCCSCSCCSSSSSRRWARAGSLGWRVVRVPRAVRAAGAARLLALFVRVSVLCLXCPPPPLFGLGVGLGVAVPGPGPRARCACLAPRPRVPRAALLPLARPGCVCCCWPLRRRSLGSGRSAPPAAGS

SEQ ID NO: 351989 - protein, 63 aa, Zea mays
  Clone ID: MRT4577_84177C.1.pep
PMRPPTLAVDRLRHAGMPLDSLDCDDTIYLSTVRTATTTDDWYHRSDLRQQMKHCRLEHPLLD

SEQ ID NO: 351990 - protein, 95 aa, Zea mays
  Clone ID: MRT4577_84178C.1.pep
AGEKGCLEKKKKKKKKKINKKPSINLISYNPNTSLYHSTIKTLHNLFIHTTPPSFEGVQNHFYPPSSPPCTNFFSNGKRGFPCPFLCGVSIPLFV

SEQ ID NO: 351991 - protein, 173 aa, Zea mays
  Clone ID: MRT4577_84179C.1.pep
VERVRSESSSIVSDVPDYLFSLDSPSDDPSPGPSAARAKSDATETPHHHGDDVPPSARQIPHVAGGASSWPAPPPPYMAQPMYYFPVPPPVHYLDQSAQSGYMPRPIYHIVGGGGSEAPGGDLHAAGGVYGVSHHMQGFPPMMYAPPRAVIYNYKSEGMPSLPPEDGGVDGDG

SEQ ID NO: 351992 - protein, 178 aa, Zea mays
  unsure (1)..(178): unsure at all Xaa locations
  Clone ID: MRT4577_8417C.1.pep
MCDDVQLCNHCVRDNKTPPLASVEKNIVPINAENNTDAEADEATPEAKNLGTTMSEIDRIIADVALEKEIAEVTFGYRFDLRHLGGQELSEEDISELKEFSIVGGYKSRSGLFGSVDEEISLLLSKVLRLQQEDEDRKNELVINNLEKRVKELEKFSDRKRFXIKTAEADLVEARIRI

SEQ ID NO: 351993 - protein, 323 aa, Zea mays
  Clone ID: MRT4577_84180C.1.pep
MAAAARQRGTVKWFNDTKGFGFISPEDGSEDLFVHQSSIKSEGFRSLAEGEEVEFSVSEGDDGRTKAVDVTGPDGSFVRGGGGGGGGGGGGYGSRGGGGSGGGGRSYGGSWGGGRRSAPDAAFGSVLSGTAGDAAPSDQWFVDALNAPAPHPIERVRSESSSIVSDVPDYLFSLDSPSDDPSPGPSAARAKSDATETPHHHGDDVPPSARQIPHVAGGASSWPAPPPPYMAQPMYYFPVPPPVHYLDQSAQSGYMPRPIYHIVGGGGSEAPGGDLHAAGGVYGVSHHMQGFPPMMYAPPRAVIYNYKSEGMPSLPPEGGAHSS

SEQ ID NO: 351994 - protein, 85 aa, Zea mays
  Clone ID: MRT4577_84181C.1.pep
LDIQIQELAEAIGLPVTHNDRLQKLGIRPLKGVLLYGPSVTGKTLMARSFAAQTNASFLKLSGPQFVQMFIGDGANLVKNSFQLT

SEQ ID NO: 351995 - protein, 107 aa, Zea mays
  unsure (1)..(107): unsure at all Xaa locations
  Clone ID: MRT4577_84182C.1.pep
FXXAXVXXXXVGGXXALAPCSXFFLXXXXXVRXXFLSXSLPXLPVLFSXXXAPPPLSPCCLXLXLAXSPVFLXXLPXFLSXVFXXGPFVFPXAFXPLXSLPLXXLLA

SEQ ID NO: 351996 - protein, 86 aa, Zea mays
  Clone ID: MRT4577_84183C.1.pep
LVLDRGRTFAPTRAPTRSPSRSRPRYYGYHADHSQRLPPPCVVNGDPQLGLSLHLNQHRTVGPQRAAHGILTAQLMGPDLVIVRTS

SEQ ID NO: 351997 - protein, 155 aa, Zea mays
  unsure (1)..(155): unsure at all Xaa locations
  Clone ID: MRT4577_84184C.1.pep
MTLISSAAITAPSFKAATARARGTRRSFTVRDSLRKATATADVGGDVTGLVACAADMAQEGMLGAGDGRLVFXPDXITAKAGETITFKNNARFTHDVLFDKDDVSSGXDDSMISQDEYLNAPRESYSVTLTVTGTYVFYXESRTXAGMIANITVN

SEQ ID NO: 351998 - protein, 80 aa, Zea mays
  Clone ID: MRT4577_84185C.1.pep
GQLEMPLVVFPYALIEPPLAKTRRGDETNCAITQRFHKTNEMRSLTYSNYTQLRQELASVDLDLLLVPKAQSPGARPPRN

SEQ ID NO: 351999 - protein, 77 aa, Zea mays
  Clone ID: MRT4577_84186C.1.pep
MADANPTLMLLTIFLLVTSATAGCIRINLSHSGMRCTPGDACPVICAKIKGIDGKCEDGACMCTICDPSYHPRAATD

SEQ ID NO: 352000 - protein, 115 aa, Zea mays
  Clone ID: MRT4577_84187C.1.pep
APPIVHPASRLGNSGRRRFQICRRHPWRGRSVVSLAPVSVVASVRCPAHLRRPETMVLICVAQPICAALLFNLHIILHHLPKESHPRSATVILLPVFFFLSAWNPLGRHTHVNEV

SEQ ID NO: 352001 - protein, 60 aa, Zea mays
  Clone ID: MRT4577_84188C.1.pep
FMCLIPGNRHTHKPPRLRGRVNVHRSPSVHASFLFTRYLRVLRNRLSLIIIREPHPNTEE

SEQ ID NO: 352002 - protein, 74 aa, Zea mays
  unsure (1)..(74): unsure at all Xaa locations
  Clone ID: MRT4577_84189C.1.pep
DASGTYNYCSDSYTLFDFRIALMGFGAHRXLQYWFNPGSMGTLDSLGASKMLTSSLISCYNCGPLMYIYDFRQT

SEQ ID NO: 352003 - protein, 145 aa, Zea mays
  Clone ID: MRT4577_8418C.1.pep
MVSSSASLGEEEGGGGPRLRSLLGEKRRMRGRTASLEPASTARPPQEYNLCSLCADWTYGKWHPDESYGPEIDDAPVFTPTEEEFKDAIGYITSIRPQVEKYGICRIVPPSSWRPPCPLKEKSFWNCTEFNTRVQQVDKLQNREP

SEQ ID NO: 352004 - protein, 60 aa, Zea mays
  Clone ID: MRT4577_84190C.1.pep
NFGSVKLQWLGYVQLGHKKALLCFLQKQQGQKVGQVKLLKKSTFRKQFKRKYFFWALIFK

SEQ ID NO: 352005 - protein, 119 aa, Zea mays
  unsure (1)..(119): unsure at all Xaa locations
  Clone ID: MRT4577_84191C.1.pep
VDVGPSKHXEXXXXXLXHXXXARXXXXXXXXXXXXXPXXFIGPFLLSGLGDYYDVRMPCHLILXKLADKCPSSVLAVLDSIVEPFXKLCVPKPLGDAVKLVXDRNEDLIRCFFRGMSFF

SEQ ID NO: 352006 - protein, 52 aa, Zea mays
  Clone ID: MRT4577_84192C.1.pep
TNINKDRLGVIYKIQKKVFTNSKILPRPGHFGPERGGKNCPQGKREKLRARG

SEQ ID NO: 352007 - protein, 47 aa, Zea mays
  Clone ID: MRT4577_84193C.1.pep
RRASSYNPRIDFSFMIVHERTMARGIPQPCRVQHDKPFIEDTNRDML

SEQ ID NO: 352008 - protein, 63 aa, Zea mays
  Clone ID: MRT4577_84194C.1.pep
MAKIKPKALLAQSKVKKVPGQISVATIVTYMILGVLVVSSVYAAYRYCWAVTGAAEAVGAQGN

SEQ ID NO: 352009 - protein, 87 aa, Zea mays
  Clone ID: MRT4577_84195C.1.pep
PSSLHISRRCVKARSTTDLFGVVLVPKSLDSTSGNILLVITLIRVRSLTIMRATTVTLAYSDVKLDQLERVFASANLVVQPRHSVMY

SEQ ID NO: 352010 - protein, 36 aa, Zea mays
  unsure (1)..(36): unsure at all Xaa locations
  Clone ID: MRT4577_84196C.1.pep
ALWKGFLPTWARLGPWQFVFWVSYEKXRQASGISSF

SEQ ID NO: 352011 - protein, 109 aa, Zea mays
  Clone ID: MRT4577_84197C.1.pep
MAHRNGTVFQPFVEPVPSFLDRNILYTLKVLGSTTIWLGRAAKPKDLQQFQAQELYTVAHYRYREHKTQGRRSGRFHQQKPTCRLTPNIIQPAAQGTDQLPLPAQAHYA

SEQ ID NO: 352012 - protein, 119 aa, Zea mays
  Clone ID: MRT4577_84198C.1.pep
EKNKEKLNKPYREKKMQAADSKMRSCYSGVKKGKVPTAFCDKEKKRKMPDNTSSEKETAPITPAVKEKKMRTTESMEIKMRHDRQNRRNVPLDVSNEKMGTSSGSNYKIWKEKLPHTLL

SEQ ID NO: 352013 - protein, 52 aa, Zea mays
  Clone ID: MRT4577_84199C.1.pep
RTPVGCHKPCLPKPPLTKCKHRDLKASPLFSISRLRLKNDEVWADAGGSFLK

SEQ ID NO: 352014 - protein, 101 aa, Zea mays
  Clone ID: MRT4577_8419C.1.pep
VGYVAAIAVAGGLAAVEFMKNLESKKFIITAGCAVILLVEAVLMILNFTGTSPCEGAGSCNGEPGCSSSCSRLLWILVLVLDIVILGVTGFSAFKLNSQKV

SEQ ID NO: 352015 - protein, 66 aa, Zea mays
  unsure (1)..(66): unsure at all Xaa locations
  Clone ID: MRT4577_841C.1.pep
FGSSTYFTGFVETMENCVCVHDEDHGILWKHQDWRTGLGEVMXTMRLTVYIIFTVANYESGCPCRM

SEQ ID NO: 352016 - protein, 87 aa, Zea mays
  unsure (1)..(87): unsure at all Xaa locations
  Clone ID: MRT4577_84200C.1.pep
STSFYTNPGSIPIWTPTIHPSTIYLNGNANQLLQEKAXKXLLDYLYRTPVRIHIKHSVSDAKPITLTIKNHDYICDINILKEYLGKD

SEQ ID NO: 352017 - protein, 63 aa, Zea mays
  Clone ID: MRT4577_84201C.1.pep
GEIQTFYCIFRIITGLVYITKSPRLPCKQRRLSPFYTLGPGRHPPPGRVGPIFRGPNPGKPVP

SEQ ID NO: 352018 - protein, 92 aa, Zea mays
  unsure (1)..(92): unsure at all Xaa locations
  Clone ID: MRT4577_84202C.1.pep
MQIRFPSARGASTNGVEXSYRMVVLIPRTTRVAEGTSRLARLILEHALHLLARGLLLLLSHTKGAERNKLALLSMAPAFLAIAVAGSRSRRT

SEQ ID NO: 352019 - protein, 164 aa, Zea mays
  Clone ID: MRT4577_84203C.1.pep
GMVGGVRRCGLGLAMAVVLLLAALVVVASGGAETRQKLPAGSGNDDDHAAVLSRLSNVIDPPGSWPPRADAVVAKRCRRRRCSAALLHQHPGSPGSRTSTTGSRGGGGQVRRACACWRLRRDRQHNKKERDADRRWGRCHRHHGEHEQCNRRSHGHDGDSECLG

SEQ ID NO: 352020 - protein, 50 aa, Zea mays
  Clone ID: MRT4577_84204C.1.pep
MAYAAVRKKRVGRYDVSRTIGQGTFAKVKFAVDADTGAPVAMKVLDKETI

SEQ ID NO: 352021 - protein, 69 aa, Zea mays
  Clone ID: MRT4577_84206C.1.pep
VSRIKRSSQHRYGSSHAGGAMGTGALLAGRAAGGAAGYGADRLAQGESGRGRYGDFGRRGRRRRAYGRG

SEQ ID NO: 352022 - protein, 87 aa, Zea mays
  Clone ID: MRT4577_84207C.1.pep
EFDYMRMMAIHGGDILIRSISLSSLNEADTVGRLINSSIASSIPPWAAPKKAQNSVTDDHNSFMTDREAMFGHVVIVRMLAPYCIAV

SEQ ID NO: 352023 - protein, 110 aa, Zea mays
  unsure (1)..(110): unsure at all Xaa locations
  Clone ID: MRT4577_84208C.1.pep
RTGXSLRMPRACMSSPAEERSQTKAGTLRSTSSSSKEADWKGRHFRXMGPNVYKGEWSIVGGTGKLTMARGVIYKEELCVVDGMARIGLEIHAFYIPMERKDAAKNVWRW

SEQ ID NO: 352024 - protein, 90 aa, Zea mays
  Clone ID: MRT4577_84209C.1.pep
NPFPKGKPQKPVGILNRGGYLKFNPVTKKPPSHQWSLKNPPPPKFRRFTIPRKNFFGPPPPRGVKKEGKAFPGDQKKEKNFNPPFSPPPN

SEQ ID NO: 352025 - protein, 51 aa, Zea mays
  Clone ID: MRT4577_8420C.1.pep
NIRKGMILLEKRSLYSDAYGMQSLKMSTRTFFNNVDPTCTRADIYKAVLVM

SEQ ID NO: 352026 - protein, 59 aa, Zea mays
  Clone ID: MRT4577_84210C.1.pep
HRALCPQHPFRLGVNNGGCVPGVQFSSNSSLGLVRKKKKKKKKKKNTKKKKKKKKTPKP

SEQ ID NO: 352027 - protein, 476 aa, Zea mays
  Clone ID: MRT4577_84211C.1.pep
MPFHDGADIKPAHLGVPSASLLLNQHQALSAASFMPLPSFPDHQHQPHLPPPPKRHHSMPENLFLLQNQLQPPPPPPQGLRFPPLHTTAPFQLQPSLQPPRGSMKTTPAAQQHQQLLDELAAAAKAAEVGNSIGGREILARLNQQLPPIGKPFLRSASYLKEALLLALTDGHQGSTHLSSPLDVALKLGAYKSFSDLSPVLQFANFTATQALLDEIASTTSSCIHIIDFDLGVGGQWASFLQEFAHRRGTGNAPLPMLKLTAFVSSASHHPLELHLTRENLTQFAVDLGIPFEFTDINLDAFDPAEFIAPSPNEVVAVCIPVGCSARTPPLPMLLQLVKQLAPKIAVAIDHGSDRGDLPFSQHFMNCFQSCMFLLDSLDAAGTNADAASKIERFLIQPRVEDAVLGRRKAENAMAWRAVFTSAGFAPVPLSNLAEAQADCLLKRVQVRGFHVEKCGMGLALYWQSGELVSVSAWRC

SEQ ID NO: 352028 - protein, 361 aa, Zea mays
  unsure (1)..(361): unsure at all Xaa locations
  Clone ID: MRT4577_84212C.1.pep
IQDELAAEAKAAEVGNSISGREILVRLNQQLPPIWKPFLRSASYLKEALLLALTDGHRGSTHLSSPLDVALKLGAYKSFSDLSPVLQFANFTTTQALLDEITSTTSSCIHIIDFDLGVGGQWTSFLQDLAHCRGTGNAXLPMLKLTVFVSSASHNPLELHLTRENLTQFVVDLGIPFEFTNINLDVFDPTELIAPSXNEVVVVCLPVGCSARTPPLPMLLQLVKQLAPKIVVAIDHGSYRGDLPFSQHFMNCFQSCMFLLDSLDAAGTNVDAASRIERFLIQPRVEDAVLGRWKAEKAMAWWAVFTSAGFAPVPLNNLAEAQADCLLKRVQVXGFHVEKCGMGLALYWQSSELVSVSVWWS

SEQ ID NO: 352029 - protein, 99 aa, Zea mays
  Clone ID: MRT4577_84213C.1.pep
VGAGGDKDIGWSHCNGNQFSPGNNGIHRRCKQLQQQKGKHSVMYFTSCVSKCLIVGYDFYHWLVFPLDGRAPAHLTGLDTRRSAYDACPMHAQQFLFCG

SEQ ID NO: 352030 - protein, 45 aa, Zea mays
  Clone ID: MRT4577_84214C.1.pep
QRKIDVLFQDVRTFTFFKGVRVANSIYFGRRPITSDKSFELLKKL

SEQ ID NO: 352031 - protein, 89 aa, Zea mays
  unsure (1)..(89): unsure at all Xaa locations
  Clone ID: MRT4577_84215C.1.pep
PPWPPPXPPRPPPXPPRXHLHSHHRIHLGDRRHSRLLDYHRHSHLDHRNHDDQQQMPKRLISQRWQIRKWIYSFLCLLNYVWKQTKISF

SEQ ID NO: 352032 - protein, 54 aa, Zea mays
  Clone ID: MRT4577_84216C.1.pep
NQSASGPGGIEFILKRKIASYITYRRNRQPYTAKATNAGEHARNAAQGRTRDDG

SEQ ID NO: 352033 - protein, 65 aa, Zea mays
  unsure (1)..(65): unsure at all Xaa locations
  Clone ID: MRT4577_84217C.1.pep
RTTGVHQKYPANPNLLYLIQARTHNPEGLGIPGGVPNPTANXSSSSLAGQPRAASSFVRPPSLPH

SEQ ID NO: 352034 - protein, 50 aa, Zea mays
  Clone ID: MRT4577_84218C.1.pep
WGGPPSFFFCFSLFFFWGDPLKPNLYYDQAYIIGHTTHNNVCSQTALLHI

SEQ ID NO: 352035 - protein, 81 aa, Zea mays
  Clone ID: MRT4577_84219C.1.pep
THVINHPEDRCTGIAACIYTLTSTISPSFSSVWGSSSWPLTYIMLPYTPILIAVSAAGYQSLFYNLAIRPEYHGQLTHDCL

SEQ ID NO: 352036 - protein, 248 aa, Zea mays
  unsure (1)..(248): unsure at all Xaa locations
  Clone ID: MRT4577_8421C.1.pep
MFAARQAFFQAQRRCFSASARQNSKVTVLGAAGGIGQPLSLLLKLNPRVSKLALYDIRLAPGVAADIGHINTKSEVTGHDATPSGLAEALKGAEIVLIPAGVPRKPGMTRDDLFNTNASIVRDLAKAAADHAPDANILIISNPVNSTVPITAEAFKAKGVYNPKRLFGVTXTLDVVRASRFISQLKNTDPATENITVIGGHSGATIVPLLSQSGYNLEGQKLDDYVRRVPVXGDEVVQPKDGAGSATL

SEQ ID NO: 352037 - protein, 63 aa, Zea mays
  Clone ID: MRT4577_84220C.1.pep
PSGQTTIFSVGIVDFTIFRLCRPFVTNLEPDVVVDPNKAARTGTFRIFCASSHPCLCKLSPNL

SEQ ID NO: 352038 - protein, 252 aa, Zea mays
  unsure (1)..(252): unsure at all Xaa locations
  Clone ID: MRT4577_84222C.1.pep
MASTLPRLPVFEAIKKHDAQSTAVVHSLSGRSFTYGELVNDVAAAKDKLQRNCGGQSAEGQRISFLVENGYDYVVTLLSILAAHAIAVPLSPTFPAHELRYIIDQSESLMLLSSEKXSKAKPTMCSKRAWRPSXINYKQEKIMMGKTDDYVTFEEPTSDKGGMMLYTSGTTNRPKGVLLPQDVLTAQSRSLLEAWNYSKEDVLLHVLPLHHIHGTVNALLTPLFAGSTIEFQFPFTXTAVWDRLAAPFLPNP

SEQ ID NO: 352039 - protein, 38 aa, Zea mays
  Clone ID: MRT4577_84223C.1.pep
FGSICASKQFVVPKNLSFRSVPRGERLNPSSNSHEKKK

SEQ ID NO: 352040 - protein, 68 aa, Zea mays
  Clone ID: MRT4577_84225C.1.pep
SIMVPYGISQVYHKNWANTIYKLARNGCANSNQKVWNKFDMMFKLEGIPVIWRKTGDSWKKKGRSGLS

SEQ ID NO: 352041 - protein, 133 aa, Zea mays
  Clone ID: MRT4577_84226C.1.pep
GRISAIDSRVSVDQSASGSRPWGRRRSSSTSAEMGTESARSTTTSSSGSSSASTCATRSAPARSRRGGSTSPTVSRACTSTPATSTAPRCSRAWTRSRTRRAGCCPCVLLRPPARALVSSRPSPSPSACRPLT

SEQ ID NO: 352042 - protein, 166 aa, Zea mays
  Clone ID: MRT4577_84227C.1.pep
DQPYDIRGPTSLSDEEGRWGLACQSSPRSPWAMADGRPEVARAAARPKLPHVRPAWRPAGDHPHGGGAEAPPCGHSTSPTATFSPLSSLLRLLSPHSLKRIFIRLETSVTVTLGVSCPSPNINNSKKNSILCCSCNQTLANWLVSTRGWNSLTAPHLASRLSLPHR

SEQ ID NO: 352043 - protein, 34 aa, Zea mays
  unsure (1)..(34): unsure at all Xaa locations
  Clone ID: MRT4577_84228C.1.pep
DYETGRAIPNNQVLGIIXRDICLKLRGXDIGKPI

SEQ ID NO: 352044 - protein, 70 aa, Zea mays
  Clone ID: MRT4577_84229C.1.pep
NSAIGLYRSEVRSIETDPKTHSMRIYMALSHLDAQRSHLVTRSGGSVGTLFRSGRKKVSHRGLGLVLDAC

SEQ ID NO: 352045 - protein, 180 aa, Zea mays
  unsure (1)..(180): unsure at all Xaa locations
  Clone ID: MRT4577_8422C.1.pep
LNGWTRYAAFLPAATSFAHTPARSEYSEDGARTKGDGSSRFRLAACALCHSPSLSSSDPAMDTKERLVGVELLHEALDAXRRGLTAAEVTALVDTCMDLTRDANFCIAQGGLQALSVAAVVAGDHFKIHLNALVPAAVERLGDGKQPVRDAARQLLITLMQVSSFRRRSQWPVVSPGKCM

SEQ ID NO: 352046 - protein, 137 aa, Zea mays
  unsure (1)..(137): unsure at all Xaa locations
  Clone ID: MRT4577_84230C.1.pep
LLSFFKGAFPPPGGRDPRPPAGPPRGGNRGPKRAPXGNRNPPPRPHKIPNPKPKKKRPGGPKREPPHPQGGGPPTPFARGKPGPPPAXKRPPPPGKEGGTLGPRPXLNNRPPGPGGSAPGSAVSPLQRGDAVLPRPG

SEQ ID NO: 352047 - protein, 36 aa, Zea mays
  Clone ID: MRT4577_84231C.1.pep
VARQQQWLPPRPRSPAAPPRPPPRPPPPPPPPPPPP

SEQ ID NO: 352048 - protein, 110 aa, Zea mays
  Clone ID: MRT4577_84232C.1.pep
KLFFLCPSFPKRIVGSHKKPRFAQGVLQDGLVACKHPQAGPRQRKVGWGLPARVPKVWGAGGVPHHPQRLTSCPFDVHFCIWVNSPPGCLGFYSSKTLAVAWCKCKFEFM

SEQ ID NO: 352049 - protein, 56 aa, Zea mays
  Clone ID: MRT4577_84233C.1.pep
MAPDPCADLAVTPKTSAKDEASCSVAPPTPPSTPDEVRRARKFAASLSRRGTRVWP

SEQ ID NO: 352050 - protein, 85 aa, Zea mays
  Clone ID: MRT4577_84234C.1.pep
FPFNQVAALDPGVYLQQQVLRPFSELVSASRVSFLTQQRLLPFYQRFGANPAPLFQVQQLLPFGRLVLENPAASCQQRNSGGAPF

SEQ ID NO: 352051 - protein, 48 aa, Zea mays
  Clone ID: MRT4577_84235C.1.pep
MKQFIYRIIITPTFTNMTTSPGRVTGKGIYNRTTIRRCLKLFQNLVVI

SEQ ID NO: 352052 - protein, 256 aa, Zea mays
  Clone ID: MRT4577_84236C.1.pep
MALLVKSHHQMLVSSSTSSSSPSASQQRQPPPPPPSSSCLTEQQPSPAKRKRRPPGTPDPDAEVVALSPRTLLESDRYVCEICGQGFQREQNLQMHRRRHKVPWRLVKRAPPPPAAAAGGGGGAADANNSSGTGGGAGGGAPRKRVFVCPEPSCLHHDPAHALGDLVGIKKHFRRKHGGRRQWVCARCAKGYAVQSDYKAHLKTCGTRGHSCDCGRVFSRVESFIEHQDACNSSRMRGEAVVVAVPVPVPPPSALP

SEQ ID NO: 352053 - protein, 75 aa, Zea mays
  unsure (1)..(75): unsure at all Xaa locations
  Clone ID: MRT4577_84237C.1.pep
SFFYLFCKFDRNFTIVFYLASXREEQNTSFDLTCGTIPSLRGGKSSPPHIGALGVPWGSRAPKIFSCVPWMRGRA

SEQ ID NO: 352054 - protein, 179 aa, Zea mays
  Clone ID: MRT4577_84238C.1.pep
MVLAGLRRHVGQFLTSSNELMAASLSAVSCADEVQKAEGAGCRDDAAALRLKKVAMAAILVAGVLGVVLPLAGRKRRALRTDSAAFLAAKAFAAGVILATGFVHMLHDAEHALSSPCLPAAPWRRFPVPGFVAMAAALATLVLDFLATRFYEAKHRDEAARVKAAAAAQASLLWRVIAR

SEQ ID NO: 352055 - protein, 111 aa, Zea mays
  Clone ID: MRT4577_84239C.1.pep
WRQLAEIPSVFFLLLGLFMWVNFSWVDSMFLYYPVVLVFITVVMLFVPLKVFYHHSRLWWAVSNWRLLLAGLYPVEFRDFFLGDMYCSQTYAMGNIELFFCLYANSWSNPP

SEQ ID NO: 352056 - protein, 131 aa, Zea mays
  Clone ID: MRT4577_8423C.1.pep
MEAALEAARAKDTKERLAGVERLHEVLDVATRRGLTAAEVTALVDPCMDLTRDANFRIAQGGLQALSVAAVVAGDHFKIHLNSLVSAAVERLGDSKQPVRNAARQLLITLMEVSSFRRRSQWPVVSPGKCM

SEQ ID NO: 352057 - protein, 50 aa, Zea mays
  Clone ID: MRT4577_84240C.1.pep
VIRTATRPGTGGEALAAPGPQKATGTTNTRLACELLTRESQTEVTSPTSQ

SEQ ID NO: 352058 - protein, 226 aa, Zea mays
  unsure (1)..(226): unsure at all Xaa locations
  Clone ID: MRT4577_84241C.1.pep
TPDVLARSFPAAALATSAVLSTGANPTHVCRARAGWCKPWKGLGLRMGRVVRKPXTITCQEASNIPADRVPRHXKRKLMNLLLLCAISLATXGMVXVPYGDFFGPAGSGNCGDGTYAKDKLCNDITEEEWLNTHGSNDRTLAQGIIACDPTYLWVEHDETLATYCINDESTHLRCIEPGNGAENQIVCPCHGSQYNNHGNAVRGTRPLSLDLSHAYVHDGXVLFVP

SEQ ID NO: 352059 - protein, 98 aa, Zea mays
  Clone ID: MRT4577_84242C.1.pep
RSFMGVFSFFLTTTSSLFFLAQPNKKSIATKNQQAICPQNYKISSIQILNNHYHASPGPVLTNMYCTSCLHRAHHISTGRATARTWPVDTISYVNHCY

SEQ ID NO: 352060 - protein, 102 aa, Zea mays
  unsure (1)..(102): unsure at all Xaa locations
  Clone ID: MRT4577_84243C.1.pep
ADLLHAQLCESXRYLKFVHWIANQAILEVFAGCRRVHIIYLRIXQGMQWPALLQALALQPGCPMSFRLTRVRPPXPDETDALQLVGCKLAQLEHTMLVDLQY

SEQ ID NO: 352061 - protein, 67 aa, Zea mays
  Clone ID: MRT4577_84244C.1.pep
MASGGKGLNATGEFFRRRDEWRRHPMAGNQLRHATPGLGIAIVAFGIYLVGEAAYNRLYRPSGDNHH

SEQ ID NO: 352062 - protein, 130 aa, Zea mays
  unsure (1)..(130): unsure at all Xaa locations
  Clone ID: MRT4577_84245C.1.pep
FDVLARPEPESLSCKREQPEDYLDLGATIANKTGQDLNAEDADVTETATLSDLVLSQWLADACDDVLMCFHTVVQNRDIAFALIFADVLWIYLTVSXTTGALERIILHRLGEDRYGMRVLALAPILELGG

SEQ ID NO: 352063 - protein, 96 aa, Zea mays
  unsure (1)..(96): unsure at all Xaa locations
  Clone ID: MRT4577_84246C.1.pep
HTVVVVPSHHCGGVLQRRPASSFLSISLLVSRRLVPVVDRRWISSSNVACRGNLRSRWDNGDLRHSHSDSSHSERLGDRFLSKCRLGXCGRAISVG

SEQ ID NO: 352064 - protein, 94 aa, Zea mays
  Clone ID: MRT4577_84247C.1.pep
PWPPAPSPHSSQNVVAPPQIIAVFSFIVDQPTCVFPKQFHAPTENLDCQSSQQKECKLKMKWSWKRSLLQCLFIKWMELSNWLLGRRSRTSSLQ

SEQ ID NO: 352065 - protein, 68 aa, Zea mays
  Clone ID: MRT4577_84248C.1.pep
LRNKLHTGQQLPRMFWLWCGELGGCGHHKHRKTAHTALDSANLVAVGEELWLAIHMNPPHHCKLWLEH

SEQ ID NO: 352066 - protein, 190 aa, Zea mays
  unsure (1)..(190): unsure at all Xaa locations
  Clone ID: MRT4577_84249C.1.pep
TRFFPLTYLRYSKLFRHIIPLSPILSAPSTAHRPSSQNDDYIDTPXHGILVADESTATVGNCLASIIVYNVKDKRPALRALLDCCTVALHYIMRVILLKETLXLNTKDVKPLAYVIREVGPIPGSYVHNGSTEAGRTHTETTIRGHTDLGKRWSTYYDXAARFFQRIAVLYIAPYDXTLLAIDLNAQVVS

SEQ ID NO: 352067 - protein, 224 aa, Zea mays
  unsure (1)..(224): unsure at all Xaa locations
  Clone ID: MRT4577_8424C.1.pep
MASQFPTRKCGVLGATGSVGQRFILLLAQHPYLTLHAIGASSRSAGKKYKDAVRWKQASPMGEIADMVVRECKAEEFQDCDVVFSGLDSDVAGDIEMAFIKADIPVFSNAKNYRRDPLVPLVVPTVNLPHLDLIPHQRSVHKLNKGFLVCNSNCAVIGLVGPFAALQAAFGPISTVSIVTLQAVSGAGYPGVSXMDVIDNIVPFISGEEDKLETEAXXDLXRLD

SEQ ID NO: 352068 - protein, 152 aa, Zea mays
  unsure (1)..(152): unsure at all Xaa locations
  Clone ID: MRT4577_84250C.1.pep
RPPFLSXTHARGRPDRXREREVTGIEKESRNPNPRRGRHRGDGGCGGAGPRGPGESGDGGGEGVGGAPRPAAAAGGGAVPRRRRRGRGRRAGRDPCLQPVLWAFVVVVFFIFCVVGFFFWCFFFFCFFFFLFFCVVFFFFLFFXLCFFCLFF

SEQ ID NO: 352069 - protein, 48 aa, Zea mays
  Clone ID: MRT4577_84252C.1.pep
HSPQQLFSQGPNPKQTLTLILYKLWKNYSIPLQLKTSDLRGTTRSSTT

SEQ ID NO: 352070 - protein, 129 aa, Zea mays
  Clone ID: MRT4577_84253C.1.pep
MDYGEWTPDRRSEYNKWDAISRCTTQVFPGGWTAVLVSLDNVGVWNLRAERLDDWYRGQEVYVKVADPLGYNITEMVVPDNALYCGLLKERQKPQVHESNSKSSAQGDAGWSNRLLATMILVVAAVIFS

SEQ ID NO: 352071 - protein, 153 aa, Zea mays
  unsure (1)..(153): unsure at all Xaa locations
  Clone ID: MRT4577_84254C.1.pep
RPGCGGFHPTPPTTLPSPTAGACSFLLTPHTRCRSSRVPSACRCPFCQPLAGRRTPELETTNAAATAWRLGRVVGDKANPTTVDEAFMERNKSFIKALQXPVGFLLQELKNLRPQLYTASEYCDKSXLHIEQKQSEPRSCSSILFLQGFDMLS

SEQ ID NO: 352072 - protein, 55 aa, Zea mays
  unsure (1)..(55): unsure at all Xaa locations
  Clone ID: MRT4577_84255C.1.pep
KTNKICNQTLKIYPNPSITFFFETRTFQHVGKSFQQRFPKMNKCYVSCECQLIRX

SEQ ID NO: 352073 - protein, 77 aa, Zea mays
  Clone ID: MRT4577_84256C.1.pep
RKLAWIAICAKGPRVHQLSFLLKQIMILESKSSQFFELDYALHVKTLTFWQLFAVAPVMTLLLFSNHSNLCYVSHRL

SEQ ID NO: 352074 - protein, 52 aa, Zea mays
  Clone ID: MRT4577_84257C.1.pep
LSAKSRSFLSFIVVCELLATGARGVRKETKSFSFYRQTDLIHTYIQLRRNYI

SEQ ID NO: 352075 - protein, 105 aa, Zea mays
  unsure (1)..(105): unsure at all Xaa locations
  Clone ID: MRT4577_84258C.1.pep
HEXLLLDINLFLTTVLSSILEASARCSHPSAHPPPHPSTLELPYLCAACDRRDPSCYAPAEPSLPSLRPRRSARPPALTPSVGSEQTRLFFHPTARDRVRLGEGN

SEQ ID NO: 352076 - protein, 92 aa, Zea mays
  Clone ID: MRT4577_84259C.1.pep
TRNSNGVFVYRIMCPGLQEENLLDRGSSDQPPLPQQVKIIPFAVFFKSAPTQTAPPGAESQELQPSRTRVIDTSTEAPPARRPRDRAWPRLT

SEQ ID NO: 352077 - protein, 185 aa, Zea mays
  unsure (1)..(185): unsure at all Xaa locations
  Clone ID: MRT4577_8425C.1.pep
MEAALEAXRVKDTKERLAGVKRLHEALDAAARRAAAEVTTLVDTCMDLTRDANFRIAQGGLQALSVAAVVADDHFKIHLNALVPAAVERLDDGKQPVRDAARQLLITLMEVSSPTIIVERAGSYAWTHKIWRVRDEFVRTVASAVGLFASTEISLQRVLLSPVLQLMNDSNQSVRDAAISCIEVS

SEQ ID NO: 352078 - protein, 166 aa, Zea mays
  unsure (1)..(166): unsure at all Xaa locations
  Clone ID: MRT4577_84260C.1.pep
MAAPASAAAGRAGGMSSDNVKGLVLAVSSSAFIGASFIVKKMGLRRAADSGVRAVIVGEIANFAAYAFAPAILVTPLGALSIIISAALAHAILQEKLHTFGILGCVLCVVGSITIVLHAPQERDIDSVKESWDLATEPAFPCYAAIVXASALVLIYFVVPHHGQTN

SEQ ID NO: 352079 - protein, 375 aa, Zea mays
  Clone ID: MRT4577_84261C.1.pep
MAAPASAAAGRAGGMSSDNVKGLVLAVSSSAFIGASFIVKKMGLRRAADSGVRAGYGGFSYLVEPLWWIGMVSMIVGEIANFAAYAFAPAILVTPLGALSIIISAALAHAILQEKLHTFGILGCVLCVVGSITIVLHAPQERDIDSVKEVWDLATEPAFLCYAAIVVASALVLIYFVVPHHGQTNIMVYIGVCSLLGSLTVMSVRALGIALKLTLSGTNQLFYPQTWAFALIVATCVSTQINYLNKALDTFNTAVVSPIYYVMFTSLTIIASVIMFKDWDHQNPTQIVTEMCGFMTILSGTFLLHKTKDMTDSPGQSLLTRRPKHASQNAFAIEVMPLKCQDYIDDETLTLSLPKVENGYLKEEYLLRYKDSSIV

SEQ ID NO: 352080 - protein, 77 aa, Zea mays
  Clone ID: MRT4577_84262C.1.pep
KAPSPSKKTKTINTTKTQNHSQTSTSNPITPPNHHSHHLQNLHLSTNHLLQTLIQPTSILLYSPTKPTTTTSLYPHN

SEQ ID NO: 352081 - protein, 58 aa, Zea mays
  Clone ID: MRT4577_84263C.1.pep
MIVEGRRMMRPPHQIEKKKKKKKKKKKKKKKKKKKKKKKKKKKKKKKKKKFCICLVIR

SEQ ID NO: 352082 - protein, 108 aa, Zea mays
  Clone ID: MRT4577_84264C.1.pep
MGSVGQTATGHRRRVLFFSLPYQGHINPMFQLAGLLHARGFAVTVFHTHFNAPDASQHPAYDFVPVQFDGTPADSADTVRVTVEHVLAVNRACEAPFRERLAALLGGG

SEQ ID NO: 352083 - protein, 167 aa, Zea mays
  Clone ID: MRT4577_84265C.1.pep
MTVYNKARLLIVALVLCQPTTPLTAREREEEQEHREQLGLGGWAAASPSRSICRLASIPMEVESAKCECCGLREDCTREYIAAVKAGFGGRWLCGLCTEAVRDEVAAKKRGDLEGALRDHMSFCAKFGKKGPAFRVADGMRQMLRRRSSDICASAAAADASSSAAAS

SEQ ID NO: 352084 - protein, 147 aa, Zea mays
  Clone ID: MRT4577_84266C.1.pep
LPYSLTRTLVNMSLLLLTSRTSSITPTIVHRIRHTHIRTLSLRPISTNRAILRMDTAIRRSRHQHRSNSIIRTLFRIRKLLRHRHLIRLNPIPASCRFNIRGHRTNIPITISLRRHLSITASQRIIHLRLRTKNMPSQAHKSAQRFQ

SEQ ID NO: 352085 - protein, 40 aa, Zea mays
  Clone ID: MRT4577_84267C.1.pep
TSSFFIHVNIHYFNPSPVNHVMERVRPGGPNLIQSRAPIF

SEQ ID NO: 352086 - protein, 150 aa, Zea mays
  Clone ID: MRT4577_84268C.1.pep
EECFNAVLNMSDCLTYVTAGSTTRQPDKPCCPEFAGLLESHPVCLCQLLAGGAESYGVSVDYKRALALPGICRLTAPPVSACAVFGVPIPAGLVPTAAPVSGLSPSSGGPEVPANTPAGSAKSSSHVPGRVNAGGLIIALAVTAAAGIMF

SEQ ID NO: 352087 - protein, 316 aa, Zea mays
  Clone ID: MRT4577_84269C.1.pep
YYSLMQSKGVIPLDNALFRPLPPSMEMVDPNTLLRYTNVFDAMLDAVRVAVRNLNATGGAGVPILVTETGWPSYGDRRAEPYAGRDNADAYNSNLIKHVLEEKAGTPMAPGAGAQSSAYIYELFNEELRAGPVSEANWGLFYGNGTPVYLLHVSGADGFLGNDTTDRTFCVAADDADQKAVQAAMDWACGPGRADCTAIQPGQACYQPDDVRSHASFAFDAYYQSQGRAAGSCYFQGAGMVTTVDPSHDSCLFPGSKLLNNATGSGNTNTSSTPTSDAEGSAIWRLRTGRDKGLLLFLRLVLSIAVAIVVDSNFWT

SEQ ID NO: 352088 - protein, 154 aa, Zea mays
  Clone ID: MRT4577_8426C.1.pep
SSPRGGTAGVLGRAERMEAARAKDTKERLAGVERLHEVLDVAARRGLTAAEVTALVDHCMDLTRDANFRIAQGGLQALSVVAVVAGDHFKIHLNSLVPAAVERLGDSKQPVRNAARQLLITLMEEMYKHMGSQFHEALQRHNLPSYMLKKFKVG

SEQ ID NO: 352089 - protein, 92 aa, Zea mays
  Clone ID: MRT4577_84270C.1.pep
LPLKKKKKTPIFFFSPPVPNLEGKETKPLENHGSSRQPPQTGYQKTHPNPQIFPLKKPPPIPPLKLIFALKPPFLPLAKWTIASKLKPPQKS

SEQ ID NO: 352090 - protein, 394 aa, Zea mays
  Clone ID: MRT4577_84271C.1.pep
MLFQVGGQGARPTFFEMSAAQQLPASLRAALTYSLGVFALRRPLLHTVLDYEDEFFALLMGVLESHSLRTTDGSFSESLYGLRRRPVKVAVKRKSPGTESNDKVYGSALRKRQKILSVVFLVVLPYFKSKLQSIYNKEREARLQATLWGQDDVRFDEVGFVLDQEQTSQAQTEPTTGEMSNLTRFKKNFASLIGVCYPWIHATNEGLSFAYQLLYLLDATAFYSPALHVLGIHVCRATGQELMDSSSRISRIRSRELERLRGPPWFKAVQRVFLSCVYTTLDYAQTGLIAAVFFFKMMEWWYQSAEERMSAPTVYPPPPPPPTPKVAKDGISLPPDRTLCPLCCQKRANPSVLSVSGFVFCYSCIFKSVSQHKRCPVTLMPAGVEQIRRLFHDL

SEQ ID NO: 352091 - protein, 196 aa, Zea mays
  unsure (1)..(196): unsure at all Xaa locations
  Clone ID: MRT4577_84272C.1.pep
LEATSKIGLSFAYQLLYLLDATAFYSPALHVLGIHVCRATGQELMDSSSRISRIRSRELERLRGPPWFKAVQRVFLSCVYTTLDYAQTGLIAAVFFFKMMEWWYQSAEERXSAPTVYPPPPPPPTPKVAKDGIPLPPDRTLCPLCCQKRANPSVLSVSGFVFCYSCIFKSVSQHKRCPVTLMPAGVEQIRRLFHDL

SEQ ID NO: 352092 - protein, 102 aa, Zea mays
  unsure (1)..(102): unsure at all Xaa locations
  Clone ID: MRT4577_84273C.1.pep
MCFRFPVGGIPGGVDHSFQAHGRVGGLAPLYSSAFLESFSPXVLELGGNVIKVLKVLGFPPRPLPLAIYXFEELGTLPLGPMAGGGVIPPILKSLIGWSSKE

SEQ ID NO: 352093 - protein, 221 aa, Zea mays
  unsure (1)..(221): unsure at all Xaa locations
  Clone ID: MRT4577_84274C.1.pep
MVVLAASIISKSGKALVSRQYVDMSRIRIEGLLAAFPKLVGTGKQHTYLETESVRYVYQPIEGLYLLLITNKQSNILEDLDTLRLLSKLVPEYSSLDEDSICKTAFELIFAFDEAISLGNKENVTVQQVKQYCEMESHEEKAHKLMMQSKINETKDVMKKRASELDKIRMEKGKLDKGGYSSISGPRVIEKTFSDMNISGTGFGSGSGLSGXGADMDSFAR

SEQ ID NO: 352094 - protein, 42 aa, Zea mays
  Clone ID: MRT4577_84275C.1.pep
ENQIQQNIQISVHFLVSLIKKNCQNVICLYVHSTMGKPYRVF

SEQ ID NO: 352095 - protein, 361 aa, Zea mays
  Clone ID: MRT4577_84276C.1.pep
MAATLLPTLSPPVSRAAAAFLLRRAPLKPSHYVHPPSTLRRLLISSYPAIPAMCPLSTMSSTTAARAVPVRRDLLMLGIETSCDDTAAAVVRGDGEILSQVVSSQADLLARYGGVAPKMAEEAHALVIDQVVQKALDDAKLSESDLSAVAVTIGPGLSLCLRVGVHKARQVAKAFGLPIVGVHHMEAHALVSRLANKDLDFPFLALLISGGHNLLVLAHDLGHYIQLGTTIDDAIGEAYDKSARWLGLDMRKGGGPALEELALEGDPNAVKFRVPMRQHKDCNFSYAGLKTQVRLAIESMNLCTEDIPVSAASEEDRQSRANIAASFQRVAVLHLEERCERAVEWALNMEPSIKYCATQIS

SEQ ID NO: 352096 - protein, 189 aa, Zea mays
  unsure (1)..(189): unsure at all Xaa locations
  Clone ID: MRT4577_84277C.1.pep
RKIKAKRQRRTAAWRPATTGSRRTGTTGASPSRSSGGEPDRLLPIAEXVGRIXMRKSLPPNAKISKEAKETMQECVSEFICFVTGEASDKCHNEKRKTINGDDLCWAFGALGFDDYVDPMRGYLHKYREVEGDRAAAAASSSRGGGDHHPASASTSTSPPAAAPPAGHFMFGAAAIDRPDNNTSSARPF

SEQ ID NO: 352097 - protein, 59 aa, Zea mays
  Clone ID: MRT4577_84278C.1.pep
LIFLNVHNADSRTVLIKNAKRAFIVKDPSILTHTYKVIVLLWGHLNPMHWPVFYKVFTV

SEQ ID NO: 352098 - protein, 60 aa, Zea mays
  Clone ID: MRT4577_84279C.1.pep
VTGHHPTLIRNNTHDTDDIQICCFDAPFLLRMSKACIHLDWQQKPSLVRTISSLGSKGLK

SEQ ID NO: 352099 - protein, 90 aa, Zea mays
  Clone ID: MRT4577_8427C.1.pep
WREADNLAVNHLTCCVQWWDHGPARRWVAFFLLLCQMYYFTSFYGSSGMVLAFHCMINRPGCLSINQSTQCRRMTWFLSSTTGTRLDAEA

SEQ ID NO: 352100 - protein, 51 aa, Zea mays
  unsure (1)..(51): unsure at all Xaa locations
  Clone ID: MRT4577_84280C.1.pep
LHPGLLGEQLFTMVXPKHRPRDSGLHSQNTIVNNCFTRASWRKSDIIKNTR

SEQ ID NO: 352101 - protein, 102 aa, Zea mays
  Clone ID: MRT4577_84281C.1.pep
SADALCYSGFSKRTCGEKPWPVSTQAWGEVNHDQKRSLMDKANGFVVEKISHITKPVATLDEQTLKDLILEYITLYRVVSLYNPYDHQLHIYDVTYTLRYAG

SEQ ID NO: 352102 - protein, 88 aa, Zea mays
  Clone ID: MRT4577_84282C.1.pep
LCNSTVVAAMEMCLFRESIQYSSPHTKSSRWHARVSQSGASITVSPVSFMAPSGGVSVSHAVVALLRKMVRFGRCLAVKAARRRWWHR

SEQ ID NO: 352103 - protein, 69 aa, Zea mays
  Clone ID: MRT4577_84283C.1.pep
WDIPRCSVIDWVDIRDIITAVCYRPDGKGAVVGTITGNCRFYDASGTKKKVKSLLAFRYHFSTSLLLLE

SEQ ID NO: 352104 - protein, 103 aa, Zea mays
  unsure (1)..(103): unsure at all Xaa locations
  Clone ID: MRT4577_84284C.1.pep
MSGMMHKIEEKLHMGGDHKKSGEEHHKKAEEHHRKEEAEHHKTDRGAHRAGTVATIRATITGEHGKQSGNHXGTKDKMXKDXKKHGEGHDHDGGDSGSIRYSD

SEQ ID NO: 352105 - protein, 117 aa, Zea mays
  Clone ID: MRT4577_84285C.1.pep
ASAIGLWRLTARRGNDGEGGHDADEQGQLRVRAVCANHRHNRRRPPAKGLSEKQHDNNMISDDDDAGSMAQATASGLRAWIQWTGARTTTRQGTSRRASARCRGFINDTARQRGGRA

SEQ ID NO: 352106 - protein, 105 aa, Zea mays
  Clone ID: MRT4577_84286C.1.pep
MPLLLNLTKNGATIALGKARTSIVIMPPQLNPATIPWATGLKATSLSPVHILDHPNLSPCQSPAHCTIPFFLPTLSVLQQQSPFNEGKMCSSSISICERKQKHRE

SEQ ID NO: 352107 - protein, 82 aa, Zea mays
  Clone ID: MRT4577_84287C.1.pep
GRKNRGGAIAGGHYRPTVWFFFPIPGEGTGPGRGYFLFQNNPHPSGFKPLSGETFGKKNFFGMNKSPPQGIQWGPFYLTPPW

SEQ ID NO: 352108 - protein, 475 aa, Zea mays
  Clone ID: MRT4577_84288C.1.pep
MEPRIGNRFRVGRKLGSGSFGEIYLGTNVQTNEEVAIKLENVKTKHPQLLYESKLYRILQGGTGIPNVKWFGVEGDYNVLVMDLLGPSLEDLFSCCNRKLSLKTVLMIADQMINRVEFVHSKSFLHRDIKPDNFLMGLGKRANQVYIIDFGLAKKYRDTSTHQHIPYRENKNLTGTARYASVNTHLGIEQSRRDDMESLGYVLMYFLRGSLPWQGLKAGNKKQKYEKISERKIATSTEALCRGYPTEFASYFHYCRSLRFEDPPDYQYLKRLFRDLFIREGFQFDYVFDWTILKYQHAQMTTAPPRAIAPAVGQSSGMAPVANNNRHSGTEEGRRSGWSGVDPTRRQAPPPVINAGSLAKQKSPVRPEASTSRDAVFSSSTLLGRSSGSSRRPAVSSSREPSIEAEQTRSRTTDASPGATFQRSGAPRWSLQMPDSSDGRRSSSGRRHSSNPKNYESTIRGMQGLNFDGDDRVHY

SEQ ID NO: 352109 - protein, 70 aa, Zea mays
  Clone ID: MRT4577_84289C.1.pep
GTRYGGHSRKRFTCFRLCLPACALAAAHHSVWAGAASEAQQPRPRGEECAGDGDCFLAPMVPRLVGAGLS

SEQ ID NO: 352110 - protein, 51 aa, Zea mays
  Clone ID: MRT4577_8428C.1.pep
NKAGYTYRGLINRRKIAIPRVRVYNANHVCNLLGNNAPFVPPTGCCPFDND

SEQ ID NO: 352111 - protein, 177 aa, Zea mays
  unsure (1)..(177): unsure at all Xaa locations
  Clone ID: MRT4577_84290C.1.pep
MEPRIGNRFRVGRKLGSGSFGEIYLGTNVQTNEEVAIKLENVKTKHPQLLYESXNVKWFGVEGDYNVLVMDLLGPSLEDLFSFCNRKLSLKTVLMLADQMINRVEFFHSKSFLHRDIKPDNFLMGLGKRANQVYVIDFGLAKKYRDTSTHQHIPYREKQNLTGTARYASVNTHLGIE

SEQ ID NO: 352112 - protein, 107 aa, Zea mays
  unsure (1)..(107): unsure at all Xaa locations
  Clone ID: MRT4577_84291C.1.pep
TEHRPWSCHQWYFLEPHEDVKRLIELRIMNPSSLLASCKLTKYIVAHGXIASTAQILDFCVACLAHCVLSLCPSHCVLPADTKNLPSEHLQEAICYIHIVSQILEDP

SEQ ID NO: 352113 - protein, 122 aa, Zea mays
  Clone ID: MRT4577_84292C.1.pep
ELKGEDGVVCNGARGGACGLGRHVGGGGVVGVRPRPIAGLHRSRRGGEHGGGGDYGLRDEGMGACVGVGGGQRQGHSACASVEGGISPAWEGSRACYARDLGESSGSRLWKGRLVGRKPRVR

SEQ ID NO: 352114 - protein, 134 aa, Zea mays
  Clone ID: MRT4577_84293C.1.pep
MAGEKKMFGFEEVAKHNVAKDCWLVIAGKVYDVTPFMDEHPGGDEVLLAVTGKDATSDFEDIGHSDSAREMMEKYHIGEIDASTIPAKRTFVPPQQGSHVQAKDSDLLIKILQFLVPILILGLAFGIRHYSKSE

SEQ ID NO: 352115 - protein, 76 aa, Zea mays
  Clone ID: MRT4577_84294C.1.pep
VCSLKLTLIDLQHNTDYKELKNTSSVNSSCTEMPLLLNLTKNGATIALGKARTSIVIMPPQLNPATIPWATGLKAA

SEQ ID NO: 352116 - protein, 137 aa, Zea mays
  Clone ID: MRT4577_84295C.1.pep
PIHSAQTFEHAALPFFHFFCWQGRLAFHALFSREKLPQSFSPPQAEGSKEVGKEEEDEVTTVAVDLNKSTTSIDHDLDTIGEPRASFPNELSPLKLKLRRTGFKPYKRCSVEAKENRVPASDEVGTKRIRLDSEAST

SEQ ID NO: 352117 - protein, 112 aa, Zea mays
  Clone ID: MRT4577_84296C.1.pep
RATANAWPTRHVSPGLSLATKPTAMFFGVVHQAQRVQSIVTPPGYRQVGGGEGRQPLALHLRLKAAPRGLPVASEAPRVPKEGMPRPKGRARGAAGLGPHPRVAGGRNVDRT

SEQ ID NO: 352118 - protein, 84 aa, Zea mays
  Clone ID: MRT4577_84297C.1.pep
WGCPINLELLLFKGEQCPSCISVCREQLHRECIQADNIKQMADSALRLSVFYACHHLPVTKDNVFVAHWQVQACPGPSPGPGKA

SEQ ID NO: 352119 - protein, 616 aa, Zea mays
  unsure (1)..(616): unsure at all Xaa locations
  Clone ID: MRT4577_84298C.1.pep
MEPRIGNRFRVGRKLGSGSFGEIYLGTNVQTNEEVAIKLENVKTKHPQLLYESKLYRILQGGTGIPNVKWFGVEGDYNVLVMDLLGPSLEDLFSFCNRKLSLKTVLMLADQMINRVEFFHSKSFLHRDIKPDNFLMGLGKRANQVYVIDFGLAKKYRDTSTHQHIPYRENKNLTGTARYASVNTHLGIEQSRRDDMESLGYVLMYFLRGSLFRSCGRVSRQLYMVLYQPACRVPPTCAYAPYXVLKLECASPTRPRFHPCSESPISSXQSILFTQARLSDGLPVSQXRPTAPHGFHLQLGKSGXSQSERPCTCKREQRQEMTCSPFRLIWAAKANRQSRLMYLXRRVNNLGGANGKXEAGNKKQKYEKISERKIATSTEALCRGYPTEFASYFHYCRSLRFEDPPDYQYLKRLFRDLFIREGFQFDYVFDWTILKYQQAQMTTAPPRAIAPAVGQSSGMAPVANNNRHSGTEEGRRSGWSDMDPMRRQAPPPVINAGSLAKQKSPVRPETSTSKDAVFSSSTFLGRSSGSSRRPAVSSSRELSTEAEQTRSRTTDASPGATFQRSGAPRWSPQMPDSSDGRRSSSSRRHSSNPKNYESTIRGMQGLNFDGDDRVHY

SEQ ID NO: 352120 - protein, 60 aa, Zea mays
  Clone ID: MRT4577_84299C.1.pep
RAGVSPATFLTHPQLSTSGEHVASNANTLLQLQQLLPFKQLGLTNPVVHYQQHIIGGALL

SEQ ID NO: 352121 - protein, 391 aa, Zea mays
  Clone ID: MRT4577_8429C.1.pep
MEAALEAARAKDTKERLAGVERLHEALDAAARRGLTAAEVTALVDTCMDLTRDANFRIAQGGLQALSVAAVVAGDHFKIHLNALVPAAVERLGDDKQPVHDAARQLLITLMEVSSPTIIVERAGSYAWTHKSWRVRDEFVRTVASAVGLFASTEISLQRVLLSPVLQLMNDSNQSVRDAAISCIEEMYKHMGSQFHEELQRHNLPSYMLKEINSRLDKIEPKVRSSDTTMQYKAVESRGNAGMEPVGSGTPSGSVNDMENEESGSKGKRPLGRDSTKASRKKAMSSSSQSTNYLSRIHDIQIARLKQSEEKSELKQQNIEFMKEVELKKLEFQSKKIEMQQTKLMMEDRIRKDEELNKMYAMDMDALPEELRAVYIARRKGLIDYFIKNPV

SEQ ID NO: 352122 - protein, 125 aa, Zea mays
  Clone ID: MRT4577_842C.1.pep
SFSNKIYHVIRTCERASAQRCSRFFLSDSLSPPSTATVYATGDSLQLPSVVSIVASSHGWRDVEAAACAEPFMPTPLSAASRRCAEPFSPALLSASSRRCAELALLANGGRREKIRILRGRKCPD

SEQ ID NO: 352123 - protein, 48 aa, Zea mays
  Clone ID: MRT4577_84300C.1.pep
QNRPSFIRTHQMKRAKAKRHYRRDNYGSLAPSRGHPDASGLDRRSGAL

SEQ ID NO: 352124 - protein, 52 aa, Zea mays
  Clone ID: MRT4577_84301C.1.pep
IYIKLIFISCNFFLFFFFLFFFFFFFFFFFSFFFFSELNSILFGGGCPAWPH

SEQ ID NO: 352125 - protein, 90 aa, Zea mays
  Clone ID: MRT4577_84302C.1.pep
AAKFSAMASSVTRTACLLVLTLFVVSAAVILPSSLCHGARGVAGLRIGLDPNHPACIRACSAPGGSYTRLPPYRGGGPVEPLPPPNGGNP

SEQ ID NO: 352126 - protein, 82 aa, Zea mays
  unsure (1)..(82): unsure at all Xaa locations
  Clone ID: MRT4577_84303C.1.pep
NWSSTGKKKKKKGPKKKKKKKKKKKKKKKKKKKKXXKKXKKKKKKXXKKKKXGPPNPPFFSPLGGVIWPLGENREKVVSGGK

SEQ ID NO: 352127 - protein, 104 aa, Zea mays
  Clone ID: MRT4577_84304C.1.pep
IARAHHHSKEPISQPSSQSAMASSVTRTACLLVLTLFVVSAAVILPSSLCHGARGVAGLRIGLDPNHPACIGACSVPGGSYTHLPPYRGGGPMKPLPPPNGGNP

SEQ ID NO: 352128 - protein, 144 aa, Zea mays
  Clone ID: MRT4577_84305C.1.pep
MPRGSSSRGARGGVGRNQGSGARGKDSGGHTTKDTHGNRAEGKHGNKHGNSLSPDLVCKSKRIPKKRTLDEDSDDGDGEIRYLQKLKGAKVAPDPVNTGHKAYDFVDDALKKKELTKLSKNKTFPYEVDKNSKWLGLARIVRRI

SEQ ID NO: 352129 - protein, 77 aa, Zea mays
  Clone ID: MRT4577_84306C.1.pep
NWSSTRKKKKKKKQKKKKKKKKKKKKKKKKKKKKKKKKKKIGGKREGKKGVRPKKKFPIPIPPFIKPYSLVPKKKGN

SEQ ID NO: 352130 - protein, 49 aa, Zea mays
  Clone ID: MRT4577_84307C.1.pep
FPLLPCLENRPDPRCMCPERIFRLGTGECHLHCSCLNELWGWSWANVVI

SEQ ID NO: 352131 - protein, 68 aa, Zea mays
  Clone ID: MRT4577_84308C.1.pep
NQPTTHASPDPSDTSRMTFTPVVTVPTRIDHDHFRNTRRKGRVDRTCIQHRSQMVLRTYMPYQYLSST

SEQ ID NO: 352132 - protein, 70 aa, Zea mays
  Clone ID: MRT4577_84309C.1.pep
MWRLKQFIPKEQPSPSGLEGRTVDVGNVKVHVREAIAEGGFSSVYATRDLVNPAKQYALKRVIVQGRESL

SEQ ID NO: 352133 - protein, 38 aa, Zea mays
  Clone ID: MRT4577_8430C.1.pep
VLYGTDGADTRPGLGVASSSLEHRFHRFFLCFLLIFFF

SEQ ID NO: 352134 - protein, 223 aa, Zea mays
  unsure (1)..(223): unsure at all Xaa locations
  Clone ID: MRT4577_84310C.1.pep
GPRGLFFFFFSFFFFFFFFFFFFFFFFFFFFFFFFFFFFFFFKKPKPGGKPSGKKRGGETPPPKGANPKKKKGGTQNRGGPKKKKGPPFTPPRGARFLKGPTXPGGPLAPPPGGVGLKKTGGGPPPKTNXPIKMGGPPATGKRKPKGPDGRPGFPPGEIFPKSKKRFWLGGKRFLGPQPPGWKFSKHPLKXPKRGSGTRPPLKIAGPPQKGGGRGEFGPFLPF

SEQ ID NO: 352135 - protein, 196 aa, Zea mays
  Clone ID: MRT4577_84311C.1.pep
MAAEEEQGFRPLDESSLLAYIKATPALASRLGGGGSLDSIEIKEVGDGNLNFVYIVQSEAGAIVVKQALPYVRCVGDSWPMTRERAYFEASTLREHGRLCPEHTPEVYHFDRTLSLMGMRYIEPPHIILRKGLIAGVEYPLLADHMSDYMKTLLFTSLLYNNTTDHKSGVAKYSANVRFSRSKQFISLQEMDLEDN

SEQ ID NO: 352136 - protein, 426 aa, Zea mays
  Clone ID: MRT4577_84312C.1.pep
MAAEEEQGFRPLDEASLLAYIKATPALASRLGGGGSLDSIEIKEVGDGNLNFVYIVQSEAGAIVVKQALPYVRCVGDSWPMTRERAYFEASTLREHGRLCPEHTPEVYHFDRTLSLMGMRYIEPPHIILRKGLVAGVEYPLLADHMSDYMAKTLFFTSLLYNNTTDHKSGVAKYSANVEMCRLTEQVVFSDPYRVSKFNRWTSPYLDKDAEAVREDDELKLEVAGLKSMFIERAQALIHGDLHTGSIMVTEGSTQVIDPEFGFYGPMGFDIGAFLGNLILAYYAQNGHADQANDRRQAYKKWILKTIEESWNLFQKKFVELWNKHKESNGEAYLPDIYNKPKLLSVVQKKYMTNLFHDSLGFGSAKMIRRIVGIAHVEDLESIKDASKRAECERAALNCAKTILKGRHQFETIEQVVEHIQSFDQD

SEQ ID NO: 352137 - protein, 296 aa, Zea mays
  Clone ID: MRT4577_84313C.1.pep
MEKPRQVARKFLARPQHEGAGAVVRRSIGRFELRYFDPFLVLDEFTVSAPAGFPDHPHRGFETVTYMLEGAVTHEDFEGHRGTIKAGDVQWMTAGRGIVHSEMPAGPGTSRGLQLWVNLSSANKMVEPGYQEIQSKDIACTSDGDGGVTVRVIAGHAMGVRSPVRTRTPTMYLDFTVRPRGAVRQPVRASWNAFAYVLEGEGVFGAERCAPVGAHHLLLLGHGDGLEVWNKSPDRPLRFLLVAGEPIGEPVAQLGPFVMNTEEEIDMTVNDFECYANGFEKARHWKSQAMLALGVE

SEQ ID NO: 352138 - protein, 143 aa, Zea mays
  Clone ID: MRT4577_84314C.1.pep
PRARDTTPGGLKDGNGPDHTTSREDGRPNTDESSRDPAKHAWGERGQDNDSEGTGGSVDGPGAGKHNQAGAKKATITAPAKGADNPTKGRGDNEGDHDHRGADNNSNATRTTNSRAPTGKTVDEEPGKAKGTTTDTHPYTGHQ

SEQ ID NO: 352139 - protein, 131 aa, Zea mays
  Clone ID: MRT4577_84315C.1.pep
DRIINSTAATAVQFVAGDMFESIPPADAVLLRHVLDCWDDEHCVKILGQCKRAIPGREAGGKVIIINVVVGYGSPDKLVKETQVLFDMYMMRYDGSEREEHEWREIFSRAGFSDYKITPTLGFHSIIEVFP

SEQ ID NO: 352140 - protein, 115 aa, Zea mays
  Clone ID: MRT4577_84316C.1.pep
SINAIWAANRDRSTGRILSPSPRTLPAMADASSQPLSSAGCLLLFFPPGRACPSTLVDLRAAAIPSCPCRNASSVLPLLLLSCLGVTIHVAATARAPWQDAAERSGHDGDDDSGS

SEQ ID NO: 352141 - protein, 196 aa, Zea mays
  unsure (1)..(196): unsure at all Xaa locations
  Clone ID: MRT4577_84317C.1.pep
GPFFFFFFFFFFFFFFFFFFFFFFFFFFFFFFPRGKKKPFGKKRVPNPPQRGGGTLPKPFLAPGGKPTEFPPPQTAIGGGTPPPAPPGLGPFFFLLAGESPPPXPGPPLGRGAPGKGTPSPPTXPSQRPPGERGPPPPPPKGXKKPGPVXCLSEKQKGGAVELPPGGKDPPAPGPPGRAGQTGRLVVTRSPPTPGA

SEQ ID NO: 352142 - protein, 52 aa, Zea mays
  Clone ID: MRT4577_84318C.1.pep
IHALISFLWVLCYYTQIPLSVIFGASWHFNLIQSMSLGCLLIPYKLSPICGL

SEQ ID NO: 352143 - protein, 120 aa, Zea mays
  unsure (1)..(120): unsure at all Xaa locations
  Clone ID: MRT4577_84319C.1.pep
DTLYAHAHRQFYRDCTXLSGTIDFVFGNSATVLQNCTMIVRKPMDNQQCIVTAQGRTDRREPSALILQGCTIAAEPTYLAAKDVNRAYLGRPWKEFSRTVVMQSTIGAFIQPEGWLPWMG

SEQ ID NO: 352144 - protein, 140 aa, Zea mays
  unsure (1)..(140): unsure at all Xaa locations
  Clone ID: MRT4577_8431C.1.pep
PPPTGAPPATWSGPRQRRSLRPAAAASMSEFQTPAPGSSRSGAQGQDLPXRRVWRRRGSLVPRRPRADPCSGEALAEADGVVGVAGGAGPGTLDGWTRRGRCRGGXGGGGGVGPFRCCRPPPALDRGSGSRLSRTFFLLD

SEQ ID NO: 352145 - protein, 210 aa, Zea mays
  Clone ID: MRT4577_84320C.1.pep
MRPVFCGNFDHETRQYDLERLFSKYGPISRIDMKLGYAFIYFEDERDAEDAIRRLDNVSFGYNRRRLSVEWSRQVEPVPKSRDRPTGDVKPTRTLFVINFDPIRTKVQDIEKHFEPYGKIANIRIRRNFAFVQYETQEEASAAVKNTDKSPVDSEEPSKEVVSKEEVASNNMIFATPSIPGGAVVVPVCLSVVMVTRCWPWLLIGTKPKR

SEQ ID NO: 352146 - protein, 255 aa, Zea mays
  Clone ID: MRT4577_84321C.1.pep
MRPVFCGNFDHDTRQYDLERLFSKYGPISRIDMKLGYAFIYFEDERDAEDAIRRLDNVSFGYNRRRLSVEWSRQVEPVPKSRDRPTGDVKPTRTLFVINFDPIRTKVQDIEKHFEPYGKIANIRIRRNFAFVQYETQEEASAAVKNTDKSTILDRVVTVEYAFRDDDGDRDDRYDIPKQGAYDRRGGSPYMRSPSPRYRRDYGPDYGRRGRYPGYGRRDGAMYERRSPVYDRYGGGRSPAYDRYDRRRSPGYDQY

SEQ ID NO: 352147 - protein, 146 aa, Zea mays
  Clone ID: MRT4577_84322C.1.pep
MPTHVFILLNQQGRQLQQSEPSIIAAMGTSTVPAIAITGTDGVLRISAEPASEDASGEQQEPAPKRRRKLQPTRAAAGPAVPAPAAYYPVVMDPILQANGGGAISVSSGLAPASAPAAPAGADASMEKTKRYKPAAVPTGPRSKPQ

SEQ ID NO: 352148 - protein, 94 aa, Zea mays
  unsure (1)..(94): unsure at all Xaa locations
  Clone ID: MRT4577_84323C.1.pep
NGGLGATLXEHVGINRXWVRSSVLFSPTPPEGGRXKXVAPNEPPIGRVXKGHLPFXCHIWSIGLSPALFEPMLLLVSWYRLQGGFFCLNRMRRP

SEQ ID NO: 352149 - protein, 100 aa, Zea mays
  Clone ID: MRT4577_84324C.1.pep
MPLGLTLGSLGRSMRRKRLSSLDILSSKRAPRDYYKGKNCKPTGFHTRKGGYVIVDEKLPRFVVPDLTDFKLKAYVSQCARDLTASTASSTSAESTESKS

SEQ ID NO: 352150 - protein, 268 aa, Zea mays
  Clone ID: MRT4577_84325C.1.pep
PFFSHHLSSCYMALGSRTAPGRCLPPLWQTRGAQDVAQGNQQLKPLSALSSSLAAKPSHGALLPQRWYRLSPPWQRLPKLLSPAMVGARRCSSSSVPLPAPFFSFFSLLSATGSHGAGPCSMPTPLLLFSLPQAPLLPALCSAQEPPWCLEMVGVFHMAGNLLIQTRCLSSLVACSEHPSPTSSLASPAELLLGRALLMPVAPIPIQISCPFSSAASLLRGFLVALVVGLQPGVRSPSATPLKPVLVVDVALRALPVQRNAESCGQPM

SEQ ID NO: 352151 - protein, 55 aa, Zea mays
  Clone ID: MRT4577_84326C.1.pep
GVLPGRSDVDGPDGEMAYMRGSFEHTVGSRDSESLYMVGPPGGDCPELAIFFVRL

SEQ ID NO: 352152 - protein, 145 aa, Zea mays
  unsure (1)..(145): unsure at all Xaa locations
  Clone ID: MRT4577_84327C.1.pep
QANRQQQAQEASVXHKPINQRQQQTKAQQTKQTNATQQQQQFQPAQSQQEEENPXADPQQQEQATNPHARANEAANQQQQQKQQPPPALRQRARENPAAHPQQQQQLSSSPPAXGKAPTHQQQQKLQQKGPGQTQQAEANPAAXL

SEQ ID NO: 352153 - protein, 162 aa, Zea mays
  Clone ID: MRT4577_84328C.1.pep
MQRIRIVEQAIQEGRYQDAMIQWIQSGREEEIFRRCLSRFPPKKFENMPLLILLVVIATISKNLKPNARLKEEVEWIEMALNAFAEALPTFEWDQSGARDIIKSTTSAMQLLIGRIQPLIGGIQDGFLTDPFLANLERAKLDWIVRTSERVLDICGAPGRYE

SEQ ID NO: 352154 - protein, 94 aa, Zea mays
  Clone ID: MRT4577_84329C.1.pep
AGRAGSISSIGNKKASPSPLILSAQVSSAPRRSSPRPFIPNLGMGTATTNGSAEQAAAPVPTLKFLIYDRTGCIGRLLGGLCARRGTTLPTGEE

SEQ ID NO: 352155 - protein, 186 aa, Zea mays
  unsure (1)..(186): unsure at all Xaa locations
  Clone ID: MRT4577_8432C.1.pep
ARRTAICYRSIKSQTYPKTRYCRGGPDPRTTIYDVGMKTQCVANFLYCVHLVSWNKENVSSEALEAALIGCNEYMTKSVRNYVLMLRVPDHPXHVLAIINMLILAIIHRLPTAMTCAFAKTQVSCANLDIVPALLSPLCKDNNDAHGSEALTLGKFXFPGRQKIIESIKWGFTKISRADYLNYKSE

SEQ ID NO: 352156 - protein, 108 aa, Zea mays
  Clone ID: MRT4577_84330C.1.pep
RDSGVTKLGLGSWSDRSNPSMAAAAASDPACALAAGDLLATCSAPTSGSPPPYSTRVSPCTPVSSVVPALPGFSSSSSRPTCSPQVLLSYPSCLADRQTQPCMEVATS

SEQ ID NO: 352157 - protein, 119 aa, Zea mays
  unsure (1)..(119): unsure at all Xaa locations
  Clone ID: MRT4577_84331C.1.pep
ARVAVARPXXAXRXXGPPRLVXGVXRRPPLPVXLSRXLXVVXRPRPRACRPLGXAPXFXLARAPPXXSCSFPGFFAFGFXXVXLCPRRAAGPRLLLFLAXAPLVCCFPPXXXXXXXXXG

SEQ ID NO: 352158 - protein, 122 aa, Zea mays
  Clone ID: MRT4577_84332C.1.pep
PFSYLYLLLLCLRLNVVLYNHPLSVSLNLGTFVIYFPSTDLFCIDLSLPTCQLLTPLHGVVSFPVRLVKERLLLLGGLFLALHRLLSSLCPSLTAAIQATATRTRGRKDGTYADGTRGWHPR

SEQ ID NO: 352159 - protein, 58 aa, Zea mays
  Clone ID: MRT4577_84333C.1.pep
GLLSPFHLRKQQQFTCLKQSNQPDQILYIQEVPPNWLLHCFLTPRFDTKHPKFLPPDT

SEQ ID NO: 352160 - protein, 83 aa, Zea mays
  unsure (1)..(83): unsure at all Xaa locations
  Clone ID: MRT4577_84334C.1.pep
MASASASLPKSALVLDKSDWVKGQTLRQPSAASVVRCNPTTPSGLTIRAGSYADRLVKTAITVASSGSGMLXMDESNXTCGKR

SEQ ID NO: 352161 - protein, 70 aa, Zea mays
  Clone ID: MRT4577_84335C.1.pep
LNQFAGICLICSSVGAQKVKFTCMQFRQLCQDKNRDGCIMALAVVRNEFYDLRNKFQTMLQLEQQIQAQQ

SEQ ID NO: 352162 - protein, 47 aa, Zea mays
  Clone ID: MRT4577_84336C.1.pep
PKCTRLLAALLKLPLRISVLACLLSVNSPVPDDHLHNMCVALSNMIK

SEQ ID NO: 352163 - protein, 50 aa, Zea mays
  Clone ID: MRT4577_84337C.1.pep
LSNQTDLYNKRVSNGGPFFLHHILNLINMPTMAKNKWLITDRPIIHSPIF

SEQ ID NO: 352164 - protein, 54 aa, Zea mays
  Clone ID: MRT4577_84338C.1.pep
ISNSLDVNCPAVGWVNDCTVHMSDEIPLIFQCALDQVMHLRRASNASQRDLRLN

SEQ ID NO: 352165 - protein, 52 aa, Zea mays
  unsure (1)..(52): unsure at all Xaa locations
  Clone ID: MRT4577_84339C.1.pep
SCNQELKSDLXDLYINGAIQLDVAGSRKAVVMPVPYRLPKGFMKIHVLIDRE

SEQ ID NO: 352166 - protein, 91 aa, Zea mays
  unsure (1)..(91): unsure at all Xaa locations
  Clone ID: MRT4577_8433C.1.pep
RFYCNNXKHTPVGKVQSPHSMVFHTRLLHSDDIAKTTAAVGHANGGARAHETYIQPSSGPRDIHVVVSGNMVISIQVFRSVTNNFSEDNIL

SEQ ID NO: 352167 - protein, 42 aa, Zea mays
  Clone ID: MRT4577_84340C.1.pep
RQPKWSPNAKPLGNPTKGLDSPTEHHLRSRHIQRTKLKGAMT

SEQ ID NO: 352168 - protein, 67 aa, Zea mays
  Clone ID: MRT4577_84341C.1.pep
GRKHPNITQDTNKGFLTPKPCLTGKQIYASRSVFLLLGAGITGALWGDLLVDLFQGGQVLGCLGEIP

SEQ ID NO: 352169 - protein, 267 aa, Zea mays
  Clone ID: MRT4577_84342C.1.pep
MFPSLIHHASHGRPDVAVAEDAPRSGCGLGLPGHGGGPSVVLTADPKPRLRWTADLHDRFVDAVAQLGGPDKATPKAIMRTMGVKGLTLFHLKSHLQKYRLGRQSGKELTEQSKDASYLMEAQSGTTLSPRGSTPDVKESQEVKEALRAQMEVQRRLHEQVEVQKHMQIRMEANQKYIDTILDKAFKIVSEQLSGFSISDQDLPILTSARAMLSPADHLSSSVFPQLSVSSVSLHNPGPGGGKGLPHVADSHVFSQRPPEQFKRKSR

SEQ ID NO: 352170 - protein, 81 aa, Zea mays
  Clone ID: MRT4577_84343C.1.pep
LDQHLLDDLDVVNLSSIENGERPSGPVPRLTHLVQGNVKGVCTRLRRTSCRELLLIGLVVLTFPDHDSQVERGRCRGEVRR

SEQ ID NO: 352171 - protein, 158 aa, Zea mays
  Clone ID: MRT4577_84344C.1.pep
SYLNRKLWIYIWWLRPPRTTPPPHVRAPTTLPIAPPIWGRDQGSSLYMGVGMGLCKKWMMGRWLTMAALPRIRVIQRHPSLHRSACTEGGSAKRGTRRPRNSSASGGKPPTVVARTRRGSEAARRAHRRRGQLSSQSTRRSSWLLRRAREWLPMYGCH

SEQ ID NO: 352172 - protein, 104 aa, Zea mays
  Clone ID: MRT4577_84345C.1.pep
MALGPESQAKTKTTWHIGAWGNPYEGGGRPGKGIVTYQLSPNRQRPMANFLSKGFWNVVRRSKNQVLYIVPPLVLGYGVMQWAIERNEFLNSKPGRALYADEEE

SEQ ID NO: 352173 - protein, 89 aa, Zea mays
  Clone ID: MRT4577_84346C.1.pep
NICGCMRGRQPYMSTMYLQRSLQERQTLPSAKYFAECEFTDTRQRSSLPECYTRQSKTLGKSIVCRVSVTRQSKYVGVRSLPSAKENAR

SEQ ID NO: 352174 - protein, 162 aa, Zea mays
  unsure (1)..(162): unsure at all Xaa locations
  Clone ID: MRT4577_84347C.1.pep
SGLCVPRHRTLPWKDKRIPKKKRRGKWRISETKHDEEVDADGGGECGPAGSVSGLHATXXXXXAEAMRTLTHPPRPHRHELELKPTPKIKIKHEPPPSIQQFAFAGAGSGERKRWGGAHGTKAVERPRPPAARISPPGLGLEIAGFTLFAAVNSLFAVFSRP

SEQ ID NO: 352175 - protein, 78 aa, Zea mays
  Clone ID: MRT4577_84348C.1.pep
HASGPTRSRMALLYLDHDMGVIAINIRETHWYLAVIHARNMQILVLETLDTSQDRKDLTDSIKGLQWQIDMISQRTEL

SEQ ID NO: 352176 - protein, 38 aa, Zea mays
  Clone ID: MRT4577_84349C.1.pep
NKTGSLIKLKAYYHIFSCGNTFNRDRNSDEFPVGNSLT

SEQ ID NO: 352177 - protein, 57 aa, Zea mays
  unsure (1)..(57): unsure at all Xaa locations
  Clone ID: MRT4577_8434C.1.pep
NLTSKCGNPGGYGCPDPSTPWRWGGIPLREAAXGHIARGWLXGPFADPPLLDAKPLG

SEQ ID NO: 352178 - protein, 37 aa, Zea mays
  Clone ID: MRT4577_84350C.1.pep
SSCNYRTSVIKCGHPVPLPSPDPIQWSSSVELSAPRA

SEQ ID NO: 352179 - protein, 257 aa, Zea mays
  unsure (1)..(257): unsure at all Xaa locations
  Clone ID: MRT4577_84351C.1.pep
PARTLSLKHSTAWAPAGHEIAWSQHQLQAPQTSAKATSVASNTLSSKLDVSQKTSTVTISGKDFEFAFNRAYGTLKSWISNGKTVLDFDPKTKAAIIPSFWRPKTDNDVPGAVPYWERFGVDQLESQLRXSLWMPAQTRLXEIEDVYYSPGTXWGWDCEIEYTVSLNGSLSVNVTRLSPQGSVPDHIPRIGLNLVXSKTLEHVKWLGPGPGEXYPDKKTSQRVGIWERXSISDLQXPYDVPQENGNREDTRRVSLRD

SEQ ID NO: 352180 - protein, 86 aa, Zea mays
  Clone ID: MRT4577_84352C.1.pep
IFSLYLYYTRANYVRKICAPLAAIRYFILLYGFTCPVGELLLSMAEGNSRLSQLPKALILGKLMAVLFNWHSRGGHSNMVCVTARY

SEQ ID NO: 352181 - protein, 34 aa, Zea mays
  Clone ID: MRT4577_84353C.1.pep
SVLNSIDSSIAMFITKLSSAYKILLHYHPCSFYF

SEQ ID NO: 352182 - protein, 67 aa, Zea mays
  unsure (1)..(67): unsure at all Xaa locations
  Clone ID: MRT4577_84354C.1.pep
AYNHGNYSNPSLGEADINGDLLGQLNKLMRILETPIXTXXRLQVFETGKHTWVLKTLYGLLMLLPQK

SEQ ID NO: 352183 - protein, 123 aa, Zea mays
  Clone ID: MRT4577_84355C.1.pep
QAGYYCSVCECVVKDSANYLDHINGKKHQRALGMSMRVERASLEQVQKRFEALKKRKDPSAFTEEDLDERIMKQQQEEEERKRQRKEKKKEKKREQATQHEPEDVDPDIAAMMGFGGFGSSKK

SEQ ID NO: 352184 - protein, 93 aa, Zea mays
  Clone ID: MRT4577_84356C.1.pep
AGALPLPMARGRKPNLGWTLVVTGQHQDKQRVQDQPDQKITQHKLGDGAKQGTTQPLPEAGGQTQPGQGQSTQGVVKRPHMQEPGGKTANPSY

SEQ ID NO: 352185 - protein, 100 aa, Zea mays
  Clone ID: MRT4577_84357C.1.pep
KKKKQNKKKKKGRRTRMLYTEVNIHKNVKAHLYNQRERLHRPIIFTMCCAGTPLGLCNVGGLCHIRLCQVGVTPKSRGRVVHRASCETSVVTLSRPRAGP

SEQ ID NO: 352186 - protein, 89 aa, Zea mays
  Clone ID: MRT4577_84358C.1.pep
PTSYKTWRLTSGIHTWEYSRPTRPKVMPYRLCPPLATVLGRRSRTNTSDQWRNSAIHSNRGNRMNPTLTARNRSWRNTPISTTMEQHGG

SEQ ID NO: 352187 - protein, 149 aa, Zea mays
  unsure (1)..(149): unsure at all Xaa locations
  Clone ID: MRT4577_84359C.1.pep
GTKTRKNRGPPCGGGARGPGGGGGGGXGGXFPGQQAQKPKKPAGGAGGGTPEPLVKAPDPGLAPXARPGPAGGPPCPMGGPVKTWRHHGHSRSLGEIVIPSRPPPQASRKQKGKSPGRPTRDPTHNNGGGLTAPFPAGKPEGPLALRKP

SEQ ID NO: 352188 - protein, 60 aa, Zea mays
  unsure (1)..(60): unsure at all Xaa locations
  Clone ID: MRT4577_8435C.1.pep
KXIFFFFFFFGGVLFKFMGLPQRTTKSIIETGKQSCPYDVEPFSDLVHCTGIIYPDEDFG

SEQ ID NO: 352189 - protein, 67 aa, Zea mays
  Clone ID: MRT4577_84360C.1.pep
FAHGSSSAQWSGSPWSPSSVGLSPCSLLVSLGACWLRGFHMPAWCAFGVVPALVSDHALALVVALES

SEQ ID NO: 352190 - protein, 77 aa, Zea mays
  Clone ID: MRT4577_84361C.1.pep
TLDVNLMSHVQTTDESESRLGAAHAFGAPHRRWGPKRRSLGSRTSWWALYWCSRGSSRRPSPTSTRRTTGMGCCTTL

SEQ ID NO: 352191 - protein, 53 aa, Zea mays
  Clone ID: MRT4577_84362C.1.pep
RLIWCKNTLSSYGITHKMALRRGINRAALALELQNAFSCSRPEHLWRKLSSLY

SEQ ID NO: 352192 - protein, 56 aa, Zea mays
  Clone ID: MRT4577_84363C.1.pep
KMGAPAHEIGPPDQGNKNGRRQKEGRNLETLRPCPGLVLKCFSFIFFFFLFLFLFL

SEQ ID NO: 352193 - protein, 84 aa, Zea mays
  Clone ID: MRT4577_84364C.1.pep
YLFGCKIRVGARAPWLARQLGPMIVLGPNALLVQVLDFCLYAFAGKKILGGGPPPPPFLKKKKKKKKKKKKKKKKKKKKKKKKK

SEQ ID NO: 352194 - protein, 84 aa, Zea mays
  unsure (1)..(84): unsure at all Xaa locations
  Clone ID: MRT4577_84365C.1.pep
KAIAPMGGFPQYGTVKAFHMMIKGGCVXPNNRVVPLRQSLLKHTSRHGAVVDLXLKFIDPLSRFGHGRFQALNEHHRFFDKLKA

SEQ ID NO: 352195 - protein, 54 aa, Zea mays
  unsure (1)..(54): unsure at all Xaa locations
  Clone ID: MRT4577_84366C.1.pep
TPWRGSRRTGPPLSSSTRLXPSPIRTLIAAADHPERNLLDPIVKLQFCAEAWAD

SEQ ID NO: 352196 - protein, 425 aa, Zea mays
  Clone ID: MRT4577_84367C.1.pep
MASEKVETIVAGNYMEMEHEPGGGGDHDQQPSGGAASSTSSSSRGGGKKKALSSLFWHGGSVYDAWFSCASNQVAQVLLTLPYSFSQLGMASGVVFQLFYGLMGSWTAYLISILYVEYRTRKEREKVDFRNHVIQWFEVLDGLLGKHWRNVGLFFNCTFLLFGSVIQLIACASNIYYINDKYDKRTWTYIFGACCATTVFIPSFHNYRIWSFLGLLMTTYTAWYLTIAAIAHGQVEGVTHSGPSKMVLYFTGATNILYTFGGHAVTVEIMHAMWKPHKFKLIYLVATLYVLTLTLPSASAVYWAFGDMLLDHSNAFALLPRSGFRDAAVIFMLIHQFITFGFACTPLYFVWEKLIGVHETGSVALRAAARLPIVAPIWFLAVVFPFFGPINSTVGSLLVSFTVYIIPALAHMATFLPPAARENAV

SEQ ID NO: 352197 - protein, 186 aa, Zea mays
  unsure (1)..(186): unsure at all Xaa locations
  Clone ID: MRT4577_84368C.1.pep
NLCFKYLYPENXDELSTKLIEIYNIDMIAATTRRLEQALQVRGLSYYAIYGRHKSMYSIYXKKARKKLVMDKIYDIHGVRVILENKADCFATLEIIHHLWPRIPGKFKDYINSPKPNRYQSLHTVVLTEQTLPLEIQIRTRDMHLQAEFGIAAHWRYKEGYPSSLACDASSKETHTIPSHSEACLL

SEQ ID NO: 352198 - protein, 231 aa, Zea mays
  Clone ID: MRT4577_84369C.1.pep
IRLEADCFATLEIIHHLWPRIPGKFKDYINSPKPNRYQSLHTVVLTEQTLPLEIQIRTRDMHLQAEFGIAAHWRYKEGERSCCTSVSEIVEWVRWVTWHCQTLNTGYPSSLACDASSKETHTIPSHSEACLLSYSKQCDHKGPVLVILLENEKMSVQEIPQNWTILDLLKRSSNYGMPLRLRLNCHAVHNWNQELKMGDVLELIPSTPCKSRGRTRELHQKFDHRLAVSQS

SEQ ID NO: 352199 - protein, 29 aa, Zea mays
  Clone ID: MRT4577_8436C.1.pep
PKCQFCFLSKKIANHPVLVVLDQEKPLAI

SEQ ID NO: 352200 - protein, 72 aa, Zea mays
  Clone ID: MRT4577_84371C.1.pep
QYPMGTCIRTAVGSVMIYGCKSCSGRATGSYLIDDMRRSGVRSGNTDEIHSDIIATAEHVRWILTVGLNDCM

SEQ ID NO: 352201 - protein, 96 aa, Zea mays
  Clone ID: MRT4577_84372C.1.pep
MRRHGSATPVTDTHSTSSCTAATTLGRGEKLSELQDKTSELHIQAQQFKKQGVKIRRKTWLQNMKIKLVILGILLLLVIIVWVSICQGFDCTKHET

SEQ ID NO: 352202 - protein, 53 aa, Zea mays
  Clone ID: MRT4577_84373C.1.pep
NSAKNATNVEQSFMTMAAEIKKRMGPGATAGGAEKSNVKIQSTPVKQSGGGCC

SEQ ID NO: 352203 - protein, 68 aa, Zea mays
  Clone ID: MRT4577_84374C.1.pep
PAALARALGLGLFLVAWVSLLLRPPVCFSCGASCLVLWLPFCRALLCSLSPGCVAGSPFVCPPKDEGG

SEQ ID NO: 352204 - protein, 50 aa, Zea mays
  Clone ID: MRT4577_84375C.1.pep
HIEDHANVGLQGGHKAVLLHRESTVKLRHAASSAPGTLAQSPGWSSTLSP

SEQ ID NO: 352205 - protein, 71 aa, Zea mays
  Clone ID: MRT4577_84376C.1.pep
ETNGARHMVGHQNKGQFTFTRVTQRTRQTREETNKGCLKTTSRPRGKNREFYTKTTGGTRYTYRGTHKRRA

SEQ ID NO: 352206 - protein, 86 aa, Zea mays
  Clone ID: MRT4577_84377C.1.pep
WYSSPVSNSEWVDCKHMILHSRRYGSTSYGRTVLLVSVIPAAMLWLVLPDVSRIVVAIGQSGVVIRLRLALSAACRLAKHGVLSPL

SEQ ID NO: 352207 - protein, 93 aa, Zea mays
  Clone ID: MRT4577_84378C.1.pep
RARKHIIAPIAFVPKVHHPGPFFRGGNGANSLTHRGGDFSSPHEGKNLGFLGRGGSTTNVKSRERVATPGIQKHTLGSSSAVFAQTEEGSFSN

SEQ ID NO: 352208 - protein, 75 aa, Zea mays
  Clone ID: MRT4577_84379C.1.pep
VQVPGFFPGGPAHAVWVFNPRVRLVPIPACMRVWLVCNAGMISLCCFIRCMEVGCSLWPRCSVRSRPLLYVCYPP

SEQ ID NO: 352209 - protein, 111 aa, Zea mays
  Clone ID: MRT4577_8437C.1.pep
RHLSVKLDKQLAANPRETPYPWRRASAFLAVVALLFAAMGEAQMAEAKLADDLWVDAEVLAADAHADGPTRTGRCTLAPRASRDYRAMRTTTMTSTTNANHVDAIAFWNKI

SEQ ID NO: 352210 - protein, 80 aa, Zea mays
  unsure (1)..(80): unsure at all Xaa locations
  Clone ID: MRT4577_84380C.1.pep
IHLQALSNGKPTVVEFYANXCEVCRELAPDIYKVEQQYNWDPSCCTTDRTSEHHGQRRQAGPLIALGRQELQQRWCHDRH

SEQ ID NO: 352211 - protein, 199 aa, Zea mays
  Clone ID: MRT4577_84381C.1.pep
MMRLPAIRSKQIVKRATFYLGKSEKGVYCALFYWAQDDSDPQFRVWSLMEEEMNGRDGQIHMKWLIKTSISLKPLLAQLHHCGHDLTPDEWRIIYNRHDRDLVSSSAQDDIDDEWDFENAHEIVLEAPNNVNDWYPIDFLVFHPYKEIVFFSLSWKTISYNLNTTKVRQLGCAAHIPVGIKTCFPYTPCYLTMEKLTNS

SEQ ID NO: 352212 - protein, 38 aa, Zea mays
  Clone ID: MRT4577_84382C.1.pep
IKKKKKKKKKKKKKKKKKKEKKKKKKKKKFVPWAGNTP

SEQ ID NO: 352213 - protein, 67 aa, Zea mays
  Clone ID: MRT4577_84383C.1.pep
PIHIRELESIFRGDIFGEATVFEFVKSFVVIKFPAKSGLEERLPALLGRRDGLTSLPRTALRPRTRI

SEQ ID NO: 352214 - protein, 135 aa, Zea mays
  Clone ID: MRT4577_84384C.1.pep
YRAPPRVFFFFFLHHMRNLSPSYKSRKQQQLKREENPARTNQIKRYKSQPTRLQLIRIFPDSSPLPCIHCVCSRFITDVMLLLSREARTASLHKSAAAGCSLFTFHKRSRINSPDPYGASAPTICVCRSMPLESQ

SEQ ID NO: 352215 - protein, 47 aa, Zea mays
  Clone ID: MRT4577_84385C.1.pep
MGGMWSGIGGYDIYAKGAVVGVVRAGSRVRKDGAWWEEEVCGCVYER

SEQ ID NO: 352216 - protein, 87 aa, Zea mays
  Clone ID: MRT4577_84386C.1.pep
KTGGPSVHCLTPLSPNFKHRHLPRPTRLFSRSADPHRQQRQPPFTRRILLHGRPSFPRRHGRYIRHHRLISFHPLPSQSQCKSQPEC

SEQ ID NO: 352217 - protein, 48 aa, Zea mays
  Clone ID: MRT4577_84387C.1.pep
FPCADGPSSQGRPSCEPGRLRAYIRRPLVPRPRAAPRLLPSVRRLPVQ

SEQ ID NO: 352218 - protein, 162 aa, Zea mays
  Clone ID: MRT4577_84388C.1.pep
MSRPATLDRQAPTVRPRSAHASAHASAHASAHASAHASDSYVTLRKTYQSSLGNNNKRVELFDMGAGSSEPAAEDNIQMASAMTNQQLIDTGRNQMDQTDQAIERSKMVVAQTVETGAQTAATLTQQTEQMKRIGNELDTVHFSLKKASQLVKEIGRQVATD

SEQ ID NO: 352219 - protein, 51 aa, Zea mays
  unsure (1)..(51): unsure at all Xaa locations
  Clone ID: MRT4577_84389C.1.pep
XKKKKKKKKKKKKKKKKKKKKKKKKKKKKKKKKKKKKKKKKKKKKKGGGRF

SEQ ID NO: 352220 - protein, 277 aa, Zea mays
  unsure (1)..(277): unsure at all Xaa locations
  Clone ID: MRT4577_8438C.1.pep
ILGTYHPLGVKSNSRTAEGMESRHLYKVGSANLGGHSSGHTEAPGFSRTGSCPLHGHQVAWNNSNNSHHHTSSPMLWPNSGSFINNIPSRPPTQAHGISRSSRMLENVLPVNHHVGSAPAVNPSILDRRTGYAGELMEAPSFHPGSAGSMGFSGSPHLHQLELTSMFPQSGGNQAMSPAHIGARSPQQRGXHMFHGRGHIGPPPSSFDSPGEHARSRRNESCANQSDNXRQYELDIERIVCGEDSRTTLMIKXIPNKYTSKMLLTAIDEXSQGTYDL

SEQ ID NO: 352221 - protein, 204 aa, Zea mays
  unsure (1)..(204): unsure at all Xaa locations
  Clone ID: MRT4577_84390C.1.pep
RLIQKVFCRYQSSLGNNNKRVELFDMGAGSSEPAAEDNIQMASAMTNQQLIDTGRNQMDQTDQAIERSKMVXPLLYTLVLFAMAKFTRHSCXVAQTVETGAQTAATLTQQTEQMKRIGNELDTVHFSLKKASQLVKEIGRQVATDKCIMAFLFLIVLGVIAIIVVKIVHPNNKNIRDIPGLAPPAQNYQIHNRRLLWAEASIGM

SEQ ID NO: 352222 - protein, 76 aa, Zea mays
  Clone ID: MRT4577_84391C.1.pep
SNLPFTVILAALIRPLFLDIMMNMPITMMTATMIAMLDVWHGQIVPFIRVTVLHITAYNTGRKSLASLRMLQMCVA

SEQ ID NO: 352223 - protein, 288 aa, Zea mays
  Clone ID: MRT4577_84392C.1.pep
MASSSKRSLPCVLLLLAVFHHGCSSARAHRRAGDMEGSMSTDDSSMIERFQRWKAAYNKSYATVAEERRRFRVYARNMAYIEATNAEAEAAGLTYELGETAYTDLTNQEFMAMYTAPAPAQLPADESVITTRAGPVDAVGGAPGQLPVYVNLSTSAPASVDWRASGAVTPVKNQGRCGSCWAFSTVAVVEGIYQIRTGKLVSLSEQELVDCDTLDDGCDGGISYRALRWIASNGGITTETDYPYTGTTDACNRAKLSGGRRYIKDEKDGRRQAGGARGIAIRPSYPLM

SEQ ID NO: 352224 - protein, 111 aa, Zea mays
  Clone ID: MRT4577_84393C.1.pep
AGRVPNDEMSETQVSRDAPISRALRVTATANAIGSASVHVAGPDPDGMHFHANSPRPQLGLKQAQVRQLAIRIRLTKIPQMTSCTTTSTSDNAFNTIIQATGAGDPGGRAG

SEQ ID NO: 352225 - protein, 242 aa, Zea mays
  Clone ID: MRT4577_84394C.1.pep
MHACHCAKHTCFCPGWTGSPGARRRWPTPTRPSGAVTPVKNQGRAGSCWAFSTVAVVEGIYQIRTGKLVSLSEQELVDCDTLDDGCDGGISYRALRWIASNGGITTETDYPYTGTTDACNRAKLSHNAVSIAGLRRVATRSEASLANAVAGQPVAVSIEAGGDNFQHYKKGVYNGPCGTNLNHGVTVVGYGQEAAGGDRYWIVKNSWGQGWGDDGYIRMKKDVAGKPEGLCGIAIRPSYPLM

SEQ ID NO: 352226 - protein, 48 aa, Zea mays
  Clone ID: MRT4577_84395C.1.pep
TRSGTEVSTQATRPTTRTEEGESVCFKSGRPLQVGDRRIRKKAKTKGG

SEQ ID NO: 352227 - protein, 67 aa, Zea mays
  Clone ID: MRT4577_84396C.1.pep
MWTIMKVATPQVAVLLLLLIVDAQEAAQLAEARVCRRRSAGFKGVCMSDHNCAQVCLQDSYGGGNCY

SEQ ID NO: 352228 - protein, 204 aa, Zea mays
  unsure (1)..(204): unsure at all Xaa locations
  Clone ID: MRT4577_84397C.1.pep
EGLSAKHSNGGCLASSSAQHPAGRRLTHPAIPCRPTLPGPQRSKQFTGAGAASSQASLHFQISTQLEAFEKCAKECGLDPKKTLSLDVATRWNSTYIMIRDAIYYKDAFDRLAKKDKDKYGHINPSSTDWLNATNISKCLKKFYDVTLLFSGTSYPTANHFFRKFSEIKMAIARWCDSSDLVICTMVXSMRHXVDKYWEMNNLA

SEQ ID NO: 352229 - protein, 82 aa, Zea mays
  Clone ID: MRT4577_84398C.1.pep
MADQIWGGLMLGGRSASVVTATIIPQCSQDAINFLLPPYLSPTLHQMCENPIDKPFWIHLAFNTPMTIATYSYYLPSNICYI

SEQ ID NO: 352230 - protein, 62 aa, Zea mays
  Clone ID: MRT4577_84399C.1.pep
LTQINVYVTPGSSLGSYIVPIDQHKSFMHTLSSLTRTRENFLVGNPSQVSPSQANLIMEDFL

SEQ ID NO: 352231 - protein, 86 aa, Zea mays
  Clone ID: MRT4577_8439C.1.pep
GPYEGTRNYPQTIGVLDKAFPNSLLGSIFWREKAIPRFPFFWGPFHAKNGFDDLKFQKKKSKGFLVNFTQLFWIRVLKGLFWELYF

SEQ ID NO: 352232 - protein, 166 aa, Zea mays
  Clone ID: MRT4577_843C.1.pep
PIALGVGIGSGYLYKTTFEKEVYSDLYGERGCLMGGIHGMFLAQYEVLRERGHSPSEAFNETVEEATQSLYPLIGANGMDWMYEACSTTARRGAIDWSPKFKDALKPVFNSLYDAVKDGSETKRSLEYNSQPDYREKYEAEMKEIRELEIWRAGKAVRSLRPENQK

SEQ ID NO: 352233 - protein, 76 aa, Zea mays
  Clone ID: MRT4577_84400C.1.pep
SVFISVIWSYPLLLVKANYYGKHISTSGERNPTPENPAWSGKFVWGHNQTCPFWSGKFVWGHNQTCPFCLHNTQLF

SEQ ID NO: 352234 - protein, 117 aa, Zea mays
  unsure (1)..(117): unsure at all Xaa locations
  Clone ID: MRT4577_84401C.1.pep
TCNGRHVLTMTRNLERAGGGSLLQSMCGVSPTHLSWSPEHHATDVDYTWSTVHTPFGPFSXTKSLSFVQNDASRKNVLLTTLNYTITNTIDVLESMVAHGGQNYLIKNMHVEFIQRL

SEQ ID NO: 352235 - protein, 85 aa, Zea mays
  unsure (1)..(85): unsure at all Xaa locations
  Clone ID: MRT4577_84402C.1.pep
PTNAAAPALRRIXRAGIAAATPISYYSWELIDLIHEHLLGTGFTATAAMLQNEAGLAPLPMIAAALPAQQVAALEASSVQQQSAS

SEQ ID NO: 352236 - protein, 104 aa, Zea mays
  unsure (1)..(104): unsure at all Xaa locations
  Clone ID: MRT4577_84403C.1.pep
KLNCKTASTELYREENVYMAXKLAEQAKRYEEMDEFMXKVTNTVYWXELTVEERNLLYXAYKNVIGARRASWRIIYSIEQKEEGRSNEDRVTLIKDYRGKTETE

SEQ ID NO: 352237 - protein, 74 aa, Zea mays
  Clone ID: MRT4577_84404C.1.pep
FSRAIFNNQHDIFLPGPQSHARPPRHRYKKLLSSMNYLSVHVTHKNLIVHNVTAALPRMQGELRIIYHPRNRVS

SEQ ID NO: 352238 - protein, 87 aa, Zea mays
  unsure (1)..(87): unsure at all Xaa locations
  Clone ID: MRT4577_84405C.1.pep
FYGRGDTGVVGRRTDLASSHLPAMLEHVFLCELIYARAXGAVTHMPPNVRIMYMEQRTSAVKTNIGWHFWAPYQLDSGEWGDVPREN

SEQ ID NO: 352239 - protein, 79 aa, Zea mays
  Clone ID: MRT4577_84408C.1.pep
HTTRSVPLLPSNSVEQMLSWMFFAKSSSTLFTALLFFATATCGLVAATRARATTKRAANGAMMHTHALAIIVMMLFAFV

SEQ ID NO: 352240 - protein, 42 aa, Zea mays
  Clone ID: MRT4577_8440C.1.pep
CPPFFKKKKKKKKKKKKKKKKKKSKKKKKKKKKKVLCVVTPA

SEQ ID NO: 352241 - protein, 68 aa, Zea mays
  Clone ID: MRT4577_84410C.1.pep
PIYRLHGHTIREKDKTLNVGWRNQTPILVKLKNLRLKKTSKRITPSIGCCTHNLDPHPSTYKGPTVNT

SEQ ID NO: 352242 - protein, 121 aa, Zea mays
  Clone ID: MRT4577_84411C.1.pep
PLFHNPPLFRSPKNPQDPPSSPFLKTPPFAPPPPRVSPLCPRTSISPPASVATPRTPPPQGFYKCLFPHQIARISAVFPHSLFWIRSQEKTPLLFFPPPPGGPFPFNRSPGVLNSGPVILF

SEQ ID NO: 352243 - protein, 311 aa, Zea mays
  unsure (1)..(311): unsure at all Xaa locations
  Clone ID: MRT4577_84412C.1.pep
MGRGKVQLKRIENKINRQVTFSKRRSGLLKKAHEISVLCDAEVALIIFSTKGKLYEYSTDSCMDKILERYERYSYAEKVLISAEYETQKKKKHEYRKLKAKVETIQKCQKHLMGEDLETLNLKELQQLEQQLESSLKHIRTRKSQLMVESISALQRKXLLSLLKLAVRTSSFKNCMISLAGHXGHGLLQVLTTLVALLHPQNISALALCCDALLPQEKSLQEENKVLQKEXRYSCMQLAEKQKDQRQQVQRDQTQQQTSSSSTSFMLREAAPTTNVSIFPVAAGGRVVEGAAAQPQARVGLPPWMLSHLSC

SEQ ID NO: 352244 - protein, 334 aa, Zea mays
  unsure (1)..(334): unsure at all Xaa locations
  Clone ID: MRT4577_84413C.1.pep
MGRGKVQLKRIENKINRQVTFSKRRSGLLKKAHEISVLCDAEVALIIFSTKGKLYEYSTDSCXSTQTSIYVGNFHIPELIERARYNIMQSESMDKILERYERYSYAEKVLISAEYETQGNWCHEYRKLKAKVETIQKCQKHLMGEDLETLNLKELQQLEQQLESSLKHIRTRKSQLMVESISALQRKXLLSLLKLAVRTSSFKNCMISLAGHXGHGLLQVLTTLVALLHPQNISALALCCDALLPQEKSLQEENKVLQKELAEKQKDQRQQVQRDQTQQQTSSSSTSFMLREAAPTTNVSIFPVAAGGRVVEGAAAQPQARVGLPPWMLSHLSC

SEQ ID NO: 352245 - protein, 515 aa, Zea mays
  unsure (1)..(515): unsure at all Xaa locations
  Clone ID: MRT4577_84414C.1.pep
ERPRFAILGERLTLRAREKMLSAMLRNXEIGWFDDTSDTSAMLSSQLEADATLVGTIVDDRSTILLHNVXMIVTSLIIAFILNWRITLVVLATYPLMVSGHISEKMFMKGYGGNLGKSYLKANMLAAEAVSNIRTVAAFCSEEKVIKLYADELREPSKRSFRRGQGAGLFYGVSQFFLFSSYALALWYGSVLMSKELASFKSVMKSFMVLIVTALAMGETLAMAPDIIKGNQMASSVFEILDRKTDVRIDTGEDIKRVEGLIELRGIEFRYPSRPDVTVFKGLDLLMKAGKSMALVGMSGSGKSTVLSLILRFYDPIAGRVLIDGKDIKKLKLKCLRKHIGLVQQEPALFATTIYDNILYGKDGATEAEVVEAAKLANAHSFISSLPEGYKTKVGERGVQLSGGQKQRIAIARAIVKDPAILLLDEATSALDVESERVVQQALNRVMRNRTTVMVAHRLSTVKNADVISVLQDGKIIEQGAHQHLIEDKNGAYHKLVSLQQQQQMQTQQSSSEDI

SEQ ID NO: 352246 - protein, 100 aa, Zea mays
  Clone ID: MRT4577_84418C.1.pep
PGSSNPAHTAAGDAAAVVDGGDFRQAGKFRSLDKACIRDAADTVPESEWRLCTAGEVRQTKTLLAELPIVACTVVTNTVLAQLQTFSGQKGKAKDTRLAP

SEQ ID NO: 352247 - protein, 45 aa, Zea mays
  Clone ID: MRT4577_84419C.1.pep
ECMHLPVPRKKVSNRYWPCRHIVHNDPALASDQPILGSCCALDWP

SEQ ID NO: 352248 - protein, 157 aa, Zea mays
  Clone ID: MRT4577_8441C.1.pep
GVLVFWGKKKRTFFFPKQSPLKNIGKTFGVYQGGKKPPQNPPPGSEPGPKKKGGGGGNFYIPTNAFDLKLAQNFRGPFGGGKKRGGSFCTRPGGPPHLAGAKKPHPPKRGRKRLFKSGPKRTDFTKNPQRGGRPQIQFFKGPGPPFYPWLRGNPPGN

SEQ ID NO: 352249 - protein, 86 aa, Zea mays
  Clone ID: MRT4577_84420C.1.pep
HRRSSCSPRDGGGTSRGGKRIRPRVPERRYSSPRAVPSSARPTHWERRANIDGHPMWGPLMAVRPELYNGIDGHIGNFWMRHVWDL

SEQ ID NO: 352250 - protein, 130 aa, Zea mays
  Clone ID: MRT4577_84421C.1.pep
SVISHRRGTSARGCNPPWVTFVAVKFQTFGRRRLPTCTSVAWFVASLTSSVRVFGYPYGVGSACTVCTDVTRVFAATCVDTGESYVSASSDSSEPAFIDTCINHTICDHVVSALTSTHTQFTKKKKKKAA

SEQ ID NO: 352251 - protein, 77 aa, Zea mays
  Clone ID: MRT4577_84422C.1.pep
SIYKARNELGLALNGDSGTHFYSPGNHPSLFVAQIILNPKRGKRGSWAWHSKGTCNFSESSKSLQSSFMDPQIKLFI

SEQ ID NO: 352252 - protein, 68 aa, Zea mays
  Clone ID: MRT4577_84423C.1.pep
SEPKWDAHLGPTEEEMLQRPPTDRALSHRPRCDGRTRGSERLATGAASARMTETDTFTSKPNSKLTSD

SEQ ID NO: 352253 - protein, 82 aa, Zea mays
  unsure (1)..(82): unsure at all Xaa locations
  Clone ID: MRT4577_84424C.1.pep
LRERMPXKVGSSATSMNQGKGESGHYKELKSNIKRTSESEANPSLXATKVWVLSXGNSGANNNLPRGNSDDTVRCTGYRLCF

SEQ ID NO: 352254 - protein, 83 aa, Zea mays
  Clone ID: MRT4577_84425C.1.pep
PPLTFVPRKELAKPVAKLAENGKVSIRTLKRDAIKAFDKLQKEKKLFEANVKNLSAALQKVPGESMKKIVSLPKQKDQDLMKI

SEQ ID NO: 352255 - protein, 177 aa, Zea mays
  unsure (1)..(177): unsure at all Xaa locations
  Clone ID: MRT4577_84426C.1.pep
MFCLHEVKKMKTYTFSGANDVSMIQMADVGIGISGQEGRQAVMASDFAMGQFRFLVPLLLVHGHWNYQRMAYMILYNFYRNATFVFVLFWXHVAIIDTSWFSLHKKYVHINSLNIXYVLYTGFTLTTAITEWSSVLYSVIYTAVPTIVVAILDRDLSRRTLLKYPQLYGXXQRDENY

SEQ ID NO: 352256 - protein, 148 aa, Zea mays
  Clone ID: MRT4577_84427C.1.pep
MTDSLGFGLAKSMVDGALTNVKSAIQEEAKLRRSAKRDLVLITDEFEMMRSFFVDATAERVDSQVAMTWVRQVRDLAYDVEDCIGFVVHLDQGTRWWWRMVPSCMAPAIPLNEAVEEIDQLKARMECVCIRNTRYNLNGGNVGSNPPA

SEQ ID NO: 352257 - protein, 74 aa, Zea mays
  unsure (1)..(74): unsure at all Xaa locations
  Clone ID: MRT4577_84428C.1.pep
WRADSTCIGWLDAHRARSVVYVXVGSWVGSIGPGKVRELALGLEATGRPFLWALKRDPSWRAGLPDGFAGRVAG

SEQ ID NO: 352258 - protein, 66 aa, Zea mays
  unsure (1)..(66): unsure at all Xaa locations
  Clone ID: MRT4577_84429C.1.pep
HSSSQPYYPTPQCQKKCIQHNQVFQXNKHLSIHAYTINPHPHHIMPYIYKHRPVXFSYTLYYDFQH

SEQ ID NO: 352259 - protein, 71 aa, Zea mays
  Clone ID: MRT4577_8442C.1.pep
ITRLPLKTTGKPHINPRSVFMSEGQDKLLYRLELTNTNKAGQEDFKSTANRYFLTSIFVRTMLYNLESDLI

SEQ ID NO: 352260 - protein, 35 aa, Zea mays
  Clone ID: MRT4577_84430C.1.pep
EEGNEEELHPRVEDFIARVKRQRKLELKSFFDVDR

SEQ ID NO: 352261 - protein, 33 aa, Zea mays
  Clone ID: MRT4577_84431C.1.pep
ARVVEKGTEAYEDIQILFMPGSTKTLLRFASVQ

SEQ ID NO: 352262 - protein, 95 aa, Zea mays
  Clone ID: MRT4577_84432C.1.pep
SPFFPPPLPSLLVLPTAWSARFAIPIDSVPNPCKDSADHAFPPAITGDRLGASSRGECGGGGRQRSWGAPEQGTRRRGCDATAGAGEARPAPRVP

SEQ ID NO: 352263 - protein, 111 aa, Zea mays
  Clone ID: MRT4577_84433C.1.pep
MRILLMFIGMGMGLVLSLFFLFMFLFFWFKDCWCLGFGLCPSPSSSFPGARGPSPLLFGVRAPPQSTNKKPKPKKKQKKKKKKKKNKKQKKKKKKKKKKKKKKKKKKKLEG

SEQ ID NO: 352264 - protein, 50 aa, Zea mays
  Clone ID: MRT4577_84434C.1.pep
HGFFHRLSQRHHGGDHISRQSASLSLARLLEPDRNHFKPYRSCKLPRSDD

SEQ ID NO: 352265 - protein, 342 aa, Zea mays
  Clone ID: MRT4577_84435C.1.pep
MGCFPCFDSPADEQLNPKFGGAGGYGGTSSAVAAYGNGTGAGVSIGRHGDRGYPDLQQAPMAAPRVEKLSAAAEKARVKSNGLTKEALVPKDANGNAISAQTFTFRELATATRNFRPECFLGEGGFGRVYKGRLESTGQVVAIKQLNRDGLQGNREFLVEVLMLSLLHHQNLVNLIGYCADGDQRLLVYEYMPSGSLEDHLHDLPLDKEALDWNTRMKIAAGAAKGLEYLHDKANPPVIYRDFKSSNILLDESFHPKLSDFGLAKLGPVGDKSHVSTRVMGTYGYCAPEYAMTGQLTVKSDVYSFGVVLLELITGRRAIDSTRPHGEQNLVSWVSDDLFTCK

SEQ ID NO: 352266 - protein, 553 aa, Zea mays
  unsure (1)..(553): unsure at all Xaa locations
  Clone ID: MRT4577_84436C.1.pep
MGCFSCFDSPADEQLNPKFGGDCGYGGTSAAAAYGAGFGRHGDRGYPDLQQAPMAAPRVEKLSAAAEKARAKSNGLTKEASVPKDANGNAISAQTFTFRELATATRNFRPECFLGEGGFGRVYKGRLESTGQVVAIKQLNRDGLQGNREFLVEVLMLSLLHHQNLVNLIGYCADGDQRLLVYEYMPSGSLEDHLHDIPLDKEALDWNTRMKIAAGAAKGLEYLHDKANPPVIYRDFKSSNILLDESFHPKLSDFGLAKLGPVGDKSHVSTRVMGTYGYCAPEYAMTGQLTVKSDVYSFGVVLLELITGRRAIDSTRPHGEQNLVSWARPLFNDRRKLPKMADPRLEGRYPMRGLYQALAVASMCTQSEAASRPLIADVVTALSYLASQPYDPSTAFASRRLGGSKPGEXAAGVVSRNDETGTSRSPGKDREDSPRDLPAILLNKDLERERMVAEAKMWGDRXAWWQRPRCGATGSAWWPRPRCGARIGATSGALRMGRAAWTRRLLGTARGLGRAFHTFHPCLSVVYFQVDFRCRGGDGQGQGQGQGGLDVHF

SEQ ID NO: 352267 - protein, 78 aa, Zea mays
  unsure (1)..(78): unsure at all Xaa locations
  Clone ID: MRT4577_84437C.1.pep
VSSEFGSRKNVPSAMIHPWRPSATGXVLTGADRYPNHPEQLIVHTEDAENNFARGHYTVGREVLHLCXLDRGRKLADN

SEQ ID NO: 352268 - protein, 71 aa, Zea mays
  Clone ID: MRT4577_84438C.1.pep
TTPVPIRRGNHAKVCPLLVNIKSKNMLSLFRMFYGPHFFSVKKQRGVISISFLYHSQLIIYNTQFEITPLG

SEQ ID NO: 352269 - protein, 39 aa, Zea mays
  Clone ID: MRT4577_84439C.1.pep
GLVGGYRSEQQNQATAFYQSSVAGVMQILKDCPTTKNVQ

SEQ ID NO: 352270 - protein, 83 aa, Zea mays
  Clone ID: MRT4577_8443C.1.pep
GDKVLNERKVYKHCYVVLSRRMDALAVISLLWCPGCLLCVDPRALARSDLAVMSTAVLTSSRGSGPWLCGERGRGGGGWRWGG

SEQ ID NO: 352271 - protein, 204 aa, Zea mays
  unsure (1)..(204): unsure at all Xaa locations
  Clone ID: MRT4577_84440C.1.pep
ISQTAIFPDPPPPSPTXAPPFSRNPASLPGVLAPPRTSPAPRAPPSLPPXPVSXPPQLPPPRAPARMDPAGPDRSGPGVPFAGAVSPPLTAMPLPPPIPHHTLPRAXPSASCASPRXPAPREPRCSAASSXAPSGTDPVLPHDRCWSPAPNAVEPASPPKNLMAEGPCSSMPWPPYPXPPGNPXPPCHRRPPYGAPSSTGVRPP

SEQ ID NO: 352272 - protein, 224 aa, Zea mays
  unsure (1)..(224): unsure at all Xaa locations
  Clone ID: MRT4577_84441C.1.pep
SLSAIAXXKPSFYGRILPVLLSLDPASSIIKLRVPGAFHALKSAFSACLKCTHSSAEPWRARLLEAQNIINQGGSIEDAANAAKNFGDTSNREESWPLMERSTDGSNKRSLAEDMNHVTEDDVHSTKRARQSIDANEHSEEANKTNFESMSVDISSSQPSSIRTGNSEAVYQLIGMFAALAAQGDRAAGSLHILSYSIASDLLAVVVMVNMQHLPIFCSEVVQQ

SEQ ID NO: 352273 - protein, 79 aa, Zea mays
  unsure (1)..(79): unsure at all Xaa locations
  Clone ID: MRT4577_84442C.1.pep
TRLLHVXQTNLLXKGQXEXGLQPXGAWTMPWRQHPLGRRRLLMEIRARRGPLFQNPPLKACNLNLKEATGSVSFQRSSD

SEQ ID NO: 352274 - protein, 93 aa, Zea mays
  Clone ID: MRT4577_84443C.1.pep
PAKAGRGRAPARYLLAALGKELPLLPHQPCICSLAIHPSTSKLRCSKWACRNHGSSLYHATKHTSFVHLPDANNAWAKPQDNTHLLAPDARCS

SEQ ID NO: 352275 - protein, 71 aa, Zea mays
  Clone ID: MRT4577_84444C.1.pep
HAIACDSLLLTIKQVSFYHLKKKKKKKKKKKKKKKKKKKKKKKKKKKKKKKKKKKKGFAKKKKFAPGPNPP

SEQ ID NO: 352276 - protein, 77 aa, Zea mays
  Clone ID: MRT4577_84445C.1.pep
MEEVDEEEEEEDELLVEDMEMAGEDELLFLSTDADADAGAPTSSLFDVVGEPFLSPPWVTAASSAGEPATGAAGAGS

SEQ ID NO: 352277 - protein, 107 aa, Zea mays
  Clone ID: MRT4577_84446C.1.pep
EPLCGPRPCPSSRRPELYPLPDPPLCRRDRLRYNLARAARAGSARQVLALSHLGLKDLVLTEMPAVCPALRRKQGRRRDHRGRGCTPRTASSGNAAGVTATLASSRR

SEQ ID NO: 352278 - protein, 48 aa, Zea mays
  Clone ID: MRT4577_84447C.1.pep
ARSKSAREPSIFSFLTGADRIASYIRILFSDPVYVKAVTRAHSHTLVN

SEQ ID NO: 352279 - protein, 147 aa, Zea mays
  Clone ID: MRT4577_84448C.1.pep
NTIGRYTGYSTLQSGSRHLRSTKAGGRPRAKELDPVRADVSATSWSTEQLMKMERQVDKSIVLLHCCLGTQIGHNRVAASRCSGCGRMLRGETEAPPFVVVAGSGSAPCRRYGLVASWEPEREEGPVCRACREPFVQTAEAILAEEN

SEQ ID NO: 352280 - protein, 39 aa, Zea mays
  Clone ID: MRT4577_84449C.1.pep
KENTANLYYSIYVCSTMGIMSILYSRCVLIYITPYMFVA

SEQ ID NO: 352281 - protein, 293 aa, Zea mays
  Clone ID: MRT4577_8444C.1.pep
ILFLDENDEELFSMFLDVDKLNSSCGASSEAEAESSSAAGGGGEGAELADAPRPRHQHSQSMDGSMSIKAEQLVGAPGMEGMSSAEAKKAVSAAKLAELALVDPKRAKRIWANRQSAARSKERKMQYIGELELKVQTLQTEATTLSAQLALLQRDTTGLTTENSELKIRLQTMEQQVHLQDALNDTLKTEVQRLKVATGQVGNGGGGMMLNFGAMPRLVGGNQQMFHSSQAMQSVLATHQLQQLQLHSQPQQQQLHSLQLQQVARDLKMKGHLGGQGQWGDGKSGSGSRSSGS

SEQ ID NO: 352282 - protein, 62 aa, Zea mays
  Clone ID: MRT4577_84450C.1.pep
IPIIGFPMRIEKEGNFVTLFNVLVHVPSSVMACRKTTCLYVFKTYLFPLPLKKPPKKKKKKK

SEQ ID NO: 352283 - protein, 83 aa, Zea mays
  Clone ID: MRT4577_84451C.1.pep
VGPFCFYKTNLACFFVPVGPPPESFFCSSDCKWSVGIEEKLWERSFRSYSFFKLRFFLCLKKKKKKKKKKKKKKKKGIKKTRR

SEQ ID NO: 352284 - protein, 88 aa, Zea mays
  unsure (1)..(88): unsure at all Xaa locations
  Clone ID: MRT4577_84452C.1.pep
EMNRKLEVYDKQMKAARMSGSKGAHDKVNGQALSKAAKEAAKNKGKGKSAAYDDDYQKHVAVPQNWRDYXFSSHFPYPINLTXPPLLH

SEQ ID NO: 352285 - protein, 271 aa, Zea mays
  Clone ID: MRT4577_84453C.1.pep
MAQKLAPPTAAVVVVLLALALSAAAQNCGCASGLCCSRFGYCGTGEDYCGAGCQSGPCDVPETNNASVASIVTPAFFDALLAQAAASCEANGFYTRDAFLAAAGYYPAFGRTGTVDDSKREIAAFFGNANHETIKFCYINEIDGPSKNYCDRNNTQWPCQAGKGYYGRGPLQISWNFNYGPAGQSIGFDGLGDPDAVARSAVLAFRSALWYWMNNVHGAIVSGQGFGATIRAINGALECDGKNPNSVNNRVAYYKQFCQDFGVDPGNNLTC

SEQ ID NO: 352286 - protein, 105 aa, Zea mays
  Clone ID: MRT4577_84454C.1.pep
MNKDPDPSLLSASQASSLQVTCRPGVLDYRLTQKYFIDISTAVPLLYIRYKRIYMGMQCVLFHIDRRLHASQILATTESSVATSSKSRRPAGERSLDEDASGRRT

SEQ ID NO: 352287 - protein, 293 aa, Zea mays
  unsure (1)..(293): unsure at all Xaa locations
  Clone ID: MRT4577_84455C.1.pep
MAQKLAPPTAAVVVVLLALALSAAAQNCGCASGLCCSRFGYCGTGEDYCGAGCQSGPCDVPETNNASVASIVTPAFFDALLAQAAASCEANGFYTRDAFLAAAGYYPAFGRTGTVDDSKREIAAFFGNANHETXVRANKPKLVQALAATNQVSTARXFCYINEIDGPSKNYCDRNNTQWPCQAGKGYYGRGPLQISWNFNYGPAGQSIGFDGLGDPDAVARSAVLAFRSALWYWMNNVHGAIVSGQGFGATIRAINGALECDGKNPNSVNNRVAYYKQFCQDFGVDPGNNLTC

SEQ ID NO: 352288 - protein, 114 aa, Zea mays
  Clone ID: MRT4577_84456C.1.pep
TKKSKKKIKKKKEKKKKKKKTNKKEDTSNVGRIHMGLQVPVRASAAGRVHHDVSWLHLQGHLLSGQLLVHRGGGQSFPPCVKHPLRHESSSQRGQLALPFQHFVPAGGVRGPAA

SEQ ID NO: 352289 - protein, 85 aa, Zea mays
  Clone ID: MRT4577_84457C.1.pep
TAQQDCLSTLRGLCKQALEAVLPHPSPYANGDGVDKSTIVSGGRKFVSFGDMSLPEWSSFLKRFQQLLRSALKDHQCAVLGTSTS

SEQ ID NO: 352290 - protein, 349 aa, Zea mays
  Clone ID: MRT4577_84458C.1.pep
MGEEDASAGGDPQRLKRIAAAAYDYENDARWAGYWSNVLVPPHLASRPDVVDHFKRKFYQRYIDPGLVVEPMSSMTSTQSSRPAAKSSATPSSENVRARDSGSSTRSTGTSQHPPAERTANSLQLDGRTINFSINAWVLVVASLGILPVLPNHISSKAYRLSLLGTICSSAYSLYGTYGKPRAWNMPAIQSWLQSIIVAKDFVHLMFSLMMFTSNVHFKIALLPVLCWALDHVARFLRRNFTHSSLYRKYLEDPCLWVETNNTTLSLLCSNAEITLGFLMIISLFSSRRNIIQTFMYFHLLKLMYHSPVTSGYHQSVWARIGRAVNPYIYRYAPFLNTPISAVQRWWLR

SEQ ID NO: 352291 - protein, 218 aa, Zea mays
  unsure (1)..(218): unsure at all Xaa locations
  Clone ID: MRT4577_84459C.1.pep
MPPLAFLRRSLPARLLARACGGGGGVRGSPGVARDEEAGGSGGXERPVGGGAVRRECYACTQPGVPAFHSTACDQVHSPDWDADAGSSLVPVQAQQQAQPAAAAAAQHAARWLFGPVLDPRSKRVQRWNRWILLGRAAALALDPLFFYALSIGRAGRPCLYLDAGLAAAVTALRTCADVAHLAHVLLQFXLAYVSRESLVXXCGXLVWDARALXXPFA

SEQ ID NO: 352292 - protein, 53 aa, Zea mays
  Clone ID: MRT4577_8445C.1.pep
VWQWVLRPLIAITRTGVSNVYGFTTVKSQLSRLESPIIIRPLAPYTVGFIQHS

SEQ ID NO: 352293 - protein, 100 aa, Zea mays
  Clone ID: MRT4577_84460C.1.pep
FLVRPLPRANPPAVRFPLLSSPSCRPARQSPPSLSYFQLQMSLGSSRWVPLPLPSPEPLTLLGIGRPACFNLSTSLSTSGSLSEEEPAAGASTASREPKL

SEQ ID NO: 352294 - protein, 173 aa, Zea mays
  Clone ID: MRT4577_84461C.1.pep
MAENVMAAYWDLPAISRNLITALVLTSVTCKLNIVSVYSVLYHPTYLWMFPPQIWRLVTCFFVELNPINLLMNSFFLYRYCTQLEMGNARFPRKVDLVFYILFVCSVILMIDYVTGLNSMLYLNGIILAMAYTVTQDQRGQKTQFLVLYIPAQTLPLCMIVVTALMAGPSAAL

SEQ ID NO: 352295 - protein, 62 aa, Zea mays
  Clone ID: MRT4577_84462C.1.pep
IRFKPPFPRVRAKQERAQPPTASWSVLHAMARKETNGSNGDHISTRPTPTPPTVRFSKSRSG

SEQ ID NO: 352296 - protein, 58 aa, Zea mays
  unsure (1)..(58): unsure at all Xaa locations
  Clone ID: MRT4577_84463C.1.pep
LGIILARLMKGITMGWVVSTFKLSPRVGLDKMXPTDKPGRFINQIAKHATIVCRPLRS

SEQ ID NO: 352297 - protein, 69 aa, Zea mays
  Clone ID: MRT4577_84464C.1.pep
RSSFYIHIFFHAIFTRNNKQINKNVFLSTYYHRLYLIYILHDRKPTPIRVGWLFCPCLGWGRDNSQLCC

SEQ ID NO: 352298 - protein, 56 aa, Zea mays
  Clone ID: MRT4577_84465C.1.pep
KMDRVSMNSSGIDGMLLNNVLVHVVVVSRKSIYDRYPLARNGGDGLNRPDYELEHE

SEQ ID NO: 352299 - protein, 863 aa, Zea mays
  unsure (1)..(863): unsure at all Xaa locations
  Clone ID: MRT4577_84466C.1.pep
PRVRRGPAEARAPRARSSAGRPRAXPGAVLVRAALTVRRKHKEDLKEALAGHLDALWDMVGRSVALELISTKLHPRTKKPLQSGQASIKDWCQKRGVKGEHVVYTAEFMVDSDFGEPGAITVANRHHREFFLERSTSKGGLPCGPVHFACNSWVQSTRELPGKRVFFSNKPYLPSETPPGLRELRDKELKDLRGDGTGVRKLSDRIYDYATYNDLGNPDRAKEFIRPILGGDNIPYPRRCRTGRPPTDTNMLAESRVEKPHRIYVPRDEAFEELKQGAFSSGRLRAVLHTLIPSMIATISAETHIFKLLKPHMRLYKEGLRLKLGLQEHLFQKIPLVQKIQESSEGMLRYASRKLWRLDQEAWLRDDEFARQTVAGINPVSITRLTVFPPVSKMDPAIYGPPESSIAEAHITGQLNGLTVQQAVDEAKLFILDYHDVYLPFLDRIDAIEGRKAYATRTILFLTKAGTLKPIAIELSLPPSKAGEPRPSKVLTPPADATSNWLWMLAKAHVSSNDAGVHQLVNHWLRTHAVMEPFILAAHRRMSAMHPVFKLLHPHMRYTLEINALARQSLISADGVIESCFTPGPVSFEISAAYYRDHWRFDLEGLPSDLVRRRVAVEDASQPHGIRLLIEDYPYANDGLLLWSAIRSWVESYVQLYYPDAGTVQSDDELQGWYQETVHVGHADIRDAPWWPRLSTPADLASLLTTLLWLTSAQHAALNFGQYPLGGYIPNRPPLMRRLVPAEGDPEYAHLVADPHRFFLSALPSLTQTTTFMTVMDTLSTHSADEQYLGERPDEAWTADAAAXAAHDMFTADVRRAEEAIDSRNADQRRKNRCGAGVLPYELLAPSSPPGVTCRGVPNSISI

SEQ ID NO: 352300 - protein, 78 aa, Zea mays
  unsure (1)..(78): unsure at all Xaa locations
  Clone ID: MRT4577_84467C.1.pep
GGGEAAAIKEEDARGALRLKLVAVASILASAAAEVLVPLLGRSXPXALRPDGDVFLDVKAFDEKVILATGMVHILTAA

SEQ ID NO: 352301 - protein, 481 aa, Zea mays
  Clone ID: MRT4577_84468C.1.pep
KQVFPPVSKMDPAIYGPPESSITEAHITGQLNGLTVQQAVDEAKLFILDYHDVYLPFLDRINAIEGRKAYATRTILFLTKAGTLKPIAIELSLPPSKAGEPRPSKVLTPPADATSNWLWMLAKAHVSSNDAGVHQLVNHWLRTHAVMEPFILAAHRRMSAMHPVFKLLHPHMRYTLEINALARQSLISADGVIESCFTPGPVSFEISAAYYRDHWRFDLEGLPSDLVRRRVAVEDASQPHGIRLLIEDYPYANDGLLLWSAIRSWVESYVQLYYPDAGTVQSDDELQGWYHETVHVGHADIRHATWWPSLSTPGDLASILTTLIWLASAQHAALNFGQYPLGGYVPNRPPLMRRLLPDPERDAAEYATFMADPHRFFLNAMPGVLEATKFMAVVDTLSTHSPDEEYLGEERDEPWTGDAAAVAAHDMFTADVRRAEEAIDSRNADQLRKNRCGAGVLPYELLAPSSPPGVTCRGVPNSISI

SEQ ID NO: 352302 - protein, 59 aa, Zea mays
  unsure (1)..(59): unsure at all Xaa locations
  Clone ID: MRT4577_84469C.1.pep
PLCIISNSPSVVGGFFPLAPKFSLLFPKGAFVPWFVGXGFLKKLFFLGPXDLAALQKDF

SEQ ID NO: 352303 - protein, 86 aa, Zea mays
  Clone ID: MRT4577_8446C.1.pep
GYVLVKQEDIVDGIACFMAAYLLSLKQTKDLTPNQLQQALSKTFSAKKRKSKLQKAWDGTKVVYNIASWSATAIGIYQNPAIVQVR

SEQ ID NO: 352304 - protein, 66 aa, Zea mays
  Clone ID: MRT4577_84470C.1.pep
THASDGSRGQVHVLSKRLTHPLGRDPMIGDNSTDLTPLVPATHYSHIGPIKFQGKALNLPSRRLAT

SEQ ID NO: 352305 - protein, 105 aa, Zea mays
  Clone ID: MRT4577_84471C.1.pep
INQSEVHESQGEATHEVWAEHEQNDDVDVLDKVRRAPRGSIHCACHYPSGGVLLPPAWLTRASTTQKSICLATRSALTHHCNAVGSWARPLGIPGPATCRRDQLS

SEQ ID NO: 352306 - protein, 118 aa, Zea mays
  unsure (1)..(118): unsure at all Xaa locations
  Clone ID: MRT4577_84472C.1.pep
LLPKEFLAVXGPGXXRSXSXPPXXXARPPSXSWPWPPXXFXXXFPXPTPPSPLXPTPXXPPPPPPPLPLPXPPPPPLPPPGPXPPLPPPPLXAPPPPLPLXXSPXPPPPXPPPPSSPP

SEQ ID NO: 352307 - protein, 138 aa, Zea mays
  Clone ID: MRT4577_84473C.1.pep
VRAPPARPTAVSLASSRLASLRLRFLRTPPQPRQAVNQPNPRRLSPPSPILRRSPILAARRPKPHASPSTPGISRGITLSFFPSASKSKSKDRSAAKVAKEQPKGSAKPLGNGTLASSYNNPFGKVHGLEPSTSLVGS

SEQ ID NO: 352308 - protein, 166 aa, Zea mays
  unsure (1)..(166): unsure at all Xaa locations
  Clone ID: MRT4577_84474C.1.pep
NHETTHSRAKASWYVSCRGHARATGVHGAIVDQYXQPXLAAFKHCGGCMXHGTGTTGGMGQLGEHGGAGMGGGQFQPAREEHKTGGILHRSGSSSSSSXEDDCMGGRRKKGIKEKIKEKLSVSHKDDQYATXTTGGAYGQYGHTXSAXYGQXGHTGGAYATGTEGT

SEQ ID NO: 352309 - protein, 113 aa, Zea mays
  unsure (1)..(113): unsure at all Xaa locations
  Clone ID: MRT4577_84475C.1.pep
HAGFINKTAIISASGMIHRADKGIGAVLEDFPLLQTKVTLASYXVLAPLNNFYXRMADANYSACDQSVIIVTTHRRNFPHYLIDDKIYFSSGHSKILYPHKKKLALLFDNPRI

SEQ ID NO: 352310 - protein, 70 aa, Zea mays
  Clone ID: MRT4577_84476C.1.pep
RGKIPPFPFLNSKFQTLAGFSRNPGPFLHGKLGGAREKWFKWGWGFFCKIPMVFNPPGNKIPCFFRFVWA

SEQ ID NO: 352311 - protein, 59 aa, Zea mays
  Clone ID: MRT4577_84477C.1.pep
QPHRTLPAFLSSLAASAGSRIILPGLVNHMNPAQTMHVYIIYLTHSCTTYLSHLIVILT

SEQ ID NO: 352312 - protein, 100 aa, Zea mays
  unsure (1)..(100): unsure at all Xaa locations
  Clone ID: MRT4577_84478C.1.pep
GPPLFFHPRKISPEQRGPGGTPFCSPRGSKSQFFPPWSKKCLYRVFRKRPFPPAFLYRPQNYGELTGVFRALFGPSQKKKKKKKKKKKKTKKKKKKKKKX

SEQ ID NO: 352313 - protein, 92 aa, Zea mays
  Clone ID: MRT4577_84479C.1.pep
THFRPFLTQNLKFSKFPILPNPLKNTNLPFQTTPIFHFFKQTNTKTAIHINRYIRFIRARSNTGSLSETLPISHAPTCSRNLLQPSNGTKLL

SEQ ID NO: 352314 - protein, 158 aa, Zea mays
  unsure (1)..(158): unsure at all Xaa locations
  Clone ID: MRT4577_8447C.1.pep
PTVDSYTLTTSTLVGFDFFLPVKPVRHPVRLGTRHTSTSPRQGDETPRSTNRICLDTNFRHPRTGSSLYSTPSHINAGVTVPAHQQTLDFTAAPPRPSVGRGRLRQPRLRGSQHSRRLKWRNRGTGRYFRRPRPLPQRKSSYXGFRSRRLPRSWRXPS

SEQ ID NO: 352315 - protein, 131 aa, Zea mays
  unsure (1)..(131): unsure at all Xaa locations
  Clone ID: MRT4577_84480C.1.pep
DAWXKKKKKKKKKKKKKKKKKKKKKKKKKTLPTPFFPIPNTFILTFKGEAQPGPAKCDRPKVGGSGGIALVELFFRNLGAFLTMGEASPVAENTGTKILPHHQVEPKVPGLLLLVGLVKGLGQGCDFGGFC

SEQ ID NO: 352316 - protein, 52 aa, Zea mays
  Clone ID: MRT4577_84481C.1.pep
RFRELPGARRHVVSSHVVSGSSLFLFFFYKNVKSRCVMCNVKLFVGIGGIVY

SEQ ID NO: 352317 - protein, 141 aa, Zea mays
  Clone ID: MRT4577_84482C.1.pep
MATATLLGSSFAMPAAARRASSSASTSLGFATSQLAGLSLSAGAATPTAVAFLPKRQQLQPIVARRVCPFTGKKTNRANKVSFSNHKTKKQQFVNLQYKKLWWEAGKRFVKLRLSTKALKTIEKHGLDAVARKAGIDLNKK

SEQ ID NO: 352318 - protein, 83 aa, Zea mays
  Clone ID: MRT4577_84483C.1.pep
RKWVLSGRSQANISSDRTVSICSSQSMSFAESMNGILFRAEFVYIRYLVTQGMNQAICVCERCMGFNQLPVLALLAGYRTYYL

SEQ ID NO: 352319 - protein, 84 aa, Zea mays
  Clone ID: MRT4577_84484C.1.pep
RDDGVCSGRVCPFTGKKTNRANKVSFSNHKTKKQQFVNLQYKKLWWEAGKRFVKLRLSTKALKTIEKHGLDAVARKAGIDLNKK

SEQ ID NO: 352320 - protein, 143 aa, Zea mays
  unsure (1)..(143): unsure at all Xaa locations
  Clone ID: MRT4577_84485C.1.pep
GPTFTSDNSTGRNNYCGGFRGNCVVTSLGLRGYLRIGGVARHTLVPLFPLIVGKVIVTRDSRPSTARNGITGSNYGISHGGLRGGLHVGSSIGGPDGLTLLITYXLDPSVSPFVVNISIRMPGCFLNSFATTRSLLPWHNGLV

SEQ ID NO: 352321 - protein, 66 aa, Zea mays
  Clone ID: MRT4577_84486C.1.pep
PPHFFFFFFFFFFFFFFFFFSIMQRFYSDSQSRPKQRWPRRITSISMFQTLKRNRLGEYAVALTHP

SEQ ID NO: 352322 - protein, 44 aa, Zea mays
  Clone ID: MRT4577_84487C.1.pep
KLVSAATPVPSSALSVADFRLIAAGLAPLTPPPFRYAFASTNIP

SEQ ID NO: 352323 - protein, 78 aa, Zea mays
  Clone ID: MRT4577_84488C.1.pep
WRRLRALLRDVSSGVHGLGSKVVRWDSWIPLQVIMMVPYMRRNGTFVTTLLACMSPARMQVRLHALTVLRPGSCGALS

SEQ ID NO: 352324 - protein, 85 aa, Zea mays
  unsure (1)..(85): unsure at all Xaa locations
  Clone ID: MRT4577_84489C.1.pep
SYIVYQTPIECFTLIHTVDPEAILRNLTFFELMINQVKDIAQTMSNPKNQVAGGSSEXAAKQHVVTADLTSMIIQVISTAGSLLP

SEQ ID NO: 352325 - protein, 258 aa, Zea mays
  Clone ID: MRT4577_8448C.1.pep
MEPASSSALPSPPPAEARRTPPEELKLRRRTLETVLEQCQRALEMMHEDGLGTAAEGASFKEVEVEEEEEEEEGSGDSGGVERAPPPPPSEADYEADELCNLLKSRVQSPEFLEKLDTLQKSVYQHGAVDETVSWDIISAADIWDDKSMNVSDDSEDGYVLVKQEDIVDGIACFMAAYLLSLKQTKDLTPNQLQQALSKTFSAKKRKSKLQKAWDGTKVVYNIASWSATAIGIYQNPAIVQAATAAFWTSCRVISKFL

SEQ ID NO: 352326 - protein, 107 aa, Zea mays
  Clone ID: MRT4577_84490C.1.pep
VCVQISHIVKKYITVIYMSCQLFHTSNVTKYFYNKVTKYYYNKVYSSLRIFSAASFNNLSTTSLIIELARLITSSASFISRSARGLYGSGSGDSSASTSFCSAVSTC

SEQ ID NO: 352327 - protein, 80 aa, Zea mays
  Clone ID: MRT4577_84491C.1.pep
MATSSRRVPLLLLCLGVLLSCSFAGGGGDADLVSPWGDGRRQVLCTGRVLTLSLDRPSGSGVQDRCGSLPGPIGVRLLLV

SEQ ID NO: 352328 - protein, 89 aa, Zea mays
  Clone ID: MRT4577_84492C.1.pep
NQQLFNKSQPEKLVKLSTPASERTCQPTASPRQSVADVPPPPQERDGDEEDPLRRPRRHRRLGHRSAGLHRGRRRGRPNCLRVVRLGSR

SEQ ID NO: 352329 - protein, 83 aa, Zea mays
  Clone ID: MRT4577_84493C.1.pep
AFIFLLSHALAMSRARSRCRGERLDADQLEGQVHLVNGIDGEGQDLGEGPKQHDPVVGRVKVVHQARPLKGDPVGPVVDAREE

SEQ ID NO: 352330 - protein, 67 aa, Zea mays
  Clone ID: MRT4577_84494C.1.pep
SLYARCGGSAFSVGGLNGVHPSFCFLFFDASGERAGVRELIKVGEGIWCGAIKDNRKIRKRVKEVIK

SEQ ID NO: 352331 - protein, 146 aa, Zea mays
  unsure (1)..(146): unsure at all Xaa locations
  Clone ID: MRT4577_84495C.1.pep
GGPPLFFGKTLKANFLPRGPNPPPGRGRAPPGGXPQRGGGPPAPNGPEKRVKTGKKKKGGXPPLGREKPXRPGPGGHPGGAQXKNKPGGVKEPPPQXGPPPPGGEEXPGKPKNPPPTGTSQGAPPPPEKKKNAYGTYKKKKKPTLL

SEQ ID NO: 352332 - protein, 85 aa, Zea mays
  Clone ID: MRT4577_84496C.1.pep
QFPNRPTQTARSTSAVSSPLPPSPPPPINGLFSTSRRPLHLPLPPPIITPPPLRSTIPPTRAVIVFSIRLCTGSSIEAFYNWTSC

SEQ ID NO: 352333 - protein, 110 aa, Zea mays
  Clone ID: MRT4577_84497C.1.pep
TPAPPKKSLPIFIKIFISKRKPRGIWGNPLEFPHAGKVTTWRRGGLGGPGLAGDLSFERGPLRGLWGSLFAVYTHFVQFVNKKKCPPLLHVACLGGLNNIYTVLTTAGSF

SEQ ID NO: 352334 - protein, 148 aa, Zea mays
  Clone ID: MRT4577_84498C.1.pep
KLKVTRQTLSFQKRGNKLPPASRVRFIWLKKKRGGQTKQRGGFPPRGSPQMANKKKTREFPHKTLKTPGNKKKKPPEAKKGPPLNWLPRLFGGGKFGGPKRGKLWNQGIGKTPPKSPHGGVSKNFFAMGAPRGGPTPEKILGQLPSGS

SEQ ID NO: 352335 - protein, 181 aa, Zea mays
  Clone ID: MRT4577_84499C.1.pep
MAFIGDSLARNQMDSLLCLLSQAETPTDVYRDAFDKFRTWHFPAHDFTLMAMWTEFGARTPARVDAGGKPTASFDIHLDRLNANWTSRLPRLDYAVISGGNWFFRVNYLWEDGRRIGCVNCRLPGLADLGIAYAVRRVVRAALDAVARCRDCKDSLVTFVRTYTPDHFEHGSWFSGGYCNR

SEQ ID NO: 352336 - protein, 108 aa, Zea mays
  unsure (1)..(108): unsure at all Xaa locations
  Clone ID: MRT4577_8449C.1.pep
PTLRPQLPTPIYLAFKXLHRGRDARVHHDTRVSQCAANAYTTEARHGVLQHVDHILLKADQRGYAPDLHREHSSTRPDLQLTAAISNTCTRMPGTTYDTSTPTTQTPT

SEQ ID NO: 352337 - protein, 933 aa, Zea mays
  Clone ID: MRT4577_844C.1.pep
MEAGAPPRGWRCGVLWLVSVEIVLVLVCTRGAGADSGESKGSFLQDSEAGEKDVYLSHSCIHDEILHQRRRAGRKEYSVMPQVYHESREDAERVRGRHLLGMSSWRAPHENARKPIRIYLNYDAVGHSPDRDCKNVGDIVKLGEPPVSSAPGTPICDPHGDPPLVGDCWYNCTLEDIAGKDKRQRLRKALGQTVEWFRKALAVEPVKGNLRLSGYSACGQDGGVQLPHAYVEDGVANADLVLLVTTRPTTGNTLAWAVACERDQWGRAIAGHVNVAPRHLTAEAETLLSATLIHEVMHVLGFDPHAFTHFRDERKRRRGQVTAQSLDKKLGRMVTRVVLPRVVMHARHHYGAFSQNFTGLELEDGGGRGTSGSHWEKRLLMNEIMTGSVDTRSVVSRMTLALLEDSGWYQANYSMAEHLDWGQNQGTEFVISPCNSWKGAYHCNTTQLSGCTYNREAEGYCPIVNYSGDLPKWAQYFPQANKGGQSSLADYCTYYVAYSDGSCTDVNSARAPDRMLGEVRGSNSRCMASTLVRTGFVRGSMTQGNGCYQHRCTNNSLELLLRCSVDEEKNMGEKPVEAPFSGSWLLLVAVDGIWKSCPQSGGPVQFPGFNVPMIGQCPKSCSFNGDCIDGTCHCFPGFHGHDCSRRSCPDKCSNHGTCKANGICECQSGWTGIDCSTDYAGYTCQKGSAILPSLSMCHDVLVRDSDGQHCAPSELSILQQLETVVLVPNYNRLMPSGRTFLNFFNNANCAAAAKRLACWISIQRCDEDGDNRLRLVERVWIVQTRPFLAKGKKKRRVFRAQDMARRSLSGYNISEASSVMALDTGSKRPFHLGTRRWAALVYKLCWSGLFVRSRLAVATVAEGNRLGRKNRAKAGKTNGTSHDGRKRWCAHDVKRSRGRAIATARVGVGLVSDEYGEEAYAPMPSAENGMVQR

SEQ ID NO: 352338 - protein, 218 aa, Zea mays
  unsure (1)..(218): unsure at all Xaa locations
  Clone ID: MRT4577_84500C.1.pep
MATSTEPEGAPPAAKGPKGEANTKGSNEHGEVGAGSGGGSQKRKRKEVFIYGNYRNYYGYRIDRNVGEDPRLEAFKKQWFEXKDCLDIGCNQGLVTIGLAMKFKCQSILGVDIDSGLIETAKWNLRRIMRQDKVATNNVKAQKSSDSPQSSPEELASELSNGNKHQDLFKIVSFRRENFVASMDGCSEQYDTILCLSVTKWIHLNWGDDGLVTLYVKI

SEQ ID NO: 352339 - protein, 54 aa, Zea mays
  Clone ID: MRT4577_84501C.1.pep
GSIAGKHQDSRVPSRMRNLGPRKAKQFIPWFYHKNKSTGSVLGRHACFHYWHAL

SEQ ID NO: 352340 - protein, 83 aa, Zea mays
  unsure (1)..(83): unsure at all Xaa locations
  Clone ID: MRT4577_84502C.1.pep
WPLVGAPIRDTVTNLELYSTHDKIRIHDYVGDGYAILFVSPNKIQPVCITEMGAISGHPDEXEVRCEHLLQISCDVSRRSHIQ

SEQ ID NO: 352341 - protein, 232 aa, Zea mays
  Clone ID: MRT4577_84503C.1.pep
MTKSSQPLDFLEDSLIKECDPSHRCIIENKKFIACLKVSGEDSLALSLLMDNRGINPLDVSIMAPDYVTLAEDSIHVEANGHNETQVRVSVNDDANSTTIVIKVAEKSCNISIHSAITRETAGSGRVIRMPLTPTYTLLPVFLLLVAVAVCIVVRRWRNQDGDPAYQKLDMSDLPVSVGGKKEHDDRSDKWDDNWGDDWDDEEAPVTPSKPLPNPSSKGLAPRRSAKDGWKD

SEQ ID NO: 352342 - protein, 69 aa, Zea mays
  Clone ID: MRT4577_84504C.1.pep
GTHLTRPVQRPKAVNPISWHHNSPRRASLIMTYNYLYKKKTAKHAWTTMLVQNPNVRATTQSCLYKTKN

SEQ ID NO: 352343 - protein, 56 aa, Zea mays
  Clone ID: MRT4577_84505C.1.pep
GSTQRFSSVRPFNFETLPAFVRSDHEIAEASLVIPCLLLDMCLLVGATIYQLCYAV

SEQ ID NO: 352344 - protein, 68 aa, Zea mays
  Clone ID: MRT4577_84506C.1.pep
LQTSLLVFSPKTLLNSTNKIQLQSKGKPTGTPIPTTDQRGQHMRATLHSRITPLGGERRLFFTQSPFG

SEQ ID NO: 352345 - protein, 166 aa, Zea mays
  unsure (1)..(166): unsure at all Xaa locations
  Clone ID: MRT4577_84507C.1.pep
AAYTXRPTARDTANVCKTNPLMDLSRDQRSRLPIWKADSVEEGRFHDSIRGCTGVFHVGTPMDFLCKDPDNEVIKPTAERMISIMRACXEAGTVRSIVFTSSAGTVKLEERERPVYYXESWTDVNFCRGVKMTGWMYIKTKTMTENARLKYSADHGLNLGTIILTL

SEQ ID NO: 352346 - protein, 219 aa, Zea mays
  unsure (1)..(219): unsure at all Xaa locations
  Clone ID: MRT4577_84508C.1.pep
GREKKDTSYCCYHIHHTSFTMIGQSTRRWLQLSFLLMASTASAGSLKLTDFESIGDKSFPSTCVAAYDTPLSDCTPDDFTGGKACSAACKDSVQQIQGLIMASCGDVSADSESLLSRGQKGNLVAVLCRNADESQSQSEAQSQAKSESKSEPQSVSESETQAPATTTTGSASATKVHKNILIETSVSTTTTSKENLNXAPLVRCGRKPRHQEHCSWHRH

SEQ ID NO: 352347 - protein, 101 aa, Zea mays
  Clone ID: MRT4577_84509C.1.pep
LVATEPARSPACVLLRDDTHAHRTPEQRNLTSPHIAVGGAKSAPGALVYLYTSIRRVSKDTTTIHLSCCQGGGCLLGTYHKWLDTKGIVSDRFLGAQNQDC

SEQ ID NO: 352348 - protein, 57 aa, Zea mays
  Clone ID: MRT4577_8450C.1.pep
FTQQAFVSVSQKAPVNPDLFSNFMFFPVPGAIEVCAQLRAPVDISMTPDADFVGPKV

SEQ ID NO: 352349 - protein, 35 aa, Zea mays
  Clone ID: MRT4577_84510C.1.pep
EWAVVDFTEDGWNRDQLGTGIVIWKSKVYDLMVHV

SEQ ID NO: 352350 - protein, 51 aa, Zea mays
  Clone ID: MRT4577_84511C.1.pep
CVPRGGPNSHSGLPKMCKLGATPGVPIEVYGPEGSIPGICKRAFECLMAPA

SEQ ID NO: 352351 - protein, 78 aa, Zea mays
  Clone ID: MRT4577_84512C.1.pep
ICPYNGNRLTIKAGLNVLVKMNEVAIRALKRRDQPCQLNVLWNNGHTLSMDGEQVGVFTQATQVCNSPLVEGKLRIEN

SEQ ID NO: 352352 - protein, 43 aa, Zea mays
  Clone ID: MRT4577_84513C.1.pep
ERSSAGVEKKGFYLKALKIENVERRIDEKNYSGSRLGALSSRG

SEQ ID NO: 352353 - protein, 873 aa, Zea mays
  Clone ID: MRT4577_84514C.1.pep
SLTNPPPSWTGTDVCGGVSFSGVTCNGAARVTGINLAKLHLSGTLSSSLANLTALQSLQLQGNALEGDLPSLAQMGSLETLVLDGNAFSTLPPDFLEGLPSLLKLSMDDLPLEPWSIPDAIAGCAMLQTFSASNASVSGPFPAVLANLTSLQTLRLSYNNLTGVLPVGLEALGSLETLQLNSQRSNGMLSGPIDVVAKLPSLKTLWLQSNSFTGPIPEFDPNTQLETFNVRDNSLTGPVPPSLVGITSLQDVALSNNFLQGPKPKFAAKTVDIDSGNGFCHEDPGPCDPLVTTLLGVASGFGYPLQLKKWAGNNPCDPWPGLSCIKMDVTQIKLPRRNLSGLISPAFANLTRLQRLDLSNNRLTGVIPDALTTLKSLNYLDVSNNRLTGQVPEFKQHIKLMTAGNSFGESGGDSGGGGSNVRSSSSNPTGSHNSKSNAGMIVGILLVVILLVICVGLFLHHRRNKNVDKFSPISTKSPSGESEVMKIQVVGTNGHSNISGSVGSTELYSHSSADNTSIADLFESHGMQLPMSVLLKATNNFDEDYILGTGGFGVVFKGTLNDKLVAVKRCDSGTMGTKGLQEFMAEIDVLRKVRHRHLVALLGYCTHGNERLLVYEYMSGGTLRQHLCDLQQSGYTPLTWTQRMTIALDVARGIEYLHGLAQETFIHRDLKPSNILLDQDLRAKVSDFGLVKLAKDTDKSMMTRVAGTFGYLAPEYATTGKVTTKVDVYAYGVILMEMITGRKVLDDSLPDGETHLVTSFRKNMLDKEKFRKFLDPTLELSAESWNSLLEVADLARHCTAREPYQRPDMGHCVNRLSSLVDQWKPTNIVDDDDEEGGTSEMGLHQHLEIWRCDDFTISDSDSFSAHNTSRKYH

SEQ ID NO: 352354 - protein, 64 aa, Zea mays
  Clone ID: MRT4577_84515C.1.pep
QAEKHHRAFVCNPEPNVLAHRLIVIRLHCGVMGRGRLQHAAEGQPLLVAPAPVAVTWPPPSCRF

SEQ ID NO: 352355 - protein, 96 aa, Zea mays
  Clone ID: MRT4577_84516C.1.pep
NETTNMLVSIDTDWASFLLAGRGKDVLKWMGLVMYFRDLPMNELSFYRGGVGANHRMEGQAFSLASIYSDELPYIQDTDRKLNHPTKDGWMGVVYV

SEQ ID NO: 352356 - protein, 201 aa, Zea mays
  unsure (1)..(201): unsure at all Xaa locations
  Clone ID: MRT4577_84517C.1.pep
GHVYALRELGHCLQDGYGVRRXDPAEGRRLLVAANARELTLALSAATASRHAVTALPFAAAAAAGVVVGGGGGGGCPLLSDFGWSLPEAEPHAANQFMVDWWASRCAAQAGGKKRGDGSGVDGDGDGAELRLCSHVRCGRRETRRHEFRRCSVCGAANYCSRACQALDWKRAHKAQCVPMDRWLLAGVAVGGGVEAQHHQQ

SEQ ID NO: 352357 - protein, 87 aa, Zea mays
  unsure (1)..(87): unsure at all Xaa locations
  Clone ID: MRT4577_84518C.1.pep
KRVGTWAGTTYMPKGVMLTHQKVVTGVGQEVDGGNPDLYXNKDDEVLHVLPLVHIYYLKSVLQAGLLAGCCIVNVRTLRTGDLVESG

SEQ ID NO: 352358 - protein, 39 aa, Zea mays
  Clone ID: MRT4577_84519C.1.pep
TVPLYEMFLVKLIDPKNFHRYRCIVQYSYNYIHNNYYNF

SEQ ID NO: 352359 - protein, 77 aa, Zea mays
  Clone ID: MRT4577_8451C.1.pep
KTQLTNVETTIDRPPPLPAWASSQRSLARTHALGNLVGNRANQQTTRDGRWAAVLPNWPLPCVLTNYIVLIAPTAKR

SEQ ID NO: 352360 - protein, 132 aa, Zea mays
  Clone ID: MRT4577_84520C.1.pep
GLQAEAIKQKLQGDSAPVTDGDQPARLLITSDQVMVSKGVIRERPRSAEEAREFINGYSGDRAFAVNFVLVTDLSTGATRGGWDVPEIRFQHIPDEFIDQVVNQGDMTCVAGGLKLTHPSVQPFVKELVGTV

SEQ ID NO: 352361 - protein, 122 aa, Zea mays
  unsure (1)..(122): unsure at all Xaa locations
  Clone ID: MRT4577_84521C.1.pep
MAKITAAAAVLESRSLRGARAVRLLHKIHHRFLRLLGATAPKAGRRKVARSREPKSLRAADEKQEQDIEAQDPNAAAAVSASASASEAAXAGKYWAHRYSLFNLYDRGVRMDAEGWYSRTPE

SEQ ID NO: 352362 - protein, 82 aa, Zea mays
  Clone ID: MRT4577_84522C.1.pep
PKDCSVSINNHCIIRTETCKWSVRWEFWRPAKFLDIRPMSLDKHRQERLSDPQIGQFDLEREKYRKMSTISNFRIVNLRKFR

SEQ ID NO: 352363 - protein, 112 aa, Zea mays
  unsure (1)..(112): unsure at all Xaa locations
  Clone ID: MRT4577_84523C.1.pep
VCPIQTPTDDXVLPYDTGASPXEDLYETXKQLTNLAGIKLNAILGTTMDCTAPKXSVIEIHNELPFLDHIENQMESLIKKNGCNVPLLLMNSCNTLDDTHNIGDNHSNPNIQ

SEQ ID NO: 352364 - protein, 135 aa, Zea mays
  Clone ID: MRT4577_84524C.1.pep
CGFPDRLVLPMGHKAGVPYALFVMVTPYEASPDVHANTLYSCNGLMTAVDNRPLGFPFDRKIDNFGRFYTPNMYFKNVAIFHKDATDAHTYTQAIFNKNVNGFDHVYQTGPQYTPSHKVIDEDIYQQDDEVHSFM

SEQ ID NO: 352365 - protein, 83 aa, Zea mays
  Clone ID: MRT4577_84525C.1.pep
KRGERQSGFQKSRPEEKTRTPKGFNADPIGGDFPGVFFRGTWRQASVVPNSAWGPPRYPGLGLGERPILGWGLKQGGTHRCPP

SEQ ID NO: 352366 - protein, 66 aa, Zea mays
  Clone ID: MRT4577_84526C.1.pep
YKGIFSVHTASSRRFGPLNLFHLQQRTLNLVLYIYSNNRLYKLISLFSISHRNKILILFFMKNKRN

SEQ ID NO: 352367 - protein, 359 aa, Zea mays
  Clone ID: MRT4577_84527C.1.pep
MIRPHLPKDPAFPRTNGSLDGGARGLGEIEEVGAAATVAVEQSPSQSSSPSASSPAAAMSSCGQYMLHRVRKLDTLAGVAIKYGVEVADIKRLNGLSTDLQMFAHKTLRIPLPGRHPPSSYQQNGSYESDDRECTPRRIHDDILESILKTPNSKVSPAMSLLQGYYGLEPPPKRDQTSEGTEMAVHSKGKSAFLDVEPWLEPPNSDPFPLQNRKNRSLMIGSFLDGGTDENGDSERFIRRRQKADGELLPREENGGDFLASVGKGLALRPKSSNRPDMNKSQQNLFAMAEPLFGNGLQTVRKSSSTPEFQEPETNTSSSIWSASKWSINTDAFALPLPIPRFDNIPKPIAAWRNKPARD

SEQ ID NO: 352368 - protein, 97 aa, Zea mays
  Clone ID: MRT4577_84528C.1.pep
WNPLGANAIEADFRYSSCALSAGQGFITTTLPSHNMVSCCLRGSTVVSWAEAGGLRNGGGGVISDSPVVRTYCLITPHAGENLQLALFLVMPSMELG

SEQ ID NO: 352369 - protein, 86 aa, Zea mays
  Clone ID: MRT4577_84529C.1.pep
NISQPKPHWGRPPIWALIYKPPRPLIQAPSDSTSPLETPATLRQPHNPMAHPRSLVNTMNTYLSPAFPGADSPKNTLLPTMTTLAP

SEQ ID NO: 352370 - protein, 267 aa, Zea mays
  Clone ID: MRT4577_8452C.1.pep
MSEANTTQLDLEKGFSQVSNDNDSSSPATMHKMKVETEDGGSEIESPTPEKRESRSKGVVVSSLARNLLAERYRDRFSNQLVEDEGQTDDEDYNGSVSPSGSQSLFSESIELLDKHKDLLSLFNRMESSIRLLHLRKKMATFNNIATQVEILTKRKLLYSHLAQMKHLFPEAIQIKRILVHDEKSLCMYADMEITLVMDVVECTSPDQSPSMTICEAFYSKLLRFLDAHHKVPPKEQVDALLKELFALSPVPGILSPLLAPCVIVAQ

SEQ ID NO: 352371 - protein, 64 aa, Zea mays
  unsure (1)..(64): unsure at all Xaa locations
  Clone ID: MRT4577_84530C.1.pep
MASHKPLLLHNSSFLNCSLLLTADYAPMNLTNVNNCPKPLWLNILYDSXHDVLEGGGFFLPPLS

SEQ ID NO: 352372 - protein, 193 aa, Zea mays
  unsure (1)..(193): unsure at all Xaa locations
  Clone ID: MRT4577_84531C.1.pep
IDYPLPLFVASVYADWLPHVPSPWAIRPARCYRQIINNPYPKSRYCXRVVPDPWIRIYDSXMNSKEADELPYXVHLVSXERECLPRGALXAARIACCKYMSKSGXLDAFLLNSRCHPFRVLRIXYMLSCVGDDMLXTGMKXAVLRLTTAEIRXDIDQGLLSERXKDCNAVHGMQCLRSANVKFPVRHQIIVSG

SEQ ID NO: 352373 - protein, 138 aa, Zea mays
  unsure (1)..(138): unsure at all Xaa locations
  Clone ID: MRT4577_84532C.1.pep
LACGQGDVXYNHFLKALEKGWEKGIFICRDGVTSKRMGRKITRLAYFNGYNGGDPFVGLGMGPMFHSGPLIFHHATEXPXGRLVGGQPIPIDPIXTMGKTKXLPWKDGWPTAPVDGSWPAHLGHTILGTWAGAKILPK

SEQ ID NO: 352374 - protein, 60 aa, Zea mays
  Clone ID: MRT4577_84533C.1.pep
ADKPQVVYIPGRRDLVNHCVNPVEIQLITGSHESRLVPFQPVGTSTTWSRPALNLAEPRD

SEQ ID NO: 352375 - protein, 57 aa, Zea mays
  unsure (1)..(57): unsure at all Xaa locations
  Clone ID: MRT4577_84534C.1.pep
FENQGSSNEAAKILDGQDTRPYLDNSNRXKQGRGRSRAGTGRGRGSKTVDQPRLTLI

SEQ ID NO: 352376 - protein, 80 aa, Zea mays
  Clone ID: MRT4577_84535C.1.pep
DKLHTVDLSTPCPGQWHRPVRHPQGKELKTGRLTMFSMFAFFSKLRSPAKAPWRTSRSTSSSPSATIHARGHLRRRGEDA

SEQ ID NO: 352377 - protein, 78 aa, Zea mays
  Clone ID: MRT4577_84536C.1.pep
GPEYWARCSCKSTFGRLTTMTARSGSGRTSATPIISTTAEAEKLITMLPPPQASCIASIDSFLSSPSTKTIHFLSNLF

SEQ ID NO: 352378 - protein, 312 aa, Zea mays
  unsure (1)..(312): unsure at all Xaa locations
  Clone ID: MRT4577_84537C.1.pep
MLSTVKVSNVSLKAAQRDIKEFFSFSGDIVHVEMQSFDELSQVAYITFKDKQGAETAMLLTGATIVDMAVIVTPANDYELPSSVLAALEPKDTKPSALQKAEDIVGTMLAKGFILGRDALDKAKALDEKHQLTSTATARVSSFDKRIGLSEKISVGTSVVNDKVKEMDQKYQVSEKTKSALAAAEHSVSTAGSAIMKNRYVLTGAAWVTGAFSKVTSAANEAGAKAKEKIAVEQEHKNAEGGPAQANISETHEAHRGLDGGFSRLHDSEVGEDIPISTASVPXLLRMRSPARLLHQLVFLKSQKLRTNWYHN

SEQ ID NO: 352379 - protein, 49 aa, Zea mays
  Clone ID: MRT4577_84538C.1.pep
TSCPHGKEYDPKNNKCVMSAKQRILIFGIVIGLVCGIGSISFALGAIVL

SEQ ID NO: 352380 - protein, 68 aa, Zea mays
  Clone ID: MRT4577_84539C.1.pep
SSRVRSETATAMATVTRRLLTTLLKTLARGLSRGLSTEKAVGAGSHIGKHTPDTMQDTSKELPMELIN

SEQ ID NO: 352381 - protein, 79 aa, Zea mays
  Clone ID: MRT4577_8453C.1.pep
YKHHLIASSLQTQFGEGPGLLPPSQHLSLCPSSPRYGGGGLRTWSKCLHHQGLLHLGAHPAAACSAFLDTSRHIATTES

SEQ ID NO: 352382 - protein, 46 aa, Zea mays
  Clone ID: MRT4577_84540C.1.pep
GTLDPVEKALRDAKLDKSQIHDIVLVGGSTRIPKIQKLLQDFFNGK

SEQ ID NO: 352383 - protein, 87 aa, Zea mays
  Clone ID: MRT4577_84541C.1.pep
PTRANATPSYLSLALATVIFVSNMTRQPRGDRQRCRFGAFNTSIPGGDSPRERRRHGGAGTDGSPAGRCSDSPAHLTKQDHDRSMRL

SEQ ID NO: 352384 - protein, 292 aa, Zea mays
  Clone ID: MRT4577_84542C.1.pep
MASLMISLSSFVILSFFQGAAGGITFTFTNRCGGTVWPGLLANSGSSPLQTTGFELGPGETRSLTAPPGWSGRFWARTGCAFDAASGKGACATGDCGSGEVECRGRGATPPATLAEFTLGGGGKDYYDVSLVDGYNLPMVVEAAAPGCPVTGCLVDLNERCPVELRAGGQACRSACEAFGTPEYCCSGQFGNPDTCHPSPYSQMFKAACPRSYSYAYDDATSTFTCTGTDYSITFCPPRAGTSSSQKATKGPLPTPRDVQLEGDSWLASLATGETDAATSTAAASLLQAASA

SEQ ID NO: 352385 - protein, 99 aa, Zea mays
  Clone ID: MRT4577_84543C.1.pep
PTPACRSPRAPPEDPIANPSTGSQKKLAIDDDQNPRGFHARRISHEVRGDALGEEFKGYAFKIMGGCDPQGYPLKQGVLSSGRVRLLLHRGTPCFRRNG

SEQ ID NO: 352386 - protein, 30 aa, Zea mays
  Clone ID: MRT4577_84544C.1.pep
SMKKMHQYVLYPVNGVFWAFGSHDALKRYP

SEQ ID NO: 352387 - protein, 109 aa, Zea mays
  Clone ID: MRT4577_84545C.1.pep
KDRIQGHKSTKLKERGALKCLENRQEPEKRASEDCSVSRVGQLTLNNYSEGRIKRLMRLDQKREWSNRKLEEKQLMGNQAWQDSRKAVHQRLKQQMFLNSDERSLSLAN

SEQ ID NO: 352388 - protein, 96 aa, Zea mays
  unsure (1)..(96): unsure at all Xaa locations
  Clone ID: MRT4577_84546C.1.pep
MKRVIVLLGRLAMPDANANALQRPCACTGLQGLYGCGARVTKMMGSHWMYPYAAELRDTQRIPGAEGPYYPSCGQTNVMYHPLRYRAXTQQMRMMD

SEQ ID NO: 352389 - protein, 72 aa, Zea mays
  Clone ID: MRT4577_84547C.1.pep
QVINAKKKRLFKTIFYPLSYPKTWNNLFFPNHKTLPINPPFTKSTRSSIPQFLHRKNPIFSLKDYPHLPYPL

SEQ ID NO: 352390 - protein, 279 aa, Zea mays
  Clone ID: MRT4577_84548C.1.pep
MDLKDSLSKFKQQQERCQSSLASIAASTSKPKHRAQPAHAPNVPARPSQPIKFSNDTERLQHINSIRKSPVGAQIKLVIELLYKTRQAFTAEQINEATYVDIHGNKAVFDSLRNNPKVSYDGRRFSYKSKHDLKGKDQLLVLIRKFPEGLAVVEVKDAYSNVLEDLQALKAAGEVWLLSNMDSQEDIVYPNDPKAKIKVDDDLKQLFREIELPRDMVDIEKELQKNGFKPMTNTAKRRAAAQINGVKPKAKPKKKQREITKRTKLTNAHLPELFQNLNT

SEQ ID NO: 352391 - protein, 70 aa, Zea mays
  unsure (1)..(70): unsure at all Xaa locations
  Clone ID: MRT4577_84549C.1.pep
RSESESARAVNDECMLKFGELQSKMVHRFLTCRHXSKFREIVLDQVGDRATSYEDFTRSVSEIECRYAIY

SEQ ID NO: 352392 - protein, 135 aa, Zea mays
  unsure (1)..(135): unsure at all Xaa locations
  Clone ID: MRT4577_8454C.1.pep
MDDIEEPSGPSREETAKREQEEKERKAKEEAEQSQLPYKWTQTIGEAEVSIPVPGTIKGRDLDVVLTKTKIKVALKGQAPIIEGDFPHPIHADDSTWMLETIPTGKQVTVHLDKVXKMEWWPHIVTSAPKIDATK

SEQ ID NO: 352393 - protein, 93 aa, Zea mays
  Clone ID: MRT4577_84550C.1.pep
PGGVRHHQGDPGESHDPQRVRAVVAGATAMATHAAGTATPTGTGGTERRGPLGQVILFATAMFTLIQRVYLPSRRVCCCPYAHLIARAVYVRR

SEQ ID NO: 352394 - protein, 71 aa, Zea mays
  Clone ID: MRT4577_84551C.1.pep
VQENNTARLNNPVAKRGNKGAQRKLQTTQRPIALISQLHITVGATHGKPPDSCGTQARGVHTSGGYITGET

SEQ ID NO: 352395 - protein, 250 aa, Zea mays
  unsure (1)..(250): unsure at all Xaa locations
  Clone ID: MRT4577_84552C.1.pep
MVQPCLHALTVVCPIISTSTASQRYIHICHFRGGLQPTDLQQALAMAEHFVLCPVMAVLLLSMDVLGAAAGVFKPPPAMYVFGDSTLDVGNNNYLPGAGVPRANRPYYGVDFPGGLPTGRFSNGYNTADFIAKCIGFVSSPPPYLSLLGAXLRRRPSGSXALTIGVSYASGGAGILDSTNAGNTIPLSKQVQYFNATRSEMIAAAGSSDAVDALINRSFVLILVGGNDLSAFRGAGAGQVRRRPGEPRRG

SEQ ID NO: 352396 - protein, 98 aa, Zea mays
  Clone ID: MRT4577_84553C.1.pep
FLFFQLVPTLLWGRKGPSSLPALRRVVCQAVGGFQTKYAETGLGGIHGHRCFGPAPLFWMRKDPLGPATPVMAAGTSSFFPPQLPSKPFINKRLNTWC

SEQ ID NO: 352397 - protein, 107 aa, Zea mays
  Clone ID: MRT4577_84554C.1.pep
SSPQQQQQQRPVPCPASHRDSAGVRWSAPSSSRPRRRAGLSSLLVEVHLSDERVDVHDVRLRPAVSLVVLRRVLVVVDAHELLLARLERPCQRMVEVSGAVGRAVGA

SEQ ID NO: 352398 - protein, 54 aa, Zea mays
  unsure (1)..(54): unsure at all Xaa locations
  Clone ID: MRT4577_84555C.1.pep
TRKVQNPPLLIIELSQQLKFHVKPANIKKKIKSLIPQKYLEPTRSNPQIXNYLA

SEQ ID NO: 352399 - protein, 64 aa, Zea mays
  Clone ID: MRT4577_84556C.1.pep
WLAPTPLPEVAEFQPQIKELEGICTPIIPKMYQAPGPGMGNPPAMAKNPPSGGTGPGPKIEKVD

SEQ ID NO: 352400 - protein, 62 aa, Zea mays
  Clone ID: MRT4577_84557C.1.pep
LNVYPPPPLFCQPVCNSCFVENGAAFPNGGCIVIKGVLPVVFSYPPSSSPAVGGSNPVGVIR

SEQ ID NO: 352401 - protein, 50 aa, Zea mays
  Clone ID: MRT4577_84558C.1.pep
PICQHAAPNAATLLQMPHIDAIQPSCSDRPISVATNNPSLRVPSLRSLMS

SEQ ID NO: 352402 - protein, 731 aa, Zea mays
  Clone ID: MRT4577_84559C.1.pep
ICHKNHDISSSTGGMPHAALSKTQLKKSVNSNLLADEKWHLIGASVWVRLISVLEHRLREFFEKEGLEHEAGVSGSEFRGLITSVAAKFVMDSIHFVSSSLVPLHASFLRKNLPMNSSSSLLFWLESKLPQQLPVSDSYDHLSRISQLSNSENMEALFNILWEISVNPVDVCNAFVSEGVNCFSLSNTNVTRSWKDIRCPVVECDKIITERSGEEHEHRLGSKRLGQGFAEKASYNGEVLYETKRRELIIQKEFQSPREILRRSGELLEAVCLNSVNEKQAAIATNRKGLVFFNWSDKQHNKSFSEYVWSGSDWPLDGWAGCQSTPTPTSISPGVDLGRKKGSQLGSVGATTGLSSLAKPGRDLTGGGAFGIPGYAGIGASGFGWGEPEEFEDFIDPPATLENIHSRALSRHPSLPLFLVGSSNTHVYLWEFGKASAMATYGVLPAANIPPPYALASISSVQFDCYGQRFATAALDGTICTWQVEVGGRSNVYPTESSICFDSHASDVAYVSASRSVIASAGYSSNGSNVVIWDTLSPPATSQTSIMCHEGGARSISVFDSDRGYGSISPLVVTGGKNGDIALHDCRFLSTGKSKHHRVTTEHGVEASSMHDIKSSTFGGTDSGMVWHIPKAHLGSVTKVTTIPNTSLFLTGSKDGDVKLWDAKNSQLVFHWTKMHERHTFFQPTSRGFGGVVRAAVTDLQVLPNGFVSCGGDGSVKLVQIKDDLAAAYQR

SEQ ID NO: 352403 - protein, 562 aa, Zea mays
  Clone ID: MRT4577_8455C.1.pep
MSEVNNTQLDLEKGFSQVSHDNDSSSPVTVHKMKVETEGGSEIESPTPEKRESRSKGVVVSSLARNLLAERYKDRLANQLVEDESETDDEDYNESVSPSGSRSLFLESIELLEKHKDLLNLFNRMESSIRLLHLRKKMATFNNIATQVEILTKRKLLYSHLAQMKHLFPEAIQIKRILVHDEKSICMYADMEITLVMDVVECTSPDHSLSMTICEAFYSKLLRFLDAHHKGADIPEAILPEPFNSRPREKLYLEAVHNGHAAEPPLHGAVEEGFSNASHFPQSFQKFMSKKIIADGTEKTQLLSDPAELSSVSAYGTKGSNRNPKKQDEHAPVPVNSEISATPSRHLISCCQESTPKQQTSESPLLSGTPAMQTPKRPLLAPLEKPKATCGHISEPRSASSARRSLNTSLTYEGGSPSYYDGMEHTATAKKCMISEDLSSFNKSFEEDSHVFFTDKDKINEVESVDSQERIASLRTTFDIVYDISHSTKNPLITKQELFHNILANNLEIEEIGEIEEQLHILEDLAPDLISKKVINGGEILYSIEPITDKNSVRARLVVEPV

SEQ ID NO: 352404 - protein, 76 aa, Zea mays
  Clone ID: MRT4577_84560C.1.pep
IRTCLIPICKIPNVTICGGTPHASRLGLECMFVVHPLSIHKEITWLSVILKNTHFQGKGATYGNCTRSFTGKGGGL

SEQ ID NO: 352405 - protein, 110 aa, Zea mays
  Clone ID: MRT4577_84561C.1.pep
NRLFRVFQDFEGGPLWLLGVFFWGGLPLPVCFFPPGVCLSTGGVALNNGLGFRFFKPFNLFLIFYGPTYVWDLFCFICPQCLAVKKKKKKKKKKKKKKKKKKKKKKTPPP

SEQ ID NO: 352406 - protein, 473 aa, Zea mays
  unsure (1)..(473): unsure at all Xaa locations
  Clone ID: MRT4577_84562C.1.pep
PLHASFLRKNLPMNSSSSLLFWLESKLPQQLPVSDSYDHLSRISQLSNSENMEALFNILWEISVNPVDVCNAFVSEGVNCFSLSNTNVTRSWKDIRCPVVECDKIITERSGEEHEHRLGSKRLGQGFAEKASYNGEVLYETKRRELIIQKEFQSPREILRRSGELLEXQAVCLNSVNEKQAAIATNRKXAGQTSFQELSLTVRVVCLASHCVIWLCCYIVSTVYHLRAASLQGLVFFNWSDKQHNKSFSEYVWSGSDWPLDGWAGCQSTPTPTSISPGVDLGRKKGSQLGSVGATTGLSSLAKPGRDLTGGGAFGIPGYAGIGASGFGWGEPEEFEDFIDPPATLENIHSRALSRHPSLPLFLVGSSNTHVYLWEFGKASAMATYGVLPAANIPPPYALASISSVQFDCYGQRFATAALDGTICTWQVEFQWFITICEYETRELQCIPTCASFSALFCSRTQVALPFRIVTAP

SEQ ID NO: 352407 - protein, 247 aa, Zea mays
  Clone ID: MRT4577_84563C.1.pep
ATSEAWLSKHIDDSVGYSSNGSNVVIWDTLSPPATSQTSIMCHEGGARSISVFDSDRGYGSISPLVVTGGKNGDIALHDCRFLSTGKSKHHRVTTEHGVEASSMHDIKSSTFGGTDSGMVWHIPKAHLGSVTKVTTIPNTSLFLTGSKDGDVKLWDAKNSQLVFHWTKMHERHTFFQPTSRGFGGVVRVCSTVKTIKCLMTSFINFVHVRAAVTDLQVLPNGFVSCGGDGSVKLVQIKDDLAAAYQR

SEQ ID NO: 352408 - protein, 80 aa, Zea mays
  Clone ID: MRT4577_84564C.1.pep
KKKTPFLQKKGPTFFRFNLKKKPFTNSQSGKQSGIIINPPPFSLTKKYKLLFHSHPFFFFKQKLPFLKKNIWLSLAKFPH

SEQ ID NO: 352409 - protein, 79 aa, Zea mays
  unsure (1)..(79): unsure at all Xaa locations
  Clone ID: MRT4577_84565C.1.pep
NKHNIIVHRYLXYKIMTVAYNLIDPTYFLLTFNYXAPLYSLKTKKNHSVHNLDACHHMNYINDLIKRMNDVTRSTSLIV

SEQ ID NO: 352410 - protein, 94 aa, Zea mays
  Clone ID: MRT4577_84566C.1.pep
ETRLHRGVIWNQTPGHWRLFNTIVQSKELTFWHSYSTTSSGSFETSQPNRMGHFLKRIHPGSFNLEHDFGGLFVPSAGSIGHGQGTPTRGGRFA

SEQ ID NO: 352411 - protein, 94 aa, Zea mays
  Clone ID: MRT4577_84567C.1.pep
TVFFRKIAKQNQCGEMSRSPHAPIPFSHGKKTHSALSQKQSFFPHVGPPPSKGPNPPLVNKKQAPFHRGSLKEKNHNPFIKHNSGGGSPITKIA

SEQ ID NO: 352412 - protein, 522 aa, Zea mays
  Clone ID: MRT4577_84568C.1.pep
NIMIRGYCSLGQLEEAVRLLKKMSGSGLQPDVVTYSLLIQYYCKIGRCAEARSVFDSMVRKGQKPNSTIYHILLHGYATKGALIDVRDLLDLMIRDGIPFEHRAFNILICAYAKHGAVDKAMTAFTEMRQNGLRPDVVSYSTVIHILCKTGRVEDAVYHFNQMVSEGLSPNIISFTSLIHGLCSIGEWKKVEELAFEMINRGIHPDAIFMNTIMDNLCKEGRVVEAQDFFDMVIHIGVKPDVVSYNTLIDGYCFVGKMDESIKQLDRMVSIGLRPDSWTYNSLLNGYFKNGRVEDALALYREMFRKDVKFCAITSNIMLHGLFQAGRIVAARELYMKMVDRGTQLRIETYNTVLGGLCENSCVDEALRMFEDLRSKEFELDVRTFSIVINALLKVGRIDEAKSLFSAMVLRGPVPDVITYSLMIKSHIEEGLLEESDDLFLSMEKNGCAADSHMLNIIVRRLLEKGDVRRAGTYLTKIDEKNFSLEASTAALLIPIVSEKKYQKEVKFLPEKYHSFMQPRDD

SEQ ID NO: 352413 - protein, 114 aa, Zea mays
  unsure (1)..(114): unsure at all Xaa locations
  Clone ID: MRT4577_84569C.1.pep
RPPXXGXXPGRRHAXSANFSSXXNSLLLXFTXXQQLXYHSSPALAVCXSPACXXLDPQQPXXLLVTNLSRLLXLTXWHXXLQHATICCXIQPDVVFDKLNSCSTNQPIIGGALF

SEQ ID NO: 352414 - protein, 46 aa, Zea mays
  Clone ID: MRT4577_8456C.1.pep
ILDGSRYGRQHQPTWRPQTWKFFGETHQTGPFRESQYIRLIGRVPR

SEQ ID NO: 352415 - protein, 110 aa, Zea mays
  unsure (1)..(110): unsure at all Xaa locations
  Clone ID: MRT4577_84570C.1.pep
GSRLSRAKTEYMRCDFGTTTYEEGDVNLEGQVVPRKNTFQYLGSMIXRDGDIKDDSHRIKAXWRKRCQASGVLYDKMVPQKLKGKFYRMTIRSAMLYGAECWLTKDIIFS

SEQ ID NO: 352416 - protein, 212 aa, Zea mays
  unsure (1)..(212): unsure at all Xaa locations
  Clone ID: MRT4577_84571C.1.pep
GAPGQSSPKEEARRRPGDSSSDEEEEAIDENGDIIKRKKKKMGLKEXKLKEKLPGHKDGHHTAAPSPAPAPVETHAHHQEEAHRPHVVPTPAPPPPPHVHQHDHGVVVQDDVKTGTPPHAPEEEKKGLLDKIKEKLPGGHNKKPEAAAAAAPAPPVHAPAPAPQAENVSSPDGKEKKGLLGKIMDKIPGYHKSSAEEADHKADAAGEHRTSS

SEQ ID NO: 352417 - protein, 107 aa, Zea mays
  Clone ID: MRT4577_84572C.1.pep
VSRLCSGGLSAGRNISVVSGGGGGLLRLGRFGGQAAVRFEHPATTGELDDAQGCCSGSRRGSRTCQRRRRSHSRTGRRGETVIFVWIGYLKVVDVNGNKIQKLYFLV

SEQ ID NO: 352418 - protein, 252 aa, Zea mays
  unsure (1)..(252): unsure at all Xaa locations
  Clone ID: MRT4577_84573C.1.pep
MEDERNTQQHQGGEAQQDAADQVDVKDRGLLDSLLGRKKHDDDQEKKKQTDELATGMEKVTVSEPEKHGHKEEEHEVVGEKKEGLLAKLHRTSSSSSSSSDEEEEATRPRPWRRMPXQEEAHRPHVVPTPAPPPPPHVHQHDHGVVVQDDVKTGTPPHAPEEEKKGLLDKIKEKLPGGHNKKPEAAAAAAPAPPVHAPAPAPQAENVSSPDGKEKKGGLLGKIMDKIPGYHKSSAEEADHKADAAGEHRTSS

SEQ ID NO: 352419 - protein, 223 aa, Zea mays
  Clone ID: MRT4577_84574C.1.pep
MEDERNTQQHQGGEAQQDAAGQVEVKDRGLLDSLLGRKKHDDDQEKKKQTEELATGMEKVTVSEPEKHGHKEEEHEVVGEKKEGLFAKLHRTSSSSSSSSDEEEEAIDENGEIIKRKKKKVGLKEKIKEKLPGHKDGHHTAAPSPAPAPAPVETHAHHQEEAHHRPHVVPAPAPPPHVETHVHQHDHGVVVQKVEDDVKTETPPHAPGEQDHGLLTRLPQELS

SEQ ID NO: 352420 - protein, 73 aa, Zea mays
  Clone ID: MRT4577_84575C.1.pep
ISLSSIHLNQCVNSKKKKKKRKKKKKKRKKNKKKKKKKKKKKKKKKKRGGPPFFFFFFFFFFWGKALKSTWHF

SEQ ID NO: 352421 - protein, 308 aa, Zea mays
  unsure (1)..(308): unsure at all Xaa locations
  Clone ID: MRT4577_84577C.1.pep
MEDERNTQQHQGGEAQQDAADQVDVKDRGLLDSLLGRKKHDDDQEKKKQTDELATGMEKKDKKKKDKKKHGEGHDHDGGHSSSSSDSXEIWCRRCRCWLIMQHRCNTCXCWMEDSCPRVREEGAIDENREIIKRKKKKMGLKEKLKEKLPGHKDGHHTAAPSPAPAPVETHAHHQEEAHRPHVVPTPAPPPPPHVHQHDHGVVVQDDVKTGTPPHAPDEEKKGLLDKIKEKLPGGHNKKPEAAAAAAPAPXVHAPAPAPQAENVSSPDGKEKKGLLGKIMDKIPGYHKSSAEEADHKADAAGEHRTSS

SEQ ID NO: 352422 - protein, 118 aa, Zea mays
  Clone ID: MRT4577_84579C.1.pep
LVEMFSADMWQEYIWDTGKQISKRCDRKQACVRTENKKRVPLLNWSMILIIHSSTLQNSLVSNINLSVRTKTYLLFNFRLVLGATDDLYSPTVLQLHQLVFHSSFFFWYKYVFVLGKA

SEQ ID NO: 352423 - protein, 154 aa, Zea mays
  unsure (1)..(154): unsure at all Xaa locations
  Clone ID: MRT4577_8457C.1.pep
KFFMWLVAHPRLWTTDRLQKKGMGPLASCPLCXQEQETLGHLLIGGVFAPNFWFKLLFQVNFQSMAFQLVDAXFMGWSNWLANQKHGTAGETVNSLVISGAWTQWKXKHRKNCVFDKNKPXVGFSVRKADQKRKKWELVGAKKLSLLTSCIPGL

SEQ ID NO: 352424 - protein, 427 aa, Zea mays
  unsure (1)..(427): unsure at all Xaa locations
  Clone ID: MRT4577_84580C.1.pep
MHLDALLSGVYEMSWMEGRLQLVNSVLSSLPTYAMCTLQVPAAVLEYIDTARRHCLWRNSDSNAKFKPLVAWNKCTRPKKKGGLGVINLRSQNSYLRMKFLDKLYNRKQIPWVNLVWNTYYSDGKTPHASKFMGSFWWRDALKLCDLFRGISNCKVGDGKTVLFWHDLWNDNIRRNKFPRLFTFAKNQSISVASFLTQENLTDNFHLPLTEQANTELQQLPDEVQQIRESVIEPEEKDSWSYIWGNSTYSSTKLYHYTFKNVNPPKPFLWILESRCSNKLKVFAWLLLMDRLNTRNILKRKNFKVQGDNYSCALCQLQREETAFHLFFNCPFSQDCWRHLNIQXPPNXDFFATFQQARDLHGSPFFMEVFIIAAWQIWKQRNNFIFDRGRPSFIGXKKEFRAEALLQANRFSEEKSTLFSSLVNSYR

SEQ ID NO: 352425 - protein, 96 aa, Zea mays
  Clone ID: MRT4577_84581C.1.pep
SIPPLMVLSIVVHSYLQSASTVRYRVSMLMNSSSYVSLIWRSLAAWARSSLTLVLANFSVVCVVRFSEAQEGYAGRSLHIPGMLLRRLFFLSLRSS

SEQ ID NO: 352426 - protein, 86 aa, Zea mays
  unsure (1)..(86): unsure at all Xaa locations
  Clone ID: MRT4577_84582C.1.pep
RIQNHEYKMGLSMPLXKAKERASQLQTIVTLLERCMILASGXEGMERFFLKXCLHEQLEDSRQRLEPLNHCMAKRENQSFTDEMTK

SEQ ID NO: 352427 - protein, 225 aa, Zea mays
  Clone ID: MRT4577_84583C.1.pep
MDPSTEYISVIDTAKYPKGQFVSNKWLIERFQDVDLTERDKEFLSRQSSNPAYYHSKYLSQGELDITGRSWTMSLAELQQAELGTLYPDIDAISVNSYAGLIYLDLDAVNPYVNNMLGLWTKDHESLHEMWSDEHTTTKSELEDVTMIARTFFGGADELDISLIILAFRNRRLRTTVEWDSEKVGPIEVCRYENLRYQMSRLENPGTESVLDSLKRLFIMEEDLQ

SEQ ID NO: 352428 - protein, 49 aa, Zea mays
  Clone ID: MRT4577_84584C.1.pep
LVLALYVVPVLLPAATSTDRVVLSSISIYLFYSMMDSIETGELRFRPVY

SEQ ID NO: 352429 - protein, 34 aa, Zea mays
  Clone ID: MRT4577_84585C.1.pep
PRLTTPQSSATRRVPTLTDSVNVHYRGVATYAWT

SEQ ID NO: 352430 - protein, 130 aa, Zea mays
  Clone ID: MRT4577_84586C.1.pep
MRSQALFFLTIALLTVLARSSNRHHHHHHSHVQSRGQGAASGGGGGGGELASRAPAPARAWPCCDSCGGCTRSEPRLCRCLDAAPRGCHPACRDCVKSSLSADPPVYQCMDRVPDFCLRRCTAPAAAAAR

SEQ ID NO: 352431 - protein, 91 aa, Zea mays
  Clone ID: MRT4577_84587C.1.pep
LLSGDIGSLVDANLHGNVNLEEVERVCKVACWCIQDSEFDRPTMTEVVQFLEGVSELHMPPVPRLLDAITGGATNTKIYSMLSLEGSPTSV

SEQ ID NO: 352432 - protein, 126 aa, Zea mays
  Clone ID: MRT4577_84588C.1.pep
GAKRCSSSRSPFSPCSRDPATGTTTTTSHVQSRGQGAASGGGGGGELASRGKAAARAWPCCDSCGGCTRSEPRLCRCLDAAPRGCHPACRDCVKSSLSADPPVYQCMDRVPDFCLRRCTAPAAAAR

SEQ ID NO: 352433 - protein, 133 aa, Zea mays
  Clone ID: MRT4577_84589C.1.pep
MRSQALFFLTIALLTVLARSSNRHHHHHSHVQSRGQGAASGGGGGGGELASRGKAPAAAPARAWPCCDSCGGCTRSEPRRCRCLDAAPRGCHPACRDCVKSSLSADPPVYQCMDRVPDFCLRRCTAPAAAAAR

SEQ ID NO: 352434 - protein, 56 aa, Zea mays
  Clone ID: MRT4577_8458C.1.pep
VPKLIVFESNQPNNDLETMIPTIVLYREFMIIQIFIYIVHQIFLLKLKHTSLSRTD

SEQ ID NO: 352435 - protein, 136 aa, Zea mays
  Clone ID: MRT4577_84590C.1.pep
MRSQALFFLTIALLTVLARSSNRHHHHHHSHVQSRGHGAASGGGGGGGGGELASRGKAAAPAPARAWPCCDSCGGCTRSEPRRCRCLDAAPRGCHPACRDCVKSSLSADPPVYQCMDRVPDFCLRRCTAPAAAAAR

SEQ ID NO: 352436 - protein, 83 aa, Zea mays
  unsure (1)..(83): unsure at all Xaa locations
  Clone ID: MRT4577_84591C.1.pep
PSVSLSWPPGLCVSVLSFPVAFGAVPSVCAALPSVLLFLFLGPCVVAPALSSSLRLRCCFXPPSGVVVAPFASCFGVALFRFS

SEQ ID NO: 352437 - protein, 194 aa, Zea mays
  Clone ID: MRT4577_84592C.1.pep
MPPPAPSSRRRETEQPVAAGVGAPCPAIQHQKWNPSHPREVVDTRRRAAKEEELAVAESSRPPMSSGADGSDPITGLGPSTIPEPPDREPPHLQSPSPAAQQEVAASQAETPVPAVTIVISRPGEEVQTPDAMGGSPACSTQAGDGKATATSVSLTASAAAKEAELARSDSFGNYEQCRYSVGVGFPARKLRVF

SEQ ID NO: 352438 - protein, 96 aa, Zea mays
  unsure (1)..(96): unsure at all Xaa locations
  Clone ID: MRT4577_84593C.1.pep
GSISFFNTQNHRGGCPLCWWVAASTHEHHXSRMHNNPTISTTSRLANIYQHPDMITPAFHAQGQPIDPDTMQEHFQDFYDDIYEQLGNRRENENLN

SEQ ID NO: 352439 - protein, 87 aa, Zea mays
  unsure (1)..(87): unsure at all Xaa locations
  Clone ID: MRT4577_84594C.1.pep
IHSLSPSQPARSLNDAGLCSATTSLITQADTTLITPHSSPPTPSSKKTHFVALXDKDRIFTNLYYLHDPFLMGAMNRAYCYNTFFLV

SEQ ID NO: 352440 - protein, 104 aa, Zea mays
  unsure (1)..(104): unsure at all Xaa locations
  Clone ID: MRT4577_84595C.1.pep
ETRLLGXLSFIPSTVWKMLFGKVAYSLXKGTEPGGEFLVSEKGLFVYRFIFVPKNMGAFHCGAFFSGLVKGVFNNAGFSPVVSAPFLPIXGPQRPRTPILIKFF

SEQ ID NO: 352441 - protein, 89 aa, Zea mays
  Clone ID: MRT4577_84596C.1.pep
TILVLNIITTTKPYFWSIYLLALDKNMTHLFKKRNLPKLSCCCTIQNLGGFLNYEFQNVISRKCSLHACLKRTPYYSFKNLLRGLIRSF

SEQ ID NO: 352442 - protein, 121 aa, Zea mays
  Clone ID: MRT4577_84597C.1.pep
HAFAASNHGRSSLRPPPPVYKIPSFSFSIYRGHQIQEEVRAPRTFGSRSGSTFFRASFWLAFSSSDHLQGSRCILPIVPIKFSCLISTIIIQTDFYPFSEANAVVLWCSSRSIGHVNWRIQ

SEQ ID NO: 352443 - protein, 152 aa, Zea mays
  unsure (1)..(152): unsure at all Xaa locations
  Clone ID: MRT4577_84598C.1.pep
ARSAYKGLLTGSIPFGPHKRIWKSRPPPKCKFFLWLVAQERCWTADRLERKGLIHPXRCPLCDQEPETINHLLVSCVFXRVGWYNILRKFGIHSLSPIQSDTNYMLWWKRVSTIVSGLNRKGLDSLLILGAWMVWKLRNRVVFKNPTPTISL

SEQ ID NO: 352444 - protein, 253 aa, Zea mays
  Clone ID: MRT4577_84599C.1.pep
MGRKFFVGGNWKCNGTVEQVESIVNTLNAGQIASTDVVEVVVSPPYVFLPTVKGKLRPEIQVAAQNCWVKKGGAFTGEVSAEMLVNLGVPWVILGHSERRSLMGESSEFVGEKVAYALAQGLKVIACVGETLEQREAGSTMAVVAEQTKAIAGKIKDWTNVVVAYEPVWAIGTGKVATPAQAQEVHANLRDWLKTNVSPEVAESTRIIYGGSVTGASCKELAAQPDVDGFLVGGASLKPEFIDIINAATVKSA

SEQ ID NO: 352445 - protein, 83 aa, Zea mays
  unsure (1)..(83): unsure at all Xaa locations
  Clone ID: MRT4577_8459C.1.pep
RPXRTPLRGARXVSXXRSLLFRAGXXGSVSYVLRTDRRYRRRSEEDXDVEPEGVVRRHSVARATISRRTRMKLXXRLPQLSRP

SEQ ID NO: 352446 - protein, 809 aa, Zea mays
  Clone ID: MRT4577_845C.1.pep
MEAGAPPRGWRWGVLWLVSVEIVLVLVCTRGAGADSGESKGSFLQDSEAGEKDVYLSHSCIHDEILHQRRRAGRKEYSVMPQVYHESREDAERVRGRHLLGMSSWRAPHENARKPIRIYLNYDAVGHSPDRDCKNVGDIVKLGEPPVSSAPGTPICDPHGDPPLVGDCWYNCTLEDIAGKDKRQRLRKALGQTVEWFRKALAVEPVKGNLRLSGYSACGQDGGVQLPHAYVEDGVANADLVLLVTTRPTTGNTLAWAVACERDQWGRAIAGHVNVAPRHLTAEAETLLSATLIHEVMHVLGFDPHAFTHFRDERKRRRGQVTAQSLDKKLGRMVTRVVLPRVVMHARHHYGAFSQNFTGLELEDGGGRGTSGSHWEKRLLMNEIMTGSVDTRSVVSRMTLALLEDSGWYQANYSMAEHLDWGQNQGTEFVISPCNSWKGAYHCNTTQLSGCTYNREAEGYCPIVNYSGDLPKWAQYFPQANKGGQSSLADYCTYYVAYSDGSCTDVNSARAPDRMLGEVRGSNSRCMASTLVRTGFVRGSMTQGNGCYQHRCTNNSLEVAVDGIWKSCPQSGGPVQFPGFNGELICPMYHELCTTVPVPMTGQCPKSCSFNGDCIDGTCHCFPGFHGHDCSRRSCPDKCSNHGTCKANGICECQSGWTGIDCSTDYAGYTCQKGSAILPSLSMCHDVLVRDSDGQHCAPSELSILQQLETVVLVPNYNRLMPSGRTFLNFFNNANCAAAAKRLACWISIQRCDEDGDNRLRVCYSACELYNTACGAGLDCSDQTLFSKREEEEKGVPCTGYGEKKSFWL

SEQ ID NO: 352447 - protein, 124 aa, Zea mays
  unsure (1)..(124): unsure at all Xaa locations
  Clone ID: MRT4577_84600C.1.pep
SPAAAQHPTLGALRPSRICSYWAIALSSRDNFPDVKSEETAGTITDFDDPATLAPTXMFLLEDQYMADTGDSGGAIPRNKATVRLTINKTGMTLSISIYDETMTPSPCNMGMQRITCSVIEHPF

SEQ ID NO: 352448 - protein, 73 aa, Zea mays
  Clone ID: MRT4577_84601C.1.pep
TYTCIVILGSPTILLPKVCYQLLTVSPVFMNKFSFNHSMLCQPPATNNQGWVISSYHSRLYSFLPCACLLVTR

SEQ ID NO: 352449 - protein, 103 aa, Zea mays
  unsure (1)..(103): unsure at all Xaa locations
  Clone ID: MRT4577_84602C.1.pep
NTGGVLIXALALLGLAASATSTHTSGGWGCQPPPPGHLPAPGHLPPPGHLPPPGHLPPAGHLPAAGHLAPAVHVPAPGHLPAAPCHYPTQPARAQAYPQAHPC

SEQ ID NO: 352450 - protein, 72 aa, Zea mays
  Clone ID: MRT4577_84603C.1.pep
TIIDLSTVMFVAGAIMGYIMFTESTLPVHTELTPKSCGFQDCSLDYGDESNNQISLDFYCSFLCAFVPILNN

SEQ ID NO: 352451 - protein, 93 aa, Zea mays
  Clone ID: MRT4577_84604C.1.pep
AKRGQATNSQSLAERLGRKKISERMKLLQDLVPECSKIIGKAIMLDEIINYVQSLQRQVEIISKQVKPPTRSPYLPLGSSGLTGPFNQGIMQP

SEQ ID NO: 352452 - protein, 87 aa, Zea mays
  Clone ID: MRT4577_84605C.1.pep
EAQINPLLSSTKKSRKQIHPRRKESTHIHTLRSRLHTLGFFSGERRVTYVLHDFCLYKLPVHMPHISTRPHTYVSVPTSREEKRPLA

SEQ ID NO: 352453 - protein, 132 aa, Zea mays
  unsure (1)..(132): unsure at all Xaa locations
  Clone ID: MRT4577_84606C.1.pep
SRRTDDSQFFAGSNRPSKFIYLHETFPLLQRGSSQASETPIIANDEDVISLFMEQHELFLSSTKSRLTKLQIIHQMWERNDIRDVLSAMERMGDHAVCADMASVLMEKXDVITLDLCTSILPAXTDLLESKM

SEQ ID NO: 352454 - protein, 47 aa, Zea mays
  Clone ID: MRT4577_84607C.1.pep
GVPSLKNHFITSQTNKPEKGLFNKGAPYTHNSTEERTLLGDDRDYYC

SEQ ID NO: 352455 - protein, 305 aa, Zea mays
  unsure (1)..(305): unsure at all Xaa locations
  Clone ID: MRT4577_84608C.1.pep
TPLHMDQDLYDKYIDIKGIPELSVINSSVKGIELGSVVSISTXTTIEVLSDGNLVFRKIANHLSKVASPFVRNTTTIGGNIIMAQRLPFESDIATVLLAAGTTVTIQTASKXRLCLTLEEFLQQSPCDSRTLLMSIFIPKWDXDGITFETFRAAPRPGEFGNAASYVNAALLARTSTDAASGKNIMEDICLVFGAYGADHAIRASKVEDFLKGKSLSSSVILKAVQLLKETISPPEGTTHPEYRVSLAVSFLFTFLSXPIHSRQEMVFGDEYKPVGKPIKKVGAELQASGISPPMYWIDHRCGSA

SEQ ID NO: 352456 - protein, 67 aa, Zea mays
  unsure (1)..(67): unsure at all Xaa locations
  Clone ID: MRT4577_84609C.1.pep
EVHTQSNTIPAIIHETYKQKHTTSKKISNNSTINXIISSCTIIMLTPLIARTIISVKTLSRLIANAI

SEQ ID NO: 352457 - protein, 429 aa, Zea mays
  Clone ID: MRT4577_8460C.1.pep
MEHDVAHGAGGAVPAGEEAFEVAHQLLAQEEFSDSESIQISDLKRRMWRDQMLLNRLECRADVFSAAGGAGPSSSRPLGPPTAGAHGEDEEEEEEVEAPEVRCRRKAMLRAQDGVLRHMLKMMEACNARGFVYGVINEAGEPMLGSSDSLRGWWKDNVSFDRAGPMALVTAPTGESPPGPASCLHRLQDIQDSTLGSVLSALIQHCVPPQRSFPLERGLAPPWWPTGKEAWWGSQGEVQAHQGAPPYRKPHDLKKAWKISLLSSVIKHMSPRFDQMRKLVWQSKRLQQRMSAKETETWSKILRQEETLSRRLKSSLRITPLDGDDDDDMDRDGLEDVVRGVQDKRKRELISSSSGGRAELVADENPIDELLKRHYNLVPDQHGIVVAPENDAGELDLLYGVVDDVPPDVLFDLIASCSGADDAFRLILD

SEQ ID NO: 352458 - protein, 56 aa, Zea mays
  Clone ID: MRT4577_84610C.1.pep
IDISIINKQQKDFVISNNKGYKLQNSTYTRCSVGYSINIKEQSTRDMGHLETRLNH

SEQ ID NO: 352459 - protein, 78 aa, Zea mays
  unsure (1)..(78): unsure at all Xaa locations
  Clone ID: MRT4577_84611C.1.pep
GSASGLLLALGSXCXVXLWCPWAWSAGGLLVRLVALLVVVSAGXRPRPSXPSACCPPGWFXWRRRAAASVLTPRAAPS

SEQ ID NO: 352460 - protein, 73 aa, Zea mays
  Clone ID: MRT4577_84612C.1.pep
SRRLSTAVWSRCINGIIRVRESHRFENIVHVHRHIEVGEGPIVLYPHIPVAYLTCMEDWSCSCHRRFPSSSRT

SEQ ID NO: 352461 - protein, 68 aa, Zea mays
  Clone ID: MRT4577_84613C.1.pep
GKTKTLEVESSGPLANLKGKIPAKEGFPPDQQGLIFAGHHLGEGRPLADFAIPKGSPPPLVAGFRGGQ

SEQ ID NO: 352462 - protein, 154 aa, Zea mays
  unsure (1)..(154): unsure at all Xaa locations
  Clone ID: MRT4577_84614C.1.pep
SPGHLYPDQWLGGLDAQGQFRFLGAWVNAHIPNGGGVFAKPLLVAQFGELAPDPGLKGGQPHPVFGPVFPRVLDLGGPGGPPGGGFFWQLLGEGMGSFGGGXKVVLPQGPSPPGVFPPQNRRFQGLPKGFLGGPRAPQGKGGKGPKGGGNLKWG

SEQ ID NO: 352463 - protein, 1469 aa, Zea mays
  unsure (1)..(1469): unsure at all Xaa locations
  Clone ID: MRT4577_84615C.1.pep
MSGFSAAANAAAAERCALAFRARPAASSPAKRQQQPQPASLRGSGIISVQLWNSASRLYQNNQLFFATSADRAXXDLIGKFTLDSNSELQVAVNPAPQGLVSEISLEVTNTSGSLILHWGALRPDKRDWILPSRKPDGTTVYKNRALRTPFVKSGDNSTLRIEIDDPGVHAIEFLIFDETQNKWFICNGQNFQVQFQSSRHQGTGASGASSSATSTLVPEDLVQIQAYLRWERRGKQSYTPEXXXXXXXXARAELIEEVNRGVSLEKLRAKLTKAPEAPESDESKSSASRMPIGKLPEDLVQVQAYIRWEQAGKPNYPPEKQLVEFEEARKELQAEVDKGISIDQLRQKILKGNIESKVSKQLKNKKYFSVERIQRKKRDITQLLSKHKHTLVEDKVEVVPKQPTVLDLFTKSLHEKDGCEVLSRKLFKFGDKEILAISTKVQNKTEVHLATNHTDPLILHWSLAKNAGEWKAPSPNILPSGSTLLDKACETEFTKSELDGLHYQVVEIELDDGGYKGMPFVLRSGETWXXXNGSXXXLDFSTHDVRNIKLKGNGDAGKGTAKALLERIADLEEDAQRSLMHRFNIAADXXXXXXXXXXXXXXXXXXXXXFMATRQLTWNKNYNVKPREISKAQDRFTDDLENMYKAYPQYREILRMIMAAVGRGGEGDVGQRIRDEILVIQRNNDCKGGMMEEWHQKLHNNTSPDDVVICQALIDYIKSDFDISVYWDTLNKNGITKERLLSYDRAIHSEPNFRSEQKAGLLRDLGNYMRSLKAVHSGADLESAIASCMGYKSEGEGFMVGVQINPVKGLPSGFPELLEFVLEHVEDKSAEPLLEGLLEARVELRPLLLDSRXRMKDLIFLDIALDSTFRTAIERSYEELNDAAPEKIMYFISLVLENLALSIDDNEDILYCLKGWNQALEMAKQKDDQWALYAKAFLDRNRLALASKGEQYHNMMQPSAEYLGSLLSIDQWAVNIFXEEIIRGGSAATLSALLNRFDPVLRNVAHLGSWQVISPVEVSGYVVVVDELLAVQNKSYDKPTILVAKSVKGEEEIPDGVVGVITPDMPDVLSHVSVRARNSKVLFATCFDHTTLSELEGYDQKLFSFKPTSADITYREITESELQQSSSPNAEVGHAVPSISLAKKKFLGKYAISAEEFSEEMVGAKSRNIAYLKGKVPSWVGVPTSVAIPFGTFEKVLSDGLNKEVAQSIEKLKIRLAQEDFSALGEIRKVVLNLTAPMQLVNELKERMLGSGMPWPGDEGDKRWEQAWMAIKKVWASKWNERAYFSTRKVKLDHEYLSMAVLVQEVVNADYAFVIHTTNPSSGDSSEIYAEVVKGLGETLVGAYPGRAMSFVCKKDDLDSPKLLGYPSKPIGLFIRQSIIFRSDSNGEDLEGYAGAGLYDSVPMDEEDEVVLDYTTDPLIVDRGFRSSILSSIARAGHAIEELYGSPQDVEGVVKDGKIYVVQTRPQM

SEQ ID NO: 352464 - protein, 159 aa, Zea mays
  unsure (1)..(159): unsure at all Xaa locations
  Clone ID: MRT4577_84616C.1.pep
LFVIQTPNPXSFGDSXKYMPKVVKGLXGRTFVGAYPGRAMSFVCKKDDLDSXKLLGYPSKPIGLFIRQSIIFRSDSNGEDLEGYAGAGLYDSVPMDEEDEVVLDYTTDPLIVDRGFRSSILSSIARAGHAIEELYGSPQDVEGVVKDGKIYVVQTRPQM

SEQ ID NO: 352465 - protein, 221 aa, Zea mays
  Clone ID: MRT4577_84617C.1.pep
RRRASWIGAGPRCVEGRWLRLLLPLRWRGARGPCAERERAPLSRRCVGRGTESGHGTRISTARTPFDTDVAANLSRCCSACSLASYTYQKKPEGKKKDEADIIARKRTSGMQARTRTARIKPAHARTETVTEYQEATDTISKMKPRRTHDGSERAKRGGGEKKRMGRRRERRSAGCGVGGNCGRRNGRGRGGRSAQRLVARSPLSSVPFPKNAHSPASCRI

SEQ ID NO: 352466 - protein, 59 aa, Zea mays
  Clone ID: MRT4577_84618C.1.pep
DHGWLHSRWSNGAISFSIAPQIHKDAWVVTIYSRICIHHLQLLNSLIKFNPYFSPPSRA

SEQ ID NO: 352467 - protein, 51 aa, Zea mays
  Clone ID: MRT4577_84619C.1.pep
EYNRKRQVNEPPLSCKMFNVPSTIYSLGAYGRSCFVGPNPLALFSPPWEKP

SEQ ID NO: 352468 - protein, 50 aa, Zea mays
  Clone ID: MRT4577_8461C.1.pep
PSGLWPLGPQRSYSQVLSRLLSLTVLRLTQRQHSHWLRALHTMPLHTIWH

SEQ ID NO: 352469 - protein, 78 aa, Zea mays
  unsure (1)..(78): unsure at all Xaa locations
  Clone ID: MRT4577_84620C.1.pep
VLEDLDLNLGKVNFKXDGTGQFNAIIVVVVNALPDLIRHIIVDAIEEPLKDKVQEVLNQVNMEELLEKGLPQLDNLGV

SEQ ID NO: 352470 - protein, 139 aa, Zea mays
  unsure (1)..(139): unsure at all Xaa locations
  Clone ID: MRT4577_84621C.1.pep
GGRPGKSSCVKGVPVXHWAGGRAPNSVNSSKTGGVPRESVRGIVNARGRGVESTGTPRTGRSILKNLEVGLXALGGEGGAAYDRXGLNAAXGDHLLGCGGAEDIDAALDRAREAIGGGEALGRRMSXVKDWGRGLLGWR

SEQ ID NO: 352471 - protein, 69 aa, Zea mays
  unsure (1)..(69): unsure at all Xaa locations
  Clone ID: MRT4577_84622C.1.pep
RLIIVARLCNYVGNKVLDTCDDQNRVLILXAVKKDLRHAXRVIYGKHIVTRVEKLIRARHARLGRVPFC

SEQ ID NO: 352472 - protein, 145 aa, Zea mays
  unsure (1)..(145): unsure at all Xaa locations
  Clone ID: MRT4577_84623C.1.pep
SHFATLLFLLCYSFLLILGVQTLLPSLSFHSPRHEPIHSYLKAPPNVEYEDTYRIRGSKYPMSRDSLSDSFXQIYHATHVYTYYIAHVKIDSSSTNHPQMLYEGTLYNALPGWTGITNIKXCGIDSEDNIHVIDLLGPTREDLTV

SEQ ID NO: 352473 - protein, 89 aa, Zea mays
  Clone ID: MRT4577_84624C.1.pep
PACPPRPRTSRVARTPRAPCAPLRAGRPRRCAVPLNPERMLQQQPHPELLLITTARPYHGAFTGVSASSYAASLLYICACRHYMNLSAS

SEQ ID NO: 352474 - protein, 271 aa, Zea mays
  unsure (1)..(271): unsure at all Xaa locations
  Clone ID: MRT4577_84625C.1.pep
HWVPRGRPGSRYLKKYPTQYSCVIIYYRGDNSHDNFHGISRLAAASVSSLLRRTLLGHTRRGLFPQFYEHSRPNGYRTIEXTIAIQAVAKETXMPASLVXLHFXHDCFVKGCDASVLLNNXTAVVSEKGSNPNXNSLRXFEVIDHXKADLEAACPXRVSCAEIVDLAARDXSTALSAGPYXDVPNXRTDSLGASIQGCNYDMPAPNNTLTTIISEFKRQGLXIVDDVALSSDHTIGYXKCTXFRQKLYYQTGNAMADGTLDVSYCAELILD

SEQ ID NO: 352475 - protein, 328 aa, Zea mays
  unsure (1)..(328): unsure at all Xaa locations
  Clone ID: MRT4577_84626C.1.pep
MAVHTQYLSHAFPYDHSTIRPALDNARNASVFISSAVVTRSRPNSVLSDLTGNNNSNGCFLPRKRARVGDLAGATLNLDMQGQRALLPLVSAPVPLPLPAGDVQNRLLCSASASTSGHPTPSVAPVSQGLLSHLYRHGVEIDALVRIEKERLRAGLQEARRRHFRTVVLAAERAAARRLRAAEAXELERAMLRNVALEETLRHTGAEGQAWQDIARRHEGVAAGLRATLDNLTQMQSPCAGAEAAGAAADGDAEDAQSCCFELEQEQGEGAEAYGGRARACRSCGQAEACVLLLPCRHLCLCRGCEAGVWACPVCAVTKNASLHVLLN

SEQ ID NO: 352476 - protein, 55 aa, Zea mays
  Clone ID: MRT4577_84627C.1.pep
EIFLVFRTKGLYWTIYPLLNIIIHTCVFEKKRLCCCISCFSKQRNKFRGDFRSHE

SEQ ID NO: 352477 - protein, 134 aa, Zea mays
  unsure (1)..(134): unsure at all Xaa locations
  Clone ID: MRT4577_84628C.1.pep
GAINRRARQPTKIGGVPYPAGVMLSTPVMFIPRGPALWGSDPNEFNLGRFPPGGSKGGRDPGAFAPFNWGPGVCIGQNFGLLEAKLAVSMILQRFAFKGFPGXVPAPYPGLTLPPQPGAPVRVGRLLKPHRGFR

SEQ ID NO: 352478 - protein, 134 aa, Zea mays
  unsure (1)..(134): unsure at all Xaa locations
  Clone ID: MRT4577_84629C.1.pep
QTSPSGGGPRTARGQAKGDEEGDKQPRAGSNTEAXDXXQGRTEKDAERRHEAREPTKGGGRTTREHXGAPRRKNGGTXQDPPKAHGEADGQHEEEGRXDKTGKNRKKDTRGEPRQDDKQGRNAHGAGPENPKPT

SEQ ID NO: 352479 - protein, 232 aa, Zea mays
  Clone ID: MRT4577_8462C.1.pep
VPCRARVVLKNRASCRANGPRAFWTSIVQAHQGVPPYRKPHDLKKAWKISLLSAVIKHMSPRFDQMRKLVWQSKRLQHKMSAKETETWSKILRQEETLGRRLKSSLKITPLDGDGDEEEEEDRGLDGLEHVVRGVQDKRKRELISTGDNSGQSSSSSRGRAELVADEMAIDELLKRHYNHLSDQHEIVVAPENDAGELDLLYGVVDDVPPDVLFDLIASCSGADDAFRLILD

SEQ ID NO: 352480 - protein, 124 aa, Zea mays
  unsure (1)..(124): unsure at all Xaa locations
  Clone ID: MRT4577_84630C.1.pep
IHAGGRGVLDELEXSVGXXXWHMEPSRMTLYRFGNTSSSSLWYELAYCEAKGRIKRGDRVWQIAFGSGFKCNSAVWKALRTVDDAGRRDTNPWADDIHDLPVHVPKVSPFASSDQAPPTNAQHV

SEQ ID NO: 352481 - protein, 101 aa, Zea mays
  unsure (1)..(101): unsure at all Xaa locations
  Clone ID: MRT4577_84631C.1.pep
KXPQXTLFTIPPFYYLLLTFLSXXIPYSLITXLXLLFTYTXXXXXXXXXXFIYXXXXXXPIXKXPLPXXLXXSLXXXXXXXXXFXXXHFXXXQLIXXXXIN

SEQ ID NO: 352482 - protein, 105 aa, Zea mays
  Clone ID: MRT4577_84632C.1.pep
WQPEKALVSCCTSSAIAWISNETGAEETMSDRGLRSVCALVCFSSCLLDDLYIYCNAKPCVLEDNYTKGDDGNLICLLLHTYRISAANYERAVSSLHVCRYVLKH

SEQ ID NO: 352483 - protein, 46 aa, Zea mays
  Clone ID: MRT4577_84633C.1.pep
SRRPPLLSCVFFKTFSGLSRHHREPRTAPGRVALNSRFITALMNLS

SEQ ID NO: 352484 - protein, 67 aa, Zea mays
  unsure (1)..(67): unsure at all Xaa locations
  Clone ID: MRT4577_84634C.1.pep
VPCRLSSPCFFVRVCAPSFGLGCPPLFRCRFCFLFSGSSGCASGCGLSSRVSLGXXLCSLXGXAGLV

SEQ ID NO: 352485 - protein, 144 aa, Zea mays
  Clone ID: MRT4577_84635C.1.pep
LAHWLGRGRKLREDAKPWCIDMVAPSMRQELHYLQESHKIHCKIILVAFLQVVQLLPQACCLPLPELSVKQEVPRKENRDLERKFINKPESEGCLGSGIQSIISGVVYSQCIVSLCVCLCFPCTLFLSRGTLCQVPEIWFSFRQ

SEQ ID NO: 352486 - protein, 80 aa, Zea mays
  Clone ID: MRT4577_84636C.1.pep
LLPNTMVYNIVSKQCFSKPCYFWSYQNYGIIMCKTLLPNRPSEFFKMALAPPFLMKKGQTGPQEFFQNGSSSSLFNEKGP

SEQ ID NO: 352487 - protein, 90 aa, Zea mays
  unsure (1)..(90): unsure at all Xaa locations
  Clone ID: MRT4577_84637C.1.pep
YIYHPGYFGKAGMNHYHLKRNQSFCSTVNLDKLXTLVSEQTRVNAAKNKTGAAPIIDVVRSGYYKVLGKGKLPKQPDLVKAKFFSRRAEE

SEQ ID NO: 352488 - protein, 86 aa, Zea mays
  Clone ID: MRT4577_84638C.1.pep
ITITQKKSEYVAAKFKDTRFYSSTLVLVGHVHVKEEHHSAVGSSHLHASVQQPPSITAEVSQMEGFGVLLTKKAGIQWRQGEEVVS

SEQ ID NO: 352489 - protein, 82 aa, Zea mays
  Clone ID: MRT4577_84639C.1.pep
LKKKSEYVAAKFKDTRLYSSTLVLVGHVHVKEEHDSAVGSSHLHASVRQPPPITAEVSQMEGFGMLLTKKAGIQWTQREDVS

SEQ ID NO: 352490 - protein, 92 aa, Zea mays
  Clone ID: MRT4577_8463C.1.pep
FVLNTHSAILLNMLRFSSFEKRRLDSNQFSGTINPLMEKLANLKELLVLDISFHNLSQTVSADILYLMHFLKKWQTPEQQQSHGQNTRWSEK

SEQ ID NO: 352491 - protein, 108 aa, Zea mays
  unsure (1)..(108): unsure at all Xaa locations
  Clone ID: MRT4577_84640C.1.pep
PVFFCFCDARPFLDLTEDCAEHFKGDKSLASREETKERFTALLVEELKQREEEVTQAQHEVYAKLIEAKKIAPXYQKEAGKRNSRMDTCQETRGEXSPEASVQQKKLT

SEQ ID NO: 352492 - protein, 65 aa, Zea mays
  unsure (1)..(65): unsure at all Xaa locations
  Clone ID: MRT4577_84641C.1.pep
LWQREAASLRQQLHNLQESHKYDLAMDSKIMXKLFSNXRQLMGEELSGLGVRDLQSLENQIGMSL

SEQ ID NO: 352493 - protein, 56 aa, Zea mays
  unsure (1)..(56): unsure at all Xaa locations
  Clone ID: MRT4577_84642C.1.pep
APQSNSXPSXHSXXPLQRHAALXXXRXALXIXGSAATXXXCRLCVXXVLVAGLXGV

SEQ ID NO: 352494 - protein, 78 aa, Zea mays
  unsure (1)..(78): unsure at all Xaa locations
  Clone ID: MRT4577_84643C.1.pep
AHAVNKCKLXAWIPSQNKILTTYNYNLTIRGWLHQDDCILCNGLLENGHLSSLPLCTGGLEQGGALGKLWKSADCPSD

SEQ ID NO: 352495 - protein, 136 aa, Zea mays
  Clone ID: MRT4577_84644C.1.pep
NAEGSVADDKNKGGVGHGDSGGLLKGVPEGNRSYTSPVSSDASTVCYYLGGGSINGMSARAGVKTRTCITYSVRFGIRFDDDLSTFPMPDDCPCRQYVVVFTFCPLYLNDFVKWILMMVYCVRSAFGFNVAQCACK

SEQ ID NO: 352496 - protein, 48 aa, Zea mays
  Clone ID: MRT4577_84645C.1.pep
ETGFGYLAYIGWTRVWTLSMQANILSSSDELSFIMLQECRPGDLLLRV

SEQ ID NO: 352497 - protein, 53 aa, Zea mays
  Clone ID: MRT4577_84646C.1.pep
SARGGSANSIFVPRPSAVDVWGLNEKQPDGNANGSKGMGLSSLRTKEARYLCC

SEQ ID NO: 352498 - protein, 161 aa, Zea mays
  unsure (1)..(161): unsure at all Xaa locations
  Clone ID: MRT4577_84647C.1.pep
RRTGCARCGLDSLLLSWSLPVFWVLGVWSGSLSVVVASLVLXDLFCVPCARWSVVFAISRVPCYSGLRCFCVCSDXXRKSLEHPEDFSGVAGSTVVEXVLEGKPFYVVCFGNLVPLTKSGHLHILSFFALEEYGLPLFVKVRDTAQEPCGRLSFMKEPGSS

SEQ ID NO: 352499 - protein, 45 aa, Zea mays
  Clone ID: MRT4577_84648C.1.pep
VEKIEVRFYAQHSNAYRTGKMLYYTLTQIAIYKFVHVALSSLLSE

SEQ ID NO: 352500 - protein, 70 aa, Zea mays
  unsure (1)..(70): unsure at all Xaa locations
  Clone ID: MRT4577_84649C.1.pep
NSLSTKSEGGGWSKTRIYSRGKMGLLGKKKPVILLNNPPFXGVVFKEGNKISLTNGGPKVSFHNDSGRGG

SEQ ID NO: 352501 - protein, 54 aa, Zea mays
  Clone ID: MRT4577_8464C.1.pep
AGRPIARRAPLRPRAPRVVPAGPVSTFQDGSSSYVFCLRAFFLNLVVDLANRDS

SEQ ID NO: 352502 - protein, 35 aa, Zea mays
  Clone ID: MRT4577_84650C.1.pep
PSMHHKEESPLIGTSLFSPLDYYILSAGSRIWFET

SEQ ID NO: 352503 - protein, 73 aa, Zea mays
  unsure (1)..(73): unsure at all Xaa locations
  Clone ID: MRT4577_84651C.1.pep
NNPXIYNYKDTRALVKLIYVVSIMTNGLSIIELHDHTYKNKTSQLQSPFYSTAKKTINLIENMPKAVNTTKHL

SEQ ID NO: 352504 - protein, 43 aa, Zea mays
  Clone ID: MRT4577_84652C.1.pep
RGLFFFFFSVVNWLAVITSRFIHHHNSLSSKLKYGQQTEATTN

SEQ ID NO: 352505 - protein, 53 aa, Zea mays
  unsure (1)..(53): unsure at all Xaa locations
  Clone ID: MRT4577_84653C.1.pep
RLXTLSXSXXLDQLEAPXXLRRRPLLLRIAXRPXRCXYASSRSRAXAXDLXLV

SEQ ID NO: 352506 - protein, 99 aa, Zea mays
  Clone ID: MRT4577_84654C.1.pep
MAQAASGSSKIDTKAPTSADEAAQPKSYGDLVSTLPARGGWVSLVQYQNYWLNPGRLQNIIPVKELYKPRADDIVLATYLKCGTTWLKALAFAITTRGP

SEQ ID NO: 352507 - protein, 338 aa, Zea mays
  Clone ID: MRT4577_84655C.1.pep
MAQAASGSSKIDTKAPTSADEAAQPKSYGDLVSTLPARGGWVSLVQYQNYWLNPGRLQNIIPVKELYKPRADDIVLATYLKCGTTWLKALAFAITTRGRHHQAFAAADHPLLTVHPQEAVPHLEVHTPGQGLADIERLPSPRLLGTHLPLSLLPPAVATSGCRVVYLCRQPKDVFVSLWHFVKGMRGGRSPVELDAALAMFCEGVSPFGPVWEHYLEYWKESLARPERVLFLRYEEMVADPVRAVRTLAGFFAVPFTDEEEGRGVPEEIVRLCSFEMLSGLESNRTGDLDCGDNTVIGKSTFFRKGKVGDWENHLTKEMGKKVDAVFEDKLQGSGLVF

SEQ ID NO: 352508 - protein, 122 aa, Zea mays
  Clone ID: MRT4577_84656C.1.pep
KKKKNTFPPPQEGGRKKRGRTRLNSTTYPPKKGGRNPNPGLNKKGGDLLPPPPGAEKEKHPLGKGEPKPPPRGGASPPRGLGSGEGGNLKREPARALNPKKPGLGALDQKPTKFFLFLHVGG

SEQ ID NO: 352509 - protein, 77 aa, Zea mays
  Clone ID: MRT4577_84657C.1.pep
PPGAGHSWIRTRCLGSSCIGIHALLLAPWLSHLGMISIAGRRDFVSSRSHGVMVADVAIAENLSALLAVDSISRLER

SEQ ID NO: 352510 - protein, 91 aa, Zea mays
  Clone ID: MRT4577_84658C.1.pep
QLVSVERRERGLIFNAVCRLCRRLGIVTWPVPCSCSTSHFKSPCWGARAGQINAFVDHIGGLNYSYPRPGDACWCMTTLSPAGAAPRSAGH

SEQ ID NO: 352511 - protein, 54 aa, Zea mays
  Clone ID: MRT4577_84659C.1.pep
EQDYHSELPSNHLCGVINGSYIIRNISGNVSMFIFITVKTSCMLWMRGFLVSLS

SEQ ID NO: 352512 - protein, 131 aa, Zea mays
  unsure (1)..(131): unsure at all Xaa locations
  Clone ID: MRT4577_8465C.1.pep
GVYLSGCYTLYRDAHPYKGLAFTQRDRDAHHLRDPLTPATVTQELRVTNIMLLQQMDQVPXQRYMAXTDLRERIVRLXYVLEVANEVELQPEGYAPSDCEACLKHMHTPGHTPGLNGLFMRPMEGADNCKA

SEQ ID NO: 352513 - protein, 64 aa, Zea mays
  Clone ID: MRT4577_84660C.1.pep
KEKHPNGQTWEGIDREHEAKQRPKVEGKKGGTGPHFPHQTRGRKLYLAHVTRKPHRGVHAKTTG

SEQ ID NO: 352514 - protein, 234 aa, Zea mays
  unsure (1)..(234): unsure at all Xaa locations
  Clone ID: MRT4577_84661C.1.pep
MARLPVLVLAVSLAVLAWPASCKSVRSVLAPVTKDPATRLYTIPFHYGANIVVDTAGPLVWSTCTPDHLPAAFPCKSDTCRLANKYHVPSCSESAADKLCDPSHKVCRAFPYNPVTGACAAGDLIHTRFVANTTDGKNPVSQVNVRAVAACAPSKLLESLPQGASGVAXLAGSDLALPAQVASAQKVXNKFLLCLPRGLSSDPGVGVFGGGPLHFMPQPERDYTKELCYAPLVA

SEQ ID NO: 352515 - protein, 69 aa, Zea mays
  Clone ID: MRT4577_84662C.1.pep
NSENWTKKSLKRKGYKPCTTMLLFRGHKLHSNKNTRSDIDVVLTSTGLTCGNPILSQGYTVTLVVYDKQ

SEQ ID NO: 352516 - protein, 56 aa, Zea mays
  Clone ID: MRT4577_84663C.1.pep
MLFPKGILGIFCALRYHSVKAKKLFASVGIILRDGVASPMFLKLSFFPKLVGFGFN

SEQ ID NO: 352517 - protein, 56 aa, Zea mays
  Clone ID: MRT4577_84664C.1.pep
NGVSPRVAIVILNNSLLAGVSLPSFSSLYPSIGLAPSSCSFKVASCIIQAGYRYHQ

SEQ ID NO: 352518 - protein, 51 aa, Zea mays
  Clone ID: MRT4577_84665C.1.pep
GVKTCLLRQGATNPIVKAQTPVRKRNVPDHERRLIAACSEARYVSPRLLAN

SEQ ID NO: 352519 - protein, 153 aa, Zea mays
  Clone ID: MRT4577_84666C.1.pep
AYTTTAPGPEASAFAMPLTSGAYTGTGQYFVRFRVGTPAQPFVLVADTGSDLTWVKCRGASPPSAASPSGSPRVFRPADSKSWAPIPCSSDTCKSYVPFSLANCSAGTAPCAYDYRYKDNSSARGVVGTDAATIALSGSNGGGGTDRKAKLQE

SEQ ID NO: 352520 - protein, 75 aa, Zea mays
  Clone ID: MRT4577_84667C.1.pep
HPLTPTQMLVSATSAITATQVHRITHYLAGAEACTLAILMPDAHTLELLYEDDIYSPCALAQVWRAVAFSLDATG

SEQ ID NO: 352521 - protein, 63 aa, Zea mays
  Clone ID: MRT4577_84668C.1.pep
KHFEYQYPSQTDDAVQMIWKAIARKVPSIRLKINRLQRFSLFETNRTDETLPPSSSWLQNQAP

SEQ ID NO: 352522 - protein, 58 aa, Zea mays
  Clone ID: MRT4577_84669C.1.pep
MATAEVQTPTVVAAEEAPVVETPPPAGGREESAPAEADADADAEAAAPAAPEGLSRFG

SEQ ID NO: 352523 - protein, 35 aa, Zea mays
  Clone ID: MRT4577_8466C.1.pep
SGKPTAALLTLGSVTNLLLAGMISGVLSCTQLLRH

SEQ ID NO: 352524 - protein, 578 aa, Zea mays
  Clone ID: MRT4577_84670C.1.pep
MEDFCAVCADTLEWVAYGSCGHRDVCSTCIVRLRFVMGDNKCCICKTVCPFVFVTKAMGEYTRVVADFSVFPIGVNEGKAGDFWYHEDTQAYFDDVDHYRMIRAMCRLSCSVCDNAEDQVALAAQAKRRSKFRSIDQLKGHLFHVHRLHMCNLCLEGRKVFICEQKLYLKSQLAQHIKTGDSEVDGSEVERNGFAGHPMCEFCRSSFYGDSELYMHTSREHYSCHICKRQNPGHVEYFANYEDIELHFREDHFLCEDEACLEKKFVVFLSKAQLKKHNAMEHGGRMSRSLRNVALETPTNLIYRRNEQEQRRGRGHNAFHDRSDCHISSSANAFHDKSDCHIPSTAQKDRAAADGHAGRLDNVSESFQSLSIGSSSREAEVGEGSRTGRVLEQLSFRPLSDPDIPDNSVETSFPSLSEQQSSFNQSARDAPRLGDESLFPPLTGSSNKMKQPVFTPKRPRTFPAAEDIHAAKMRYALGMNEDMYSAFKEIAGEYRRGTIDAFEYLSYVEQFGLSHLVPEMARLLPDSRKQRELADAHYTNTRLKNLQENGNNRKGGFFLSKKKSLQENGGGTSKWRWN

SEQ ID NO: 352525 - protein, 385 aa, Zea mays
  unsure (1)..(385): unsure at all Xaa locations
  Clone ID: MRT4577_84671C.1.pep
MNIAMLIVGRVLLGVGIGFGNQAVPLYLSEIAPYRIRGAVNQLFQLTTCLGILVADVINYFTDRLHPWGWRLSLGLAMGPATAIFVGALFLPETPNSLVERGHLEEARRVLEKVRGTHKVDAEFEDLKEASQAARAVTGTFRNLLAVRNRPQLIIGALGIPAFQQLSGMNSILFYSPVIFQSLGFGSSAALYSSIITGSMLVVGALISMVTVDRLGRRFLFIEAGIQMVSSMVVVAVILALXFGKGEELSKGVSTVLVVAICLFVVAYGWSWGPLGWLVPSELFPLEMRSAGQSVVVCVNLFWTAAVAQCFLAALCHLRWGVFVLFAALIVVMSIFVILLLPETKQVPIEEIWMLFDRHWYWKRIVRRDPKYQGNLHQQQEMSRI

SEQ ID NO: 352526 - protein, 187 aa, Zea mays
  unsure (1)..(187): unsure at all Xaa locations
  Clone ID: MRT4577_84672C.1.pep
IDPPTASDLDDAISIEILSGGTVRIGVHIADVSYFLHPETALDAEAQSRSTSVYTLKHKISMLPSGFSEVVSLNPGVDRLAFSIIWDIDPHGNLISRWIGRSIIFSCCKLSYELVQDLICNETSQTRLEGSSLEVHGIFGRDDVIKSLRGLYEVSQNLRKXKFKGGALSLDTAKIMIMVDEDGIHVI

SEQ ID NO: 352527 - protein, 132 aa, Zea mays
  Clone ID: MRT4577_84673C.1.pep
MIYSSALLINNEPMIIFFFFFEHGKCALAGRCHCSKRSKKLRVKRSIKVPAVSNKIADIPPDEYSWRKYGQKPIKGSPHPRGYYKCSSVRGCPARKHVERCVDDSAMLIVTYEGEHNHTGMPAQSAAAAAQV

SEQ ID NO: 352528 - protein, 196 aa, Zea mays
  Clone ID: MRT4577_84674C.1.pep
TSLPPGSQPMGTCGLAAVVVLLLASALLPAPDSASARSLLEGENPSSGERRLFGSPQDAPAPAVSGQSSAAGQQAENKRHQKSLPPVTSPPPPPPTQETNSQKAASPPPGPNVGTGQEDTGSQGRREETDKLKEAMEKCDASHKCTSGKEFSACLQVPDNALVGPYIIVHNEGQHDIDIDVKEPSSNTNNDKKPLH

SEQ ID NO: 352529 - protein, 590 aa, Zea mays
  Clone ID: MRT4577_84675C.1.pep
MEDFCAVCADTLEWVAYGSCGHRDVCSTCIVRLRFVMGDNKCCICKTVCPFVFVTKAMGKYTRVITDFSVLPAGVNEGKAGDFWYHEDTKAYFDDADHYRMIRTMCQLSCNVCDNAEDQVAQAKRKSKFRSIEQLKGHLYCVHRLHMCNLCLEGRKVFICEQKLYLKSQLAQHMKTGDSEVDGSEVERNGFAGHPMCEFCRSSFYGDSELYMHMSREHYSCHICKRQNPGRVEYFANYEDIELHFREDHFLCEDEACLEKKFVVFLSKAQLKKHNAMEHGGRMSRSQRNAALETPSSFIYRRNEQEQRRGRGRNAFHDGSDCHISSSANAFHDRSDCHISSSANAFHDKSDCHIPSTAQKDRAAADGHAGRLDNVSESFQSLSIGSSSREAEVGEGSRTGRVLEQLSFRPLSDPDIPDNSVETSFPSLSEQQSSLNQSARDAPRLGDESLFPPLTGSSNKMKQPVFTPKRPRTFPAAEDIHAAKMRYALGMNEDMYSAFKEIAGEYRRGTIDAFEYLSYVEQFGLSHLVPEMVRLLPDSRKQRELADAHYTNTRLKNLQENGNNRKGGFFLSKKKSLQENGGGTSEWRWN

SEQ ID NO: 352530 - protein, 102 aa, Zea mays
  unsure (1)..(102): unsure at all Xaa locations
  Clone ID: MRT4577_84676C.1.pep
QDARRAGRAWARSAAKRHRKVLRDDIHGITRXAIRGLGLTGGMQRIAGLIYKETRVVLKIFLENEIRDAGTYAEDARRQTGTVMYACYTLMRQGRTLYGFRG

SEQ ID NO: 352531 - protein, 72 aa, Zea mays
  Clone ID: MRT4577_84677C.1.pep
TPPQGGGPATLIYFLGREANTPEGLLCSNHKSATSGIILPKGFGSCMPCWPRTPLGEYRNTFCSNPPGPWRV

SEQ ID NO: 352532 - protein, 87 aa, Zea mays
  unsure (1)..(87): unsure at all Xaa locations
  Clone ID: MRT4577_84678C.1.pep
DSSYKNTFXSNTGTTYKTIPKYDLHKSYNSLTEXRNKHLIESYNATYYPCIHISYDFYIYFSSLNNIITLTFPFIKFYNKEKHPTSP

SEQ ID NO: 352533 - protein, 53 aa, Zea mays
  Clone ID: MRT4577_84679C.1.pep
MDTQVKLAVVVKVMGRTCSRGHVTQVRVKFLDDQNRLIMRNVKGPVRQGDILT

SEQ ID NO: 352534 - protein, 114 aa, Zea mays
  Clone ID: MRT4577_8467C.1.pep
SFARVCERGWSVGPGCRRTPGIGVVGWREVISRWAKIPAVSPVKIFLFFLFIFYFLFSIFKSNLNSNLNSNFYGSSFQLYFFVKLGILILPIFIYIYIIYIFVLYPFSLISISI

SEQ ID NO: 352535 - protein, 47 aa, Zea mays
  Clone ID: MRT4577_84680C.1.pep
KANMKVVIDVSYSGRCIKSLPHRKQQFKRPWHRFLDGAQATVTQCMT

SEQ ID NO: 352536 - protein, 56 aa, Zea mays
  Clone ID: MRT4577_84681C.1.pep
HAWWNPKWWTSWTYLRIRRDLRIRVLIHVRNEACSFTFTLTLIMTMHKRIRDLMTN

SEQ ID NO: 352537 - protein, 262 aa, Zea mays
  Clone ID: MRT4577_84682C.1.pep
MESLTLRASPSSTASPLLRLPGRRRAASVRVSASGAGAGEPDLSVTVNGLKMPNPFVIGSGPPGTNYTVMKRAFDEGWGGVIAKTVSLDAGKVINVTPRYARLRADPNGSTKSPIIGWQNIELISDRPLETMLNEFKQLKKEYPDRILIGSIMEEYNKAAWHELIERVEESGVDALEINFSCPHGMPERKMGAAVGQDCALLEEVSGWINEKATVPVWSKMTPNITDITQPSRIALKSGSEGIAAINTIMSVMGIDLKTLRP

SEQ ID NO: 352538 - protein, 140 aa, Zea mays
  Clone ID: MRT4577_84683C.1.pep
MVAALGPGRFYGSGLPRPRFFPGDRVDPPASVTDPLLDWAREAHWSMGGFGVKRLRLQGRIEGSIDKLRRRTRRDARAKTKARSAGHVPASLSPLGSEDEAEEVAAPERALVDDDVDSDGSDESEGEEEDEPLAAIVTAA

SEQ ID NO: 352539 - protein, 60 aa, Zea mays
  Clone ID: MRT4577_84684C.1.pep
KWGQFLWGPCAAQNKQGGKPLPGLGNYKTALTRLGFLNNRVMCWPPKGVKKKLAQAFSRF

SEQ ID NO: 352540 - protein, 564 aa, Zea mays
  unsure (1)..(564): unsure at all Xaa locations
  Clone ID: MRT4577_84685C.1.pep
MGRRTQPAQLCPLHDFCVGPLEWDVLGSPHHSTELLMRGLGVLESVSPQDNTGPLETTNADHPRLLEGKTLPVEAQALDVPTLKVYSRWIIQHQTAVTHSEELVDGVVAACTAPLASAPPHPCSTLAKRSGISSSDVVALKAIQTEPARLIHSLRAGKRRCSRERLQPRFPRAKERGLIVWFKPRGFGQELKDIRAECLGPWVLAGDFNLIYRTSEKNNSNTNRAMMDRFRMVIDDLALKETPLHGRRFTWSNQQDDPVLVKLDRVFCSVDWETIFPNVLLQSTASGDSDHCPLLLGLLDNKCGKRLHNNAQKSKVYPIHCPEDDLLEVQNLLPYEISTLPCWYLGLPRSLHKVTRKQFQPFLERIADQLQSWKADLLTRAGRKVQVQHVLTGASIYLAMAIDIPQWVVYAIDKIRKGFLWRGRKEVKGGHCLVAWGKELSALSVGALVDYLHLWDLVSSVELQPSMEDKHIFSLASDGKYSAKVAYEGFFLGSSSFDTTKXVWKSWAPPKCRFFLWLAAQKRCWTTDRLAKRGLNHSDRCPLCDQESETIDHLLVSCVFTREL

SEQ ID NO: 352541 - protein, 159 aa, Zea mays
  Clone ID: MRT4577_84686C.1.pep
PRASASADIADGRSASVAQPRAGGRPSAARQVLARGPSACGGGACQVLAARSSAARQSLARCSPAARQPTLEVLARCSLLARQPLASSQVLARQPEALRRRCSPGARHNPRNLEPSSWRTPVVLIDKHHGNLLRHCKIQDHEGPPQTGQVLACVLLFFF

SEQ ID NO: 352542 - protein, 60 aa, Zea mays
  Clone ID: MRT4577_84687C.1.pep
MAEMFGYIQNLGPAQGHAPPPPLFPAADPTKFPTPGQSGGWNNPHVLSSPFPNQSKSPPR

SEQ ID NO: 352543 - protein, 60 aa, Zea mays
  Clone ID: MRT4577_84688C.1.pep
LMTQQDADLPEQNKDLTRPLFIAPTATPIKSHPLFGCTPITQLLLLAARSKPTTDVYITY

SEQ ID NO: 352544 - protein, 109 aa, Zea mays
  unsure (1)..(109): unsure at all Xaa locations
  Clone ID: MRT4577_84689C.1.pep
LHAVSLKFMLAPVTFLLKPDQLTLERLNPNYSNHYLKLSKLHTLSDLLETLFITDSVLNPNTTTXDDSLTYKMQSSHHTTIHSHPDMHHTTTYIIMKEFLSGSSRVLIT

SEQ ID NO: 352545 - protein, 84 aa, Zea mays
  Clone ID: MRT4577_8468C.1.pep
LKAPKGKELAPPNEKTTPPTFKQPPRARGSPRGPLPRGGASPIWFREHPAPGIFAQPSPFFFKRTPPKLRVLWTMAAISNCCPF

SEQ ID NO: 352546 - protein, 65 aa, Zea mays
  unsure (1)..(65): unsure at all Xaa locations
  Clone ID: MRT4577_84690C.1.pep
GTGISGHDSRRGPVTAEGNRRRGTSDGDGGDQRRRVAGGRSRLTLQARVGAWCLSRLRGGGEKXG

SEQ ID NO: 352547 - protein, 249 aa, Zea mays
  Clone ID: MRT4577_84691C.1.pep
MSKLANMFSALCLDAESNEDVGRAEVPQASSSTDKTAASKPDKNEQNDTTAVNYEEAALVSSSSDYRMPLVWIDLEMTGLDITKDRILEIACIITDGKLTKQIEGPDLVISQSKDCLDNMDEWCKTHHAASGLTERVLQSELSEHDAEAKVLDFVRKHINSGTPLLAGNSVYVDFLFLKKYMPQLAAVFSHVIVDVSSIMALCIRWYPKERKQTPRKQKTHRAMDDIKESIAELKYYKHNIFKPQKSKR

SEQ ID NO: 352548 - protein, 80 aa, Zea mays
  Clone ID: MRT4577_84692C.1.pep
RPPTRPDTHSPAFLLHSPLLSRRLALLDLWDLITCPPPDPPFPRALSPYPQPYGSFLACLNNRQITGLAGAAEDLYERKL

SEQ ID NO: 352549 - protein, 111 aa, Zea mays
  Clone ID: MRT4577_84693C.1.pep
SKERTDLNCTAIQIQTNWSLKASPGMHGEKMQSAHTPNALVENTHLTHARTRAFPITQGPLSIGQKGWWGPHPWGAIWRTTTAPRRGSRRTWPSIETFFCPTDCTTLPARW

SEQ ID NO: 352550 - protein, 118 aa, Zea mays
  Clone ID: MRT4577_84694C.1.pep
KGRLLTGSFLKLSHKNKRALRSNGQQKENQRTVPEKFSNPLFFPPQLSGFHPSKRGIQKPAPQKRGRCPSIKKIGEVHVRGKNRGGFFKPPEKKPTGFNISPWGPATFNIGLLWLQLG

SEQ ID NO: 352551 - protein, 182 aa, Zea mays
  unsure (1)..(182): unsure at all Xaa locations
  Clone ID: MRT4577_84695C.1.pep
VLSPSSTSCKPQDWAAPEKAHTPLVAFPATALVVPEPLGVVLVFSCWNLPIGLALEPLSGAXTSAFLAANIPKYLDSKAVKVVEGGPEVGEKLMXSTDGXQVLFTGSSRVGRLIMAQAAKHLTPVALELGSKCPCIVDWLDSDRDSQVAVNRIIGAKWSTCSGQACIAIDYLLVEEEFAPVL

SEQ ID NO: 352552 - protein, 577 aa, Zea mays
  unsure (1)..(577): unsure at all Xaa locations
  Clone ID: MRT4577_84696C.1.pep
MGSVPEEKAKLGFGGLVGDLREVYESGRTQGLEWRQSQLRGLVRLLEEKEEEIFDVLHEDLGKHRGEAFRDEVGVLKKSVVDKLQNLKNWAAPEKAHTPLVAFPATALVVPEPLGVVLVFSCWNLPIGLALEPLSGALAAGNAVVVKPSELAPATSAFLAANIPKYLDSKAVKVVEGGPEVGEKLMXSTDGXGSLHWQQPRWAPYHGPGRQAPHPGGAGARLLPSSGTALGSPGGRQRRGGEAVGARAVGVPRGIPKYLDSKAVKVVEGGPEVGEKLMEHRWDKVLFTGSSRVGRLIMAQAAKHLTPVALELGSKCPCIVDWLDSDRDSQVAVNRIIGAKWSTCSGQACIAIDYLLVEEEFAPILIEMLKSTLERFFTKPEYMARILNEKQFQRLSGFLADRRVASSVVHGGHFNPKTLSMEPTLLLNPPLDSDIMTEEIFGPLLPIITVKKIEDSIKFLRSKPKPLAIYAFTRNEKLKQRIIDETSSGSITFNDAIVQYGLDSIPFGGVGHSGFGQYHGKYSFDMFSHKKAVLKRSFLVEFMFRYPPWDETKIGMLRRVYRFDYVSLFLALIGLRR

SEQ ID NO: 352553 - protein, 68 aa, Zea mays
  Clone ID: MRT4577_84697C.1.pep
MSDETHHQHLFHHRKAEEDEGASGEVDYEKKEKHHKHMEQLGQLGAIAAGEYALHETHKARMDPENDH

SEQ ID NO: 352554 - protein, 392 aa, Zea mays
  unsure (1)..(392): unsure at all Xaa locations
  Clone ID: MRT4577_84698C.1.pep
MFCVRSTCLCTGLALEPLSGALAAGNAVVVKPSELAPATSAFLAANIPKYLDSKAVKVVEGGPEVGEKLMXSTDGXQVLFTGNXTYVMHERVSAXHLVSLSLSGSSRVGRLIMAQAAKHLTPVALELGSKCPCIVDWLDSDRDSQVAVNRIIGAKWSTCSGQACIAIDYLLVEEEFAPILIEMLKSTLERFFTKPEYMARILNEKQFQRLSGFLADRRVASSVVHGGHFNPKTLSMEPTLLLNPPLDSDIMTEEIFGPLLPIITVKKIEDSIKFLRSKPKPLAIYAFTRNEKLKQRIIDETSSGSITFNDAIVQYGLDSIPFGGVGHSGFGQYHGKYSFDMFSHKKAVLKRSFLVEFMFRYPPWDETKIGMLRRVYRFDYVSLFLALIGLRR

SEQ ID NO: 352555 - protein, 126 aa, Zea mays
  Clone ID: MRT4577_84699C.1.pep
MALLRLLAISLLFAVATPVRDMAHDACSSEGREVHDTERSSRGSFPPGNAMGSLPLLAACCSLLLTVAAPARDSTTSVCASQIGGSPRVNGSRGLLSMCTEKDGGGPVDNATEEKSLCLISLGEGG

SEQ ID NO: 352556 - protein, 89 aa, Zea mays
  Clone ID: MRT4577_8469C.1.pep
ISHSIHLPITSRASLFVSPTPHPGPCILQSVSSCDVRELLVRMQIMALKGGGGRQKAASELINLNVRETQASCSENHSSEINLDVSRHD

SEQ ID NO: 352557 - protein, 65 aa, Zea mays
  Clone ID: MRT4577_846C.1.pep
HLYSNVGRHQFCTGEHTPPLKRLYKTNKLLDNNCLHAAVSMYGTHNGQFLLYDKIFSKTTEFPVH

SEQ ID NO: 352558 - protein, 66 aa, Zea mays
  Clone ID: MRT4577_84700C.1.pep
FVIFPPGSSPGGVGPKSPGLLFPVAFQILLNSPPPPKLPVGSVDPVYTLFSCPLEKIKGALPFEVF

SEQ ID NO: 352559 - protein, 56 aa, Zea mays
  Clone ID: MRT4577_84701C.1.pep
ARDPAFSLLGCVVLAVDDETTKLLLNPPHALYLSVPHGEFTSDGRLYKKGSVHFSV

SEQ ID NO: 352560 - protein, 69 aa, Zea mays
  Clone ID: MRT4577_84702C.1.pep
MGSLPLLAACCSLLLTVAAPARDSTTSVCASQIGDHKRFREVDEAVMVSAPQKPNRALIPSRITKGQWF

SEQ ID NO: 352561 - protein, 54 aa, Zea mays
  Clone ID: MRT4577_84703C.1.pep
HLPTLCPKLQSLRTLKTLTLSTETVQANSAAHSSAHHNPTQATQSMPAPHGVMT

SEQ ID NO: 352562 - protein, 66 aa, Zea mays
  Clone ID: MRT4577_84704C.1.pep
QRFPPFSDELGPQKQKKNGLWEKVEPFKGPAPAFPGPLYSFKGAMEKNTPPLCPLLSFHRGPGPPF

SEQ ID NO: 352563 - protein, 61 aa, Zea mays
  Clone ID: MRT4577_84705C.1.pep
CLLDGKLTVGHTSPCAPHSVLLCHGTDRLLLTGLSPSILPSQVIRSSCASLPESLYWSSGL

SEQ ID NO: 352564 - protein, 100 aa, Zea mays
  Clone ID: MRT4577_84706C.1.pep
GLVPPGFSFPKKTAWGFFLDWSPPLGGFRGKRIFSAPICMGTLFAIPPVFFPTPGSQNLFFFFPSPWPKNNFQNLFGPQPCFCIFYRKKLSNSISLFSPP

SEQ ID NO: 352565 - protein, 110 aa, Zea mays
  unsure (1)..(110): unsure at all Xaa locations
  Clone ID: MRT4577_84707C.1.pep
PEREEAMSWLGKGGKGLGKGGAKRHRKVLRDNIQGITKXPEIRLLARRGGDKRISMLIYEETRVVLKIFLQNVIRDAVTYTEHARRKTLTAMDVHYALKRHGPTLYAFLC

SEQ ID NO: 352566 - protein, 174 aa, Zea mays
  Clone ID: MRT4577_84708C.1.pep
PARLGARWRASKRAGEDLDPRATPFQILGLDAAAGYSAAELKAAFRAQVKEFHPDVCKDPENADLIMRRVIEAYQMLSGNQEMMFERNNVDPFDEPECEARDIFVNELLCIGTDDTGTARAISQGNGEDDLVQLAVGQCPRKCIYYVTPCQRTILEDVLASSSGFPPFKSEVRE

SEQ ID NO: 352567 - protein, 108 aa, Zea mays
  Clone ID: MRT4577_84709C.1.pep
SRPIRNNVDPFDEPECEARDIFVNELLCIGTGCPYSCVKRAPHVFSFSDDTGTARAISQGNGEDDLVQLAVGQCPRKCIYYVTPCQRTILEDVLASVLMVPYDLAEAA

SEQ ID NO: 352568 - protein, 94 aa, Zea mays
  Clone ID: MRT4577_8470C.1.pep
VKMTGFSHSDRIGGNMRFLDERRIQDTICHGKDIFGMLPEAYSYRDFISKMNLEPFKTAVGLPGYLINNAKDFGFLLPGGCMRETQALTAESKS

SEQ ID NO: 352569 - protein, 258 aa, Zea mays
  Clone ID: MRT4577_84710C.1.pep
MIAVASSFPSRAHAAPFGSGTLPPPSTRRSTSLRHPRVSALGGGLEGEPGKILDPRATPFQILGLDAAAGYSAAELKAAFRARVKEFHPDVCKDPENADLIMRRVIEAYQMLSGNQEMMFERNNVDPFDEPECEARDIFVNELLCIGTGCPYSCVKRAPHVFSFSDDTGTARAISQGNGEDDLVQLAVGQCPRKCIYYVTPCQRTILEDVLASVLMVPYDLAEAAVLDSLLSKAKFENNRYKKPQRGAKSSSDYVDWM

SEQ ID NO: 352570 - protein, 238 aa, Zea mays
  unsure (1)..(238): unsure at all Xaa locations
  Clone ID: MRT4577_84711C.1.pep
MQIFVKTLTGKTITLEVESSDTIDNVKAKIQDKEGIPPDQQRLIFAGKQLEDGRTLADYNIQKESTLHLVLRLRGGMQIFVKTLTGKTITLEVESSDTIDNVKAKIQDKEGIPPDQQRLIFAGKQLEDGRTLADYNIQKESTLHLVLRLRGGMQIFVKTLTGKTITLEVESSDTIDNVKAKIQDKEGIPPDQQRLVFAGRQLEDGRTLADYXIQKXSTLHLVLRLRGXMQIFVKTSLG

SEQ ID NO: 352571 - protein, 170 aa, Zea mays
  unsure (1)..(170): unsure at all Xaa locations
  Clone ID: MRT4577_84712C.1.pep
PGFRHGFQADRSLDLLHCHHRSRLPSLRIRRPWTVARTPPGTQPRALDPTEERARATADDHQHAPTQKKPTAAKTSATRITAAKTDIRRGTPDNYLVPXLEXDDEAHKGGPEIDAADIANDLNISYNYSFAPLKQYLFHIENSAIAGDGVXTEYPKTPSEGAGRFSNLNT

SEQ ID NO: 352572 - protein, 49 aa, Zea mays
  Clone ID: MRT4577_84713C.1.pep
SITTLLKHACMHLPDLEEGLFPHRQPHTFGPGTNTQVLQDRCIHQKCFH

SEQ ID NO: 352573 - protein, 37 aa, Zea mays
  Clone ID: MRT4577_84714C.1.pep
PRRLPKKNNAILPLLYQYLVFIIPSFVCDRSGYRVNC

SEQ ID NO: 352574 - protein, 153 aa, Zea mays
  Clone ID: MRT4577_84715C.1.pep
MQIFVKTLTGKTITLEVESSDTIDNVKAKIQDKEGIPPDQQRLIFAGKQLEDGRTLADYNIQKESTLHLVLRLRGGMQIFVKTLTGKTITLEVESSDTIDNVKAKIQDKEGIPPDQQRLIFAGKQLEDGRTLADYNIQKESTLHLVLRLRGGQ

SEQ ID NO: 352575 - protein, 49 aa, Zea mays
  Clone ID: MRT4577_84716C.1.pep
NTLRDPLFLIVSQIAVYCTVRVSNLLNLELCPLSGESLFSTYIILHCTV

SEQ ID NO: 352576 - protein, 252 aa, Zea mays
  unsure (1)..(252): unsure at all Xaa locations
  Clone ID: MRT4577_84717C.1.pep
MQIFVKTLTGKTITLEVESSDTIDNVKAKIQDKEGIPPDQQRLIFAGKQLEDGRTLADYNIQKESTLHLVLRLRGGMQIFVKTLTGKTITLEVESSDTIDNVKAKIQDKEGIPPDQQRLIFAGKQLEDGRTLADYNIQKESTLHLVLRLRGGMQIFVKTLTGKTITLEVESSDTIDNVKAKIQDKEGIPPDQQRLIFAGKQLEDGRTLADYXIQKESTLHLVLRLRGGMQIFVKTLHRKTITLEGESSDTID

SEQ ID NO: 352577 - protein, 153 aa, Zea mays; identical to SEQ ID NO: 352574
  Clone ID: MRT4577_84718C.1.pep

SEQ ID NO: 352578 - protein, 128 aa, Zea mays
  Clone ID: MRT4577_84719C.1.pep
TLQQGWQGIAKERRIFFLRTKHKTLLSYMKDMEIEPDVTCYTVLIDGQCKAEYLDEARELFDEMLAKGLTPDVYVYTALINGYCSQGEIAKAEDLLQEMTDKGMKPDVLTFSVLHQRTLRHRKAHSYS

SEQ ID NO: 352579 - protein, 124 aa, Zea mays
  Clone ID: MRT4577_8471C.1.pep
MKFSVATALLAAVSGAAAYGKNGTVIVTEVVQSYTTYCPAPTQITHGDKTITVTKAGIVTITDCPCTIEKPVQTKTAETPSVLPPAPTGGVTPTKQPVPVPTAGAGKLSAAGLAGVVGLAAFVL

SEQ ID NO: 352580 - protein, 176 aa, Zea mays
  unsure (1)..(176): unsure at all Xaa locations
  Clone ID: MRT4577_84720C.1.pep
MAPLNLYSMPLSPNVLRVATVLNDKGLYFKIVPVDLTTGAHXQPDFLTLNPLLXIPALVDGNEVLFXPRAINRYIASKDASVGXTDLLPATGSTAKLHVWLXGQSRHFYPNASPLAFQLFVRPLLGXAPDAALVDKHSXQLAQVLDLYEAYLGRNKYLVVDEFTLGDANHTSYLLY

SEQ ID NO: 352581 - protein, 53 aa, Zea mays
  Clone ID: MRT4577_84721C.1.pep
ELGNTCKLTQQCISMMIQHVEHIQNLSNPCYILDISAHAKSDSPMRSGSQTIK

SEQ ID NO: 352582 - protein, 106 aa, Zea mays
  Clone ID: MRT4577_84722C.1.pep
RCCRTTGSQQPSTTCSTKKGEKWREQERPSDDVLISPLVCSHSRCRTPGEWAGTQGAVPLPAGVAAARRCPGLQGQWRSAREGEAGAVQERRGEDRGDVQRASVGG

SEQ ID NO: 352583 - protein, 102 aa, Zea mays
  Clone ID: MRT4577_84723C.1.pep
MAAKQAAEKLISEHLVAVFSKSYCPYCSQAKSVIDKLGLDKSKIGILELDTMGSEGSDIQAYLQEKTSQRTVPNIFINQKHLGGCSDLLDAQKSGKLQQLVK

SEQ ID NO: 352584 - protein, 106 aa, Zea mays
  Clone ID: MRT4577_84724C.1.pep
MKTFHVFFESLHYRILNRYKEELIVHLPKAPHKGLAFTGGCKVPQGTIRTGKGPLKTTFTFSGRNIAKDGICGRTHMHCPSIGSFPQAKVWAGDTGFLRTGLVTGN

SEQ ID NO: 352585 - protein, 302 aa, Zea mays
  unsure (1)..(302): unsure at all Xaa locations
  Clone ID: MRT4577_84725C.1.pep
MTSPSENPNPNPNTPFEIGKLFRPTNPXPTPPPTXFPGVAGGPAPSGPYSYPPVTPPXSTADPTSTTRXDPHAMTRPVVSFPMPNPNLNPNPNANPNAVAPGPNPGARLMQLLGNSGPTXSRPPSPCPRPHRNXQLQLLPAMPSAPPARMLSSTSSKVPRGRLLGTGERAVHDVDSRLPGEAQPPQLEVTPITKYTSDPGLVLGRQIAVNXVVYGLKLGNIRVLNINTALRSLLRGHTQEGLRIHLLPRRQWKPDLQTRGPRNVDRIQSNPQQTMASNGSDVVMMYGTRRCWSRPSSPSQRL

SEQ ID NO: 352586 - protein, 479 aa, Zea mays
  Clone ID: MRT4577_84726C.1.pep
MDRAAASPPAVEEPVRATSVLDSLGAEVLAVMSPVSICMALVVLLISLLSPPSSGSAAGSPPPVTAATLVYLESPNDSPGQKLLGALLDAAVFVALVAAVTFVLVALYYYRCTGFLKNYMRFSAFFVIFSMGGAIVAAVLRRLGAPLDAATVLLLLFNGAAVGVLSVFASAVPILVRQGYMVALAAIVAAWLSRLPEWTTWIMLVALALYDLVAVLAPRGPLRMLVELASSRDDELPALVYESRPTVGPATSSSSYASVMGSVEMQTMSDSGQICGNRYDRVEQEEYASHASLEMRDLGRGRSSVGEMNRPRGPVLQMENLEREVPATSAELTANQGGGSQHAIIQIEQPDEEETSPLVSAPSTNTAALDVEEHRQSSSSEPLDFEMFESTRGIKLGLGDFVFYSVLVGRAAMYDLMTVYACYLAIIAGLGCTLILLSICRHALPALPISIMLGVTFYFLTRLLMEPFVVGASTNLVMF

SEQ ID NO: 352587 - protein, 99 aa, Zea mays
  unsure (1)..(99): unsure at all Xaa locations
  Clone ID: MRT4577_84727C.1.pep
HKKNLIKIRCSTLRVWILRWEILLRLELNRNLLAWFSFCAAPGECXYPWRRGGLGGHMGFSLLVWVGLMLTVGCGPGLLVSTFVFVRGWQPVFLVCPFY

SEQ ID NO: 352588 - protein, 145 aa, Zea mays
  Clone ID: MRT4577_84728C.1.pep
FPWVCVLWFTGCSSARVCSFPVTCSGGEWTIVLGVPVVQLSRLLLGAASLSLSLELSLVFSSLELMMPCSPCAVASPCLLNIGFSCSVHLFSLASAACLCAGVFLASPWVYYVAWACCPFLAWWLAGPFLKNTPRLCRLAVELLG

SEQ ID NO: 352589 - protein, 38 aa, Zea mays
  Clone ID: MRT4577_84729C.1.pep
GFYIRNISIWEGALNDIGGFLQPMNNPVIVQYVTDVPY

SEQ ID NO: 352590 - protein, 92 aa, Zea mays
  Clone ID: MRT4577_8472C.1.pep
IFFFGKRIQIKGIWERGGLGCPKKLGGGGGGPPLCYQKQNRGLGPGEFPSGGFVLGFDSIGGACFGALNFKGGRKVLGGPPEDLFLGGVDNE

SEQ ID NO: 352591 - protein, 124 aa, Zea mays
  Clone ID: MRT4577_84730C.1.pep
MEDFYVTIPYGLLLVAGGVAGYMKRGSAASLVAGGGFGAALLLAGALSAWAFAHAGGGAAAIFATVLQIVCAVLLTVVMGIRYVKTQKIMPAGIVASISALVLIFYVYKISTGGNKVYMSVSAE

SEQ ID NO: 352592 - protein, 92 aa, Zea mays
  Clone ID: MRT4577_84731C.1.pep
TLVSRISSQIRPSSFASLTCHNDKFPVKAPRPWHPLMMPSRRKAFVPKFLCIFHSHFVGWRCFFSFRHSMSGALAFARLVPGVSHSRKKKKK

SEQ ID NO: 352593 - protein, 49 aa, Zea mays
  Clone ID: MRT4577_84732C.1.pep
NSLLLINNGMMHPQTLKMVLTTDHVSLIKKTWGAIRSHRVQRLYFPNDN

SEQ ID NO: 352594 - protein, 99 aa, Zea mays
  Clone ID: MRT4577_84733C.1.pep
MAWRASLSRSLKEIRVLFCQSSPASAAAREFVKKNYGDIKARNPSLPFLVRECSGVQPQLWARYDMGVERCVNLDGLTEAQIDKKLEELAKAGESLKTK

SEQ ID NO: 352595 - protein, 99 aa, Zea mays
  Clone ID: MRT4577_84734C.1.pep
MAWRASLSRSVKEIRVLFCQSSPASAPAREFVKKNYGDIKARNPSLPFLVRECSGVQPQLWARYDMGVERCVNLDGLTEAQIDKKLEELAMAGESLKTK

SEQ ID NO: 352596 - protein, 87 aa, Zea mays
  Clone ID: MRT4577_84735C.1.pep
IGPVLPLIFEHFLIRSPIICKMSVKTRPPLTACHVLAAVARQQDMLTWSHPWYVLSGSCLSAHDGWQHALVRFEQCFVTPCFRYVPE

SEQ ID NO: 352597 - protein, 58 aa, Zea mays
  unsure (1)..(58): unsure at all Xaa locations
  Clone ID: MRT4577_84737C.1.pep
HEAAAAAAAVXASSLVGVATAAEAPAPSPAGPTGAAAVTGPALAVGTLAVAAAGYLFC

SEQ ID NO: 352598 - protein, 82 aa, Zea mays
  Clone ID: MRT4577_84739C.1.pep
RIPVFEALLHPRRWSTLPQSATGATQADAGGSLSLHRIPFQRLRYRSDLTVVPALRLTFVLYLVLDFGCGISDRGAQWRCDW

SEQ ID NO: 352599 - protein, 83 aa, Zea mays
  Clone ID: MRT4577_8473C.1.pep
KGWLRTKKKKKKKKKKKKKKKKKKKKKKKKKKKKKKKKKKKKKKKKKKKKKKKKKEGAPLKAPILTTLCNKLKNFLKGDPNLN

SEQ ID NO: 352600 - protein, 126 aa, Zea mays
  Clone ID: MRT4577_84740C.1.pep
SLARLALGGFRLRAVPGGVAEGLRSLSLSHADVTDEAVRDIVSSCRALELLSLRSCNLLRSVRIAGETLRSLEIVRCLGVRELRVNAPSLESFAFHGDNVYSTSDDDEEDLSSAVDLGSTPALRDA

SEQ ID NO: 352601 - protein, 73 aa, Zea mays
  unsure (1)..(73): unsure at all Xaa locations
  Clone ID: MRT4577_84741C.1.pep
GTPGRLHLALRPQVGEALRRPPPFPSRRGACXXRAFRXXPRLXSVYLTLPXXSFAGLFLLXXSRXKWSVSFFF

SEQ ID NO: 352602 - protein, 67 aa, Zea mays
  Clone ID: MRT4577_84742C.1.pep
SKSFLRIYFFLTPHKQCRLQYKTHSRKQHVSLSVGPIGIVEPSSTISRHCSILKMFISSSIIYDNKN

SEQ ID NO: 352603 - protein, 79 aa, Zea mays
  Clone ID: MRT4577_84743C.1.pep
PSVSHRRRNSVERKRTVSTRQGRCRRAPHPVSEAQRRRLRHLTSAPHRCRSPALPPSTTTTAVPGPASRTSSGSRMLAA

SEQ ID NO: 352604 - protein, 178 aa, Zea mays
  unsure (1)..(178): unsure at all Xaa locations
  Clone ID: MRT4577_84744C.1.pep
MLRLSPSTLALMAVQRHTAASSSTSPFSSGQHGSFTGTPTLALIRSSTLAHTPSFSAFVGQWPYQPLVPSLPPPPPPIPPPXPPPPMGPYPPPLPPPMGPIPPLPPPMGPIPPPLPPSPIGPYPPPPPPPPPPPIGPYPPPLLPPPGPLPPPEPPVPPPPCPLPPWCPLLPWPLLPGQ

SEQ ID NO: 352605 - protein, 183 aa, Zea mays
  Clone ID: MRT4577_84745C.1.pep
MASSKVPLFLVLNLLLFAAANACPYCPGNNGHGSSGHHGSSGGGYGPIGGGGSGGGGGGGYGPIGDGGSGGGGIGPIGGGSGGIGPIGGGSGGGYGPIGGGGGGIGGGGNDGTSGWYGHCPTNALKLGVCANVLDLIKAKVGVPVNEPGCPLLNGLVELEAAGCLCTAIKANGLGLNLNIPGN

SEQ ID NO: 352606 - protein, 133 aa, Zea mays
  unsure (1)..(133): unsure at all Xaa locations
  Clone ID: MRT4577_84746C.1.pep
IRSSTLAHTPSFSAFVGQWPYQPLVPSLPPPXIPPPPPPMGPYPPPLPPPMGPIPPLPPPMGPIPPPPLPPSPIGPYPPPPPPPLPPPPIGPYPPPLLPPPGPLPPPEPPLPPPPCPLPPWCPLLPWPLLPGQ

SEQ ID NO: 352607 - protein, 98 aa, Zea mays
  Clone ID: MRT4577_84747C.1.pep
SNKRTTKASSAISHQSIIYLIMPSGMAGGAPITAPPPAFFCLCRSMFSSQPSRTNTYTRTTTFRRPYGYERARAHTHTHVIERNLHCMRLPIPRSKPR

SEQ ID NO: 352608 - protein, 317 aa, Zea mays
  Clone ID: MRT4577_84748C.1.pep
MAEDGEEKLLATVQHIVQTLGSSDTMTEDILKVFSNYDGRLSLDKLYAARAAAAAAASGGGGGGGGGGGGGIVGERSMPTSPPLPPPPAAAVSAAGPRPLVTSMERTVRALDRQISQFVAMDRLIWADSADADAFLEAVDDLIGTVQELDAAGTNRALLDRSDELLSRCMARLEDEFRELIERPDAAAPVVPGGFGSDGSDDDEEDFGAGDNYGDEPIPIAKPVTDYDVVIDALSPGSIANVHQIARRMVDAGFGRECAEAYAAARRGFVDESVARLGVRSRTAEEVHASPWEVLEFDIARWIPAFNMMFRILIPSE

SEQ ID NO: 352609 - protein, 107 aa, Zea mays
  Clone ID: MRT4577_84749C.1.pep
SFDNKRLHLRHGALSVHITTRYITRHRTSTKPKCDVQWTHTAQHTRPFCTSESSTVRHLSREKHHTLCLRTAIFILSIEPAEILNQQDHQRSHSAPPEWRTPPTRIT

SEQ ID NO: 352610 - protein, 151 aa, Zea mays
  unsure (1)..(151): unsure at all Xaa locations
  Clone ID: MRT4577_8474C.1.pep
MVLMPRTKRMALLSTPGKDSADDVATDSPTNPAPYTGAPPTAMRNTPETVVSKENHLMKXARKGSIXTMTFSVSCCRSDMMYRGTCRYDSHRCGGFFRPWTRHCDCMIXTATFTNXMAPGLRXGHEKLTEPTGSISMGICVNGGGYYHYSY

SEQ ID NO: 352611 - protein, 61 aa, Zea mays
  Clone ID: MRT4577_84750C.1.pep
VVDVLLLLPPTVERCTCRLIRSPCFLKKKKNSKKKKKKKKKKKKKKKKKKKKKKKKKKNKK

SEQ ID NO: 352612 - protein, 95 aa, Zea mays
  Clone ID: MRT4577_84751C.1.pep
SSSHTTSDTSVPIHHAPILHSHRLTTELVIINLILTNFDYHKTKFLSTLSESPPNPDNSLRNIPNFPTLSKVTYYPSLLLYHQQFKLYRLNSKVS

SEQ ID NO: 352613 - protein, 292 aa, Zea mays
  unsure (1)..(292): unsure at all Xaa locations
  Clone ID: MRT4577_84752C.1.pep
KKKKKKKKKKKKKKPAPSSVALRAGVSSMGNTLGPFIRGLFMEWENLIRRDPAQIAAQGGVIHPITRYVMNYLRPAWGSRQTLKEVMEGDFGANGGAPVAVDPDRPTXSFAGHIVXILDVLKKNLDMKSKIYRDPSFASIFLRNNGKSIIHKVNDSELGVLLGDEWIKQMTNRVRRWSMDYQRATWGKVTTVLQSGTPGIGGLPAKAMLQKLRMXXNTYFEEIYAAQSEWVIADDQLKVDIRAAVEETVMPVYASLIAKLKSSPETGRDLYIKYTPEDVVAHIQHLFEGAAK

SEQ ID NO: 352614 - protein, 189 aa, Zea mays
  Clone ID: MRT4577_84753C.1.pep
MAEDGEEKLLATVQRIVQTLGSSDTMTEDILKVFSNYDGRLSLDKLYAAAAAVPATGPRPPVTSMERTVRALDRQISQFVAMDRLIWADSADADAFLEAVDDLIGTVQELDAAGTNRALLDRADELLSRCMARLEDEFRALIERPDDAAPAVPGGFGSDGSDDDDDDFGAGDGYGDEPIPIAKPVTDYD

SEQ ID NO: 352615 - protein, 42 aa, Zea mays
  Clone ID: MRT4577_84754C.1.pep
MASWRLPPKFRCAMARATAAPQWTVNSTALRTQSAMSRRRRS

SEQ ID NO: 352616 - protein, 64 aa, Zea mays
  unsure (1)..(64): unsure at all Xaa locations
  Clone ID: MRT4577_84755C.1.pep
KGGSEFNFGGHIKKLLCWMDGEVRLGYLEGAAFFYFFFLFFLCLGGCDLLFEGLFLXILFFIFF

SEQ ID NO: 352617 - protein, 488 aa, Zea mays
  unsure (1)..(488): unsure at all Xaa locations
  Clone ID: MRT4577_84756C.1.pep
PAGRELIERPDAAAPVVPGGFGSDGTDDDQXDFGGGYLVRALPIPIAEPVKGVIVVIDALSPGSIANVHQIARRMVDAGFGRECAEAYAAARRGFVDESVARLGVRSRTAEEVHASPWEELEFDIARWIPAFNMVFRILIPSERRLCDRVFDGLAPFGDLAFIAAVRTQALQLISFGDAISSSSRSPERLFRVVDMYEAVRDILPDLDPVFSDPYSAALHAEVSAMCNTLGSSIKGIFMELENLIRRDPARVAAQGGAIHPITRYVMNYLRAACGSRQTLEEVMEGDFGANGGAPVAVDPDRPTSSLAVHIAWIMDVLQKNLDMKSKIYRDPSLASIFLMNNGKYIIHKVNDSELGVLLGDEWIKQMTNRVRRWSMDYQRATWGKVTTVLQSGTPGIGGLPAKAMLQKLRMFNTYFEEIYAAQSEWVIADDQLKVDIRAAVEETVMPVYASLIAKLKSSPETGRDLYIKYTPEDVVAHIQHLFEGAAK

SEQ ID NO: 352618 - protein, 121 aa, Zea mays
  Clone ID: MRT4577_84757C.1.pep
SLWGGGFFFAVPVAGRVPGRVPPGAWSCCFCHGWVAASCCFLRPLFRVCCSGFLCALLLKWVFARFSPAAPLLLFCFCPYPVPAGPVLFCLRSSSFGSLCFLYVNLPLWTVVVRFRYKKRR

SEQ ID NO: 352619 - protein, 169 aa, Zea mays
  Clone ID: MRT4577_84758C.1.pep
EAGGETFPAHRCVLAARSPVFAAEFFGAMEESKSGSAVHIHDMEARVFKALLHFIYTDLCWKTNEVEEEEEDDVMAQHLLVAADRYNLPRLKLICEDKLCKYIDVGTVATILALAEQHHCHGLKKACFRFLSSPENLKVAVASESFDHLSKNCPSVMKELVAMLGTLLE

SEQ ID NO: 352620 - protein, 65 aa, Zea mays
  unsure (1)..(65): unsure at all Xaa locations
  Clone ID: MRT4577_84759C.1.pep
EIEKSTSSILPLQNVFIRXVKILNAPKFHLGKLMEDHSDYKEDVGDNLXRPVEGDEDWHEVAAAA

SEQ ID NO: 352621 - protein, 77 aa, Zea mays
  unsure (1)..(77): unsure at all Xaa locations
  Clone ID: MRT4577_8475C.1.pep
MSDVRRPRASGALSVPVLSDISGYPLEEPCPETKDGXPFVXVLKEGGVLPGIKVDKGTIEVVGTDKETTTQGHDDLG

SEQ ID NO: 352622 - protein, 100 aa, Zea mays
  unsure (1)..(100): unsure at all Xaa locations
  Clone ID: MRT4577_84760C.1.pep
MQKESTLHLVLCLRGGMXIFVKSLPGKTISLXVESLGTMVAVXCKIQNKEGFPPVLXRMILPGKQMEDXAVLSVSFIQKESSLLMVFCLGGGLSAMVHLR

SEQ ID NO: 352623 - protein, 145 aa, Zea mays
  unsure (1)..(145): unsure at all Xaa locations
  Clone ID: MRT4577_84761C.1.pep
KEKPKSKNKKILDANPLIYMVPRPKKKLFAXKKNWAKNSKPXFQKKKRPWFSKKKIXFFGEEETTLGGKIVSRPKNHVQAEKKLNFPQPIFNFKAQMFVPKMWGRLKFXTKKIEFGPSGKTKSLNEPCSPGSPLICITQQRGPPL

SEQ ID NO: 352624 - protein, 45 aa, Zea mays
  Clone ID: MRT4577_84762C.1.pep
HAYAHNLYSSSGLWTTNSERSSQRQPPVLYSPLIPRLATRHVGQG

SEQ ID NO: 352625 - protein, 45 aa, Zea mays
  Clone ID: MRT4577_84763C.1.pep
ETSYFMRGNYTILYHIHKKFYLQSSFLMHSLLFRSLKHFLPLRPT

SEQ ID NO: 352626 - protein, 50 aa, Zea mays
  Clone ID: MRT4577_84764C.1.pep
KSASEAPSKTSTSSSSSTLITPSAPTISSLTTTNTLYNNLYSDKLQNAHI

SEQ ID NO: 352627 - protein, 97 aa, Zea mays
  Clone ID: MRT4577_84765C.1.pep
SLSTSQTFKIPTDSGIQWNPQSKNQGVELKNQEVELSQTSVNFDNRHSALEDSCCKICLWRVTTLAYSSTSSCSAPEVCGYDLHTTPARHKPVEKDM

SEQ ID NO: 352628 - protein, 294 aa, Zea mays
  Clone ID: MRT4577_84766C.1.pep
MDRCRAHWDDTTTRIFLDLCIAEKEKQNYNSKGLTKIGWHNLYRNFKEETRRSYDTKQLQNKFNGLKRMYSLWRLQNDKAGPGGGGGWDKSSSTVTQDADGWDNQITETSAAEDFRGKALAHEDALAVIFGPKDGTNSPSVGGGAGDRTPGGGGGGEEENHARASGDNAACPEDSARGYRSGRASPWSSQDHHIHMVGSRPAKKPKNTGYYAEGVSESMLGSRNESSSAIRREQEEVVELLQLVEKDGVSQGSELFFIATELFRSPIRRAAFRCITTPKNRVAWLRWTWDNVKM

SEQ ID NO: 352629 - protein, 120 aa, Zea mays
  unsure (1)..(120): unsure at all Xaa locations
  Clone ID: MRT4577_84767C.1.pep
MEDACRVALLDADGGGGEGGKKQQAARVWEESRKLWDIVAPAIFSRVXXYXMYVXTQXFAGHLGDXXLAAFSIAXTVVVGFNFGPHGTAIRRPPALLVCPSTKLSGRPIDRESSSVRFGS

SEQ ID NO: 352630 - protein, 48 aa, Zea mays
  Clone ID: MRT4577_84768C.1.pep
FSYFFAHLQFYKDVIAFFQRTVLIYSSTFKPASIQYSIQINYQHANIL

SEQ ID NO: 352631 - protein, 138 aa, Zea mays
  Clone ID: MRT4577_84769C.1.pep
REMRSRGRDASARAITHTDMGATADSTALPGGTRLPADGAAAPTSGLLLPRRNKLSPLPLRVQYVTRMWLIRVNTSSDYSSGVSVDDFIGNLKAKWHALSRTRALSSHTPDIADDDRWLTFDISKAMNSMCLLLTECS

SEQ ID NO: 352632 - protein, 128 aa, Zea mays
  unsure (1)..(128): unsure at all Xaa locations
  Clone ID: MRT4577_8476C.1.pep
MIASMRRYTPDYLPKIPVRAHSRPEASLWRMRTPLEGRHYALKIVTLAKTGVYIAKANRWYXDRIXAAGDARCPGKGVGGNWPALPCTAFAGADPDANDDDDLDLYGDETEEDRKACADAGQQWQGLL

SEQ ID NO: 352633 - protein, 138 aa, Zea mays
  Clone ID: MRT4577_84770C.1.pep
RRLQGEEHGRQDSSMRSTDTTTPLQHSAFSVPHGRHEDFFWYSRFFTGVPCHPQRRHGGLDGRRAAWRARRRQNGGVLCLATQGGATAGGEGDGRQRCLGFGALWPAAACPNGRLVVWSCRASAHEVGWRRSISGGRA

SEQ ID NO: 352634 - protein, 54 aa, Zea mays
  Clone ID: MRT4577_84771C.1.pep
HGGNCDRCAHTGLMSHHGHGQKHAQRQRSMIRNSHAFPLLTLDRAHVEYDGRAV

SEQ ID NO: 352635 - protein, 66 aa, Zea mays
  unsure (1)..(66): unsure at all Xaa locations
  Clone ID: MRT4577_84772C.1.pep
ALSFKHALVDKALKSALLGVPFKLKNTYKKSAKKTTVSAIHINHCQNFQPIQRDXHLKNILFNANL

SEQ ID NO: 352636 - protein, 122 aa, Zea mays
  Clone ID: MRT4577_84773C.1.pep
ATRASRFVIGVFPLMRALLIHGQVKLFPSMAPQICSRRSPCSSIHSARLPLSLLYLSWRHSWPESRSTMCSATGTGALLHLPWDMESIKCTRPTLSPWRPSACPTLGTTDSVCRYLLCGTWA

SEQ ID NO: 352637 - protein, 64 aa, Zea mays
  Clone ID: MRT4577_84774C.1.pep
IPLILLPFHNFTTFKTLKLQYLPTFIYIPLFPIPLLPQIPSPLYLSHFSTLSISQYTLPLSPLF

SEQ ID NO: 352638 - protein, 145 aa, Zea mays
  unsure (1)..(145): unsure at all Xaa locations
  Clone ID: MRT4577_84775C.1.pep
LPRRSXVLXAXAFFFFFFFFFFFFFFFLWSFKNGWPRPSPGGFTPGCPPLRRRLAAIVRFLEAAGCGVRWAPLRHVPPPGGAASARLRPCQVVCRECQPALFPAGRPYGWFWGPCPRAGLLRQLVPGAXCSGPCPALSGPRVCFA

SEQ ID NO: 352639 - protein, 192 aa, Zea mays
  Clone ID: MRT4577_84776C.1.pep
SARKARDKTWTRRPWQQQGDGHAMGGAHRRELGASSAQGEFLWGVELHLGGSSAMGEAWLGRAAEPRAEEAGVEGAYVQEANKEPKPRGRARTLRNALHAGLEMESSGVPGVRASSAAWMKGARPRGRRTGSAGGLLLWGGKRGRGRKMAGGGRRAGCVRWKLGGQDGVSNPICSPSFRLSVSVSAPGRPRG

SEQ ID NO: 352640 - protein, 167 aa, Zea mays
  Clone ID: MRT4577_84777C.1.pep
ASNVRSLLVLDRRPSCCLDRASLPTAADHRRSLFFFPVGAPPSSRQQTTHARQERPSSPSLIQRAGHFSGSELEQVSSSPWLGLLVCFLHVRSLNAGLLCPRSGSPPQPSFSHGAATSRMELDTPKVGIRPSLCSPQFQAPLAFLFALQKFPLGAGGAKLAPVSNSH

SEQ ID NO: 352641 - protein, 64 aa, Zea mays
  Clone ID: MRT4577_84778C.1.pep
LRTNTKSRCSTSLNQRTFVHIKNKVRSVDVDSAGFLGNNVVEKAMDDPDRATRILDGSPTNRLG

SEQ ID NO: 352642 - protein, 283 aa, Zea mays
  unsure (1)..(283): unsure at all Xaa locations
  Clone ID: MRT4577_84779C.1.pep
LASLEFSSESRSISPPARRSSLAAPHLQPPPLLPXAQAPSSPRAFLSSRRVSSLRRRSTGRIEHRAHPWRLPWRGPSSGPVRARSPPWPTSLLPSRXPXPRSGTPPHSSKSPASSLTRPGISWPPSFQRTQPARLPPPAIFLPLPRFPPHSSRPPALPVLLPRGRAPFIQAADDARTPGTPELSISNPACRAFLRVRARPLGLGSLFASCTYAPSTPASSALGSAALPNQASPMALLPPRWSSTPQRLESDPLSVPLNFKLPWRFFLPCRNSPWALEAPSSRR

SEQ ID NO: 352643 - protein, 67 aa, Zea mays
  Clone ID: MRT4577_8477C.1.pep
VNYLSIAPSSSSILARSGDCHCHCQAIFFLPLKVPCTSSSLACQLHKPCHVKKKPTRPRTRGRTRGL

SEQ ID NO: 352644 - protein, 160 aa, Zea mays
  Clone ID: MRT4577_84780C.1.pep
SARKARDKTWTRRPWQQQGDGHAMGVAHRRELGASSAQGEFLQGKKKRQGSLKLRGTERGSDSNLWGVELHPGGSSAMGEAWLGRAAGPARARTLRNALRAGLEMESSGVPGVRVSSAAWMKGGRPRGRRTGSAGGLLLWGGKLGRGRKMAGGGRRAGCV

SEQ ID NO: 352645 - protein, 65 aa, Zea mays
  Clone ID: MRT4577_84781C.1.pep
VLPPFYFFPALVRGFFFSVSFLGGAAVLSRSRRSCLSSHHLSVVFSRVGSPYSLGRRLLVRSRLF

SEQ ID NO: 352646 - protein, 96 aa, Zea mays
  unsure (1)..(96): unsure at all Xaa locations
  Clone ID: MRT4577_84782C.1.pep
EXXGGPTRALERAQPRPVLSFLGTIFKRAHRNIWQYLRQAKNQNMSQPHREPRQPTDNAQFTFIHKVHNLETCIISTLKKPLYCNLDPWRVRLTTR

SEQ ID NO: 352647 - protein, 252 aa, Zea mays
  unsure (1)..(252): unsure at all Xaa locations
  Clone ID: MRT4577_84783C.1.pep
KPPQIFAGLKGPTPPGPKTGLGPXPPXFPGGGPPGPFYGXRPPPPSPKGSPPRGKRGRPPPKTGPPPPXFFPPKGGPPPPKKPPXPPGFPKPGFFAGPPKAPNPGGGGGLKNPNRGQGNGGPPKPGLGMAARPPKGXGFPPPPGRGTLGLFFTGSPGFFPLGVPPSGWFKPPKLFFSXGPEPQGCPPGGVGEMGAQKTPPGLGVPLKGFKKKGVDWGFFFQKKKKKKKKKKKKKKKKKKKKKKKKKKKKKKK

SEQ ID NO: 352648 - protein, 74 aa, Zea mays
  Clone ID: MRT4577_84784C.1.pep
LVQVSAQCALDVLLEAVDHVLHQVVHLAYNVETQLMNVRIGESYVYSYNPVDRPLVLSTLCPDAACLYAMVSDV

SEQ ID NO: 352649 - protein, 89 aa, Zea mays
  Clone ID: MRT4577_84785C.1.pep
KWESSTTTAISTMCSTLSCPISSESSALCIAPVATTHRNRTESLSLLGSTVRLLGLGSHTYLPTYPMLLHVVRLNPERGCFCHGNFFPG

SEQ ID NO: 352650 - protein, 51 aa, Zea mays
  Clone ID: MRT4577_84786C.1.pep
GYMPFFVAKKYAFFFSMYVVCFVHLHVASSYIDIIASEYVESELLSADVGS

SEQ ID NO: 352651 - protein, 110 aa, Zea mays
  Clone ID: MRT4577_84787C.1.pep
RRFQGLAQHLRAERTDAGGQPRPSTCPGALSAPSVGHLVVPPVNKKTMFSLVPSNVACRSTESVIMETVSTYDFWFYSEVSSEFLMPRERWHPSCVTCRCMFPWIQVDNR

SEQ ID NO: 352652 - protein, 30 aa, Zea mays
  Clone ID: MRT4577_84788C.1.pep
KNKSVVSNSPFLDNDYLGVNAYKYGSRVVI

SEQ ID NO: 352653 - protein, 152 aa, Zea mays
  Clone ID: MRT4577_84789C.1.pep
HAFAAFALLLLTGWREQNVTLNQLIKGLCDGNRTDDAMDMVFRRMPELGYTPDVFSYNALIKGLCVEKKSQEALELLLHMTADGGYNCSPNVVSYNTIIDGFFKEGEVDKAYFLFDEMIGQGFPPDVVTYSSLIDGLCKAQAMDKAEAILHI

SEQ ID NO: 352654 - protein, 35 aa, Zea mays
  Clone ID: MRT4577_8478C.1.pep
FASVNTGPAQISYDPPRCDYDDFNILVNSSSTTFK

SEQ ID NO: 352655 - protein, 46 aa, Zea mays
  Clone ID: MRT4577_84790C.1.pep
SGRTLLLWNGFLLFIYFSFMCMSGFSSCKLTAMPLEARRVHWILQL

SEQ ID NO: 352656 - protein, 64 aa, Zea mays
  Clone ID: MRT4577_84791C.1.pep
QKALGSDLSCTVSACDIYRVVAPPGAMRRIGGKRLPIRLAKAHCQVRRSQWFRSDKPQWGFWAI

SEQ ID NO: 352657 - protein, 118 aa, Zea mays
  unsure (1)..(118): unsure at all Xaa locations
  Clone ID: MRT4577_84792C.1.pep
NTRSDALSLLDHTLGTKKFCLPRALGLSGWGDXAHIILQGSHAPIAPLLPPYLSSMIASVCENPALEPYRLQQAXVAGSNIPLSPLFQQSPAVSTVLGSVHTIKAQQLQQLVLPVINQ

SEQ ID NO: 352658 - protein, 178 aa, Zea mays
  unsure (1)..(178): unsure at all Xaa locations
  Clone ID: MRT4577_84793C.1.pep
MVLFEGSQEVSKXAYEQVSERARSLDEELTKLRTELESLRSERDKAVLEADFARDRLNGFAVELEHQRKESNSASLRNAELTRLVVDYERRLREDLDSKQALEENLRKLSMEVSTLKNAKESLEKSERRALDEVRDLTERVHRLQATIDTIHTTEEVQENARSMERRNHEEHIKRLER

SEQ ID NO: 352659 - protein, 46 aa, Zea mays
  Clone ID: MRT4577_84794C.1.pep
WKRLAIRLYFLRTIGYIRRLSQHGKTLAIYQHAFIFTFELILSPNS

SEQ ID NO: 352660 - protein, 694 aa, Zea mays
  Clone ID: MRT4577_84795C.1.pep
MPALAVDAATPVAHAFASCDAARFPAPPVVGPAAAAEAAPWSADLSAALYNVDGWGAPYFFVNDDGDVAVRPHGAATLPGQEIDLAKVVAKAAGPRAGGGLGLPLPLLVRFPDVLRHRVETLNAAFGYAVRSTGYGSRYQGVYPVKCNQDRYVVEDIVEFGAPFGFGLEAGSKPELLLAMSCLAARGGLDALLICNGYKDDGYVSLALMARSMGLNTVIVLEQEEELDIVVEASRRLGVRPVVGMRAKLRTKHAGHFGSTSGEKGKFGLSAAQILSVVTKLKAIGMLDCLQLLHFHIGSQIPTTALLSDGVGEAAQIYCELARLGADMRVIDVGGGLGIDYDGTHSAQTDMSVAYSLEEYAGAVVAAVGRVCDRKGVQHPIICSESGRALVSHHSVLVFEAFSATAPGRLDAATAYLLDELTDDCRADYRNVMAAAVRGDYDTCGLYADQLKRRSAELFKEGVLGLEHLAAVDAFCELVARGMGAPEPPRTYHINLSVFTSLPDMWAIGQQFPIIPIQRLQERPAVDGVLSDLTCDSDGKVSEFIGGRHSLPLHELPTHATRGYYLGMFLGGAYQEALGGLHNLFGGPSVVRVSQCDGPHCFAVTRAAAGPSCADVLRAMQHEPEVMYEVLKQRTDGATAAALARAFGAMPYLVFDPEAAVMSGGESSDSERSAAGAAEEEDDEEWEFMRGLTV

SEQ ID NO: 352661 - protein, 92 aa, Zea mays
  unsure (1)..(92): unsure at all Xaa locations
  Clone ID: MRT4577_84796C.1.pep
MSXLAFSFSTLISFHGQYALEKVLDINHLFDPDDVSHNSNCMTTEDITAATNAMFYNTEYSDASSPYLSHLHTDRLAAQNQYFYPTYRLIHN

SEQ ID NO: 352662 - protein, 74 aa, Zea mays
  Clone ID: MRT4577_84797C.1.pep
LEAHHLLNIQRECIPVNSRDNVGASVETAPERVTSYNTIAYNVRLKNALANHKDFHIDICPHILTMNLNKDHHD

SEQ ID NO: 352663 - protein, 77 aa, Zea mays
  Clone ID: MRT4577_84798C.1.pep
VPPRERFLVTHLRQFVPRYKQGILQQARKLFHEAGNDAPACEKTPVDLHLAVPEGDSGLAHRAQHVLDEDGRPVSTS

SEQ ID NO: 352664 - protein, 165 aa, Zea mays
  unsure (1)..(165): unsure at all Xaa locations
  Clone ID: MRT4577_84799C.1.pep
AYRRIVGALRYLVNTRPDIAFAVGFVSRFMEKPTTEHLLAVKRVLRYVAGTSDYGCYYQRRKKPAGLTGYSDSDHAGDVDTRKSTTGVVFFLGGSLITWQSQKQKIVALSSCEAEYIAAAVASCQGVWLARLLAELRGEEAEPVMLFIDNRSXALELSKTPVFHE

SEQ ID NO: 352665 - protein, 104 aa, Zea mays
  Clone ID: MRT4577_8479C.1.pep
MKACTTTTVGVTPPRDPSSASTTEASSKATGIMNIRSICHQEILTELGQAKVAASAYRQDTKNANDAGMDPRDDGSNTQEAVVQIDVKTTDPQDSADVNDTQRG

SEQ ID NO: 352666 - protein, 80 aa, Zea mays
  Clone ID: MRT4577_847C.1.pep
FWFLPHKIRYLLDPDIYTDGRISVQGIDAVLFAPDDAKATQTVDPNRKPPTIVTHKKKIKLRRDWGGHYIKKKIGGGGVD

SEQ ID NO: 352667 - protein, 61 aa, Zea mays
  Clone ID: MRT4577_84800C.1.pep
IPLAKKWGIVSSFEVHLIYFSMVSTPGPIIFVRPLIKWKKFFWGFRKKTTLFLKNLGFEYQ

SEQ ID NO: 352668 - protein, 218 aa, Zea mays
  Clone ID: MRT4577_84801C.1.pep
IWSGGELAGLSRAATGKILRRRVRAERSRSSPCLHMMPRQKGEGSAVPVPWTPGMGRNIENYVLRDQETRYRQRYLDLMVNHEVRHIFKTRSKVVSFIRKFLDDREFLEVETPMMNMIAGGAAARPFITHHNELNMRLFMRIAPELYLKELVVGGLDRVYEIGKQFKNERIDLTHNPEFTTCEFYMAYADYNELMELTETMLAGMVKDLDSGYKIKNH

SEQ ID NO: 352669 - protein, 65 aa, Zea mays
  Clone ID: MRT4577_84802C.1.pep
GLTWALIRWTARPYDPEKHCHCTITCIDTQDKGSRMSAIPGKRCRHLVPALLVVPVVASLLYCQG

SEQ ID NO: 352670 - protein, 89 aa, Zea mays
  Clone ID: MRT4577_84803C.1.pep
RCAPASRAAAPRCARSWLSRSTSSEMYRNSRSPGRLSCVDVLEDDLPVGCESVGEIWLPSNLIVVCCEVQCTGTIVINITPRKKGGRRL

SEQ ID NO: 352671 - protein, 117 aa, Zea mays
  Clone ID: MRT4577_84804C.1.pep
FTHVGAGPHLRFVFLRPPVTVPSLPLPLVPPGWVFHAASSLFHYFFPRPFRPRALGPGVSPLVRPALPGVSGPLCLLPQVLCGPLWPHIVLFVLLCWLPQTTFLWITFVAPLEVSAS

SEQ ID NO: 352672 - protein, 76 aa, Zea mays
  unsure (1)..(76): unsure at all Xaa locations
  Clone ID: MRT4577_84805C.1.pep
LERRRNSTXSSVALNTRPCYKCYKWRTVPKEEFETIRENFTKDPWICSTRPDRSCEEDDEIEYDSSRIWVLHNPAI

SEQ ID NO: 352673 - protein, 126 aa, Zea mays
  Clone ID: MRT4577_84806C.1.pep
FMQPSFFPCALILDQAAGFFSFYIELRELHVSVSTCHDRVKHRVYDCASSIHCAAVHSSLIHEFKHMLIEVTMCQYIQCRAERHMVYIIGQFIASCSGCQPVDQHSVCGRKRVGLSLYGQYASYPL

SEQ ID NO: 352674 - protein, 150 aa, Zea mays
  Clone ID: MRT4577_84807C.1.pep
LCPCSSAVRPSAASASSLRAPSMAASPPPLSCQFPAPLSFAPACGRHSSVIPAVLVDMVGHFSRHRHQPSVAFLLPTPTSSASSPGFDLQLVQAAIELARPWRSRPSLLPAPRTVIAEFTGNSSLVVPQTVSWVSAVFGGRLARQGVFHQ

SEQ ID NO: 352675 - protein, 77 aa, Zea mays
  Clone ID: MRT4577_84808C.1.pep
SHIQSLGTKFPAAMAAAVARTWFGACCAALPSRRRRRAPCAPRPTHQETSVCAVQARVPQVNDSENPQGREGTVCNL

SEQ ID NO: 352676 - protein, 97 aa, Zea mays
  Clone ID: MRT4577_84809C.1.pep
GGREGAAQEDKHRRQSQRGLRTSSGRIASDTLLLLLPLPSPAVSEQASVRRARGRRGLAGRRPWRRRRGRPSLLLLLLRPACSWGAYWSPRVRGRVG

SEQ ID NO: 352677 - protein, 153 aa, Zea mays
  unsure (1)..(153): unsure at all Xaa locations
  Clone ID: MRT4577_8480C.1.pep
RRQATRERATRPPGRPPRGRPAEPESRTRHPGARRKRPQPEPGGANTPRTDGAAAPSARQAAAPAGRPRAPAPAAHTRPQPEEPPPATAQPAPRGNXRXGTPAQARDPKQRAAAREHPRGATRXGPDGEEEAXNNEEDTNHERTSGRRRAPRP

SEQ ID NO: 352678 - protein, 184 aa, Zea mays
  Clone ID: MRT4577_84810C.1.pep
LLVFSLFGAIIHHPICSNIQPPESNRCFDCPRNRGGFRYELLKGTHIVTLYAPLIRDGRMEKFYWQPNREDIISIVHGMYIKDGLSVEEVSRIVDAFPNQALDFYGALRSRTYDQAILEWVEEIGGHEQLNEKLLKRKKGEELPTFIPPKPTLEALIESGYSLVKEQELIMSSKLSKEYMKNLE

SEQ ID NO: 352679 - protein, 96 aa, Zea mays
  Clone ID: MRT4577_84811C.1.pep
KGPGPLQGLGPKGPPPRLQGPFPYPISSGFPLRWWQWKQLRLSHFVGGFFRIHKLLVATLVVCFSIKFRMFQWPLLVFSPKIFCPFEANNICLAGF

SEQ ID NO: 352680 - protein, 129 aa, Zea mays
  Clone ID: MRT4577_84812C.1.pep
SRDRLYSFQGEPGRTDRPHPAYAATLKRRCPPSTDGDMEDRTTVPLDTVTPNAFDNQYFKNVLEHKVPFTSDQTLLDSPWTAGLVAFHAAVGQAWEAKFAKAMVKMGAIEVLTGYEGEIRQKCSMVNYY

SEQ ID NO: 352681 - protein, 93 aa, Zea mays
  unsure (1)..(93): unsure at all Xaa locations
  Clone ID: MRT4577_84813C.1.pep
NPIFNLRIHGQSGWLLPISPLLLQHSLALLQKIPGGGGLAHNIRGHQLQHLVLAHHAAYSQXQQCLAFNQLSGLNCAYYLPLQLPFSLLAAGY

SEQ ID NO: 352682 - protein, 78 aa, Zea mays
  Clone ID: MRT4577_84814C.1.pep
RGPDLPGPRQPSRRGRAAAAPPQQSVVPSSMPRAGRSPLPALSSSRSAVAEHGNASRGLRMAASCDSAARGTLVRAPP

SEQ ID NO: 352683 - protein, 72 aa, Zea mays
  Clone ID: MRT4577_84815C.1.pep
GEKTNTFYGSKSTQSSQGGLTKHLTNQVPRQTGGSPMGPQLTRGGGAKFEKRPGPCKLATLILKKEGDITGN

SEQ ID NO: 352684 - protein, 171 aa, Zea mays
  unsure (1)..(171): unsure at all Xaa locations
  Clone ID: MRT4577_84816C.1.pep
MADSPRTRVDERQSARGCDCGRGQQVGKEEQGEGWEDKWIEKRLSCTFALLSQANRLELVNSVFSALPTFLMCTLRIPVATAYEQFLELDETWGQITVTNTKDAWKFIWGSDNFSTKKTYKHLMGQAQVHQIFRSLWKNKYQPKHKVFFXWLWLKNRLNTRDMLRRKNMTL

SEQ ID NO: 352685 - protein, 188 aa, Zea mays
  unsure (1)..(188): unsure at all Xaa locations
  Clone ID: MRT4577_84817C.1.pep
KTSTIIINKQNLXFXPHKITISTNNLIXQXKHFLQKSNYSLTINLNXTXXXXNXXXPINKKYNLNLLLNTLXXKLNLKQKQIXLFKYIILSKIXNNXNNTXXLIXLXQXIPXKXXLXSXXXXXKNSQFKPTPNNKIIKFHNILIQNNLTIFIQLNKKNNXXXXXXXLKXPKNYKLPLLHIPKKFQITL

SEQ ID NO: 352686 - protein, 51 aa, Zea mays; identical to SEQ ID NO: 265587
  Clone ID: MRT4577_84818C.1.pep

SEQ ID NO: 352687 - protein, 94 aa, Zea mays
  unsure (1)..(94): unsure at all Xaa locations
  Clone ID: MRT4577_84819C.1.pep
VSYAVDRLITNGAVLASCPIDTVLRRLMMTXGEADEPRSVLYAFQEVLKIVGPNXLLLAAEAYILRAIGAATVLLGYDQFQMLLLAKMSPVRWR

SEQ ID NO: 352688 - protein, 177 aa, Zea mays
  unsure (1)..(177): unsure at all Xaa locations
  Clone ID: MRT4577_8481C.1.pep
KLKPQSNRKPSAMSATAGDEAAVAERLEALRRKLGKKQHFEEAVADLAATLRDRYAGASPALRESMYSTVCRVATVLQTRYTAPGFWRAGLNLFVATEKLLTNPAEKERLKTCILRAREHLDEKENXSQCQPTENQTXFLFEGHLTVGQEPPPPAWLVAQNLTRELNILAEPSGDQN

SEQ ID NO: 352689 - protein, 51 aa, Zea mays; identical to SEQ ID NO: 265587
  Clone ID: MRT4577_84820C.1.pep

SEQ ID NO: 352690 - protein, 51 aa, Zea mays; identical to SEQ ID NO: 265587
  Clone ID: MRT4577_84821C.1.pep

SEQ ID NO: 352691 - protein, 51 aa, Zea mays; identical to SEQ ID NO: 265587
  Clone ID: MRT4577_84822C.1.pep

SEQ ID NO: 352692 - protein, 51 aa, Zea mays; identical to SEQ ID NO: 265587
  Clone ID: MRT4577_84823C.1.pep

SEQ ID NO: 352693 - protein, 79 aa, Zea mays
  Clone ID: MRT4577_84824C.1.pep
NWGKKVFPRPHCLKTQPQVIFNPPPKKGNGPPKNKPKPPPSWGKSAKIPPKGVSAQGPTLFFFFFFFFFCLFIFFFFFL

SEQ ID NO: 352694 - protein, 45 aa, Zea mays
  Clone ID: MRT4577_84825C.1.pep
HEIRKWKKKKKKKKKKKKKKKKKKKKKKKKKKKKKKRKKKKKKGP

SEQ ID NO: 352695 - protein, 109 aa, Zea mays
  Clone ID: MRT4577_84826C.1.pep
GRVGSSIVGALLPAYIRLTATNAAVEAMTKILAKEVAAKGVTANVVAPGPVRTELFLAGKDEAFLRRVEQQSMGRIAETTDVAPVVAFLASDAAAWVNGQVIRVNGGFV

SEQ ID NO: 352696 - protein, 73 aa, Zea mays
  Clone ID: MRT4577_84827C.1.pep
FPHMEGCYKLAVHPFSIRTISFMICGPVCNIPAVFFLCCNKFLYNDMKSGSGKASRSTKKKKKKKKKNQISSC

SEQ ID NO: 352697 - protein, 51 aa, Zea mays; identical to SEQ ID NO: 256054
  Clone ID: MRT4577_84828C.1.pep

SEQ ID NO: 352698 - protein, 61 aa, Zea mays
  Clone ID: MRT4577_84829C.1.pep
MPFTPGPYSGVSTLALVARASAFGVGVVYGSIKLSILKFYASNSVLLRYHRLEFHLQHASI

SEQ ID NO: 352699 - protein, 124 aa, Zea mays
  Clone ID: MRT4577_8482C.1.pep
FLFDPTVRQDDVGGLEVLKDGMWIAVPALRDGILVILADQTEIITNGRYKSSVHRAVVNAERARLSVATFYDPSKSRKICTAPQLVSKDEPQKYRDVIYGDYVSSWYSKGPEGKRNIDALLIQK

SEQ ID NO: 352700 - protein, 76 aa, Zea mays
  Clone ID: MRT4577_84830C.1.pep
RSRSFKPALSAVHHRPKFFDYNPISIAGDGSPLWCLFLYGTPPPKSSFLMESLTTKHLGLVVKKKKTLFNQASLCP

SEQ ID NO: 352701 - protein, 47 aa, Zea mays
  Clone ID: MRT4577_84831C.1.pep
ETKIKYQLLLNDGRGVSLLIYQTGRIKCAGGQFNQAGSLNITGSPTM

SEQ ID NO: 352702 - protein, 71 aa, Zea mays
  Clone ID: MRT4577_84832C.1.pep
ITIFLFNLANTFLSCGAPSRSFTDLRGLRWFLLYYLLKISLTLPNAQTRHCKRNNYTIQLYELRRDQMLHR

SEQ ID NO: 352703 - protein, 49 aa, Zea mays
  Clone ID: MRT4577_84833C.1.pep
EQVPKTNHMVLSMKPAKFMPYSPSLNHMLPLQSAFCVVTLLKDESAEPS

SEQ ID NO: 352704 - protein, 87 aa, Zea mays
  Clone ID: MRT4577_84834C.1.pep
WGAVLKKQFRDWILLVKEGGLGFHSITKNWDHLNYGGTKGGKIEEQKQGRRLAIFQRRPLCHYRFNGFLIWFSFINLGAHARFFGTG

SEQ ID NO: 352705 - protein, 109 aa, Zea mays
  Clone ID: MRT4577_84835C.1.pep
GIGFYFFPLFFCWKQTVKPLEGPLVGFGPRNIYTFSGPPKTGIKKPFMPRGALKKPARPAPNLKVYPNPPAGGDQKQKGLGHSKPLPGPQTETGRQGGLFWENPHRRFL

SEQ ID NO: 352706 - protein, 78 aa, Zea mays
  Clone ID: MRT4577_84836C.1.pep
RLSRERASTPSMIALPACLYSSGPAMATILETIQKARLLHSQAAQGRAANLMRRRQTGEPPHRPAEAADRLLRQDPAH

SEQ ID NO: 352707 - protein, 77 aa, Zea mays
  unsure (1)..(77): unsure at all Xaa locations
  Clone ID: MRT4577_84837C.1.pep
DIHMDLDFKFLFTDLLFDSGIGPTFTLQDGFLHYLKGIFMLLSYIVIXASFFVPRQPVNNNNDAALSLSTGTLSAHA

SEQ ID NO: 352708 - protein, 48 aa, Zea mays
  Clone ID: MRT4577_84838C.1.pep
YLREGLLLGLSDGHQGFTCLNFPVEGGLKLGGYQAFFQLLAWGSGWPI

SEQ ID NO: 352709 - protein, 344 aa, Zea mays
  Clone ID: MRT4577_84839C.1.pep
STTSLSPSDRAAAAAPDLSASSDTDSASSGSNSGAGDPPRRGISVPARFWQGNNSRLRRLPEPGLPLPSSGRRSFSDSPMSPRLPGRSPSPCRGSRGAPSPSRGRSGEASPNGHTVQAPANAPSIISFAAEVRRAKKGEKRIEEAHRLRLLDNRHLQWRCINARTDATLLVQSFTAEKTLHSAWKEISRLRDNVSNKRSRLQLQKQKLKLFAILRRQMSFLEDWSHIEKHHSSALSAAIKALKASTLRLPVVDGAKADAQAVKEAVNSAVDVMNTMTSSICNLLSKVEGTSSVVSELSKLATQEQMLLDQSKDLLSTVAAIHVKNCSLQTHMLQRNQKQSPAQL

SEQ ID NO: 352710 - protein, 345 aa, Zea mays
  Clone ID: MRT4577_8483C.1.pep
METAEPARVQALAEAGVFRLPAQYIQPPEHRPTPSPSPIAAALSVPVVDLSTSTADDAVRAACADWGAFHVVGHGVPGELLDAVRAAGLAFFRAPMEDKLRFACDPARGAASEGYGSRMLANDDSVLDWRDYFDHHTLPESRCDPARWPDFVPGYRDTIAKYSHSMKDLAQKLLCIISENLSLPPSYIQEAVGEVFQNITISYYSPCPQPDLALGLQSHSDMGAITLLIQDDVGGLEVLKDGMWIPVPALRDGILVILADQTEIITNGRYKSSVHRAVVNAEHARLSVATFYDPSKSRKICTAPQLVSENEPQKYRDVIYGDYVSSWYSKGPEGKRNIDALLIQH

SEQ ID NO: 352711 - protein, 105 aa, Zea mays
  Clone ID: MRT4577_84840C.1.pep
GWILPHLCPCSQGWFRVKAQLNSGPQYFCFVCKMHGLYFFLPWACYKLIPFVPFSPCEGVFSKCFFLKKLFRLSIFGRYPLVFFFFIPFFVGRFFIKKKKNIQYY

SEQ ID NO: 352712 - protein, 87 aa, Zea mays
  unsure (1)..(87): unsure at all Xaa locations
  Clone ID: MRT4577_84841C.1.pep
VYVVHRTPHISAMHHDETSDLKIVAENFEENLEITGTSLEARKXXVVEICDIVATRAARLAAAGLAXILMKDRRDPAXRGQRSVIAS

SEQ ID NO: 352713 - protein, 61 aa, Zea mays
  Clone ID: MRT4577_84842C.1.pep
LIQGRLALPTTTPFCAATMPRLTALADLWRRRRWSRYAHHSAGFAVQHRTLQLVNVSVGCN

SEQ ID NO: 352714 - protein, 109 aa, Zea mays
  unsure (1)..(109): unsure at all Xaa locations
  Clone ID: MRT4577_84843C.1.pep
KRDFSQLYMFKWATLLXIPPTPIFIINLGGGGGGIFYPNKNGFPSWGPLFGKIFFGFWGNVPPDPFPKGPMGKKNPPPPNVVVWGNPPGGIFFPKGGWIEPIPPRGPGP

SEQ ID NO: 352715 - protein, 83 aa, Zea mays
  Clone ID: MRT4577_84844C.1.pep
LLFNQTLCASVQTKHLSPLDYDPTIDISVKGDIRLDHDLTDHKARLHIRPDYTIVVTCFSSFFYLRPSRAVHPYGHPKHCFAL

SEQ ID NO: 352716 - protein, 65 aa, Zea mays
  Clone ID: MRT4577_84845C.1.pep
INLYTSARAGKTNKTIVAVAPTFVCANRAENRREFYTDLKDQRTALAHENIQTHASKREEEKESL

SEQ ID NO: 352717 - protein, 70 aa, Zea mays
  unsure (1)..(70): unsure at all Xaa locations
  Clone ID: MRT4577_84846C.1.pep
HYSTLEIHLAAHERDGFYQHHLPRRLAGTGRXRALVTSGSLRYIHALLSVKQALVNAASLSTLTPASPNC

SEQ ID NO: 352718 - protein, 199 aa, Zea mays
  unsure (1)..(199): unsure at all Xaa locations
  Clone ID: MRT4577_84847C.1.pep
MGGSNYDDDWVLPSADITLVLVGKLGYGKSATGNSILGREAFVSEYSHASVTNTCQMGSTMLTDGRTINVIDTPGLFDMTVTPEDAGKEIVKCMNMAKDGIHAVLMVFSATSRFSREDSSTIETIKVFFGEKIVDHLVLVFTYGDLVGENLLKNMLSNAPEYLXKVVQLCXNRXVLFDNKTRDPRIRTSSSNVAFDGGI

SEQ ID NO: 352719 - protein, 188 aa, Zea mays
  Clone ID: MRT4577_84848C.1.pep
MPRSSRHRSHRSHRRGGSADRSESDGEESAPVAGAREEAAAARVSRDPEPERRRSSSGQEAVRSGNGYAEHGKKRKERVEEAVVDVVSDRWNSGVCDDHLVDKRSKSETFGHAEVEKLADRSRGSGDESKRSSRRAVAVDDRAEEVLSKSDSGKRRSEKQKDVGRKESTGHYKDNRDRENERKKKKKK

SEQ ID NO: 352720 - protein, 56 aa, Zea mays
  Clone ID: MRT4577_84849C.1.pep
CYGATTINRNDMTMCTNVAWLRLLNLLFTTIFDFFPVPSVQKIAFFFCQKKKECNI

SEQ ID NO: 352721 - protein, 92 aa, Zea mays
  unsure (1)..(92): unsure at all Xaa locations
  Clone ID: MRT4577_8484C.1.pep
CISVGEVTLRPHETPHGWDIMFYLCQLEKGDILFAEIALIGTGWSFLKPFLPPKKKDRLKXXNPGGVTKNTTAGGGGHTFRGRQGWKTRNQN

SEQ ID NO: 352722 - protein, 167 aa, Zea mays
  unsure (1)..(167): unsure at all Xaa locations
  Clone ID: MRT4577_84850C.1.pep
QKKYGPAGKPLGPPMGKPWVFFSPKGLKDFLLFFKTQYGNPPFFFPXNGIGGVYTKEKPFPLGGAFNGSQRVVFFRGPFLTFKGSINLGANGQGSFAWFLGENFEWGPGSPHRFGLVFVAPQKKSPRSLKGSPQWFKKFHFSKKPTQKIFSPALKHGASLCGGGAPP

SEQ ID NO: 352723 - protein, 35 aa, Zea mays
  Clone ID: MRT4577_84851C.1.pep
TPCTFVVPWGSRRCPQIHPWGTLSRSGESSPAMLP

SEQ ID NO: 352724 - protein, 50 aa, Zea mays
  Clone ID: MRT4577_84852C.1.pep
KGKPTEKLGIKVVTKVAKAISQIVFITTILYIQSLNGRILTLPGTVANKE

SEQ ID NO: 352725 - protein, 46 aa, Zea mays
  Clone ID: MRT4577_84853C.1.pep
IRPEPEFWCYGSLLAIYIQLKFLFTSLPSLCTSLPSSHNMLLPPPD

SEQ ID NO: 352726 - protein, 103 aa, Zea mays
  unsure (1)..(103): unsure at all Xaa locations
  Clone ID: MRT4577_84854C.1.pep
MMLAYMDRRCFADVPGGALWEEVLHWAVDNHGLAPASWTDYLRLTVGGTLSNGGVSGQSFRYGPQVSNVXELEVVTXDGERRXCSPSSHPDLFFXVVGXLXQF

SEQ ID NO: 352727 - protein, 154 aa, Zea mays
  Clone ID: MRT4577_84855C.1.pep
QTSVAINRTTPPPGNCPSPPLPLKLYCRRESAPPPDGPPDDGWFTALVASVPARTAEEVRRHYEALVEDVAAIEAGRIPLPRYAGEESSAATPEGSGAAGPSTPKDGGGGSGHRREERKGGVGADAGKSCSKAEQERRKGGAWTEEEHRLVLVG

SEQ ID NO: 352728 - protein, 119 aa, Zea mays
  Clone ID: MRT4577_84856C.1.pep
RMSLRLKWDVNRLFLPSSPIVAKQSVFWHSKGRYKQVFLQNGNRAKSIIHMKSVSGLMIWLGYRQSLDVSGHIMGGLVPVSHCRRSVVQLISPFSGSRGFILTQRIVIGCLEVEHFVQF

SEQ ID NO: 352729 - protein, 78 aa, Zea mays
  Clone ID: MRT4577_84857C.1.pep
RYKPSQWPTCTCSKFLMLGPYKTTYSDMELPEYLSFFMVCLIFLMGIRILGDSNIWIFFLVLHLKFSIAKCYQNIISS

SEQ ID NO: 352730 - protein, 319 aa, Zea mays
  Clone ID: MRT4577_84858C.1.pep
PSPPLPLKLYCRRESAPPPADQTSAMTTLATDTAAWTREEDKAFENAVAASAAPPADGPPDDGWFTALVASVPARTAEEVRRHYEALVEDVAAIEAGRIPLPRYAGEESSAATPEGSGAAGPSTPKDGGGGSGHRREERKGGVGADAGKSCSKAEQERRKGVPWTEEEHRLFLLGLDKFGKGDWRSISRNFVISRTPTQVASHAQKYFIRLNSMNRDRRRSSIHDITSVTAGEVATAGAPITGGGPTAAGAMPMGPGGMKHHHPVPPMGMYGHAPMGHPVAGHMVAPAAVGTPVMFPPGHHSPYVLPVGYPAPPTKMHQ

SEQ ID NO: 352731 - protein, 78 aa, Zea mays
  unsure (1)..(78): unsure at all Xaa locations
  Clone ID: MRT4577_84859C.1.pep
NTGCGCVIHNREKXRAAFXTILLQVSLGHQLSPGMGTVFXTPEGNNPWVSLPKGKGIQLSIIVELRKRGAXAQVAANA

SEQ ID NO: 352732 - protein, 156 aa, Zea mays
  unsure (1)..(156): unsure at all Xaa locations
  Clone ID: MRT4577_8485C.1.pep
MGSSPXALEILGREPDGISVXYGPPYTARTSRPTQKVPKTECNDTSFSTDDVRLLLTEGSFSGTDYDCHMLTVRKGFELAVLLDDVLSPTMAYHDQLPEVVLNEXNNATSWNCNTGCALYQQYNXSMSSATWPMSSPSAHESGACRMMPNDITFFD

SEQ ID NO: 352733 - protein, 140 aa, Zea mays
  unsure (1)..(140): unsure at all Xaa locations
  Clone ID: MRT4577_84860C.1.pep
LAQKKESPKTPGKKPGPPPKGGGEKKKKGGGERPKKKPPGGGRGPPKKKIGDGEXLFERPPQGXFVFVPPRKGKKGPHGPQNPGKGPGTQGPSKGGKSPPWPQKKPKGPKXPFPPGKNGGKGARPRKGGKFFPSPQKGRA

SEQ ID NO: 352734 - protein, 39 aa, Zea mays
  unsure (1)..(39): unsure at all Xaa locations
  Clone ID: MRT4577_84861C.1.pep
EVIVSGGCLLFSSVVRLATGALVVSDALFVGSAHVXRTC

SEQ ID NO: 352735 - protein, 55 aa, Zea mays
  Clone ID: MRT4577_84862C.1.pep
SVEALQANVHSLKTYKANLISFPIHSHNVHAHVSTPHELVNDTQIQGDYIPYTRS

SEQ ID NO: 352736 - protein, 108 aa, Zea mays
  unsure (1)..(108): unsure at all Xaa locations
  Clone ID: MRT4577_84863C.1.pep
GCQTPPTVHVPSSVHLPAGVHLPSWVHLPPPHQLSQPLLLPPSVHVPPPDHLTPQPCHYRTXGPXPQTHPESHPCPCQQAHTSPCQLHGTCGVGSTLILGQFLKFLMR

SEQ ID NO: 352737 - protein, 32 aa, Zea mays
  Clone ID: MRT4577_84864C.1.pep
VFNGSDHMVSTTAHELFPTTNRVQDLMLAGRC

SEQ ID NO: 352738 - protein, 131 aa, Zea mays
  unsure (1)..(131): unsure at all Xaa locations
  Clone ID: MRT4577_84865C.1.pep
ATHPTVFPVTIMFAMKCLSLLKFLMDLGCNGEPCFSCLYRNGPYPPAPPPSNRFNDAPASDKAPSAVQFCEFLSAPDVSRWAGPIIDVLLDYVGNVQLCSRLKEHIDSFEDWAVIKEKAEPXRPLAHLCRL

SEQ ID NO: 352739 - protein, 351 aa, Zea mays
  Clone ID: MRT4577_84866C.1.pep
MGRRLDVLLGRTTKQTARLKSLLGLAATRLGVVRGHRQVRCGQARGDVEQLLRLGHADRALARAEHVVREQNALDVLAELEACCNLIAERAALVDDAHRGECPEELREAAAGLVYAAARCGDLPELQEVRAILAAKFGREFVSAASNLRSGCGVNPKIVQKLSTKQPSLESRQLVLQEIAADKGIAVRIYEPPPPYEDSGSSNHSHRKTEHDGERISRTPPVDGRDEDISGHSAQRYKDVEAAAQAAFESAASAAAAAKAAMELSRGEPRGPGDRRRAGRTQMDDPEIEKQDEVLHGNKPEKIGHGRNYSSDVEITPEDDEANHGNVAVDEPKQREPARGKPASVRTKWGF

SEQ ID NO: 352740 - protein, 53 aa, Zea mays
  Clone ID: MRT4577_84867C.1.pep
VHSHHHRGGGGYIPSRPTSLPIKTFCAAYNETLHMAFNIAHEQLSLTPTTSIT

SEQ ID NO: 352741 - protein, 106 aa, Zea mays
  unsure (1)..(106): unsure at all Xaa locations
  Clone ID: MRT4577_84868C.1.pep
PHSPTPPRKQLKNPRTLPNYNIQESXDLHLILNCRRATIIKXKLSPAKKIKINTAPTDSINRIEKSAKENEGISPMQQRIIYTGKKLANDCTTXDYNIKGESVLHH

SEQ ID NO: 352742 - protein, 381 aa, Zea mays
  Clone ID: MRT4577_84869C.1.pep
MGRRLDVLLGRTTKQTARLKSLLGLAATRLGVVRGHRQVRCGQARGDVEQLLRLGHADRALARAEHVVREQNALDVLAELEACCNLIAERAALVDDAHRGECPEELREAAAGLVYAAARCGDLPELQEVRAILAAKFGREFVSAASNLRSGCGVNPKVRPGGDPRTLAGWPTDFSTLDSRLNLDSRQIVQKLSTKQPSLESRQLVLQEIAADKGIAVRIYEPPPPYEDSGSSNHSHRKTEHDGERISRTPPVDGRDEDISGHSAQRYKDVEAAAQAAFESAASAAAAAKAAMELSRGEPRGPGDRRRAGRTQMDDPEIEKQDEVLHGNKPEKIGHGRNYSSDVEITPEDDEANHGNVAVDEPKQREPARGKPASVRTKWGF

SEQ ID NO: 352743 - protein, 124 aa, Zea mays
  unsure (1)..(124): unsure at all Xaa locations
  Clone ID: MRT4577_8486C.1.pep
DRIGSTPHKPFRPPFRXAKMVNVPKTKKTYCKNKECKKHTLHKVTQYKKGKDSLSAQGKRRYDRKQSGYGGQTKPVFHKKAKTTKKIVLKLQCQSCKHYSQHAIKRCKHFEIGGDKKGKGTSLF

SEQ ID NO: 352744 - protein, 56 aa, Zea mays
  Clone ID: MRT4577_84870C.1.pep
CMKVFLGCFGLHYLKFMGFRTILVRPRNAHSTPHCECNQLQVIPDFGRFPIDRKRE

SEQ ID NO: 352745 - protein, 115 aa, Zea mays
  Clone ID: MRT4577_84871C.1.pep
QKPWQPPKDSWSLLGVNKKFGILFLIIGLWGSGQNFTRGFPWLYIGKTLPFKVWLSIQRFLHNGCKKMGKLVIPGFSQKPDYEGILKCFVQQGIAQDFKNHELDPRFEILKDAWE

SEQ ID NO: 352746 - protein, 87 aa, Zea mays
  Clone ID: MRT4577_84872C.1.pep
SHENHYRYYRRNNLSKIRLLALFESPTCDRSCDGSTSIKPPTLFYRNPTEPSETSTTPLRWLKINIAVFTRRSTRRSTASSWSMSSR

SEQ ID NO: 352747 - protein, 113 aa, Zea mays
  Clone ID: MRT4577_84873C.1.pep
THTTRTFATSLAWHHPSAGGCCDRGQVNCIPGVKIDVARRLGKPICILRLVKRCSSHVVYCCKTSHGIHSYSLATKKKKKKKKKKKKKKKKKKKKKKKKKAPKRPKIVPLRKN

SEQ ID NO: 352748 - protein, 50 aa, Zea mays
  Clone ID: MRT4577_84874C.1.pep
IKAKLEAATKAVLKIGQHMFGGGFGGSQSGFGPQGGGDQAPGAEFEGVKK

SEQ ID NO: 352749 - protein, 86 aa, Zea mays
  Clone ID: MRT4577_84875C.1.pep
MATVLGSPRAPAFFISPSSLRAAPAHTAVALPAAKVGIMGRSASIRGRLRAQATYNVKLITPEGEVELQVLDDVYILDQADEDGID

SEQ ID NO: 352750 - protein, 147 aa, Zea mays
  Clone ID: MRT4577_84876C.1.pep
AKICINDDRLLPNGAIKYTSLPSVTSPRDSSLSSGSPPSPASIVLHQRNDHERLHNNQQNLSDLKPQRYIPPGGRNCSSEMTTSVKHMQPIEGAWLHSSSNEHLGSNNDKSQASSQLGNDNSNPKQITSAENGTSDTVQQKPQYADV

SEQ ID NO: 352751 - protein, 129 aa, Zea mays
  Clone ID: MRT4577_84877C.1.pep
AARSRADPLLLPRPLPLLTPYPLLLAARAPARRRASSCLPGGAERELSALVTEPERAGARMMGARVNASANAADCGEYPQPRPPRPVRKAQRRPRQGRAQDRVTGVRQVPKPCRWRGITRSLYHFLQRP

SEQ ID NO: 352752 - protein, 285 aa, Zea mays
  Clone ID: MRT4577_84878C.1.pep
GNLAYTPPEYLRNGRVTPESVIFSFGTVLLDLLSGKRIPPSHALDIMRGRNIQAVMDSHLEGNYSIEVATTLVNLASQCLQYEPRDRPDIKKLVSILEPLQKKIEVPSYVMLGIAKPVEEPQAPPTPQRPLSPMGEACSRMDLTAIYQILFTTHYRDDEGSNELSFQEWTQQMRDMLDARKRGDSAFKDKDFKAAIDCYTQFVDVGIMVSPTVFARRSLCYLMCDQPDAALRDAMQAQIVYPDWPTAFYMQAVALSKLNMQSDAVDMLNEASQLEEKRQKSTRVP

SEQ ID NO: 352753 - protein, 79 aa, Zea mays
  Clone ID: MRT4577_84879C.1.pep
CSSGPRLVPTPRVTKGWSRIGPPWLVVPDLQSSLRSILAGTCPLCWPVHTARLVFSRSLVSRPPQIHRNFGPPLDSVGD

SEQ ID NO: 352754 - protein, 117 aa, Zea mays
  unsure (1)..(117): unsure at all Xaa locations
  Clone ID: MRT4577_8487C.1.pep
GARRTSPFRXAKMVNVPKTKKTYCKNKECKKHTLHKVTQYKKGKDSLSAQGKRRYDRKQSGYGGQTKPVFHKKAKTTKKIVLKLQCQSCKHYSQHAIKRCKHFEIGGDKKGKGTSLF

SEQ ID NO: 352755 - protein, 376 aa, Zea mays
  Clone ID: MRT4577_84880C.1.pep
MALLKAARVADVPTLDVVVAPGLVAVAKARSAAAVGGRFSVIGHRGKGMNALASEDPRLRDVRENTVRSFNDAGRFPVDYVEFDVQVTKDGCPIIFHDNFIFTQDDGKISQKRVADIQLEDFLQYGLQNEQGKVGKPLLRRLKDGRMVNWDVQSEDALCTLEEAFDKVNPRLGFNVELKFDDSLEYTEEELTRILQAILKVVFEYAKDRPILFSSFQPDAAQLMRKLQGTYPVYFLTNGGTELYADVRRNSLEEAVKLCLAGGLQGIVSEARGIFRHPAAVPKIKEANLSLLTYGTLNNVPEAVYMQHLMGVNGVIVDLVPEITEAVSELIALPLPDPDLEVGSLSNQAAARGATTPNFSQREISFLLRLIPELVQ

SEQ ID NO: 352756 - protein, 59 aa, Zea mays
  Clone ID: MRT4577_84881C.1.pep
MSKEPSPKNSGHTQFWAVKFCGIKWVLIHSYNYCLARGGKKKALAFTLGRPPYFGGGPR

SEQ ID NO: 352757 - protein, 387 aa, Zea mays
  unsure (1)..(387): unsure at all Xaa locations
  Clone ID: MRT4577_84882C.1.pep
MALLKAARVADVPTLDVVVAPGLVAVAKARSAAAVGGRFSVIGHRGKGMNALASEDPRLRDVRENTVRSFNDAGRFPVDYVEFDVQXEKRTVNTDFXVTKDGCPIIFHDNFIFTQDDGKISQKRVADIQLEDFLQYGLQNEQGKVGKPLLRRLKDGRMVNWDVQSEDALCTLEEAFDKVNPRLGFNVELKFDDSLEYTEEELTRILQAILKVVFEYAKDRPILFSSFQPDAAQLMRKLQGTYPVYFLTNGGTELYADVRRNSLEEAVKLCLAGGLQGIVSEARGIFRHPAAVPKIKEANLSLLTYGTLNNVPEAVYMQHLMGVNGVIVDLVPEITEAVSELIALPLPEPDLEVGSLSNQAAARGATTPNFSQREISFLLRLIPELVQ

SEQ ID NO: 352758 - protein, 98 aa, Zea mays
  unsure (1)..(98): unsure at all Xaa locations
  Clone ID: MRT4577_84883C.1.pep
IHLCFHHLMHSLLLLAFLVGPNARFKCAVGQIVANAFGWRPKITMTVLGLWFSFSGQNFSECLGRFCLXLHPSFFFAFVSRFNNLAELKQTLVHTFRS

SEQ ID NO: 352759 - protein, 88 aa, Zea mays
  Clone ID: MRT4577_84884C.1.pep
ELPSVYPSRSNVPEAVYMQHLMGVNGVIVDLVPEITEAVSELIALPEPDLDLEVGSLSNQAAARGATTPNFSQREISFLLRLIPELVQ

SEQ ID NO: 352760 - protein, 76 aa, Zea mays
  Clone ID: MRT4577_84885C.1.pep
WRWRWRCRCAVAGVEGNVPLEPTDLAGCESSGVRELSSASNAEAAEESSLFPEGFVRARPPNRSPDVGALVGGRTP

SEQ ID NO: 352761 - protein, 90 aa, Zea mays
  Clone ID: MRT4577_84886C.1.pep
MALLKAARVADVPTLDVVVAPGLVAVAKARSAAAVGGRFSVIGHRGKGMNALASEDPRLRDVRENTVRSFNDAGRFPVDYVEFDVQVLIN

SEQ ID NO: 352762 - protein, 75 aa, Zea mays
  Clone ID: MRT4577_84887C.1.pep
IQRWCVGMLSFHEKPSVSPREIRCLTLCTMSNCFPTRIRVVEHPFVHVGYPYEWSPRFFLTTPKKKRKGGQRKVS

SEQ ID NO: 352763 - protein, 127 aa, Zea mays
  Clone ID: MRT4577_84888C.1.pep
GFGEELCFCLDWNWTRGRTKWLGCSMPSAWAKVVLVLFTAQYLDGRFGGLVQFRSGLVFCYLAKEPVWGRYHFSWERNFLFPWIGWRSLPYKEKPSVLGSNEMKSFPKVKEKKPKGGRFRGFQVTEG

SEQ ID NO: 352764 - protein, 68 aa, Zea mays
  Clone ID: MRT4577_84889C.1.pep
EPKFFLRTTTRPQPYPTANECLGHMSRAWQDAPDWIFEQTTSRPRASAEPHPRYIIVVSRKTGRWATG

SEQ ID NO: 352765 - protein, 105 aa, Zea mays
  unsure (1)..(105): unsure at all Xaa locations
  Clone ID: MRT4577_8488C.1.pep
FNQDETRYLTDRIQNGATEVVEAKAESRSVTVSMAEAATKGADACLRAMQSEPGSYECSYAACNAADLPIXSTNVKLGRCXPEDILPIGHNNDIVRASLVATEEE

SEQ ID NO: 352766 - protein, 88 aa, Zea mays
  unsure (1)..(88): unsure at all Xaa locations
  Clone ID: MRT4577_84890C.1.pep
GRGARSCRRCRRSIHHGRGGGQKSKMARERXLEKNKGAKGSQLETNKKAMSIQCKVCMQTFMCTTTEVXCRGXAEANHPNTYXYHFFP

SEQ ID NO: 352767 - protein, 156 aa, Zea mays
  Clone ID: MRT4577_84891C.1.pep
LEPAGIHTSSIYLSLTCAYTLASHPSLRVIIEALLTLATPSRSHHPSDRHHVHWRGPVPLPCSGARKGLCRTPRRRAPRPRILPPARPSATLLLLLMPRSFHATSQTQPPRLTPLPPAAAEEHAAPNCQRGAGCCSWWRRGHSWAPAGSSRRPGCC

SEQ ID NO: 352768 - protein, 73 aa, Zea mays
  Clone ID: MRT4577_84892C.1.pep
VPFWEPRAGLLFPPCPPIGQAALTVLIGPLKLTCAPLRRPFFLAVALGVVCSKGLVWSPKPLLPKRVFPIFRG

SEQ ID NO: 352769 - protein, 272 aa, Zea mays
  Clone ID: MRT4577_84893C.1.pep
SQGLKSLQPEPAKRAWTRPILLPSPTFPQLLLPPSNPISPQGRDHAQLHRRPALYSLLRPRHVRLRPRLRGAGLFHPRRRRIHLPGAGLLRGQRRLRQDPDLPRAPVVVPRHQPSHAEVFRAAAFSRPPSLGEALARTRRNAAYFRANYALAVLAAVAASLLWHPGTLLALVLLCAAWFFLYFARGNQPLRVLGTEFDDGTVLAALCGVTVVALLFTSVGWNVVGSVMVGGALVGAHAALRTTDDLFLTEQEAAGDGLVAAGPILPTYVRIV

SEQ ID NO: 352770 - protein, 60 aa, Zea mays
  Clone ID: MRT4577_84894C.1.pep
TIIRIKWCMHATSRSVASSQSRAKSDSGKTPPPHGMFDHASHNALYSAFLLCNGGPIAEK

SEQ ID NO: 352771 - protein, 279 aa, Zea mays
  Clone ID: MRT4577_84895C.1.pep
MRNSTAAQPSTPSSAPAMSGSGPAYVAPASSTPVGGGYTYPAPASSGGSAGYARIPTYPAPPSAYPATNPPTPQVSTNAPVQDPTAPPSPLAKAGELVARLREQGQALIAARRPWAEVFRAPAFSRPPSLGEALARTRRNAAYFRANYALAVLAVVAASLLWHPGTLFVLLFLCAAWFFLYFARPAQGGQPLRVLGMEFDDGSVLAALCGVTVIAMLFTSVGWNVVGSVMIGGALVSAHAALRTTDDLFLTEQEAAGDGLLAAGMSAAGPMLPTYVRIG

SEQ ID NO: 352772 - protein, 90 aa, Zea mays
  Clone ID: MRT4577_84896C.1.pep
YPCPRLPDPLTGPAPSCHILLFLCLLFGRVAVFSLCLVTSVAVFFWFLAPGSPVPAWGPTGRFLRPRLRFVLRPPLLRGRFLCLRFVFGL

SEQ ID NO: 352773 - protein, 242 aa, Zea mays
  Clone ID: MRT4577_84897C.1.pep
MDPKPDASAPAAVPAEHAAYPRLSPEDIAPPPPPVVPPSGANPYVLSAPSPNPPAKSARENLREMFGMVGKKFNEAARKTEGIAGDVWQHLKTGPSITDTAMGRIAQISKVISEGGYDKIFQQTFECSPDEKLNKAYVCYLSTSHGPIMGVLYLSTVKIAFGSDSPVKYVTEDNKTESSFYKVVLPLHHLRSVTPTASQQNPAERYIQVVSVDNHEFWFMGFVNYDSAVKNLQESVRVVHGA

SEQ ID NO: 352774 - protein, 76 aa, Zea mays
  Clone ID: MRT4577_84898C.1.pep
INPYFAGQPNFSPPRTRPPLGVSPPLRGLFLFSKKLINLFINLLKGPLTKLLINSLKKIISPFFLNPSKTLFRGFF

SEQ ID NO: 352775 - protein, 55 aa, Zea mays
  Clone ID: MRT4577_84899C.1.pep
EGHRPLHLAVEGGHAEAVELLLDMGAEANARTRRSATQLQIAKAIEYEAIDQLLC

SEQ ID NO: 352776 - protein, 66 aa, Zea mays
  unsure (1)..(66): unsure at all Xaa locations
  Clone ID: MRT4577_8489C.1.pep
LTIEERLVQPSRVPESEIFQGQAQPXFFFLLFFYFFRAERQHLVMWRFYSNRPCDHMAHGIPNPMR

SEQ ID NO: 352777 - protein, 142 aa, Zea mays
  Clone ID: MRT4577_848C.1.pep
SGHATAFIAIEDCGIKSRAQRLLSSITNSLETVLKCNVEVKIGPLAELMDGEVTLEAGPNVRRYESDVLSCSSNSDRLKGALDSRRSSGHPDEVKKELETYKEVPIQTTKEPTIDDQRLESAWLQVTEKHTPCLVDQALHDQ

SEQ ID NO: 352778 - protein, 82 aa, Zea mays
  Clone ID: MRT4577_84901C.1.pep
PLTRPPSCYNAQDLPLSDHLTMPPGACIARQAGLIAPWLSLFSPVYTSVRIVFIDWCHNHAYVSMPCQPLCCHRCSSKNMCN

SEQ ID NO: 352779 - protein, 140 aa, Zea mays
  Clone ID: MRT4577_84902C.1.pep
APCAGGGVGPCGPTATSTTSPRAASLGFNRCRHASPQCMPPLALPYGDGGGKRRSNAGASVGRMQRCDHGLASALQRRRGGGRRGCGGSRADKEYVVVAGGIGDLARVTLRRKLSGWGGGSGAKLDRAFDADDCLDSPGR

SEQ ID NO: 352780 - protein, 189 aa, Zea mays
  unsure (1)..(189): unsure at all Xaa locations
  Clone ID: MRT4577_84903C.1.pep
METEQPEETFPNTETNGEFGKRPAEDMEEEQAFKRSRNTDEMVELRILLQSKNAGAVIGKGGKNIKALRTDYNASVSVPDSSGPERILSISADIETIGEILKKIIPTLEEGLQLPSPTATSQLPLESDAVECLNYQHYKGSDFDCELRLLIHQSLAGGIIGVKGAKIKELRENTQTXIKLFQECCPHST

SEQ ID NO: 352781 - protein, 404 aa, Zea mays
  Clone ID: MRT4577_84904C.1.pep
MPTVTCNACNAGFDDEEQQRLHYRSEWHRYNLKRKVAGVPGVTEALFLARQAALAEGSKPASTPMLYSCALCGKEYRSSKAHEQHLNSRSHLLKASQEPNASIAGITIVKPLPERVSRRAPSAVEEDQDDDEEEEWVEVDPSEMELADESTSNMQEDEHSSKSDDDMDDLEELDISSCFMCDLKHDTIEDCMVHMHKKHGFFIPDSEYLKDPSGLLTYVGLKVKRDFICLYCNDRCQSFFSLEAVRKHMDAKGHCKLRYGDGGDDEDADLEEFYDYSSSYVDSEGKQLIAVDDLNNNIELGIGGSELVITNKSEKGTRVRTLGSREFMRYYRQKPRPSVAPDRALALSLASSYKSMGLVTVQSKEQMVRLKVLRAMNRTGVETMRNKIGMKSNVIRNLPKNCPH

SEQ ID NO: 352782 - protein, 135 aa, Zea mays
  unsure (1)..(135): unsure at all Xaa locations
  Clone ID: MRT4577_84905C.1.pep
MSRKRQPQASAGPRRAGGGGGGEPSGSTSCFSLPQRPAEPKRQRIALRDVNTEVMQNTIALEPLARRVEEFDKGNWTEENTQILCDLVVEQIREGNYLHGHMKNTAYKVMAXKYYECTNLFHAPKQLENRYNQCE

SEQ ID NO: 352783 - protein, 105 aa, Zea mays
  unsure (1)..(105): unsure at all Xaa locations
  Clone ID: MRT4577_84906C.1.pep
RGSLKTSYASADTPISDSEKHFLKWKAHSISSTTYPHHAVTVLKNNFIFINNRXPFLLSKVSTINTFNHGHSNIQFLTIHIFHVKNHEHIFSLSHNSYIFYFYLT

SEQ ID NO: 352784 - protein, 326 aa, Zea mays
  Clone ID: MRT4577_84907C.1.pep
MPWWLGLFPLHLHCSVNTEVMQNTIALEPLARRVEEFDKGNWTEENTQILCDLVVEQIREGNYLHGHMKNTAYKVMAQKYYECTNLFHAPKQLENRYNQCEAMYQWINWADGEPGLCRGDNGSIIADDGWWENYTQGKYSECKKFKYGMPSYIDQLAEMFGVTTVDVWTSYVAGESEEPTYGNLDMGEEEDEVDIRSPLSSSSKKRTGSNTDTASSPPRKHKSPMIECEALIDTLQSLNSKDLDVAKQIQEDHIAKNKKLEQEKENKEIDKCFELAKECGATEETEEFYVATRIFAERYYRYVFIKMTTNAGRMAWLKKWCRDWTG

SEQ ID NO: 352785 - protein, 116 aa, Zea mays
  Clone ID: MRT4577_84908C.1.pep
GRVGSEVKVVPVREQATFLRKRFVPGAFGTLPVPSFGRVLSKLPVRANFNASVTDDDYMAGKLLSAAYEHRHIASLRTLLLETAEQMSSKPHMDMRNQAMAYKYTAEELKEMTGNA

SEQ ID NO: 352786 - protein, 218 aa, Zea mays
  Clone ID: MRT4577_84909C.1.pep
RFKFDAEAALRYAKANAMFGQVDTQYHLREVEAGAGREPLAAPEAAPQQRSELRLMETAAFRPGTSGNGAPLPMSRAGAAPARPAVGVGQPPKSILKKSTDEGSSGTTREVSRVKFVLDGADGGTLAPPPSVGGNGNGADGGSPMVAKAAKSVGFAPSQPLQPPPRTLQPPMRPAHQQPPRAVTQQLPPQPLPQHLPYHQHPRGADGPSLAPPSQLLA

SEQ ID NO: 352787 - protein, 160 aa, Zea mays
  unsure (1)..(160): unsure at all Xaa locations
  Clone ID: MRT4577_8490C.1.pep
SHRRAPPRRPHPPRRRAQRRPRSRSRARHRARNNRRXGRQRRQRSKPTPQTTQRRAPTAPQKRRPTRRSSSNKGTNXTDSRHTGTTTTTTTFLNATPPPTETRRARSLDLATAKGESRQRATLTSCPNPKRRTGRRRRKCPRPNRTRNNTIPEKKTKGEE

SEQ ID NO: 352788 - protein, 92 aa, Zea mays
  Clone ID: MRT4577_84910C.1.pep
THASLMQRQPGPAGGIWKQEGVITTNAEIRYRANIAGTHDVVSRTHPEHPQSGNRGRDLDRALGDHHATHNGGTVTIGAQLRKGRGTPTQDD

SEQ ID NO: 352789 - protein, 187 aa, Zea mays
  unsure (1)..(187): unsure at all Xaa locations
  Clone ID: MRT4577_84911C.1.pep
MTPPFPPPXPLTPAPAPPPPPPAPPLTPATAPHPTRPLPPHSRPIGTPPPPPPTPPRLRPPAPPXPPTPPPPLPSPPPPPPPPPPPPPPPPPSPPPPPPPPPPPPHPPPPLPPPPPPPPPPPPPPPPPRPXPPPPPPPPPPPPPLPPPLSPHPPPPPXPPPPXPPPPPLPLPLPPPLLPPSPPPPPP

SEQ ID NO: 352790 - protein, 105 aa, Zea mays
  unsure (1)..(105): unsure at all Xaa locations
  Clone ID: MRT4577_84912C.1.pep
QSQQLQRLMLAXFAGYYKEHDVVASNQLTASISISYSQHHLLLFNQLVAAYPQYSLPFIQLALSNCLAYIHARHLLPFKLLAGVSPAGFLTHPQMLPLYQHAKPN

SEQ ID NO: 352791 - protein, 40 aa, Zea mays
  Clone ID: MRT4577_84913C.1.pep
SSYKTSRNHRRLAKRRIEFKGFAAHRHRAPKTAASGAAPI

SEQ ID NO: 352792 - protein, 101 aa, Zea mays
  unsure (1)..(101): unsure at all Xaa locations
  Clone ID: MRT4577_84914C.1.pep
RTRGLVRTQTFVXSAFEQVDAAQLKQGNLINYGVAIXWKKKTPGVKKDXAEGHKVXAPSVETKKSTPVTRKLLKRKGGLSLYAHIEEQLFSGRLLVCIIFP

SEQ ID NO: 352793 - protein, 116 aa, Zea mays
  Clone ID: MRT4577_84915C.1.pep
PLGGAPYYPGCGHPSPMFHPLRQQFSHHQMRFMEVQSFAHQLQIIIQFEGAAPPTTTLYNPVFMQHHHQLLAPQGFTPMPIIMAQTIPPMGGLSQYQLPSSRPTPCGVSPPIPPYY

SEQ ID NO: 352794 - protein, 58 aa, Zea mays
  Clone ID: MRT4577_84916C.1.pep
TTSDPSYRTFLMIYPFEPQTRPCAVCSEMITNHMVNHLTTQHGCLFKNRRLLPIFIIP

SEQ ID NO: 352795 - protein, 118 aa, Zea mays
  Clone ID: MRT4577_84917C.1.pep
RGKSPPHPDPIFFTLPLNEPPPVLPRHQRCCELGPWNKLNLLKKWEIFFPRGGFFCPFLPNLLWRKTPIFKLKPLLGRNNREYTNVSRDPVFPLAKKKKKKKTPPQKKPTTKKKKKKK

SEQ ID NO: 352796 - protein, 105 aa, Zea mays
  Clone ID: MRT4577_84918C.1.pep
NSKNWIIWSPKLYRRFLEARKRTMTSPRHHDEARRRETWTAGQRSSGGEGAWHRGFFNRSPESGHATPSCAQESQGRSCAARKGKEALERREPRPASRVPIALRS

SEQ ID NO: 352797 - protein, 109 aa, Zea mays
  Clone ID: MRT4577_84919C.1.pep
RPVRGYTASCRVHVGTITRSPRRSSHRSIVASALHPRRRRVVTLELHQTPRGRLAESPTSMARSSLSLSTFHLQRRASVSPCLDRDLFLRFEESMIKLRRSSDLALRVP

SEQ ID NO: 352798 - protein, 116 aa, Zea mays
  Clone ID: MRT4577_8491C.1.pep
MDSAAASSLVVSPASDDRFWDGLRTRVDTIIEDRRLVASAASTCAAASGRPKRLREDSLMLVRGLDSVAASLAQLSDTLTAAQKGVNALAMCSSQVRERESGEEEPDVKRRCTAST

SEQ ID NO: 352799 - protein, 129 aa, Zea mays
  unsure (1)..(129): unsure at all Xaa locations
  Clone ID: MRT4577_84920C.1.pep
MAPRVAFFLALXLFFAAPANGCEPFCPGPVVPTPPVVPTPLLPSPGRCPINALKLKVWAHVLGLVKVGLPQPEQFCPLLEGLVALDVALCLCPPIKAKVLGIPPNMPLSLTLILNNWGKICPGGFPCPP

SEQ ID NO: 352800 - protein, 154 aa, Zea mays
  Clone ID: MRT4577_84921C.1.pep
SSNSSKSWNSWRSASTPSSLPKHRLHQRQPSPNRCSESSISQSSRSLITWSPTLDLRFLEARKRIAILATKDEAMARHGGARLLRARRRSLTASAAPTRTAAGATARRARGLLGEQFCVCTKRRERLGKMSHGGAARLVGPRSQRLGGRLRRRL

SEQ ID NO: 352801 - protein, 79 aa, Zea mays
  Clone ID: MRT4577_84922C.1.pep
NKVDRSGFSGDRRTASEQSSSERLWVGYVYMHGPHASHIHITWMVHVRSMWWSRFFTSDRTKEGRRRRTSPADSIGARA

SEQ ID NO: 352802 - protein, 118 aa, Zea mays
  Clone ID: MRT4577_84923C.1.pep
NSKNLITRSPTLDRRFLEAQEQIAICARQTTDQARKEDGDFGRMLRGVRTQAPTARTSMARRGCCLTRQTASRSLGGYRREIWGAMCFASGRGGVLGKKNRRWGGWALACGRERHPGR

SEQ ID NO: 352803 - protein, 100 aa, Zea mays
  Clone ID: MRT4577_84924C.1.pep
STARRNRQQVSKAPVGKVLGVGVSSTAHRSRATPRRAVRRRAKGRAAPRKGLVVPEGREALERRERGEGDAGVVQMAGMGGRLALFCILSKNGLHPGRPR

SEQ ID NO: 352804 - protein, 135 aa, Zea mays
  Clone ID: MRT4577_84925C.1.pep
AIGFLEAGRTLFIFLKPPLPHVLRAAAAPRPRLAASRLTLLHLALASPSLRSSSCREAPRARPLAELPAPSAKAPWRRAIRAPAHPLRVAVPGRRRSRVAMAAVMPCAHVTSAIRPLLRRSCWHVWSLHPALPRS

SEQ ID NO: 352805 - protein, 167 aa, Zea mays
  Clone ID: MRT4577_84926C.1.pep
MAARWDTPQGEPPLGNSHRALSKREEEATSYPRHRQALESGLGSAQRPVLFVGQPDLASNCKVIRHIVVVVRSRGSEESPWYLESKVSGQEQVPLDEAHGGCCAVFVRGLGRRLPVDFLAPRMDFSLIHVYILICKTSYYVINTLHYCDINLYTLCYYTKKKKKKWT

SEQ ID NO: 352806 - protein, 126 aa, Zea mays
  Clone ID: MRT4577_84927C.1.pep
PNPRTRRSLGTPGDPPRRILLYLSIDCTEGTFTKQMLRVFDLVELEEFDHFVAMLDHRFLEAHKRIAISATTSASQIFLGDRRDERLCGQDMEGSSPESRGRLGAVRLWVSRTWARWVGRGSWRRE

SEQ ID NO: 352807 - protein, 93 aa, Zea mays
  Clone ID: MRT4577_84928C.1.pep
WQTPSRLPVKALSSTFRIPHFDIGSSGSTRLKILSICLVNDNGSSSLISCEKQTIRIEFLSLQGYLWCNLCSGKVEGVKADLQEFQDFDEFED

SEQ ID NO: 352808 - protein, 46 aa, Zea mays
  Clone ID: MRT4577_84929C.1.pep
MSTRFFPIKIGWFLPPKKKKKKKKKKKKKKKKKKKKKKKKKKKPHH

SEQ ID NO: 352809 - protein, 188 aa, Zea mays
  Clone ID: MRT4577_8492C.1.pep
MARKEVTLLLFLVLLVAAVEAQLHDEPTAAAVGRRRGAKAATAPTHLHFFFHDTVSGKSPTAVRVVSPPASSPSPVFGMVNVMDDPLTEGPEQGSAPVGRAQGLYMGSDQAKIGFLQAMNLVFTAGDYNGSTLALLGRNCPLDAVRELPVVGGTGAFRFARGYALLRTHWLDFATGDATVEYDVYVTD

SEQ ID NO: 352810 - protein, 201 aa, Zea mays
  Clone ID: MRT4577_84930C.1.pep
FVAETAIHFQASRNLRSNFGDQMTYFFEFHEIEDPKHLFGEGCLWRGLWRGRTRGRTRGAEQPRQASSPGPRVRNRSLCSSPKFQTISYQRREDLGSMAPLQQTSRSWHPNPCGSPAIRVPCVLGWSSRVVAVEIAICSRASRNRRTSFSDQEIELFEFYEAEDSEHLFGEGCLWCNLCSGKEEGVEVDLQEFQEFDEFED

SEQ ID NO: 352811 - protein, 76 aa, Zea mays
  Clone ID: MRT4577_84931C.1.pep
GQQLFPPHRVQQKLWGGGSYSKYFKPQLCQGQTKNHKTPYKCQEKLQIGCRKRQFFLGRAIFRGGPEHIGFNSELG

SEQ ID NO: 352812 - protein, 124 aa, Zea mays
  Clone ID: MRT4577_84932C.1.pep
DPRGLPVYPRPFPRADDLGSVVSSHCSRASFFCMGLFPFSSEFLGSSCPYKCRPAASAETASPVARVGPPRELHWPQNFSEAGFGFVPGFMIFPACTVNCLVLERRKRQPCDREECVCNVNSYY

SEQ ID NO: 352813 - protein, 90 aa, Zea mays
  Clone ID: MRT4577_84933C.1.pep
ILTLMREAREGMDSINHSLIPNTFFTGRFRHGAFCGTGEDGGNWEGERERERWRFIEIFFFFFFFFFFFFFFFFSFPFLEGGMMSFLPFT

SEQ ID NO: 352814 - protein, 50 aa, Zea mays
  Clone ID: MRT4577_84934C.1.pep
DCNWGTIFKESLGPVMNIGTCEGPKKLSCRFEFPQIHQGMGMFCWVKPHH

SEQ ID NO: 352815 - protein, 323 aa, Zea mays
  Clone ID: MRT4577_84935C.1.pep
MVRHRNPSVVESDSDDDAPEIREDTPPRSRSKRGRGSGNVLPGSEALGSHGARGRTTLNPFGRSRPAANPQAWEATSDDEGGKDDDIDLPPANAPIIQGLVLHRAQARCSANEQVIDFTASGGSALLQDMRFQNPTFRVRDVRIDGNRFWTLLHVDFYNSVILPKKHQPILHHRFINWDGCEAIGDPKMTQELRACERKRMKTIMTFQYDWNDEVIAQFYSTLCIKNADEESPYNFPYLNFFIEGSWYKVKAQSSQGTRSRLARAQPRAKAADPGGFTSHPRAPSSNGHTFGSPEAQSSQRSNLGQIATPTDRIAGAFNARIA

SEQ ID NO: 352816 - protein, 104 aa, Zea mays
  unsure (1)..(104): unsure at all Xaa locations
  Clone ID: MRT4577_84936C.1.pep
ETYHDSPMDGERTREQAMLENRTGLADGSSWGEGVSAGRRXHPPRRGLSRELETGPRLRTSLQTTIRAERPSRSNAGLLPGRSPAYSARTGDTEGELLPTAGPH

SEQ ID NO: 352817 - protein, 79 aa, Zea mays
  Clone ID: MRT4577_84937C.1.pep
ELFSSCLRLSLFSLVSRLIVDSGISGSRHDGLRGFSSSSKGVDGPSKTYPHWDVTVLKSSFISLENRPWRMSSSLTLTS

SEQ ID NO: 352818 - protein, 219 aa, Zea mays
  Clone ID: MRT4577_84938C.1.pep
MISSPFSPMAATPTPTAAVLLARPLIALSSAFTSPHRARVPSGPSSISVPPLRSRWCQWRGPLRSLPPEGSPAELMEEDSKFVPLNADDPMYGPPALLLIGFEKGETVTIQAFLKELEGEFLKVIHCTEEMTKQTLWDAMHTEQPDLEAVKIAGPLPRICIFSGLTGEEMMMFINAFPETGLEAAAFAALVPNSAEKVLGEVIEEIMGDHEMLTGKDSK

SEQ ID NO: 352819 - protein, 95 aa, Zea mays
  Clone ID: MRT4577_84939C.1.pep
SDAHALPWSGAICRSTKELTDNNIHTKPLFGLVQSCVEEGYGFDPETLYSPSSTPSAPSYGTRIYTYYLKYTNLLPNRYELLAFYERHPPLGNWA

SEQ ID NO: 352820 - protein, 65 aa, Zea mays
  Clone ID: MRT4577_8493C.1.pep
VLCRVTKSVQRQMKENRITRLKAQTRHSRTSFLFISSKAPSSIISLFLYILLFVFFFGRVVGRVG

SEQ ID NO: 352821 - protein, 76 aa, Zea mays
  Clone ID: MRT4577_84940C.1.pep
PYRSILFMHVYDLWIVVKRRAGSFVCSVTEFVRVRRLSIIISFYTQPHTKPPEPLCTVLIYPISNSSSMFFYQKKK

SEQ ID NO: 352822 - protein, 65 aa, Zea mays
  Clone ID: MRT4577_84941C.1.pep
HALNLTSLCVSPYKSQNTKTTAAPRTFSLGPHPIFTTYPLTEIWIPLVEILCHYLPTNVASCSTT

SEQ ID NO: 352823 - protein, 103 aa, Zea mays
  unsure (1)..(103): unsure at all Xaa locations
  Clone ID: MRT4577_84942C.1.pep
NILGALVKIIRGGRPTXSYXGSTSSLIGVVSYTTTNYFVYYSLKKVYKKMFKTNEIVIAPTLVIASDSXAISSTSTIHVDVARKHMQVGAVGRTKVYKNMLHA

SEQ ID NO: 352824 - protein, 67 aa, Zea mays
  Clone ID: MRT4577_84943C.1.pep
SSLVGGRPSFFFFLFFFFFFFFFWFFNTPKRSSDFFYLQGTKGFIKRTNPLQGSPKPPGPDYKKQSC

SEQ ID NO: 352825 - protein, 183 aa, Zea mays
  unsure (1)..(183): unsure at all Xaa locations
  Clone ID: MRT4577_84944C.1.pep
MSDPETPARGGSRSFDFRADHALCSYDDXAASIEPKRPDPGDGVPDFRGSRLWRAVAEPYERESYGKEDALSAVDKCVKWYAENLLRSLEALTRRLSQLEIYCYELERSISELRNDGLRDXETDHKENTLDTHQHDSLRPIQDLRDXSDSSVAQNELAXFQLTADTSEASEDVPHIYSCLNQC

SEQ ID NO: 352826 - protein, 106 aa, Zea mays
  Clone ID: MRT4577_84945C.1.pep
TKYAHGVMQVYVWHPMPGFWDGVTHTTGPPMEHFEPALAYPVQSPGVTGNHPDIVMDSLSVLGLGLVHPHLGAELIVELHAYLASCGVSGVKVHVQIIIDTISTGQ

SEQ ID NO: 352827 - protein, 117 aa, Zea mays
  Clone ID: MRT4577_84946C.1.pep
HSWLGVLGSISQVLSLTGVGANIIIGLQKIPSFFPMLKHRCKVRRQSQSSTVLKASPRRPDGGPTPRHLARLPRLGVQAVVQHLVSPYHFKNHAVFSTWATVPLCMGGTGVQGFFRL

SEQ ID NO: 352828 - protein, 119 aa, Zea mays
  Clone ID: MRT4577_84947C.1.pep
LHFSLQPAFLPTHSLRLACSSPSPMAAPWGSPACSSARPAPARIFFLLRRALRCSSHGRRARPMLLPASRAEIPTVLPAPCRSPPMARPSSWFFSARASTPSAHHAPCSSLLPVRALLA

SEQ ID NO: 352829 - protein, 81 aa, Zea mays
  unsure (1)..(81): unsure at all Xaa locations
  Clone ID: MRT4577_84948C.1.pep
QFXQMVQLFQQHIIQPTPSTTPSPPXSPPPRGAGRNRRSNDGRSSLSDGPETAAITATPRSAVTGGMLSWSCAFERGGRLG

SEQ ID NO: 352830 - protein, 223 aa, Zea mays
  unsure (1)..(223): unsure at all Xaa locations
  Clone ID: MRT4577_84949C.1.pep
HPSGQAYVQLCKEEAVAVGAWAGRRKIRNQSYIFSPKLPPCKLHSTAEGASTNFASINCSEPQSIRRLVVAGAASARRHPRPRVPLHGFPGGPEAFELVARFCYADGGRGGAVTAANACALRCAAEFLDMAAAADAPAPEAASTAAPSLVRMTEKALEEMPHWPWHAVVDAVKQCQRRLLPLADSTGAFDAAVDALVSLMXRAPPPXDATPTGSSPESTAFRF

SEQ ID NO: 352831 - protein, 671 aa, Zea mays
  unsure (1)..(671): unsure at all Xaa locations
  Clone ID: MRT4577_8494C.1.pep
DWVPRAGRDRSPYYTTHKIMQGLLDQYTLASNEKGLDVVLRMADYFSNRVKNLVQIHTIQRHWEAMNEETGGFNDVMYQLYTITRDQKHLTMAHLFDKPCFLGPLGLHKDDISGLHVNTHLPVLVGAQKRYEVVGDRLYKDISTYLFDVVNSSHTFATGGTSTMEHWHDPKRLVDEIKISSNEETCATYNFLKVSRNLFRWTKEAKYADHYERLLINGIMGNQRGTQPGVMLYFLPMGPGRSKSVSGQSPSGLPPKNPGGWGGPNDTFWCCYGTGIESFSKLGDSIYFLEEGXVTPGLYIIQYIPSTFDWKATGLTVNQRAKPLLSTDPFFKVSLTISAKRGARQAKVSVRIPSWTTTVGATAILNGQKLNLTPTGNSTNGGFLTITKLWANDTLTLHFPITLRTEAIKDDRPEYASIQAVLFGPHLLAGLTHGKLPVTDSSHSNDGLTAGIWEVDATGAASVAGWVTPLHSETLNSQLVTLKQSIGGRTLVLSVSIADAKLEMQQQPAPGTDACVHATFRAYGQAGGSSQLLRGPNVTIEPFDRPGMAVTNGLAVGCRGGRDTLFNAVPGLDGAPGSVSLELATRPGWFVATAPTAMHANATTQVVCRANKGGAAFRRAASFARAPPLRRYHPLSFAARGTARNFLLEPLRSLQDEFYTVYFSLVSDGES

SEQ ID NO: 352832 - protein, 72 aa, Zea mays
  unsure (1)..(72): unsure at all Xaa locations
  Clone ID: MRT4577_84950C.1.pep
AGGHRKEEMGSKRIQKELKDLQKDPPTSCSASPVVFFLPHSPATIMGPSDSPYSGEDXTKTIHFSPDYPYAT

SEQ ID NO: 352833 - protein, 75 aa, Zea mays
  Clone ID: MRT4577_84951C.1.pep
GIEGKSRMVGEKCGFGRVKHPTSAGINKPESSVHNLVLGTPSHLNSLFLTCPILVPQKRTGKILNIPQKKKKKKK

SEQ ID NO: 352834 - protein, 71 aa, Zea mays
  unsure (1)..(71): unsure at all Xaa locations
  Clone ID: MRT4577_84952C.1.pep
VGDRGIXVPYKXFVRGXYEQFXVXLXXVVRXXVGSXXGTXLXIRGXXRGSTVRHAHHVGXTAASRTXXEAP

SEQ ID NO: 352835 - protein, 57 aa, Zea mays
  unsure (1)..(57): unsure at all Xaa locations
  Clone ID: MRT4577_84953C.1.pep
XLKLGDTTYLFYPLCSLRCGSFWRADVGVCADGGRGLQSYHMSDTGGXTXTTGCGAL

SEQ ID NO: 352836 - protein, 154 aa, Zea mays
  unsure (1)..(154): unsure at all Xaa locations
  Clone ID: MRT4577_84954C.1.pep
MLSKRERKKECRGYSFLVTSETVYDAHPDKLCDHXTDSTLHACLWQXPNSKVDCETCTTTNMLMVFSYITTKVDASYXQKIMXDTCXEHLRSPSYDQTIYAYRCKVLVNIEQQSPNIDAGRARRTSRYEAEEIERRETQTHMHRFTPPDDYPPS

SEQ ID NO: 352837 - protein, 116 aa, Zea mays
  Clone ID: MRT4577_84955C.1.pep
SSPWHPTPPYSLHVAQPPALLRSCSPKPSPSSPMDASSRKLRGAGFPLHAIPGSSSSSLSSPPHDSPFASREPSCSSSPDVFASCAPPDLRSPGRDDIKPCRRRCRTSCSAYTMKC

SEQ ID NO: 352838 - protein, 95 aa, Zea mays
  Clone ID: MRT4577_84956C.1.pep
IQRPKSRRSLTLLTILINNRIRIRSNMTTLTLKRKTNRIIMNITQLPRPIRRRLLHLLISLRHSRPRTSLQLRLLRLRLTLITRNRPQHQIHRNS

SEQ ID NO: 352839 - protein, 98 aa, Zea mays
  Clone ID: MRT4577_84957C.1.pep
MSAMETDINAPPPPAPAGEGSSAAGPSSSRKPNKRFEIKKWNAVALWAWDIVVDNCAICRNHIMDLCIECQANQASATSEECTVAWDNSEWEFQKYGH

SEQ ID NO: 352840 - protein, 129 aa, Zea mays
  Clone ID: MRT4577_84958C.1.pep
MKCSSKSNTSRDAGMDGTAARANKDANKGTAGRTANKPRTKSVTRSLKARLQRIVRRMKKDLNKDRDAQGVRTYVAVYLDDVLEYVVDQVLDLADDNDKDNMMTRIMLLDMLMDKQLDEELGKLMIGDS

SEQ ID NO: 352841 - protein, 55 aa, Zea mays
  Clone ID: MRT4577_8495C.1.pep
ELPATKNSSGTFINQVQLQAAAASAHISWVHSNQQQCTVTQQPPSSFNRIRTGHT

SEQ ID NO: 352842 - protein, 357 aa, Zea mays
  Clone ID: MRT4577_84960C.1.pep
MALQGRGRAAGALRGRGRQVGVESVGRTGVTIPTVAAANELYKVAKSLGLSDHDLTRIYCTSRHLKFHLAVSNKSFNLHGYTASTLHELLRGILSLSHEFIKLPDPETTLLEDPKWKWFDNCLGALDGTHIDVNVPLTNQGFLAPYRSTWYHLNECASQGNNPSTVRELFNLHHATASNVIERTLGLLKMRWAILRTSSYFVLENQIRIIHACYILHNFLRDRQRDMDNVLIHQVDIVISGAPTKNQGEMSLITHVQSTNEWSDFRDTKASEISKRQWSHGSFNSMWCEKFDMLTAALKDDGPKLPSSVEVLDSLQEVDGLDEDTKLELYDILTTNACKFESMMALPKERRKRWLMM

SEQ ID NO: 352843 - protein, 66 aa, Zea mays
  unsure (1)..(66): unsure at all Xaa locations
  Clone ID: MRT4577_84961C.1.pep
MACTRRQLWWACLLAAWCCAGXAAAAQPPARXADPLQSRXQXDFGKLTDCMDYATGHAASPSSTCV

SEQ ID NO: 352844 - protein, 37 aa, Zea mays
  Clone ID: MRT4577_84962C.1.pep
KDGCAIQVNRQLNSSHHMICCTGASRAPAATGHAQDQ

SEQ ID NO: 352845 - protein, 86 aa, Zea mays
  Clone ID: MRT4577_84963C.1.pep
FCRRLCVTATTNINKLCDSGTLYYHKKHINRARIKEAQVNQMTYIPPWWPCSFRIGLCVRDTLRPSCGQLKSSGIQLLLKYLVWSA

SEQ ID NO: 352846 - protein, 140 aa, Zea mays
  unsure (1)..(140): unsure at all Xaa locations
  Clone ID: MRT4577_84964C.1.pep
MARVAAVLVALLALFAVAATAQAPAASPKRAPAPAPPKMAPLPPPPTRAPMASPPSPPTMSPASAPSADAPATSPAGAGFGDAMAPAGASALTPAAAPVTEKSTAASXPPSASSPSPALWQPPPSCSRHPEVDLRSCSCT

SEQ ID NO: 352847 - protein, 112 aa, Zea mays
  unsure (1)..(112): unsure at all Xaa locations
  Clone ID: MRT4577_84965C.1.pep
DNGNGDESIFDQKLEVHKLVXSDTAHGVLCTVNGGRWANGXQFLVCNVESPWLVGKRVVCGQVAEGIGDVKAIEKVEGGNGYRFKVVKVQGCGQLSYILEIWYVGRSSVRHR

SEQ ID NO: 352848 - protein, 107 aa, Zea mays
  Clone ID: MRT4577_84966C.1.pep
YCPHHLVPLGGVGGSCFNKQDIVPFKQLAAVGPGVNFGQQVLSPFRQLCPASSVSFLQQEGLMPFIQEFGANPGAFLQVQRLLPFGRRGLEKPAASCLKGISGGALF

SEQ ID NO: 352849 - protein, 124 aa, Zea mays
  Clone ID: MRT4577_84967C.1.pep
ANLTQAEEETPSLFMVVVQPSMKTVHDAHYVEHVYLNEHKVLPDFDINGEQREMKWYLDTGALNHMTGDADVFSDYNHDVVEFVRFGDGSLVEVIERGSILFESKDGGHRAIHDVYHILCLRSN

SEQ ID NO: 352850 - protein, 77 aa, Zea mays
  unsure (1)..(77): unsure at all Xaa locations
  Clone ID: MRT4577_84968C.1.pep
TIACTLLLLTLIHLFAESLTQAVLTQTFSLSCSLCHKISITLSXSINNIFNYRVHLYQQVPXSVLKTIIYTTNNRPF

SEQ ID NO: 352851 - protein, 188 aa, Zea mays
  Clone ID: MRT4577_84969C.1.pep
MAGTTPRRLLLVIVPLVAVVPASAKDYMVGDSSGWKSGVDYAAWAKGKPFAIGDTLSFQYSSAHSVLEVSEADHGACSASNPLRSHQGQSTTIPLTKAGTRYFICGAPGHCASGMKVAITVSGGGGGGSSSADNTATPSGPSVRATNTKPASGGATTTDESDSSAAGSGARLAMGLLFGAAGLAAIMG

SEQ ID NO: 352852 - protein, 34 aa, Zea mays
  Clone ID: MRT4577_8496C.1.pep
GARHREVPPLGYRLDAFDWDRSREEFDLKPRRVY

SEQ ID NO: 352853 - protein, 131 aa, Zea mays
  Clone ID: MRT4577_84970C.1.pep
PLVPFSIAATSTCSIYFPTTVGLAVLLLPLMCLFSVLFADVRTPHCLVYLPTQPGPTLLPSRPLTAQFICQHIESFTIGFSSPAMGPAKSWSPGLGRRMRAPMPQGRGPHHPTPPRPGACRSQRRKRRKRT

SEQ ID NO: 352854 - protein, 106 aa, Zea mays
  unsure (1)..(106): unsure at all Xaa locations
  Clone ID: MRT4577_84971C.1.pep
MMGCLFGCFRASGDGGEAKGAGDRNTSLAPATTTTIQQDGTGRRIRPPSRNALSAVFQREDEGSRAAXAASSWAEQTGESKRMDQELEPQTIIQKNCGALLETTNN

SEQ ID NO: 352855 - protein, 211 aa, Zea mays
  Clone ID: MRT4577_84972C.1.pep
MAPAPRASSFFSVLLVLLFALSVGCASATGVFQVRRKFPRHGGRGVAEHLAALRRHDANRHGRLLGAVDLALGGVGLPTDTGLYYTRIEIGSPPKGYYVQVDTGSDILWVNCIRCDGCPTRSGLGIELTQYDPAGSGTTVGCEQEFCVANSAGGVPPTCPSTSSPCQFRITYGDGSTTTGFYVTDFVQYNQVSGNGQTTTSNASITFGCGA

SEQ ID NO: 352856 - protein, 541 aa, Zea mays
  unsure (1)..(541): unsure at all Xaa locations
  Clone ID: MRT4577_84973C.1.pep
MAPAPRASSFFSVLLVLLFALSVGRASATGVFQVRRKFPRHGGRGVAEHLAALRRHDVGRHGRLLGAVDLALGGVGLPTDTGLYYTRIEIGSPPKGYYVQVDTGSDILWVNCIRCDGCPTRSGLGERLDLTISMARPDQAMRDAPMPFLSLWSLSAWFDDFCREESSSXTLVWWQIELTQYDPAGSGTTVGCEQEFCVANSAGGVPPTCPSTSSPCQFRITYGDGSTTTGFYVTDFVQYNQVSGNGQRTTPISCCSFGCGAQLGGDLGSSNQALDGILGFGQSDSSMLSQLAAARRVRKIFAHCLDTVRGGGIFAIGNVVQPKVKTTPLVPNVTHYNVNLQGISVGGATLQLPTSTFDSGDSKGTIIDSGTTLAYFPREVYRTLLAAVFDKYQDLPLHNYQDFVCFQFSGSIDDGFPVITFSFEGDLTLNVYPDDYLFQNGNDLYCMGFLDGGVQTKDGKDMLLLGDLVLSNKLVVYDLEKEVIGWTDYNCSSSIKIEDDKTGSVYTVDAQNISAGWRFQWHNSLILLILIRTIWSCLVIA

SEQ ID NO: 352857 - protein, 100 aa, Zea mays
  unsure (1)..(100): unsure at all Xaa locations
  Clone ID: MRT4577_84974C.1.pep
HASGLLYDINGRFRLRPIRDDDAKFELCNVMSVQFGQXVITYLNSYDGCTIRYTDALIKVNVTIXIDVETNKIMDFVEFDVVNVVMVTGGSITGRVGVIK

SEQ ID NO: 352858 - protein, 61 aa, Zea mays
  Clone ID: MRT4577_84975C.1.pep
VLLHSLETGFFCREKNAGASTIMIDLPLFDRWIYSHRDWFLGRVSTKRNHRVGIRLFSIII

SEQ ID NO: 352859 - protein, 70 aa, Zea mays
  unsure (1)..(70): unsure at all Xaa locations
  Clone ID: MRT4577_84976C.1.pep
EFCASCGKISFILXYWKRHLVIGKDARRVDNLCQRIYLSYRLLEGTSHFKELHEIIEDAKAXLESEVGPL

SEQ ID NO: 352860 - protein, 64 aa, Zea mays
  Clone ID: MRT4577_84977C.1.pep
YYLPHLHCGGLLIISWAPLGSKHLQVTPPLELGGSTEPVPVLNHRHTSGKQEHKRGPLHHVGQR

SEQ ID NO: 352861 - protein, 76 aa, Zea mays
  Clone ID: MRT4577_84978C.1.pep
IGTLEAGRDRNSHSVLFSSRRRQEKVHLPHAAASQLADVSSSYRPATWSCSSQLTFGPHRTLGMNPGLLLEVKRLR

SEQ ID NO: 352862 - protein, 122 aa, Zea mays
  unsure (1)..(122): unsure at all Xaa locations
  Clone ID: MRT4577_84979C.1.pep
KQETSXGXRGQRGPADXKGRTHEGHXXSXERTKHRTXRGGRSKAGGGGXKSEDIEAGDXAXXRQXGRQTHQEXSQXGKGREXGXNQRALFEGKVAGGNGERVLRRDGDRVGQVFDCCRMLTF

SEQ ID NO: 352863 - protein, 235 aa, Zea mays
  unsure (1)..(235): unsure at all Xaa locations
  Clone ID: MRT4577_8497C.1.pep
MLVLINRYFRSRNSSPAGGGGEEMAPAATSSDHLCLPGCVPVRAKRASSSAAAAATATTARASRHNFVRAAASGLLAGAHFTNHESLPPLPYAYAEFVAAFPQYAHGALARADAIRGEEYQHLDRHVCLDYTGINLFSHAQMSASLPSTSSAPPAWQPPFFDIAYKSTSLRAQVQCXDNAAXRGRAASGAAVTRRIMASLKIPXDDXAMXXTATGNAAFRLLXESYSFQPGKSCF

SEQ ID NO: 352864 - protein, 237 aa, Zea mays
  Clone ID: MRT4577_84980C.1.pep
MAAADRQLVVAVEGTAALGPYWSTIVAEYVEKIVRSFCASELPGQKLVGTPPELALVVFHTHGPYSAFDVQRSGWTKDVDAFLSWLSGILFSGGGFSEASTCEGLAEALKILQGNPNTTQGHQNHEAQKHCILVAASNPYPLPTPVYCLPTQSTDHKENIETSKEPSIADAETVAKSFAQCSVSLSVISPKQLPTLKAIYNAGKRNLRAADPSVDHAKNPHFLVLLSENFMEARTAL

SEQ ID NO: 352865 - protein, 365 aa, Zea mays
  Clone ID: MRT4577_84981C.1.pep
ACAERVLAGVLAAPGRRDADQRALLEAVVDALPPAADAPLPAAFLCRLLRAGGTAEASAKTCRDMELRGRPVLDQATAGDLLGVALDGAGERVVNAGTLRRVVAACVERQQTQQGRRASLAGGPAGELSALEKVAKTVDEVAAEMASHESLPISKFVGVAGAVPRDARPSHNCLYRAVDIYLKTHPGLDEIEREKVCSVMDPLRLSYQARMHASQNKRLPLQAVLSVLYYDQLKIRSADGSGGTEEGWETQSAAGKARAQARADVSLARENEALRLELARMRAYVSGMQQSSKGSGSRPSSSSLVPGPATATGKKASFLGSVSRTLSRLNPFKGGWAKDTTSIADGRDRTSMHVVKPKRRRFSIG

SEQ ID NO: 352866 - protein, 49 aa, Zea mays
  Clone ID: MRT4577_84982C.1.pep
ILSRPPPLCLRFRIWMVCVNVIAISLWHRLQAMTMPSASVHPHPQGNGT

SEQ ID NO: 352867 - protein, 91 aa, Zea mays
  Clone ID: MRT4577_84983C.1.pep
VACAWKMPLRNLDARSRCLPLSTYTFTSSTLHEAILLSLTIDSLPLLASIRSMDMKNMCNEYKKAIEKEEEALRDARKRRIGSKVSAFCLL

SEQ ID NO: 352868 - protein, 69 aa, Zea mays
  unsure (1)..(69): unsure at all Xaa locations
  Clone ID: MRT4577_84984C.1.pep
VYAFGSSRCTVIETAIGKPQWSHEXQEVSLLYYDETTKSHPPIPEHIFTEAKDYMLTCXTKEPEKRSEA

SEQ ID NO: 352869 - protein, 108 aa, Zea mays
  unsure (1)..(108): unsure at all Xaa locations
  Clone ID: MRT4577_84985C.1.pep
MKPELDGVNEHALGDTTKGXVATEPDYNPASKEHRAPXDENRHAGEFGKGTTGAQGDANMNVTNSQIPLTATNSSXEDDVQVHAXPNDQRQRGHELTKSNRNDVRRDG

SEQ ID NO: 352870 - protein, 93 aa, Zea mays
  Clone ID: MRT4577_84986C.1.pep
PLPQKIFLKKSKPLGRCPSTKGGWILPPGAHFLRPFLVFPPFYICRAGPPPFCFFGAQKRFSIPLPWAGPGPPVLCPNFIRLAGTNMGTFYFF

SEQ ID NO: 352871 - protein, 59 aa, Zea mays
  Clone ID: MRT4577_84987C.1.pep
GGHPIKKKLMTVAMRRGNVKLGFLLKPARPFFFFFFFFFFFFFFFFFFFFFFFFFFSDG

SEQ ID NO: 352872 - protein, 92 aa, Zea mays
  unsure (1)..(92): unsure at all Xaa locations
  Clone ID: MRT4577_84988C.1.pep
TTIARHCQSVAIKRIEMEDAEMNTRNFKYSXLLIKLKAERDRGITIDIGLYKFENTFFFCTHTHAGGHRNCIPNMITGNSQADCDALIIDST

SEQ ID NO: 352873 - protein, 107 aa, Zea mays
  unsure (1)..(107): unsure at all Xaa locations
  Clone ID: MRT4577_84989C.1.pep
MAERGGQRGGERGGFGRGFGRGGRGDQGGRRGGRRGPRQEEEKWVPVTKLGRLVRENMITKSEEIYLHSLPGKEHHIXIDXLVPRLKDEVMKITPVQXQTQARQRTK

SEQ ID NO: 352874 - protein, 97 aa, Zea mays
  Clone ID: MRT4577_8498C.1.pep
VCSSLRLWPTLTTQPIGPTPDTAAHSVIAKERILLPWMVTVWVTWTRAGISCKNSGVVSADFASLDVCGGHRLGSSTIPSWVRCVLGSAVYTHVPLY

SEQ ID NO: 352875 - protein, 279 aa, Zea mays
  Clone ID: MRT4577_84990C.1.pep
MAERGGERGGERGGERGGFGRGFGRGGRGDRGGRRGGRRGGRQQEEEKWVPVTKLGRLVKENRINKIEEIYLHSLPVKEHQIVETLVPGLKDEVMKITPVQKQTRAGQRTRFKAFVVVGDGDGHVGLGVKCAKEVATAIRGAIILAKLSVVPVRRGYWGNKIGQPHTVPCKVTGKCGSVTVRMVPAPRGSGIVAARVPKKVLQFAGIEDVFTSSRGSTKTLGNFVKATFDCLMKTYGFLTPEFWAETKYAKTPFQEFTDLLAKPTKGLLIEAPTETVEA

SEQ ID NO: 352876 - protein, 224 aa, Zea mays
  Clone ID: MRT4577_84991C.1.pep
KKKKKKKKKKKLEEIYLHSLPVKEHQIVETLVPGLKDEVMKITPVQKQTRAGQRTRFKAFVVVGDGDGHVGLGVKCAKEVATAIRGAIILAKLSVVPVRRGYWGNKIGQPHTVPCKVTGKCGSVTVRMVPAPRGSGIVAARVPKKVLQFAGIEDVFTSSRGSTKTLGNFVKATFDCLMKTYGFLTPEFWSQTKFSMTPFQQYTDLLAKPTKGLVLEAPTETVEA

SEQ ID NO: 352877 - protein, 256 aa, Zea mays
  Clone ID: MRT4577_84992C.1.pep
MAERGGERGGERGGFGRGPRQEEEKWVPVTKLGRLVKENKITKIEEIYLHSLPVKEHQIVETLVPGLKDEVMKITPVQKQTRAGQRTRFKAFVVVGDGDGHVGLGVKCAKEVATAIRGAIILAKLSVVPVRRGYWGNKIGQPHTVPCKVTGKCGSVTVRMVPAPRGSGIVAARVPKKVLQFAGIEDVFTSSRGSTKTLGNFVKATFDCLMKTYGFLTPEFWSQTKFSMAPFQQYTDLLAKPTKGLVLEAPTETVEA

SEQ ID NO: 352878 - protein, 274 aa, Zea mays
  Clone ID: MRT4577_84994C.1.pep
MAERGGERGGERGGFGRGFGRGGRGDRGGRRGGRRGPRQEEEKWVPVTKLGRLVKENRITKIEEIYLHSLPVKEHQIIETLVPGLKDEVMKITPVQKQTRAGQRTRFKAFVVVGDGDGHVGLGVKCAKEVATAIRGAIILAKLSVVPVRRGYWGNKIGQPHTVPCKVTGKCGSVTVRMVPAPRGSGIVAARVPKKVLQFAGIEDVFTSSRGSTKTLGNFVKATFDCLMKTYGFLTPEFWSQTKFSMTPFQQYTDLLAKPTKGLVLEAPTETVEA

SEQ ID NO: 352879 - protein, 137 aa, Zea mays
  Clone ID: MRT4577_84995C.1.pep
LVWLVLGVGACGRWARLLRPLCWVRCLWRCLFLPLLFPGLSVVCVCGEVPFFCGVWFCSWCRRVLGRLVCWRGGVPAGGGRAFWARAGVSLVCLGLFFALVGVGVVGPIFFFKPSLFVGVFGERPIVGRSSSRIPVL

SEQ ID NO: 352880 - protein, 64 aa, Zea mays
  Clone ID: MRT4577_84996C.1.pep
KTNFLVYHLVLHTGNGDNDIFRKPSGTHGIAVDRSLMFVRAIRRGGGVVENCVLSCPGVALACG

SEQ ID NO: 352881 - protein, 85 aa, Zea mays
  unsure (1)..(85): unsure at all Xaa locations
  Clone ID: MRT4577_84997C.1.pep
GLGLVVPGXYYSEXKMLQCQMIVYTHTQGYRLXGSNYLMLTCNYPRSAHNNIHYDXPKYLMSPDEGEDYYPCRHVLLRHVAPATP

SEQ ID NO: 352882 - protein, 38 aa, Zea mays
  Clone ID: MRT4577_84998C.1.pep
HSYATFPGIRFHVSGRLGTIVLSTLPLSTCHKHPYVNV

SEQ ID NO: 352883 - protein, 35 aa, Zea mays
  Clone ID: MRT4577_84999C.1.pep
SLVHIKRQLTPISVVCDVRDCIAQGTSVYPVTKQH

SEQ ID NO: 352884 - protein, 100 aa, Zea mays
  Clone ID: MRT4577_8499C.1.pep
LIFRRRGRSGWIPSARCRPSHQPGHGGLSRIRIPTFGQELRKQGLLDCAEPEAQEQVAGPPTTPSAGPWRPPAPLGPSLPVTRPRVLLLSKRKLPGVCGW

SEQ ID NO: 352885 - protein, 169 aa, Zea mays
  Clone ID: MRT4577_849C.1.pep
EARRFSAASSRLRYAPRAPPPLQRPERLQHHSNATSASAAPPNNSRSRERPFLWAGRRSTEQLQRHSKSCSSRTLLQPAMTPCACRTRASTPCSSCRTTPRPRRPPTRTGILPPSSPTRRRSSSGEVSTYLPSDLDLLLCVLRRPEQEVSHHCIVLFSIIAPKFIARNI

SEQ ID NO: 352886 - protein, 108 aa, Zea mays
  Clone ID: MRT4577_84C.1.pep
MRHLCDVNSFVFFLHADSVCHVQVTGRSLSPDLMIDLSDPAGYSNLKYLPGAGNLRPEDLISIDAKDSPDWRSLVSRYRQMRQLAMVYMLLGPVQLQFMDEDEADLQM

SEQ ID NO: 352887 - protein, 85 aa, Zea mays
  Clone ID: MRT4577_85000C.1.pep
FPFNQWAALNPPGFLRQQIFFPFSQLVAANRVSFLTQHQLLPFFQRFGGNPATLLQLQQLLPFVQLVLTDPGASFQQPIIGGALF

SEQ ID NO: 352888 - protein, 48 aa, Zea mays
  Clone ID: MRT4577_85001C.1.pep
SSLSIQVSSLSSCEMTAQLACCFVTIFDFSSLPKEGSPVSGYEALDKF

SEQ ID NO: 352889 - protein, 79 aa, Zea mays
  Clone ID: MRT4577_85002C.1.pep
FFFFFCNLLLFLQWSGGSFKNTSFSSSFLLYPIPLSSMEFHRCSGARATNPLQIRLCPRLTSRWQKRSTMMYSCPWRPH

SEQ ID NO: 352890 - protein, 97 aa, Zea mays
  unsure (1)..(97): unsure at all Xaa locations
  Clone ID: MRT4577_85003C.1.pep
MAVAVKVVNPDVAVHEARFARAVERIGRARHPNLVTLVGACPAARAVVYELVPGGSLEERLDPGGGSGSAPPPLPXTQRSGVAYGACSALAFLHSTL

SEQ ID NO: 352891 - protein, 120 aa, Zea mays
  unsure (1)..(120): unsure at all Xaa locations
  Clone ID: MRT4577_85004C.1.pep
LRVRIKHIICTNNWQPKYFCFLMLLGLSAXAATATIFPQCSQAPIANFLPPFLXSRGVLRXCENPLFYPCRIQQAIQKSILPKSPLDLQQPRALPQQVPWENPLAHNIKAQLLRQLVLGN

SEQ ID NO: 352892 - protein, 200 aa, Zea mays
  Clone ID: MRT4577_85005C.1.pep
MLHPARGLTSMAHGRSSVSRPWIRRLKSSQYRARAVQICRRSPLPITGRSAIHGRSARGTIFSCKLHYDHMVLVDYLISRDVGVLCAQYLLRCLCLVSQSWHAFVDDLVYSTKIEKLNCKKQRISRDKDSNRASSSNQYKNGSGCDKEVEDSRKLFRDAKKCLYLLKRTLEDLQKKDLFPYNPKPLLRSLARFQELGEQG

SEQ ID NO: 352893 - protein, 104 aa, Zea mays
  Clone ID: MRT4577_85006C.1.pep
GWPFFGEGVRAGLFSWPPLCGRGFFFPPFLGGTARVFPVGKVFLCRPWHFVCCRPLGGAFSSAPPVGPPRFGSWGVFPSWGGFLARFGFGFPLAWWLPFGCLLG

SEQ ID NO: 352894 - protein, 101 aa, Zea mays
  unsure (1)..(101): unsure at all Xaa locations
  Clone ID: MRT4577_85007C.1.pep
GPGASGKPYSGGYMGSLVGDFPRPFFLGGVSGSPRAKKSKKGKLGFXFRXAPMSFFVEQAGGKGFSGPQRIFAFPPPGIPQRGPLSFGGVGEVAKGEKFRA

SEQ ID NO: 352895 - protein, 47 aa, Zea mays
  Clone ID: MRT4577_85008C.1.pep
VIDSCWLLVFLISIGLIHIQGPLVGGEDSKQHPDEVKERWYSTRSFS

SEQ ID NO: 352896 - protein, 103 aa, Zea mays
  Clone ID: MRT4577_85009C.1.pep
SHELTINILPLTPAQNAQNEASTSCSRLYNYRIPRGRLNSISSPSYISDLEVDYLDPPHLIHTHIILAIWACHYKLMTAKQLLPHLLNRRSASPPIRCSLNTE

SEQ ID NO: 352897 - protein, 81 aa, Zea mays
  unsure (1)..(81): unsure at all Xaa locations
  Clone ID: MRT4577_8500C.1.pep
QCQHPHPNXCXIPGTCALGSGSILCQCVQFLKHQRSPIATPYCSPQYQSSLHQCCQQLMQVESHLPYQAIFRLFVQFMLQD

SEQ ID NO: 352898 - protein, 95 aa, Zea mays
  unsure (1)..(95): unsure at all Xaa locations
  Clone ID: MRT4577_85010C.1.pep
CPRGRPGGKGTARHLMYSRRSKKEPITMAYDRARKGRRAQEEGQRKVVPPYVPFCPAWPLSFLAITLGVMSRSAHVHQEGPEYHRRAAAHPDRXP

SEQ ID NO: 352899 - protein, 67 aa, Zea mays
  unsure (1)..(67): unsure at all Xaa locations
  Clone ID: MRT4577_85011C.1.pep
PISFGRWLXALSVLLSFRDDPSLVSSLPTKFVXVVSAPWAAHVXTIVLQMCFTCVQQVVEKAWCKFL

SEQ ID NO: 352900 - protein, 104 aa, Zea mays
  unsure (1)..(104): unsure at all Xaa locations
  Clone ID: MRT4577_85012C.1.pep
MGRKDCGNHGEDDLRRSCPRLLAILLGGGLIXIVITLIIYLEDRPTHPRFYLQDASLQQLNLSNSTSPSSTLLSTNLQGRLDSHNPNXSLXGIYYNRLNKYTTN

SEQ ID NO: 352901 - protein, 487 aa, Zea mays
  Clone ID: MRT4577_85013C.1.pep
MSTAPHFVLVPLLAQGHMIPTMDLARLIASQGARVTVVLTPVNAARHRAVLEHDTRAGLAIDFAELAFPGPAVGLPEGCESFDMLADISLFATFYEALWMLPEPLEAYLRSLPRLPDCLLCDSCSSWTATVARRLGVLRIVVHFPSAFYILAAHSLAKHGAYDRAADDFEPLEVPAEFPVRAVVNRATSLGLLQWTGFERFRRDTLDAEATADGILFNTCAALEGAFVERFAAELGKRIWAVGPVCLVDSNAARATAERGDRAAVDAEQVVTWLDARPAASVLYVSFGSIARLLPPQVAELAVALEASRWPFVWSAKETAGLDAGFEERVKGRGLVVRGWAPQMAILSHPAVGGFLTHAGWNSILESLCYGVPMLTWPHFVDQFLNEALVVDVLGVGVRSGAKVPATHEMHVTIEVQVGRVDIERTVSELMDQGSSSAMRARAKELAAEVRAAMAKGGSSDADVKDIVRHVIEVAKNKREHARGHHS

SEQ ID NO: 352902 - protein, 103 aa, Zea mays
  Clone ID: MRT4577_85014C.1.pep
KVAREAWPSTPLHVQGDCKGAWGLFPAPRPAGGGNFAAWGMDNFAPLGAREIGFARGRLTRAPPPTHFFLFPMGIMVACPYPPAPCWGKNLGGWLVGKNVGLG

SEQ ID NO: 352903 - protein, 51 aa, Zea mays
  Clone ID: MRT4577_85015C.1.pep
HASANEETQVHYLGPRIQNELIHLLASAIKSKIIKKIKSAKYFSVILDCTP

SEQ ID NO: 352904 - protein, 91 aa, Zea mays
  Clone ID: MRT4577_85016C.1.pep
QSPPAAKKGHPPGRDDQETFLGSPAAQVANACELRCHPQVCANPGKQGAITGQVGGQGACDVASKQCVGSTKSGSLKPPGWGGLETPPAGG

SEQ ID NO: 352905 - protein, 62 aa, Zea mays
  unsure (1)..(62): unsure at all Xaa locations
  Clone ID: MRT4577_85017C.1.pep
GXMMHGSMMLLSYATLLRGYLLXXALLMIRMGKEWAWLFTKEKWRAYHXXSLARSNIDMPRE

SEQ ID NO: 352906 - protein, 108 aa, Zea mays
  Clone ID: MRT4577_85018C.1.pep
HEFYFLQELNWFPRIFTSQMNFNLSFLSRFSISICYLPKLDNQSGQGIISKHSNNCKCIYMCTLFSCLVMVTPLEISLVRTKEGPRSDDGRLFNGSCSDAWADAWAYA

SEQ ID NO: 352907 - protein, 330 aa, Zea mays
  unsure (1)..(330): unsure at all Xaa locations
  Clone ID: MRT4577_85019C.1.pep
MSSDDEVREEKELDLSSNDVVTKYKAAAEILNNALKIVVSQCKPKVKIVDLCEKGDSFIREQTGNVYKNAKRKIERGIAFPTCVSVNDTVCHFSPLATDDAVLEENDMVKIDMGCHIDGFIAVVAHTHVITNGPVTGRAGDVLAAANTAAEVAMRLVRPGKKXVLSVSNADTKVDDAEFEENEVYAIDIVTSTGEGKPKLLDEKQTTIYKRAVDKNYHLKMKASRFIFSEISQKFPIMPFTARALEEKRARLGLVECMNHELLQPYPVLHEKPGDLVAHIKFTVLLMPNGSDKITSHPLQELKPTKSIEDNAEIKAWLALGTKSKKRVVG

SEQ ID NO: 352908 - protein, 214 aa, Zea mays
  Clone ID: MRT4577_8501C.1.pep
MAQDLRSQDIKNPIDVAEYLFRRLQQVGVESVHGVPGDYNLVALDYIPKVGLKWVGNCNELNAGYAADGYARVKGISALVTTFGVGELSAVNAIAGAYSEYVPIVHIVGYPSTASQKNGALLHHTLGNGDFTVFSRMSKEISCAVSMLNSQHEAAMLIDNAIRECYLKSRPVYISLPSDMVTKKVDGDRLNTPLDLEYPQNDQEAEDYVCRCGL

SEQ ID NO: 352909 - protein, 64 aa, Zea mays
  Clone ID: MRT4577_85020C.1.pep
TLYGCSLLTSDDITRICETLCPVWMKWPSLIYGSSKLTDRAVVIGCNRDPWAVMHLDRLAFRNG

SEQ ID NO: 352910 - protein, 364 aa, Zea mays
  Clone ID: MRT4577_85021C.1.pep
MSSDDEVREEKELDLSSNDVVTKYKAAAEILNNALKIVVSQCKPKVKIVDLCEKGDSFIREQTGNVYKNAKRKIERGIAFPTCVSVNDTVCHFSPLATDDAVLEENDMVKIDMGCHIDGFIAVVAHTHVITNGPVTGRAGDVLAAAYDCKIVEGVLSHQLKQFVIDGNKVVLSVSNADTKVDDAEFEENEVYAIDIVTSTGEGKPKLLDEKQTTIYKRAVDKNYHLKMKASRFIFSEISQKFPIMPFTARALEEKRARLGLVECMNHELLQPYPVLHEKPGDLVAHIKFTVLLMPNGSDKITSHPLQELKPTKSIEDNAEIKAWLALGTKSKKKGGGKKKKGKKGDAAEADPMEEATNGATSQE

SEQ ID NO: 352911 - protein, 394 aa, Zea mays
  Clone ID: MRT4577_85022C.1.pep
MSSDDEVREEKELDLSSNDVVTKYKAAAEILNNALKIVVSQCKPKVKIVDLCEKGDSFIREQTGNVYKNAKRKIERGIAFPTCVSVNDTVCHFSPLATDDAVLEENDMVKIDMGCHIDGFIAVVAHTHVITNGPVTGRAGDVLAAANTAAEVAMRLVRPGKKNKDVTEAIQKVAAAYDCKIVEGVLSHQLKQFVIDGNKVVLSVSNADTKVDDAEFEENEVYAIDIVTSTGEGKPKLLDEKQTTIYKRAVDKNYHLKMKASRFIFSEISQKFPIMPFTARALEEKRARLGLVECMNHELLQPYPVLHEKPGDLVAHIKFTVLLMPNGSDKITSHPLQELKPTKSIEDNAEIKAWLALGTKSKKKGGGKKKKGKKGDAAEADPMEEATNGATSQE

SEQ ID NO: 352912 - protein, 57 aa, Zea mays
  Clone ID: MRT4577_85023C.1.pep
PHWRRVQDTTRANCCAMTNIYISKWMGQSGKYNTSAVREIRLRVYGSPPKIIIYSPY

SEQ ID NO: 352913 - protein, 281 aa, Zea mays
  unsure (1)..(281): unsure at all Xaa locations
  Clone ID: MRT4577_85024C.1.pep
DCSPTSPQWLGPQIEVIRAATKSIEREINSVNDNPLIDVSRGKAIHGGNFQGTPIGVSMDNTRLAIAAIGKLMFAQFSELVNDFYNNGLPSNLSGGRNPSLDYGFKGAEIAMASYCSELQFLGNPVTNHVQSAEQHNQDVNSLGLISARKTAEAIDILKLMSSTFLVALCQAIDLRHLEENVKNAVKDCVTRVVRKTLITNDMGGLHNARFCEKDLIRTIDREAVFAYADDPCSANYPLMKKMRAVLVEHALXNGEAEXHAETSVFARLXQIEQELCANYL

SEQ ID NO: 352914 - protein, 181 aa, Zea mays
  Clone ID: MRT4577_85025C.1.pep
MSMSLHASYVVPSLVSFSSHPMFPAARCSVPGLYPHPNAAACRRAPPPTAVSAKARRSSRGSRRERSWDDGGGSDSDVDDGFFGQEQGEEDEPTPSPAGRPAPAAPQLRGSDVLRALQRAAAAKEAARNKKKPAARQRQGKERPAGGDVEAREVRPVVIRPEWTARIRELELRVQQLAADK

SEQ ID NO: 352915 - protein, 100 aa, Zea mays
  unsure (1)..(100): unsure at all Xaa locations
  Clone ID: MRT4577_85026C.1.pep
GWGPWSLVRAGHPVTRWFPGVALEFLXWFASARVLRPGGLLWVVPFWCRRSDLGGVFPAMLRRLGYKAIQWVAPDKSVAIGGCSSKDEVYLAALLQKSFS

SEQ ID NO: 352916 - protein, 74 aa, Zea mays
  Clone ID: MRT4577_85027C.1.pep
INFNVISFKRGVHHLVPHSGYYLGPGWGRQKKLKGPFCLEKKLRKNSSLPHFNHKFVVAIRFKMRPKLFFFFFN

SEQ ID NO: 352917 - protein, 80 aa, Zea mays
  unsure (1)..(80): unsure at all Xaa locations
  Clone ID: MRT4577_85028C.1.pep
SINFFSHQGLXHSTRMEIEASEKRNLGLLNCMSLAATTANPDELLSIFSWRGWAAELRDCSFSLILVSSLVHICASAVII

SEQ ID NO: 352918 - protein, 101 aa, Zea mays
  Clone ID: MRT4577_85029C.1.pep
VNVNDGVMYEANTASRSCSGLTRESRNRVVQSRRILGADDERHRVAHVIVLRRAASEALALQQERRHHGVPIGEDLHVLLQSSTLHRMRHDIVLLETPVPQ

SEQ ID NO: 352919 - protein, 186 aa, Zea mays
  Clone ID: MRT4577_8502C.1.pep
PRCVVPRRPLAPRQPARRPLQPSPRDTGAPLHLVHPRARIPCYPRRPSRHAPPASDPWPARLLSGPLLRRALLPLALEPCNPLSQPRDLAIPGASGAAGFKNWRGFGYLGGPRRGIRGIHRAASPVQLGCHPCAARSSAHHQFPPTAPHLGSLPRHHVGLPSGLTRLSRLAPATTSSPGAPVSGCR

SEQ ID NO: 352920 - protein, 112 aa, Zea mays
  Clone ID: MRT4577_85030C.1.pep
MSSVSRAQRQSLYNFTRFLCYSKMLGYQNVVGGRLKLKGKALDVKDGGVKKKKKKYQREESSQTESDKNGDEGKPHPDYDHLTPAERRYMEQKQEIDMQKMARQPWNRFSRR

SEQ ID NO: 352921 - protein, 119 aa, Zea mays
  Clone ID: MRT4577_85031C.1.pep
SNPSGAIQSPKRENHFQASSYCSGGGGPGGAPRKETMLGKKTLTITFSPGESSLEWYPPGKLIPLRCPWASPAGPGPGAAPSGKAATLFMWDPSNCPESKSRSLDMDGTLGKKKLAFFG

SEQ ID NO: 352922 - protein, 146 aa, Zea mays
  Clone ID: MRT4577_85032C.1.pep
MAAAAAAPAWASLGPDTTPLLDKQLVLELQHDGCSKTGGVAHGDGDAVNEDDVTKFGVVPRDGHADVQDVVTKLAGDAAHGDGDVGCQDGVTKVAYVAAHGDGDVGCQDGVTKVTCGAIHGDGDASCQDDVAELAAEVMGSDRNPS

SEQ ID NO: 352923 - protein, 132 aa, Zea mays
  Clone ID: MRT4577_85033C.1.pep
RDHARHPKGNRVKISRAGTWRLLPSQTAATFQATSYPLFGALSGLDESTIASLPKTQREPLSFFGSDFVTPKQENQTLRPFFDEWPKSRDSWPELNEDNSLGSSATHLSISIPMAPSDFNTSSRSPNGIPSR

SEQ ID NO: 352924 - protein, 393 aa, Zea mays
  Clone ID: MRT4577_85034C.1.pep
MASGGEGAGSGESPPAASVEAAAGEATLHIRCANGSKFTVQTDLGATVGGFKEVVAGSCDVPAPQQRLIYKGRILKDEQTLESYGVETDHTIHLVRGVAPPAASSAPAAASSLASSTPSSVPAGGLGDLFPGVGAPGSGRSSAGTAQGATRTSGNTRTGASGHVGGTGATGGLGGLGSPDLSSLLGGLAGSPRTGASGGLGGLGSPDLGNMLGGSPDVSLFSQMLQNPAMMQMMQSIMSDPQTMNQLLSFNPNARNLMESNPQMREIFQNPEFLRQLTSPETLQQLLLFQQSLLGQLGQHQPNQGRNNSGSATGTPGNPSLDTLMSMLSGLGSGGGLGVPNTSNVPPEELYATQLTQLQEMGFIDTAENIQALLATAGNVHAAVERLLGNLGQ

SEQ ID NO: 352925 - protein, 78 aa, Zea mays
  Clone ID: MRT4577_85035C.1.pep
FNAFSRTNTVIPILDFRSLKNCWCLGIRMCMKPKIPRKLILNLSKEIKEKREESENWGGIDSYKNHKICCKLEGRNLE

SEQ ID NO: 352926 - protein, 106 aa, Zea mays
  Clone ID: MRT4577_85036C.1.pep
MAGRRKASNAAALVAVLIVAVAAAAAGAIKLCGVDESAVDACTPYCKAGSTQAAPGQLCCAKVKSARWSCLCDYRSALSSDIDAARVMDLATKCKCDYPPASCDDN

SEQ ID NO: 352927 - protein, 34 aa, Zea mays
  Clone ID: MRT4577_85037C.1.pep
FSFIQVDNHVPRHGVIAGNLYKCPVLLFARGGKT

SEQ ID NO: 352928 - protein, 576 aa, Zea mays
  Clone ID: MRT4577_85038C.1.pep
MASGGEGAGSGESPPAASVEAAAGEATLHIRCANGSKFTVQTDLGATVGAFKEVVSGSCDVPAPQQRLIYKGRILKDEQTLDSYGVETDHTIHLVRGVAPPAASSAPAAANPLASFTPSSGPAGGLGGLFPGVDAPGNDRPSGIFRPGFPELEQVEQHLSQNPNLMREIMNMPAMQNLMNNPDLIRNMIMNNPQMREIMDRNPDLAHVLNDPSVLRQTLEAARNPEIMREMMRNTDRAMSNIESSPEGFNMLRRMYETVQEPFLNATTMGGEGSTASNPFSALLGNQGSSQPGQGQPATNAPTTGSESTTGTPAPNTNPLPNPWSTNAGSAQGATRTPSGNARTGGVGGTGATGGLGGLGSPELSSLLGGLAGSPRTGAAGGLGGSGSPDLGSMLGGSPDVSPFSQMLQNPAMIQMMQNIMSDPQTMNQLLNFNPNARNLMESNTQMREIFQNPEFLRQLTSPETLQQLLSFQQSLLGQLGQHQPSQGGNNAGSATGTRGNPSLDTLMSMLSGLGSGGGLGVPNTSSVPPEELYATQLTQLQEMGFIDTAENIQALVATAGNVHAAVERLLGNLGQ

SEQ ID NO: 352929 - protein, 77 aa, Zea mays
  Clone ID: MRT4577_8503C.1.pep
FAFGIWKSGESGRVWYFFFLGFDHSTFRFEFRFISLSLVFYPSFNYCFFSYSDKFIVVQVIYVVDIAGFCMALVLLS

SEQ ID NO: 352930 - protein, 95 aa, Zea mays
  Clone ID: MRT4577_85040C.1.pep
MLGYQNVVGGRLKLKGKALDVKDGGVKKKKKKYQREESSQTESDKNGDEGKPHPDYDHLTPAERRYMEQKQEIDMQKPPRRVIFSALRPANPGIG

SEQ ID NO: 352931 - protein, 102 aa, Zea mays
  unsure (1)..(102): unsure at all Xaa locations
  Clone ID: MRT4577_85041C.1.pep
AGLFGGLEKNPIPAKEILASNKRTDLAQQTGVGPYFPLFYGGCFTNFXIGGDGTNPSLLFPKVPDTPLDEVIKRYLLPLKLTVGLSQPNHIRRGLYFITPSK

SEQ ID NO: 352932 - protein, 68 aa, Zea mays
  Clone ID: MRT4577_85043C.1.pep
YNQSTTYSFPLYYAFPSFLTRKHIIPLHLLNIFISCKLKLKLPIELLTNSPLVKYMPNAKTYYTFPHF

SEQ ID NO: 352933 - protein, 87 aa, Zea mays
  Clone ID: MRT4577_85044C.1.pep
NLMCNKSAQGSTSSLLSRHKKGMLPSIDIESIGLFKLHCYMVTEYEASQPIHQQNQHTWQWSQSFHSASHYQHETVEQLFKFPCLSV

SEQ ID NO: 352934 - protein, 40 aa, Zea mays
  Clone ID: MRT4577_85045C.1.pep
TCIQPHTICILLPKFISIAVRKQRSDLKSHSLIKLNAHIY

SEQ ID NO: 352935 - protein, 127 aa, Zea mays
  unsure (1)..(127): unsure at all Xaa locations
  Clone ID: MRT4577_85046C.1.pep
VGFSSLSGSALPSAPPSLGDVAGEVQPANRTLRPGERTEMMLAVSMLLSRLFAYKEMMVLMVGLLDAGETTTLYEVQIVENVATILTIVFNVDIVEYKNISFTDWXGGDQNRNRPLRGHYFLKTQGL

SEQ ID NO: 352936 - protein, 37 aa, Zea mays
  Clone ID: MRT4577_85047C.1.pep
NKSKCTVIPTPLSLCFYLYNIVWFNIKKRTSKSREPY

SEQ ID NO: 352937 - protein, 102 aa, Zea mays
  Clone ID: MRT4577_85048C.1.pep
RARIPAAAYLLAFPPTSLLRRSSLASSLLPISPQPRSLSHTTHRTMDLLTVVFPGQNDQRRRVPACGSIHNHALKANIHCHVCKDKVKKPCSADPRRVLGGH

SEQ ID NO: 352938 - protein, 1613 aa, Zea mays
  unsure (1)..(1613): unsure at all Xaa locations
  Clone ID: MRT4577_85049C.1.pep
MDPKGKGIVINDKEKESFVNEPKDDKHTDSGSGHRRKEGKKKKTRRIKEIVYYDDSDESSSSQKDNDDNDYDKQKTVNSNFSFDYSRIPHSSNAHLLPIPLGKPPHFDGEDYGFWSHKMRTHLFSLHPSIWEIVESGMKFDSSDSPSFINEQIHKNAQATTVLLASLCRDEYHKVSGLDNAKQIWDTLKISHEGNDVTLLTKMELVEGELGRFAMIRGEEPTQTYNRLKILINKIRSYGSTRWTDHDVVRLMLRSFTVLDPHLVNNIRENPRYIKMSPEEILGKFVSGRMMIKEARYVDDALNGPIHEPQPIALKATRSKEALPSKVAQIEAAGLNDEEMALIIKRFKTALKGRKGQPSKTKAKGKRSCFKCGKLGHFIANCPDNDSDQDQVNKREKKKHYKKAKGEAHLGKEWDSDCSSSDSDNEGLAATAFNKSTLFPNERHTCLMAREKKVCTRNSTYASSSEDESSDEDEVDYSCLFKGLDRTKVDKINELIDALNEKNMLLEKQEDLLYEEHDKFIEAQKSYALEVKRNEMLSFELSTCHETISTLKGVNNDLNAKLEVANKSNSCVEHVAICSRCKDFDINACSEHLVSISKLNDELASLNAQLKTSKSDFDKLKFARDAYTVGRHPSIKDGLGFKREAKNLTSHKAPIPAKEKGKAPMATSTKKNHAFLYHDRRQSRSAYRGYNAFDSHHMIASSSSYMHGRNMSRRNAIHHVPRKNVSHAPRKVVNEFSTVYHALNASFAICRKDRKVIARKLGAKCKGDKTCIWVPKKICANLVGPNMSWVYASGGSSWIIDSGCTNHMTGEKKMFTSYVKSKDSQDSIIFGDGNQGKDKSETQGTLKRFLRRAQNEFELKVKKIRSDNGSEFKNLQVEEFLEEEGIKHEFSAPYTPQQNGVVERKNRTLIDMARTMLGEFKTPERFWSEVVNTXACHAINRVYLHRLLKKTXAYRVFNKSLGLVEVSSDVVFDETNGSPREQVVDLDEVDEEDVPTAAIRTMAIGDVRPQEQDEQDQPSSSTMVHSPTQDDEQVHQQEACDQGGAQDDHVMEEEAQPAPPTQVRAMIQRDHPVDQILGDISKGVTTRSRLVNFCEHYSFVSSIEPFRVEEALLDPDWVLAMQEELNNFKRNEVWTLVPRPKQNVVGTKWVFRNKQDEHGVVTRNKARLVAKGYAQVAGLDFEETFAPVARLESIRILLAYAAHHSFRLFQMDVKSAFLNGPIKEEVYVEQPPGFEDERYPDHVCKLSKALYGLKQAPRAWYECLRDFLIANAFKVGKADPTLFTKTCDGDLFVCQIYVDDIIFGSTNKKSCEEFSRVMTQKFEMSMMGELNYFLGFQVKQLKDGTFISQTKYTQDLLKRFGMKDAKPAKTPMGTDGHTDLNKGGKSVDQKAYRSMIGSLLYLCASRPDIMLSVCMCARFQSDPKECHLVAVKRILRYLVATPCLGLWYPKGSTFDLIGYSDSDYAGCKVDRKSTSGTCQFLGRSLVSWKSKKQTSVALSTAEAEYIAAGQCCAQLLWMRQTLRDFGYTLSKVPLLCDNESAIRMAENPVEHSRTKHIDIRHHFLRDHQQKGDIEVFHVSTENQLADIFTKPLDEKTFCRLRSELNVLDSRNLD

SEQ ID NO: 352939 - protein, 251 aa, Zea mays
  Clone ID: MRT4577_8504C.1.pep
MSGQPNIAPTRPAADKTASRAAETRSGARRRVTCGVSGFVPAWQRPSPIEHRGMEPGAKSEAKQGEAGSGAGASGSGKVYHERQRLQFCLLHALNNLMQEKECFTRVELDGIAGNLVLNDPDKGQWTPLPFIFKPHHNVITGNYDVNVLITALEARNKKVVWHDRRKGASSVDLNAETLVGLMINVPIRRFRGLWTGRHWVAIRRIDGIWFNLDSDLSEPKQFKDQENVIGFLDSVLSQGGELMVVLQEIS

SEQ ID NO: 352940 - protein, 774 aa, Zea mays
  Clone ID: MRT4577_85050C.1.pep
VYASGGTSWIIDSGCTNHMTGEKRMFSSYVKNKDSQDSIIFGDGKQGKIDLVQLVKQEKSETQGTLKRFLRRAQNEFELKVKKIRSDNGFEFKNLQVEEYLEEEGIKHEFSAPYTPQQNGVVERKNRTLIDMARTMLGEFKTPEHFWSEAVNTACHAINRVYLHRLLKKTSYELLTVFGSKCYILVKKGRNSKFAPKSVEGFLLGYDSYTKAYRVFNKSSGLVEVSSDVVFDETNGSPREQVVDCDDVDEEEVPTAAIRTMAIGDPFRVEEALLDPDWVLAMQEELNNFKRNEVWTLVPRPKQNVVGTKWVFRNKQDEHGVVTRNKARLVAKGYAQVAGLDFEETFAPVARLESIRILLAYAAHHSFRLFQMDVKSAFLNGPIKEEVYVEQPPGFEDERHPDDVCKLSKALYGLKQAPRAWYECLRDFLIANAFKVGKADPTLFTKTCDGDLFVCQIYVDDIIFGSTNQKSCEEFSRVLTQKFEMSMMGELRYFLGFQVRQLKDGTFISQTKYTQDLIKRFGMKDAKPAKTPMGTDGHTDLNKGGKSVDQKAYRSMIGSLLYLCASRSDIMLSVCMCARFQSDPKECHLVAVKRILRYLVATPCFGIWYPKGSTFDLIGYSDSDYAGCKVDRKSTSGTCQFLGRSLLSWSSKKQTSVALSTAEAVYVAAGQCCAQLLWMRQTLRDFGYNLSKVPLLCDNESAIRMADNPVEHSRTKHIDIRHHFLRDHQQKGDIEVFHVSSENQLADIFTKPLDEHTFCKLRSELNVLDSRNLY

SEQ ID NO: 352941 - protein, 859 aa, Zea mays
  Clone ID: MRT4577_85051C.1.pep
VYASGGSSWIIDSGCTNHMTGEKEMFTSYVKNKDSQDSIIFGDGNQGKVKGSVESLGYNLLSVSQLCNTGYNCLFTNIDVSVFRRSDGSLAFKGVLDDKLYLVDFAKEEAGLDACLIAKTSMGWLWHRRLAHVGMKNLHKLLKGEHDKYETQGTLKRFLRRAQNEFELKVKKIRSDNGSEFKNLQVEEFLEEEGIKHEFSAPYTPQQNGVVERKNRTLIDMARTMLGEFKTPECFWSEAVNTACHAINRVYLHRLLKKTSYELLTDNKPNVSYFRVFGSKCYILVKKGRNSKFAPKAVEGFLLGYDSNTKAYRVFNKSSSLVEVSSDVVFDETNGSPREQVVDLDDVDEEDVPTAAIRTMAIGDVRPQEQKEQDQPSSSTMVQPPTQDDEQEAYDQGGAQDDQHGVVTRNKARLVAKGYAQVAGLDFEETFAPVARLESIRILLAYAAHHSFRLFQMDVKSAFLNGPIKEEVYVEQPPGFEDERYPDHVCKLSKALYGLKKAPRAWYECLRDFLIANAFKVGKVDPTLFTKTCDNDLFVCQIYVDDIIFGSTNKKSCEEFSRVMTQKFEMSMMGELNYFLGFQVKQLKDGTFISQTKYTQDLLKRCGMKDAKPAKTPMGTDRHTDLNKGGKSVDQNAYRSMIGSLLYLCASRPDIMLSVCMCASIQSDPKECHLVAVERILRYLVATPCFGLWYPKGSTFDLIGYSNSDNVGCKVDRKSTSGTCQFLGRSLVSWNSKKQTSVALSTAEAEYVAAGQCCAQLLWMRQTLRDFGYNLSKVPLLCDNESAIRMVENPVEHSRTKHIDIRHHFLRDHQQKEDIEVFHVSTENQLADIFTKPLDEKTFCRLRSELNVLDSRNLD

SEQ ID NO: 352942 - protein, 1742 aa, Zea mays
  Clone ID: MRT4577_85052C.1.pep
MDPKGKGIVINDKERESFVNEPRDDKSNDSSSGHRRKDGKKKKTRRIKEIVYYDSDESTSSQKDEDNDYKQKTVNSNFSFDYSRIPQSSNSHLLSIPLGKPPHFDGEDYGFWSHKMRSHLFSLHPSIWEIVESGMKFDSSDSPVIINEQIHRNAQATTVLLASLCREEYNKVSGLDNAKQIWDTLKISHEGNDVTMLTKMELVEGELGRFAMIRGEEPTQTYNRLKTLVNKIRSYGSTRWTDHDVVRLMLRSFTILDPHLVNNIRENPRYTKMSPEEILGKFVSGRMMIKEARYVDDALNGPIHEPQPVALKATRSKEALPSKVAQVEAAGLNNEEMALIIKRFKTALKGRKGQPSKTKAKGKRSCFKCGKLGHFIANCPDNDSDQDQGNKREKKKHYKKAKGEAHLGKEWDSDCSSSNSDNEGLAATAFNKSTLFPNERHTCLMASEKKVCTRNSTYASSSEDESSDEDEVDYSCLFKGLDRTKVDKINELIDALNEKNMLLEKQEDLLYEEHDKFIEAQKSYALEVKRNELLSFELSTCHETISTLKGVNNDLNAKLEVANKSNSCVEHVAICSRCKDFDINACSEHLVSISKLNDELASLNAQLKTSKSDFDKLKFARDAYTVGRHPSIKDGLGFKREAKNLTSHKAPIPAKEKGKAPMATSTKKNHAFLYHDRRQSRSAYRGYNAYDDFDSHHMIASSSSYMHGRNMSRRNAIHHVPRKNVSHASRKVVNEPSTIYCALNASFAIRRKDKKIVARKLGAKCKGDKTCIWVPKDICTNLVGPNMSWVYASGGSSWIIDSGCTNHMTGEKKMFTSYVKNKDSQDSIIFGDGNQGKVKGLDVSVFRRSDGSLAFKGVLDGKLYLVDFAKEEAGLDACLIAKTSMGWLWHRRLAHVGMKNLHKLLKGEHVIGLTNVQFEKDRPCAACQAGKQVGGSHHTKNVMTTSRPLEMLHMDLFGPVAYLSIGGSKYGLVIVDDFSRFTWVFFLQDKSETQGTLKRFLRRAQNEFELKVKKIRSDNGSEFKNLQVEEFLEEEGIKHEFSAPYTPQQNGVVERKNRTLIDMARTMLGEFKTPECFWTEAVNTACHAINRVYLHRLLKKTSYELLTGNKPNVSYFRVFGSKCYILVKKGRNSKFAPKAVEGFLLGYDSNTKAYRVFNKSSGLVEVSSDVVFDETNGSPREQVVDLDDVDEEDVPTAAMRTMAIGDVRPQEHLERDQPSSSTMVHPPTQDDEQPFRVEEALLDPDWVLAMQEELNNFKRNEVWTLVPRPKQNVVGTKWVFRNKQDEHGVVTRNKARLVAKGYAQVAGLDFEETFAPVARLESIRILLAYAAHHSFRLYQMDVKSAFLNGPIKEEVYVEQPPGFEDERYPDHVCKLSKALYGLKQAPRAWYECLRDFLIANAFKVGKADPTLFTKTCDGDLFVCQIYVDDIIFGSTNKKSCEEFSRVMTQKFEMSMMGELNYFLGFQVKQLKDGTFISQTKYTQDLLKRFGMKDAKPAKTPMGTDGHTDLNKGGKSVDQKAYRSMIGSLLYLCASRPDIMLSVCMCARFQSDPKECHLVAVKRILRYLVATPCLGLWYPKGSTFDLIGYSDSDYAGCKVDRKSTSGTCQFLGRSLVSWNSKKQTSVALSTAEAEYVAAGQCCAQLLWMRQTLRDFSYNLSKVPLLCDNESAIRMAENPVEHSRTKHIDIRHHFLRDHQQKGDIEVFHVSTENQLADIFTKPLDEKTFCRLRSELNVLDSRNLD

SEQ ID NO: 352943 - protein, 302 aa, Zea mays
  Clone ID: MRT4577_85053C.1.pep
MEAAELALRLRAAANDRLARYEPLALVAAPLLALLVARTLHATASAVADRGLVAIAIAAVKLLPGVSGYIAAEKKKVVDKMQSGGAKNNRRAELPTIGLAEQVIEELETLKAKDVDWQGKCSGTVYIAGSESEGHFQLINKAYSMFSHTNPLHQDVFKSVANMEAEVVAMTAALLGSKEKSSGGQICGNMTSGGTESILLAVKTSRDYMRSKKGITRPEMIIAESAHSAYDKAAQYFNIKVRRVPVNKEFLADVKGFKRCINGNTIMMVGSAPGFPHGLIDPIEELGELASRYDICLHVDLC

SEQ ID NO: 352944 - protein, 918 aa, Zea mays
  Clone ID: MRT4577_85054C.1.pep
MACSAKKNYAFLYHDKRQSRNAYRSYNAYNAFDSHAMFASSSSYVHDRNVGRRNVVHNMPRRNGVNVPRKANEPSTIYHALNTSFAICRKDKKIVARKLGARCKGDKTCIWVPKDICTNLVGPNMSWVYASGGSSWIIDSGCTNHMTGEKKMFTSYVKNKDSQDSIIFGDGNQGKDKSETQGTLKRFLRRAQNEFELKVKKIRSDNGSEFKNLQVEEFLEEEGIKHEFSAPYTPQQNGVVERKNRTLIDMARTMLGEFKTPECFWTEAVNTACHAINGVYLHRLLKKTSYELLTDEEDVPTAAIRTMAIGEVRPQEQDERDQPSSSTSVHPPTQDDEQVHQKEACDQGGAQDDHVMEEEAQPAPPTQVRAMIQRDHPVDQILGDISKGVTTRSRLVNFCEHYSFVSSIEPFMVEEALQDSDWVLAMQEELNNFKRNEVWTLVPRPKQNVVGTKWVFRNKQDEHGVVTRNKARLVAKGYAQVAGLDFEETFAPVARLESIRILLAYAAHHSFRLFQMDVKSAFLNGPIKEEVYVEQPPGFEDERYPDHVCKLSKALYGLKQAPRAWYECLRDFLIANAFKVGKADPTLFTKTCDGDLFVCQIYVDDIIFGSTNKKSCEEFSRVMTQKFEMSMMGELNYFLGFQVKQLKDGTFISQTKYTQDLLKRFGMKDAKPAKTPMGTDGHTDLNKGGKSVDQKAYRSMIGSLLYLCASRPDIMLSVCMCARFQSDPKECHLVAVKRILRYLVATPCFGLWYPKGSTFDLIGYSDSDYAGCKVDRKSTSGTCQFLGRSLVSWNSKKQTSVALSTAEAEYVAAGQCCAQLLWMRQTLRDFGYNLSKVPLLCDNESAIRMAENSVEHSRTKHIDIRHHFLRDHQQKGDIEVFHVSTENQLADIFTKPLDEKTFCRLCSELNVLDSRNLD

SEQ ID NO: 352945 - protein, 743 aa, Zea mays
  Clone ID: MRT4577_85055C.1.pep
MGIKARRSDGSLAFKGVLDGKLYLVDFAKEEAGLDACLIAKTSMGWLWHRRLAHVGMKNLHKLLKGEHVIGLTNVTFEKDRPCAACQAGKQVGGAHHTKNVMTTSRPLEMLHMDLFGPVAYLSIGGSKYGLVIVDDFSRFTWVFFLQDKSETQGTLKRFLRRAQNEFELKVKKIRSDNVSEFKNLQVEEYLEEEGIKHEFSAPYTPQQNGVVERKNRTLIDMARTMLGEFKILERFWVEEALLDPDWVLAIQEELNNFKRNEVWTLVPRPKQNVVGTKWVFRNKQDEHGVVTRNKARLVAKGYAQVAGLDFEETFAPVAGLDSIRILLAYAAHHSFRLFQMDVKSAFLNGPIKEEVYVEQPPGFEDERYPDHVCKLSKALYGLKQAPRAWYECLRDFLIANAFKVGKADPTLFTKTCDGDLFVCQIYVDDIIFGSTNQKSCEEFSRVMTQKFEMSMMGELSYFLGFQVRQLKDGTFISQTKYTQDLIKRFGMKDAKPAKTPMGTDGHTDLNKGGKSVDQKAYRSMIGSLLYLCASRPDIMLSVCMCARFQSDPRECHLVAVKRILRYLVATPCFGIWYPKGSTFDLIGYSDSDYAGCKVDRKSTSGTCQFLGRSLVSWSSKKQTSVALSTAEAEYVAAGQCCAQLLWMRQTLRDFGYNLSKVPLLCDNESAIRMADNPVEHSRTKHIDIRHHFLRDHQQKGDIEVFHVSSENQLANIFTKPLDEQTFCKLLSELNVLDSRNLD

SEQ ID NO: 352946 - protein, 458 aa, Zea mays
  Clone ID: MRT4577_85056C.1.pep
MQEELNNFKHNEVWTLVPRPKQNIVGTKWVFRNKQDEHGVVTRNKARLVAKGYAQVAGLDFEETFAPVARLESIRILLAYAAHHSFRLFQMDVKSAFLNGPIKEEVYVEQPPGFEDERYPDHVCKLSKALYGLKQAPRAWYECLRDFLIANAFKVGKVDPTLFTKTCDGDLFVCQIYVDDIIFGSTNKKSCEEFSRVMTQKFEMSMMGELNYFLGFQVKQLKDGTFISQTKYTQDLLKRFGMKDAKPAKTPMGTTGHTTSTKRFQSDPKECHLVAVKRILRYLVATPCFGLWYPKGSTFDLIGYSDSDYAGCKVDSKSTSGTCQFLGRSLVSWNSKKQTSVALSTAEAEYVAAGQCCAQLLWMRQTLRDFGYNLSKVPLLCDNESAIRMAENPVEHSRTKHIDIRHHFLRDHQQKGDIEVFHVSTENQLADIFTKPLDEKTFCRLRSELNVLDSRNLD

SEQ ID NO: 352947 - protein, 366 aa, Zea mays
  unsure (1)..(366): unsure at all Xaa locations
  Clone ID: MRT4577_85057C.1.pep
MTGEKKMFTSYVKNKDSQDSIIFGDGNQGKDKSETQGTLKRFLRRAQNEFELKVKKIRSDNGSEFKNLQVEEYLEEEGIKHEFSAPYTPQQNGVVERKNRTLIDMARTMLGEFKTPERFWSEAVNTACHAINXDEEDVPTAAIRTMAIGDVRPQEQTEQDQPSSSTMVQPPTQDDEQVHQEEALDQGGAQDDHVMEEEAQPAPPTQVRAMIQRDHPVDQILGDISKGVTTRSRLVNFCEHYSFVSSIEPFRVEEALLDPDWVLAMQEELNNFKRNEVWTLVPRPKQNVVGTKWVFRNKQDEHGVVMRNKARLVAKGYAQVAGLDFEETFAPVARLESIRILLAYAAHHSFRLFQMDVKSAFLNGPI

SEQ ID NO: 352948 - protein, 1475 aa, Zea mays
  unsure (1)..(1475): unsure at all Xaa locations
  Clone ID: MRT4577_85058C.1.pep
MDPKGKGIVINDKEESFVNEPKDDKPTDSGSGHKRKDGKKKKTRRIKEIIYYDXSDESTSSQKDNDDNDYDKRXRDEYHKVSGLDNAKQIWDTLKISHEGNNITLLTKMELVEGDLRRFAMIRGEEPTQTYNRLKTLINKIRSYGSTRWMDHDVVRLMLRSFTVLDPHLVNNIRENPRYTKMSPEEVLGKFVSGRMMIKEARYVDDALNGPINEPQPFALKATRSKEALPSKVAQVEAAGLNDEEMALIIKRFKMALKGHKGQPSKTKTKGKRSCFKCGLAATAFNKSSLFPNERHTCLMAKEKKVCTRNNATYDSSSDDESSDEEIDYSSLFKGLDRTKIDKINELIDALNEKDRLLEKQEDLLYEEHDKFVEAQKSHALEVKRNEMLSYELSSCHETISSLRSINDDLNAKLEIASKSNSCVEHVMICNRCKDFDIDACSEHLVSNSKLNDELASLNAQLKTSKNEFDKLKFARDAYTIGRHPSIKDGLGFKMEAKNLTSHKAPISSKEKGKAPMTSSAKKNHAFMYHDRRQSYRSCNAYDAFDSHAMFASSSFYMHGRDMPRRNVVNIPRKVNEPSTIYHACNASFAICRKNKKVYASGGSSWIIDSGCTNHMTREKKMFTSYVKNKDSQDSIIFGDGNQGKIDLVQLVKQDKTETQGTLKRFLRRAQNEFELKVKKIRSDNGSEFKNLQVEEYLEEEGIKHEFSAPYTPQQNGVVERKNRTLIDMARTMLGEFKTPECFWSEAVNTACHAINRVYLHRLLKKTSYELLTGNKPNVSYFRVFGSKCYILVKKGRNSKFAPKAVEGFLLGYDSNTKAYRVFNKSSGVVEVSSDVVFDETNGSPREQVVDIDDVDEEEVPTAAIRTIAIGDVRPQEQDERDQPSSSTMVHPPTQDDEQEACGQGGAQDDHVMEEEAQPAPPTQVRAMIQRDHPVDQILGDISKGVTTRSRLVNFCEHYSFVSSIEPFRVEEALLDPDWVLAMQEELNNFKRNEVWTLVPRPKQNVVGTKWVFRNKQDEHGVVTRNKARLVAKGYAQVAGLDFEETFAPVARLESIRILLVYVAHHSFRLFQMDVKSAFLNGPIKEEVYVEQPPGFEDERYPDHVCKLSKALYGLKQAPRAWYECLRDFLIANAFKVGKADPTLFTKTCEGDLFVCQIYVDDIIFGSTNQKSCEEFSRVMTQKFEMSMMGELSYFLGFQVRQLKDGTFISQTKYTQDLIKRFGMKDAKPAKTPMGTDGHTDLNKGGKSVNQKAYRSMIGSLLYLCASRPDIMLSVCMCARFQSDPRECHLVAVKRILRYLVATPCFGIWYPKGSTFDLIGYSDSDYAGCKVDRKSTSGTCQFLGRSLVSWSSKKQTSVALSTAEAEYVAAGQCCAQLLCMRQTLRDFGYNLSKVPLLCDNESAIRMADNPVEHSRTKHIDIRHHFLRDHQQKGDIEVFHVSSENQLADIFTKPLDEQTFCKLRSELNVLDSRNLD

SEQ ID NO: 352949 - protein, 71 aa, Zea mays
  Clone ID: MRT4577_85059C.1.pep
KKKKKKKKKKKKKKKKKKKKKKKKKKKKKKKPKKKKKKKKNASTWAETPQRGTLENFITMGGPWIFNLGAP

SEQ ID NO: 352950 - protein, 197 aa, Zea mays
  Clone ID: MRT4577_8505C.1.pep
MEPGAKSEAKQGEAGSGAGESGSGKVYHERQRLQFCLLHALNNLMQEKECFTRAELDGIAGNLVLNDPNKGQWTPLPFIFKPHHNVITGNYDVNVLITALEARNKKVVWHDRRKGASSVDLNAETLVGLVINVPIRRFRGLWTGRHWVAIRRIDGIWFNLDSDLSEPKQFKDQENVIGFLDSVLSQGGELMVVLQGE

SEQ ID NO: 352951 - protein, 87 aa, Zea mays
  Clone ID: MRT4577_85060C.1.pep
RVLTPVGLLGGHPPTSFVKPFLVCPKVLNPVAGKRENKTFSKPPRPQIDVFCKRGAVLTPAPGFKLFVIPRAPLGGGPYIPLGPLFP

SEQ ID NO: 352952 - protein, 42 aa, Zea mays
  Clone ID: MRT4577_85061C.1.pep
VGPRGLLLAVSKSQSLFRLLYPVSLIQIDPKIIKGRPPTMSS

SEQ ID NO: 352953 - protein, 41 aa, Zea mays
  Clone ID: MRT4577_85062C.1.pep
YQPTSLLRVVELITSQRHGHVHDRLRCAVPSVRWLGDPLVP

SEQ ID NO: 352954 - protein, 149 aa, Zea mays
  unsure (1)..(149): unsure at all Xaa locations
  Clone ID: MRT4577_85063C.1.pep
DIESDDEDLDFEVDDGAEDEPXHDAEDAPAEPAIKKAMALAAPPKDTERQLSKKEMKKKELAKLDLVLAELGLSGXSSSAAQDAENKGANXTSDTEKKEDAPAPSESKASKKKKXDKSSKEGKETQAADGSEETASARPDIPLFIVDSQ

SEQ ID NO: 352955 - protein, 104 aa, Zea mays
  unsure (1)..(104): unsure at all Xaa locations
  Clone ID: MRT4577_85064C.1.pep
TVGGAPAGLIVMELYANEVPKTVXNFRALCTGEKGVGKFGKSFHYKGFTLHRVMPELMCXXGDFTCGNXTXGEFIYCEKXXXEKFVRKNTXLGVVFMXNGGPNI

SEQ ID NO: 352956 - protein, 191 aa, Zea mays
  Clone ID: MRT4577_85065C.1.pep
MGLLGRRPWLLLLALASAAVAVEASEGDADPLYSDTIWTEKLYFSSAAAFLGYSLILAILRTSSLRDEASRVMVAAPILAFVTTHILYLNFYELDKGLNMKVCTVISIAQCLLWALWAVMSGHRSRLKIISVAVGGAVAVLVEAYDIPPRWGYADGRAICLAVAIPLSYLWWSFAKEDAEMRTSAILKKTR

SEQ ID NO: 352957 - protein, 50 aa, Zea mays
  Clone ID: MRT4577_85066C.1.pep
CQPTAFHPRWGYADARAICLAVAIPLSYLWWSFAKEDAEMRTSAILKKTR

SEQ ID NO: 352958 - protein, 113 aa, Zea mays
  Clone ID: MRT4577_85067C.1.pep
NSSFTSPAVTDNRPPGSMADRALLITSSLSVFQFVPVAHFRSAARKHQRLALADCALHRATQPPTLCLVSVFFFVSTCRTITRSPRRTRHLHCAIELEFSPHLLESLTVCLNI

SEQ ID NO: 352959 - protein, 131 aa, Zea mays
  Clone ID: MRT4577_85068C.1.pep
MVVLQPDRFLSELTSMYERSTEKGSVWVTMKRSTLKGKAQLRKMENKGQEVEHRCLVRASNGKKNISTSVSLKEYTKFQASYATVLKAHMHALKKRERKDKKKAADAEKAIETAPKKQKKASSKKSSGSKS

SEQ ID NO: 352960 - protein, 227 aa, Zea mays
  unsure (1)..(227): unsure at all Xaa locations
  Clone ID: MRT4577_85069C.1.pep
MGLLGRRPWLLLLALASAAVAVEASEGDADPLYRACVEGCXKTGSLKEASIKHCMVPTDGQPADKSWYAHEPLYLQWKDWNCKSECRYHCMMEREGERAKLGLQPVKYHGKWPLKRASVFQEPLSAALSALTLVVQFNGWLSFFLLLYYKLPLRPETHKTYYEYTGLWHIYGLLAMNSWFWSAIYHSCDTIWTEKLYFSSAAAPFWGXSLILDPRVRPRVRGRVGEN

SEQ ID NO: 352961 - protein, 52 aa, Zea mays
  Clone ID: MRT4577_8506C.1.pep
LMEVMLLLQHVLQSANHLLRMLLISQLWINKLLLIRGFGMREVVKQLLAHSN

SEQ ID NO: 352962 - protein, 357 aa, Zea mays
  Clone ID: MRT4577_85070C.1.pep
MGLLGRRPWLLLLALASAAVAVAVAVEASEGDADPLYRSPMEAENRACVEGCQKTGSLKEASIKHCMVPTDGQPADKSWYAHEPLYLQWKDWNCKSECRYHCMMEREGERAKLGLQPVKYHGKWPLKRASVFQEPLSAALSALTLVVQFNGWLSFFLLLYYKLPLRPETHKTYYEYTGLWHIYGLLAMNSWFWSAIYHSCDTIWTEKLYFSSAAAFLGYSLILAILRTSSLRDEASRVMVAAPILAFVTTHILYLNFYELDKGLNMKVCTVISIAQCLLWALWAVMSGHRSRLKIISVAVGGAVAVLVEAYDIPPRWGYADGRAICLAVAIPLSYLWWSFAKEDAEMRTSAILKKTR

SEQ ID NO: 352963 - protein, 122 aa, Zea mays
  Clone ID: MRT4577_85071C.1.pep
AAGELSLLLASPCGSTLHIPSRSEASDLAGLELDPAKHNQNRWRSPVTDADPAPSPLLAHYGRHRVYSYSAQRRRELYSHTPLQEPRKDRHRNIWNAFSRMLSIIPPGREDRLGRHRENLNK

SEQ ID NO: 352964 - protein, 99 aa, Zea mays
  unsure (1)..(99): unsure at all Xaa locations
  Clone ID: MRT4577_85073C.1.pep
PKPSLPSPPTVPAPRPXPREXAPPTTPWRTTPSRRSWTSTTRRSSLRGPGSSTRRTGNARCSSPPPPPRGQEGAPPPPPPPPLPPPSPPPPPPLPPFPP

SEQ ID NO: 352965 - protein, 79 aa, Zea mays
  Clone ID: MRT4577_85074C.1.pep
GLTAYNSLCGQKLKISQHKGALINSTPSVGAVSHCFPLERRWFEKTRPRMQIDFPSLEPCACQMEASLVSRGNPDRDYG

SEQ ID NO: 352966 - protein, 344 aa, Zea mays
  Clone ID: MRT4577_85075C.1.pep
MMASRQSGNNAQEAASPLASPPHSNIASIIPSLPLETRCPPFPLRRYANFWVPEVILKADLPGIHSCFKPRPTDVFVASFPKSGTTWLKALAFATLKRSTHPPLDGDHPLRRCNPHDCVRFLDANFNQQKDELEALPSPRVLATHLPYSLLPGSITGDRERSGCRIVYVCREPKDALVSDWLFTRKAASACGADARSFTIQEALELFCDGRCPGGPQWNHVLQYWKESVRRPDRVLFLRYEEMLIDPEAHVRKLAKFMGCGFSEEEEEHGVVSAIVELCSLGKMRDMEVNRNGSNMLGVKNESFFRKGVAGDWSNHMTPEMAQSLDKVVEDALQGTGFSFTSKA

SEQ ID NO: 352967 - protein, 86 aa, Zea mays
  Clone ID: MRT4577_85076C.1.pep
QPSHTNHTHLHFPNPQPASWTAPRATTASLLPPRPSLTGKPASLLRVKEQTTPLTRSKPTSPALRTLPPTPRDPWTRLSRRSLPRR

SEQ ID NO: 352968 - protein, 221 aa, Zea mays
  Clone ID: MRT4577_85077C.1.pep
MMYGNIANHEAFLRRKLEEQQQAIELEGRRFMGLHLLDLKIRGHHLGSSPATTVVGQGEGGKGSGNGNAVQLEDVIVQDTPTKMNSNSLAMSAPAAAVSAAADAGGEHEEQQEAGHGEEGDGSPKQAVNLGEDEKTESGPVTAPPPPIVARGFQGSGVAVEHILPDSPFASTTNKEASAPTAQNGSIISNGSPHHVASSALFPPAPDIELPPYNSCFFQAP

SEQ ID NO: 352969 - protein, 109 aa, Zea mays
  Clone ID: MRT4577_85078C.1.pep
TSNIRVTSKKKKKKKKKKKKKKKKKKKKKKKKKKKKKKKKEKKKKKKKKKEKQKIKKNRTKITQREKMGKTGGKPQQNAPWGHSPLFPSRCKTGGSPATYPHLPKSANP

SEQ ID NO: 352970 - protein, 107 aa, Zea mays
  unsure (1)..(107): unsure at all Xaa locations
  Clone ID: MRT4577_85079C.1.pep
GGVQLAXXSRVGGPRDHMRTRVHRXASXRARFDRHPXACXDXXSTPLCXXVALVNGXXGWGPXDDXVXVLXAPRRXGMLXCDXXPGXRRXLPFVTLXXPXSSIEGVF

SEQ ID NO: 352971 - protein, 76 aa, Zea mays
  unsure (1)..(76): unsure at all Xaa locations
  Clone ID: MRT4577_8507C.1.pep
QRPRKRGRKRXKKKKYKKKKKKKKKKIKKKKKKIKKKKKKKKKKKKKKKGGLFKKQKFTNGVLKQKIFFLGALKLN

SEQ ID NO: 352972 - protein, 81 aa, Zea mays
  Clone ID: MRT4577_85080C.1.pep
ISSVCHSVQHIAQQRCLYIMDFFVHISNGSGDSWIQCTGTSKLRGTAWYIDFFFFFPLEPRLQESKKARAGIQFIVYFKQK

SEQ ID NO: 352973 - protein, 121 aa, Zea mays
  unsure (1)..(121): unsure at all Xaa locations
  Clone ID: MRT4577_85081C.1.pep
GPPPPGGAAPPPPRAVSSRASPSPXFGTPKKVLANPRKMSGPXKVFNVRLYSHSGGPPXYIPPRPEXKARPXVGPPPGGGLGVPKKDPPPPGKPXGPVPPGXRPNSFPPRLGRQRAPPCAQ

SEQ ID NO: 352974 - protein, 51 aa, Zea mays
  Clone ID: MRT4577_85082C.1.pep
VLSVLCCAIYLCEIAAHLFFCSSLRSDDRPPFLIHQILMLYGGVSSIHLCF

SEQ ID NO: 352975 - protein, 97 aa, Zea mays
  Clone ID: MRT4577_85083C.1.pep
VFFFFHFPPLHLLHPEISAPPPLETQITPEYRHKKEGAYLFTHGHRLKKPHPYQGHQINIPKHKRRGLRKTIIPVHPPKFPADITKATPGDPHHPPA

SEQ ID NO: 352976 - protein, 232 aa, Zea mays
  unsure (1)..(232): unsure at all Xaa locations
  Clone ID: MRT4577_85084C.1.pep
KKQKTKKQKQTKKTAKHQKRKKKTNKKRKKKQKKEKKPKRQKKNTKQXRRKNKKKKQQTPKQKQTKKKKKTKKKKQKKKRNKKKKKKKKKKKKEKKRKTTQTTKKKKKKKERKEKEKKKKKPKQHNPKKKREKKKKKRKKKKKNKKREQTKKKGGGKKPRGFLKHPGPFRGDYFPGESFYTADEAPPHRLSSHAELTRPLRRHTLWLGRGTSATRLQRKNAKEAKRRGYEPG

SEQ ID NO: 352977 - protein, 202 aa, Zea mays
  unsure (1)..(202): unsure at all Xaa locations
  Clone ID: MRT4577_85085C.1.pep
LFNKPRSRAVTDRXAITHDDYVSLCLMALAAAGGGGGHAAAASARTTTMTTQECELRFRCSVCGKAFASHQALGGHKASHRKPPPTLVQAASSSSSVTTNTSSAGGSGAGQGRHRCSVCHRGFATGQALGGHKRCHYWDGLSVSLTASAASGSASSLRGFDLNLVPAAGAARWREEEEVQSPLPVKKRRLSSGPSTELSLTI

SEQ ID NO: 352978 - protein, 81 aa, Zea mays
  unsure (1)..(81): unsure at all Xaa locations
  Clone ID: MRT4577_85086C.1.pep
MVLLVAVLLLVVVASTTSTHTTSGCCCXPPPPVDLPPPAHQPPPVDLPPPAHLLPPVHLLPPVDLLPPVHDAPPVDHVPXP

SEQ ID NO: 352979 - protein, 38 aa, Zea mays
  Clone ID: MRT4577_85087C.1.pep
LARRALRVRRGLLRLTSLVQGNSVQRQSTSTLRWMLTL

SEQ ID NO: 352980 - protein, 77 aa, Zea mays
  unsure (1)..(77): unsure at all Xaa locations
  Clone ID: MRT4577_85088C.1.pep
LAPPGLLRWVWGSGPLCXPGLWSGGARWAXVWLRAPRXGAFGPGSPVFGVGLAVVPCWCVCPSFFVXVCWCAXPPPP

SEQ ID NO: 352981 - protein, 460 aa, Zea mays
  Clone ID: MRT4577_85089C.1.pep
PRVRHNQCSSNSNLGNVAQAVATKTVFHIYYNPRLTQSEFIVPYWKFTRSFNQPISVGMRCRMRYESDDASERRCTGIIIGSREADPIWYGSKWKCLVVRWDDGIECRWPNRVSPWEIELTGSVSGSQMCAPSSKRLKPCLPQVNPEIVLPNGSVSSDFAGSARFHKVLQGQELLGFKTHDGPAISASQATEARNLQYSDERSNMSNNNLGIPRLGVRSPTGIPGFPYHCSGFGESQRFQKVLQGQEVFHPFRGGCLADGHIRTAGMYQPDGRHVSGAAYKWSAPQGYDFPQPAKPVFLLQESSPSSVMMFPQTRSKITHLEYEYSCLDKDEDGRLDRTVPTQDMGRSNQTLSLWPHLVSGEAIEECTGTVNMHSPVSGAEHESNNESTVENGCKIFGISLAEKIRSCDEADSCSAKCNSRLQPLKSQMPKSLGSCWATVHEQRPVVGRVVDVSATDMMI

SEQ ID NO: 352982 - protein, 77 aa, Zea mays
  unsure (1)..(77): unsure at all Xaa locations
  Clone ID: MRT4577_8508C.1.pep
LVGSKIPKFVNNNRQVRLTGVTWLAPGCFFSTSLDPTRPIFFWKIFLWQKILWGVICKNGTVFPPQKKXXPVKDKKX

SEQ ID NO: 352983 - protein, 40 aa, Zea mays
  Clone ID: MRT4577_85090C.1.pep
SLTTSPIQHHPTTTTNPIKISTISPNSSPTYYSLPTTHHH

SEQ ID NO: 352984 - protein, 416 aa, Zea mays
  Clone ID: MRT4577_85091C.1.pep
MASFSPSGRMTRTAASSLAARVVLALLLLIGVSGSGATQAASPHTHHSRQLDVNHKKPVQTFRPINIAHRGSNGELPEETAAADLRAIEEGADFIETDVLASKDGHLVCFHDVTLDATTDVADHAEFAGRKRTYEVQGEDVTGWFIVDFTLEELRSLRVKQRFSFRDQRYNGKYQIITFEEYILIALYADRTVGIYPEIKNPVFINQHVKWSDGKRFEDKFVETLLRYGYGGEYMSDGWLRQPLFIQSFAPTSLIYVSNMTDSPKLLLIDDTTVPTQDTNQSYHEITSDAYLAFIGSYVVGIGPWKDTLVPPDPTDNRLGRPADLVARAHALRLQVHPYTFRNENQYLHFDFRQDPYAEYAYWLDEVAVDGLFTDFTGSLHKYQEWTRPYRKEQEKTSPEALLREIAGMLKNDGYD

SEQ ID NO: 352985 - protein, 231 aa, Zea mays
  unsure (1)..(231): unsure at all Xaa locations
  Clone ID: MRT4577_85092C.1.pep
YLGTGRAKFFLFFCTVYIAYLDLHKQKAKTNRERKKHLILQRAIEEGADFIETDVLASKDGHLVCFHDVTLDATTDVADHAEFAGRKRTYEVQGEDVTGWFIXSPAGADDDDDDGGLVDXQSCFFLIWFPVDFTLEELRSLRVKQRFSFRDQRYNGXTLSLVSMQSDXLTSHVRCLSSSVRSHRIGPXKYQIITFEEYILIALYADRTVGIYPEIKNPVFINQHVSIYILA

SEQ ID NO: 352986 - protein, 29 aa, Zea mays
  Clone ID: MRT4577_85093C.1.pep
GLSFFPYLCLTFRCCLHVNEVFIYLNLVY

SEQ ID NO: 352987 - protein, 114 aa, Zea mays
  Clone ID: MRT4577_85094C.1.pep
DNMMEEYEKLAAAAPDGSAKLRVFLFPASGSDAAGSGSGSHLVAAVDESGQRYIDTINCVSAEAMAVAMRPKDSVASAGSSAHNSEASEYSGLVEGMSPRAVPPAFAATEYSYS

SEQ ID NO: 352988 - protein, 128 aa, Zea mays
  unsure (1)..(128): unsure at all Xaa locations
  Clone ID: MRT4577_85095C.1.pep
MQIFVKTLTGKTITLEVESXDTIDNVKQKIQDKEGIPPDQQRLIFAGKQLEDGRTLGDYNIQKESTLHLVLRLRGGIIEPSLKALASKYNCEKMICRKCYARLPPRATNCRKRKCGHTNQLRPKKKLK

SEQ ID NO: 352989 - protein, 67 aa, Zea mays
  Clone ID: MRT4577_85096C.1.pep
RKRTFQERKFTQKKTAVNPRCLRLHRVVLQADGRSSAAKGRRRPGSKGPTRAPGVGRRRSRGRGHGP

SEQ ID NO: 352990 - protein, 70 aa, Zea mays
  Clone ID: MRT4577_85097C.1.pep
MSALFNFNSFLIVVLLVICTCTYIKMQFPAILNDRTGFRGFFWKAARIGERLSPWVAFGCFAMGVSTIFF

SEQ ID NO: 352991 - protein, 104 aa, Zea mays
  unsure (1)..(104): unsure at all Xaa locations
  Clone ID: MRT4577_85098C.1.pep
RWAPNECMVLYNEALYDICFRRLKLSTLIFGXDLNHLISVMMMGVSSCIRILGQLKSDHLKIXVSMIRIRSVQFVIAGIVECNSMGIQQXRALTVPEPIHQMWE

SEQ ID NO: 352992 - protein, 308 aa, Zea mays
  unsure (1)..(308): unsure at all Xaa locations
  Clone ID: MRT4577_85099C.1.pep
VPSGFPGFTDPLGPFXSPRKKLRVPHHPDFPFDGQLLNPIFHGNPLGPSNGGGALRCFSDIAPAGIQGARHAQFGLPLTDRQLNKLHLGLFQGGGFKRRLDAITPPCPISRGFVIGSAPVDESVSCVLTIGTPRAAERSDDRKKPHLMLFGKPILTEQQMSSRGSRETLSPEATGNSSDGSVQKTGNVSDGSGSSICIGSSSRGREASRLGFEFEAGHCKVFVESEDVGRTIDLSVFGSYEELYGQLADMFGIERAEVMSHLCYRDAAGAVKRTGDEPFCDFMKVARRLTIVESTEGRLQKPLVEYMA

SEQ ID NO: 352993 - protein, 78 aa, Zea mays
  Clone ID: MRT4577_8509C.1.pep
TELLHKGGRSYNVFGGPRAYCSPLLRALFAGTSSRATSIIRALLIRTAWTMIVHGSFAQRGGHWLVNILRTHYICCFT

SEQ ID NO: 352994 - protein, 66 aa, Zea mays
  Clone ID: MRT4577_850C.1.pep
STSGAEISFFFLGCEQAKIGSQQQFYVTLTRAAQHTIASLTHIRVTCKVVIIYRHPGSTSRVSGHR

SEQ ID NO: 352995 - protein, 91 aa, Zea mays
  Clone ID: MRT4577_85100C.1.pep
SKALVQTRLSKKTKFVPGTPTWKTLKGGDPQGSHPPAGGVTRYHYPTFRKDFNFKEGACACCGTGGPLGGLCGPPPACGGAREEPANTRTG

SEQ ID NO: 352996 - protein, 57 aa, Zea mays
  Clone ID: MRT4577_85101C.1.pep
SPGFQISPKFPWDFYWSDPTTELNTGSWRYITTIGNNNNNKERQGESNALLLHKRGR

SEQ ID NO: 352997 - protein, 74 aa, Zea mays
  unsure (1)..(74): unsure at all Xaa locations
  Clone ID: MRT4577_85102C.1.pep
TXKTXACQAERPXXRDIKKPXWSIXEVKCLASTRMSAEVFGSRVDSSSVFRLAMLDMKGLFLVVMWHVLLIRMA

SEQ ID NO: 352998 - protein, 139 aa, Zea mays
  unsure (1)..(139): unsure at all Xaa locations
  Clone ID: MRT4577_85103C.1.pep
VKAVLTGGLTXGLLTTVLSVVYAGARAGFFSTALSPPGWGGGTDTSLIAFNQADEXQDDPRAVPWSYTYFYFIFYLIFLLSSMFLTVLLTGCATSVGESENLGDFGWASIWAKIATQGATIWLFIWPIVLPILYSYREF

SEQ ID NO: 352999 - protein, 67 aa, Zea mays
  Clone ID: MRT4577_85104C.1.pep
AVQPSIFSRVWRTCSTMHFPLFRWLTISFISRCAPVQRVAFHDGAVETHSCPTVWSARAARWQLVVY

SEQ ID NO: 353000 - protein, 224 aa, Zea mays
  unsure (1)..(224): unsure at all Xaa locations
  Clone ID: MRT4577_85105C.1.pep
MAALLARQAAQALRARQSAQLGPTTSAMQGHLRTYMXTRGFPSGXKEEEEKEQLAKDIAKDWNAVFERSINTLFLTEMVRGLMLTLKYFFERNVTINYPFEKGPLSPRFRGEHALRRYESGEERCIACKLCEAICPAQAITIEAEEREDGSRRTTRYDIDMTKCIYCGFCQEACPVDAIVEGPNFEFATETHEELLYDKEKLLENGDRWETEIAENLRSESLYR

SEQ ID NO: 353001 - protein, 93 aa, Zea mays
  unsure (1)..(93): unsure at all Xaa locations
  Clone ID: MRT4577_85106C.1.pep
CALSVEWLTGVTWQDAGGVGLINGSCYLGQPMSFSISTLISIEVLVIGYIEFQRNTXLDPXKRLYTGGSYFYPLGLWARPETKERLLLLDIKH

SEQ ID NO: 353002 - protein, 77 aa, Zea mays
  Clone ID: MRT4577_85107C.1.pep
PTRPPTRPTFSPPYIRDLDIKRKLKHSKPFRSLSLEEGGKHALEYWRSQLLLSPSNTLRYRRPQLLLSPCFYFYLNN

SEQ ID NO: 353003 - protein, 25 aa, Zea mays
  Clone ID: MRT4577_85108C.1.pep
DANRPDGRHHLRNLTVYTLNKAQKN

SEQ ID NO: 353004 - protein, 118 aa, Zea mays
  Clone ID: MRT4577_85109C.1.pep
VSVLAMHRSAHSLLHESEGPRRQRDVGYADNLPGHVRLVLALYRERRCCDEVQVARADCGVVVRRRGAALDARRRADGQHRRPQHGDHPGHDGRSRALRGPRRCDRRGGEARVLRKLA

SEQ ID NO: 353005 - protein, 79 aa, Zea mays
  Clone ID: MRT4577_8510C.1.pep
AERGLAGLWGFFWNVRVMDVCDCTVTCVTFGMRSIGCTLGCMFCALAYCTARISGKDMNPSGTLRLILMSKLSITRAVF

SEQ ID NO: 353006 - protein, 107 aa, Zea mays
  Clone ID: MRT4577_85110C.1.pep
MADRGGYVQVQHGQYGGGHHGGQQQHGRQMGEQMKGMFQEKAPSASQALTVATLFPLGGLLLVLSGLALAGHAIQSRAEDARAGGGGHTGATGGAGAGTGTGTRASS

SEQ ID NO: 353007 - protein, 777 aa, Zea mays
  unsure (1)..(777): unsure at all Xaa locations
  Clone ID: MRT4577_85111C.1.pep
PTRGHTHVSPSDSSPPPPCFSFPPPSSPPHASHSPSPLASQTLPTPPASSSPAXASSPVRAFCPRARPSPSTCAAFSSTMAASDNPLLVADFDFPPFDRVEPSHVRPGIHELLTRLEGELEELEKGIEPTWAKLVEPLERITDRLEVIWGMVDHLKSVKDSADLRAAVEEVQPVKVSFQLRLGQSKPIYEAFKAIRNSSNWDSLSDARKRIVEAQIKEAVLSGVALEDEQRKKFNQIEQELEKLTQKFSENVLDATKKFEKLITDKKEIEGLPATALGLAAQTAVSKGHENATAENGPWVITLDAPSYIPVMQHARNRELREEVYHAYLTRASSSELDNTNIICQILKLRLEKAKLLGYKNYAEVSMAQKMATVERVEELLEKLRAASWDHAVKDMEDLKVFAKDSGSPEANDLTHWDLTFWSERLRESKYDINEEELRPYFALPKVMDGLFTLAHKLFGVTVEPADGLAPVWHSDVKFYCVKDSSSSPVAYFYFDPYSRPSEKRGGAWMNVVFSRSRVLARNGLAARLPVAHIVCNQTPPVGEKPSLMTFREVETVFHEFGHALQHMLTKQDEGFVAGIRGVEWDAVELPFQFMENWCYHKNTLLSIAKHYETGETLPEEIYAKLVAAKNFRAGTLSLRQIRFASVDMELHTSYDPNGSVSIYDVDQRVAERTQVLAPLPEDRFLCSFSHIFAGGYAAGYYSYKWAEVLSADAFSAFEDAGLDDEKAIEETGRRFRDTVLALGGGKSPLEVFVSFRGREPSPEPLLRQNGLLPVAA

SEQ ID NO: 353008 - protein, 89 aa, Zea mays
  Clone ID: MRT4577_85112C.1.pep
MESSVGIETAAAVAVGAGVGGGGGYGCGGWETPKREECRIPATLPCPAAPRKAVPDFGKRRSPPKNGYFQPPDLEALFALAPRRQAFCA

SEQ ID NO: 353009 - protein, 99 aa, Zea mays
  Clone ID: MRT4577_85113C.1.pep
AASCRRTACCASLKERRNATQAWFALSLLRALLCLLRSHPTFVVILLSSLNTLVLILIIFTHTWIRVNTRIPKQSLISFLFLFSQLSLLFLFLLSTLCN

SEQ ID NO: 353010 - protein, 64 aa, Zea mays
  unsure (1)..(64): unsure at all Xaa locations
  Clone ID: MRT4577_85114C.1.pep
VILASNRGTVMELGITPIVTSGMVMQLLVGSRIIEVDTILKRDVPRLNXAKNCLGILTAMGEPV

SEQ ID NO: 353011 - protein, 78 aa, Zea mays
  unsure (1)..(78): unsure at all Xaa locations
  Clone ID: MRT4577_85115C.1.pep
PSEADVVVTNAIFLGLSSRFTACKLCSCQAHHLGGANNRPTVWNKRERIRLAIKLKLRSQRQKSSKLRSVPDGVGXTR

SEQ ID NO: 353012 - protein, 562 aa, Zea mays
  unsure (1)..(562): unsure at all Xaa locations
  Clone ID: MRT4577_85116C.1.pep
QIQDLECSDSSFGNNPNLCGPGTTKPCPGAPPFSPPPPYNPTTPVQSPGSSSSSTGAIAGGVAAGAALLFAIPAISFAYWRRRKPQEHFFDVPAEEDPEVHLGQLKRFSLRELQVATDGFSNKNILGRGGFGKVYKGRLADGSLVAVKRLKEERTPGGELQFQTEVEMISMAVHRNLLRLRGFCMTPTERLLVYPYMANGSVASRLRDRPPAEPPLDWQTRQRIALGSARGLSYLHDHCDPKIIHRDVKAANILLDEDFEAVVGDFGLAKLMDYKDTHVTTAVRGTIGHIAPEYLSTGKSSEKTDVFGYGITLLELITGQRAFDLARLANDDDVMLLDWVXTVPFPLFKLYPKCSCLFCGFRTVQGLVLTFSYAIVRNLLIISSNDKXALILMSKRXILTELILXRLITKQVEXMLVSLKVLIYLLEYCFSLLGFISLHSFDMTXLASKLIPCSIALLXKGLLKEKKLESLVDEDLDHNYIDVEVESLIQVALLCTQSNPMERPKMSEVVRMLEGDGLAERWEEWQKVEVVRQEVELGPHRTSEWILDSTDNLHAEQLSGPR

SEQ ID NO: 353013 - protein, 487 aa, Zea mays
  Clone ID: MRT4577_85117C.1.pep
RCVSIILVKNPPFVHTNRWVKHEAITALQVLDLSNNNLSGEVPSTGSFSLFTPISFGNNPNLCGPGTTKPCPGAPPFSPPPPYNPTTPVQSPGSSSSSTGAIAGGVAAGAALLFAIPAISFAYWRRRKPQEHFFDVPAEEDPEVHLGQLKRFSLRELQVATDGFSNKNILGRGGFGKVYKGRLADGSLVAVKRLKEERTPGGELQFQTEVEMISMAVHRNLLRLRGFCMTPTERLLVYPYMANGSVASRLRDRPPAEPPLDWQTRQRIALGSARGLSYLHDHCDPKIIHRDVKAANILLDEDFEAVVGDFGLAKLMDYKDTHVTTAVRGTIGHIAPEYLSTGKSSEKTDVFGYGITLLELITGQRAFDLARLANDDDVMLLDWVKGLLKEKKLESLVDEDLDHNYIDVEVESLIQVALLCTQSNPMERPKMSEVVRMLEGDGLAERWEEWQKVEVVRQEVELGPHRTSEWILDSTDNLHAEQLSGPR

SEQ ID NO: 353014 - protein, 95 aa, Zea mays
  unsure (1)..(95): unsure at all Xaa locations
  Clone ID: MRT4577_85118C.1.pep
SAYVTIHSSTQPREGVERWRAAWCPANGDAVAGKKNGSVSFTIDCTKAVEDMIMGVSSLEKFLQEHMGVSDGKDGDLTXSFTISRERTKVTLTSD

SEQ ID NO: 353015 - protein, 93 aa, Zea mays
  Clone ID: MRT4577_85119C.1.pep
VSDSPSFSGHRNSHLNRLTMAHRHLPFHYHLPYSSNCAARHQKPSTAYVFREPVNFFFCYARQWGRIHRQSGWRHVWLLQSSELLAGSKGTHQ

SEQ ID NO: 353016 - protein, 41 aa, Zea mays
  Clone ID: MRT4577_8511C.1.pep
KMVSFDSPSVPSFVELRKYSVLLFLMDYRSQHVPYDSQFSD

SEQ ID NO: 353017 - protein, 90 aa, Zea mays
  Clone ID: MRT4577_85120C.1.pep
AKGVSVKTVLSSRQNRSTAMHLIGWSALKSLRGIGYGHGLWCIHGELNYGNLKSCAETYMTTADFEELMKEVDSVVMTGGTGSSRCMTAG

SEQ ID NO: 353018 - protein, 223 aa, Zea mays
  Clone ID: MRT4577_85121C.1.pep
MAAAMDVDEAGGEERRPSEKELFRAAESGDAAAFASLAPADLSLRNEDGRSLLHVAAAAGHPQVVLALAQCGGDAAASVLNAQDEEGWAPIHSAASSGNSQIVDILLERGRLNIAEKLIAHGANVNKKDKFGCTPLHRAASTGNAELCEFLIEEGAEVDAVDKTGQTPLTHAVICENKGAALLLIRHGADVDVEDKEGYTALGRASNSFRPALIDAAKAMLEG

SEQ ID NO: 353019 - protein, 142 aa, Zea mays
  unsure (1)..(142): unsure at all Xaa locations
  Clone ID: MRT4577_85122C.1.pep
PQVVLALAQCGGDAAASVLNAQDEEGWAPIHSAASSGNSQIVDILLERXFGCTPLHRAASTGNAELCEFLIEEGAEVDAVDRTGQTPLTHAVICENKGAALLLIRHGADVDVEDKEGYPALGRASNSFRPALIDAAKAMLEG

SEQ ID NO: 353020 - protein, 244 aa, Zea mays
  Clone ID: MRT4577_85123C.1.pep
MAAAMDVDEAGGEERRPSEKELFRAAESGDAAAFASLAPADLSLRNEDGRSLLHVAAAAGHPQVVLALAQCGGDAAASVLNAQDEEGWAPIHSAASSGNSQIVDILLERGADVNLVTDGGRTALHYAASKGRLNIAEKLIAHGANVNKKDKFGCTPLHRAASTGNAELCEFLIEEGAEVDAVDKTGQTPLTHAVICENKGVALLLIRHGADVDVEDKEGYTALGRASNSFRPALIDAAKAMLEG

SEQ ID NO: 353021 - protein, 80 aa, Zea mays
  Clone ID: MRT4577_85124C.1.pep
ALQVLLDIFTGVRLYLPPSTPDFSPLRRYFVAFDGDLVQEFDMTSATHVLGSRDKNPAAQQVSPEWIWACIRKRRLVAPC

SEQ ID NO: 353022 - protein, 89 aa, Zea mays
  unsure (1)..(89): unsure at all Xaa locations
  Clone ID: MRT4577_85125C.1.pep
XDXLATALAQHEQTAVDDNAGGRRRRRAIQRRSRSRCAAAVSAGRYRPLRKTAERRHRDQCLRRRRARRLVTYLERRFEAADHPATVDR

SEQ ID NO: 353023 - protein, 24 aa, Zea mays
  unsure (1)..(24): unsure at all Xaa locations
  Clone ID: MRT4577_85126C.1.pep
YIGRVLFILXFYLPRQIFKNIVNT

SEQ ID NO: 353024 - protein, 47 aa, Zea mays
  Clone ID: MRT4577_85127C.1.pep
GQRGRERSSSSSSRRSYHLLLTLTITNKAFHFHECFIYRFSTFSLSY

SEQ ID NO: 353025 - protein, 78 aa, Zea mays
  Clone ID: MRT4577_85128C.1.pep
FDQRLFIFSGLLYWVIISTLPTPSYMGVNFRGGGGAAACDRAWLIVHGGPNNQVLALFASPFSFCLGPCVCWRVVGRA

SEQ ID NO: 353026 - protein, 364 aa, Zea mays
  Clone ID: MRT4577_85129C.1.pep
MSIIYTATSHPLPRTVGTKMTTPPRRSPPLRGRGHAGLRALAPMVNIHERSPVPACVPAHPDPSSSISPDDWRRLEGATFSVMCKIHPTVSSQHLRARVIDYIQRLFRLHHDGYQVISFGSVPLKTYLPDGDIDLTLLCAAISDENLENEVCAILKSEEQRKDSEFEVKDVKYVPAEVKLVKCKVQNIAVDISVNQIGGPNKVYFLEKVDQNLGKNNLLRRSIMLIKHWCYYESCILGAQRGLVSTYALETLVLYIFHVFHKSLDGPLAVLYRFLDYYSKFDWDNKGISLFGPISLSSLPELVTEPPYTRDDGFLSREAFLRDCAKAFSVPPINSEENPQVFSKKFVNIVDPLKQSNNLGRSIS

SEQ ID NO: 353027 - protein, 57 aa, Zea mays
  Clone ID: MRT4577_8512C.1.pep
VVPARTCRHKPLQCIVLALPGDWTLDPQKVRKDPLLAVPNAHILSNARPLQSHRFTF

SEQ ID NO: 353028 - protein, 335 aa, Zea mays
  unsure (1)..(335): unsure at all Xaa locations
  Clone ID: MRT4577_85130C.1.pep
NRRSLWWQVKLVKCKVQNIAVDISVNQIGGPNKVYFLEKVDQNLGKNNLLRRSIMLIKHWCYYESCILGAQRGLVSTYALETLVLYIFHVFHKSLDGPLXLFLDYYSKFDWDNKGISLFGPISLSSLPELVXVKVNSARGTVDCAVCWCSVCGXLLVIGMAFLXAEPPYTRDDGFLSREAFLKDCAKAFSVPPINSEENPQVFSKKFVNIVDPLKQSNNLGRSISKGNLGRIRKEFYFGACKLGKILQAPACFSANEINRFFRNTLSRADVPVSSPDDVLQAASVSASPGNKGVEGVSKGSSPNNSCDVLCNQFGYIKISDSNNALQNLVVDRPA

SEQ ID NO: 353029 - protein, 65 aa, Zea mays
  Clone ID: MRT4577_85131C.1.pep
AGPAPAAGRSCHPRRYRRPSSGVSIGGNADHASGRVIGRVEGPWKRPRLGARLSHRTSPNTRGVG

SEQ ID NO: 353030 - protein, 81 aa, Zea mays
  Clone ID: MRT4577_85132C.1.pep
GRSPSGFKTGWRSIATVSSTGIVEKGSVCRLATLRTKVSCSVVMGKAIVLFQLITRVKKVKSSVGAHHRPLLVLFRAWRSV

SEQ ID NO: 353031 - protein, 241 aa, Zea mays
  Clone ID: MRT4577_85133C.1.pep
MNSSKQALIYSFVAKGSVVLAEHTAFSGNFSTVAVQCLQKLPPNSTRSTYSCDGHTFNFLVNRGFVFLVVADEAAGRSVPFVFLERVREDFMQRYGSSIDEEGQHPLADDADEDDFLFEDRFSIAYNLDREFGPRLKDHMQYCVNHPEEINKLSKVKAHLSDVKGIMMDNIEKILDRGEKIELLVGKTETLQSQADSFHRHGRELRRKMWLQNLRFKLMVGGGIAALILIIWLMVCRGFKC

SEQ ID NO: 353032 - protein, 97 aa, Zea mays
  unsure (1)..(97): unsure at all Xaa locations
  Clone ID: MRT4577_85134C.1.pep
WTERESSRQTTXMRXFSYGLYGESRRXRFSYDGXSEARQASFWHYRRTLPVRLGLGGSXSPSAHARKVGLVPXXRSXSRXXRGATDLKRATRRVRVD

SEQ ID NO: 353033 - protein, 241 aa, Zea mays; identical to SEQ ID NO: 353031
  Clone ID: MRT4577_85135C.1.pep

SEQ ID NO: 353034 - protein, 241 aa, Zea mays; identical to SEQ ID NO: 353031
  Clone ID: MRT4577_85136C.1.pep

SEQ ID NO: 353035 - protein, 108 aa, Zea mays
  unsure (1)..(108): unsure at all Xaa locations
  Clone ID: MRT4577_85137C.1.pep
LYLLHSAEEPDRHDQGVARSARSHGSNCQRQILAYNHRLHNVLQFTQIIYVSPGTFLTQPQLLXPFYQHAAPNACTLLQLQQLLSLNQLALTNLAVFYQQPIIGGALF

SEQ ID NO: 353036 - protein, 73 aa, Zea mays
  Clone ID: MRT4577_85138C.1.pep
AGALPAGSVKGNKRVQWPEIKRHWGQMWQTREALPSESLTFRGMTKDPPKAPPWGVFPPEWKFGVPSPASQNF

SEQ ID NO: 353037 - protein, 118 aa, Zea mays
  Clone ID: MRT4577_85139C.1.pep
GTSRPAGPGFIPASLQLTIILPAQSRWQVLLAAAFYHASTFIATEAERNKRTRRIEKKLLTMKCKSYSGFVLWTRGARASPGHGMNEDGMDCASRMRGGLLYDVADVNLRLRYTAIML

SEQ ID NO: 353038 - protein, 27 aa, Zea mays
  Clone ID: MRT4577_8513C.1.pep
YLHFTLYLKLFVFTIFLNNENQDMQSV

SEQ ID NO: 353039 - protein, 80 aa, Zea mays
  Clone ID: MRT4577_85140C.1.pep
VSNPCIWLSLRYVVYLPHLFPSFFYPNVAGSETSVVDVLVFAGRTFRALDVTFSHSPTLFALVLVLSGLFCGCSITCSQE

SEQ ID NO: 353040 - protein, 131 aa, Zea mays
  unsure (1)..(131): unsure at all Xaa locations
  Clone ID: MRT4577_85141C.1.pep
MQRRMAGAAAPMLSVGPAEGTSAATEQGGXLASSSLANANVVAHPTPISLAQRAQLALMPHPEPSINSPRCXTTNTNFCYYNNYCMTHPRHLYKXCRRYWTRGGSLCNVHKRGGWRXNKRAGNSSSYIAGS

SEQ ID NO: 353041 - protein, 57 aa, Zea mays
  Clone ID: MRT4577_85142C.1.pep
KYSFRYMDRVIFLYPSQHYLLMSFKSNANCGAHCLLHYGMWGDSQTSMASLMRIGMS

SEQ ID NO: 353042 - protein, 87 aa, Zea mays
  Clone ID: MRT4577_85144C.1.pep
MKKKNRWSKTGAHPPPPKAMESRPKSRAPTPKPKPIGGRLGPATCFFFFFFLFFFFFFFFFFFFFFFFLKRKTNTVRGWIIRPSFCT

SEQ ID NO: 353043 - protein, 340 aa, Zea mays
  Clone ID: MRT4577_85145C.1.pep
MGKGAELWDDSALVDAFDRAMFSMKEMHCKSKRATPSEDGKTELAAATAEEEPITAGAADVCGEEDANCDSTHCDLSELQQQPYEDRQTIEHAPLQETDPGKETHVSEAKTLSTDASTNAGGNWSSSQQTGQYNELLRQYYELEEKSRNILEQLQQTNYSNYQASGYASTAQQQQVPVYSATVPDPYSSTTQSSCCNWNVPLVSVSCCSAGQPSGGSACTPPTAGCSVSLTCDQCPGATTAYPSVSNFMQAPTMVSSNDDQVDKAAMMTAEAAFNFMRSTISGQPSTQGSKSDTGKEESTNMGMNPNLDSDLAALLNSWYAAGFYTCRYLMLQSTKNSRP

SEQ ID NO: 353044 - protein, 43 aa, Zea mays
  Clone ID: MRT4577_85146C.1.pep
SGVQNDPCLIRQLANYYLEGLIESSKKKKKKKKKKVLCVVTTA

SEQ ID NO: 353045 - protein, 85 aa, Zea mays
  Clone ID: MRT4577_85147C.1.pep
KTKLRSNKSWEKQHSLRILFLVQSAGFFLTFSAHVGPRDIRLKRLLLRWQMWTTTGRHILDRVGGAFLSTLESTDGAHSSRASDL

SEQ ID NO: 353046 - protein, 147 aa, Zea mays
  Clone ID: MRT4577_85148C.1.pep
MKDPAHRTKVVLRRLPPAIAQQAVVDQVDARFAGRYDWACFRPGNASQKNHRYSRLYLNFKHPEDVVEFAEVFNGHIFVNEKGAQFKAFVEYAPSQQVPKSNVKKDGREGTVTKDPEYLEFLEFISKPTEHLPSAEIQLERKEARRA

SEQ ID NO: 353047 - protein, 252 aa, Zea mays
  Clone ID: MRT4577_85149C.1.pep
MPVKRSASALALPPVGRRARARLCIRLAAPLSFLLLFVALFHAQPLLGVPPAAQPPSAGPGKVAFLFLVRAGVPLDFLWDAFFRNGEEGKFSVYVHSAPGFQLDRTTTGSPYFYGRQLARSVKVVWGEATMVEAERMLFAAALQDPANQRFVLLSDSCVPLYNFSSIYTYLMASPKSFVDSFVDKTEKRYNQNMSPAIPKDKWRKGSQWVVLIRKHAEVVVGDKNVLKVFRRHCKMVVTKSLFRRRPNARQL

SEQ ID NO: 353048 - protein, 63 aa, Zea mays
  Clone ID: MRT4577_8514C.1.pep
NNILLGAKFYAMTQWHHQFSKLAPSTNFKLITITNGTEKTYHNNKPPSLYRYTYFLTFCRNYP

SEQ ID NO: 353049 - protein, 358 aa, Zea mays
  Clone ID: MRT4577_85150C.1.pep
LVVRAGLGSRVNVQNVLIHMYSSCQDVVAARRLFDNGESLDHFSWNSMISGYLKNGRVEDAKALFDVMPDKDNVSWSAMIAGCVHNNQSSEALNVFDSMRAHEIKPDDVTLVSVISACSNLSALEQGKLVHEYIRKYQYNITIVLGTSLIDMYMKCGCMEAALEVFDMLEEKGTPCWNAVIVGLAMNGLVTRSLDMFSEMEATGTAVPNEITFTGVLSACRHGGLVEEGRQFFKLMQNKYQIVPNIRHYGCMVDLLGRAGYVREAEDMIQSMPMSPDVPAWGALLGACWKHGDSEVGERVGKKLVKLDPDHDGFQTMLSNIYASEGMWQCVKDLRGSMKQQHVAKVAGCSMVEPSHSS

SEQ ID NO: 353050 - protein, 55 aa, Zea mays
  unsure (1)..(55): unsure at all Xaa locations
  Clone ID: MRT4577_85151C.1.pep
LYSFFXGVFYFSLAQSTFTNSTSNLTIIYRGGLFSSFGPLAPAPXKSPNQIILAS

SEQ ID NO: 353051 - protein, 65 aa, Zea mays
  Clone ID: MRT4577_85152C.1.pep
LCDEKKKKKKKKKKKKKKKKKKKKKKKKKKKKKKKKKKRGGPPIRNFSTPEINSDPGLEGYQFFL

SEQ ID NO: 353052 - protein, 371 aa, Zea mays
  Clone ID: MRT4577_85153C.1.pep
MKDPAHRTKVVLRRLPPAIAQQAVVDQVDLRFAGRYDWACFRPGNASQKNHRHSRLYLNFKRPEDVVEFAEVFNGHVFVNEKGAQFKAFVEYAPSQQVPKSTIKKDGREGTIMKDPEYLEFLEFISKPTEHLPSAEIQLERKEAERAAAGKEAPVVTPLMMYVRQQRAAKSMVHRPGSRLSRKLASVVSSSSPKRSSEKRRSSTYVVRDNTKEKPTYIMVPKREEHTQREKVVAGNSGDATSGGTSGSGQVAEFKRDKIVILKGRGRIDSNTPNGATQHSSTPIKNVPPSRSRQDQRLEASGKIIKTILSNKEARSSNPSEHEQEGHMFNTEKDKRPPRAFNPRTIVKDQVVENAERSHFDEKANHLHGSV

SEQ ID NO: 353053 - protein, 153 aa, Zea mays
  Clone ID: MRT4577_85154C.1.pep
LRTVLVLIRATCVMQCMHIQFSHACTLVCTHQHSSYCTPHLFSYDIYYYDKRMQGGPLQVLLIIFVVVIMLLLLMMLEIIVNYYILVLFILLQIHKELHLEQYHHYIQYKIHIEILSVLDIFHFIFTTIIIIFIIFTNTIFFFLFFYIPTHSK

SEQ ID NO: 353054 - protein, 220 aa, Zea mays
  Clone ID: MRT4577_85155C.1.pep
MSSPLEDVSVGMEEEDQRPLNRALLHRSATTNASQVAMVGSNPCPIESLDYEMIENELFDQNWRTRRKADQVRYVVLKWTFCFAIGILTGIVGFFINLAVENVAGFKHQAVSALMDSASYWTAFWVFAGCNLALLLLASSITAFLSPAAGGSGIPEVKAYLNGVDAPNIFSLRTLAVKVRRVCSVPILLPSPSLSLAAVHMLPSAFPDASCANGLTSTLI

SEQ ID NO: 353055 - protein, 54 aa, Zea mays
  Clone ID: MRT4577_85156C.1.pep
MIRHPCLSPAHFLLYFRIWKCNFLFLVGRIHHPTNCIIEFHLISNLKEGTTNDV

SEQ ID NO: 353056 - protein, 498 aa, Zea mays
  unsure (1)..(498): unsure at all Xaa locations
  Clone ID: MRT4577_85157C.1.pep
MKDPAHRTKVVLRRLPPAIAQQAVVDQVDARFAGRYDWACFRPGNASQKNHRYSRLYLNFKRPEDVVEFAEVFNGHIFVNEKGAQFKAFVEYAPSQQVPKSNVKKDGREGTVTKDPEYLEFLEFISKPTEHLPSAEIQLERKEAERAAAGKEAPVVTPLMMYVRQQRAAKSMAQRPGSRLSRKVAGVVTSSSSPKRSFEKRRSSTYVVRDSIKEKPTYIMVPKREEHTQREKIVSGNSGGMLVPNQEIANSNNKVFLIKSXDECLMLTSITEDFFSYHLPLXRPAKCSRQCKRSEANGRIIKTVLSNKEVRSSNPSQHEQEGHMFNTEKDKRPPRALNPRTIVKDQVVENAERSHFDEKNNYVHSSAPIGEKVERHARNRDRPDRSVWAPRRYDKSPPGGVSHALSSDFSQMQSHSGDNVSQLTDXMETERQTQGVXGSRGVPVENGHRHANRRGTPCDPKETKISASVPDGKNSKRGSASYGAHERQVWVQKSSSGS

SEQ ID NO: 353057 - protein, 95 aa, Zea mays
  unsure (1)..(95): unsure at all Xaa locations
  Clone ID: MRT4577_85158C.1.pep
PPPAPSGGLRSSXLRFSGXLAGPPAPWASXLLLAAFPVVAFFSAVLAXPSSLWLCAAXVXXXSPXALGSCGFLSPAPGLRSSNVXAGVAAGCFLA

SEQ ID NO: 353058 - protein, 96 aa, Zea mays
  Clone ID: MRT4577_8515C.1.pep
IYLTSFTTSTTLILRRPKVLKPFSRHLRNRSYRAFCRRVSSSSPWSKTTATQRIERGHRVCKFRDHWQSEPHRYTSVGAWHPALSDQLLDSLFNTL

SEQ ID NO: 353059 - protein, 38 aa, Zea mays
  Clone ID: MRT4577_85160C.1.pep
FIIFFLFIKINFLFFFFFFEEKKMLWKYYLNGVDLKGE

SEQ ID NO: 353060 - protein, 53 aa, Zea mays
  Clone ID: MRT4577_85161C.1.pep
FKLPLIFFFRPFTNYKIRFGNFQKAFFFRTGGRPYMSLEHLTSHRSPGGFGVP

SEQ ID NO: 353061 - protein, 113 aa, Zea mays
  Clone ID: MRT4577_85162C.1.pep
GRVGVRSARIQSSPIIRTGTHLRHAAAAGHHDEPRTRAASLSHPPRLTKTDSFSLLDPCRSQSACARILCLPRPGELLPPPPPLPSVSSFSNPSLFPLYHHQSIYWFRRDMWW

SEQ ID NO: 353062 - protein, 116 aa, Zea mays
  Clone ID: MRT4577_85163C.1.pep
HIGFFFFFLFFVYHKTASLWVWYAQNSHHKTLAMMLVATTLLKHNQGLTGFGLLTLPSPNCHESSASWKHTAAVANGSNHRACTVPGWGEIVIARATEYLMGPRMTSRTAMTFRGD

SEQ ID NO: 353063 - protein, 52 aa, Zea mays
  Clone ID: MRT4577_85164C.1.pep
NINLISHKDHFLTLKNKDMIYVTLVKNVCHSRDTCPRPADTHHPSPRSPLRP

SEQ ID NO: 353064 - protein, 63 aa, Zea mays
  Clone ID: MRT4577_85165C.1.pep
FFSLTFRTVPTVVFFANKTVISQHDSISKSPKEAWQKERRHYRSLEHKQTREVIQAVKLDLQK

SEQ ID NO: 353065 - protein, 56 aa, Zea mays
  Clone ID: MRT4577_85166C.1.pep
DLASSTALSPCTNERMTYKIRKTNQPKPQVAIRTKMTSNGSCQSINHDERDKNKHI

SEQ ID NO: 353066 - protein, 123 aa, Zea mays
  Clone ID: MRT4577_85167C.1.pep
IISLISYMCTLRSVWMYIFSQTMIVSRVIIIQLQTQVSWGYLLKLVQIVLSNILSIKGFRIFIESPPGKCLVIADPHSSISHNLDTGRELASSPLATMVSVTLWSWCTGLTFTSGHVSSPSRP

SEQ ID NO: 353067 - protein, 57 aa, Zea mays
  Clone ID: MRT4577_85168C.1.pep
TQLLECVPHAVDVRKVWSKLRLMVGAKNGRIWASLTSVSLGGQPSRRVTVGLMGSTI

SEQ ID NO: 353068 - protein, 137 aa, Zea mays
  Clone ID: MRT4577_85169C.1.pep
KKKKKKKKKKKKKKKKLGPGAFLGISGPPFWVALGQARSLIPKRLVRVPKCFGENPKARGGGFLCSKTPGQKRRLKIFLQVKNPPFKGAPFGRGPFFTPKNGFEPWGKFFVVEKKGFAHLMWARVLRGNVKIFPYFE

SEQ ID NO: 353069 - protein, 58 aa, Zea mays
  Clone ID: MRT4577_8516C.1.pep
SGKNFICSVLHTFWFAHYLIEIWLNTKFYLFTLLKIMGWDVYHFCSGVLVVTSPLDFY

SEQ ID NO: 353070 - protein, 304 aa, Zea mays
  unsure (1)..(304): unsure at all Xaa locations
  Clone ID: MRT4577_85170C.1.pep
MTHRLLLLLLLLPLLAPPAASARQGAGQDLGQCPGLEYGLPPFAAALRASCPVSTEGYSPPEEVVNGEELLRLLDGKEEHTAVLFYASWCPFSERIRPVFDDLSSMFPRVKHLAIEESNVTKAILSRYHVRALPSIIIARSSYIFWALSSKDLDSLVNLYTAATGQEPVAYIGTXASGGPRKAQTMLRFGTXSISETVKQEPCLAFRILFACLKIFIFFFPKFFALVQDFWTQYYEQINLGILAKLTQLLECVPHAVDVRKVWSKLRLMVGAKNGRIWASSLTSVSLGGQPSRRVAVGLMGSTI

SEQ ID NO: 353071 - protein, 53 aa, Zea mays
  Clone ID: MRT4577_85171C.1.pep
RRVGFSPNSTDDAGVFHYAHPEQEHADHEAIPDAPALGMRLTPKDDLFTYRLC

SEQ ID NO: 353072 - protein, 168 aa, Zea mays
  Clone ID: MRT4577_85172C.1.pep
TSEIRPIEKTMLNKTRTFTAAPLETLLGGKVCVDDFNNQFYSHHLEGPWTVGITKFYGGWNRLLEKLPEGWVYCDADGSQFDSSLTPYLINAVLNIRLQFMEDWDIGAQMLKNLYTEIVYTPIATPDGSIVKKFKGNNSGQPSTVVDNTLMVIIAFNYSMLSSGIKEE

SEQ ID NO: 353073 - protein, 116 aa, Zea mays
  Clone ID: MRT4577_85173C.1.pep
NKKHCGAGRKASKAKLASTAPTKDPQSLAAKNRRERISERLRALQELVPNGTKVDLVTMLEKAISYVKFLQLQVKVLATDEFWPAQGGKAPEISQVREALDAILSSASQSQRGQLN

SEQ ID NO: 353074 - protein, 40 aa, Zea mays
  Clone ID: MRT4577_85174C.1.pep
QSLRGQRPCFFVLRKGKKRWFWGVEKKRFNKRFVRGGGSC

SEQ ID NO: 353075 - protein, 96 aa, Zea mays
  unsure (1)..(96): unsure at all Xaa locations
  Clone ID: MRT4577_85175C.1.pep
ERGQVTPTELSRPSSGRRQRQSISAHNEEPVAESVMDKIAERFHXDDSSSSSSDSHDENKGSSLASSAGAMKAEIYRLFRRERPSHSVLTGGTPGA

SEQ ID NO: 353076 - protein, 78 aa, Zea mays
  Clone ID: MRT4577_85176C.1.pep
PAFFFFFSGGRGGAILFIQSTDHGHGITQHPKHTHAVHHVMSYHTICMQGLGPIHNAHDIRGGDGDYWRSKELKTSKQ

SEQ ID NO: 353077 - protein, 54 aa, Zea mays
  Clone ID: MRT4577_85177C.1.pep
RTTSSTPLCLYCALPPCRQTHHPLASATPRSAHLRGSVPKNLIPVEVVTKIGSP

SEQ ID NO: 353078 - protein, 82 aa, Zea mays
  Clone ID: MRT4577_85178C.1.pep
SPREMLPNKVRFPFPPPSFFTLDQFTPFFGATLFWEDFLLLEAPTFIPQKLKGSPGGSLVFSRKGGPSFGSPVSEKMGTSEI

SEQ ID NO: 353079 - protein, 35 aa, Zea mays
  Clone ID: MRT4577_85179C.1.pep
LQVSHQSECWRRRWRHASVIQAPRHHSLWPNEEIG

SEQ ID NO: 353080 - protein, 110 aa, Zea mays
  unsure (1)..(110): unsure at all Xaa locations
  Clone ID: MRT4577_8517C.1.pep
SYPKAERGKGCCPSLRAAQRGPELRFPSGLGRLGPAPTREGRASXDQSATPGSRSDPHPASVQPIAAESRRIDFYSPDRARTAVSPRQKNPGCSRNPRCPKSEHAWTDQI

SEQ ID NO: 353081 - protein, 85 aa, Zea mays
  Clone ID: MRT4577_85180C.1.pep
IVKPGIFVALPLRFDVSKGIKKGFFNRAFLGYPVGMPVPLIVMNWFQGAQPALLSLVPGVIGFVPVPCFWYGKVKHLLEFAESKT

SEQ ID NO: 353082 - protein, 40 aa, Zea mays
  Clone ID: MRT4577_85181C.1.pep
YRSLIPASTHTSAHTCMLHLIFFFYNYILIPLFFKIPPAP

SEQ ID NO: 353083 - protein, 114 aa, Zea mays
  unsure (1)..(114): unsure at all Xaa locations
  Clone ID: MRT4577_85182C.1.pep
MRVQIQRPHQVTITTRTTHEHTRRLTRRGEQSAAMGGGGAHGGTTYKGYTIPHNKRWHTVAGKGLCAVMWFWVFYRAKQDGATLLGLXHPWEGHDDHSHGHGHGHKASSSSSSH

SEQ ID NO: 353084 - protein, 85 aa, Zea mays
  Clone ID: MRT4577_85183C.1.pep
MGGGGAHGGTTYKGYTIPHNKRWHTVAGKGLCAVMWFWVFYRAKQDGATLLGLRHPWDGHDDHSHGHGHGHEVVPFDPFYLLGIT

SEQ ID NO: 353085 - protein, 75 aa, Zea mays
  unsure (1)..(75): unsure at all Xaa locations
  Clone ID: MRT4577_85184C.1.pep
VQHIQCMASVAICPKAAAIDDNLVHDVKLAADXTRIPMVHXLVLDFMNFHELCKNINTDEADGYSAGTQPVILNT

SEQ ID NO: 353086 - protein, 54 aa, Zea mays
  Clone ID: MRT4577_85185C.1.pep
KARKSAGLIHREVARPKELGDKLLHTGWLKKTPPGITFFNAYHLHTPKNPIYWG

SEQ ID NO: 353087 - protein, 66 aa, Zea mays
  Clone ID: MRT4577_85186C.1.pep
YLFKDSPTLPLSSTPALSQLNSNNDIINLFYNLCFSLQYCITFLFPSTTSFAHLSSANSSNYSLKL

SEQ ID NO: 353088 - protein, 123 aa, Zea mays
  Clone ID: MRT4577_85187C.1.pep
SPNQLLVRILSLHITLFIATSAGRFAAAHSPPGRWGLPVVAGRSTFPVPVRASDPQRFPESLRARVSPSQGSKVDSAPSSPELVHAPLSLRARSFAGDHHAVLEPVFSGNGASRPASGTTPSR

SEQ ID NO: 353089 - protein, 117 aa, Zea mays
  Clone ID: MRT4577_85188C.1.pep
YLCTSTEAKLAKYSLLAGRLNTRQLVTLADKQPDRKSRQQKYDTYRQGTGCYAIHCQCIPRAPCDLDLAAPNLLPDHMTILSLEECCIRSSCARPRNHPCCKSRNRHRQTQTKMFMF

SEQ ID NO: 353090 - protein, 58 aa, Zea mays
  Clone ID: MRT4577_8518C.1.pep
FLFIMGLFLSSLWSGMSSMRSLYMPRRAVVPPNTRSVAVANLRQMQKLVELVWVAHAS

SEQ ID NO: 353091 - protein, 139 aa, Zea mays
  unsure (1)..(139): unsure at all Xaa locations
  Clone ID: MRT4577_85190C.1.pep
MAATVRRAASSVLSRFLLTKPSPSPASAAGNKSALLGAGAAALHRFSTAPASAAAAAEEPIQPAVEVKHTQLLINGNFVDAASGKTFPTLDPRTGEVIARVAEGDSEDIDRAVAAARRAFDEGPWPRMTXYERCRVLLR

SEQ ID NO: 353092 - protein, 368 aa, Zea mays
  unsure (1)..(368): unsure at all Xaa locations
  Clone ID: MRT4577_85191C.1.pep
MAATVRRAASSVLSRFLLTKPSPASAAGNKSALLGSGAAALHRFSTAPASAAAAAEEPIQPAVEVKHTQLLINGNFVDAASGKTFPTLDPRTGEVIARVAEGDSEDIDRAVAAARRAFDEGPWPRMTAYERCRVLLRFADLIERHAEEVAALETWDNGKTLAQAAGAEVPXVARCVRYYAGWADRXHGLVAPADGAHHVQVLHEPVGVAGQIIPWNFPLLMFAWKVGPALACGNTVVLKTAEQTPLSALYVANLLHEAGLPEGVLNVVXPVQTILKFSGVEEVIRRANATPYGLAAGVFTRSLDAANTLSRALRAGTVWVNCYDVFDATIPFGGYKMSGVGREKGIYALRNYLQTKAVVTPIKNPAWL

SEQ ID NO: 353093 - protein, 105 aa, Zea mays
  Clone ID: MRT4577_85192C.1.pep
RLLFPFVRVLCALGVVVVLAVSGGGLFLALGSARRSGRWRRVWVLGCVLGVLARLACVALAARFPVGVPVVPSALVPRPARGVGRFASWALVRFLARWLGALARS

SEQ ID NO: 353094 - protein, 87 aa, Zea mays
  Clone ID: MRT4577_85193C.1.pep
DSSALPIGSAAKRLKEAEAAASAQHHHAGVVSYDVGRIASQLGDGGALAAAYGAHYHGAAWPTIAFQPGAASTGLYHPYAQQPMRGG

SEQ ID NO: 353095 - protein, 106 aa, Zea mays
  unsure (1)..(106): unsure at all Xaa locations
  Clone ID: MRT4577_85194C.1.pep
MAIARTGVYVDDYLEYSSTLAGDLQRILSTMRELDDRAHGIMGQTKEQIKYILGVSSHGYDRSNMDDDESERMKKDIEASQDNALNLCTEKVLLARQAYXDLIESH

SEQ ID NO: 353096 - protein, 166 aa, Zea mays
  unsure (1)..(166): unsure at all Xaa locations
  Clone ID: MRT4577_85195C.1.pep
MAPMNNQNLNYSSNYGEAAAQKVNVLASCYLVDSAANLKGLHYCTTGVAGAEWYXPEVPSSGLPSPPTSPPLAALTSSNQLALLPKNKKREIPGRRLGRRGGAALSIREECERFFCESMKATFHGERNSSMNGSGLSGAFLPTPPSDDRLDTSSLFPMTSYLPTTL

SEQ ID NO: 353097 - protein, 550 aa, Zea mays
  Clone ID: MRT4577_85196C.1.pep
MAATVRRAASSVLSRFLLTKPSPSPASAAGNNSALLGSGAAALHRFSTAPASAAAAAEEPIQPAVEVKHTQLLINGNFVDAASGKTFPTLDPRTGEVIARVAEGDSEDIDRAVAAARRAFDEGPWPRMTAYERCRVLLRFADLIERHAEEVAALETWDNGKTLAQAAGAEVPMVARCVRYYAGWADKIHGLVAPADGAHHVQVLHEPVGVAGQIIPWNFPLLMFAWKVGPALACGNTVVLKTAEQTPLSALYVANLLLEAGLPEGVLNVVSGFGPTAGAALSSHMGVDKLAFTGSTGTGQIVLELAARSNLKPVTLELGGKSPFIVMDDADVDQAVELAHQAVFFNQGQCCCAGSRTFVHERVYDEFVEKSKARALKRVVGDPFRDGVEQGPQIDGEQFNKILRYVQSGVDSGATLVAGGDRVGDRGFYIQPTVFADAKDEMKIAREEIFGPVQTILKFSGVEEVIRRANATPYGLAAGVFTRSLDAANTLSRALRAGTVWVNCYDVFDATIPFGGYKMSGVGREKGIYALRNYLQTKAVVTPIKNPAWL

SEQ ID NO: 353098 - protein, 73 aa, Zea mays
  Clone ID: MRT4577_85197C.1.pep
IGSLDPNTSKMVGGLVNVVQWFRQVVNLALDAGSPMLVGSLLKPDSRYCVFDGSGALANLSGYKVPEALCLFM

SEQ ID NO: 353099 - protein, 155 aa, Zea mays
  unsure (1)..(155): unsure at all Xaa locations
  Clone ID: MRT4577_85198C.1.pep
IRHEVVLTNPGXLNFYDGGSLFSVQNSKEGNPLPEAQKFQVAIPTLDPNITVTGLYSLTKSEFPNISLKKFCARKNVGHFISENMKXPLTGGVPNEMSLNEDHAVERIXIAGYQDGSVSIWDATFPVLMPMFVLDGNVSLICIFVVLLALFLIGL

SEQ ID NO: 353100 - protein, 74 aa, Zea mays
  Clone ID: MRT4577_85199C.1.pep
FCMPLPRLVDYHRNQVGPDVLAAPDTLLAEDVYDYELGATFDHRPCLQASCKVISIQGQCADRSNLTMNNNNLD

SEQ ID NO: 353101 - protein, 73 aa, Zea mays
  Clone ID: MRT4577_8519C.1.pep
PSLATGSASPGFGLIASPPGNFPGGLPSQKFPRRLHMKVVWAPNVSFLTRVGAPPPIFGVIPPPLGVRSVWGI

SEQ ID NO: 353102 - protein, 82 aa, Zea mays
  Clone ID: MRT4577_851C.1.pep
FWFLPHKIRYLLDPDIYTDGRISVQGIDAVLFAPDDAKATQTVDPNRKPPTIVTHKKKIKLRRGQYLPTFRSGPAPLCPPST

SEQ ID NO: 353103 - protein, 97 aa, Zea mays
  unsure (1)..(97): unsure at all Xaa locations
  Clone ID: MRT4577_85200C.1.pep
IQRGWRRRTLLKGIILDDSAVGKTCLLNQYPNTKFSHQYKATIGADFLTKDVQLEDRLFTLQIWDSAGQERLXSLGGALYRXSRLMXLGYDVNSMKS

SEQ ID NO: 353104 - protein, 69 aa, Zea mays
  Clone ID: MRT4577_85201C.1.pep
KHGITFLSWEECHKKGFFNVPRAGGKETKENSFNYTGFALFFLEVFYGKTKLFPPKGVPLDWGPTFRGG

SEQ ID NO: 353105 - protein, 62 aa, Zea mays
  Clone ID: MRT4577_85202C.1.pep
LISKECEPRYIIITFCRRRFKLYYQMQITYVVLKLGSKLMQSNPKKNSKNEMKKYSALLPLL

SEQ ID NO: 353106 - protein, 77 aa, Zea mays
  Clone ID: MRT4577_85203C.1.pep
KALVGPPPNRLGSAMAANPPRGVKRMGRPTPCFSPGLGVFPPALCPRHPGLLLPPFLLHKPPRPLQGGGPLPLFLWP

SEQ ID NO: 353107 - protein, 75 aa, Zea mays
  Clone ID: MRT4577_85204C.1.pep
KKKKKGGARNQKVQDPRPGKGVNVSRAGLKILNMCPRKQEVWGFQKSPRGIWFPRFERGLLNSRLFPHWNSKNKL

SEQ ID NO: 353108 - protein, 145 aa, Zea mays
  Clone ID: MRT4577_85205C.1.pep
GNKMRLVVRVIEARGLPPTDADGTRDPYAKAQLGKQRAKTKVMRKTLCPAWDEEFAFRVGDLRDNLLVSVFHEDRYFAADVLGQVKLPLTAVLDADNRTLGTQWYQLQPKSKKSKLKDCGEIRLNVSLAQTTLKRDDGTCTLGLR

SEQ ID NO: 353109 - protein, 67 aa, Zea mays
  Clone ID: MRT4577_85207C.1.pep
VKYDFTWYKIFGFCQEEIFAVTMYKKREKKKISILPHFNAECLTSCFVSPPVQLGNATPVGRGADAG

SEQ ID NO: 353110 - protein, 92 aa, Zea mays
  Clone ID: MRT4577_85209C.1.pep
MRTETDNGKDKESSGTEKARDGSHNQRGTTGQATEATRCEKEMAKEAGRAKKDQANARKHQEKADHTSRPRHGTPRHARAPYRPERSRWRWR

SEQ ID NO: 353111 - protein, 60 aa, Zea mays
  unsure (1)..(60): unsure at all Xaa locations
  Clone ID: MRT4577_8520C.1.pep
SSFPPAALSVVPIQQKSPLLLSPFTTLNYTCTLHLTKVSYLKHNXIFCMIELGLFYLSLP

SEQ ID NO: 353112 - protein, 210 aa, Zea mays
  Clone ID: MRT4577_85210C.1.pep
PHAPLIHVMKVKPNKVNLIIGSGGKTIKSIIEETGVDAIDTGDDGTVKITARDLTSLEKSKIIIANLTMVPKVGEIYRDCEIKSIAPYGAFVEIAPGREGLCHISELSSGWLAKAEDAFKVGDRIDVKLIEINDKGQLRLSSRALLPDVDSESNIGSTKEKVPQKDDVIKMTTKRPRRKKQSEPSGAENATTKALAKSAAAPAGSKGSEA

SEQ ID NO: 353113 - protein, 93 aa, Zea mays
  Clone ID: MRT4577_85211C.1.pep
HETQNSMRCVWTMYYQNQIPKIYCEPNTVYVLLRPFQNGHVLETKRLHVTTDNSQRYRMLVVACLVFEAIMLWIEPTSSWSSSSPHVHQWRSE

SEQ ID NO: 353114 - protein, 71 aa, Zea mays
  Clone ID: MRT4577_85213C.1.pep
LITSCSSLHWPDWQEYVVSTERYNTSGDYNQVSMVVTGSVPLTMATIQSWAPLLLDRRTPCVTHQPDTLPV

SEQ ID NO: 353115 - protein, 51 aa, Zea mays
  Clone ID: MRT4577_85214C.1.pep
RTDGAVSFWSKREFRGLKMPHIIFFFYLYSNRGVIWTPPPPWFGTFFMNPI

SEQ ID NO: 353116 - protein, 229 aa, Zea mays
  unsure (1)..(229): unsure at all Xaa locations
  Clone ID: MRT4577_85215C.1.pep
MAPAIGIDLGTTYSCVGIFRDDRIEIIANDQGNRTTPSFVAFTDTERLIGDSAKNQVAMNPTNTVFDAKRLIGRKFADAEVQADMKHFPFKVIDKGGKPVIQVEFKGEEKTFTPEEISSMVLTKMRETAESYLGGTVNNAVVTVPAYFNDSQRQATKDAGLIAGLNVLRIINEPTAAAIAYGLDKKTQGERNVLIFDFGXGGTFDVSLLTXIEEGIFXEVKSTAGDTHL

SEQ ID NO: 353117 - protein, 70 aa, Zea mays
  Clone ID: MRT4577_85216C.1.pep
VSQPQLPLVSIPHGPVHTLTIVHHDRGWRAVLVVAPQRRDPAQLGRHHSTFISIIRRVRLDFQTPPTGRA

SEQ ID NO: 353118 - protein, 46 aa, Zea mays
  Clone ID: MRT4577_85217C.1.pep
LPTSSILTPYLPSITSKPYEHPVLQPYRLQHAIAASDIHLPTSQKQ

SEQ ID NO: 353119 - protein, 78 aa, Zea mays
  Clone ID: MRT4577_85218C.1.pep
GQRIQPWGPPISYLGGHGPAGAAPVTYKPGHPLPLPGPAGHLGCDATLASSVFAARRTGVRCRWLPSSTAKGSSFSAG

SEQ ID NO: 353120 - protein, 72 aa, Zea mays
  Clone ID: MRT4577_85219C.1.pep
DRYVQKGLFLDAARDYTHPLFHYKLGFMNPYTSNIVCTTTLESQSLINISLLDNYKHDDHFIQLLNTHLNNN

SEQ ID NO: 353121 - protein, 54 aa, Zea mays
  unsure (1)..(54): unsure at all Xaa locations
  Clone ID: MRT4577_8521C.1.pep
GRWQCLWPFCVFSCRGSVLLRRNFIIVGXSGDIAPVFCVKPPALGRPPRSISSS

SEQ ID NO: 353122 - protein, 199 aa, Zea mays
  unsure (1)..(199): unsure at all Xaa locations
  Clone ID: MRT4577_85220C.1.pep
MALSSTRFSCWSWNAPWLSCFPKAPPTISTTTANAKXAAXSPSRWYGXPDXTLYLXPMADEPPSYLSGRVPGHYGXTSTGMAADPKTFTENRELDWILSGWAHADAARAXFPELLTSTTSSSSRPRXFTCASHSFPEVRLDYXLDYASLNPYHHILAIRPLHVALMGTTKGYCVRXGISSRCXDPLYPICTIIPIELAD

SEQ ID NO: 353123 - protein, 60 aa, Zea mays
  Clone ID: MRT4577_85221C.1.pep
IRHEAQSLDPAASHASDELRRTSGEQLASICYSFADGVALPNSLEIGDAVDESVTVYPVV

SEQ ID NO: 353124 - protein, 82 aa, Zea mays
  unsure (1)..(82): unsure at all Xaa locations
  Clone ID: MRT4577_85222C.1.pep
VXFXWFGSLXWXXPVXLSXSPXXVAPVRXXSAXSSAVLXRXXXAGGVVFVXAGLSLSXRRXGXXCXLXVXSPXGLXLXARLP

SEQ ID NO: 353125 - protein, 93 aa, Zea mays
  Clone ID: MRT4577_85223C.1.pep
VYGVDAPPPPIGVAFAPPHMDNLDFFQNPCGTRSFPLAVAAPARTPPSPSSCPEGASFCPSPSPGPFGGPLYSLVFLTRAGIKVFSPFLGAFF

SEQ ID NO: 353126 - protein, 127 aa, Zea mays
  Clone ID: MRT4577_85224C.1.pep
AVRAALKVKASVIICFTSSGRAARLIAKYRPSMPVLSVVIPRLKTNQLRWSFTGAFEARQSLIVRGLFPMLADPRHPAESTSATNESVLKVALDHGKASGVIKSRDRVVVCQKVGDSSVVKIIELDD

SEQ ID NO: 353127 - protein, 123 aa, Zea mays
  Clone ID: MRT4577_85225C.1.pep
PSSLFGPSSSLQPLAAVPIPPCSLIDPSIWSLLVPPSPPLACLLACSGKKKKKGAGGAAALHKQNPSPSLCSQDSPFLVICPAKVLFPLSSLRPSKAPAVLATSDLCVPPRRLFYAPPHPPPP

SEQ ID NO: 353128 - protein, 57 aa, Zea mays
  unsure (1)..(57): unsure at all Xaa locations
  Clone ID: MRT4577_85226C.1.pep
NNGFTIYEPLNVFNITQSPPFGSQCLLQCCRDSTVGTFIFILXISFVYQQPCHGLFK

SEQ ID NO: 353129 - protein, 82 aa, Zea mays
  Clone ID: MRT4577_85227C.1.pep
WTPSNHSSHETCFQTSEPGFFLIKRYAPRFAWTRTLNLGAILLSPSTVLRPGPIELGAQKAAGLYGKYITPYLEVLYCYQHR

SEQ ID NO: 353130 - protein, 101 aa, Zea mays
  Clone ID: MRT4577_85228C.1.pep
ERGVPLRVRVGFSRVVLFLRLKSPPSCWVGFPLVCGGFPSFLGPCFVYPLCVCVPFFKEVLGWVFGSPVFFSVPPLFRLGVFVFFFLFFCPPPPLGLCSLV

SEQ ID NO: 353131 - protein, 222 aa, Zea mays
  Clone ID: MRT4577_85229C.1.pep
TGRVGGRVGRRFFFTVGLGADPCRSRVNGTCQGPNGTRFAASMNNVSFAMPRTTSLLQAHYQRRYSGVLAANFPAVPPTRFDYTGAPPNNTFVTHGTRVVPLSFNTTVEVVLQDTSVLGAESHPLHLHGYDFFVVGTGFGNYDATNDTARYNLVDPVQRNTVSVPTAGWVAIRFVADNPGVWIMHCHLDVHLTWGLAMAWLVNDGPLPNQKLPPPPSDIPRC

SEQ ID NO: 353132 - protein, 100 aa, Zea mays
  Clone ID: MRT4577_8522C.1.pep
MEESKTGPGGLTARGKGKAPAPPPPPPSREEENGGGHRRGQRRKVWPRGRRAVVALVAMVAAALYLLLADAVAEPPPGAWVLVAYLLWIVGLIMLFSVMK

SEQ ID NO: 353133 - protein, 94 aa, Zea mays
  unsure (1)..(94): unsure at all Xaa locations
  Clone ID: MRT4577_85230C.1.pep
GGVKKPAEGGAPLPLKVKGQDANXVFFCIKRSPPLKKFINPFWAPQFVDINPLAFLFYGPRFSGEQTPFXLEMEDGHKINPIFPQTGGRVPSPP

SEQ ID NO: 353134 - protein, 46 aa, Zea mays
  Clone ID: MRT4577_85231C.1.pep
QSDEAFDHIYRSSLVRHLKPNLPRESCPVPSSYGVQQSYRSRTLSI

SEQ ID NO: 353135 - protein, 88 aa, Zea mays
  Clone ID: MRT4577_85232C.1.pep
ACYIAAGVYQGEQCYDPRYLWPETDEVFAGCGHAEAGRMRFLVERINHLNAGVLHLRSRLLVVRARDDGDISICWDIRDWDIGRLRLE

SEQ ID NO: 353136 - protein, 68 aa, Zea mays
  Clone ID: MRT4577_85233C.1.pep
GFRSSGVAGCGRASMTGASCINVRGAAQRAKSDQQRRKVNKYPRVAPRAPSHEWLHALHVTVCSTGFV

SEQ ID NO: 353137 - protein, 36 aa, Zea mays
  Clone ID: MRT4577_85234C.1.pep
SLWSSELDATSFCRVTVGTVVLHSADLVTPHIVSKG

SEQ ID NO: 353138 - protein, 127 aa, Zea mays
  Clone ID: MRT4577_85235C.1.pep
TNEKEASRAAQVSICLLQRHNGTVIPQQRGDQIVSFLQLSSAPTGRICLRSFSSRLSYVRSCELGSPPLTRPARTSLGEVRQVFVVRRCGRISYTVEHLEETHGDRRRLRVGVQGDRESERQARTGR

SEQ ID NO: 353139 - protein, 283 aa, Zea mays
  Clone ID: MRT4577_85236C.1.pep
MEAPLTVQIVEFNTKVMQEELKKLGLKVNHHEANITFLKSEIYAIEESIADLTIKRGKKVVASSNGTSVQEAEQRTIESICNQDKTAASLICQLKKRHSTQISTMPMMKDILGVVATLGKTNDDNLSSLLSEYLGIDNMLGLVCKTYDGIKSLETYGTEGNIDKKSGIHGLGGSIGKILHGRFTVFCLENIRPFSGEVVIDDPQRYLMLRKPRLPNGESPPGFLGFAVNMILMDQAYLSCLTPHGHGLRETLFYSLFSHLQVYKTTADLRRAIPFINDGAVSL

SEQ ID NO: 353140 - protein, 87 aa, Zea mays
  Clone ID: MRT4577_85237C.1.pep
RPMDMNPYMLKTACPFLFLCLLPLAVKSLTPKLPYIIPGCYQKTTITTVRSRVYFCQVRHNKHPNYDELSILHTSQKDTTSHLCTTL

SEQ ID NO: 353141 - protein, 47 aa, Zea mays
  Clone ID: MRT4577_85238C.1.pep
WHPPCRMALTPEGVIIPRSCTATLRQDLSTCHFPISPSFLSTSFLFP

SEQ ID NO: 353142 - protein, 58 aa, Zea mays
  Clone ID: MRT4577_85239C.1.pep
TSLQRKLERSENGMFSLNLRLYPGRYEIKFIVDGVWKNDPLRPTVHNNGHENNLLLVT

SEQ ID NO: 353143 - protein, 89 aa, Zea mays
  Clone ID: MRT4577_8523C.1.pep
MAGTIQSVMARQIFDSRGNPTVDVDEYCSDGTFARAAAPTGALTGVYEALELRDGGSDYQGKGLYNAVNNVNGDIGPVLIDKDPTAHTE

SEQ ID NO: 353144 - protein, 117 aa, Zea mays
  Clone ID: MRT4577_85240C.1.pep
RARMLRRPVQSRPRRLPRCSRRPPHANPRWAPCMRRKRDGNAMPMRLPAAPRPREGMHPSTPARRRRSGRPARRWAKRVAVANLLPPLAPLRYSLGNGIRSRPITYNIISVNLIASQ

SEQ ID NO: 353145 - protein, 111 aa, Zea mays
  unsure (1)..(111): unsure at all Xaa locations
  Clone ID: MRT4577_85241C.1.pep
KNLGVNKFKPLEEKPLFTNWLNSKKAKTNCLSKNFXNLNGKWXTPCSGPLNPAFLVVTPKGTLKFGRSLTPAPXDFFPYFFPTLAGFPRKLXNWRLLLGVPFKVLRNLYPK

SEQ ID NO: 353146 - protein, 154 aa, Zea mays
  unsure (1)..(154): unsure at all Xaa locations
  Clone ID: MRT4577_85242C.1.pep
GRQPHQYLQGPRKTCSSRLIKCLTKLYYPVRTTYILIYYTCNTFLTDYVPTLFDNFSANDFHHGNTLNLDLWDTPRQKHYNTLTPLSYPGPDLFLLAFSLITNAIYHNVSKNWIPELKHYPPLVPIILPRTKLDLLDHKQFFXDHPAAVPITTA

SEQ ID NO: 353147 - protein, 95 aa, Zea mays
  Clone ID: MRT4577_85243C.1.pep
ESHWFLSFSSKWKVSTDEGEAKAQEHGAMFMETSAKAGFNVKPLFRKIAGSLPGLDALSSGKPEDMVDINLRPASGSSASGAAAQLEQKSGGCSC

SEQ ID NO: 353148 - protein, 57 aa, Zea mays
  Clone ID: MRT4577_85244C.1.pep
QKMFFGQNQRHTQKSLGGTVCVAKQPGINFYLGVVGTFQGDGFPCPKINGWGSLPWP

SEQ ID NO: 353149 - protein, 38 aa, Zea mays
  Clone ID: MRT4577_85245C.1.pep
GFSLDLKKEFFFKSPDNHKGEVDITRSGKCLTYLHRIV

SEQ ID NO: 353150 - protein, 223 aa, Zea mays
  unsure (1)..(223): unsure at all Xaa locations
  Clone ID: MRT4577_85246C.1.pep
MCGGAIILDYIPARRRVSAADFWPDSEADAEDSDSHAPDPERAPRPRGKAKRGRKNQYRGIRQRPWGKWAAEIRDPVKGVRVWLGTYPTAVAAARAYDRAVRRIRGAKAKVNFPNDASSSSVTAPTAASGVAAQAPAVFLPAPKVEARAQVSDEVKXELSEDLMAYKNYVNLHGVPXWRPEMQPASATTAARPDEXQVPAPAPAGLWSFEDYYYPPSLSLFTE

SEQ ID NO: 353151 - protein, 102 aa, Zea mays
  Clone ID: MRT4577_85247C.1.pep
GVKKKGGPYYKGRGFFSHGQGFFWLNPTARFHLYHPAIGHGLDNLPGKKKYSGLHRGKTTGGDPHFKLLLQGHHFNIEMKAPQVLALNGGMEIHTCQLVSLF

SEQ ID NO: 353152 - protein, 258 aa, Zea mays
  Clone ID: MRT4577_85248C.1.pep
MAAPIHARLLPLPLHPNPSPSLHASGTRRVPWPPRHRRRCLATPPSRNGSSSSPEIDWCPVPPDQLPVNEYEALAASLPFSWAAGGLRVYCSRLALTGAAVALFVGLPVAAFGGRGGAGGDALHLALGATGSGILAVTLAVVRMYLGWAYVGNRLLSATVEYEETGWYDGQIWVKTPEVLARDRLLGSFSVKPVLNRVKFTLVGLAGSLILCILLYVNTETPKEPYGNTGGRSIPGVYSDAAARSFEPDAFCGEPDLS

SEQ ID NO: 353153 - protein, 86 aa, Zea mays
  Clone ID: MRT4577_85249C.1.pep
FPTNEPSFFVLGGIQGFPYPGKKFPQLIMGIQKGGKSLLRAAKVFSGHRRGPPKGTGPLFVLKNWLRRYLPKKAFTNFWRFFFENY

SEQ ID NO: 353154 - protein, 98 aa, Zea mays
  Clone ID: MRT4577_8524C.1.pep
MEESKTGPGGLTARGKGKAPAPPPPPPSREEENGGGHRRGQRRKVWPRGRRAVVALVAMVAAAVYLLLADAVAEPPPGAWVAYLLWIVGLIMLFSVMK

SEQ ID NO: 353155 - protein, 208 aa, Zea mays
  Clone ID: MRT4577_85250C.1.pep
MALCRTAPANSSCFHPRAVASSPSSLSVGPKVFVGLKAQTRLGSLGFWSSCPNVNARFYTAVNRRVSLGLSNKRATRARISMMPVGTPRVPYRTPGEGTWQWLDIWNALYRERIIFIGDTIDEEFSNQVLASMLYLDSVDDTKKILLYINGPGGDLTPCMALYDTMLSLKSPIGTHCLGFAFNLAGFILAAGQKGSRTGMPLCRVSLQ

SEQ ID NO: 353156 - protein, 38 aa, Zea mays
  unsure (1)..(38): unsure at all Xaa locations
  Clone ID: MRT4577_85251C.1.pep
HASARKMDYYMXHRITRPRLRQPGRVNQTWPRTCSRRT

SEQ ID NO: 353157 - protein, 133 aa, Zea mays
  unsure (1)..(133): unsure at all Xaa locations
  Clone ID: MRT4577_85252C.1.pep
LFAPKPFNIKSGRTRRXKHIPLVSEWFKEHCPPAYPVKVRVSYQKLLKCYVLNELHHRPPKAQKKKHXFPPPQATKFFQTTELDWAEAGLQVCKQGYNMLNLLIHRKNLNYLHLDYXFQLKXCEDLTTKEKRT

SEQ ID NO: 353158 - protein, 153 aa, Zea mays
  Clone ID: MRT4577_85253C.1.pep
GGEKTGGFFKKYTQTPLRGGGGAGNIKQNRDPKLKGKKGGPGPTSPPGPDDAHFFLPLLLAGRTGGVTRKPLVLFPHTFPHTRMGKKPKFRVGLKKKPLPCGGAPPGPMSSPPAVPPPYGPPGGPAKLVGFFGHLRGGVGLFGVFKGRVVRPG

SEQ ID NO: 353159 - protein, 54 aa, Zea mays
  Clone ID: MRT4577_85254C.1.pep
PTIADHNRCATGRSGSYCDLQRGGGMHCEAQQQQKHGAMMTALDAATAATFGGT

SEQ ID NO: 353160 - protein, 58 aa, Zea mays
  Clone ID: MRT4577_85255C.1.pep
FKKYGLHHIFNLLHKLIFLYLHHPFFENLYKNFISQPLLNTITQFLHLSLKQLYYFIY

SEQ ID NO: 353161 - protein, 86 aa, Zea mays
  Clone ID: MRT4577_85256C.1.pep
EKPLVVKLKKPFNIKWGLERHVVVLYRSRSLWYWGYSIILPRRCVSVVCLFDVLVMFKNMWFKWSVECWQQLNYSSKLHRRYQLIN

SEQ ID NO: 353162 - protein, 103 aa, Zea mays
  Clone ID: MRT4577_85257C.1.pep
APPKQNRGAFRGYPRKNIFKTGPGHITFSKKKKKKKKKKVKKKAPWGDQPKQFSPLAKKGNFNSKNPGPPPTKQRGNLAKGRGGKAANPLVMLRVTPPNIFFG

SEQ ID NO: 353163 - protein, 84 aa, Zea mays
  Clone ID: MRT4577_85258C.1.pep
HNCMYTLTCVSGRVLAGFLFPSAENHRGSIQGGTNSHRGLLELAQHIAEQGPDDRCYLRTLVQIICSCGSEQEMYNLIPTACIL

SEQ ID NO: 353164 - protein, 80 aa, Zea mays
  Clone ID: MRT4577_85259C.1.pep
YQHLKGHESHKPLPSRHGRIALRGLSKVPLVLENLLRFQKEGSIGIPRPNSHRSMINPRTSLYSIAMHSLLPLLGKVISQ

SEQ ID NO: 353165 - protein, 112 aa, Zea mays
  Clone ID: MRT4577_8525C.1.pep
PLMVSPGTKAVVVDLPQRAVTYWAACRSRRTGRGSCRVRIRSARRPSDGGAPQAAWSSSLCSSRGYPSTYSLRNVPVFVTVITIGASLYRDQSLRDRLARVIFNALRILSSV

SEQ ID NO: 353166 - protein, 55 aa, Zea mays
  Clone ID: MRT4577_85260C.1.pep
IAYLHLYNNPTIYSTLLLSNIYHLPNIITTKNHPQCQPIHPYTIHYHLYHFYHNI

SEQ ID NO: 353167 - protein, 106 aa, Zea mays
  unsure (1)..(106): unsure at all Xaa locations
  Clone ID: MRT4577_85261C.1.pep
LLWWWVPLPGGFSSVLAVLLLCXGVLFXVGGLXVLPLXAVWPSLRVSLSPVGVGLPXCSCXXRVCFLGLGWSAGLXWSFXALGCGGFRALACERSFSSRLRRWVSI

SEQ ID NO: 353168 - protein, 142 aa, Zea mays
  Clone ID: MRT4577_85262C.1.pep
MDDGDLDFSNPDTYLCPALGTDPPSSCSMDSYFDEILKDTEHHACTHTHTCNPPVHDLSHTHTCVHVHTKIVAASPGDDTAQVTSSCDFRCNDQMYCSPGMQGAVSGQVLGQGACEVLSIQCVGSTRSAFTKLPVCGGMDAV

SEQ ID NO: 353169 - protein, 105 aa, Zea mays
  unsure (1)..(105): unsure at all Xaa locations
  Clone ID: MRT4577_85263C.1.pep
PATGPPGAXPPARPAAPARAPTGTRIAPPRPPSPRARGDPPPPPPKPPPPXTPAALLWPRTPPMVCPPPRAPRRAGRQSEERAEVSPLASAARPTIRSAASPGAA

SEQ ID NO: 353170 - protein, 103 aa, Zea mays
  Clone ID: MRT4577_85264C.1.pep
GDSSLLALKLTGHPRLLCLVSRRSMIKCRTEPDRKELNMNLLKSGICRCMDREIPRVGAVSLFCYVRDLREPGFIYCLNVSLFLSQVNNLLHGKFITLDLVKF

SEQ ID NO: 353171 - protein, 273 aa, Zea mays
  unsure (1)..(273): unsure at all Xaa locations
  Clone ID: MRT4577_85265C.1.pep
MDDGDLDFSNPDTYLCPALGTDPPSSCSMDSYFDEILKDTEHLACTHTHTCNPPVHDLSHTHTCVHVHTKIVAASPGDAESPSEXTATAAAATXNAASKKRPSGNRAAVRKYREKKKAHTASLEEEVVHLRALNQQLVKKLQSHAALEAEVARLRCLLVDIRGRIEGEIGAFPYQRPPPAAKNVDLVSGVDQGGFLAGAAAQVTSSCDFRCNDQMYCSPGMQGAVSGQVLGQGACDVSSIQCVGSTRSASTKLPVCGGMDAVPAACLPNVQNK

SEQ ID NO: 353172 - protein, 76 aa, Zea mays
  Clone ID: MRT4577_85266C.1.pep
MRNPLRDKWQIFNITKGEQKNQIFHKFTIFLAVYFNFHATRVLEQCQCIGSGPPRLTCWIQSYSLKSLALTASGYE

SEQ ID NO: 353173 - protein, 212 aa, Zea mays
  unsure (1)..(212): unsure at all Xaa locations
  Clone ID: MRT4577_85267C.1.pep
MDDGDLDFSNPDTYLCPALGTDPPSSCSMDSYFDEILKDTEHLACTHTHTCNPPVHDLSHTHTCVHVHTKIVAASPGDAESPSENNSNGNAASKKRPSGNRAAVRKYREKKKAHTASLEEEVVHLRALNQQLMKKLQSHAALEAEAARLRCLLVDIRGRIEGEIGAFPYQRPPAVKNVDLLSSVDQESLLGSAXPVANSCDFRXNHQMYCTP

SEQ ID NO: 353174 - protein, 147 aa, Zea mays
  unsure (1)..(147): unsure at all Xaa locations
  Clone ID: MRT4577_85268C.1.pep
KLPHKLICCCPIIKSDVLAAXWLSSVXSSESLDSWMLNSAFLTLIPKSEDADQVKDFHPISLIHSFAKLVAKILANRLAEKLDILIALNQSAFFKGRXAQDNFMLVQQTTKFLHQQKLPHILLKFSLTIGNRATAQLVEPQVERPPT

SEQ ID NO: 353175 - protein, 193 aa, Zea mays
  Clone ID: MRT4577_85269C.1.pep
MDDGDLDFSNPDTYLCPALGTDPPSSCSMDSYFDEILKDTEHLACTHTHTCNPPVHDLSHTHTCVHVHTKIVAASPGDAESPSENNSNGNAPSKKRPSGNRAAVRKYREKKKAHTASLEEEVVHLRALNQQLMKKLQSHAALEAEAARLRCLLVDIRGRIEGEIGAFPYQRPAAVKNVDLLSSVDQESLLGSA

SEQ ID NO: 353176 - protein, 68 aa, Zea mays
  Clone ID: MRT4577_8526C.1.pep
MRLDFEFLEGTKPRVWVFILRCSKNKFKHKWESGRLFILKFVPRFKGYFLKIFGWKRTQKGFFPLKEN

SEQ ID NO: 353177 - protein, 93 aa, Zea mays
  unsure (1)..(93): unsure at all Xaa locations
  Clone ID: MRT4577_85270C.1.pep
IKGENMIPXCRKVYALPTITLKLGGKGYKLSGEDYTLRGSQAGKTLCLSGFMGMDIPPPSGPLWILGEIFIGRYYTVFDRDNNRLGFAEAARL

SEQ ID NO: 353178 - protein, 267 aa, Zea mays
  Clone ID: MRT4577_85271C.1.pep
MDDGDLDFSNPDTYLCPALGTDPPSSCSMDSYFDEILKDTEHLACTHTHTCNPPVHDLSHTHTCVHVHTKIVAASPGDAESPSENNSNGNAASKKRPSGNRAAVRKYREKKKAHTASLEEEVVHLRALNQQLMKKLQSHAALEAEAARLRCLLVDIRGRIEGEIGAFPYQRPPAVKNVDLLSSVDQESLLGSAAAQVANSCDFRCNHQMYCNPGMQGAISGQVLGQGACDVASMQCIGSTKSGSTKLPVCGGLDTLPAVCLPNVEKK

SEQ ID NO: 353179 - protein, 53 aa, Zea mays
  Clone ID: MRT4577_85272C.1.pep
RGPEVDLGPMWAGAYVTDYNVPPRITEGVGFFKVPVWVFSSCKSLAKTMLKVF

SEQ ID NO: 353180 - protein, 276 aa, Zea mays
  Clone ID: MRT4577_85273C.1.pep
MDDGDLDFSNPDTYLCPALGTDPPSSCSMDSYFDEILKDTEHHACTHTHTCNPPVHDLSHTHTCVHVHTKIVAASPGDDTADSPSENNTNGSGGNGSNAASKKRPSGNRAAVRKYREKKKAHTASLEEEVVHLRALNQQLVKKLQSHAALEAEVARLRCLLVDIRGRIEGEIGAFPYQRPPPAAKNVDLVSGVDQGGFLAGAAAQVTSSCDFRCNDQMYCSPGMQGAVGGQVLGQGACDVSSIQCVGSTRSASTKLPVCGGMDAVPAACLPNVQNK

SEQ ID NO: 353181 - protein, 94 aa, Zea mays
  unsure (1)..(94): unsure at all Xaa locations
  Clone ID: MRT4577_85274C.1.pep
AGPVRSSLVLPTXPLXPCDFSRPRSFLFFKSQPVGGRTSARXAPRPLFAERASAADAANRDAELKALRENRALKIITGLQNLHRCLLSKVGTEA

SEQ ID NO: 353182 - protein, 101 aa, Zea mays
  Clone ID: MRT4577_85275C.1.pep
GAVTDAYMRSAVDYFEATRARPSLASTLLITAWSRLPFRAADFGWGPPAACGPAALPEKEVALFLPCGEEGGGGGGVRVLLGLPPAAMAEFQRLVDEVTAA

SEQ ID NO: 353183 - protein, 214 aa, Zea mays
  Clone ID: MRT4577_85276C.1.pep
TLPLGSFASLVGYPYLPQNYYVPPAAFQQAYSSNGPFHQSGGAAVPGSAMKYSMPQYKSGLPVTSPPQHSSAVSGYGGFGSSSNIPNFGQNQSASPATTMGIDEALSSQFKEANHYMALQQSDNSAMWLHGAAGSRAVSAVPPGNFYGFQGQSAQGGFREVQQPSQYGGLGHPSFYQSQNGMQQEHPQNPAEGSLNSSQTAPSQPSHQMWQHSY

SEQ ID NO: 353184 - protein, 94 aa, Zea mays
  Clone ID: MRT4577_85277C.1.pep
DDPRVRSAASTTSSSRLQLFLSELAGGSDRCAFSVCACVSVEMATAYAPMASQVMKTTLGMHSRPMGLSSAASLTRRPGRFTVKAIQPERGNCT

SEQ ID NO: 353185 - protein, 115 aa, Zea mays
  Clone ID: MRT4577_85278C.1.pep
LTSSQRPGRQRKRAEEEHPSTKIDTIDHRHLYSTDTAVVAAPQVNMRSKIQYQGEDQCTRIPAHSPGSDIPALVVPSLPFQSTMLEPSRTQPRSNRRVRRVNDVEVVDHANAPGP

SEQ ID NO: 353186 - protein, 128 aa, Zea mays
  Clone ID: MRT4577_85279C.1.pep
MQIFVKTLTGKTITLEVESSDTIDNVKSKIQDKEGIPPDQQRLIFAGKQLEDGRTLSDYNIQKESTLHLVLRLRGGIIEPSLKALASKFNCDKMICRKCYARLPPRATNCRKRKCGHTNQLRPKKKLK

SEQ ID NO: 353187 - protein, 85 aa, Zea mays
  Clone ID: MRT4577_8527C.1.pep
FFFFFFFFFFFFFFFFFFFFLLGLTGFFRVRTGPEIGARRARFLANPKPHWRKQKLCGNLQFFEVIRAVTNHPNFFSPQTRFNTS

SEQ ID NO: 353188 - protein, 72 aa, Zea mays
  Clone ID: MRT4577_85280C.1.pep
HHHRQEHYDLWDSCHLEYLPKPDQGHQAPSRQISDLPVVHRLICRRQGCGDVPPIYYHLRSELVQEGRHLSF

SEQ ID NO: 353189 - protein, 567 aa, Zea mays
  unsure (1)..(567): unsure at all Xaa locations
  Clone ID: MRT4577_85281C.1.pep
HLHDRAESRVEYPEPIYVSRDEEXEEGXKNEMLSEGALKALLHNFMPLLVSSVSPDIRDFAGFHDVDNLFKEGLRLKQALQDQLFQKIPFVRKIQENSEGLLFLFPPFRVAEDKFAWLRDDEFARQALAGINPVNIERLQAFPPMSKLDPAVYGPPESAITEEHIIGQLDGMSVQQALQDDRLYMLDYHDIFMPFLDRINAQDGRKAYGTRTLFFLTAAGTLKPIAIELCLPPMTDGCARAKRVFTPPADATSNWLWQLAKAHVCSNDAGVHQLINHWLRTHAAMEPFIIAAHRHLSTMHPIFKLLKPHMRYTLKINALARQILINGDGVIESGFTPGRYCMEMSSFAYRELWRLDQEGLPADLIRRGMAVEDPTQPHGLRLLIEDYPYATDGLLLWSAIRRWCDAYVAMYYPSDESVQGDTELQSWYREAVHTGHADKRDAPWWPRLSTPADLASLLTTLLWLTSAQHAALNFGQYPLGGYIPNRPPLMRRLVPAEGDPEYAHLVADPHRFFLSALPSLTQTTTFMTVIDTLSTHSADEQYLGERPDEAWTADPAALRRTPVDHTI

SEQ ID NO: 353190 - protein, 41 aa, Zea mays
  Clone ID: MRT4577_85282C.1.pep
SSQKKKKKKKKKKKKKKKKKKKKKKKKKKKKKKKGTSSRSR

SEQ ID NO: 353191 - protein, 312 aa, Zea mays
  unsure (1)..(312): unsure at all Xaa locations
  Clone ID: MRT4577_85283C.1.pep
TLKINALARQILINGDGVIESGFTPGRYCMEMSSFAYRELWRLDQEGLPADLIRXTQINWNIYEVVVLRAMQCMENWKYEPHSGXMVFPCHRGMAVEDPTQPHGLRLLIEDYPYATDGLLLWSAIRRWCDAYVAMYYPSDESVQGDTELQSWYREAVHTGHADKRDAPWWPRLSTPADLASLLTTLLWLTSAQHAALNFGQYPLGGYIPNRPPLMRRLVPAEGDPEYAHLVADPHRFFLSALPSLTQTTTFMTVIDTLSTHSADEQYLGERPDEAWTADPAALLHDDEFARQTYSMALPPSPRSAHSLQASV

SEQ ID NO: 353192 - protein, 36 aa, Zea mays
  Clone ID: MRT4577_85284C.1.pep
FGSRTGLGRLRNRTKAGNSASDQKKTARHNRETELT

SEQ ID NO: 353193 - protein, 80 aa, Zea mays
  unsure (1)..(80): unsure at all Xaa locations
  Clone ID: MRT4577_85285C.1.pep
FTVGMVNARHAXIPFQRVPPKKNKVRISARMWERLLFSTNQPSFLSQKDIDTAKKPDKAPPRPKSKEDSKKLLTPGLANG

SEQ ID NO: 353194 - protein, 89 aa, Zea mays
  Clone ID: MRT4577_85286C.1.pep
SERAFLWSSGPPNPPTTSIRVFLSRRSLTYREDKAAYRDRGQSSLRCRVFFRLFTEDGHCFFCMYTPKDISGSTAPPMYSSTSNMWIGV

SEQ ID NO: 353195 - protein, 113 aa, Zea mays
  Clone ID: MRT4577_85287C.1.pep
MVPLRLYRHLIPQLAAAARSPSAPKAAASCAPRRIPPLPALAMAAYGTGVCADSKLLFRQLFEKESSTYTYLLADVGDPEKPAVLIDPVDRTVDRDLNLIKELGLKLIYAMNT

SEQ ID NO: 353196 - protein, 61 aa, Zea mays
  unsure (1)..(61): unsure at all Xaa locations
  Clone ID: MRT4577_85288C.1.pep
LMLASVIVIYGFGNRCSGNVYCVFLTYFYRPTVYXDAGPVAKMTYSQAHKQANKSSQKSQA

SEQ ID NO: 353197 - protein, 139 aa, Zea mays
  unsure (1)..(139): unsure at all Xaa locations
  Clone ID: MRT4577_85289C.1.pep
ASGERPRGAAXKDQXDAXEGAXATXXXXADEAAXXARXGTQGHXXNKXASKHQRHPHEAXXAKXPRXDXXQEKAAXNXXXEDRAXXXQDXDEPNHXPGTPXGNHQRXXATGNRXGPAPXXARSDAXDAHDXDHHAPPKA

SEQ ID NO: 353198 - protein, 128 aa, Zea mays
  Clone ID: MRT4577_8528C.1.pep
RDHASRLGIPSGSLQWILGPLWWALPRAKGFHPLRVEGLQVWDRGWVSFGGGSNPRALHAKFFSRVHKKRTLSAGNNRAKYFATPSPLKELPPQHKVVGNIPPSVGLCLRQIPPRFVFAPQSAKRLKE

SEQ ID NO: 353199 - protein, 311 aa, Zea mays
  Clone ID: MRT4577_85290C.1.pep
PRVRDADSLPNNIKDLLHEHTVADDVAGSKCLVVRGWALHVAILAHPASDGFMALCGWGSTLEVVAAGLPMAAWPFFAEQFINEQLIMDVLGIGLSVAVMKPIENVLIASNMGGAVVMIYAPVFWSCLTSFTLGIHGQIVGVLCLPFLVIQLNISIAVQQRFLWDPGGDQCCLLNLFIHGLGDLQMQQASLSFVTKTGWLVIILSLLLLQWDKPNLRGLNKSKCIQRGFRRCYVHACPSRWSDWLPSAEFWYNSSFHSATGRSPFEDLSHASARHFCITSCDGPSAGLNAFLQDKLVMTKLLQQHLLRAKQ

SEQ ID NO: 353200 - protein, 64 aa, Zea mays
  Clone ID: MRT4577_85291C.1.pep
KFGIVYRPRQLETKASNGSNSCFSNKLRRCSVLIYIDLQLHVRHPILWKYRILYDLYIEINGRS

SEQ ID NO: 353201 - protein, 42 aa, Zea mays
  Clone ID: MRT4577_85292C.1.pep
WEKNIMLNYINFPYFLYYFLSKKSSCTNNTCASTMNSEEPDA

SEQ ID NO: 353202 - protein, 159 aa, Zea mays
  unsure (1)..(159): unsure at all Xaa locations
  Clone ID: MRT4577_85293C.1.pep
GKQVRAPEPPGKSRRAPNLFFMVYLTHRFINQLSKGYTPIMQFXVTPLPVVKRAATDMAKLSLKTNDPALFHRPRFAIGKYTQYDCSGLLRAPFEPNLRQEXKIGANELFSATPLESFXHILDKEVHVKLRHLHQTTGRTTRLTDHLQTLXLGVNSSLD

SEQ ID NO: 353203 - protein, 39 aa, Zea mays
  Clone ID: MRT4577_85294C.1.pep
EDRESYAPLAGEPRSQPAACQSIFQDLDRIHILNVILTT

SEQ ID NO: 353204 - protein, 122 aa, Zea mays
  Clone ID: MRT4577_85295C.1.pep
QVISGESGPRVVGTQGAVSLVPEESYWCWQAGVTSSTMLRAGRGEYYAMEPLVLDEYTSLRLIPHWEESDSGEQVYRRPYEQAVRGEHRGVVRENACNMRIEGSLSRMNEKVDWVSRKGRAS

SEQ ID NO: 353205 - protein, 107 aa, Zea mays
  Clone ID: MRT4577_85297C.1.pep
KPPLGGLFQKPHRGKGCRLLGGFRSGVLVSVGVCNGHACTGARGLFFLLVWGPPARNKGGGSLFCLVSPQVNGFSGPPLKNRVGFLWTGFFFFIYTGNKGWVGPLRF

SEQ ID NO: 353206 - protein, 636 aa, Zea mays
  Clone ID: MRT4577_85298C.1.pep
MQGVTVHSPSTSSRGRIRPRHGPEASRSSSLLFQATAFRRFATRRRRFGRASVPVRVGAVDDEAEVVSKVLRSRPKTKRAQIRLPPAQLRMASSKEDTMKSLVKVLVDCAEDATKSLRGLVDHALDHMHDEEILARTLFAMKEKLDLLHQDALEAKVQAFPEIAKYEGDDISVQPTSPSTPPTVTEPSVDEEEFYCPDVSDEWYFSDSDSMDPASNATSSQAMSNPSNAQQFPPPPPLWPTGYMQQNPVDCNIMGNINFPSPGQGPTTMWAPIQPGNTSSQSTMIPASQSALYWNHYMNFVRNPLGSVGMSPYTDSYPPSLSSTPLQGSNTIPQMPVHLESDAEHSVQDINSPEKNAPPVQKQKKSKEQNFTAPEDRLLCTTWLQISSDPIVNTGQRREGLWARIEKRALSSRWDKIRADVSKFSGYYARVLREKQSGLSDDDKTSKAATLFAHEEGKPFHFMHCWHQLKGEPKWESICQGHSFRGLHARSIPSSGCPSVETPETDSGSAGLSGKRPRGRDYSKAERKKAGSSSSPEYLSRLQEITEKQIQRSIEKGEKKEMTTEEDREIQKKRLDLEAQKLSIRQRELKLEELKSAEQRLQMLLSTNEEDVDPEVWVVMKEQKKKLQQFIFTFEQ

SEQ ID NO: 353207 - protein, 60 aa, Zea mays
  Clone ID: MRT4577_85299C.1.pep
WFSIITTPNPIFSHLAGKTSVWKAISAEVLQASFNTTPEMEKLFRSKRLDSEIFFAPPSN

SEQ ID NO: 353208 - protein, 63 aa, Zea mays
  Clone ID: MRT4577_8529C.1.pep
MSNFEEQYPRQSLYQPPVDRHVKRDYYSIIPQNCRVELQRRQWGLSYQTPHCDMLQKFEAPAQ

SEQ ID NO: 353209 - protein, 88 aa, Zea mays
  Clone ID: MRT4577_852C.1.pep
DVEVDRVAMLDDLFLYGLHYDLDAGAIGVVFPVAQSNVRDPVDVGDARWSPGLGWQRRSELQLKICDIWQCSYLEGEPWHWAVDEELP

SEQ ID NO: 353210 - protein, 58 aa, Zea mays
  unsure (1)..(58): unsure at all Xaa locations
  Clone ID: MRT4577_85300C.1.pep
HQIHPNKDPALNIILRAPRRYQHSPATCIXTSSVTGDTDGMRPDGNRRISDQDLQIRA

SEQ ID NO: 353211 - protein, 498 aa, Zea mays
  unsure (1)..(498): unsure at all Xaa locations
  Clone ID: MRT4577_85301C.1.pep
MKSLLKVLVDCAEDATKSLGGLVDHALDHMHDEEILARTLFAMKEKLDLLHQDALETKVQAFPEIAKYNRDDISVEPTSPSTPPTVTEPSVDEEEFYCPDVSDEWYFSDSDSMDPANNATSSQAMSNPSNAQQFPPPPPIWPTGYMQQNPVDCNIMGNINFPSPGQGPTTMWAPIQPGNTSSQSTMIPASQSALYWNHYMNFVRNPLGSVGMSPYTDSYPPSLSSTPLQGSNTIPEMPVHLESDAEHSVQDINSPGKNAPPVLKQKKSKEQNFTAPEDRLLCTTWLQISSDPIVNTGQRREGLWARIEKRYNEQRGEFPCRLNRALSSRWDKIRADVSKFSGYYARVLREKQSGLSDEDKTSKAATLFAHEESKPFHYMHCWHQLKGEPKWESICQGHSFRGLHARSIPSSGCPSVEAPESDSGSAGLTGKRPRGRDYSKAERKKAGSSSSPEYLSRLQEITEKQIQRSIEKGEXKEKSTEEDREIQKKRLELEAQKL

SEQ ID NO: 353212 - protein, 80 aa, Zea mays
  Clone ID: MRT4577_85302C.1.pep
ITGLLKIIYEGESILQGTEEGAVCMLDPPSRSGCSHKHLVVLAAPPFQKLAYPQRTTGVVRSSPLPTTTSTVCLTASAPP

SEQ ID NO: 353213 - protein, 34 aa, Zea mays
  Clone ID: MRT4577_85303C.1.pep
HTSGRSETSPVWCTFVKRLISNVHRTCLEHLGNS

SEQ ID NO: 353214 - protein, 42 aa, Zea mays
  Clone ID: MRT4577_85304C.1.pep
MIHAYVHIHATVIASSMVYLKFNSLDVFFHRCDWKNPVFHQT

SEQ ID NO: 353215 - protein, 72 aa, Zea mays
  Clone ID: MRT4577_85305C.1.pep
PTRPNADFPVYSSQLKELKHITQVQLNFLAFASDAGKLFGWFSGVAALYLPLWLVAFVGAAFGLDGYGDQYM

SEQ ID NO: 353216 - protein, 76 aa, Zea mays
  Clone ID: MRT4577_85306C.1.pep
LKNGQHFPYFNFESTRAPLKELAGAYCPNDWASHPEFLRAKTARPNDWPIIFWGIKQTGGPRLDFAGAFFSILYHV

SEQ ID NO: 353217 - protein, 70 aa, Zea mays
  Clone ID: MRT4577_85307C.1.pep
IVRPARSLLTFLFREEIMEDGHTACPAPRRGVFVVSHGDPPGLTCPSKEGFGALFGVRKRRVHWFLQFTT

SEQ ID NO: 353218 - protein, 36 aa, Zea mays
  Clone ID: MRT4577_85308C.1.pep
TPSSPAQSPCCHGSSPGIANIAAASLVRNPQPGILC

SEQ ID NO: 353219 - protein, 67 aa, Zea mays
  unsure (1)..(67): unsure at all Xaa locations
  Clone ID: MRT4577_85309C.1.pep
RKKHNFIKLYVLRVFIMDNCEELIPEWLSFVKGIDDSDDLPLNISRVTLHQNKILKVIIXNLVKKCV

SEQ ID NO: 353220 - protein, 540 aa, Zea mays
  Clone ID: MRT4577_8530C.1.pep
MLFVPRQVVLAASSQPRAAASSAMAKEESKKEKKKAKAKVANGAAAAAAAPVPGARAAVVASVAAFLESAGLSRTLVALQSEAGLEAGAWGSSQVNLEELVARFLESSNSTRAAAILGSDEQDKENDDIAGEVGKEKKRSGTEAGEPESKAIEPLAEEKPTENMDGEAKEKKQKKKKDKGDPSAANAASEGTTEIVKNADQKDDEAKEKKQKKKKDKGDPSAAGAGSGETTETVKEDDHKLDGKKKKKNKKQGKDDDVEARLEKAELAILNKFEAAEKLNGREVEPKSQNDSADDCSGAVERKKKKKEKSSAGTSEKTDAGSAPAEADGAKGKNGAVETVKDDNEKKAKKKRKKSNPEETVQVEGKEAAGKDSVPKQDDANKSVMEIEEGNQGKSSNENAVAGKKRKLEEVEGSIPPVTGKEDCPANESLSNGFAEDKKAESNTKPSKRQKHSSEPKTVTPFQRIKVDDVRFADDRLQDNSYWAKGGADTGYGAKAQEILGQVKGRGFRHEKTKKKRGTYRGGQIDLQTHSIKFENSDDE

SEQ ID NO: 353221 - protein, 100 aa, Zea mays
  unsure (1)..(100): unsure at all Xaa locations
  Clone ID: MRT4577_85310C.1.pep
MLDNTRRVLMVSGSRDSLCEFGRQFAVLAESVHGDRDLRSASSIVACTQANDVCDAQVSRRYLSGADDCERSCWGKCMCAAAMQAXRARLCRHCGQALRG

SEQ ID NO: 353222 - protein, 57 aa, Zea mays
  Clone ID: MRT4577_85311C.1.pep
FLGSLWGLPAPWISRLPIWTVLRFSLSACGPCFRDPCMRSLFSTAAFSDVMCLDTHK

SEQ ID NO: 353223 - protein, 44 aa, Zea mays
  Clone ID: MRT4577_85312C.1.pep
LMCLTTKVIKATAFRFSVCSLVYKTRIIFSLDVIVYDINVPYFV

SEQ ID NO: 353224 - protein, 58 aa, Zea mays
  Clone ID: MRT4577_85313C.1.pep
MATVAQSVDEKLDKLRVEVAKFDRIRQNEMSGFICLGVRCLSAEAHQIEWSRIPTPCS

SEQ ID NO: 353225 - protein, 55 aa, Zea mays
  Clone ID: MRT4577_85314C.1.pep
FIWRKPPFWKPPPLFKIKGPNKSPPKKKLPELSPPGGPPNFARVKFMGNPQFFNP

SEQ ID NO: 353226 - protein, 162 aa, Zea mays
  unsure (1)..(162): unsure at all Xaa locations
  Clone ID: MRT4577_85315C.1.pep
MXAGGQLGKXATKSALDQDGARLQAPGGRGKGPGPLFCKGRLKQARRGGGSCPGPDPRVLGPAPSSDPGIRSPSQRWLRGLATQPGTPRPRSHPGNLGTGEGGATTRPRPRCSQTRGRRHFLRLFRPRPHILIGVDAKTTSTCQXKKKKNRWRPRPYMSIGL

SEQ ID NO: 353227 - protein, 142 aa, Zea mays
  Clone ID: MRT4577_85316C.1.pep
FIMGHPQMMSPLAKYHRENVGLCERFEAFVCKKEIVNAYTELNDPFDQRLRFEEQARQKSQGDDEAQLIDENFCTSLEYGLPPTGGWGMGIDRLVMFLTDNHTIREVLTFPFMKDDITAEKKPTAAEVVGINPQPEEGIPHK

SEQ ID NO: 353228 - protein, 71 aa, Zea mays
  Clone ID: MRT4577_85317C.1.pep
TRRSLSCFIQSGAVRSCAHQPPLTSYPSHLSHSFHSVRARGAASEPRAAVKLVPMARAVAMLAALALVVVD

SEQ ID NO: 353229 - protein, 89 aa, Zea mays
  unsure (1)..(89): unsure at all Xaa locations
  Clone ID: MRT4577_85318C.1.pep
RRGAATQSHTHAQPPPQPAHPKRATPRRERTATDTGQAGTEAGNARRERDGDEHGRRAEXQKPGDKTKGGGEEARSTHSSETGAGKNAP

SEQ ID NO: 353230 - protein, 396 aa, Zea mays
  Clone ID: MRT4577_85319C.1.pep
MALDAPVERRDEVQIAMGNGNGVAPSQPSRPAGRPTAAAAAAPYADRRLRLNPNADHKPEDYSDVRGEYAPAVYSALERHLPPSLIDADRDVKLHFMRDILARYWPQGERNKVQRHREYRQRILHLYKPLHEELYNMHPSVFFLPTFLEAVRSNTEECFRSIMTEPIPGVYSFAMLQPTFCEMLLEEVENFEKWVHAMKFKIMRPNTMNKYGAVLDDFGLEAMLNQFMEQFIAPISKVLYPEVGGGTLDSHHAFIVEYGKDRDVELGFHVDDSEVTLNVCLGKQFFGGELYFRGIRCENHVNSETQHEEMYDYTHIPGWAVLHHGRHRHGARATSSGLRINLLLWCRSSVFREMKKYQKDFPSWCGECQREKRERQSQCVKATKMAFLRGSGGAAI

SEQ ID NO: 353231 - protein, 142 aa, Zea mays
  unsure (1)..(142): unsure at all Xaa locations
  Clone ID: MRT4577_8531C.1.pep
PVLPARPDPRVRRVETSISIGATEATLILNLVMLHAVSTYLADATMLPXANXAPIAIIIAPYLPYIIAPIYENPAIQPYLLQHALAISSIPKSPLWTQHLSILSLAHASEHTIMAQHQXHLVLPLINXQVALANLSTYCQQR

SEQ ID NO: 353232 - protein, 81 aa, Zea mays
  Clone ID: MRT4577_85320C.1.pep
MRLSWILTVLSICLSALVTATGAEGKRKLQIGVKKRVDHCPIKSRKGDVLHMHYTGKLEDGTEFDSSLPQNQPFVFSLGTG

SEQ ID NO: 353233 - protein, 34 aa, Zea mays
  Clone ID: MRT4577_85321C.1.pep
RHARYRAGKDVDEGITYLGTGSAAACLVLMRLEV

SEQ ID NO: 353234 - protein, 64 aa, Zea mays
  Clone ID: MRT4577_85322C.1.pep
FFFFFFFFFPGRRARSGATAGLSTLLAPPMFLPVSQVLQDSLEWLQVNHTGCQFMCVQCVWCGM

SEQ ID NO: 353235 - protein, 81 aa, Zea mays
  unsure (1)..(81): unsure at all Xaa locations
  Clone ID: MRT4577_85323C.1.pep
YTCFYGSKKKKKKKKKKKKKKKKKKKKKKKKKKKKKKKKKKKKKKKKKKKKKKKKKKKKKKXGPLGPGPLKKKGPPRGGEI

SEQ ID NO: 353236 - protein, 70 aa, Zea mays
  Clone ID: MRT4577_85324C.1.pep
FLAPSFEREHWQGYPGPSHFNHTLLLHIVKQFHRSLLFSSASIAWSSFSFFFRSFFLLKVKTFDLTSCIL

SEQ ID NO: 353237 - protein, 61 aa, Zea mays
  unsure (1)..(61): unsure at all Xaa locations
  Clone ID: MRT4577_85325C.1.pep
MSMGDAGPPRLSSAQLETLDAITSSCAGVLPAAAHNCGXQPHVCCSKSRYCXTTDEYCGDG

SEQ ID NO: 353238 - protein, 153 aa, Zea mays
  Clone ID: MRT4577_85326C.1.pep
RLFNVNRASFRGPRKERPQKQFAPAFRAYVGHLPWPVDYFRLGQLFNQQGKVVYSKVVYHKKTGRPPGIGFVSMGSKEELNDSFSALNGQELDGPPPSMNVSTKRPPRGFLFGWMKKNAGCLLLARKPKHPMEEPWVQLTEADAVPSWLIFLP

SEQ ID NO: 353239 - protein, 85 aa, Zea mays
  unsure (1)..(85): unsure at all Xaa locations
  Clone ID: MRT4577_85327C.1.pep
FELSYTRPIRPFTAPQVSYNIQDVHAIILGFGSICLDILKEPWSPAATISNALIAIXSLVCDPHADNRLVREIALLSQIHRPTYQ

SEQ ID NO: 353240 - protein, 68 aa, Zea mays
  unsure (1)..(68): unsure at all Xaa locations
  Clone ID: MRT4577_85328C.1.pep
KXCYLRPVLHTKKMSLLDTNAAQRXYIFSLPLLHFLSHLFHGLPLPPQRLQYLRLGPRLQYHPPSVDS

SEQ ID NO: 353241 - protein, 113 aa, Zea mays
  unsure (1)..(113): unsure at all Xaa locations
  Clone ID: MRT4577_85329C.1.pep
ACAMIRSGRELSHKLAEGRSQRMACCARLTRQQQRLLDLFTGRCRCCGRAGLANNVRYLLLSPLVGHASTPAREYLCKYXLRAKRTCTGDGWIGAGRFVNSGSRMCGAGKVVF

SEQ ID NO: 353242 - protein, 134 aa, Zea mays
  Clone ID: MRT4577_8532C.1.pep
GKKQTGTLISRASGGPKFSFFFKNWKMDSPTLSSPFLQNPFQNFTRHYGCTKKIKTGPGPFFPFLENFTQIPPPPLKINPSPLQLKKSPPFPPGGGENREIKKKTNFFGPPPLGKKALPWKIPPGSPVGLWKFF

SEQ ID NO: 353243 - protein, 122 aa, Zea mays
  Clone ID: MRT4577_85330C.1.pep
MSGSAFNAFKSRVPVAWSPRLYITLVRGLPGTRRLHRRTLEAMRLRRCHRTVEHRTTPSLLGMLTQVKRLVAVETEEMYNARKQAEAERRAPRPPLVVSHQPQPPAPKPAAAAAVGAATTAQ

SEQ ID NO: 353244 - protein, 56 aa, Zea mays
  Clone ID: MRT4577_85331C.1.pep
PPRGPKRSNKLHSTMTTSSRGEHWHLHLVKKATWGRAGYAGQGTSRTTDMPYGMYK

SEQ ID NO: 353245 - protein, 122 aa, Zea mays
  Clone ID: MRT4577_85332C.1.pep
MSGSAFNAFKSRVSVAWSPRLYITLVRGLPGTRRLHRRTLEAMRLRRCHRTVEHRTTPSLLGMLTQVKRLVAVETEEMYNARKQAEEERRAPRPPLVVSHQPQPPAPKLAAAAAVGAATTAQ

SEQ ID NO: 353246 - protein, 91 aa, Zea mays
  unsure (1)..(91): unsure at all Xaa locations
  Clone ID: MRT4577_85333C.1.pep
HCLVAWGKVCRPLQLGGLGISSLPELCWALRMRWLWLQKTDLGRPWXSLPIQVPNKARAFFSMALVSMVGDGSNTLFWNDRWLHGTQIADI

SEQ ID NO: 353247 - protein, 143 aa, Zea mays
  unsure (1)..(143): unsure at all Xaa locations
  Clone ID: MRT4577_85334C.1.pep
AAKKQDSNTDKFFFFAHREPTAASHGLLIPAATISLPRTRRTRGSLTVTPFSPPYGYNAVFPQPAMYNYASQPLATPAMHGGRMGMGLGLWLLRSAVGGMMLGEAIDDYXTDASYYSAFNHALAFYIYVVLHSWRLSAFEILN

SEQ ID NO: 353248 - protein, 580 aa, Zea mays
  Clone ID: MRT4577_85335C.1.pep
MDSEPDVELRGLDIDVELDPEDLQPSVPLKKVPGGDLFEAARAGDCDRLALLLDAGANVNARDRWDSVALYYACLAGHAEAARMLLEAGAVCAERTFDGDRCHYAALNLRLRWLLKSFEARPPPLAPLPTALRATFLACPANRTAFLEMLQGSAGAESAALAAAAGFGPKDDPSSACLFPPDITFYVDRKPVEAHRVILCARSPFFEKKFKTDWKDRKEVRFSNQKLYFGALYSLIHFFYSDRLEVAVDDMENLARACKVCKCEELQKVLDKEVVHQKYAEYKSARELDMDSSQKRFILQAQSLPEEDRLPSALQRILQTCLANSREGYCSEESNEMIRNSEDDDLADLYIKVGDKVFHCHQVILASRSEYFRARLSRTVDFLEGNCGFEAAQNVPLLEEHDISAEAFEKMLEYMYTDKLEHLDPGQAEELFDVASRYLLFPLKRVVADMLLPYLEHVSPAELCHWLMMSDIYGVMKIREYILDIIACNFEMFAATREFRALLLTLPPPSGDDSLRTTRPSAPGTGGNTDQGNILDDLREKWLEAEGAELDERDESAALFDKRLEMLMLVAEKEADDEDA

SEQ ID NO: 353249 - protein, 122 aa, Zea mays
  Clone ID: MRT4577_85336C.1.pep
MSGSAFNAFKSRVPVAWSPRLYITLVRGLPGTRRLHRRTLEAMRLRRCHRTVEHRTTPSLLGMLTQVKRLVAVETEEMYNARKQAEAERRAPRPPLVVSHQPPPPALKPAAAAAEGAAATAP

SEQ ID NO: 353250 - protein, 67 aa, Zea mays
  unsure (1)..(67): unsure at all Xaa locations
  Clone ID: MRT4577_85337C.1.pep
SNTCCDIFIQFHSRVLSKQQQYVPADKQNQKKNTLNPIIPLHKNFYLKPFDRSQXCRSADTINTQNH

SEQ ID NO: 353251 - protein, 429 aa, Zea mays
  unsure (1)..(429): unsure at all Xaa locations
  Clone ID: MRT4577_85338C.1.pep
DITFYVDRKPVEAHRVILCARSPFFEKKFKTDWKDRKEVRFSNQKLYFGALYSLIHFFYSDRLEVAVDDMENLARACKVCKCEELQKVLDKEVVHQKYAEYKSARELDMDSSQKRFILQAQSLPEEDRLPSALQRILQTCLANSREGYCSEESNEMIRNSEDDDLADLYIKVGDKVFHCHQVILASRSEYFRARLSRTVDFLEGNCGFEAAQNVPLLEEHDISAEAFXDARIHVRSYCNMLYHYCFXCCCCCCFLAYFLLVKLRYTDKLEHLDPGQAEELFDVASRYLLFPLKRVVADMLLPYLEHVSPAELCHWLMMSDIYGVMKIREYILDIIACNFEMFAATREFRALLLTLPPPSGDDSLRTTRPSAPGTGGNTDQGNILDDLREKWLEAEGAELDERDESAALFDKRLEMLMLVAEKEADDEDA

SEQ ID NO: 353252 - protein, 122 aa, Zea mays
  Clone ID: MRT4577_85339C.1.pep
MSGSAFNAFKSRVPVAWSPRLYITLVRGLPGTRRLHRRTLEAMRLRRCHRTVEHRTTPSLLGMLTQVKRLVTVETEEMYNARKQAEAEMRAPRPPLVVSHQPQPPAPKPAAAAAVGAATTAQ

SEQ ID NO: 353253 - protein, 100 aa, Zea mays
  Clone ID: MRT4577_8533C.1.pep
SSVILCNLEYALQLQDAIPPEGARQGGDGDDQDGAAAAGGGRAFVPSGGALSVTSTASAADFFSLFSSLLYIVRRSLIIPLFSSRSSICFFNSPSSSLFS

SEQ ID NO: 353254 - protein, 114 aa, Zea mays
  unsure (1)..(114): unsure at all Xaa locations
  Clone ID: MRT4577_85340C.1.pep
CGPLXGXAGFXXKKKKKKKNLKKKKKXVGPRHAFDSRRQPLHASAPSHTPQASGATSTMAPKKENAFPFRPSPQSSGATSTMRHQKKKRPPRLQRNRPSPGGETKKKKCGLGEQ

SEQ ID NO: 353255 - protein, 100 aa, Zea mays
  Clone ID: MRT4577_85341C.1.pep
VHKRGGDTIDMWINALKIYTIPDYYLALLSTGTCKPKDELDEILRGPKDFRAHEALDYRLSDTILQSVEGSFKPSDLTVHLAQAQAMHQSGKHTAYVPQI

SEQ ID NO: 353256 - protein, 68 aa, Zea mays
  unsure (1)..(68): unsure at all Xaa locations
  Clone ID: MRT4577_85342C.1.pep
MPGRGTFRIKKKLAKKMRQNRPIPYWIRKRIFPLRFXNAKRWWGGGTKLXFLSPFLGGGGGALLGGGG

SEQ ID NO: 353257 - protein, 243 aa, Zea mays
  unsure (1)..(243): unsure at all Xaa locations
  Clone ID: MRT4577_85343C.1.pep
NLNSTQEWRRKELERVSPSPTRRPNPCACCSSLLLPLLSSSHTTTAAARGAASATASPPPAAVLTATADDQQALLAFKDLVTGDPHGVLTSWTPAGNTTAGVCSWRXWGCRSRRRRPGRVTSLELASANLTGTVSPFLANLTFLGTLNLSHNFLSGNIPRELGFLPRLSYLDLQHNSLXGVVPGSLAGASRLLVLQLEYNSLVGEIPANLSHLQAGGPWTSAPTSSPVAIPAVASPRSRGSRT

SEQ ID NO: 353258 - protein, 112 aa, Zea mays
  unsure (1)..(112): unsure at all Xaa locations
  Clone ID: MRT4577_85344C.1.pep
LRRRHQRPPSILFLRLPTPLLQPPCPTAPLASGTLRRRIWPDPXMILLSVCALSXPETWPTFLPPFISPSTHGSGKNKFNLVPGXSPAHARGXFVPVVAARKGRTPVPPAFE

SEQ ID NO: 353259 - protein, 132 aa, Zea mays
  unsure (1)..(132): unsure at all Xaa locations
  Clone ID: MRT4577_85345C.1.pep
ATISVLVEPRDKIACLTCAFTFVRXLLCPKFSKFTCDIALSLIYILKEQSSEEDFLSSSRFRHXFSFALTPSFRTSLCFELYFCRITYSLPLGSLNWIWSWSLLLSLPKRWTSKGRGKVTNEKGDDPHRRQA

SEQ ID NO: 353260 - protein, 76 aa, Zea mays
  Clone ID: MRT4577_85346C.1.pep
LELLMPVHGVQKVHMGCVVGSSRVGASPIVLQHGTSGLSHSAVDRGSKSQRRLARRFGRWGPKHVTGCINPRAEFR

SEQ ID NO: 353261 - protein, 109 aa, Zea mays
  Clone ID: MRT4577_85347C.1.pep
HHQRAWGHPCYEDRLPPLFAPLFTLALPSFCIGPACFSTPTALCPSGGWPSVSLLLAHQASPSASCVLTPLYGLLLPFRRAWPWFAACAPPSSLRCVRRCFFCSDRCFF

SEQ ID NO: 353262 - protein, 82 aa, Zea mays
  Clone ID: MRT4577_85348C.1.pep
HASDETSAFCNFTKEPAAALPAFAWLRCDREDVEDCASFLRGHGILTRSGSQFGADPRYVRVSMLDRDDAYDIFVKRLSSLH

SEQ ID NO: 353263 - protein, 78 aa, Zea mays
  Clone ID: MRT4577_85349C.1.pep
SESCALSYRTSSIVVLELFCLLSRVASLSLSRLVALREPPVLRHLSPFVAYVATSCMATRPVQRRSSSATRSKRASKQ

SEQ ID NO: 353264 - protein, 112 aa, Zea mays
  unsure (1)..(112): unsure at all Xaa locations
  Clone ID: MRT4577_8534C.1.pep
SRPPEAGGRPKQPDXETAPRGATGPGPDGATTHPGGPNQRTAAQAAAEDAAPDHKHGAEAARVASWAAPGARAVTRRRHGRADAAAQTDAETQRAGPSASRRPSGRTRARDA

SEQ ID NO: 353265 - protein, 56 aa, Zea mays
  Clone ID: MRT4577_85350C.1.pep
IWFTMIFPWGLFNQNLLVCLERVSIDIHDMLLGSVFFCIVIIPLGSFRSNPKKRLK

SEQ ID NO: 353266 - protein, 98 aa, Zea mays
  Clone ID: MRT4577_85351C.1.pep
CNLIYKKSMCRGHPNQEAIGYGPQTRNRGGKNNPDWGGGENIPRPGQGNNFPTRYGGFNFWEKNTGENNFWDTLETQRAPNSWVKGGPQTGPIFLGAP

SEQ ID NO: 353267 - protein, 157 aa, Zea mays
  unsure (1)..(157): unsure at all Xaa locations
  Clone ID: MRT4577_85352C.1.pep
DAWGKCLEKAAKLDPNCMATXRFAVAVQRIKDAERSQDASDQLSWAGNEMASVIREGESVPIDPPIAWAGLAMAHKAQHEIAAAFVADRNELTEMEERAVYSLKQAVTEDPEDAVRWHQLGLHSLCSQQYKLSQKYLKAAVGRSRECSYAWSNLGIS

SEQ ID NO: 353268 - protein, 89 aa, Zea mays
  Clone ID: MRT4577_85353C.1.pep
CSHSIIVCETNVSLNTKGSTVTNTSYTSSDIRPRSIFDHIVDKTRRHRAYATAFVLLQPVILGTPKMGVWRSDSTVMITSTSAACISSS

SEQ ID NO: 353269 - protein, 73 aa, Zea mays
  unsure (1)..(73): unsure at all Xaa locations
  Clone ID: MRT4577_85354C.1.pep
PHYISAAALGFSFSTPPLASRITVSVFSSFSSFSNSVVSRGPWDFSSVXPLLRQLSLLVQFQAFVLLHLQAFQ

SEQ ID NO: 353270 - protein, 127 aa, Zea mays
  unsure (1)..(127): unsure at all Xaa locations
  Clone ID: MRT4577_85355C.1.pep
HFPSAMDNEKTHIIIVDIGHANCGKSTTTGHLNYKLGGIDKXRVIDRFDKEGADMNKRAFKYAXWVLDTLTAERDTGITIDIDLRKFSTTKNYCTVIDDPGHRDFIKNMITGNSQADCAALIIDSTT

SEQ ID NO: 353271 - protein, 76 aa, Zea mays
  Clone ID: MRT4577_85356C.1.pep
MMNCDGCEQLWQLCRSLLLKKKKKKKKKKKKKKKKKKKKKKKKKKKTIPKKQKKTKTTNPKNHLSPICHAPHSGKP

SEQ ID NO: 353272 - protein, 263 aa, Zea mays
  unsure (1)..(263): unsure at all Xaa locations
  Clone ID: MRT4577_85357C.1.pep
MAPVRVFGTADFVNAARVMACLEEVGVEYEVVEVDYAAMEHKGAQHLARNPFGQIPAFQDGDTMLFGTPYTLIIRSIRSTHLTTTETLASXGCFVFFSIACISLNNFXESRAIAKYVLRKYSKSAQVDLLREGNPEEAAMVDVWTEVEAHTYLPAIAPIFYEYVVYPAEHGTTPNQEVVDESVERLRKVLDVYEAHLYKTKQLYLAGDYFSLADLNHVPYTFHLMRTPHASLFEAYPHVKAWWERVIARPSLQKLAPDMVIKA

SEQ ID NO: 353273 - protein, 51 aa, Zea mays
  Clone ID: MRT4577_85358C.1.pep
RCWSRSRRTRRRPSAGPAGARSACRGGALPRCRRPPRLSCRRTREKPARPA

SEQ ID NO: 353274 - protein, 46 aa, Zea mays
  unsure (1)..(46): unsure at all Xaa locations
  Clone ID: MRT4577_85359C.1.pep
SLCLDAADYKLVSVLMKRGPNKEFIRSQXNXXTSYXLGPDAWADAW

SEQ ID NO: 353275 - protein, 52 aa, Zea mays
  Clone ID: MRT4577_8535C.1.pep
ERIRTICTDICQARDTDIDELSTAMIRYNCHFIKHNYAMLLSARYIRLQHHN

SEQ ID NO: 353276 - protein, 56 aa, Zea mays
  Clone ID: MRT4577_85360C.1.pep
QKFELPKQEVKVADVFHAVESAKRRFSIYAWGLVDTTLEDVFIKVAKGAQAFSVVA

SEQ ID NO: 353277 - protein, 75 aa, Zea mays
  Clone ID: MRT4577_85361C.1.pep
TTPDALLHKLIILLDEYFIHCFHHIRQNVRLCGESTAPLTHHSDTDNAHHRTLPTLICCTPSTYFHRTPTVTYYR

SEQ ID NO: 353278 - protein, 108 aa, Zea mays
  Clone ID: MRT4577_85362C.1.pep
QLDARGAFQALKGTIPPDESSFNTLVHGWCKARMLKEARETMKEMERHGFSPSVTTYTCLIEAYCMEKDFQTVDGILDEMHTNRCTPNIITYTIVMHALGKAGRTQEA

SEQ ID NO: 353279 - protein, 63 aa, Zea mays
  Clone ID: MRT4577_85363C.1.pep
ESHVMGESEKSASILRSDLSHARWLILLMQDGSPCFHSLERRLCEKQRQCNVTLSLLKKHAET

SEQ ID NO: 353280 - protein, 241 aa, Zea mays
  unsure (1)..(241): unsure at all Xaa locations
  Clone ID: MRT4577_85364C.1.pep
MGTLEPLSNLSSLTTLQLLSCGEDLKCQGLQSLLTTGGQLNELKVAGSPRFFADWDPNSGRALKDAEGGEEQQTQHVSSTLHELWTDDIAGLLAAPICRFLSSSLTKLQLRGDWCEGMERFIKEQEDALQLFSSLQKLVFWNFKDLQQLPAGLRNLTSLKILSVNLCPAILSLPNDGLPDSLEMLDVYKCSEELXQQCRGGWREPSQESIYSDPRTMPWSSLVHSSSLVALFPSHSNTCMT

SEQ ID NO: 353281 - protein, 70 aa, Zea mays
  unsure (1)..(70): unsure at all Xaa locations
  Clone ID: MRT4577_85365C.1.pep
XVKQLPPFSTVYARTPHKGRDGRFRRSLGTQSDLLLSDKRLLRLPDTNVIYTGYLLYTRCAISAIIVLTH

SEQ ID NO: 353282 - protein, 139 aa, Zea mays
  Clone ID: MRT4577_85366C.1.pep
MANSASGMAVSDECKLKFQELKSKRSFRFITFKINEQTQQVVVDRLGQPGDTYDDFTGSMPESECRYAVFDFDFTTDENCQKSKILFISWSPDTSRVRSKMLYASSKDRFKRELEGIQLELQATDPSEMSMDIVRARAL

SEQ ID NO: 353283 - protein, 180 aa, Zea mays
  Clone ID: MRT4577_85367C.1.pep
MDLKDSLSKFKQQQERCQSSLASIAASTSKPKHRAQPAHAPNVPARPSQPIKFSNDTERLQHINSIRKSPVGAQIKLVIELLYKTRQAFTAEQINEATYVDIHGNKAVFDSLRNNPKVSYDGRRFSYKSKHDLKGKDQLLVLIRKFPEGLAVVEVKDAYSNVLEDLQVTLTLLIRQLRCF

SEQ ID NO: 353284 - protein, 90 aa, Zea mays
  Clone ID: MRT4577_85368C.1.pep
VFKPKFCSYWSSVKSNFKGRGPQRVPLIFPAVLGPVNLRVLEVFALTRIYCGYNPSFLSSPLGPPVFRPLEGVKKPLTKPRWGPIWWEIS

SEQ ID NO: 353285 - protein, 88 aa, Zea mays
  Clone ID: MRT4577_85369C.1.pep
VAHIEELLDIFHAYMFPFLFLFTSRVRLILTMMSRLLPKCCFKGISSVRTTPNTGHANRTAIQAFQSYGTRFQRHRQKDSGSIVQQIK

SEQ ID NO: 353286 - protein, 140 aa, Zea mays
  Clone ID: MRT4577_8536C.1.pep
DAWVAMRVAPSMFPLDITIFDPFTEIPVDVLLFQICIPFAIEHFKPRATIKALLHHWFSVVGWGLGLTDFLLPKSEENGGQENLNARAERRDRGHGGREMVAPQVEQLMIQHVAAEDNGRGDSNEANDVTEDSDVDDQDS

SEQ ID NO: 353287 - protein, 148 aa, Zea mays
  unsure (1)..(148): unsure at all Xaa locations
  Clone ID: MRT4577_85370C.1.pep
GAKTPGVRQRAQRVGSPKPPAKSEGWCLQAPKSPREPPPCKKKTHVSKSTPPPSKKKKNSFLPKPXGPWPDPAGAPKGDPRALDRPXGPGAQNPPPPGPTQGAPPGKTAPPPXSPPGAPPGGAPGGGKQATGPPPPGKKGRAPRPRAR

SEQ ID NO: 353288 - protein, 137 aa, Zea mays
  unsure (1)..(137): unsure at all Xaa locations
  Clone ID: MRT4577_85371C.1.pep
ELVQPPFRWFPCLLMHRVPFHLVRRLWDTCLPEGDDRPVFFVNRPAGSLLPWLAGLHQLAFPQMXMFLRPLPPXTWAPPFLPMVLLLGXMWRSDVHEALFVSPSTGLVYPFPRSAHCPVRRASQFPFCFINKVKERC

SEQ ID NO: 353289 - protein, 153 aa, Zea mays
  unsure (1)..(153): unsure at all Xaa locations
  Clone ID: MRT4577_85372C.1.pep
PGAGSRVGQGGGPGXGGAGRALGQWAXAQASGXXGGXSXXDKEHKRXRGLVRXRGQAQQARXRKXAXXXXXEXKGRXREKKXSEMEERLXTRQSENQRRRQNGRPLQKRFRKWRGRPKALKGIMHPLTRSGSKKKEGRQPRGGKKLGIKAPQK

SEQ ID NO: 353290 - protein, 116 aa, Zea mays
  unsure (1)..(116): unsure at all Xaa locations
  Clone ID: MRT4577_85373C.1.pep
MLHSYCFHLWEEFISNMLCFFLYFALLTNSMLFSYCFRLWEEFIFNMLCFFIFLCFKVNLRNFLMYRAANVFSCAYLVNMSRPEHRRIPVKHQKAXXWFSGLRGAMAFALALQSVH

SEQ ID NO: 353291 - protein, 58 aa, Zea mays
  unsure (1)..(58): unsure at all Xaa locations
  Clone ID: MRT4577_85374C.1.pep
EKINALPTMEIKSGRLAMLSVMGAWVQAEYTGTXPMDNLFDHLDDPGHATIFQDFTRK

SEQ ID NO: 353292 - protein, 88 aa, Zea mays
  Clone ID: MRT4577_85375C.1.pep
MRSLILALVALLSLLLSATNAFIIPQCSLAASAIIPHLLPPVTSMGFEHPSVHAYKLQLALAACVFQHPIAQLQHQSLAHLNLQTIGT

SEQ ID NO: 353293 - protein, 89 aa, Zea mays
  Clone ID: MRT4577_85376C.1.pep
VEGHESRWRLRQCLLPGEYSPLQDLGSYACKGQQFLETGCSEIQFRNLTDVEKHAPPLLRICMAMEFRQAHTENISGRGNFTIGSLAIG

SEQ ID NO: 353294 - protein, 65 aa, Zea mays
  Clone ID: MRT4577_85377C.1.pep
ALVAVKSKAGYHGRKSEQTMQPLVYSEIIKFTLSLVEKPDMANIINTVKSQVEIFLFLRISEVLG

SEQ ID NO: 353295 - protein, 416 aa, Zea mays
  unsure (1)..(416): unsure at all Xaa locations
  Clone ID: MRT4577_85378C.1.pep
AVGEGLAVNRAYKRCITLLRSLYAALRFLPAYRAFRRLCASGQVYNYCMGHRVGSFAAPFSRAEEAAMRTKRLAPVETQLGRLVVSVQYLPSLAAFNFEVTSLASAAIITDYVGSPAAEPMRAFPPSLTEATGSPFPQPSRRPXLGVASALAAHAWATGXFSPPPAHYASPTPSPPTFGYLHSRFSGETAPMTIPQAGGGRGTVHHRNMSEPSRAFMFPPPSPKNVRGEAGMQESPTEINRSFKRADGIRMGDLYANLPSGSKIKDTKDESGRFSGVFSSSGSPRHGFSRSSSRLSMQDDTDDADFPFAVDDVYPDSRPGSSGGKDTGDQAGSSSHKSQDAAVGYLVHLLKSARPLRDSTYSSHTSRGESTEAGSTSSFLSRRTSDALEEFESFKETRENLLARSRSRLQDSLDKP

SEQ ID NO: 353296 - protein, 112 aa, Zea mays
  unsure (1)..(112): unsure at all Xaa locations
  Clone ID: MRT4577_85379C.1.pep
ERIEEWQLPEDHXIKLGIVGIIDPFRVGVLDIVGLXXAAGINAHMVTADYLHTAXTLIWMCIKLEDPNESESVIIEGKTFXRQLSHFGKVLLLLEITIVMVRSPPNXDKLLL

SEQ ID NO: 353297 - protein, 86 aa, Zea mays
  Clone ID: MRT4577_8537C.1.pep
QRRVLFFFFFFFFFTKNQIHGLVRGDYSRQTQRWLFSCHLILTTAIYKKSYYDIHTAESKSLSLHDSDDPIHGSISPAYSALLPLL

SEQ ID NO: 353298 - protein, 159 aa, Zea mays
  Clone ID: MRT4577_85380C.1.pep
TQRSPGLGFVPFSPEGAMGNPLKGINGKELGGPNIPVKKGQFPPALENGAGGYGGGRGGGGYGGGGPRNGGGGFGGGGGGYGGGGGYGGGGGGFGGGNRGGGFGNSPGKWRKLTVGAARPNYPVCSRDVFPSPKGLFSFVSFVVAPLGFLLQGRFVSVV

SEQ ID NO: 353299 - protein, 73 aa, Zea mays
  Clone ID: MRT4577_85381C.1.pep
GQGQVPDSRVYFYYLPHWVPKGNTWACLGSSFVTVVPKGGGHPSSVGLYFLGGFSLGQRVFFWVFRKIGLTCR

SEQ ID NO: 353300 - protein, 163 aa, Zea mays
  unsure (1)..(163): unsure at all Xaa locations
  Clone ID: MRT4577_85382C.1.pep
ALRRPQVLEDRRDRNPVATVMLLSDTQQQQSAAPENSSRKQFGRPAVAPATRFTHVEIPIGPGDPPPLVSECEEEPPVEHAFAKCLGGLVSVVMQEVQLELAFLTGEITAVYSCGPGQQAVAVSGGAXVSVRLGEMYAEEERELLVEVRAPLGSHPHSLVRCT

SEQ ID NO: 353301 - protein, 78 aa, Zea mays
  unsure (1)..(78): unsure at all Xaa locations
  Clone ID: MRT4577_85383C.1.pep
QMWETCDTMFLYNLSLLWAASSCRYVFSRGSELGVVSAAGLEVMVRRRRRGAEAGAERGEEYGLNHGGXPEEIRNRPA

SEQ ID NO: 353302 - protein, 26 aa, Zea mays
  Clone ID: MRT4577_85384C.1.pep
ILCNPCYNPKIVVLATLQSGSYSLAR

SEQ ID NO: 353303 - protein, 111 aa, Zea mays
  Clone ID: MRT4577_85385C.1.pep
PAGKIYKMTVIHIVLFKFRADVDEAHRQTFINELKTLKTLSCVKDQRLVVGGPSITDPIARSKGYQICLLSFHPSPSALVEYQASSEHHRVTSQYLWPYAEDVTRLYFRRL

SEQ ID NO: 353304 - protein, 94 aa, Zea mays
  Clone ID: MRT4577_85386C.1.pep
KMPYPSREWGSGFFCSPIKKPLLVHFPKAPLRVPGYPPGLDPSKPPVPEYPPGLEHSKRGRGYPPPPRESPPPPPGWGQPKPTPFSHPPVEPWV

SEQ ID NO: 353305 - protein, 92 aa, Zea mays
  unsure (1)..(92): unsure at all Xaa locations
  Clone ID: MRT4577_85387C.1.pep
SHTASPCRIELVLARLXWALFQSHSKWSRSSVNASASDVSTVNREVLLWSWYSRDKMISRKALRQVKEVTQLTGRYRDTADVETAHDLTMWS

SEQ ID NO: 353306 - protein, 51 aa, Zea mays
  unsure (1)..(51): unsure at all Xaa locations
  Clone ID: MRT4577_85388C.1.pep
YSPIYNXRXWSPTGDVYVVXTTGLLICSVTLAWILGGGSLLVYNTSALFGL

SEQ ID NO: 353307 - protein, 357 aa, Zea mays
  unsure (1)..(357): unsure at all Xaa locations
  Clone ID: MRT4577_85389C.1.pep
MASELTYRGGGTSTAAGAGAGGYSPKPSKPLAWLPRAARYAVAEHRPLFALAGMLIAAAVISIASPSASSSSSTSTSTGGAXVLLQQQQSARPLPRRARPPPXDVATRHFVGGKVPLGLKRKALRVLVTGGAGFVGSHLVDRLLERGDSVIVVDNFFTGRKDNVLHHLNDPNFEMIRHDVVEPILLEVDQIYHLACPASPVHYKYNPIKTIKTNVVGTLNMLGLAKRINARFLLTSTSEVYGDPLQHPQVETYWGNVNPIGVRSCYDEGKRTAETLTMDYHRGANLEVRIARIFNTYGPRMCIDDGRVVSNFVAQALRKEPLTVYGDGKQTRSFQYVSDLVEPRQGVPRVGAEDPPA

SEQ ID NO: 353308 - protein, 66 aa, Zea mays
  Clone ID: MRT4577_8538C.1.pep
MKSSTLLAILVLQALLVSTAVAKGPAGPKKQCAATCKNCVPVSTDKGATKYRCRDFLPENCGCKIH

SEQ ID NO: 353309 - protein, 95 aa, Zea mays
  Clone ID: MRT4577_85390C.1.pep
KGKVFSPGPPKRAKNRGGLFVGPPPLFVWGGFPQGGLLAPPCWVFIFQNPPPGGFSFGGTNFGRPLKKKKKKKKKKKKKKKKKKKKKKKKKKKKK

SEQ ID NO: 353310 - protein, 236 aa, Zea mays
  Clone ID: MRT4577_85391C.1.pep
HKTNVVGTLNMLGLAKRINARFLLTSTSEVYGDPLQHPQVETYWGNVNPIGVRSCYDEGKRTAETLTMDYHRGANLEVRIARIFNTYGPRMCIDDGRVVSNFVAQALRKEPLTVYGDGKQTRSFQYVSDLVEGLMKLMEGEHVGPFNLGNPGEFTMLELAKVVQDTIDPNARIEFRKNTQDDPHKRKPDIGRAKELLGWEPKIPLREGLPLMVTDFRKRIFGDQDAAAATTGNQQG

SEQ ID NO: 353311 - protein, 112 aa, Zea mays
  Clone ID: MRT4577_85392C.1.pep
TRHLTHYNFKQHQYKDNSNINLYLNRSTILSLTDHNLNTLLNILLPTTHDTKLKTLDLNPMLLLLNTLLTITTINLHNKTTITNHLHLKIRTRLLQRRKPPHTTANNTSTYN

SEQ ID NO: 353312 - protein, 97 aa, Zea mays
  unsure (1)..(97): unsure at all Xaa locations
  Clone ID: MRT4577_85393C.1.pep
VGTRPPGRHRXHIHTHQQAAAASQAIPLEPEHNSKQCRRLLLLRPTPTLPIPRRMDASXSXAGALCSASGRGRDDGPGRVGGXRPGXLXAGPARRGG

SEQ ID NO: 353313 - protein, 107 aa, Zea mays
  Clone ID: MRT4577_85394C.1.pep
TRPLAGSGTPPLETTGFALAPGQSRALYAPQGWSGRFWGRSGCDFDAASAKGSCATGDCGSGEVECRGAGASPPATLAEFTLDGAGGKDFYDVSLVDGYNLPMLVRA

SEQ ID NO: 353314 - protein, 167 aa, Zea mays
  unsure (1)..(167): unsure at all Xaa locations
  Clone ID: MRT4577_85395C.1.pep
MAYSSFSKALALVALIFSILVKNGSXAIPDNFTDSDFAXDPXWEAAIDTXTATPTGSGPDYNGGACGGKNANVXPFXSAMTSSRNQTLFKDGXGCHSCYQILRQKHPACSGNPHTVMITEMNYXPVVNAXHFDLSATAFVAMAKDERNDELHHAVIIDIQFKTVTCN

SEQ ID NO: 353315 - protein, 92 aa, Zea mays
  unsure (1)..(92): unsure at all Xaa locations
  Clone ID: MRT4577_85396C.1.pep
RKSTGGEVPRKYMATKVARKSTPATGGGKKPDRFRAXADGLREIRKCQKXTGMIXRKIPYRXLGREIAHEFITALFHQQSDVKCMFKPLFYM

SEQ ID NO: 353316 - protein, 256 aa, Zea mays
  Clone ID: MRT4577_85397C.1.pep
MEALHEEMPFDLSFHPSVPLVATSLITGELHMFRYADGLPLERLFVAKPHKESCRAVRFVDSGTAILTGSADMSIVASDVETGKVIARLDNAHDDAINRLVCLTETTVASGDDDGYIKVWDTRQRSCCNTFHRHEDYISDMTYVAGSNQILATSGDGTLSVNNLRGNRVKSQSEFSEDELLSLVVMKNGQKVVCGTPSGTLLLYSWGHFKDCSDRFLGHAQSVDNLLKLDEETLISAAADGVIRLVGILPNQIYSR

SEQ ID NO: 353317 - protein, 249 aa, Zea mays
  Clone ID: MRT4577_85398C.1.pep
RRGLRRRGLRRRRLRRAQDDEAHGRAAAGRRGDKKGGGGKKGGGGSEIPVQIKGNNQGGGQPHNAKGGPPGGGNPLAQGKKGGAVGGPMGGMLPQQAMMRPNMLGGAGAGFPGTAQMGGGPMGMPMGHPHMGIMQQGGGGGGGGVPGLGFYQGNANGGGGGMHSGAEMLQAAAASGNPMAQQQYMALLQHQQQQQMMLQHGNGGGAGYPAMGYGYGRPPMMHYPMPPHSHPEPYNIFSDENPNSTCSLM

SEQ ID NO: 353318 - protein, 167 aa, Zea mays
  unsure (1)..(167): unsure at all Xaa locations
  Clone ID: MRT4577_85399C.1.pep
QEGRKQTEDGXRKXXQEXXPXLXTXEARDXTRGXXLAXQXSRXXRLXARKEPEEXAEEDXXEXKEXXXDXAXXPXXXXGGNXXXGXXXXXESXXGXEXXXXXGTXGXXPKXAXXXXEXTXXXXDXXXXXXXPKAQXXXXXRGRSXXXXXXXRXKEXXXKKKKKKKRA

SEQ ID NO: 353319 - protein, 67 aa, Zea mays
  Clone ID: MRT4577_8539C.1.pep
MMLLRAGPKKQCWCGECTSWSGVWTCDDLLTKCAATCKNCVPVSTDKGATKYRCRDFLPENCGCKIH

SEQ ID NO: 353320 - protein, 81 aa, Zea mays
  Clone ID: MRT4577_853C.1.pep
FWFLPHKIRYLLDPDIYTDGRISVQGIDAVLFAPDDAKATQTVDPNRKPPTIVTHKKKIKLRRVHLLLNLSIGQRENMEVK

SEQ ID NO: 353321 - protein, 258 aa, Zea mays
  unsure (1)..(258): unsure at all Xaa locations
  Clone ID: MRT4577_85400C.1.pep
PLKDHFKSVKFALPEDSFDDDGGSEFDDDFDDDDFDDDEDYDDEGFDDDVYDEPKMMKPMAVPPPSGGGDKKGGGGKKGGGGNEIPVQIKGNNHGGGQPHNAKGGPPGGGNPLAQGKKGGGGGGAVGGPMGGMLPQQAMMRPNMLGGAGAGFPGTAQMGGGPMGMPMGHPHMGIMQQGGGGGGGXGPGILPGXNANGGGGGGMHSGAEMLQAAAASGNPMAQQQYMALLQHQQQQHQQQMMLQHGNGGGAGYPARGYG

SEQ ID NO: 353322 - protein, 130 aa, Zea mays
  Clone ID: MRT4577_85401C.1.pep
PRVRNKLRIMMKMHGLGDLPYWTISYCYFLLLSLLYVLSFMLFGSALGLTFFRQNNYGMQFVFYFAYMNLQISFAFLMTTYFSSVRTATVTGNLYIFVSGLLSQFMFRPYVEDSNILRIWITLMELLPAF

SEQ ID NO: 353323 - protein, 83 aa, Zea mays
  Clone ID: MRT4577_85402C.1.pep
SWCVVSYAAACMSPCLYCCFVHGRVKNKDAPSSGLIWLTAMHGGSVRLCLCGACIIGSVRHAFVISRRQCGCICPCGCWFSRQ

SEQ ID NO: 353324 - protein, 233 aa, Zea mays
  unsure (1)..(233): unsure at all Xaa locations
  Clone ID: MRT4577_85403C.1.pep
GRPPRGYPTVRGEEITRKRATRGDESAGLQRWVGLATYFSPRTREALHRTATNLFLAVDRLLLLLVIKEPDYDQIEAILWESTGXSPMIPLSKLSDSIIAQKYGAQPDMVTSDLLHATPTHNEIIVDVKALRADLRAKLCQDIHDTPMSCLAIGSSSLGKLLRLLLRSDRDYVLSNATCPDTVDKTSSTLMLISSPKCLTIAVDIIKDGCPREEHAPRFKIPETCRTGQSYCT

SEQ ID NO: 353325 - protein, 53 aa, Zea mays
  Clone ID: MRT4577_85404C.1.pep
CHLLIVQQHPSQSHGALNGYVRFDPSSIIFEVSSSLDTQDNAIFELDTNNSTA

SEQ ID NO: 353326 - protein, 80 aa, Zea mays
  Clone ID: MRT4577_85405C.1.pep
RAGEPVTLLLFATLLVYPACRPRHGRRIYTALPAMPPALAVPSAGAYYNPPAAFLLFGCSIHLPSEPTLLGLFIHAHFFS

SEQ ID NO: 353327 - protein, 101 aa, Zea mays
  Clone ID: MRT4577_85407C.1.pep
WRFQPHSTSVVEPLLITPLPSCVGNSDHVLDQLPLSWGVIAPAVALRSLDLPPSHIRGYASFRSTLESWTFHSLCQTVLFIRAGFLALFCAPTFQHILPCT

SEQ ID NO: 353328 - protein, 139 aa, Zea mays
  Clone ID: MRT4577_85408C.1.pep
LAMVDPFAYLQQEQFFLFSPLALGNGPKNLQQRVVPPRVVPPIGPGFSQLGGGNPGAYLEQLFPFNQLVGGNFGGGLPQGPRFLYPPGGGNPLGGAFPQEQPMVGGALFWFPMGGTRKGGPQRGMGFPKKTQKLVGVFP

SEQ ID NO: 353329 - protein, 45 aa, Zea mays
  unsure (1)..(45): unsure at all Xaa locations
  Clone ID: MRT4577_85409C.1.pep
NIXRLLSHKQHLIRGNGDFLILFSNYNVYNNETHIGVIILLTIPS

SEQ ID NO: 353330 - protein, 87 aa, Zea mays
  Clone ID: MRT4577_8540C.1.pep
MKSSTLLAILVLQALLVSAAVAKGPAGPKKQCWCGECTSWSGVWSCDDFLTKCAATCKNCVPVSTDKGAIKYRCRDFLPENCGCKIH

SEQ ID NO: 353331 - protein, 74 aa, Zea mays
  Clone ID: MRT4577_85410C.1.pep
VHTCAPLGPLTRLCVSVPPRSLLPFSVSSLPPRFHSRPFHPQRIVIATNRHLTISSKICKHPLLVMLTKVYHNN

SEQ ID NO: 353332 - protein, 138 aa, Zea mays
  Clone ID: MRT4577_85411C.1.pep
KKYSDNFVDYKDRKIILSSGSEKKLEEAAPGLILRKRKSADESVASEANSSSVESEASVADAVALLLKHKRGLQTSEEMENETEPYSSKTEGKKSKQKRVLGPARPDFLEARQDSETWVPPEGQTGDGRTALNDRLGY

SEQ ID NO: 353333 - protein, 210 aa, Zea mays
  unsure (1)..(210): unsure at all Xaa locations
  Clone ID: MRT4577_85412C.1.pep
FGTRVRSSSLPSVFVSTALADAYAKAGRLDLALQVLDEMPSRNVVSWTTLVASLARAGRRHDALRRFAEMRASGVACDSHACSAALTACADAGLLPRGREVHALCAKLGLDAVPFVANALAALYARCGDVDRALAAVGRMGSHDVAVCTTLIASYVQTGRTEEAIEAFVRMLRDESSNSASPNEYTFSAVXAACXNMDRAYLGEQLHAQA

SEQ ID NO: 353334 - protein, 51 aa, Zea mays
  Clone ID: MRT4577_85413C.1.pep
PSKSTCHCPECAPGHAIVQIQCLVALTVSVFGGSHRGVDGSEVAQHSGVLL

SEQ ID NO: 353335 - protein, 47 aa, Zea mays
  Clone ID: MRT4577_85414C.1.pep
GLPNLTESTKSFRAKIFLFHNCQIKILLHLQEILKVTENQMLNNKFT

SEQ ID NO: 353336 - protein, 85 aa, Zea mays
  Clone ID: MRT4577_85415C.1.pep
SEYDRNTNSSRLKRGRKTQTARQVLVARPYSSRLERPQRRIMIPFGSRSLMAHRVKDPLTVRLSDRSGWGNMLSLGHVGEQLYRR

SEQ ID NO: 353337 - protein, 116 aa, Zea mays
  Clone ID: MRT4577_85416C.1.pep
HHSHTTRSVGKESIHEFVNTMCKGVHQRDVPHLQGCCFVTTLVPCPGATYQPLILFLNSRSYAGPTSNIKALPSLLALKPLAWLLCCTVVYTRRASLPICCSSVFLLLHGSWVFGC

SEQ ID NO: 353338 - protein, 107 aa, Zea mays
  unsure (1)..(107): unsure at all Xaa locations
  Clone ID: MRT4577_85417C.1.pep
TARPTHSVHSASAIGAVGYDKRVEITVCEEPDFVDLHGRLLHGLFRSQNDYDLDVTRCTIMYELYHNDVDXKFYASXSLCIYALKIVVSTCGSTKLLVTISRMLELA

SEQ ID NO: 353339 - protein, 149 aa, Zea mays
  Clone ID: MRT4577_85418C.1.pep
MADQLTDDQIAEFKEAFSLFDKDGDGCITTKELGTVMRSLGQNPTEAELQDMINEVDADGNGTIDFPEFLNLMARKMKDTDSEEELKEAFRVFDKDQNGFISAAELRHVMTNLGEKLTDEEVDEMVREADVDGDGQINYDEFVKVMMAK

SEQ ID NO: 353340 - protein, 66 aa, Zea mays
  Clone ID: MRT4577_85419C.1.pep
IMNPPGQIGNGYGPVLGCHPSPIAVKFAELITKIDRRSGKELEKEPQFLKNGDAGMVKMISPKPMV

SEQ ID NO: 353341 - protein, 81 aa, Zea mays
  Clone ID: MRT4577_8541C.1.pep
MCAGCDEIKQVRIMLLRAGPTTKKQCWCGECTSWSGVWTCDDLLTKCAATCKNCVPVSTDKGAIKYRCRDFLPENCGCKIH

SEQ ID NO: 353342 - protein, 63 aa, Zea mays
  Clone ID: MRT4577_85420C.1.pep
PGVPKEPPFLVPEVGSLGGLEPSFFWLQGSLNWVERAFLGILLGESLRGRRGGEGRGFAGNSV

SEQ ID NO: 353343 - protein, 67 aa, Zea mays
  Clone ID: MRT4577_85421C.1.pep
WVLSMSLPSSDDIELVSLAVVNNLVVEIVDVSSSGQPPGHATSMVLSEMGSLGTLDHAPEGRKTSRI

SEQ ID NO: 353344 - protein, 527 aa, Zea mays
  Clone ID: MRT4577_85422C.1.pep
MATFTAASSLSLLFSHPHSHSRQPSAQGPTASSHLRLHPRASRARCASSDTTATKHRRPAEENIREEAARLRGPAQGFSAWYEPFPPAPGGDPNERYSLDEVVYRSSSGGLLDVRHDMEALARYPGSYWRDLFDSRVGRTAWPYGSGVWSKKEFVLPEIDSDHIVSLFEGNSNLFWAERLGREHLGGMNDLWVKHCGISHTGSFKDLGMTVLVSQVNRLRRAPLSRPIAGVGCASTGDTSAALSAYCAAAGIPAIVFLPADRISLQQLIQPIANGATVLSLDTDFDGCMRLIREVTAELPIYLANSLNPLRLEGQKTAAIEILQQFNWQVPDWVIVPGGNLGNIYAFYKGFEMCRVLGLVDRVPRLVCAQAANANPLYRYYKSGWTEFEPQTAETTFASAIQIGDPVSVDRAVVALKATDGIVEEATEEELMDATALADRTGMFACPHTGVALAALFKLQGQRIIGPNDRTVVVSTAHGLKFTQSKIDYHDKNIKDMVCQYANPPISVKADFGSVMDVLQKNLNGKI

SEQ ID NO: 353345 - protein, 922 aa, Zea mays
  Clone ID: MRT4577_85423C.1.pep
MLSSMVVPMSNPLPMLTLTIICATLWLTGGAGGTGTDTGGGGCIPSERDALLSFKKGITSDNTSRLGSWHGQDCCRWRGVTCSNRTGNVLMLNLAYPSYPYDDSYYTDVCGDYRTLVGEISPSLLLLRQLEHIDLSWNCLLGPNGRMPSFLGSMKNLRYLNLSGVPFKGSVPPQLGNLSRLQYLDLGNSYVGYGIYSKDITWLTNLPLLQYLGMRSVNLSGIAGDWPHILNMLPSLRVISLSFCWLGSANQSLAFFNLTKLEKLDLSFNNFDHTYISSWFWRATSLKHLVLKDTGLFGELPDALGNLTSLVVLDLSSNGNMTITQGLKNLCGLEILDLTYSSINIDIAELMDTLPLCTRENLQLQELHLGYNSFTGILPSSIGYFRSLRILDLTDNNLRGSVPTEIGTLTNLTSLDLSNNNLGGVITEEHFVGLMNLKEIELSFTNLSVVVDADWIQPFRLESAGFASIHLGPLFPVWLHQQLLQITYLDISSTGLVGNIPDWFWSFSKAAFLDMSYNQLNGNLPADMSDMAFLMLNLCSNKLTGQVPPFPRNITMLDISNNLFSGIMPQNLSDFETLYFLILSNNSLSGTFPAFLQNCRNMIFLDLAWNNLSGRLPSWIWELKGLHVLRLSHNSFSGNIPSEITSLSYLQYLDLSGNYFSGVIPPHLSNLTDMTMNAVDHSFNIEFEKYTIHGGVDQFNDIWLVVTKGRQLTYSQGAIYFVNIDLSGNCLTGEIPFDITALDALMKLNLSSNQLGGKIPNKIGAMRSLESLDLSNNKLFGEIPWSLSNLTFLSYMNLSYNNLSGRIPSGRQLDTLNSDNPSLMYIGNSGLCGPPLQNNCSGNGSFMPGYHRSNRQKFEPASFYFSLVLGLVVGLWMVFCALLFINTWRVAYLGLLDKVYDKIYVFVAVKWASMTMSAAAAE

SEQ ID NO: 353346 - protein, 219 aa, Zea mays
  Clone ID: MRT4577_85424C.1.pep
HASAKGQQLKYSREIAYFVSIDLSGNYLTGEIPLGITSLDALMNLNLSSNQLGGKIPNKIGAMMSLASLDLSINKLSGEIPWSLSNLTSLSYMNLSYNNLSGRIPSGRQLDTLNVDNPSLCGPPLQNNCSGNGSFMPGYHRSNRQKFEPASFYFSLVLGLVVGLWMVFCALLFINTWRVAYLGLLDKVYDKIYVFVAVKWASMTMSAAAAEREHTTNTM

SEQ ID NO: 353347 - protein, 82 aa, Zea mays
  Clone ID: MRT4577_85425C.1.pep
LANDAATVMNLHGIQAPCQYNPQADPSRRRLLTVLLGGAVQFSHIYVNWLLHQWFRMQSYSTCATWAIIFPYYRVECSILFR

SEQ ID NO: 353348 - protein, 141 aa, Zea mays
  Clone ID: MRT4577_85426C.1.pep
MRQSKLVVTEGAIDEGTFGAEAEQADIKEEENADEEEEDYSTLIPSKPSHLDFEKSIVSEADVSMMMKLGYFREAERKLIRFAGEETTPMSKDDEVVVFKSFFRAGLHFPLNEMIGEVLDNSEIFLHQLTPNAIVRLNIFI

SEQ ID NO: 353349 - protein, 79 aa, Zea mays
  Clone ID: MRT4577_85427C.1.pep
AHRGQPVHQLIPLQGIVHVQQSILPPTTCSPSLYIRPYNLILFRELKVISVGIYRCLAAHVSWTWYLLRCMNDPCVSFF

SEQ ID NO: 353350 - protein, 81 aa, Zea mays
  Clone ID: MRT4577_85428C.1.pep
SLRLNHTPAPQLTRTLGTPTCIHQQPYKHTYLSTNTDAHRHSTAPSKTTSLLTTSQQHNQTTTFFHLYYTSFITPRHPQQT

SEQ ID NO: 353351 - protein, 79 aa, Zea mays
  unsure (1)..(79): unsure at all Xaa locations
  Clone ID: MRT4577_85429C.1.pep
PIVRRLYVQGKEGNGAGINSSFAEHQDVDGRATDDDLAWTVALGSPLTVATTXEQEYESDIFGERGILLRAVHGIKEAL

SEQ ID NO: 353352 - protein, 87 aa, Zea mays
  Clone ID: MRT4577_8542C.1.pep
MKSSTLLAILVLQALLVSTAVAKGPAGPKKQCWCGECTSWSGVWTCDDLLTKCAATCKNCVPVSTDKGATKYRCRDFLPENCGCKIH

SEQ ID NO: 353353 - protein, 179 aa, Zea mays
  unsure (1)..(179): unsure at all Xaa locations
  Clone ID: MRT4577_85430C.1.pep
MLRLRAFRPTSDKVVKIQLHPTHPWLVTADANDRVSVWDWEHRQVIYELKAGGVDERRLVGAKLEKLAEGDDSKGKPTEAIRGGSVKQVSFYDDDVRFWQHWRNCSAAAEAPTAVSQQSSTFIAPAPSTRGRHFVVICCENKVIFLDLVTMRGRDVPKQELDNRSLLXMEFLSRTSSSD

SEQ ID NO: 353354 - protein, 216 aa, Zea mays
  Clone ID: MRT4577_85431C.1.pep
MAETVGFASGDAAAWRAALAAYDRRLAALDKPDLVAVDSFYRHDLPALLRCRDPDPFLAKPELVRLLQWKLSRGKWRPRLMDFVKGLDDAVVESASRKAFAALPDLRRAITELTVLKGVGPATASAVLAAYAPDVAPFMSDEAMVAALGNSKEYTLKQYLAFADKLQAKAKELSIGEESFTPSDVERALWSSAIASKSPPSGNPKRESKMHGKRKR

SEQ ID NO: 353355 - protein, 201 aa, Zea mays
  unsure (1)..(201): unsure at all Xaa locations
  Clone ID: MRT4577_85432C.1.pep
SSRPXLSSAPPSLPXRASAKAKLSPLRXRRRXPTRAQNPPAPNSKSRVPAATDRPPSHTRXRATPSVTVDPRAPXRREEVEASARVAPXRGRRSSQGGSRWPGSPWRPLSGPXGRLRAAISSSTDTARDPDQEEPPAPASXRRRRRRPHQRSLPRWRRKSRRRWSSWRRRWRRPPPTRPSEGDGHMAPCLAALLNGMLLVP

SEQ ID NO: 353356 - protein, 188 aa, Zea mays
  unsure (1)..(188): unsure at all Xaa locations
  Clone ID: MRT4577_85433C.1.pep
ARASPPPAVAPTRAQNPPAPNSKSRVPAATDRPPSHTRIAPPHPSPSTREHPWRREEVEASARVAPXKRXRRSSQGGSRWPGSPWRPLXPLMGRXSALPSPAPPTPPATPTRRSLPRLPLRRRRRRRPHQRSLPRWRRKSRRRWSSWRRRWRRPPPTRPSEGDGHMAPCLAALLNGFLRLAGIESKIV

SEQ ID NO: 353357 - protein, 121 aa, Zea mays
  Clone ID: MRT4577_85434C.1.pep
MAKGGSGGQREGSALKTAAIVAGGLALAWVTVETAFRPLMGRLRAAISSSTDTARDPDQEEPPAPASAAEAEKASAPEEPAAVEEKVVELGRRWRRPPPTRPSEGDGHMGPCLAALLNGML

SEQ ID NO: 353358 - protein, 44 aa, Zea mays
  Clone ID: MRT4577_85435C.1.pep
LSLALLPQLLTLAKTPRSSTYSASSTSTLSLFAAYSIGTVHLFY

SEQ ID NO: 353359 - protein, 77 aa, Zea mays
  Clone ID: MRT4577_85436C.1.pep
AGSGKFPLRPPSLPPHAHRTPPPAIPNPECPRPQTDPHHTRRHAHRATPSKHPHPSPSTREHPWRREEVEASARVAP

SEQ ID NO: 353360 - protein, 251 aa, Zea mays
  Clone ID: MRT4577_85437C.1.pep
MAPHRKARASQPQQPPPSDYETDVIPSVDVPLPPPRSNEELNLSVLRRQYPALTSIEHVTPYAALYTFNLETQQWEKMGVEGTLFICQLTPSPLGAERYCAIILNRRGLDNFYEELTSSDEMEISDPYVIIQGEQVYGIWIFADPPPSSTANCRQETAAKMMAVADRAKASRAALHGSPDAVSSTPMGRQLSLRELFGQQREQDADFSLHHHDSHPMPSMHHPPQQHQHQQQPYMTHASPAQPDVGQLMRA

SEQ ID NO: 353361 - protein, 219 aa, Zea mays
  unsure (1)..(219): unsure at all Xaa locations
  Clone ID: MRT4577_85438C.1.pep
KKRAQDSGFNAIVNWLWRSGQVDGQKNFLPCPAPAVEGPSLGATATRRLEELDANHGAGSGVVWPGPLPGGGPGPGEPKLIWGREAPTAFGPLLIWAFSLPATPVFQGPRPNLNSSPQEERLVPRPAFCFLVLLPTVPAVGQGCPFSPXPRAPVARFSRSRRCRAGRPATDFRPCMPTXTXDXXVGTSXRRPWACYSILARTGGNIGPXNSSRSPGFAG

SEQ ID NO: 353362 - protein, 64 aa, Zea mays
  Clone ID: MRT4577_85439C.1.pep
MTLVWVFPSFCNCSIRACFRIGLVMQLVSVYTNRLEWILTQLGYIGKFLHDECRPLDFVPADFI

SEQ ID NO: 353363 - protein, 155 aa, Zea mays
  unsure (1)..(155): unsure at all Xaa locations
  Clone ID: MRT4577_85440C.1.pep
GIGILEAGRVGLDGVNTGATGGFMDGNYVIIGWQIAAIVGASSYAFVMSAIIAKIIDLIPGLKLRASEEAELLGMDDDQHGEFSYDYVEVRRDFLAWSPQRGEPXXDGDVLEPTHGIHEHQSMMNPSESDDARKTPSLNTPDVIAPDAVINEKHA

SEQ ID NO: 353364 - protein, 496 aa, Zea mays
  Clone ID: MRT4577_85441C.1.pep
MAATAMAAAAAASRAFLRPHRCLLLPHTHPLRRRLSTNATASAPAATAASPGVVDVLMKRGLVEAITSEALAAARPGELKVYCGFDPTAESLHLGNLLGLVALSWFRRCGHTAVALIGGATGRVGDPSGKSSERPELGIAAVEGNSDAIKSLVAQILGRVPEPAHRSHSGQKELSLDNSANSSQTMGSFLILDNYDWWKDITLLDFLREVGRFARVGTMIAKESVKKRLASEDGMSYTEFTYQLLQGYDFLYMFKNMGVNVQIGGSDQWGNITAGTELIRKILQVEGAHGLTFPLLLKSDGTKFGKTEDGAIWLSSKMLSPYKFYQYFFAVPDIDVIRFMKILTFLSLDEILELEDSMKKPGYVPNTVQKRLAEEVTRFVHGEEGLEEALKATEALRPGAQTQLDAQTIEGIADDVPSCSLAYDQVFKSPLIDLAVSTGLLTSKSAVKRLIKQGGLYLNNVRIDSEDKLVEEGDIVDGKVLLLSAGKKNKMVVRIS

SEQ ID NO: 353365 - protein, 91 aa, Zea mays
  unsure (1)..(91): unsure at all Xaa locations
  Clone ID: MRT4577_85442C.1.pep
RGHPPDQQRLIVAGKQLEDGRTLSDYDIQKESTLHLVLRLRGRMQIFVKTLTGKTITLEVEPXDTIENVKAKIQDTEGXPPDSRGHLAGSS

SEQ ID NO: 353366 - protein, 180 aa, Zea mays
  unsure (1)..(180): unsure at all Xaa locations
  Clone ID: MRT4577_85443C.1.pep
MRTPIGNPPKIPFSQSPLPVPDLVHSHSRNPAAPRLMASCGAGDAASAQSRASISHVIFDMDGLLLDTEGFYTEVQEKILARYDKVFDWSLNGLLTPEQFLEERESMLQALFPSCTKLPGVLRLVHHLHDNGVPMAVATGSHKRHFVLKTQNHQEMFFPLMHXHVAMGDDPEVKXGKPTP

SEQ ID NO: 353367 - protein, 87 aa, Zea mays
  Clone ID: MRT4577_85445C.1.pep
GASKGAKHFRSINHGKRYNAACHPKEFQGSPGQATILTHNGPSEATEENGCPDNPQEKEGAPAEGAAQAALWYMRPTPGSQATRTPS

SEQ ID NO: 353368 - protein, 70 aa, Zea mays
  Clone ID: MRT4577_85446C.1.pep
GANLVGHMPNVDVLGFLCSKVKRARNHLGEQSPEFLNHHYRGGKGHPFGGTTQDPGKVQGEIRNLLWKVS

SEQ ID NO: 353369 - protein, 36 aa, Zea mays
  Clone ID: MRT4577_85447C.1.pep
SMFHSWVAPFSATQPLVGSILTLSTRNTSSRINKSF

SEQ ID NO: 353370 - protein, 64 aa, Zea mays
  Clone ID: MRT4577_85448C.1.pep
DAISINYKPIFNTILKFHFVNVMFLQSSSFISSAGLFILELQWFFFLSKHLRCINIELCILTNC

SEQ ID NO: 353371 - protein, 74 aa, Zea mays
  Clone ID: MRT4577_85449C.1.pep
QGPEFFSKSQSQGQVLGDLLGANSLAPAPSSGQSWCRSCTVQFLALSVLWVLFWGHRGPVLYINLSNVTFFFKI

SEQ ID NO: 353372 - protein, 67 aa, Zea mays
  Clone ID: MRT4577_8544C.1.pep
CCRAGPTTKKQCWCGECTSWSGVWTCDDLLTKCAATCKNCVPVSTDKGTTKYRCRDFLPENCGCKIH

SEQ ID NO: 353373 - protein, 133 aa, Zea mays
  unsure (1)..(133): unsure at all Xaa locations
  Clone ID: MRT4577_85450C.1.pep
KTPQKPTNNNLTPXXTXTXTPLXLLXLLINXTNXLIIPXXSLXPNPIIXXFLPPXTSXXFXHPTPQPYXLQLXLQKNPLQQPIXQLHQQSXXHLTLQTTQXQQQQHPPPPSXXHLTIINXXTXQQQXQXXSNP

SEQ ID NO: 353374 - protein, 48 aa, Zea mays
  Clone ID: MRT4577_85451C.1.pep
AATSLGRWRSRLPPLPSRTLPSPFRPLLRHLFVSRLSVCKKSPLLRIL

SEQ ID NO: 353375 - protein, 123 aa, Zea mays
  Clone ID: MRT4577_85452C.1.pep
APNISTFNSLVFGYCRHGDLAGASRVLKAMLGRGISPTARTYNYFFTVFARNLSIDLGMNLYVKMVSNGYAPDRLTYHLLIKMLCEANRLELTLQMLQEMRNSGFEPDLATSTMLIHFLCRRH

SEQ ID NO: 353376 - protein, 139 aa, Zea mays
  Clone ID: MRT4577_85453C.1.pep
MVFSIKHRPWFVQGHVRSYLTAYTGLLTYCSTAVYFCQCITRTGSRRPQPKAHRDRRPESCAQRRYPRCMPPGPMSWRSSWTSNGNTSDSHPPQVPPPHAVHLISGSEHVLVLLGACRVPRALAAVGAVRPCVGVAEEG

SEQ ID NO: 353377 - protein, 135 aa, Zea mays
  unsure (1)..(135): unsure at all Xaa locations
  Clone ID: MRT4577_85454C.1.pep
MHIDQIILCNGCGVDKISQLPLSSKERDSAYRKQPPCTPQAFRSVHDHWAQRSDHGKTXQDHGHFITIYNEALMCAAKPLPVEGGPDSSPEXKNXKESPYPECPPLAGIPNLARMLAKKASATQNLYGSPRPSLK

SEQ ID NO: 353378 - protein, 36 aa, Zea mays
  unsure (1)..(36): unsure at all Xaa locations
  Clone ID: MRT4577_85455C.1.pep
YCSLSFPKFSVGIRYAAXLSXTNLFIRIELVSTNIS

SEQ ID NO: 353379 - protein, 64 aa, Zea mays
  Clone ID: MRT4577_85456C.1.pep
STSKWVVPLNLECVNTEDAQVILLLSLGRCKLRHIHTQANAGKATTHGHGRAAGGRGATGIRTG

SEQ ID NO: 353380 - protein, 113 aa, Zea mays
  unsure (1)..(113): unsure at all Xaa locations
  Clone ID: MRT4577_85457C.1.pep
KYARPSVSYVYIRKSRAFAQTLQQSRGFDREFRFXRTVGXTVGVSTPDPFASGGAAAADAVLYRWVSCGVGSGLGKTGLTSHRLKPRIILRPGRSHNNICFRTIGPLKKRRFF

SEQ ID NO: 353381 - protein, 76 aa, Zea mays
  Clone ID: MRT4577_85458C.1.pep
QPNLETPFSLGFSKVPLPGLPTPLRMRNPGLFFLSFPSRKQFPCEGYCFSLFRLLFSQATIWVKNFVCMFFGGLGP

SEQ ID NO: 353382 - protein, 156 aa, Zea mays
  unsure (1)..(156): unsure at all Xaa locations
  Clone ID: MRT4577_85459C.1.pep
ARQARSRGTTXDXTGTGAGGKGKKGAAGRKGGGPRKKXXXRAXKAXRGGGXGRXGRHXKKGRXAQXXGTGAPXXXAXXXRNXAXEGXEXAXKXARDNKKXRXXPRHXXXAXRNDEEXGKXXGGXTXXHGXGXPXXNXXXXPKKTAEKAXXGGSKEA

SEQ ID NO: 353383 - protein, 87 aa, Zea mays
  Clone ID: MRT4577_8545C.1.pep
MKSSTLLAILVLQALLVSAAVAKGPAGPKKQCWCGECTSWSGVWTCDDLLTKCAATCKNCVPVSTDKGATKYRCRDFLPENCGCKIH

SEQ ID NO: 353384 - protein, 255 aa, Zea mays
  unsure (1)..(255): unsure at all Xaa locations
  Clone ID: MRT4577_85460C.1.pep
IGYLEAGRASKSDAETSPPADKAPPEISSPECYSDLVSTRPARGGWVQPLVLYQNYWLTPGRLQHIIPVKELYKPRADDIVLVTYPKCGTTWLKALAFAITTRSRHAFAAHPLLARHPQELVPHLELPALAGDLADVEKLAAXPRLLATHLPLSLLPPDVSGYRVVYLCRHPKDAFVSWWFFANGMLRRGGRERRSPRAGGEAVQLRGAQRPGEKPNRRCRFWKRFSHWQVYVLQGRQGGGLGKPHDQRAGTEVG

SEQ ID NO: 353385 - protein, 76 aa, Zea mays
  Clone ID: MRT4577_85461C.1.pep
ISLTISDCITISMTIGNMNQVPMQHGMISCRKRKLQILCASVRDWKLLQAATVCSYFPGCFNVEKLPLFYGSEAIE

SEQ ID NO: 353386 - protein, 58 aa, Zea mays
  Clone ID: MRT4577_85462C.1.pep
VYQQRMWDRRLTRPQARADKPLQLCEAEMILKQSGTGFIAAICMQLTHVPGRVVGRVT

SEQ ID NO: 353387 - protein, 93 aa, Zea mays
  unsure (1)..(93): unsure at all Xaa locations
  Clone ID: MRT4577_85463C.1.pep
EFPARPTHPGDARTRGLDAVGRLSASCLTTTQLRQLLTTHPWHKSNPTNSLQLHNNNNXFLPSLEXHLAVVNTCXPTCNXQLLAFQPTCSWRT

SEQ ID NO: 353388 - protein, 40 aa, Zea mays
  Clone ID: MRT4577_85464C.1.pep
MPKKKKRKILKKKKDKKKKKKIKKKKKKKKKKKKKNAYHI

SEQ ID NO: 353389 - protein, 50 aa, Zea mays
  unsure (1)..(50): unsure at all Xaa locations
  Clone ID: MRT4577_85465C.1.pep
LCLTAAYQLTPSNIRRISMAQLIFFALSQCRIHHSVGLYHMFXLSSRSTS

SEQ ID NO: 353390 - protein, 75 aa, Zea mays
  Clone ID: MRT4577_85467C.1.pep
MIFFNWPFKFLALLVSDNSPLPLTPDYGPVVRYADGVFDPHFHRFVTIMEGEYTYSMYQINSSDLLTVIELIKKE

SEQ ID NO: 353391 - protein, 92 aa, Zea mays
  Clone ID: MRT4577_85468C.1.pep
SAVAGVAHSVATAAAPVAGLAGPYSGLEELGTALLVRVQAESSGGMAADAILYEVRVVLPRIQLELQRELDPQLQDIHDLVVQEKLDIYKKQ

SEQ ID NO: 353392 - protein, 129 aa, Zea mays
  Clone ID: MRT4577_85469C.1.pep
NFFYRQGVKKTNLAGQFLKRGKCNPRLNLGVFFGGRGKFGICQKPKKGGAQKQGFKKKRGGGGGGPLGNWRVFHQPVLKSQEIKQARFRGIIGLRPQRAQPLFFSFEKKGSPAKKLPEKTKGPPKFRFP

SEQ ID NO: 353393 - protein, 72 aa, Zea mays
  Clone ID: MRT4577_8546C.1.pep
LKQIAVMATANGDAKGTGATHGYSGTVPSRRSLRLTPDGTYMEPLLGGVTSARYLKTTYYGDDQLRGTMCMG

SEQ ID NO: 353394 - protein, 46 aa, Zea mays
  unsure (1)..(46): unsure at all Xaa locations
  Clone ID: MRT4577_85470C.1.pep
MDLALLEKAGLGLFAADVVVIGEAKLSGKRYXLPPGPVGAHVVVNC

SEQ ID NO: 353395 - protein, 87 aa, Zea mays
  Clone ID: MRT4577_85471C.1.pep
PFPFFLDLRTNGHFHLSWGFPLALLTLYQPTNPISNLVPKHSLTSRYDKALLHEPAVPVEKTTNATGRATRGTTTGATLQVHLESHL

SEQ ID NO: 353396 - protein, 104 aa, Zea mays
  Clone ID: MRT4577_85472C.1.pep
VKISIFQREEFYPRHETKFQTFNKKAQFFLFGGKCRKSQPRVTRNPILNKLANKSNGGQLGTTTDQADQGGCPGFTPVGGSTPWIFHKTTPGSPRGTGGAPQTS

SEQ ID NO: 353397 - protein, 75 aa, Zea mays
  Clone ID: MRT4577_85473C.1.pep
EKHANLTTQETAVHIVYIDHLHNTNTEEFNITTINHILFKKHLNRIAVLYHYNNAHSNILHDDDPISCHKILKSN

SEQ ID NO: 353398 - protein, 760 aa, Zea mays
  unsure (1)..(760): unsure at all Xaa locations
  Clone ID: MRT4577_85474C.1.pep
NTLILDILKKKPWTATSACQQDNLTFIDXQGGSLKSSLLILEKEYENAINTRGELDERMFANDEDSLLGSGSLSGGAINLPGTKRKYDVMASPAKSISSPNPMSPPRFCLSPKGNSFCNSKMAPSTPVSTAMTTAKWLRNTVSPLPSRPSGELLRFFSACDKDLTDDIAHRAGIILGAIFTSSSFGERICTSMRSASRMDAIWTEQRKMEALKLYYRVLESMCRAESQILSGNNLTSLLSNERFHRCMIACSAELVLATHKTVTMMFPAVLEKTGITAFDLSKVIEGFVRHEDTLPRELKRHLNSLEERLLESMSWEKGSSMYNSLIVARPVLSIEINRLGLLAEPMPSLDAIAAHHNISMGGLPPLPFQKQERLQSITLSATISIMPXHVPEVLKAXFFVSFTLFNHANKXEPXLVIVFPVDKDEIRSPKRACTERRHVPVDSNSFRSPVKDSIKLKLPPPLQSAFASPTRPNPAAGGETCAETGIAVFFSKISKLAAIRIRSLCERLQLSQQVLERVYSLVQQILSQQTGLFFNRHIDQIILCSIYGVAKISQLQLSFKEIVFAYRKQPQCKPQVFRSVYVHWPPTSHNGKTGEDHVDIITFYNEVFIPAVKPLLVEVGPGASPKRKEEGKVGPYPESPRLARFPNLPDMSPKKVSATHNVYVSPLRSSKMDTLLSPSPKSYYACVGESTYAFQSPSKDLKAINNRLNSGKKVSGRLNFDIVSDLVVASSLNGVQNAKPAATEVVPTKTPVKCEPSES

SEQ ID NO: 353399 - protein, 76 aa, Zea mays
  unsure (1)..(76): unsure at all Xaa locations
  Clone ID: MRT4577_85475C.1.pep
TKIADIPPDEYSWXKYGQKPIKGSPHPRGYYKCSSVRGCPARKHVERCVDDSAMLIVTYEGEHNHTRMPTTQSAQV

SEQ ID NO: 353400 - protein, 469 aa, Zea mays
  unsure (1)..(469): unsure at all Xaa locations
  Clone ID: MRT4577_85476C.1.pep
LALAFCSSPVSDFESKVLVLKVLKKCVKLPVLAHHLVKESGILLWLLSVISVRSEVSDGSESSCSRVTELALEVVNGLISSRLITDWLQETALEQLSTISSYLSVLINNAKLLKGNVHLLTSALSVITSTMRLSMKRKIYQPHFTLSLHGVFNLCQTIGGSSRSTEHKLVMELGIDAILMNGPIPILSEMVLCSSCTAFISQATKSHIFCIIVNVLSGQGLCEMLYVNLCFVSQDKSRISMVVSWATSSIFWLYSNQRSLLEISSSEPPRNESLLSKILRLLAASVILGKISSIFHGKSVDLAGNTSETLCSFLDNAYERAETAKSCSVNDTLAVIILHLQDHMPKNRFGLRSVIAALCLLLLDRSXASEQTPGQQPRXIEMLCSKIGCPAESNPAWRWHYYQPWKDSALQRTGMERLEEEQACRSLLVLFSSAFSACLSEFPVLSLDDVEKSGLFQWERDLMAKQSST

SEQ ID NO: 353401 - protein, 58 aa, Zea mays
  Clone ID: MRT4577_85477C.1.pep
VEDCLAIKSLSHWKRPDFSTSSRDNTGNSDRQALKALENRTRRLRQACSSSSRSIPVR

SEQ ID NO: 353402 - protein, 37 aa, Zea mays
  Clone ID: MRT4577_85478C.1.pep
ILSNRNRGYLTALPGPYMITVDWPKQRRHGLGKFICE

SEQ ID NO: 353403 - protein, 102 aa, Zea mays
  Clone ID: MRT4577_85479C.1.pep
SSLVFIFSCRSLSILCMYTLSLVRSSTVFTRPFLSLSRHRLAFRCPDSRGVQARGQVSKFGPLHHPPLLSRSLGLICLVCCLLCVSWVLALQFLSVWLFFSL

SEQ ID NO: 353404 - protein, 89 aa, Zea mays
  Clone ID: MRT4577_8547C.1.pep
MKSSTLLAILVLQALLVSAAVAKGPAGPTTKKQCWCGECTSWSGVWTCDDLLTKCAATCKNCVPVSTDKGTTKYRCRDFLPENCGCKIH

SEQ ID NO: 353405 - protein, 134 aa, Zea mays
  Clone ID: MRT4577_85480C.1.pep
RNKAPFFFSSPPGVFVVLFLEGIMRFFFPLCFVGGRVLGGRHSVFIPPRCVGSSFLWWRGVTSLFRLSFTGHCVVPSSRPLLRVGVSVSSLFCAVYNVLVWFSLCPVPLCFFLISRFVFPLSSNGGAFFVRGVG

SEQ ID NO: 353406 - protein, 111 aa, Zea mays
  Clone ID: MRT4577_85481C.1.pep
ELGVVPIVDVAGGLLMPAAAAALMEMLTRAEDIVRPDGARADGAGVHLSHRADAVAVTRQGRGPAGGEHLHREPAVAERTLHLHLDLHGANGRDTYVAPLPYGARLLRHCC

SEQ ID NO: 353407 - protein, 59 aa, Zea mays
  Clone ID: MRT4577_85482C.1.pep
ARSSDRSSLTALGSELEPVPCFDSVPGAMPACTFPDTPVVTLDLNSNLYLPWIMRRSYS

SEQ ID NO: 353408 - protein, 193 aa, Zea mays
  unsure (1)..(193): unsure at all Xaa locations
  Clone ID: MRT4577_85483C.1.pep
MFPWGGFGSEQRSAGEQRRCVLRSWARPLVAQPQADANTTRYLGVRRRSWDRYAAEIRDPATKXHDRVARSLRGSHARTNFAYPDLPPGSSVTPYLSPDLTSGDNATQLLQPFYAVDPAAASLPPALPAANGAAGYGYGVEDMSALMDDLTIPDDLTADYGAEDTGGLEAGSGAATDRGRGRRARETRGRDSG

SEQ ID NO: 353409 - protein, 66 aa, Zea mays
  Clone ID: MRT4577_85484C.1.pep
SHASFLSCACLRKGIFCFRPRSSYSAFALLPRLSPPRILASIHHVIIVRVAPLALYHQHDPVSSIL

SEQ ID NO: 353410 - protein, 207 aa, Zea mays
  unsure (1)..(207): unsure at all Xaa locations
  Clone ID: MRT4577_85485C.1.pep
KVSPVRSILLVHSVLSISVCLRSSKNIYAAAGSCQTWSTRCRRWPRSPRARPPTTTCTSPRPAXSGGGGGGGGGPPSVRFKILCSFGGRIMPRPSDGALKYIGGDTRVLAVPRSXPLPRFEEEGGGDVQDGCGXAIKYQLLSSDDLDVLVSVTCDEDLAHMLDEYDRFEAKRSPSASPRFRVYVFVPHQVSASSGVGGPVSSSRHVS

SEQ ID NO: 353411 - protein, 50 aa, Zea mays
  Clone ID: MRT4577_85486C.1.pep
PFCFKRGPFVVIIWGLLLGGPFGAQIEQGGRLFTGLGDIKTTLTRLGFLK

SEQ ID NO: 353412 - protein, 72 aa, Zea mays
  unsure (1)..(72): unsure at all Xaa locations
  Clone ID: MRT4577_85487C.1.pep
EAKDSDGRPDEEVADEYWGNHLARNDSIIVDICQVSFEXGQYKSTLVCPICKKVSVTFDPFMYLSLPLPSTT

SEQ ID NO: 353413 - protein, 94 aa, Zea mays
  Clone ID: MRT4577_85488C.1.pep
RSSWYLESQVPGEEQVVQEEPHRGVRFDLGGVSQLTFLRQGRSLVGFIFILYFVSLPLCNKYSDYIMTFISIHSFIIYGAFFGGKKKKKRSLGP

SEQ ID NO: 353414 - protein, 154 aa, Zea mays
  Clone ID: MRT4577_85489C.1.pep
VMQIAEGDEVTGSRPRVPDSRLLCSSDTVTRSHGDGQPRGTAPAGRPVRRSPVQPQAVRQAYRSACSRIDLNTHHTHTAPQSHSRSRSHRHERNSPRLAGGRSRHGRRRRSARLAGPPPARIFSTSAGAHGRPGPRGHSSRTPRASGQETRYID

SEQ ID NO: 353415 - protein, 59 aa, Zea mays
  Clone ID: MRT4577_8548C.1.pep
AFCKPIVSGVRQALQISNTACVLNSSKKQDSHTNGDILIYAKRRLELNDTWDMSHGRRC

SEQ ID NO: 353416 - protein, 90 aa, Zea mays
  Clone ID: MRT4577_85490C.1.pep
WRLHWQPWPGPSDPHLFSKCKETHRYQVHGESSRDGNPDQWLVPWTHDQLLLNINLSGQHDEDTCHALLVTCNGMHYKKNSAMDEMPGTQ

SEQ ID NO: 353417 - protein, 105 aa, Zea mays
  Clone ID: MRT4577_85491C.1.pep
SDTKKSRPPEAFRPSTKSFRYYHGSKIGYKSMFGRVFVIINRSIMVFTPFISVSSCLCWRAKINSGRPGFIQPMDPTLRYYSIENEPKKMLPFPKKKKNGRLGPP

SEQ ID NO: 353418 - protein, 44 aa, Zea mays
  Clone ID: MRT4577_85492C.1.pep
GPRRSGKKKKKKKKKKKKKKKKKKKKKKKKKKKKNLFFIWWGAV

SEQ ID NO: 353419 - protein, 447 aa, Zea mays
  unsure (1)..(447): unsure at all Xaa locations
  Clone ID: MRT4577_85493C.1.pep
RILAHLRDMDNEVKSFLLLNMYLQVAWCLHAIDGENPSETCIDELLSKQSSLFDQLYYYLVVLPTYQKEGRSTTVLSCRVCIITAEMWCLFKKSKYSSTRLESLGYFPQPDMVQKFWKLCEQQLNISDETEDEDANEEHIEDTNRDAVMIAAAKLVLADTVSKDYLGPEIVSHYVSHGASTTEIIKHLITSLKKNANFDMGTLFFEALKRAYERYMAHVHDGENQILTGKSYSECQDLASRLAGSYVGAARIKNKSDILKIIRDGGXFAFGELPNQLLFLEAALLPFVSKLQASDIPDILADVEKRIQHINTTGDQSVWRPFFMFVEHLRDKHAKNEVLHEEEEKPVRKRGRPRKVREVPDVPDLRGARHVRGKKLFRDDGHNSSGEESIGASDHQDHGEDDDSNGDADQPLINTIRSSAAKLRSLKISQQGPSSQKGVPGPSGSNS

SEQ ID NO: 353420 - protein, 99 aa, Zea mays
  Clone ID: MRT4577_85494C.1.pep
FNLQITLKAQNFFKPRNSRPGPERVPSFPLMRRFKAWRHHGQNCFPGKNFIRSKFHTKYHPETKKEKPGGPNEGANPHLLGWPHLPVSNRENLPAPFFN

SEQ ID NO: 353421 - protein, 115 aa, Zea mays
  Clone ID: MRT4577_85495C.1.pep
SCMSVVPGHRGVIPQGTRRRGTPGRASPRSTCRSSSQGTPTERRRRSYRRGGRRCTPTTRSPRKPRRLPACTSSLIPLATFGAGTCARRLAALQESLVGALILRSALIVCMVRSV

SEQ ID NO: 353422 - protein, 75 aa, Zea mays
  Clone ID: MRT4577_85496C.1.pep
LIFTTNRCNQIPIVPRSGHSSYLFTKLIANVILGNHNVFILRNHNVVNTHRSSVANYGDTPSFSQTFGDAVRPSR

SEQ ID NO: 353423 - protein, 90 aa, Zea mays
  unsure (1)..(90): unsure at all Xaa locations
  Clone ID: MRT4577_85497C.1.pep
KDRGWNDPPQFSYGLQTQTGGTKRTPRTRMVADPQVVFXELPETSGATXVDHPHPSSRASRPAPMGSCPASGVDXPRSRVXESETRIEEC

SEQ ID NO: 353424 - protein, 300 aa, Zea mays
  Clone ID: MRT4577_85498C.1.pep
MGSGNLIVKKVVKHSSFDLDIQLDKSWMEDVTCPICLDYPHNAVLLRCTSYEKGCRPFVCDTDQTRSNCLERFKSAYELPSNAKVSSFAMPPLDSIIHIVPSNANNRPSCPLCRGDVIGWIVIGEARRHLNQKKRCCEEDCCSFVGNFNELQKHTQQKHPDSRPSEIDPARQVDWENFQQSSDIVDVLSTIHAQVPNGIVLGDYVIEYGDDDTGEDYEVFRGVRTHWWSCICRRARERRGSGRRIGNQANLENFNIEVPAQSVELREIRFDEIDDEYIVTGAIPSMATPGRMASFHYRDA

SEQ ID NO: 353425 - protein, 90 aa, Zea mays
  unsure (1)..(90): unsure at all Xaa locations
  Clone ID: MRT4577_85499C.1.pep
SGLPAFRFISAASQRGSTHHSRFCXPLYGQGVVDHEADCESRRQRVGGSGRTRAVQRHVRRPMKTLRRSLAVVGCGVVHPCSXEDPXPAG

SEQ ID NO: 353426 - protein, 585 aa, Zea mays
  Clone ID: MRT4577_8549C.1.pep
WILQPQFSGRKSRHLYLVAPLSVETATSSVTWHRRLGHPGRDVMSKLSSSTSGSGCRGSFEHLYHACQLGRHVRLPFPTSSRAAGTFDLIHCDVWTSPVISISGSKYYLLILDDFSHYLWTFPLRQKSDTFPTLSHFFACVSTQFGRTIRSIQCDNGREFYNNVSRDFFLSRGVHLRMSCPYTSPQNGRAERMIRTTNDVVRSLLFQASLPTHYWAEALATATYLLNHLPTKAIAHPTPYFALFGIHPSYNHLRVFGCACYPNLASTAPHKLAPRSTRFVFLGYSPDHKGYRCLQQEFAMKDLGALHHFLGVTVERRPQGLFLHQRQYTVDILERAGMADCKTCATPVDTQGKLSAAGPLVVDPTGYRSIAGALQYLIFTRPDIAYAVQQVCLHMHDPREPHLTAMKRILRYLRGTLDFGLLLRRSSATKLRVYTDVDWAGCPDTRRSTSGYDVFLGNSLVSWLSKHQPVVSRSSAEAEYRAVANGVAEAAWLCQLLHELHSPLATSTLVFCDNVSAVYLSTNPVQHQRTKHVEIDLHFVRKRVACGAVRVLHVPTTSQFADVFTKGLPSVVFTEFRSSLNICSG

SEQ ID NO: 353427 - protein, 98 aa, Zea mays
  unsure (1)..(98): unsure at all Xaa locations
  Clone ID: MRT4577_854C.1.pep
QNCSCQICSYHLFRPCITTILHLILRLSQISLTSCSVVVKKISRFGTDTKSSKAFDLSTAVNPSIPFKFSLTLANRKLILLPLMFFKSFKCFCILGSX

SEQ ID NO: 353428 - protein, 68 aa, Zea mays
  unsure (1)..(68): unsure at all Xaa locations
  Clone ID: MRT4577_85500C.1.pep
YRKRTVESAYRTVNRILTMDGLIEDIKHRRYYEKPCRQRQRXSYERCRRIYNMEMARMINFXMRKNRA

SEQ ID NO: 353429 - protein, 317 aa, Zea mays
  Clone ID: MRT4577_85501C.1.pep
MGSGNLIVKKVVKHSSFDLDIQLDKSWMEDVTCPICLDYPHNAVLLRCTSYEKGCRPFVCDTDQTRSNCLERFKSAYELPSNVKVSSLAVPPLDSIIHIVPSNANNRPSCPLCRGDVIGWVVIGEARLHLNQKKRCCEEDCCSFVGNFNELQKHTQQKHPDSRPSEIDPARQVDWENFQQSSDIVDVLSTIHAQVPNGIVLGDYVIEYGDDDTGEDYEVFRRVRTNWWSCIFCRAFSRSSRSRRRSRARERIGSGRRNGNQVNLENFNLVVPTQPVELREIRFDEIDDEYIVTGAIPSIAAPGRMASFHYRDTRYGR

SEQ ID NO: 353430 - protein, 315 aa, Zea mays
  Clone ID: MRT4577_85502C.1.pep
MGSGNLIVKKVVKHSSFDLDIQLDKSWMEDVTCPICLDYPHNAVLLRCTSYEKGCRPFVCDTDQTRSNCLERFKSAYELPSNAKVSSFAMPPLDSIIHIVPSNANNRPSCPLCRGDVIGWVVIGEARQHLNQKKRCCEEDCCSFVGNFNELQKHTQQKHPDSRPSEIDPARQVDWENFQQSSDIVDVLSTIHAQVPNGIVLGDYVIEYGDDDNGEDYEVFRGVRTHWWSCIFCKAFSRSSRSRRRARERRGSGRRIGNQANLENFNIEVPAQSVELREIRFDEIDDEYIVTGAIPSMATPGRMASFHYRDTRYGR

SEQ ID NO: 353431 - protein, 93 aa, Zea mays
  Clone ID: MRT4577_85503C.1.pep
EEGIGQSRTILLQHFSDLRTRFEVNGQINLCGFSPGNMHLLLLLLLQGMISVSKLYSDLEKRALLSKVRGVKLFEEREQDYFRIGKGDGLALL

SEQ ID NO: 353432 - protein, 44 aa, Zea mays
  Clone ID: MRT4577_85504C.1.pep
LFSFHYERIIKTILSRLNFFGFNYFLLLITCPIHFCSFPVLLGQ

SEQ ID NO: 353433 - protein, 88 aa, Zea mays
  Clone ID: MRT4577_85505C.1.pep
LYLGGTYSWVFLVGWPRFVSLDPFEGPPLFFFFFFFFIFWGVFFFFFFFFLSKSEWHTFFKSSCPDHTLSSCNTTSIHTIDYVATFIR

SEQ ID NO: 353434 - protein, 78 aa, Zea mays
  Clone ID: MRT4577_85506C.1.pep
ASECVLRVLPINELCHQWGQGTHCPLAYLLVLLLTDPQLVFVPRLVWTDDLLPLVVPVAQVANALMDLDIARKVLKRK

SEQ ID NO: 353435 - protein, 341 aa, Zea mays
  Clone ID: MRT4577_85507C.1.pep
MAIGVPSMELHRSSPLLSGGRGGNTCLQKKPFFVQAKRLVGMEKASTRPGTQESGQTKKRAPLVRGTVSPPLPVPGNIPRPPYVGTEYVPEIAKEIQMHDKEGIVHMRAACELAARVLDYAGTLVKPSVTTDEIDKAVHKMIIDAGAYPSPLGYGGFPKSVCTSVNECMCHGIPDSRELQDGDIINIDVTVYLNGYHGDTSKTFLCGEVDEASKRLVKVTEECLLRGISTCKHGTSFKKIGRRISEHAERNGFGVVECFVGHGVGRVFHSEPIIYHQRNNRPGQMIEGQTFTIEPIISMGSIECDMWDDGWTAVTTDGSLAAQFEHTILITRTGAEILTKC

SEQ ID NO: 353436 - protein, 128 aa, Zea mays
  unsure (1)..(128): unsure at all Xaa locations
  Clone ID: MRT4577_85508C.1.pep
MAEEVAGGGGGAVGAPSSSPRRVVVAVDESEESMHALSWCLSNVVSAGKAXWRHPPSVVLVHARSPRPLYYPTIDGTGTGYVMTQQVVDCMEQYMASAADTVVTKAKTICTAFPDVGVETCVEKGDPA

SEQ ID NO: 353437 - protein, 151 aa, Zea mays
  Clone ID: MRT4577_85509C.1.pep
MSGRKKTREPKEENVTLGPAVREGEHVFGVAHIFASFNDTFIHVTDLSGRETLVRITGGMKVKADRDESSPYAAMLASQDVAVRCKELGITALHIKLRATGGNKTKTPGPGAQAALRALARSGMKIGRIEDVTPVPTDSTRRKGGRRGRRL

SEQ ID NO: 353438 - protein, 84 aa, Zea mays
  unsure (1)..(84): unsure at all Xaa locations
  Clone ID: MRT4577_8550C.1.pep
LPNKLKPLMHPQWRNFTNSFQGGTSITNTRYFSSKTFYRYQTNSTHIFYGGTGTWGLSLKVXEAQVPQGKRSNIFTVFGQRHCL

SEQ ID NO: 353439 - protein, 66 aa, Zea mays
  unsure (1)..(66): unsure at all Xaa locations
  Clone ID: MRT4577_85510C.1.pep
MPSDAVQPSDAXLLQAQSDIXRITLSYLTPLSLKCAVVLGIPRAIYRHGGAASAAELITALSLHSA

SEQ ID NO: 353440 - protein, 89 aa, Zea mays
  Clone ID: MRT4577_85511C.1.pep
PGRSVFVVGFTRPKLGGRLKPRPGWKKHRWVDRLTNQQKRNQNQWTTSRCLIQKASPLPPEEPRGGACLGRPASNRGGTTTCSSFKRPS

SEQ ID NO: 353441 - protein, 44 aa, Zea mays
  Clone ID: MRT4577_85512C.1.pep
MGKNQPPSFPGISDRLCSNEWVKEDGGWAPGFCPLRYCRGQKAC

SEQ ID NO: 353442 - protein, 87 aa, Zea mays
  Clone ID: MRT4577_85514C.1.pep
NSGLTIAREEAIRTGWGALPDANCAALLSCCTLGGSPDECRQCLALVFCLPSHVFQLTWIHMATPRIRSVSVGTLATLARWKVIYLL

SEQ ID NO: 353443 - protein, 64 aa, Zea mays
  Clone ID: MRT4577_85515C.1.pep
NSLVDELYVGGRPGSTCGGTFRLSVVVDTDDGAVRGPSHADDHVCETLGVREYALTLTACLPAL

SEQ ID NO: 353444 - protein, 61 aa, Zea mays
  Clone ID: MRT4577_85516C.1.pep
DRVGLCGRGGTVGLGRLLGRSLCRRRDVLRGGARLFLWRWRSLLPLYNTPRCCARSRSLSS

SEQ ID NO: 353445 - protein, 148 aa, Zea mays
  Clone ID: MRT4577_85517C.1.pep
GRQSKRPPLQHARVTEQCRCRSSKKTCFITASNELVRVLANPTGVLNPSAASLLAPRCVCAPSWKLAEASLRVATRGWVLAAAQATTVLASDDAAVAAVSRCSRVFQAEERSAAASAEARQCPSYWTRVGHVSVSWARPLEKYKGEQL

SEQ ID NO: 353446 - protein, 51 aa, Zea mays
  Clone ID: MRT4577_85518C.1.pep
KKFGCSRGTQFTHSKQIKNSVAVGVHSLHILNKKIFNCTGGCFSNVSVHNK

SEQ ID NO: 353447 - protein, 143 aa, Zea mays
  Clone ID: MRT4577_85519C.1.pep
PGGQDPCVCIPAPRGSPKSFLVDFRVLVGAPSPWGVFFFFKILRLPFGCPPPPPCCPLVGLHPTPLPIFFSGKGSFVFKTLQILGPSRLQSPAFFSLFKSVSGGVGFELFCGPPSPTFWAHFGCFGACLTSCPPFVGGFFSVP

SEQ ID NO: 353448 - protein, 188 aa, Zea mays
  Clone ID: MRT4577_8551C.1.pep
MASTSSSSPQPPPAAAAASPGAASSPEDRRAGGGRGGPPPVPPYVKAAAGSLGGVMEACCLQPIDVVKTRLQLDRTGAYRGIAHCGATVARAEGVRALWKGLTPFATHLTLKYALRLGSNAVLQSAFKDPTTGKVSAHGRLASGFGAGVIEALLIVTPFEARLNISLFLSRSLTILPWLRCCASYSLH

SEQ ID NO: 353449 - protein, 166 aa, Zea mays
  Clone ID: MRT4577_85520C.1.pep
MEGCDRIRGPWSPEEDGALRRLVELHGARNWTAIGRGVPGRSGKSCRLRWCNQLSPGVERRPFTAEEDTVIARAHVRIGNRWAAIARLLRGRTDNAVKNHWNCSLKRRLGDLGADGVTEGDLDERPCKRASVTPESTSGSGSGSGSGSDRSDLSHGAFGLGQVYRP

SEQ ID NO: 353450 - protein, 134 aa, Zea mays
  Clone ID: MRT4577_85521C.1.pep
KKKKKKKKKKKKKKKKKKKKKKKGKKKKKKKKKKGLSLGRNPLWGDFCKFPSPWGPFGLAFRGPISPFGGSFYISGAAVFHRGDGENLGVPHFIRFAAFPLLASWGNTKRARPFRLSQNLPSLMGNGPPLVWGL

SEQ ID NO: 353451 - protein, 352 aa, Zea mays
  unsure (1)..(352): unsure at all Xaa locations
  Clone ID: MRT4577_85522C.1.pep
MDPAGASPAPAPAVEEPVSATSIFDTLGAEVLAVMSPVSICMALVVLLISLLSPPSSGSASSSPPPVTAATLVYLESPNDSPGQKLLGALLDAAVFVALVAAVTFVLVALYYFRCTGFLKNYMRFSAFFVIFSMGGAIVAAVLRRLAVPLDAPTALLLLFNGAAVGVLSVFASAVPILVRQGYMVALAVIVAAWLSRLPEWTTWIMLVALALYDLVAVLAPRGPLRMLVELASSRDDELPALVYESRPTVGPVTSSSSYASAMGSVEMQTMADSGQIGSSQYEQEEDASPAFVQMRDLVRVRSSIGEMKRSRGSVLQMGDLEREVPVISAELTANQGGXSSQHAIIQIEHPD

SEQ ID NO: 353452 - protein, 65 aa, Zea mays
  unsure (1)..(65): unsure at all Xaa locations
  Clone ID: MRT4577_85523C.1.pep
FGVTSVVKTLNRGVWNRRIPTIFFVTLDMIFKKMVYAHNFTVNEELLAVDIKKKKNPKCXFFGIC

SEQ ID NO: 353453 - protein, 78 aa, Zea mays
  Clone ID: MRT4577_85524C.1.pep
GRSERHACFSFLGLQSWFKICVAIKTLLCHLSHEILYARLRQGLYHLEFFRNQEYSLPLFQIIRHFSFSRYFFYFIFS

SEQ ID NO: 353454 - protein, 125 aa, Zea mays
  unsure (1)..(125): unsure at all Xaa locations
  Clone ID: MRT4577_85525C.1.pep
QTGTGKTFTMEGTESNRGVNYRTLEELFNIAEERKESVTYDLSVSVLEVYNEQIRDLLATSPSKKLEIKPNSEGQNHVPGLVEAKIENINEVWKVLQTGSNARAGGSNNGNEHXXXRSHCMLCIT

SEQ ID NO: 353455 - protein, 168 aa, Zea mays
  Clone ID: MRT4577_85526C.1.pep
MASSWMAAPRPLLLSLLVAMLAVAADLCPPKDKWCKPPQEHFDLSMPAFLQIAQEKAGIVPISYRRVACAKQGGIRYTITGNKYFNMVTITNVGGAGDIAAVSVKGSKRVKWTEMKRNWGQVWQTEEDLTCESLTFRVMTSDHRKATSWHVLPADWKFGVTYQASKNF

SEQ ID NO: 353456 - protein, 274 aa, Zea mays
  Clone ID: MRT4577_85527C.1.pep
MASSWMAAPRPLLLPLLVAMLAVAADVANAGHAKPLTPGGRVVHDNHGKFTAGPWKPAHATFYGGRDGSGTTAGACGYKDTRAQGYGVQTVAVSTVLFGDGAACGGCYEVRCVDSPSGCKPDVAALVVTATDLCPPKDKWCKPPQEHFDLSMPAFLQIAQEKAGIVPISYRRVACAKQGGIRYTITGNKYFNMVTITNVGGAGDIAAVSVKGSKRVKWTEMKRNWGQVWQTGEDLTCESLTFRVMTSDHRKATSWHVLPAGWKFGVTYQASKNF

SEQ ID NO: 353457 - protein, 274 aa, Zea mays
  Clone ID: MRT4577_85528C.1.pep
MAGSWMAVPQPLLLSLLVAVLAVAADVANAGHAKPLTPGGRVVHDNHGKFTAGPWKPAHATFYGGRDGSGTTAGACGYKDTRTQGYGVQTVAVSTVLFGDGAACGGCYEVRCVDSPSGCKPDAAALVVTVTDLCPPKDQWCKPPREHFDLSMPAFLQIAQEKAGIVPISYRRVACAKQGGIRYTITGNKYFNMVTITNVGGAGDIAAVSVKGSKRVKWTEMKRNWGQVWQTGEDLTCESLTFRVMTSDHRKATSWHVLPADWKFGVTYQASKNF

SEQ ID NO: 353458 - protein, 57 aa, Zea mays
  Clone ID: MRT4577_85529C.1.pep
MTDIDGAQDVTMDASDHKVTVTVTEDAYTLMTGLYRSGMRGVPCEIHAPHKNKQPAP

SEQ ID NO: 353459 - protein, 129 aa, Zea mays
  Clone ID: MRT4577_8552C.1.pep
WIPIFFDCIRIVRWFCLNHISVGTYVGRPRGDDWFQKQTRNTLDVACPPWMDWFHGGLQFHVEHHLFPRLPRCHLRRVAPLVRDLCRKHGLPFERCGFWEANVRTLRSLRDAAMQARAVTAGSSDPGPR

SEQ ID NO: 353460 - protein, 300 aa, Zea mays
  Clone ID: MRT4577_85530C.1.pep
MIETRLVRGWLRPGRDRTIMAGSWMAAPQPLLLSLLVAVLAVAADVANAGHAKPLTPGGRVVHHNHGKFTAGPWKPAHATFYGGRDGSGTTAGACGYKDTRAQGYGVQTVAVSTVLFGDGAACGGCYEVRCVDSPSGCKPSAAALVVTATDLCPPNDQQSADSGGWCNPPREHFDLSMPAFLQIAQEKAGIVPISYRRVACTKQGGIRYTITGNKYFNMVTITNVGGAGDIAAVSVKGSKRVKWTEMKRNWGQVWQTGEDLTCESLTFRVMTSDHRKATSWHVLPADWKFGVTYQASKNF

SEQ ID NO: 353461 - protein, 257 aa, Zea mays
  Clone ID: MRT4577_85531C.1.pep
NDIGDEGAKCLSDILVENVGIQKLLLNSINIGDEGAKALSNMLKKNNSIRILQFSNNAIEYSGFASIAEALLENNTIRSLYLNGNYGGPLGACSLAQGILGNKSLREIHLHGNGIGNEGIRELMSALSAHKGKITVVDIGNNNISPEGLHPVAEFLKRTKSLQWFSLYMNDISDEGAGKVAEALKDNKTISTIDLGGNNIHSKAVSAIAETLKDNAVLTTLDLSYNPIGSDGVKALCDVLKFHGKIQTLKLGWCQIG

SEQ ID NO: 353462 - protein, 52 aa, Zea mays
  unsure (1)..(52): unsure at all Xaa locations
  Clone ID: MRT4577_85532C.1.pep
LDSCEVWCWVQMQCVCAPXPYGQLCPQGRMRIATEVLKSKPKSSHWHTGIDR

SEQ ID NO: 353463 - protein, 98 aa, Zea mays
  Clone ID: MRT4577_85533C.1.pep
YVAAAAAAWPPPPSPLPSPPPPPSRTSYPSPAATRSVPFLSRTLPPASALLLRTGSGGLDPDDEGDFLNLSRVSIVAPCRRATARRCRSSRGSSRSSP

SEQ ID NO: 353464 - protein, 72 aa, Zea mays
  Clone ID: MRT4577_85534C.1.pep
GSLPSNNSSSSRHGRQQQEAPAVPPHAAAGALHRRDAHPLAVSANINLYLPLALQLLLTCGKTPPPGYTCTV

SEQ ID NO: 353465 - protein, 151 aa, Zea mays
  unsure (1)..(151): unsure at all Xaa locations
  Clone ID: MRT4577_85535C.1.pep
NPCGVSFRVSSPVRYAPCVKGILSRGNLSGVXGIKTKVVVWVKVARVTFKSSKFAKFFFFPGVKKLGPKDVFGVPCEPFFVGGFWAHPTPFGLPGSLLLGGFFLWGLFGVPCDRRFLCCFLGALSKFWKHGVLFPPPKNNPGLFFAVGGPS

SEQ ID NO: 353466 - protein, 116 aa, Zea mays
  Clone ID: MRT4577_85536C.1.pep
MEASSKKLQAFILTLLLVLSTAVTPILSLSVPDDEVACDCDKPKTKPSHPSPSPKPKNPKPPKGSTGYPAPGHQPPVCLCTTIKLRLLNINLYLPLALQLLLTCGKTPPPGYTCTV

SEQ ID NO: 353467 - protein, 182 aa, Zea mays
  unsure (1)..(182): unsure at all Xaa locations
  Clone ID: MRT4577_85537C.1.pep
RPGKAAPPDDASQRAASFLLVGAAVVGLVAARQLVRFFLLVVVLQERARPGGRVYNARLVEDNDAVDVVGSVIIGILDNPLVVVVRQLVLPLLNEGDRCSLFYXDGRTVENSMVKRINLVLNKILLHDTTILQYLHDDAEKISLLEDINKLMRIFHEASSYDDKMILYWHFANLQLFYDGCR

SEQ ID NO: 353468 - protein, 232 aa, Zea mays
  unsure (1)..(232): unsure at all Xaa locations
  Clone ID: MRT4577_85538C.1.pep
MEGSSKKLQPFLLTLLLVLSTAVTPILSLSVPDDEVACDCDKPKAPKPSHPPKTKPSHPSPKPKNPKPPKGGTGYPAPGHQPPKSPSYPPVVGPPKGPVTRPPVTRPPVVGPPKGPVTRPPVTRPPVVGPPVTYPPITGPPTTPPVVGPPVTYPPITGPPATTPAVTGPPVTYPPGGGGGSSTPCPPPPRPKPTPVXPTCSADSLKLRACVDLLGRLMRIXLCDHVVNKCCP

SEQ ID NO: 353469 - protein, 132 aa, Zea mays
  Clone ID: MRT4577_85539C.1.pep
PATATNPRRPRPSPPTRRRRRSPRTPSHPGAAPGTQRRGTNRPRAPPTPRSSALPRAPSRARQARVRRSSGLPRVRPRVRPRVRGLVELEAAVCLCATIKLRLLNINLYLPLALQLLLTCGKTPPPGYTCTV

SEQ ID NO: 353470 - protein, 168 aa, Zea mays
  unsure (1)..(168): unsure at all Xaa locations
  Clone ID: MRT4577_8553C.1.pep
MGMPHSSSLHHFLRHVSFPPDPHLLPTVFKSCPTLPLARALHAVAEVSGLARDPFVASSLLHAYLRLGTTGNARALFDGMPRPQRTVVGWSALVAAHAARGDAEGAWRLLEEMRRDGGVEPNVITWNGLVSGXNRSGRXPDAVVALATMHGEGLLRPDATGVSCALSA

SEQ ID NO: 353471 - protein, 194 aa, Zea mays
  unsure (1)..(194): unsure at all Xaa locations
  Clone ID: MRT4577_85540C.1.pep
MEGSSKKLQPFLLTLLLVLSTAVTPILSLSVPDDEVACDCDKPKAPKPSHPPKXPSPPTRRRSPRTPSHPRAAPXPGARAPTAQEPLLXPPVVGPPKGPVTRPPVTRPPVVGPPKGPVTRPPVTXPPVVGPPVTYPPITGPPTTPXPVVGPPVTYPPITGPPTXXPPVVXPPVTYPPITGPPATTPPVTGPPVT

SEQ ID NO: 353472 - protein, 110 aa, Zea mays
  Clone ID: MRT4577_85541C.1.pep
MAELTRTLPASWYRSPPLYQLERRAVFLKSWYLIGPVVRFLNVDEKVSYEIAQQQIYAVRISATTEFPGNDELKVFEASTGNQLPSHVTPTGLLFAALSSSAPSFHEFFP

SEQ ID NO: 353473 - protein, 302 aa, Zea mays
  Clone ID: MRT4577_85542C.1.pep
MEASSKKLQAFILTLLLVLSTAVTPILSLSVPDDEVACDCDKPKAPKPSHPPKTKPSHPSPSPKPKNPKPPKGSTGYPAPGHQPPKSPSYPPVVGPPKGPVTRPPVMRPPVVGPPKGPVTRPPVTRPPVVGPPVTYPPITGPPTTPPVVGPPVTYPPITGPPTTPPVVGPPVTYPPITGPPATTPPVTGPPVTYPPGGGGGSSTPCPPPPSPTPTPSSPTCPADSLKLGACVDLLGGLVHIGLGDPVVNKCCPVLEGWWSSAVCLCTTIKLRLLNINLYLPLALQLLLTCGKTPPPGYTCTV

SEQ ID NO: 353474 - protein, 108 aa, Zea mays
  Clone ID: MRT4577_85543C.1.pep
PDYNELTSAIPGGLCAEGKFLYLAAINNKLSGSIPAGLVNCTTLKTLALDNNQLSGAIPGGLCAGGNLRYFTANNNKLSVSILASLVNCTTLQTLALANNQLSGDLSC

SEQ ID NO: 353475 - protein, 125 aa, Zea mays
  Clone ID: MRT4577_85544C.1.pep
DAWDAVAVCDSSATANHLYMTVDGTEFLKTENVFDLQFIPDSREFKHPARDADTEAPPSYKEPDFETRALQHSRVKLTWDDDEPERKKVLKLKFNDDQLDELNMYLTSDDSASDNESVDDSEDES

SEQ ID NO: 353476 - protein, 109 aa, Zea mays
  Clone ID: MRT4577_85545C.1.pep
QVHLLRTMLQWEEQVPRGTSLTEKNLGASTCTKPILREVAIIFWPNGRIIRMGTGSTAADAARRMGVEVKLLWANGQLVLPQIELKVGDIVEVRIQMQAPVSSKQSLSF

SEQ ID NO: 353477 - protein, 100 aa, Zea mays
  Clone ID: MRT4577_85546C.1.pep
QRPHKGTPKEPTSQATGPGAPRPLGEHHQARPRVLSYQPAHAAPDHCVPHPRTCRDPHPHRTPKFVTSPQRNGPGSSVLTIPSIRGSGLYVNGPRPFAAV

SEQ ID NO: 353478 - protein, 61 aa, Zea mays
  Clone ID: MRT4577_85547C.1.pep
GGDDFLIKTCIACSTTHCEVTKEEKVIAYKVFKDPDNRQIFLSACNDDREAALTCVRDEMA

SEQ ID NO: 353479 - protein, 57 aa, Zea mays
  Clone ID: MRT4577_85548C.1.pep
WNSIQISKGNDIALLKLANPVALTDKIQLACLPPAGTILPNNYPCYVTGWGRLQTNG

SEQ ID NO: 353480 - protein, 111 aa, Zea mays
  Clone ID: MRT4577_85549C.1.pep
AALRRAASQDVHHVILNNHVRTCVLTASASRQTESISRSHLQAGYERHCLPVQVPVDPYRGPGGQQPREAVRGQARQRIWVRNPRAVRAGGAFVGTARASIRGVRRGRTRL

SEQ ID NO: 353481 - protein, 73 aa, Zea mays
  Clone ID: MRT4577_8554C.1.pep
RIIWCKKTYCFFFNRFLLFGRKKHVVFIRCWKIGGTLDSKQACFCRFDMVCFIQLVNICCFVSSLEVHLFNFL

SEQ ID NO: 353482 - protein, 138 aa, Zea mays
  Clone ID: MRT4577_85550C.1.pep
LLFFRGSLAYIFTENQAVAAAVADLSPLLVFSILLNSVQPVLSGVAVGAGWQGVVAYVNVTSYYLIGIPLGAVLGYVVGLHVKGIWIGMLLGTLVQTIVLLFITVKTDWDKQVVVAQERLKKWYMEENRRMQASRGNP

SEQ ID NO: 353483 - protein, 216 aa, Zea mays
  unsure (1)..(216): unsure at all Xaa locations
  Clone ID: MRT4577_85551C.1.pep
AGHGRKRRSREEVPDGDGERGCRRREALQSTIGCPFGEGCRFLHFVPGGYPAVAKMLNLGSPAVSAPSRTHVDHAALTGASHSASSGKTRMCTKYNTTEGCGFGDKCHFAHSERELGKPAYMPYGEPPMGGRFGGRPEPVQPAAMGPPAGNFGASATAKISVDASLAGGIIGKGGVNTKQISRVTGVKLCIRDHESSPNLKNIELEGNXDQIKQAR

SEQ ID NO: 353484 - protein, 81 aa, Zea mays
  Clone ID: MRT4577_85552C.1.pep
RAWHKALRPAIIQDRTSSALPHQHQPARGDLEVYGRLLMTPAELLLLEVKLLSTEETADGATKILLLRHSPTMSPSISGRH

SEQ ID NO: 353485 - protein, 323 aa, Zea mays
  unsure (1)..(323): unsure at all Xaa locations
  Clone ID: MRT4577_85553C.1.pep
FGTRPPLLFSLRPSPCSGFPLRRLLFRCSASSASTFSSLASYHASFARRMALAGIHPHHRIAVGVSGGPDSMALCVLATAWKKAAGRKAGDEEDPVASAFVDGLLGVVVDHGLRPESADEARLVRDRVRGMGVECEIANCEWPYGPPKQGKVQEAAREVRYQKLLDICIKQQIGILLIAHHSDDQAELFVLRLSRQSGVLGLAGTAFVSQLFASNVKYDGESFRRYGILLVRPMLEFSKDDMYKICQGSNQPWVEDPTNTSMKYARNRIRVSLRKLSTXGTFLSGVHKLISACRLTRACVDCACNTIAKQSVSISEYGYAIID

SEQ ID NO: 353486 - protein, 86 aa, Zea mays
  Clone ID: MRT4577_85554C.1.pep
MGVPFEALLPYAIMTGFFAFSAVSVGKLKEIQNGGKRTRRGIDAWDRQMMERDRRLTGFMRGQTDKPVAPAGFELNNPWRCEQRFF

SEQ ID NO: 353487 - protein, 102 aa, Zea mays
  unsure (1)..(102): unsure at all Xaa locations
  Clone ID: MRT4577_85556C.1.pep
MTLIIKRFKTALRXHKEYSNKNKAKGKRSCFKXDERHEKKEKKKVYKKAKGEVHLGKEWDSDCSSTDSDDEGLAASAFNKSPLFPNERHTCLMAKEKKLKKY

SEQ ID NO: 353488 - protein, 53 aa, Zea mays
  Clone ID: MRT4577_85557C.1.pep
YKNIMVLAQGHGERWLHEFTHNWPTNIYTADALACAATATCAKNNLECHCAAT

SEQ ID NO: 353489 - protein, 56 aa, Zea mays
  Clone ID: MRT4577_85558C.1.pep
AMSTYFMRLLSFLGHTHQQIIIFADEEDSSVSLLLNLTPVSFIHLGTSWVKGIALL

SEQ ID NO: 353490 - protein, 58 aa, Zea mays
  Clone ID: MRT4577_85559C.1.pep
TVAAVADDRRVGEHQGTRRDGLGRTHIGVHTEFRSGSRAQSQEHRSLLPMDGNYFLIH

SEQ ID NO: 353491 - protein, 46 aa, Zea mays
  Clone ID: MRT4577_8555C.1.pep
AALVASCFLGSWRPLDFVAVCFVRAIGTVTRPLELCLALESDARDC

SEQ ID NO: 353492 - protein, 40 aa, Zea mays
  Clone ID: MRT4577_85560C.1.pep
GEHALVSALTNVLLLHRCRFMDYHAAKALPSIFRSVSMGG

SEQ ID NO: 353493 - protein, 36 aa, Zea mays
  unsure (1)..(36): unsure at all Xaa locations
  Clone ID: MRT4577_85561C.1.pep
SQVLGQSLYCFQIXEHXFSGHRDFFCGSSKWDETLE

SEQ ID NO: 353494 - protein, 126 aa, Zea mays
  Clone ID: MRT4577_85562C.1.pep
VNGPHCTWWVRWLTISPSGRVENKKKKKKKKKKKKKKKKKKKKKKKKKKKKKKKKKKKKKEKKKKKRGPPNPTFGPPKRGKKARRGKQGKKRSPGKKGNPPKIPTKKKPGKKKGKPGGAKGGEKPP

SEQ ID NO: 353495 - protein, 47 aa, Zea mays
  Clone ID: MRT4577_85563C.1.pep
FFGGPPGKPRHHKSCARYQEKRRMKVKLYAGCLLLKRHQHDTSTNLR

SEQ ID NO: 353496 - protein, 124 aa, Zea mays
  Clone ID: MRT4577_85564C.1.pep
MGGKCPHRKVKKRRLSHKTARRGKFLLKADDAVYDELVKLADQGKDAEGKELPVDEDLPGMGQFYCLHCDRYFASESVKDDHYRSKRHKKRVKVMSGPAPHTQLDAELAAGMGKPDNGLKLMSM

SEQ ID NO: 353497 - protein, 55 aa, Zea mays
  Clone ID: MRT4577_85565C.1.pep
EWSNEGKQCEERWTAITLIYRVDDDDAAAKRKMKSEEEGRQLHAADSRRLFAVNR

SEQ ID NO: 353498 - protein, 124 aa, Zea mays
  Clone ID: MRT4577_85566C.1.pep
MGGKCPHRKVKKRRLSHKTARRGKFLLKADDAVYDELVKLADQGKDAEAKELPVDEDLPGLGQFYCLHCDRYFASESVKDDHYRSKRHKKRVKVMSGPAPHTQLDAELAAGMGKPDNGLKLMSM

SEQ ID NO: 353499 - protein, 53 aa, Zea mays
  Clone ID: MRT4577_85567C.1.pep
QQGRVERNVWRFRLCWSKSDIKILETHSMSSFLFVLRDCPPPFFSLPQSVSVL

SEQ ID NO: 353500 - protein, 46 aa, Zea mays
  unsure (1)..(46): unsure at all Xaa locations
  Clone ID: MRT4577_85568C.1.pep
LLEPKMALSMILQRFQFRLSPSXKHGPYTVLVGHPKHGAPIIFNRF

SEQ ID NO: 353501 - protein, 326 aa, Zea mays
  Clone ID: MRT4577_85569C.1.pep
MGFGVVHLLDAVFRRMFRSAGLRPGSATVNAEDDTVIHYWAHPSLLRPPPSDSDSEQRQPVVVLIHGFGPDPTWQWAAQAGPLSRHFRLVVPTLLFFGASGTRAPARSDASQAAALAALLAGPGQQHLPGLGAGRTVHVVGTSYGGLVAYHLARELERQGGGVRVGKVVLCDSDACKGAEDDRALAARSGVAEVAELLAPADTRALRRLMAVCAHRPVKYVPECLLRDMLRRYFADKREEKMALIRGIATGEGFELVTLLQEVLIIWGEFDQIFPVDKAHKVKEKLGEKATVKVIPNAGHLPQQEDSKLFNRVLLDFLLRPSSTAA

SEQ ID NO: 353502 - protein, 74 aa, Zea mays
  Clone ID: MRT4577_8556C.1.pep
VFEAAGRAPSARTPTSRRCWRRRSITGCPRRLTTTGRGIRNPDRISYTSQDERHESLGSGPALGGGIAIQSARA

SEQ ID NO: 353503 - protein, 93 aa, Zea mays
  unsure (1)..(93): unsure at all Xaa locations
  Clone ID: MRT4577_85570C.1.pep
TGTAAAAVRFPFXSYPVTHPYFXFGQAAAAAAAGCHMLKLAPTVTVAAVAQSDSDSSSVVDLSPSPPAAVSTQKAAAAFDLDLNCPPPAEMEA

SEQ ID NO: 353504 - protein, 99 aa, Zea mays
  Clone ID: MRT4577_85571C.1.pep
NQRRVLLLTSRHWCRWLHWCRCQFIYRKILMKPQTHPDCSRTEQAASTLSFTSGPPPNLHHGAYALSRLGLHNSHLPGPLASVPLRICRGRHTVTPAAN

SEQ ID NO: 353505 - protein, 111 aa, Zea mays
  Clone ID: MRT4577_85572C.1.pep
FFFFFFFFFFFFFFFFLEEQQFQSTNINITFFERWDIHGKWIGGLEQSKITIFLQNNKDQLYSSRSTTSNSMSEERMGHKTLWDFSEPFRQTLPSSKRRIPYVNICAKAKL

SEQ ID NO: 353506 - protein, 97 aa, Zea mays
  Clone ID: MRT4577_85573C.1.pep
MSSPSPTRSRSSSSRWARATAAAEVPFVAPAQYSDTLILFRFRDSQLPLKLRQIIMSDIRLLTLLESGLPSWVIFFQSYPVLCQLYRPWMRPPTREL

SEQ ID NO: 353507 - protein, 332 aa, Zea mays
  Clone ID: MRT4577_85574C.1.pep
MLTQRRPIPWPSFSGIIIRRHLLESLPLVPHCSVNMRKSMFTHCQLSVIHWKHCFEFLDNALSVDCFQSGAPKWDQSSDTHKVSSAEDKLVALCRFRRARGLWEKCDEKWSHAYKCIVDAHLHALEEVWELLVPDPTKTEGQSPEDSSTEQLFMLVSLAAWGGTNVSQTLKFQGQLQNHSVLILIDSGSPYTFLHEKFRAWFQHVDLVVAPLQVRVANGELLHCQHKILQIPWQIQTFNHIPVTMIPSNLDCFGWCTSDAFYKAAEPCGIEEDLQRRREGGVPPRFLIIDDGWQEIVDYYPETLHQMFVANAGSSFKLPGNSVKDFLDSKTA

SEQ ID NO: 353508 - protein, 67 aa, Zea mays
  Clone ID: MRT4577_85575C.1.pep
PAQAPLVLGVAPKKKAAPKFVKAPAESGKPAPPFGSGNSCKCDPSNCCSHRSTPMEMIFIYLAWGGG

SEQ ID NO: 353509 - protein, 165 aa, Zea mays
  Clone ID: MRT4577_85576C.1.pep
WRTTGMSSSVLVWRIVAGVVDGHVQTSNSSCEGSAALGLSPERGLRLSSPRPSRERYVQGIPPGPQVAIPYHHQLSLHSPWPHPSNRCRRGEHDRAERAGKTGHGAVGGALGSIPDDDAQDTDWARRARNPSPEGGRRPAPRPRGRRGKRAGQGKGRGRAVPRRN

SEQ ID NO: 353510 - protein, 78 aa, Zea mays
  Clone ID: MRT4577_85577C.1.pep
HNQHQQLKYKSWPLWGQGPFSHQRMSGTHAGKWQCSPPSQYPKETTALMRDRMVKLWCNSQVLPRCDYDPLEIKKNLP

SEQ ID NO: 353511 - protein, 86 aa, Zea mays
  Clone ID: MRT4577_85578C.1.pep
PPRGRYDPRGGPGGGKGKGSRFSRSHSGPAKGGRPARFFFGPGKGAPHSRFFFGGRPRLFSPPRGARAPLRETTRERRAKFFQWPP

SEQ ID NO: 353512 - protein, 105 aa, Zea mays
  Clone ID: MRT4577_85579C.1.pep
KFKKVLKVFKAPLPKGKTLFGNFFSLADFNQGFVPFGLLGTPQAFVFDPPPHFKAWWFGFIKSPFFQKVPPFIKPFALNGCPAHRGMEKTQPVLGCLLFQKWAFL

SEQ ID NO: 353513 - protein, 99 aa, Zea mays
  Clone ID: MRT4577_8557C.1.pep
SISFEDPANLSSVKCLQFLRCETESLPGNLKSLSSLESLHIGRCPNIASLPDLPSSLQRITIWDCPVLKKNCQEPDGESWPKISHVRWKSFLQIPHWLP

SEQ ID NO: 353514 - protein, 58 aa, Zea mays
  Clone ID: MRT4577_85580C.1.pep
FSQKPQNPYLPQPHMNPTRLHNAHITISYKQHHPHKIHKQKSLKTKTRQHGPFEYPKN

SEQ ID NO: 353515 - protein, 112 aa, Zea mays
  Clone ID: MRT4577_85581C.1.pep
IFFGRFACKTVRERVAYECRAEGSKAACQKHQLFCRLGWFPFPVCSRPVSAVVTLGLLVALKKKNPDDPFSSEWLVLTGGLADSNILRKSPNFQLYKQHEILCYHFVFMLQF

SEQ ID NO: 353516 - protein, 76 aa, Zea mays
  Clone ID: MRT4577_85582C.1.pep
RRSDPPVARSSTTPGTSAPRGGRLLSPARCGQRMFKTAMSVLSKMHVAARSPPASTTMRRRRPRWHRRRQVNQGTE

SEQ ID NO: 353517 - protein, 73 aa, Zea mays
  Clone ID: MRT4577_85583C.1.pep
NLVSECNFFSHARELRIIILRRCTKKGPAGPVLSQAPLTVAKNRNTQKNPHILANETLLKTRDWGCSHWNMSF

SEQ ID NO: 353518 - protein, 76 aa, Zea mays
  Clone ID: MRT4577_85584C.1.pep
MLLYVAAFAFHAATRLARRCGFRPPCILSTRLDRALHGNLSWFYEDLDCIMHEPEVSSLAHCKSQGRLARYSDFIE

SEQ ID NO: 353519 - protein, 89 aa, Zea mays
  Clone ID: MRT4577_85585C.1.pep
RVRPHGILCPTVNHSSAAPPFLVFQRPARQTSRGTCVPSCSDTPTEACSIGSRRLLIPVHQIRGARSRVTFMSKLVPGISCPRSRTGSR

SEQ ID NO: 353520 - protein, 116 aa, Zea mays
  Clone ID: MRT4577_85586C.1.pep
MNLAWLAMYIRQRYGEITTVEASRGKPPVTQDSVVILDHGDPVMYEEFWRREGDSASILIPAWQTMSYFSNLGGICCFLEPGLEREVRRLHRLVGNAVVDGYHVIVGTGSTQLFQA

SEQ ID NO: 353521 - protein, 53 aa, Zea mays
  Clone ID: MRT4577_85587C.1.pep
PRVRPRVRADPSLGCDPFNMAACVLVPASGGVGLLYRYLVPVCWPDFYNCLSG

SEQ ID NO: 353522 - protein, 88 aa, Zea mays
  unsure (1)..(88): unsure at all Xaa locations
  Clone ID: MRT4577_85588C.1.pep
SHIKINEYRDRIILNPINPYGKAKKMTVDIILDFTKSKEQPDMAVMIXRYFNVIGSNPNIXLGEAPRPLCQGSLQCTYWCMIYWRLCA

SEQ ID NO: 353523 - protein, 799 aa, Zea mays
  unsure (1)..(799): unsure at all Xaa locations
  Clone ID: MRT4577_85589C.1.pep
LLRKCALVFFDAILIFSSCLEDHLKHLQQVFELLSRDAWKVKMNKCSFAQNQVSYLGHIVSAAGVATDPAKIQAIADWPKPANVKELRSFLGLAGYYRKFIRHFGIICHPLHGLLKKGVVYVWTDDHSTAFHTLKAALASAPVLALPDFSSQFTIETDASSFGIGAVLMQKGHPLSFLSKALGPKCRGLSAYEKEFMAILVAVQQWRQYLQHGEFIILTDHQSLSQLNEQRLHTPWQXKVFTKLFPLQYKIIYRQGHSNRVADALSRRISPEINAVSEVVPQWLTDVQNSYSHDPAAQSLMAKLALDPSAVPHFTLTNGLLRYKGRIWLGNDKVLQQRLVAALHTSPIGGHSGIPVTYSRLKNLFAWKNMKTTVQQFIQTCQICLQAKPDRSAYPGKLQPLPVPSGAWETITMDFIDGLPSSGHANCILVVVDKFTKYAHFIPLSHPYTASSVAQVFFVNVYKLHGLPSAIISDRDPVFTSNFWQHLFKITGTDLKLSSSYHPQTDGQTERVNQCLETFLRCFTSACPKKWKDWLSAAEFWYNTSLHSSLGCSPFQTLYGRQPRTLGLTINDAGRVGLCAWLQERSVMQELIRQHLLRAQSRMKRHADKHRSERTFQEGDWVYLRLQPYVQASVMPRAHHKLSYKFFGPYKIXDRIGQVAYRLALPASSRIHPVVHVSQLKLAKGFKDPEPLPLPDDIPEISVPLQIIQSRGITKGSRLVQQVLVSWSGLPAELATWEDREALQQCFPFAPAWGQAGLPEGGNVKDFDMSAHQQETNVPRRRTHRVRRSNPRVYGPEWV

SEQ ID NO: 353524 - protein, 88 aa, Zea mays
  Clone ID: MRT4577_8558C.1.pep
WRDPPGLALLGGHVAPRRGARHGKVHLHRAWCLAVGGPGGSRTTGRADQQLGMCTCVASLASTSAQGVDTTAIGDEERSDSVCKRQVH

SEQ ID NO: 353525 - protein, 111 aa, Zea mays
  Clone ID: MRT4577_85590C.1.pep
HLQYMGPHVPCLSWCLGSNCLLLIEPAPATSKKPRLHSCSVMSQYPSPVVVPVVKPSPVNGAPTTLLVLSPRDLARVRSQRTQQQRVARLRWAMVVQALKQISVLDAVAAH

SEQ ID NO: 353526 - protein, 87 aa, Zea mays
  Clone ID: MRT4577_85591C.1.pep
WVKSGGRGMFWTKENLVPAKAGYARMGTARSVPGSCQSVGFGSLWTVIGGKNSIPNIGVGDRGPPVRARCVKEPLCPGGKGFSLFSR

SEQ ID NO: 353527 - protein, 41 aa, Zea mays
  Clone ID: MRT4577_85592C.1.pep
SMATYGASFKANCALDRLFINYAVRATYSIDTGRTPMINDP

SEQ ID NO: 353528 - protein, 61 aa, Zea mays
  Clone ID: MRT4577_85593C.1.pep
MHQFIVENVEIMLFAHIFRFIEFGNDGGPAAKTLKPKFNLFVKLVSKNTGLGLPHMDIKTV

SEQ ID NO: 353529 - protein, 58 aa, Zea mays
  Clone ID: MRT4577_85594C.1.pep
FSFLFSLFLFIFFLNPPKSLRRGKHHPVYPPPIQGKHHLANPFPIGMAFFEKKHPFVK

SEQ ID NO: 353530 - protein, 98 aa, Zea mays
  Clone ID: MRT4577_85595C.1.pep
LLVARSCKKLKQTGPINLYNQHIVNSEPFQNMFLAVLLQSYVTKFRDVMYLLFLLYVNNHVISFMLHESNFFVHNFNIKWDRTSRMYQFPVRNTHESI

SEQ ID NO: 353531 - protein, 83 aa, Zea mays
  unsure (1)..(83): unsure at all Xaa locations
  Clone ID: MRT4577_85596C.1.pep
SGLEHGFFFSGAAAWIIILSKHSTYHLTVRLHGRRALLITTIRCMVHCGARFFLPFGVALTEVSAQGSXTRPKCENLISTPAS

SEQ ID NO: 353532 - protein, 46 aa, Zea mays
  Clone ID: MRT4577_85597C.1.pep
CAKYEYEIRALAHGMRLSSGIDKHYGVATGRPISMSPLKYITHFAC

SEQ ID NO: 353533 - protein, 80 aa, Zea mays
  Clone ID: MRT4577_85598C.1.pep
SLRLRAFETRIRGARRCMHCNSRWAFDNAGKLCFSVILPGIKANYGLDESSGTGRHIMNAYLDSKSLVIIHMLYHCMMQV

SEQ ID NO: 353534 - protein, 137 aa, Zea mays
  unsure (1)..(137): unsure at all Xaa locations
  Clone ID: MRT4577_85599C.1.pep
CRHHDVLPDDRQTADDNTXITDDDVFNIFFRMTAAKNHPPRSVFDRQAPAVNDEGTAANHQLFHPDEHIIGEEDDANNNFRRHYYTVEKNIDQRRHHSLKNVDNCSALHQFLLFYDAGGGTXSALVALLLEQLPADD

SEQ ID NO: 353535 - protein, 82 aa, Zea mays
  unsure (1)..(82): unsure at all Xaa locations
  Clone ID: MRT4577_8559C.1.pep
ESLPXNLKSVSSLESLSIEHCPNITSLPDLPSSLQRITILYCPVLMKNCQEPDGESWPKISHVRWKSFLPRPHHFEINEKAP

SEQ ID NO: 353536 - protein, 51 aa, Zea mays
  unsure (1)..(51): unsure at all Xaa locations
  Clone ID: MRT4577_855C.1.pep
VFLAKYVCDIRNLGHQLFSWLFCASDGLISPSAVQELSKISXLXXLXXXXI

SEQ ID NO: 353537 - protein, 41 aa, Zea mays
  Clone ID: MRT4577_85600C.1.pep
WPHAERVTAFAGRPTHWVTNFEPEREFNLKHITPMLLDDLR

SEQ ID NO: 353538 - protein, 70 aa, Zea mays
  Clone ID: MRT4577_85601C.1.pep
HSSLVLLLSKITSPSSFQFQNGGNDVPIGERQRPVTLPAFVKVDARDANKKKITKRSKKLRLADLEMIQS

SEQ ID NO: 353539 - protein, 36 aa, Zea mays
  Clone ID: MRT4577_85602C.1.pep
ECNGIGPLEGTTGQSFRFFMSYSSIIKFLSDVLWLL

SEQ ID NO: 353540 - protein, 80 aa, Zea mays
  unsure (1)..(80): unsure at all Xaa locations
  Clone ID: MRT4577_85603C.1.pep
MTEGAPENSDYTKCYNILGVPNXAFDDDLKKAYRKADIKNHPHMVGDPEKFKELTQAYEDLSDPEKREIYDQLREDGLYE

SEQ ID NO: 353541 - protein, 69 aa, Zea mays
  Clone ID: MRT4577_85604C.1.pep
RPFFFFFFFFFFFLGHSNMHFLCKLGRDTLVHLQYVRAQPPFLQLQTQKLQARLKIHRVKLERAWNRIT

SEQ ID NO: 353542 - protein, 87 aa, Zea mays
  unsure (1)..(87): unsure at all Xaa locations
  Clone ID: MRT4577_85605C.1.pep
RMTLSPKHAFEKMLVIGYEPPLKVRALWLSSGXYVPKFVMNEVYTMEVXEWTKVAIFDQAQKERANPMIEDQEPFXGEALLDEKCLK

SEQ ID NO: 353543 - protein, 65 aa, Zea mays
  Clone ID: MRT4577_85606C.1.pep
GFLPVHLLGLRVDWDDRWINDVEDSYGQQWTYEQRKIVEFTCHTAFFVSIVVVQWADLVICKTRR

SEQ ID NO: 353544 - protein, 48 aa, Zea mays
  Clone ID: MRT4577_85607C.1.pep
MGAADADTSTTYGYELQAERAAAELVRSSSSYDYDYGALMKGVRHLSD

SEQ ID NO: 353545 - protein, 127 aa, Zea mays
  Clone ID: MRT4577_85608C.1.pep
ERLRGVLMTARPPLRAMMLVPITITTIPTMRRRSTMTRLGRLALMPPKPRMRRLINRQPTTVVRALTPARRGRGRCRCRSQHCMMRMASKGSDLSIPIMILHCKFMIYKDLYRHHLFICRGRNKTVR

SEQ ID NO: 353546 - protein, 50 aa, Zea mays
  Clone ID: MRT4577_85609C.1.pep
VVMGWANSGWEREEVGPRWFWVEKAGAAEIVWRLARESCGVDELSGRSEV

SEQ ID NO: 353547 - protein, 1308 aa, Zea mays
  unsure (1)..(1308): unsure at all Xaa locations
  Clone ID: MRT4577_8560C.1.pep
IRSQSVVNAAVPAVPCFCRLDFSAITFAISSISFDVHTKQYAYPSMEMGHEIRQLXATELPQFELVIHATQYRHYRGILEEWLWRLKEAXYDAEDLLDEHEYNVLEGKAKSVWRLLLGEHGSSSTATTVMKPVHAAMSRARNLLPQNRRLISKMNELKAILTEAQQLRDLLGLPHGNTVEWPAAAPTSGGMGKSTLTSKVYGRDRDRDRIVDFLLGKTTTAEASSAKYSGLAIAPSACYSAPTLAQYVYNDKRIEECFDIRMWVCISRKLDVHRHTREIIESACAGECPRVDNLDTLQCKLRDILQESQKFLLVLDDVWFXXSHNETEWELFLAPLVSKQSGSKVLVTSRSKTLPAAICCEQEHVIHLENMDDTEXXAXXKHHAFSGAEIKDQLLRTKLEDTAVEIAKRLGQCPLAAKVLGSRLCRXXDIAEWRAALKFGDLSDPFTSLLWSYEKLDPRLQRCFLYCSLFLLFGLSFFRASTWSRTNAVEPXMETSTSVAAFLQLIRSLMACHXSKHLSFDVCRSSPSLSIGHLTSLESLRLNGLPDLYSVEGLSALHLKYLTLQXCCKPHCQVHLTVSCXESLTVSTSVLLNHMXWLKDLQSHRILXLSYCKEPSVSSRYNSXXLPESIGELKHLRYLNLIRTLVSELPRSLCTLYHLQLLWLNHMVENLPDKLCNLRKLRHLGAYVNDFAIEKPICQILNIGKLTSLQHIYVFSVQKKQGYELRQLKDLNELGGSLKVXXLENVIGKDEAVESKLYLKSRLKEXXXXXXXXXXXXXXXILEGLRPPPQLSKLTIEGYRSDTYPGWLLERSYFENLESFQLSNCSLLEGLPPDTELLRNCSRLRINFVPNLKELSNLPAGLTDLSIGWCPLLMFITNNELGQHDLRENIIMKAADLASKLALMWEVDSGKEVRRVLFEDYVSLIRXXXXXXXXXISKHLQIIGSVLVXXXXXXXXXXIKAWLFCHEQRIRFIYGRAMEMPLVLPSGLCELSLSSCSITDEALAICLGGLTSLRTLQLKYNMALTTLPSEKVFEHLTKLDXXXXXXXXXXKSXXXLRAAPSLSCFNCWDCPSLELARGAELMPLNLASNLSILGCILAADSFINGLPHLKHLSIDVCRCSPSLSIGHLTSLESLCLNGLPDLCFVEGLSSLHLKRLSLVDVANLTAKCISPFRVQESLTVSSSVLLNHMLMAEGFTAPPNLTLLDCKEPSVSFEEPANLSSVKHLHFSCCETESLPRNLKSVSSLESLSIERCPNIASLPDLPSSLQRITILNCPVLMKNCQEPDGESWPKISHVRWKSFPPKSIWLP

SEQ ID NO: 353548 - protein, 98 aa, Zea mays
  unsure (1)..(98): unsure at all Xaa locations
  Clone ID: MRT4577_85610C.1.pep
RPMVLFFLQIHNNRGVGYTWCGHIHATYANXKISVDGTSYRHEDTTGGGSTTHGRVGWMDGWANGDAWWSWACXGHVRRDEGGRTGTLGDTRTLEAWM

SEQ ID NO: 353549 - protein, 314 aa, Zea mays
  Clone ID: MRT4577_85611C.1.pep
MPSDKAPGPDGFTGIFFKECWDIIKVDVLEAFHQLHAMNGADFKFLNSANIVLIPKKPDAKSVGDYRPISLIHSIAKIFSKLLANRLAPLPEQLNLQILICRSFLWKGKAESNGGHCLVAWPLVCKPKALDGLGVLNLDKFGRTLRWLWKEWTRYVHPWKDLEVPCNRVNRLLFSASTTVTIGDGKTAKFWHNSWLDGMAPRNIALHLFDLISRKNNSVSRELSREHWIKTLRSRITSTVQIEEFVSLWTRLCDFQLQPDSPDTIVWNRSLDGIFSVKLAYRAQFIGSYSHLNANFVWKAHAEPKCNFFAWILL

SEQ ID NO: 353550 - protein, 36 aa, Zea mays
  Clone ID: MRT4577_85612C.1.pep
MNIRYKKKATYDWKESPTKITQRSRSFLSYKFIVAD

SEQ ID NO: 353551 - protein, 165 aa, Zea mays
  Clone ID: MRT4577_85613C.1.pep
MPPKFDPSEVKLVYLKCVGGEVGATSSLAPKIGPSGLSPKKVGDDIAKATSEWKGLKITVCLTIQNRQAAISVVPSAASLVIKALKEPPRDRKKQKNIKHSGNITFDDILAIARTMRPRSMARHLEGTCKEILGTAQSVGCTVDGRPPHDLIDDINSGALEVPAE

SEQ ID NO: 353552 - protein, 40 aa, Zea mays
  Clone ID: MRT4577_85614C.1.pep
NYSFKKTNVFQMNLFALPQGFIYYDYIKFRPVYYILDDFI

SEQ ID NO: 353553 - protein, 106 aa, Zea mays
  Clone ID: MRT4577_85615C.1.pep
IKFLGSTLHGCSITSLPSSISLPWLICRLVTWTFHVVGNNEMVLGVKLSSLPDRRQGTNREERLLSGRTLRTSARLYEQAIHASGRRGELDLAWRLCKWIRTALAS

SEQ ID NO: 353554 - protein, 113 aa, Zea mays
  unsure (1)..(113): unsure at all Xaa locations
  Clone ID: MRT4577_85616C.1.pep
MREILHIQGGQSGNQIGSKFWEVICDENGIDQTGKDAGDSDRQIERSNVYYNSGLVAARYLPLRRVSWNLEDRHXDSLSSGSYGQIFRPDNFAFGHSGAGNNCPKGHYTQVAE

SEQ ID NO: 353555 - protein, 484 aa, Zea mays
  Clone ID: MRT4577_85617C.1.pep
MDPKGKEIVINDKEEILNVYEPKGDKITDSGSNNKRKDGKKKRCIKKIIYYDSDTSSSSPRDNDNGDSSSKNKTVNQNYSFDYSRIPYNSNAHLLSIPLGKPLHFDGEDYSFWSHKMHNHLFSLHPSIREIVQSGMHFDSSDNTVFINEQIHKNTQATTILLASLCMDEYNKVSGLDNAKQIWDTLKISHEGNDATMITKMECGRRAGYTKMTPEEILRKFVSGCMMVKEARYVDDITNGPLPLYEPQLVALKATNSKEVLPNKVAQVEVAALNDEEMALMIKRFKTTLKGRKEYPNKNKSRGKCSCFKCDYSDLFKGLDRSKVDKINELIDALNENDRLLEKQEDILYEEHDKLVNVEKCLAIEVKKNEILSSELSSCHESISSLKSLNADLNARIEKLNIASSSVEHVSICNRCKDFDIDVYNDHASTIYAYTIGRHPCINDGLGFQKGTKNLTSQRASNLTKEKGKAPFVGDRYPPGPLEG

SEQ ID NO: 353556 - protein, 48 aa, Zea mays
  Clone ID: MRT4577_85618C.1.pep
SAYPRGGAIKNFGGNKKLGTSFGLPAARDCLLGQSVFRCSRCLLTPRS

SEQ ID NO: 353557 - protein, 174 aa, Zea mays
  Clone ID: MRT4577_85619C.1.pep
PTRPIKHGRDNDKAKLLCGGPETPSWVSSHSDKAYHNGYWVQPTVFTNCTDDMKIVREEIFGPVMSILTYKTVEEVVERANATDVGLAAGVFTKDLNLAHKVIAQLEAGITWVNTWGESPAEMSVGGWKQSGVGVENGKKGLEAWVRNKSTLVEMGGSVPTVFTKLQVGDGSKL

SEQ ID NO: 353558 - protein, 46 aa, Zea mays
  Clone ID: MRT4577_8561C.1.pep
VQQTTLPIICSFCIFFGRGKNSPAVKKPLTIFMSIGYFPFYHLKKR

SEQ ID NO: 353559 - protein, 95 aa, Zea mays
  unsure (1)..(95): unsure at all Xaa locations
  Clone ID: MRT4577_85620C.1.pep
MSKNYPTVSAEYSEAVDKGRRKLRALIAEKSCALIMLRLAWHSARTFDVSTRTGGPFCSXETXSELAQGANAGLDIERRLLKLIKEELPILCYTD

SEQ ID NO: 353560 - protein, 100 aa, Zea mays
  unsure (1)..(100): unsure at all Xaa locations
  Clone ID: MRT4577_85621C.1.pep
KKKKKENRENKKXKNREEERVRKKKDKMKRGKKKGKKKMKREXKKKKERGKKKERKRSERKKKGKRKEKRKRRDRRRKKKERRCRKEKEKVKKEKIRIKW

SEQ ID NO: 353561 - protein, 162 aa, Zea mays
  Clone ID: MRT4577_85622C.1.pep
SSSSKTPSVMLAHSSGFQLSSVTTLLPCLASVSSESPALQHLVHVPRLAVRVQVAQLPGLVGHASRGAPRSACSAPPRPSRVGPTCPAAWMASLARSRVILSITFIGACFCSALPPCASPTLVRCLWDCPSSARHAQPLRPTLLDLLDVPRHPHHVHRAPAL

SEQ ID NO: 353562 - protein, 43 aa, Zea mays
  Clone ID: MRT4577_85623C.1.pep
SSRSSRSDYHELKYKSRSQFSTPVILKDGQISLMGEGSPSIVG

SEQ ID NO: 353563 - protein, 65 aa, Zea mays
  Clone ID: MRT4577_85624C.1.pep
SISCTIKTIRADSNNNTVITYFTYTHEYNHVTIHEEVVPLTHDAYIPAIHIHSIHLIIQSTVIIN

SEQ ID NO: 353564 - protein, 98 aa, Zea mays
  Clone ID: MRT4577_85625C.1.pep
MKANPREKSSRRKRRKAHYMAPSSGHRVLMHGALSTELRHKNNVRTIPSRKDHKGQAERGTYKGREGKEVQENRRRWAIHVERITPQKANGSTDERGQ

SEQ ID NO: 353565 - protein, 97 aa, Zea mays
  Clone ID: MRT4577_85626C.1.pep
HWYLEPAGKFMERDYNSVFKSGLAKSIHHARVLIRQRHIRVGKQIVNVPSFVVRLDSQKHIDFALTSPYGGSRAGRVKRKRAKKADAGEDAGEEDEE

SEQ ID NO: 353566 - protein, 43 aa, Zea mays
  Clone ID: MRT4577_85627C.1.pep
NITTCTYGESKIYYHRRALMEFILRPEPADSDSEVLAILKDLA

SEQ ID NO: 353567 - protein, 137 aa, Zea mays
  Clone ID: MRT4577_85628C.1.pep
GYLEAGREQFSTRYILAIHCTLPNHENESTVNGIFAALATAGARAAAGLLTVCSSPALWHRVPEKGAVYNYHSIHHLETVKLILRFLHMLLKMDKLLIHGTTDCNTDYCLHIIGDDCWNCWHVLFEVNPLDRELARD

SEQ ID NO: 353568 - protein, 124 aa, Zea mays
  Clone ID: MRT4577_85629C.1.pep
MLFSMMEESHSVTGNLLLQTTCHHCTPSRLRQATTLAGGAMRWLMSKLEHKVMVATADRVIRSYVGTKSQCTALTMLSRLLIDSNPLRHIGAPPLYLSQRLPSVESNGSIQRQWEQGSKGAINR

SEQ ID NO: 353569 - protein, 83 aa, Zea mays
  unsure (1)..(83): unsure at all Xaa locations
  Clone ID: MRT4577_8562C.1.pep
ALFCCETXSLPRNLKSVSSLESLSIYDCPNITSLPDLPSSLQRITILRCPVLMKNCQEPDGESWPKISHVRWKSFPPXSIWLD

SEQ ID NO: 353570 - protein, 81 aa, Zea mays
  unsure (1)..(81): unsure at all Xaa locations
  Clone ID: MRT4577_85630C.1.pep
MYSAPGRDLGMEPHRAAGPLQLRFSPYVFNGGTILXIAGEDFAIVASDTRLSEGFSIHTRDSPKCYKLTGKTVIRCSGFHG

SEQ ID NO: 353571 - protein, 105 aa, Zea mays
  unsure (1)..(105): unsure at all Xaa locations
  Clone ID: MRT4577_85631C.1.pep
EAIGASLLLPNLPPAGAGVCENPMFXPYMIQQAITAGILPVSPLFLQQLSALLHHLPXVHLLAQNIMAHQLQHLLPFVQLALTNPGFLYQQHIIGGALFYIAYEM

SEQ ID NO: 353572 - protein, 148 aa, Zea mays
  Clone ID: MRT4577_85633C.1.pep
MGVVKGKPPLVEKNPQPLGVILRLEEELGKGKNIVIVLFFVALVGILEDEYRTLEKDSEEEYGSLENKYRTREGEGEYEILEEESEEEYGSSEDGSEKEYGTLEEDSEEDSEEDSVGLGFKLSPAPFHQWTPDVYEGVWFVRQIPTSI

SEQ ID NO: 353573 - protein, 146 aa, Zea mays
  Clone ID: MRT4577_85634C.1.pep
KKKKKKKKKKKKKKKKKKKKKKNFKKKKKKKKKKKKPQKKKKKKKMFFPLGRAPLRGVFWNFPSPGGGLGLFFGGPISPFGGCFSISWAGFLQRGVGKTPGFPHFFPFGNLPLFPGWVFSKGAPPIPLSQSLPPLIGNWPPLLRAL

SEQ ID NO: 353574 - protein, 249 aa, Zea mays
  Clone ID: MRT4577_85635C.1.pep
MGKKQHSKDRMFITRTEWATEWGGAKQKDVGTPFKRLPFYCCSLTFLPFEDPVCTVDGSVFDLMSIIPYLKKFGKHPVTGAPLKHEDLIPLTFHKNSDGEFQCPVLNKVFTEFTHIVAAKTTGNVFCYEAIQELNIKPKNWKELLTDEPFTRNDLITIQNPNVVDGKVLGEFDHVKKGLKLEDEELQRMKDDPTYNINISGDLKQMIKELGTEKGNEAFLQGGGGLKAQKERAAALAAILARKEKDDLK

SEQ ID NO: 353575 - protein, 97 aa, Zea mays
  Clone ID: MRT4577_85636C.1.pep
GGNYFLNQSAKEAYRSYLLSYNSHSMKDIFDVHQLDLKKVAASFCFKNPPKVNLDLDSSSSKHRKMRKADGANRHGIGPSTPYGRSGRYDSRHLARF

SEQ ID NO: 353576 - protein, 69 aa, Zea mays
  Clone ID: MRT4577_85637C.1.pep
RVERDQERERESMSSVLRWRTRVMEQVGFDRVYMYEEKRGSGWSILKRQAAGIIVLLSLVLKEQDRTRG

SEQ ID NO: 353577 - protein, 79 aa, Zea mays
  unsure (1)..(79): unsure at all Xaa locations
  Clone ID: MRT4577_85638C.1.pep
RGGSDNVSKTTWREGSYRDQGISTCAGGSXPSPLPAMLPLVFYFIPIDLAGYMQWRMGGMDKIWLRGGCDSGWAYISWA

SEQ ID NO: 353578 - protein, 88 aa, Zea mays
  Clone ID: MRT4577_85639C.1.pep
QENEICQTMKYPKAICLEYHRLCLLYSSAQYCPAKPCYAPRMETKHFNTESTFIAHHIICGSSKWLAGFTSICQKGEMACERKTYILA

SEQ ID NO: 353579 - protein, 70 aa, Zea mays
  Clone ID: MRT4577_8563C.1.pep
LSIYISASFKIEIKFGGTLTPHPPTHTPKKAKGNIVFRAPSLVLQQQIPDQHKWKFTRSGSYTSKSSYNT

SEQ ID NO: 353580 - protein, 48 aa, Zea mays
  Clone ID: MRT4577_85640C.1.pep
DFMFQNVYTCGSTLSFRLVIQTSHVCRRHLQQFNGLYVHPLYYPPRPL

SEQ ID NO: 353581 - protein, 109 aa, Zea mays
  unsure (1)..(109): unsure at all Xaa locations
  Clone ID: MRT4577_85641C.1.pep
FKIIRLLKLPSLSTRAYLATSFWQGSPGGNASLFAPHLLPIVXPACENPSLQPYWLQQAIAACIVPLSPLVLQQPIALLQQLPLVHLMAQNILAQQLPQPVLGNLAVHF

SEQ ID NO: 353582 - protein, 80 aa, Zea mays
  Clone ID: MRT4577_85642C.1.pep
NIFLPCHLYLGENTSQLTMLIGKDKHYKADNTLATMNCGKYFSFILSHRSTMHTEQNGWPWRWSMSSATTMNLRKRWLMT

SEQ ID NO: 353583 - protein, 91 aa, Zea mays
  Clone ID: MRT4577_85643C.1.pep
PSARWLSSLPRTPGLSFACLTRQSNVLPDCIAMTSPVPFTTCNDTFTESAKKRIKRSCMLSTYRILLNMPRADHNHLYQFQEAHTYLLTLI

SEQ ID NO: 353584 - protein, 42 aa, Zea mays
  unsure (1)..(42): unsure at all Xaa locations
  Clone ID: MRT4577_85644C.1.pep
PNPKQGPATSVAPSPKRQPVGPNPGFMVXRVXHSRQSHQRKG

SEQ ID NO: 353585 - protein, 114 aa, Zea mays
  unsure (1)..(114): unsure at all Xaa locations
  Clone ID: MRT4577_85645C.1.pep
QXKRKGXXXRGGGDXXGNQHXXNXKDNXXXXERXPXANXEKHEXASXTXXXRKEXGRDSXXQXXTTXAXESRDGDADXTXQXDHXXQRETGAXXXKAHTEXRPKRAXGEGTPKG

SEQ ID NO: 353586 - protein, 74 aa, Zea mays
  unsure (1)..(74): unsure at all Xaa locations
  Clone ID: MRT4577_85646C.1.pep
IGYLEAGRVQXSTQSNFSGHLHQQLQRLDGPLLFGHAHAAAAMHPASENQLTASAALQLWDGLRHSGMKEKGRS

SEQ ID NO: 353587 - protein, 288 aa, Zea mays
  Clone ID: MRT4577_85647C.1.pep
MERPAPVRKSHTSTADLLIWPEGAPQESPAGATPPSNRRPHQPSEALRKVVFGGQVTEEEAESLNKRKPCSAPKWKEMTGSGIFAAGGEAEEDESANASATSIRTAPKNYQAISTISHISFAEEESISPKKPTSIAEVAKQRELSGTLLSEDDSKMKRQISDLKSKELSGHDIFAPPEDPRPRNSENGSTSQTPGKNAHVSNFKFGEADEDGMVKTAKKIPTKKFTDLAGNIFKGDETPPGTAEKHLSTAKLKEMTGSDIFADGKAPSRDYLGGIRKPPGGESSIALV

SEQ ID NO: 353588 - protein, 66 aa, Zea mays
  Clone ID: MRT4577_85648C.1.pep
SGEEAALDLVKQVSTLLPRIRHIANRRLCDTAKPHLQATGLVLITADMHTVPSYTGPRFYRIDDIG

SEQ ID NO: 353589 - protein, 43 aa, Zea mays
  Clone ID: MRT4577_85649C.1.pep
VCNRIWMRYNETIRLGRGVIRYGWILIVLHLFSYSLRIRIRYE

SEQ ID NO: 353590 - protein, 85 aa, Zea mays
  Clone ID: MRT4577_8564C.1.pep
LADPYLDHVSGLAYRRRRSCYIRPEKKTSLVAHITVTPMCISLLPLCRILFPSFFFLYLFWVYKGNLFFVICFLIVVIRWPSVIS

SEQ ID NO: 353591 - protein, 265 aa, Zea mays
  Clone ID: MRT4577_85650C.1.pep
HAVLLTAAGGRHLTNYVGVLQTDRSHQNAPRKRSWSVYVSASSAKPCSAPKWKEMTGSGIFAAGGEGEEDESANVSATSVRTAPKNYQAISTISHISFAEEESISPKKPTSIAEVAKQRELSGTLLSEDDSKMKRQISDLKSKELSGHDIFAPPEDPRPRNSENGSTSQTPGKNAHVSNFKFGEADEDSAVKTAKKIPTKKFTDLAGNIFKGDDEPPGTAEKHLSTAKLKEMTGSDIFADGKAPSRDYLGGIRKPPGGESSIALV

SEQ ID NO: 353592 - protein, 325 aa, Zea mays
  unsure (1)..(325): unsure at all Xaa locations
  Clone ID: MRT4577_85651C.1.pep
MERPAPXRKSHTSTADLLIWPEGAPQESPAGATPPSNRRPHQPSEALRKVVFGGQVTEEEAESLNKRKPCSAPKWKEMTGSGIFAAGGEAEEDESANASATPIRTAPKNYQAISTISHISFAEEESISPKKPTSISEVAKQRELSGTLLSEDDSTMNRQISDLKSKELSGHDIFAPPEDPRPRNSENGSTSQTPGKNAHVLTSDSELTLIIITXQTNPVTKKLQCCLLLVVVLATGKQLXFGEADEDSAVKTAKKIPTKKFTDLAGNIFKGDDEAPGTAEKHHLSTAKLKEMTGSDIFADGEAPSRDYLGGIRKPPGGESSIALV

SEQ ID NO: 353593 - protein, 289 aa, Zea mays
  Clone ID: MRT4577_85652C.1.pep
MERPAPVRKSHTSTADLLVWPEGAPQELPAGSTPPSNRRPHQPSEALRKVVFGGQVTEAEAESLNKRKPCSAPKWKEMTGSGIFAAGGEGEEDESANVSATSVRTAPKNYQAISTISHISFAEEESISPKKPTSIAEVAKQRELSGTLLSEDDSKMKRQISDLKSKELSGHDIFAPPEDPRPRNSENGSTSQTPGKNAHVSNFKFGEADEDSAVKTAKKIPTKKFTDLAGNIFKGDDEAPGTAEKHHLSTAKLKEMTGSDIFADGEAPSRDYLGGIRKPPGGESSIALV

SEQ ID NO: 353594 - protein, 55 aa, Zea mays
  Clone ID: MRT4577_85653C.1.pep
HTQLLNNYMIRVITSQQIGRLTITPCLHTMTKEPKTHCKSTVQYMYYIMYSSSGP

SEQ ID NO: 353595 - protein, 47 aa, Zea mays
  Clone ID: MRT4577_85654C.1.pep
LACSRNCSSLSGRQYRTCLCPYPFTRPRSRMRSDRPECSRAFVLISC

SEQ ID NO: 353596 - protein, 106 aa, Zea mays
  unsure (1)..(106): unsure at all Xaa locations
  Clone ID: MRT4577_85655C.1.pep
MNCKNSLLWALDLASSLLQCDRSDDNDDQLLKGINSYRASIKVPALSEKKKAQCQSENSRGTSRRYECTNTTGANTVMVINEQSQEYPTXLDRCRLNXSVTRDETH

SEQ ID NO: 353597 - protein, 72 aa, Zea mays
  Clone ID: MRT4577_85656C.1.pep
MGQSPEYESVLLQVLPVKIKDSQGYAGLKGVKVKSLHESRVLSTLVQALDLYYPISYQPFLFTGMLCVIKVR

SEQ ID NO: 353598 - protein, 96 aa, Zea mays
  unsure (1)..(96): unsure at all Xaa locations
  Clone ID: MRT4577_85657C.1.pep
AITQRVIFLNTPPKVDXLTVKMMIMYHTVSATHCDMYHNTMDIIISEFRSLSSRVLITTDLLSXNLRPSCLXLFINYYLPTHPKNYLHLIILNGLF

SEQ ID NO: 353599 - protein, 150 aa, Zea mays
  Clone ID: MRT4577_85658C.1.pep
MRIARIAMAMEDGGGASSSVQQMQPAAAMAYGRVEPPPFWSTPTPYLFIGFAVVMALIAVALAMLLCSRRKEEEGRRAAEAAGVMSVVRVLTPLDREDAMPKVLVVMAGHSAPSFLASAAPFASFTEAADGAAKPQHGRGGGGKEGAAAV

SEQ ID NO: 353600 - protein, 42 aa, Zea mays
  Clone ID: MRT4577_85659C.1.pep
FFCNQTSNKYYLALLSIYKYTTAYTLSARGSNQRGDVTCPTL

SEQ ID NO: 353601 - protein, 50 aa, Zea mays
  Clone ID: MRT4577_8565C.1.pep
GAISLLVPDHAKMTTDKFSLSGQHSSQGGLTQIFQCSSTHTYWNAWLFLY

SEQ ID NO: 353602 - protein, 313 aa, Zea mays
  unsure (1)..(313): unsure at all Xaa locations
  Clone ID: MRT4577_85660C.1.pep
MSKGPAVGIDLGTTYSCVGVFQHGKVEIIANDQGNRTTPSYVAFTDTERLIGDAAKNQVAMNPTNTVFDAKRLIGRRFDDAVVQSDMKHWPFMVVNDAGRPKVQVEYKGETKSFYPEEVSSMVLTKMKEIAEAYLGKTVTNAVVTVPAYFNDSQRQATKDAGTIAGLNVLRIINEPTAAAIAYGLNKKVGAERNVLIFDLGGGTFDVSILTIXDGIFEVKSTAGDTHLGGEDFDNRMVNHFIAEFKRKHKKDISENKRAVRRLRTACERAKRTLSSSTQASIEIDSLYEGIDFYTSITPARFEELNADLFRGT

SEQ ID NO: 353603 - protein, 133 aa, Zea mays
  unsure (1)..(133): unsure at all Xaa locations
  Clone ID: MRT4577_85661C.1.pep
MRECMSIHTGQGGIHVGNACWELYCLEHGIQVGAQTAGDETIGXGDDAVNIFLRETGDGXKQVPRAVFFYPAPPPIDGERTATDRQLFHPEQVIRGEADATNYFARAHYTTGKKTPGQGLDPIRKLGENCSAP

SEQ ID NO: 353604 - protein, 121 aa, Zea mays
  unsure (1)..(121): unsure at all Xaa locations
  Clone ID: MRT4577_85662C.1.pep
MSNQCEDLFKLVLIGDTSGGKLCFLLRFSDDCYVGSYISTIGVHSKILTGEAEGKTIKLPIWDTPGQERIRTIXSSDYRRAHGIVIADDITVMESXNNVKQRLREIDRNANDSVCKLLCGH

SEQ ID NO: 353605 - protein, 88 aa, Zea mays
  Clone ID: MRT4577_85663C.1.pep
GPGKPPPTVTIFGPPGTYKVAARAPPPGPPVSVTGEPSPFSFTRAGEKQSFPVSFPAGGMPSGPPGFGRLVWSPAPPVVARPIPATWA

SEQ ID NO: 353606 - protein, 117 aa, Zea mays
  Clone ID: MRT4577_85664C.1.pep
PRVLYASAHASAPVPSTVGSLPENTPASNVPVNMPANTNTATGAAAPVPPTAGSLLEYTPATNVPVTMPANANAATGAAAPVPSAAGSLPENTPASNVPVNMPANANAATGAAAPVP

SEQ ID NO: 353607 - protein, 40 aa, Zea mays
  Clone ID: MRT4577_85665C.1.pep
SFPHQQYSVCSRGDQSPPVPSLVVHQGLENVVKTWKSISR

SEQ ID NO: 353608 - protein, 79 aa, Zea mays
  unsure (1)..(79): unsure at all Xaa locations
  Clone ID: MRT4577_85666C.1.pep
LLHELXTPPSRAPPSXCDNVRAVYLSTNPVQCQRTKHMEINLHFIHKCVVVGDVRVLCVPTTSQFTNIFAKGLPSTIFN

SEQ ID NO: 353609 - protein, 133 aa, Zea mays
  Clone ID: MRT4577_85667C.1.pep
WDPRGRPGPQISACIACSESNARPSMTLLTWSPRRMSPPATSTTWSQPIHQTKYTAVECTFDNPMRTLKAHELTPNDPQMSDAGLMPFLSLLHGTHDTFHFTEKWNNTSSTDKINLNIHHAVHATVHYHSTIQ

SEQ ID NO: 353610 - protein, 88 aa, Zea mays
  Clone ID: MRT4577_85668C.1.pep
MANLGSKVRREVNARIASVSRMMERLETSGNSRTSDRPTTSTFEVPPATKSSNERVTESNSDAAIAGGELMNCKQCLWRWLSKTLGTN

SEQ ID NO: 353611 - protein, 88 aa, Zea mays
  Clone ID: MRT4577_85669C.1.pep
MADGEDAAAARRRAAITDYRKKLLNCRELESRVGTGESSRSPPLLPSPTLLGSSLPRVRRARFPCLTRGIMAVCAGSSWRFGCRVVFV

SEQ ID NO: 353612 - protein, 88 aa, Zea mays
  Clone ID: MRT4577_8566C.1.pep
AWAWGWVVGITCVPPHAMELGRLLCKLDAGNGSHTHSRYASSFRGIQEGGGFERRASVVKGRHGHCTADILGGHGGDARRGQQEHEVG

SEQ ID NO: 353613 - protein, 44 aa, Zea mays
  Clone ID: MRT4577_85670C.1.pep
ECILILESYLLKTLTHNCITCGNTHFLKANSLIKQENLYQNNND

SEQ ID NO: 353614 - protein, 80 aa, Zea mays
  unsure (1)..(80): unsure at all Xaa locations
  Clone ID: MRT4577_85671C.1.pep
GSEGSKPTFRGFHAPGLKKMGGHAHYXPYFIHSQPMYNFPRIKPQGFKVTLSLLGTVGIGFXVPVYAVIFQPKKTPSWLR

SEQ ID NO: 353615 - protein, 222 aa, Zea mays
  Clone ID: MRT4577_85672C.1.pep
MSKARVYADVNVVRPKEYWDYEALAVQWGEQDDYEVVRKVGRGKYSEVFEGINVNNNEKCVIKILKPVKKKKIKREIKILQNLCGGPNIVKLLDIVRDQHSKTPSLIFEYINNTDFKVLYPTLTDYDIRYYIYELLKALDYCHSQGIMHRDVKPHNVMIDHELRKLRLIDWGLAEFYHPGKEYNVRVASRYFKGPELLVDLQDYDYSLDMWSLGCMFAGMIF

SEQ ID NO: 353616 - protein, 401 aa, Zea mays
  unsure (1)..(401): unsure at all Xaa locations
  Clone ID: MRT4577_85673C.1.pep
NLETLLWKRKKADKKINELIQEYTDLKVASETRASHDSKLLXXKEMMGXKQLEEKLSVALTGCSKDQETIVELNKELDATQMMLENELKSMVALKDSIRSSEEALKTSRSEVSKLSKELEEANELNEDLVSQISKLREESNEMQVDLTNKLGEAESLSKALSEDLASVNEMVQKGQEELEATSIELASIAEARDNLKKELLDAYKNLESTTHELVEERKIVTALNKELEALAKQLQVDSEARKSLESDLEEATKSLDEMNNSALLLSKELESTHSRSATLESEKEMLRKALAEQTKITTEAKENTEDAQNLITRLETEKESFELRCRHLEEELALAKGEILRLRRQISTNSSQKPRARGPPEASETLKEQPVNDYNQKTSGVVAGTPQPVKRTVRRRKGGA

SEQ ID NO: 353617 - protein, 129 aa, Zea mays
  Clone ID: MRT4577_85674C.1.pep
DKIGWGVGVGGGKRLIKRKFQFKQKKIIFKGPKGGGEFYMDWVGFPLMGGGIRGGLDKHRRPHYHFFFYWQRREHVGGVPQGADFLGPIWIFGFFFKNLFFLFLPLLNKRKKNNRLQLCFPKKRGQLGE

SEQ ID NO: 353618 - protein, 116 aa, Zea mays
  Clone ID: MRT4577_85675C.1.pep
MLRKALAEQTKITTEAKENTEDAQNLITRLETEKESFELRCRHLEEELALAKGEILRLVVEISTASSQKPRARGPPEANETLKEQPVNDYNQKTSGVVAGTPQPVKRTVRRRKGGA

SEQ ID NO: 353619 - protein, 120 aa, Zea mays
  unsure (1)..(120): unsure at all Xaa locations
  Clone ID: MRT4577_85676C.1.pep
GHDSHRALSIRKGLQVKKRAAHCDCGGHKEVFYKKLRVNGGPENVGQSLLLLKNVLQAIVELSVAQNNPLICXWFKRGFSPYTFEFQLVIXFVFQKKKIIKKKKKKKKKKRRAPKRELRD

SEQ ID NO: 353620 - protein, 38 aa, Zea mays
  Clone ID: MRT4577_85677C.1.pep
YIITSRGLWFALSIMMHEQSVHLYTCLPISKIKKLWPP

SEQ ID NO: 353621 - protein, 87 aa, Zea mays
  Clone ID: MRT4577_85678C.1.pep
GEKYGLMNVSSMVHTKENRDTTLNLEPSPDLLTKVPSLVERKVSKHPPVLKLKRTMATKTKSHLVVKGASPTPATPNPLPPVLVLNY

SEQ ID NO: 353622 - protein, 95 aa, Zea mays
  Clone ID: MRT4577_85679C.1.pep
QKFKHRSRKHMGPPNIKERKTALPQEGTAQKKKRTQNQPTKKKPRAATKDPNPKKGQPNPKPNKPKERKGRHPGPSSWRPGTATGIQCQPKRPKT

SEQ ID NO: 353623 - protein, 72 aa, Zea mays
  Clone ID: MRT4577_8567C.1.pep
SLLSLSFLITIAFATYWSLWLMWHMDSFYQLSNDLNKAHKVELVTAPNDAIIYEWLDDTSFVHRTVSNKNQS

SEQ ID NO: 353624 - protein, 74 aa, Zea mays
  Clone ID: MRT4577_85680C.1.pep
GPKKTCFFRLHKGGLLITFPPFFVGARKEFSKVPSFLKGVPPQRSFLGCGVHQGARVPGCFRAPPPGFLGSPNP

SEQ ID NO: 353625 - protein, 65 aa, Zea mays
  Clone ID: MRT4577_85681C.1.pep
ARNSARAYYSPSNCKHCFTSSLLLLVLTGASIRRAPVDVGGNVGPSRSGTGDLVAITRWYFIDVG

SEQ ID NO: 353626 - protein, 128 aa, Zea mays
  unsure (1)..(128): unsure at all Xaa locations
  Clone ID: MRT4577_85682C.1.pep
PTSETNCQHQKHHYGPTVAPKRWRPHTLRALYARSDTDTIFSQLSQAPIASLFPIHLIKAVYTICEHPFLNTYTIQHALAPGITPISLVVLPLSXPILQELPDAHQLAQTITAHHLQQHVLANLGDYS

SEQ ID NO: 353627 - protein, 145 aa, Zea mays
  Clone ID: MRT4577_85683C.1.pep
TPPQFKGGLLNQKPPEKFGGFYRKRGGQIIKKPPPPPGEKNKQYPLFERRKKRGPFGVGEAPEGNNFFAGNPGGAFEEKKAGGPFFFPPPPPFLKRGGGLKNFFKKRPGFGVLAKEKKRGGEEFGGGFGQNLPLNPGENLWRDPP

SEQ ID NO: 353628 - protein, 224 aa, Zea mays
  Clone ID: MRT4577_85684C.1.pep
MKFLEYTPFDSINLFLEQLDLGDCTIRGNLEAFSCKHTATDRRLSISLEHEILDYLGKSSDSDPSSPVEHLASRSSRKTLIYLVLTLGHIYPDYDFSAVRAHLFFQEEELESFKQMVDTYLSDASRQWAATNEGSSLLDSMTKAIDEVIKIKECDIYSYNPDSDADPVLEKGAIWSFNYYFYNRKLKRVVSFRCYCTSKLSGDDFLTGVASDGEEEDALIDMDI

SEQ ID NO: 353629 - protein, 95 aa, Zea mays
  Clone ID: MRT4577_85685C.1.pep
AAKIRSQVGDRPTDGVSLGRGGLRRRRRHGRRARAGVPAAPRPGAAARLPLRTRTRSRCGRQRRRHGAYTMSAVVVVVVPTRRRLGAPAAAAAAL

SEQ ID NO: 353630 - protein, 86 aa, Zea mays
  Clone ID: MRT4577_85686C.1.pep
QRPFDSAAVIMWWVLFPSLSTYLKYTSAPGVGRRSTRCCRPQQSTAPDNVCRGALQAQVNAVGGSHSSVKDEVSIRTATRGRNRTC

SEQ ID NO: 353631 - protein, 190 aa, Zea mays
  Clone ID: MRT4577_85687C.1.pep
MRASRPAVHPVEAAPPPPAAAAEGPEAQVEGAAHPRGVRMKDPPGAPGTPAGLGLRLAQAFFAAAALAVMASTNDFPSVSAFSYLVAAAILQCLWSLLLAFVDIYALLVKRSLRNARAVCIFTIGDGITGTITLGAACASAGITVLIGNDLNICAENHCASFETATALAFISWFALAPSCILNFWSMASR

SEQ ID NO: 353632 - protein, 41 aa, Zea mays
  Clone ID: MRT4577_85688C.1.pep
CIKVILLSTISNKCSKMHFQMRKFKKWMPNKNAFFGITSDG

SEQ ID NO: 353633 - protein, 112 aa, Zea mays
  unsure (1)..(112): unsure at all Xaa locations
  Clone ID: MRT4577_85689C.1.pep
SRFIPLLEPQTNRPRATNKWLGDKPATAVYFTKIXPTDNRALLLSIFTLSGTTKSWKPAQNPSNGKPKSFXFSEYESTEGILRLTPLVNKFSIDRHELVININDATNEYLNK

SEQ ID NO: 353634 - protein, 63 aa, Zea mays
  Clone ID: MRT4577_8568C.1.pep
PVTTRHPSLQSWMDSSNINTVEIPDGLPPTPSRSKKDKLSEEEMLANKAEASHRRMIQVENAT

SEQ ID NO: 353635 - protein, 56 aa, Zea mays
  Clone ID: MRT4577_85690C.1.pep
FSNTVGEILTAYHQPRHRTPSLHIPVSLLQTRAWMSSPINLSIKNSVRRRRRRFPI

SEQ ID NO: 353636 - protein, 187 aa, Zea mays
  unsure (1)..(187): unsure at all Xaa locations
  Clone ID: MRT4577_85691C.1.pep
LHFVCKRRLHARHPTGFNNKVKLLAGGVLQQRVGNDPGAVAHXNNLLDQREPQRPALARXKHVDGSTSNLPSPSLPFGHMVSRTLGRCXLHRPLEPGFKFPRRTVPXVRHLPHSWVWRFSYDPCPLPVEAGPQRSEKRTXHGPPQRRHAPGHRPLPSXXXTFGVHRRATSSPGNLFHEXPGEADGVG

SEQ ID NO: 353637 - protein, 83 aa, Zea mays
  Clone ID: MRT4577_85692C.1.pep
KPNFFQWLVPQGIPPSCLNSVPPLQGPPLVRAFRVPLRNSGGRPLGGGPSGFPGAGSLKFVFLFKGPLEGPYPSPRFQFLCPP

SEQ ID NO: 353638 - protein, 347 aa, Zea mays
  Clone ID: MRT4577_85693C.1.pep
MASSATYLMLASAHAPLAPLIRPPPMALVARTAATSITRRERASVPLLVNPAACRPGLRRRGWAHICRDSSLQGPSGADSPAQEQEDLKKSEAVSEAAARIAGGTGGTLSDWSTSVLIFGIWAGLMYYVFLLAPNQTPYRDTYFLQKLLNLKGDDGFRMNDVLVSLWYIMGLWPLVYSMLLLPTGRSSKSKIPVWPFLVLSCIGGAYALIPYFVLWKPPPPPIDEDEIGQWPLKFLESKLTAGLVFALGIGLIIYAGKAGGDDWKEFIRYFRESKFIHATCLDFTLLSAFSPFWVYNDMTARRWKNGSWLLPLALIPFVGPSLYLLLRPSLSSLLEASASASDEFKK

SEQ ID NO: 353639 - protein, 574 aa, Zea mays
  unsure (1)..(574): unsure at all Xaa locations
  Clone ID: MRT4577_85694C.1.pep
NLSYVDLSSNFLHGSLPMGIGDLSALTLLNLRQNNFTGEIPRTITKLKNLLYIDLSSNNFNGSIPDGLPDDLVEFNVSYNYLSGSVPSNLLKFPDSSFHPGNELLVLPRSESLNGSDKSDEARHGLKRGILYALIICVVVFVTGIIVLLLVHWKISSWKSREKGTGQGKHVGQVQSAQRSAEISTTEMHDVALESSPSAEYGAVSLPGKERRHEAQDAPIDAAYFNEPAGSSSARKDSTKSSMPSLSSSPPDARSQHHHSXSLECTLLINYXDLHLFDYAVVFTTEELSCAPAEIKGRSYHGTSYKATLDNGYMLTVKWLKEGFAKSKKEFSREIKKLGSVRHPNLVPLRGYYWGPKEHERIMISDYADATSLSTYLSEFDERNLPPLSAGQRLNIAIDIARCLDYLHNERVIPHGNIKSSNVLIQNSTPSALVTDYSLHRLMTPIGMAEQVLNAGALGYSPPEFSSTSKPCPSLKSDVYAFGVILLELLTGKIAGEIICMNDGVVDLTDWVRMLDLEERVSECYDRHITGVESSEGAPQALDGILRIALRCIRSASERPEVRTVFEDLLSLSS

SEQ ID NO: 353640 - protein, 41 aa, Zea mays
  Clone ID: MRT4577_85695C.1.pep
PIHERTCTRLIFIGVRWRASHMMTCYQTSIATLRCYILFGS

SEQ ID NO: 353641 - protein, 75 aa, Zea mays
  Clone ID: MRT4577_85696C.1.pep
SPREFWRRRLRVCQHLGRHNSYYADTCSNNKIQTDHHYGNDGGQTVEVHDNRRKEKINAWNEDVHKHRENFHGYR

SEQ ID NO: 353642 - protein, 79 aa, Zea mays
  unsure (1)..(79): unsure at all Xaa locations
  Clone ID: MRT4577_85697C.1.pep
KVWEFKPGPVPGSCDMCLLVNFKFLSXMSSLDAFMFFRVNVSRLVRSFTGRCFNTYGPVVPVVKNRYAQRGCSPYASNA

SEQ ID NO: 353643 - protein, 103 aa, Zea mays
  unsure (1)..(103): unsure at all Xaa locations
  Clone ID: MRT4577_85698C.1.pep
ISPCPLLKGIFPPHGGAIPGPPGPPPRGAKRGPKPXPRGERKPPPQPHTKHGPKRKKEKPGGPKGKPPHTQKGEHTPPFAETKNAPPPAKKKSPPPPKRKPGT

SEQ ID NO: 353644 - protein, 47 aa, Zea mays
  Clone ID: MRT4577_85699C.1.pep
EGHRQRRDCGELETRCRLHWQRPTLLDLGLPWIHAAQRAMDLEQLAN

SEQ ID NO: 353645 - protein, 101 aa, Zea mays
  unsure (1)..(101): unsure at all Xaa locations
  Clone ID: MRT4577_8569C.1.pep
SSPRQRADRQAHDRPLPTGSIKSWTVEIASPVAALRLFRAAVMDRHRLASNVAAHVITSAHAVEGDGGVSSVRQFNXTXSMTCGILKDKRDFLDVDKCECT

SEQ ID NO: 353646 - protein, 81 aa, Zea mays
  Clone ID: MRT4577_856C.1.pep
ALPTMQFFSTTCQALVSLEYLAFCHTLWEAPVQKGAVGEQDVEQGRMRGLQMIHYLLSMVLRACQSFMQRQQRRICLMAIN

SEQ ID NO: 353647 - protein, 106 aa, Zea mays
  Clone ID: MRT4577_85700C.1.pep
FSFKTTYIKSSMSRILSIVLLVIALFGACSQAFLYNITVFTGNKFDSATGSIKVTVNGNNNRRTNEFRMVNNNFIGSNYLYSNLTDLPFNVQEIQSANVRFTLTNT

SEQ ID NO: 353648 - protein, 123 aa, Zea mays
  unsure (1)..(123): unsure at all Xaa locations
  Clone ID: MRT4577_85701C.1.pep
GIDEIDLXGNRTWIKVFAMHNAHERITKLENMRWRIWHLTRKKQEFEHSGDPKGHFQALLALAMDGLEKGKAGTAGSSDGGFGERSLLVNVVRIMINFSSIWQMYKVKRKTCCCRDSSARWAV

SEQ ID NO: 353649 - protein, 129 aa, Zea mays
  unsure (1)..(129): unsure at all Xaa locations
  Clone ID: MRT4577_85702C.1.pep
VDQLDSEHPSIWQSSVLLNGVPGKSFHCRRSVRQGXDPSFPLLFVLAADLLQSIINKARMRNLLKXLXPDIGEQDFPIIQYADDTLLIXXACPKQLFFLKAILNSFASSTGLKDNYNXSXMFPINMSPI

SEQ ID NO: 353650 - protein, 235 aa, Zea mays
  unsure (1)..(235): unsure at all Xaa locations
  Clone ID: MRT4577_85703C.1.pep
MVRPRKSWPGLSPAAGGPNLTRAAEMNRSVPRLPACFYNSGNLRILADSNVQDTSPVGTRRPFTPPARASPTTSTFSSLNTGSSPSFSELLHSSDGFMRYMVEEQPQNCSENEHLVGATSHVIQIDDKPDEIRKETRLIWKSDEDVRVMSAWLKHSIDPLSGNNKKGDKYCEDVVNEYNLTTEKIRWRTKTQVKERWHKLNRWTNLFNDXWLKAXDIYTSGYSDQMWIDKAHKFY

SEQ ID NO: 353651 - protein, 43 aa, Zea mays
  Clone ID: MRT4577_85704C.1.pep
QAYSHFLRPDTLDYVPCYFILIHTIKLIYYIFYFLASYPAFHA

SEQ ID NO: 353652 - protein, 69 aa, Zea mays
  Clone ID: MRT4577_85705C.1.pep
LLLGRVAKVNLDVGAVGAKALNVVLEGKPSGRTCRVLVGRWMRSTEIEGALNMRFRNHKITQSPSCDKS

SEQ ID NO: 353653 - protein, 150 aa, Zea mays
  unsure (1)..(150): unsure at all Xaa locations
  Clone ID: MRT4577_85706C.1.pep
TSRVFGPALTLPDFPPSYSRPRALDDRHVWALHAVGLCRLTLMKVIILGDGGVWKTSLMNXYVNKKFIIXYKATIEDDFLINDYHIQDGIFILLILYTAGQERIXRMTVAFYRIAHCWELFYDVDSMKSFDNLNDWLDEDLIQAIPSDTD

SEQ ID NO: 353654 - protein, 50 aa, Zea mays
  unsure (1)..(50): unsure at all Xaa locations
  Clone ID: MRT4577_85707C.1.pep
CTGTGDHAWRQARQALGRLLXLIMSTLTAPNRRWSPIFRGTAXGVNAFAL

SEQ ID NO: 353655 - protein, 73 aa, Zea mays
  Clone ID: MRT4577_85708C.1.pep
GSSIKSFYMTKKIGNCWRRPTKIKTALKKHGMQKTDKNQANKARGEEMDTKARTKAPTGYISACLLSRWSFLF

SEQ ID NO: 353656 - protein, 120 aa, Zea mays
  Clone ID: MRT4577_85709C.1.pep
IELCLGLASPCLQEKKSATAGKENLVRRHSHPALPSLLGAWGLVRELRTTLSLGYLANRSSVSSPGRADCSSEYSFALDPQFAVTRGTGHPYTYSENTCHLQIILVPGISSPRSRTGTAG

SEQ ID NO: 353657 - protein, 34 aa, Zea mays
  Clone ID: MRT4577_8570C.1.pep
DSRWHLEESLYSAHHKSCNSVPMPVAPTRPPRRL

SEQ ID NO: 353658 - protein, 66 aa, Zea mays
  Clone ID: MRT4577_85710C.1.pep
CVSSLSCSVPGRHGQYVNDVISILCQICVFGACIFLLSTSSIGSYLLWVKLHSDHIKTHLKLPRCF

SEQ ID NO: 353659 - protein, 194 aa, Zea mays
  Clone ID: MRT4577_85711C.1.pep
MLRRAAPSAATALLRRALSNSPRPRSSAAATAVASSSAVNSILLRSLKEHYLEVSKMTPPPKISPPKPYTIVKGALDQTSGPVLRRSYGEAGEEISISVARLSNIMPPGADSDSDGSDGAGGVSGSISQLFLHVDISRPESSKSLQFLCGLYPDAVGIHSVCLRSKTSASGAVAVAAATKGGGEYQGRIFQELD

SEQ ID NO: 353660 - protein, 87 aa, Zea mays
  Clone ID: MRT4577_85712C.1.pep
RRTNSTTVMRSDTRPRRARSAPPAYCGSACTAMSPVPVPWPEASSRCDPSWRRQRHILFKRRQPPFQMSGAVTIKTSTKSARSRPLK

SEQ ID NO: 353661 - protein, 44 aa, Zea mays
  Clone ID: MRT4577_85713C.1.pep
LDSSSGIHNLLSIKLPIHHLVDPASEHVRCLYFRSVAGSLGVQA

SEQ ID NO: 353662 - protein, 90 aa, Zea mays
  Clone ID: MRT4577_85714C.1.pep
ELQKIMNLKLQTFRIYLDKSFCFSFRLKYFLKPFTFILYTTVHSFMLKLKLRAVPNTPILNEHPTKFVDLTSLLKYHHLYKMNHTHKIGS

SEQ ID NO: 353663 - protein, 67 aa, Zea mays
  unsure (1)..(67): unsure at all Xaa locations
  Clone ID: MRT4577_85715C.1.pep
AQLLGISKPVRPSAMKSILGDLISHTLNPDHPIWIAFEHQSPHVSSDAQKTLYRQRRHQRXLRLIRL

SEQ ID NO: 353664 - protein, 140 aa, Zea mays
  Clone ID: MRT4577_85716C.1.pep
LPPVTLVLSPLAVSPRVEDVIAFAFLFLSLSLNPDFYSPSSPPPGGRQRPTRLSLSLPGPGFPFPAPQIDSPSGKSGAQWGAAGAAGSAGGERLAATGGQSTAEGGGRLPVAHRPTESRKGCNLAHITHQWLIRNCIQWM

SEQ ID NO: 353665 - protein, 98 aa, Zea mays
  Clone ID: MRT4577_85717C.1.pep
PCQTCNRFPPNESLYHSLEVPGPIGSRNGIEEPGTLLMRGFYIVGTKMTLRTRVRDDVSGSRVLPLYPFLVTMVLMVVHNKNIFGCFHLSGHDVYLIL

SEQ ID NO: 353666 - protein, 97 aa, Zea mays
  Clone ID: MRT4577_85718C.1.pep
FRDLLFSSMEREPCEPHDFQFLFHYVVPPNKGHIMLCFIVFIQFKKGTLDFCHFVCFNMFEFVGSLYHLQTDKSSLSNAECCLEMAMGNRLVFTLLG

SEQ ID NO: 353667 - protein, 277 aa, Zea mays
  unsure (1)..(277): unsure at all Xaa locations
  Clone ID: MRT4577_85719C.1.pep
WRCTVAVQAALCLALYAAFSLGEPQLIPRGGVDALGRGARGGGVAFLSVAGGARAKYEVNALLSMGGSTAKLYEVKFVLDVTQLGADDPLWQNGSMYFQALNIPWYSTSSHGRTVGNFLKKVKMPYDQVLDIIGLGTWPLQEPLHXGGRISTSYRGQIKWLDRLLALTESNWXVVGYNPLLVCNGKETTKLDVPFQHIFAKYEVNAYISMGGSCGYFHRDNSILYIGHPRSPGGAQTSVDGFFLHRVRPLEMESMLINVEGKLVQRSDVQQHGTGAM

SEQ ID NO: 353668 - protein, 80 aa, Zea mays
  Clone ID: MRT4577_8571C.1.pep
MGSRMSQPFESYITAPPGTAAAPAKPATPATPGAPTSPAEHRLLKTCWSCRVLTGLGAMGAGGYVYWVARKPMKIGYPPS

SEQ ID NO: 353669 - protein, 79 aa, Zea mays
  Clone ID: MRT4577_85720C.1.pep
ISGQRPSSPQKLYYCSYTLYHANLTGGHHAMIGWLVKRCSLGPTTLVRAVCHLVPLVERCALASRALGGTSQIRTHSVV

SEQ ID NO: 353670 - protein, 59 aa, Zea mays
  Clone ID: MRT4577_85721C.1.pep
GMDGETTIRSRWCQREVSRFYLGVIQLNLQYWYLFGPCSEHHYAKHVSQECLLDCDEES

SEQ ID NO: 353671 - protein, 46 aa, Zea mays
  Clone ID: MRT4577_85722C.1.pep
ACRFPCEGYVSPLKNNCSLFSGVGSLVFVRQRRIFFSPHPGRGGRF

SEQ ID NO: 353672 - protein, 70 aa, Zea mays
  unsure (1)..(70): unsure at all Xaa locations
  Clone ID: MRT4577_85723C.1.pep
GRVVKFMVPPTFYYYDGXRXXXFYILTGAHINYCHKLWVLVDRDDQSVLLQIFTKPVWDRPTLFLENIQR

SEQ ID NO: 353673 - protein, 61 aa, Zea mays
  Clone ID: MRT4577_85724C.1.pep
MAPSSPLCLQRNHPCARRMPPGFLGSMLESSMQLAVSRTESIPYRIYEPIGLFVIIMLGEG

SEQ ID NO: 353674 - protein, 79 aa, Zea mays
  Clone ID: MRT4577_85725C.1.pep
NSTSFCEGGSREGGHEQKNPNTFVRESRSKRRALYKACIDLACTKSENDTYKKNHRKQGCFGRIIKQISASKKKNTPPP

SEQ ID NO: 353675 - protein, 78 aa, Zea mays
  Clone ID: MRT4577_85726C.1.pep
FFFFFFFFFFFFFFFFFLFFFFFFFFKEKNGIRGPAQPNARKGIFLVRIGLRKKTLNQTLKTFDQTKTYIGKNGAKTK

SEQ ID NO: 353676 - protein, 127 aa, Zea mays
  Clone ID: MRT4577_85727C.1.pep
RYRTFPGSETPLLYGRGAWLLERTARAKKGEPAGFNRAHRTRSSSGPGAWTESMQPRSRIRGRDPPPPPPPGGRYRHRSPTPASPRHQRRPRDPTPAQRKRHKYKLTPPRRCEEDPVLNGCNAAAER

SEQ ID NO: 353677 - protein, 58 aa, Zea mays
  Clone ID: MRT4577_85728C.1.pep
MLETSNQNNCSKFGDCTYIFHCRYSPRIKEITVIRHKKVRRAKLYYLKDKLPRFSTFK

SEQ ID NO: 353678 - protein, 97 aa, Zea mays
  Clone ID: MRT4577_85729C.1.pep
AIKGRVVWGCRLTSRWIGCRRCSILRSWCVALALVCKLVVLCTLGAYEGSRIPPLAVVRSAVLSEKACHEIYFVAVGETLFRIGRHFCNPLILERFP

SEQ ID NO: 353679 - protein, 71 aa, Zea mays
  Clone ID: MRT4577_8572C.1.pep
MDEDEFRRMLDLFPVVRSRDYCCSDPGTSSRGTRQRSRVQEATTGDNKDSSCAQDWSDKGRVLLQDIRRSS

SEQ ID NO: 353680 - protein, 67 aa, Zea mays
  Clone ID: MRT4577_85730C.1.pep
PPPPLPPKWIWFWGGGTFRLRALIGPRGVYNTRFYFLAPKKGFPQVPRPPDPQIWEKFVLPSLRPMG

SEQ ID NO: 353681 - protein, 131 aa, Zea mays
  Clone ID: MRT4577_85731C.1.pep
RRAPWAIRVGQGWGGAAGSALFPLAPAGVRGMFSRGVQRGFARVFPGKPWANDGLLGGPRGALLTSFARGRQAYYTLAPPARPPLFFFFFFFVFFFFFFFFFFFFFFFFLKQNASMHVTILHVLNSDSRIT

SEQ ID NO: 353682 - protein, 224 aa, Zea mays
  unsure (1)..(224): unsure at all Xaa locations
  Clone ID: MRT4577_85732C.1.pep
MPRPREILLHRAAPKTSLASKTSTASDSPRSTPPLGCFPTRVAISSARSTLLSKQGQLRPTSVPAGTRYWSTASSTAAKKKAKKKLSTSRAGPFLVPNPPGLSISFPLIGYKKSLSGPAARSVGQLGIEIELDTQLAPISEILLGLECTGPHFSDWSVVLKPPFPFPQVSISYIETATVTKKRYNDLKXGSEEDALLEGFRCKNQTCDGFLLPNSAYMVGWNHH

SEQ ID NO: 353683 - protein, 81 aa, Zea mays
  Clone ID: MRT4577_85733C.1.pep
PQKQKGGIPRKSQRPLSLTPPCFYFPKVTPGGFGGVRLANFFFPGGISFSNFKRKLPPLGPLPQSKLKPFSRFGENFGGQC

SEQ ID NO: 353684 - protein, 95 aa, Zea mays
  Clone ID: MRT4577_85734C.1.pep
MAPDVEHREGNILLACPMVKKFSTKDICGHNQGKAYVQRKIRKRMGDKYPKLEPLLNDLLPKKSPMIGEKCQNHLNLAAPNNVTLLANIREGPYM

SEQ ID NO: 353685 - protein, 115 aa, Zea mays
  unsure (1)..(115): unsure at all Xaa locations
  Clone ID: MRT4577_85735C.1.pep
MARLGSMLYTPIPRRVLVPAQALEVPPPPASRSTPETARPAGPSXWPPPPRTTXCSLLMSHTPPAPPPSTDPPTAAPTSSAAAXPAAPRSRTTTTPPSPPPTSWHHQISPSRLSS

SEQ ID NO: 353686 - protein, 126 aa, Zea mays
  unsure (1)..(126): unsure at all Xaa locations
  Clone ID: MRT4577_85736C.1.pep
SCKANPQDLTDAAAATVSYDLVRGAACLARSYLSXSCCFCRRVTSRRRRWPLPRPGFVCVCAPFHHSWNGRNRFRAVGSHMQSPEASVHLAESQYRLAGSCSWYYLRGPAGGGGAFPTXCIRCHVA

SEQ ID NO: 353687 - protein, 200 aa, Zea mays
  Clone ID: MRT4577_85737C.1.pep
PKKEKHWGAMRPLCFSARLLGSPAHPLGSPASPLVGDCRPLGRPGGASSSVPPSPAIFTIPAPSSVSPSPVILTVPASSAAATEPSLSSVEPGSLPEAPRSTSLSPRGILHRSVGHSKVERWQEASPRSIGNCSIDSRSVKHHAGPKSFLDRLAKRRLDHPDRCPLCDQDDESINHLLISSVFSRQKKKKNKKKKKKFAA

SEQ ID NO: 353688 - protein, 68 aa, Zea mays
  Clone ID: MRT4577_85738C.1.pep
FAQVNGLFGSKKKKKKKKKKKKKKKKKKKKKKIFLKKKKKKKKKKKKKKKNKFALTLFNGEIFGIPSK

SEQ ID NO: 353689 - protein, 82 aa, Zea mays
  Clone ID: MRT4577_85739C.1.pep
CRDWTSPQDDVVSRINLKTNRLSKYQNKSRSSSDRRLTNTNVVFIPGHNFVLRLMVLSAGGLGLLISLSNSPILLIEDGHLS

SEQ ID NO: 353690 - protein, 121 aa, Zea mays
  Clone ID: MRT4577_8573C.1.pep
DQRRRRHACAAAPTMDEEEFRRMLDLFPVVRSRDYCCSDPGTSSRGTRQRSRVQEATKGDNKDSSGAQDMFMQKLKMAAENKIGATKAEFFCKTFEEVHEKLVHRELNLDAAKKFLSAYES

SEQ ID NO: 353691 - protein, 328 aa, Zea mays
  Clone ID: MRT4577_85740C.1.pep
VPVRNSRVDPRVCNKLGEGGFGPVYKGKLEDGMEIAVKTLSKTSAQGLDEFKNEVLLIAKLQHRNLVRLLGCSISGQERMLVYEYMANKSLDFFLFEKDTVVLDWQVRYRIIEGITRGLLYLHQDSRYRIIHRDLKAANVLLDKEMTPKISDFGMARIFGNEETEINTLKVVGTYGYMSPEYAMDGIFSVKSDVFSYGVLLLEIVSGRRNRGVYSSSNNQSLLGHAWSLWNEEKSIELADERMNGQFNSDEVQKCVRVGLLCVQENPDDRPLMSQVLLMLASPDAASLPTPKQPGFAARRVLMETDTSSTKPDCSVFDSATTIMLEGR

SEQ ID NO: 353692 - protein, 82 aa, Zea mays
  Clone ID: MRT4577_85741C.1.pep
CRDWTSPQDDVVSRINLKTNRLSKYQNKSRSSSDRRLTNTNVVFIPGHNFVLRLMVLSAGGLGLLISLSTSPILLIEDGHLS

SEQ ID NO: 353693 - protein, 59 aa, Zea mays
  Clone ID: MRT4577_85742C.1.pep
GTFLTVESAYQQRIIQSFLYAMRPSVGTQQLAGECSIFTPYLISQIDQITFTPMHVIYF

SEQ ID NO: 353694 - protein, 214 aa, Zea mays
  unsure (1)..(214): unsure at all Xaa locations
  Clone ID: MRT4577_85743C.1.pep
HGRXRREGREXTNGXSQXEGPPQPXKMGXRXXGTXXRRRQARRGGGTTGXPXRRGATGXPQQGGGARATXGRGRXSAEAGEGRPXRGGXXTRXRKRRTXRPXRWEREPKRRTPEXXGHEEXEXPEXHEXGPREADXEXAXXGEREGGDGRGEEARGQAXQREEXGEXXXXXWSXXXRRRRGGRGGGLGDAVVXRWRGGEAGGRGERDXTLGRDP

SEQ ID NO: 353695 - protein, 99 aa, Zea mays
  unsure (1)..(99): unsure at all Xaa locations
  Clone ID: MRT4577_85744C.1.pep
LPRLPLAVXVRVARCRXXLGFPCLLGFXVRFGGRXCLCPLLLXVXXFXLFVGCPSLPFFFFFFFFFFFFFFFFXVGPCLCFWXGXRFPAXGXLGXXFAG

SEQ ID NO: 353696 - protein, 162 aa, Zea mays
  unsure (1)..(162): unsure at all Xaa locations
  Clone ID: MRT4577_85745C.1.pep
GHVLIALGAPRSLYXASVVVGXCFGAQWPLVFAIISEVFGLKYYSTLYNLGGMASPVGSYILNVRVAGRLYDAAAAQQRGRGRICLGVECYRRSFLIVTAATVVGALVSLVLVWRTWTFYRGDIYARFRDGDEGPGRDGRLPVDQKREEEEREKAAANGRKA

SEQ ID NO: 353697 - protein, 82 aa, Zea mays
  Clone ID: MRT4577_85746C.1.pep
THTIYYPFQLIIPHLFLTPVLQPLLLITSSLLISSDNHLLLFLKYFSFTIYFFIFLFHTLFFSYLIYIYTFLPIITIIISIY

SEQ ID NO: 353698 - protein, 73 aa, Zea mays
  Clone ID: MRT4577_85747C.1.pep
AWSSIAYIIQQHMDTCRHHGDTLMRNLRSLDCILRDAIGIRRHRPGERSPYTPTTPWPSYNAAGLNCYYIRRT

SEQ ID NO: 353699 - protein, 141 aa, Zea mays
  Clone ID: MRT4577_85748C.1.pep
FFLDHPPPMGWWPDPRDPWILPKEGVISAQGNFGFWPNRWRNKKFGAKGGGFFPIFLKWGFRKPFFVNFRGNFLPVPVVFRTPVEISPWLGLASNPKPKKIQKKKLGPPLFPKRGKRAIGKRSLKKNFTGVGSKGPLFFPF

SEQ ID NO: 353700 - protein, 126 aa, Zea mays
  Clone ID: MRT4577_8574C.1.pep
RTGGLRRRRRRHACAAAPTMDEEEFRRMLDLFPVVRSRDYCCSDLGTSSRGTRQRSRVQEATKGDNKDSSGGRDMFMQKLKMAAENKIGATKAEFFCKTFEGVHEKLVHRELNLDAAKKFLSAYES

SEQ ID NO: 353701 - protein, 144 aa, Zea mays
  unsure (1)..(144): unsure at all Xaa locations
  Clone ID: MRT4577_85750C.1.pep
DPAPRRPRRRGQRRHARXXXRXXXDRKXAKXQKNXTKRXXXXETTXKKSXDXPGGXRGGGXXXXXXXGXXXXQXXRTATSXGRAHGAKTRNRTREPGGKAQQQTGPRRRRANDTTGQEAAAKENKRTPPSKGRKRERGGEKPQA

SEQ ID NO: 353702 - protein, 36 aa, Zea mays
  Clone ID: MRT4577_85751C.1.pep
GAAAPGGARDLQPQALSTLSESQRTHMESGQGSDPP

SEQ ID NO: 353703 - protein, 426 aa, Zea mays
  Clone ID: MRT4577_85752C.1.pep
MVSGSFSRSTSARLTSRGGVGSPRVSTPGAVHRNWWPPAPSGPSFDRVVLAFFLASVALVLSCALYLYVFRYLGRSRVVAEFAGENLESCDVFDGVWVPDQRHPLYNSSQCPFAERGFNCLANGRKDTEYLKWRWKPRGCDLPRFSARALLQWLRGKRVVFVGDSMSRTQWESFICMLMTGVDDPETVYEVNGNQISKTIQFLGVRFESFNLSVEFFRSVFLVQQIPALRHGRRRVRAILKLDKLDGLSQEWVNSDVLIFNSGHWWTASKLFDMGCYFEAGGVLKLGTSINAAFKMALETWASWVKERIDLRRTHVFFRTYEPSHWSGLNQKVCEVTQQPTAEANGNDRREFGDILAGVVANMSVPVTVLNVTLMGAFRSDAHIGLWSHPNTILDCSHWCLPGVPDAWNELVFSHLLTNGWRVPAS

SEQ ID NO: 353704 - protein, 224 aa, Zea mays
  Clone ID: MRT4577_85753C.1.pep
MISYIIVLDTYLEIQSIHWCICHNLARIEKSAEKQAKSGAENAGWYEKWWEKYDAKVWTEKGAHKYGRLNEQSWWERWGEHYDGRGFVLKWTDKWAETDLGTKWGDKWEEKFFAGIGSRQGETWHVCPGGERWSRTWGEEHFGNGKVHKYGKSTTGERWDLVVDEETYYEAEPHYGWADVVGDSTQLLSIQPVERPPGVFPAIDFSSAPPPKDAPPGMPPSPLD

SEQ ID NO: 353705 - protein, 152 aa, Zea mays
  Clone ID: MRT4577_85754C.1.pep
AGRPGSFNVYFINMSADLVWAIVKNNNSFLVKRQNVQFSSEPSNLLNLNSFKYSGLANYKNAAIIPAARGVRVTLRKANKEQSPAKSANTVVIAKTRRQTAKSVANLIARGNKYRPDLRAAAVARASAIISSQQPKKERKVREAKGVRAQKN

SEQ ID NO: 353706 - protein, 303 aa, Zea mays
  unsure (1)..(303): unsure at all Xaa locations
  Clone ID: MRT4577_85755C.1.pep
NNCTRETLIWFTLSNTAILKEWGINLLDEAVKESGINEKQAKSGAENAGWYEKWWEKYDAKGWTEKGAHKYGRLNEQSWWERWGEHYDGRGFVLKWTDKWAETDLGTKWGDMWEEKFFAGIGSRQGETWHVSPGRERWSRTWGEEHFXTAASMQMILSYILILVVNIFGVDYSVANSGTSQLNHIYLCLGXRKVHKYGKSTTGERWDLVVDEETYYEXLFVPPIDSLKRLLDAKIAPTRHCHRTANIXXAEPHYGWADVVGDSTQLLSIQPVERPPGVFPAIDFSSAPPPKDAPPGMPPSPLD

SEQ ID NO: 353707 - protein, 169 aa, Zea mays
  Clone ID: MRT4577_85756C.1.pep
KPPLRLPPSATGYKELGAEKSGRNAEGDSWWEKWKEVLYQDEWSNLARIERSAEKQAKSGIENAGWYEKWWEKYDAKGWTEKGAHKYGRLNEQSWWERWGEHYDGRGFVLKWTDKWAETDLGTKWGDKWEEKFFAGIGSRQGETWHVCPGGERWSRTWGEEHFGNGYVT

SEQ ID NO: 353708 - protein, 83 aa, Zea mays
  Clone ID: MRT4577_85757C.1.pep
TTTTKNLPKRFSVRPATLSTDNILNQGQGVSSSNNRLYCYYHHSNYPHFHFLKIYCATLLFKDLKGIGHQSSFMYFRRTGGPP

SEQ ID NO: 353709 - protein, 158 aa, Zea mays
  Clone ID: MRT4577_85758C.1.pep
LKKSGWTGYKKLGAEKSGKNAEGDSWWEKWKEVLYQDEWSNLARIEKSAEKQAKSGAENAGWYEKWWEKYDAKGWTEKGAHKYGRLNEQSWWERWGEHYDGRGFVLKWTDKWAETDLGTKWGDKWEEKIFAGIGSRQGRTLHVSPGRKRLSRTWGEEH

SEQ ID NO: 353710 - protein, 48 aa, Zea mays
  unsure (1)..(48): unsure at all Xaa locations
  Clone ID: MRT4577_85759C.1.pep
ASADTSTTITQWSQQYLFASTDMGFXYASIQSYMAQEAILASILPALT

SEQ ID NO: 353711 - protein, 144 aa, Zea mays
  Clone ID: MRT4577_8575C.1.pep
LIGMSSCLDLSGFFEKEDASERKIRFASNYPPAYLFEKIESIVRKMGFQVHKSNGKLKVSQDCKGLANSRGKESLLISAEVFEINESLYVVELKKSSGDCSLYRKLCETLSEDLGTCKSQQFLKQDSIRQEIVYWPCTYYRCAL

SEQ ID NO: 353712 - protein, 71 aa, Zea mays
  Clone ID: MRT4577_85760C.1.pep
AAGSGVRRCNSSDSGATMMLARMPRERHRRLIPVERHRLSPASGRHRRWPSGSPPLARPREPPPRSHAREN

SEQ ID NO: 353713 - protein, 121 aa, Zea mays
  unsure (1)..(121): unsure at all Xaa locations
  Clone ID: MRT4577_85761C.1.pep
PLSWXPRRSXXXXSXSVSXLXCRRCXSXXCWCXXXGXXRPSXSWRAPXSSRXCXSVPCAVXVGVVXVXLXXXGRXVXLXRGPXLLGVXGVXXAPLXVLLPALXXVGLXXXXXXLXLVAVQR

SEQ ID NO: 353714 - protein, 81 aa, Zea mays
  Clone ID: MRT4577_85762C.1.pep
RTPPGQAGCARRSGPPARCSAPHRVASLARRLPNTSSASPRRSAPSVRRLLAGVRRPPLTVSRNVKGVGRAEIGADWVGGN

SEQ ID NO: 353715 - protein, 57 aa, Zea mays
  Clone ID: MRT4577_85763C.1.pep
KKKKNLNFKKKKKKKKKKKKKKKKKKKKKKKKKKKKKFFLKKKGGGRFLKDPSLAPF

SEQ ID NO: 353716 - protein, 132 aa, Zea mays
  Clone ID: MRT4577_85764C.1.pep
MDVWFTQGESVRKADESRGLLNADVENRDVSNSVSGERKTDETNMMMSYYEQIVNERRAGFWGRCMEIIYQTSAGATMLTDVTYWGLLVPFFYRDKFGLALFTDGMHSLNAVFLLIDTLLNNMPFPWYRMAF

SEQ ID NO: 353717 - protein, 103 aa, Zea mays
  unsure (1)..(103): unsure at all Xaa locations
  Clone ID: MRT4577_85765C.1.pep
MKRFPRVTSSRRKRRKVNFTIPPSARHVLMPVGISTHLRQKDYVXRCVPIRKEDDRQGVHGTYEGXREAKVLQENHRXLVYPHPVNRCQKVNCSAVNISILIS

SEQ ID NO: 353718 - protein, 66 aa, Zea mays
  Clone ID: MRT4577_85766C.1.pep
FSTITKSIKNGVRAFYLFRRHSSIQIKRFKKVVALYTKHSLFINAPLMSSIIAYCVHSTHDMTYTR

SEQ ID NO: 353719 - protein, 64 aa, Zea mays
  unsure (1)..(64): unsure at all Xaa locations
  Clone ID: MRT4577_85767C.1.pep
PVARSVVITHGRLAERVRYPTCARCPELLPVMLQASELARIAYTRTXVGSXPGNXPDPGTCRRY

SEQ ID NO: 353720 - protein, 65 aa, Zea mays
  Clone ID: MRT4577_85768C.1.pep
DARTFSNDSIRFTFIEDIYIYNRRDSFKHRKSFIPMKCVFYELFQNPAPKKAMTEIFMHKKNNVS

SEQ ID NO: 353721 - protein, 86 aa, Zea mays
  Clone ID: MRT4577_85769C.1.pep
FFFFFFSRRMAAAAPKEALLKGTNHKSLGSVTGTPATKYINFLFARNQTHSTNYTSHWSKYYVQFHLLIPFSNWGIRWTKKHIDLV

SEQ ID NO: 353722 - protein, 107 aa, Zea mays
  Clone ID: MRT4577_8576C.1.pep
MDEDEFRRMLDLFPVVRSRDYCCSDLGTSSRGTRQRSRVQEATKGDNKDSSGGRDMFMQKLKMAAENKIGATKAEFFCKTFEEVHEKLVHRELNLDAAKKFLSAYES

SEQ ID NO: 353723 - protein, 122 aa, Zea mays
  Clone ID: MRT4577_85770C.1.pep
KYVEAYKITNNLLDSGRYRIIVDMNAGLGSFAAALESPKLWVMNVVPTIANTSTLGVIYERGLIGMYHDWYVLLTYLLYCSPVFLEFFNLHIMFDLLCKIPKSFFSIVTFYFYILFNFFLCC

SEQ ID NO: 353724 - protein, 61 aa, Zea mays
  Clone ID: MRT4577_85771C.1.pep
NIVRRKTVKFDPLKWPPLYSNFNLVREDSVDSHKLVIALGFKCHWLIFSFVCFYFLNAFKS

SEQ ID NO: 353725 - protein, 98 aa, Zea mays
  unsure (1)..(98): unsure at all Xaa locations
  Clone ID: MRT4577_85772C.1.pep
EYGSPEEFLSQVDYLLGKQAYGGKTDSEGGFETDAVATXNVLESSTPVVDGKQYYSIXVLTRTADGDEGGKHXXIXAXVSXGKLYICKAXAXDKRFXK

SEQ ID NO: 353726 - protein, 301 aa, Zea mays
  unsure (1)..(301): unsure at all Xaa locations
  Clone ID: MRT4577_85773C.1.pep
VVAFLESTAGGVSYTGDGWLHECAKWDAEGGRFLASTFFGGGVAEVRAGEGEERVVVADPDAAGRVALGLAVDAPRRRLLLVYCDRPPRFGYAALAAYDLGSWRRLFLXHVLDVPGESTFPDDVAADEEGNAYVTDASGNKIWKVSPSGVLLGVVKNSTFVQRPGLRHNLVGLNGIVYHPNGYLLVVHTFGGDLFKVDPKTEAVHAVKVQGSLGRGDGMELLSPTRLVVAGTPSSRLVESSDDWETARVTGQYVGPVHRVGSSATVKDGDVYINHIVGFGLGKKKTHVLARAVFSPLAAES

SEQ ID NO: 353727 - protein, 121 aa, Zea mays
  unsure (1)..(121): unsure at all Xaa locations
  Clone ID: MRT4577_85774C.1.pep
MGAMKQGHTVNGKSIKQIQQLQRQMDPHQHSEKAWVRXIYGVPHEIRSFVPLWAGGTIIGATHKVDLRYTKQMGVVRLLVGVTNVDKIPESADIVVEESLYEIFFKIDKVRKDGVWSEYYY

SEQ ID NO: 353728 - protein, 43 aa, Zea mays
  Clone ID: MRT4577_85775C.1.pep
RKRDTMRSIHHIRRAKCATTGRVPIANQVEHQMVRPIGTALLS

SEQ ID NO: 353729 - protein, 72 aa, Zea mays
  Clone ID: MRT4577_85776C.1.pep
LSCGSRAEIICSLLSIAPADMPNMHNTVYTKFNKLLRSWTKLASYKHGVRDICTAIILYLKGRINHFTNKIL

SEQ ID NO: 353730 - protein, 110 aa, Zea mays
  Clone ID: MRT4577_85777C.1.pep
MSAPRATSPNAASSGSTTARPASPKPPGGPATVMRRKAAADRAEKTANLRPSSTRAAGAGGSSSTMLRLYTDESPGLKVDPVVVMTLSVVFIFSVVALHVIAKVMRRFSA

SEQ ID NO: 353731 - protein, 74 aa, Zea mays
  Clone ID: MRT4577_85778C.1.pep
IDEQWLISAGCRCCFITGPHTLSLAEESVSIYAAGGTSYPWPKGGILFIGVTDPCLCYRYYVQNIHIIMLVLCT

SEQ ID NO: 353732 - protein, 96 aa, Zea mays
  Clone ID: MRT4577_85779C.1.pep
CGEAGLWCPCSCVSIIVRGQRGLVVAVGDGVVEWPAFFSHHDRVRQPSAMYDVAELAGAGAKPSRAFQYVILLEEPQVTMLADRARTARGSSAGSR

SEQ ID NO: 353733 - protein, 71 aa, Zea mays
  Clone ID: MRT4577_8577C.1.pep
KNKKTPGERKKKKNPLKEKTGFNFYFPGAKLNLGQKVQSLPHCFPVKAKQAQMETLKFVGKKKKTFKKLGF

SEQ ID NO: 353734 - protein, 112 aa, Zea mays
  Clone ID: MRT4577_85780C.1.pep
AFLRPHRPTLLLARPRSPMAAAPVVTPLAYTDDEIVYESMPCICVYIKRSERYFGTEFVFASTDAGTVVASRDLVIYPNVCSRLYLPGLDDESAQATHLRLLARERVLTRVR

SEQ ID NO: 353735 - protein, 59 aa, Zea mays
  Clone ID: MRT4577_85781C.1.pep
CLTTANKLNEDPKYSKGTIVIHRTMSKSLARYLIHALGTPYLPKAPSEGDCTCHSLEDD

SEQ ID NO: 353736 - protein, 98 aa, Zea mays
  Clone ID: MRT4577_85782C.1.pep
TGGSVSALADADAAAFFLRAPRFLGPTRVLIRSTRSSKSSSAVAVLVSAGAGSWSAAAAASSPEQSARGGNGSSSSRARCRRGERRAVGPKGLQTGVA

SEQ ID NO: 353737 - protein, 59 aa, Zea mays
  Clone ID: MRT4577_85783C.1.pep
HDFSNTRFTEHTLSLYSKSRSQKYLGYHFICLHPFLFSTKQLAYLFSWAQTCMNKKYLK

SEQ ID NO: 353738 - protein, 136 aa, Zea mays
  Clone ID: MRT4577_85784C.1.pep
ATPFRPLSVARSISPPTMGKENHHINIVAIDHVHSGKWTTTGHLIYKLGGLDKRVIERPEKEAAEMNKRSFKNARVLDKLKAERERRITIDIAVRKHETTKYYCTVVDAPGHRDFIKNMNTETSQADCAGAIIDST

SEQ ID NO: 353739 - protein, 86 aa, Zea mays
  Clone ID: MRT4577_85785C.1.pep
THTKTLLDWLWNILYSTHCHLPGLGGMPSDQILLCPVHVLRPDSLIGGAYYPVTSLLLYYPYLLRQFIFIGSVLYVALVRGVSHSP

SEQ ID NO: 353740 - protein, 202 aa, Zea mays
  Clone ID: MRT4577_85786C.1.pep
MSCNGCRVLRKGCSDACVLRPCLQWIDGAEAQGHATVFVAKFFGRAGLMSFLTAVPEPQRPAVFQSLMYEAAGRTINPVSGAVGLLGAGSWQLCQAAVETVLRGGAIGPLPEFDGGRDNTFALAATARRAVGCSTSSSRPAGAVVRPRAVAQPRVVPGAGRAAAAAARHAVHDLRGVRDDDERRRRRWREGARAAEPFCLRL

SEQ ID NO: 353741 - protein, 52 aa, Zea mays
  Clone ID: MRT4577_85787C.1.pep
SPINIIKYCESNFHDKSSNILHSQSTQSFTYPWSKSKKCLICRNLNGIYLEV

SEQ ID NO: 353742 - protein, 279 aa, Zea mays
  unsure (1)..(279): unsure at all Xaa locations
  Clone ID: MRT4577_85788C.1.pep
MSGLPPGGAWVVPGMSCNGCRVLRKGCSDACVLRPCLQWIDGAEAHGHATVFVAKFFGRAGLMFFLTAVPEPQCPGTYLNPPAEVLAGYLSTRRGYPYDPVCLLPRARTCGSXLMADVLTRSRDAAVFQSLMYEAAGRTINPVSGAVGLLGAGSWQLCQSAVETVLRGGAIGPLPEFDGGRDNTFALAATARRAVGCSTFSTAKRGAPTRTNLGAAPPVPPEPSCDLGLWLSPGSCPAPGERRRRRPGTPSMTSEESVTTTSGGGGGGGREPELLNLFV

SEQ ID NO: 353743 - protein, 60 aa, Zea mays
  Clone ID: MRT4577_85789C.1.pep
FNKASFIFLFAQHTVHEFIWTNKFGNHQVLMPISFHIVHDYKSEPGNEFEYLLLIVISRS

SEQ ID NO: 353744 - protein, 49 aa, Zea mays
  Clone ID: MRT4577_8578C.1.pep
RKNFQGCWGVPIQPKVYFFFKQKVFAQQFVFPILKNLFNFSKIKGGCLR

SEQ ID NO: 353745 - protein, 182 aa, Zea mays
  Clone ID: MRT4577_85790C.1.pep
LGRASWSALLAQLTTRQRNPLQTSRHVHALCNPAPAIPQRPLLTALHSSHPAMSMADEAELAFLEAQKDEEYDPSAGYNMPDAPTGQEEYDPTATFSAHSEQSGSAPPESGANSPPPTTESEHGSQSQPPQAPAEASAAPQSKRPRTVGGFVDESEDEEEESAAQPQEANATLLRATGDAES

SEQ ID NO: 353746 - protein, 52 aa, Zea mays
  Clone ID: MRT4577_85791C.1.pep
SSTAFTVVSGTTGNLAVPMPMAGMGLASPDRSATSGTAVVEAMRRICRVIEL

SEQ ID NO: 353747 - protein, 38 aa, Zea mays
  Clone ID: MRT4577_85792C.1.pep
NGPFMAQSQHRGLCVRSHRLALIIGTSSRKLDNIIILV

SEQ ID NO: 353748 - protein, 80 aa, Zea mays
  Clone ID: MRT4577_85793C.1.pep
GAHLHTTSIGRACSWLGRDCPSSTTEGALPVQSSGRRGPHGAHLGINPDTEEADTCDDTAGHEAGSDHIRSGPACGDPPI

SEQ ID NO: 353749 - protein, 119 aa, Zea mays
  Clone ID: MRT4577_85794C.1.pep
KCDCTLTRILIDGSQLTLHVCTCALSEDIVLSQSMERALTVTCDSVCSSACTIPLNRGIIKFRQQQLSRVETTTGCWVQHIRKVSKGQSSLELNVEKHDAVINGHAWRPGIGACLHVAK

SEQ ID NO: 353750 - protein, 142 aa, Zea mays
  unsure (1)..(142): unsure at all Xaa locations
  Clone ID: MRT4577_85795C.1.pep
GALXTFAAGGGGXXAXAATAAXPXPLAPAPASSEKALLQFEDTGRLFAGEPXPXXXXTGGGAGXXSLGPLVDAATAALRSPAVAGSALGRAAPRATAYPHFFAGETPGEALAAXRPLWRGGMGGVLPYRIPDPXDXGACDRN

SEQ ID NO: 353751 - protein, 67 aa, Zea mays
  Clone ID: MRT4577_85796C.1.pep
GRGPSLLAPFSAGGASPGPQTHLGARTPPFLGERFNVLGQDKRGWLPPGPGEIWGRLVKKLPISQSN

SEQ ID NO: 353752 - protein, 132 aa, Zea mays
  Clone ID: MRT4577_85797C.1.pep
GRVGNNVVIRLLEILELCMCRDYSAALLVLVSQLGRSFVDDVGYEERSVSKLRNKLSLLLTGAHFTKSWSLSVQFTAIGALVSVLPLPFDKIVATGSRQLSGSFDVEMKQISEWFVQLSSEHQYLARSFFSC

SEQ ID NO: 353753 - protein, 132 aa, Zea mays
  unsure (1)..(132): unsure at all Xaa locations
  Clone ID: MRT4577_85798C.1.pep
SNHAQPVPSYIKPVYRHYTTELRHEGKDGASRWVARPRVAERYMLRTRTAGPNLRVMLXRGGGNIRSTLTDCVIANREGILWATKDKVQQANYYXCLTQAXSTMRVNRFNGXEEIYAXPFKSXLLPMENPND

SEQ ID NO: 353754 - protein, 78 aa, Zea mays
  Clone ID: MRT4577_85799C.1.pep
ALYHGRPGRDKLFFFFFFFFLFFFFFFFFFSFFFPKHPSSPYIIPFHFNGQITTFLGRRAVLIANPPLLIPAKRVNSL

SEQ ID NO: 353755 - protein, 182 aa, Zea mays
  unsure (1)..(182): unsure at all Xaa locations
  Clone ID: MRT4577_8579C.1.pep
ILDPNPITRVDVDGIRAHDWFKQGYAPSAPFNDDEEDINVDEEDSLNMTEQNGIQYKIAINQINAFQLIGMSSCLDLSGXXEKEDASERKIRFASNYSPAYLFEKIESIVXXXGFQVHKSNGKVFEINESLYVVEXXXSSGDCSLYRKLCETLSEDLGTCKSQQFLKQDSIRQEIGRHNSSF

SEQ ID NO: 353756 - protein, 123 aa, Zea mays
  unsure (1)..(123): unsure at all Xaa locations
  Clone ID: MRT4577_857C.1.pep
MSDAAVDTSSEITTKDLKEKKEVVEEAENGRDAPANGNAQNEENGEQEADNEVDEEEEXGGEEEEEEEEGDGEEEDXEXXXEEAEGSXTGKRVAXEDXXEDXRCXXKKXEDPEEDXLDSQKEK

SEQ ID NO: 353757 - protein, 125 aa, Zea mays
  unsure (1)..(125): unsure at all Xaa locations
  Clone ID: MRT4577_85800C.1.pep
MRHLAEAETASKAATANKGDAXTHALKVAKAVXLGQPSRXTNNIRSSVTFHRPTDXLKKASDPKYPRFITTVRNKLDQYQILKYPLTTDSAMKTIDDNNTLIFIVDLKAYKMKIKADVNKMYDIH

SEQ ID NO: 353758 - protein, 152 aa, Zea mays
  Clone ID: MRT4577_85801C.1.pep
MAPKAAPVKKGDAKAQALKVAKAVKSGAGKKKTKKIRTSVTFHQPKTLKKARDPKYPRISTTGRNKLDQYQILKYPLTTESAMKKIEDNNTLVFIVDLKADKKKIKAAVKKMYDIQAKKVNTLIRPDGKKKAYVKLTPDYDALDVANKIGII

SEQ ID NO: 353759 - protein, 113 aa, Zea mays
  Clone ID: MRT4577_85802C.1.pep
MAPKAAPAKKGDAKAQALKVAKAVKSGAGKKKTKKIRTSVTFHQPKTLKKARDPKYPRISTTGRNKLDQYQILKYPLTTESAMKKIEDNKNTLVFIVDLKADKKKIKAAVKKM

SEQ ID NO: 353760 - protein, 177 aa, Zea mays
  Clone ID: MRT4577_85803C.1.pep
NSLPVFFYLTVVSLAAPDYLLFYLTVVSLAAPAKKGDAKTQALKVAKAVKSGAAKKKTKKIRTSVTFHRPTTLKKARDPKYPRISTTGRNKLDQYQILKYPLTTESAMKKIEDNNTLVFIVDLKADKKKIKAAVKKMYDIQAKKVNTLIRPDGKKKAYVKLTPDYDALDVANKIGII

SEQ ID NO: 353761 - protein, 152 aa, Zea mays
  Clone ID: MRT4577_85804C.1.pep
MAPKAAPAKKGDAKTQALKVAKAVKSGAAKKKTKKIRTSVTFHRPTTLKKARDPKYPRISTTGRNKLDQYQILKYPLTTESAMKKIEDNNTLVFIVDLKADKKKIKAAVKKMYDIQAKKVNTLIRPDGKKKAYVKLTPDYDALDVANKIGII

SEQ ID NO: 353762 - protein, 74 aa, Zea mays
  Clone ID: MRT4577_85805C.1.pep
FFSFCFGVGLFFFLVLLGRFFGKNVPRFSLGGREILKKKINKKIKKKKKKKKKKKKKKKKKKKKKKKKKKKKSL

SEQ ID NO: 353763 - protein, 79 aa, Zea mays
  Clone ID: MRT4577_85806C.1.pep
LQLETIQNKKKTCVLFDAQCSPIPKKINSSKVKYNIWNSGSTNNGQILINILDRLHIRNINNSGINIGSKINRIRAHAS

SEQ ID NO: 353764 - protein, 121 aa, Zea mays
  Clone ID: MRT4577_85807C.1.pep
GSRQTSGGGFCRFREKKARKFFGAGPSPQVSCGINQIVRRPPFVTKMSKKLRPNCPFLIPFLIGTPDPPLGEYPLCQIFFGRDFFFHMKSKYQWGLCAPPKKQKNQKKKTKKNQKKKKKNK

SEQ ID NO: 353765 - protein, 37 aa, Zea mays
  Clone ID: MRT4577_85808C.1.pep
SRISLGVMWVGFVLGFHDQLTLCWTFYLCFHSVPRGL

SEQ ID NO: 353766 - protein, 179 aa, Zea mays
  Clone ID: MRT4577_85809C.1.pep
GRRAQSRAAAAAAEERLQSAIPITQRQQARTPPLPMLLQLVKQLAPKIVVAIDHGSDRGDLPFSQHFMNCFQSCMFLLDSLDAAGTNADAASKIERFLIQPRVEDAVLGRRKAEKAMAWRAVFTSAGFAPVPLSNLAEAQADCLLKRVQVRGFHVEKCGMGLALYWQRGELVSVSAWRC

SEQ ID NO: 353767 - protein, 112 aa, Zea mays
  Clone ID: MRT4577_8580C.1.pep
SSRPGDRRLDVYPVRLRPPCTRMSFGACSTSSRSSAPETTAAPILPTSIRRIRLRSRVQEATTRDNKDSFCAPDHVYAQIENGSRTIILERQRQSSSARHSNKFMINLFTES

SEQ ID NO: 353768 - protein, 152 aa, Zea mays; identical to SEQ ID NO: 353761
  Clone ID: MRT4577_85810C.1.pep

SEQ ID NO: 353769 - protein, 65 aa, Zea mays
  Clone ID: MRT4577_85811C.1.pep
SPAGQTRSHLLHFARYKITTVGTKLRAALPISNIFTLPHNLSNYSGYYKNTTTANPPIASLLSNK

SEQ ID NO: 353770 - protein, 184 aa, Zea mays
  unsure (1)..(184): unsure at all Xaa locations
  Clone ID: MRT4577_85812C.1.pep
MAPKVVSLAAPAKKGDAKTQALKVAKAVKSGAAKKKTKKIRTSVTFHRPTTLKKARDPKYPRISTTGRNKLDQYQILKYPLTTESAMKKIEDNNTLVFIVDLKADKKKIKAAVKKMYDIQAKKVNTLIRXHLLQCSFFLHDLLCCATKELFLSCLCRPDGKKKAYVKLTPDYDALDVANKIGII

SEQ ID NO: 353771 - protein, 121 aa, Zea mays
  Clone ID: MRT4577_85813C.1.pep
MRWIWWQQVAEVKRPWQAHARPNEHAYLPHDCGVQLFMRPHASRINQELQIALLGQKASEHHPSTTASTRLDAQQKKLKYLQLSNINNRFILSKCATENVPAAIQGKEIHQCTTSMTPINE

SEQ ID NO: 353772 - protein, 149 aa, Zea mays
  unsure (1)..(149): unsure at all Xaa locations
  Clone ID: MRT4577_85814C.1.pep
AVLDLWGTNAEIHAVLIEILLLDPQXESRTKASVXMHQLKGXLHVLGHVPXDEDSAXNDLIDELREALHELIGELAVMQSLNLTLSIXECELNIALQELRXELLDVLLDLSRVQTHIIIKIVLKPYLKAFPKACTKDPTEXADFTGAFL

SEQ ID NO: 353773 - protein, 88 aa, Zea mays
  unsure (1)..(88): unsure at all Xaa locations
  Clone ID: MRT4577_85815C.1.pep
FIARAACRDGGGEDGKQKSLLVLVHKLFLLPHSVVDDLRKVDLRSVVCGAAKSSDIAXLYESLPVDGALXTDATLLAVMRAWIDEEIL

SEQ ID NO: 353774 - protein, 79 aa, Zea mays
  Clone ID: MRT4577_85816C.1.pep
IISPIFSQGGVVKTKILERTPPCNKPMDLGPPCPKKKPPPPLFFKPNPVWSSPKIFLLKMGMSKGKNSNSRETPNKHFF

SEQ ID NO: 353775 - protein, 126 aa, Zea mays
  unsure (1)..(126): unsure at all Xaa locations
  Clone ID: MRT4577_85817C.1.pep
PDSTSNSCIQPLEPIKEEYHTLFYAHFNQLDQVVAVEATDRPVIPFHPHREHKPHSTPEDRLPYATKASDHLMQVFGKHITLSHHDILTLFADHTLIMSLIEHTVFDGAXTTNPXLFDNSYFNELL

SEQ ID NO: 353776 - protein, 63 aa, Zea mays
  Clone ID: MRT4577_85818C.1.pep
GCDYIYDRCLSPCFKMPPHFTIRVPLVIQGSRNHSRDLGANVIVFLLIPSNSSEILGHQISYK

SEQ ID NO: 353777 - protein, 244 aa, Zea mays
  unsure (1)..(244): unsure at all Xaa locations
  Clone ID: MRT4577_85819C.1.pep
MGLLSNRIGRESLKAGDHIYSWRAAWVYAHHGIYVGDDKVIHFTRGRGQEVGTGTVVDIILVSSTPKRSNTPCPVCTDETSDSSTETNGVVSSCLSCFLAGGALYRFEYAVNPALFLAKARGGTCTLAPSDPDDTVARRARALXGQSGQAISIIGGPLAAVVSTPGRLETGRVYGMAVMAVGVYCASRYAADIGNRRDVVKMEVEDLTAGLASGRICAVENIAQLVAPEAEGPADATATATLAA

SEQ ID NO: 353778 - protein, 416 aa, Zea mays
  unsure (1)..(416): unsure at all Xaa locations
  Clone ID: MRT4577_8581C.1.pep
VCLRRQILDRQRILAMKIHERIKREIATQGLGQYXDLALLVQVSASKTKIYMVLEYVNGGELFDKIALKGKLTEKEGRKLFQQLIDAVGYCHEKGVYHRDLKPENVLVDAKGNIKVSDFGLSALPQNQQKDGLLHTTCGSPNYIAPEVLLNKGYDGSISDVWSCGVILYVMLTGNLPFDDQNVVVLYQKILKGNAHIPKWLSQGAQDILRKILDPNPVTRIDVDGIRAHDWFKQGYAPAMPFSDDEEDISMDEDSLNITEHNDIQDKIAINQINAFQLIGMSSCLDLSGFFEKEDVSERKIRFASNYSPAYLFEKIESIVRKMGFQVHKSNGKLKVIQDCKGLANSRGQESLLISAEVFEINESLYVVELKKSSGDCSLYRKLCETLSEDLGTCKSQQFLKQDSIRQDIGRYNSSF

SEQ ID NO: 353779 - protein, 127 aa, Zea mays
  Clone ID: MRT4577_85820C.1.pep
LRGFTPVHRVRPWHRFARKSSGSRGVAHRTSRSTTEARYTVAGDFCASNHGENLLCQLALVFASHRSGRIRSLGAGARNRVLRYGAAVRCARTAAWSRWVENMCRWPLAVGLVANGVEQRAMVKSCA

SEQ ID NO: 353780 - protein, 278 aa, Zea mays
  unsure (1)..(278): unsure at all Xaa locations
  Clone ID: MRT4577_85821C.1.pep
MGLLSNRIGRESLKAGDHIYSWRAAWVYAHHGIYVGDDKVIHFTRGRGQEVGTGTVVDIILVSSTPKRSNTPCPVCTDETSDSSTETNGVVSSCLSCFLAGGALYRFEYAVNPALFLAKARGGTCTLAPSDPDDTVARRARYLXLSNGFRCYNLFKSNCEDFAIYCKTGLLVAEQGVVGQSGQAISIIGGPLAAVVSTPFRLVTTNIYGMAVMAVGVYCASRYAADIGNRRDVVKMEVEDLTAGLASGRICAVENIAQLVAPEAEGPADATATATLAA

SEQ ID NO: 353781 - protein, 52 aa, Zea mays
  Clone ID: MRT4577_85822C.1.pep
GSTAVGHSWTETDTRRRGAMLASHCFYCCLAWGADHTVHEQRRYSYSEVPML

SEQ ID NO: 353782 - protein, 75 aa, Zea mays
  Clone ID: MRT4577_85823C.1.pep
SPCSSGPQKACPWDPEAYGTCMAWASIVRRPRGWVNQESLNGCPWFKDITSRGHEGPYLRCKKWIPGSKDVIPSV

SEQ ID NO: 353783 - protein, 83 aa, Zea mays
  Clone ID: MRT4577_85824C.1.pep
KGGGGKSRSPPSLLKIHPGAQRYFYILSGGVRQVLLFRGLGFSFCGGPNNLDNPSFIQKSCLRGGRNFSIFRPLLVCSPFIKE

SEQ ID NO: 353784 - protein, 103 aa, Zea mays
  unsure (1)..(103): unsure at all Xaa locations
  Clone ID: MRT4577_85825C.1.pep
MYGSPASKDLNQPPPPTMXTPPASSGTDRRPARCSARSARSSSSPARAPPAPTPPPPPTTSSPASWPTTRSETPSRRRRRPSRPXPTSRMTPPPWRPSSTSSR

SEQ ID NO: 353785 - protein, 106 aa, Zea mays
  unsure (1)..(106): unsure at all Xaa locations
  Clone ID: MRT4577_85826C.1.pep
SGAGLDLDAVLKGTPILPXKEXAGITIAEIFNGLNDLSMRCQGSIHCDXKPGSEISDEVAGSLVTDFGLSMIALTGTVVRXMELPYRXAGTSGCLPPQCHGLPDHH

SEQ ID NO: 353786 - protein, 90 aa, Zea mays
  Clone ID: MRT4577_85827C.1.pep
CPPRAEHRVERNLYQAGALYEASLAKMIGQVGRRGRSTDQSMAQPNRIRHRSQLQEPTHLRHSLIKETAGICLLTGRVETHPAILGGPEH

SEQ ID NO: 353787 - protein, 109 aa, Zea mays
  Clone ID: MRT4577_85828C.1.pep
LLVWSQQSLRLANHVHGNELVKCPETEFTCIINIELTMQHRLVAPDAMHLGGHHVDMAPVLPPAGRSTAGVRVSSSCCLHGHPLPLLSHCSYPSFMIRNTNLWHGIDIM

SEQ ID NO: 353788 - protein, 128 aa, Zea mays
  unsure (1)..(128): unsure at all Xaa locations
  Clone ID: MRT4577_85829C.1.pep
MEIRYKACIYLMLALAXELSGRAQEEPANDEEGEDVLKLYAHSFHEADRKXPLKRAXLYARWCRHCKKPAPXSEIAGKGLTKHDPPSGLGQDEDYDDNNTPVATKHEIQGVPTIKIFTDQWKNIEDYK

SEQ ID NO: 353789 - protein, 108 aa, Zea mays
  Clone ID: MRT4577_8582C.1.pep
WRIFPPMPFSVDQRVVRKKNRSMESNYLDTTGDEGRFHGPHSDSTGTDCTSSAMTVLSSPDGIRTNNSLQVCTVQDADIPRSLTTKETTTTLVPAVSSVEVGYYNDAS

SEQ ID NO: 353790 - protein, 162 aa, Zea mays
  Clone ID: MRT4577_85830C.1.pep
AEVWVGDRRVFAVELSAGEPSGVGRESGPNCSPPSLTRRLPPCAVGEPPGDLIPDPKKNRPAQWATSMHHRAVDARSLARNRPSLPRRYRGPPSLGPAARRFPTCPLLECSVAVAAPRGSPQKSRGGGIVHLLPRCAGLPSIEAAQSRGKPRAATPLPPTAT

SEQ ID NO: 353791 - protein, 58 aa, Zea mays
  Clone ID: MRT4577_85831C.1.pep
GSPPRALPRPPRRSGSGPRQWPLVPMKRIMATRRSGPAYLEPRANKCLSLSLGWTCKK

SEQ ID NO: 353792 - protein, 125 aa, Zea mays
  unsure (1)..(125): unsure at all Xaa locations
  Clone ID: MRT4577_85832C.1.pep
PPPTPRYAGHGHGTTLEADPAAVNTPSXARPRAGPHYVARLSAPARQRGGPPPPPHRSPWHEEGGERVFVPDKSWVVGLPSSGIPRGGWSRAICAWRVLGTPPPPPASASAQGKCVVWEEEGSPR

SEQ ID NO: 353793 - protein, 650 aa, Zea mays
  unsure (1)..(650): unsure at all Xaa locations
  Clone ID: MRT4577_85833C.1.pep
MSPAACATPAAARPLNTVPTRRSPPSAARPPSAIPARRSAGCCFCASSSSASSPSTWDWTRWSRHFDEVDQAESYASLLQFQLEEAVENEDFAEAAKLKRDIIEATGNDAVAHVMAELKSAIEEQRYQDASRLTRLAGTSLVGWWVGYAKDTDDSIGRIVRISPGVGRYVAKSYNPRQLVTASSGTPLFEIFLVKEDDETYTMKVVHMRPTKGTSGAPSISSTITESPAKVENENSSESSAISDSVTEEANTDTTVRGNEDAEEKAQDVGSSKDSSVEGLKSVLNFFKSRIPEFKVQVINVDVAEETELAANSSEELVQDDVKSTPESSLEEPATEELEQEEDVPEENTDEESKSTEVKLFISGVVHNKEDAGAKSYVRVPAEINNMEKDSFELYIPGEGSDRDLAETKAAKQKVADMAAKLASELMPSDVAKALWGTAKSSSKINKEVQELLRLTLSKARVKLTENTIFKRIIMDTNSTDPFNGLYVGAFSPYGPEIVQLRRKFGHWNSTDDVEFFEYVEAVKLTGDLSVPAGQITFRAKIGKGKRLENRGAYPEEFGVIASYKGQGRIAQPGFKNPRWVDGELLVLNGXRVQFHTLEAQSSVSCIVYLSRVFWFSSIGLIFPSDETPKGSRLLTCRLHERAEAGHSSK

SEQ ID NO: 353794 - protein, 447 aa, Zea mays
  unsure (1)..(447): unsure at all Xaa locations
  Clone ID: MRT4577_85834C.1.pep
EEKEQDVGSSKDTSVDGFKSLLNFFKSRIPEFKVQVINVDVSEETELAANSSEESVQDDVKSTPEGSLEEPTTEELEQEEDVPEEDMDEESKSTKVKLFISGVVHNKEDAGTKSYVRVPAEINNMEKDSFDLYIPGNGSGHDLPETKAAKQKVADMAAKLASELMPSDVAKALWGTTKSSSKINKEVQELLRLTLSKARVKLTDDTFFNRIIMDTNSMDPFNGKVSPVKLMSISXDLTVGMLGXIGLYVGAFSPYGPEIVQLRRKFGHWNSSDDVEFFEYVEAVKLTGDLSVPAGQITFRAKIGKGKRLENRGAYPEEFGVIASYKGQGRIAQPGFKNPRWVDGELLVLNGXRVQSHTLEAQSSVSCTVYLSRVFWFSSIGLTFPSVETPKRSRFLTCRLHERTEAGPSSKCSNKSVACGPFFPSSSGLFCYLRCLPIFSPLLLGRS

SEQ ID NO: 353795 - protein, 82 aa, Zea mays
  Clone ID: MRT4577_85835C.1.pep
ITNESTTYAELAETYTDQERCDRRSSIVHESQISRCRLKSASDLKWNYWFHSSSLVSIPYGEHFDGYGQFDFFFLRLQSYLH

SEQ ID NO: 353796 - protein, 78 aa, Zea mays
  unsure (1)..(78): unsure at all Xaa locations
  Clone ID: MRT4577_85836C.1.pep
ILIQESHTMSSHDTEGSINRMRPSPADSCLSRDHRIGSSALSASAGAASSDGSGTRRREGHDYFRETEIQFXXXLERR

SEQ ID NO: 353797 - protein, 104 aa, Zea mays
  unsure (1)..(104): unsure at all Xaa locations
  Clone ID: MRT4577_85837C.1.pep
HYLHIDFITYRQVLQFIIILNRLTLRNRGFYLQKLLMAXEILNVINVINDQALQQLHMTVQEVKYLGMANXGGYLQLQQLPSSRPLPRSNAPTXLQQLLLQQIV

SEQ ID NO: 353798 - protein, 43 aa, Zea mays
  Clone ID: MRT4577_85838C.1.pep
LTNQMMFNCFQQPINLTKGAANDLHRWKVRLLVLSYYKTRRFS

SEQ ID NO: 353799 - protein, 84 aa, Zea mays
  Clone ID: MRT4577_85839C.1.pep
NLLWRVFSSVVPWVKPWGGGGSNRLAVAPPFTGWWLAGPARTGWHSLQFPTLCAVWNAPCTGALAARYGAVTRWVPALFPLLLA

SEQ ID NO: 353800 - protein, 60 aa, Zea mays
  unsure (1)..(60): unsure at all Xaa locations
  Clone ID: MRT4577_8583C.1.pep
PLVTIRLFTNYPYTFMLKLHNLLHSHHXLHKYGLKTILHNVYPKFIVHRPLILYITTTIF

SEQ ID NO: 353801 - protein, 112 aa, Zea mays
  Clone ID: MRT4577_85840C.1.pep
GSLNSAFYLQQQQLPFSQLPVASPQQFFPFNQLAALNSPVYLQQQQLLPFSQLGGVSPAPFLTQPQLFPFYQPVGPNAGPLLQLQQLGPFNHLALTNPPGFSPPPPLGGAPF

SEQ ID NO: 353802 - protein, 98 aa, Zea mays
  Clone ID: MRT4577_85841C.1.pep
MYRESLWQKRGRPRELYPDVSSKDAHVPPDFLCLIVTVADQLRYHWPEPEANEKNELAEELKSDLVLCKCGIEAKYGLVTSKLGETKKCNWERYTDKE

SEQ ID NO: 353803 - protein, 71 aa, Zea mays
  Clone ID: MRT4577_85842C.1.pep
LEAGRAYISSRRSTMSISPVAGDVSPLTPTAAADEAVRGTETVVAHEKVASHWDPLLAEALAQPSTPAHGF

SEQ ID NO: 353804 - protein, 84 aa, Zea mays
  Clone ID: MRT4577_85843C.1.pep
TLAREPHISMPHVPLSIPMRGQPLTALSATRLTTLCTTSHARHAHVLQAVLPLPPLQGVRSARELQLLRLSALLDSLLLPHGPE

SEQ ID NO: 353805 - protein, 63 aa, Zea mays
  Clone ID: MRT4577_85844C.1.pep
MGLLDSLYRVVMRRNAVYVTFVVAGAFAGERAVDYGVHKIWEMNNLGKRYEDIPVLGQRPAEE

SEQ ID NO: 353806 - protein, 125 aa, Zea mays
  unsure (1)..(125): unsure at all Xaa locations
  Clone ID: MRT4577_85845C.1.pep
MKHSIFNFYLYKGPYPKAMGAYXKKLSVDTKPANGXNHATMPSADVSIXDSSHTTGNLTEPKSYCENYLTHYQKPIPTTSLEEISTGXXDLASLYETMNEQDTSLTIIEKPLQMYNITGCQQITT

SEQ ID NO: 353807 - protein, 82 aa, Zea mays
  unsure (1)..(82): unsure at all Xaa locations
  Clone ID: MRT4577_85846C.1.pep
RGVPVHYAVPMERVRQARSRVXSWGDDTLWRVHLHELSVYAYASPXPDPVAESDFPSHLGPLWEGGTTDAPAPVAELLGGIF

SEQ ID NO: 353808 - protein, 401 aa, Zea mays
  Clone ID: MRT4577_85847C.1.pep
MAKLASIARSMLRFPNGSMRLVMVTVIGAVLGFFIGISFPSVSITKLHFPDSFISYIEDKDAGLTTQAILNHAWTSARNARGNGTEPTSNSTLKIYVPTNPKGAEGLAPGIVVSESDFHLRRLWGDPSEDLPFKPKYLVTFTVGVEQKANINRAVKKFSDNFAILLFHYDGRVSEWDEFEWSQRAIHISVRKQTKWWYAKRFLHPDIVAAYEYIFIWDEDLGVEHFNAEEYIKLVKKHNLDISQPGLEPDRGLTWQMTKRRGDSEVHKDTEERPGWCSDPHLPPCAAFVEIMAPVFSRDAWRCVWHMIQNDLVHGWGLDFALRKCVEPAHEKIGVVDSQWIVHQVVPSLGNQGQSENGRAPWEGVRARCRKEWGMFQTRMAEAEKAYYKMMGITPPNSTRV

SEQ ID NO: 353809 - protein, 246 aa, Zea mays
  unsure (1)..(246): unsure at all Xaa locations
  Clone ID: MRT4577_85848C.1.pep
PRVRYIKLVKKHNLDISQPGLEPDRGLTWQMTKRRGDSEVHKDTEERPGWCSDPHLPPCAAFVEIMAPVFSRDAWRCVWHMIQNDLVHGWGLDFALRKCVEPAHEKIGVVDSQWIVHQVVPSLGNQXKEKHYVFFLAFFNLTMXYDFXYHFPTITIRIPKPXGQSENGRAPWEGVRARCRKEWGMFQTRMAEAEKAYYKMMXINPPNSTRVPRLSSWFSIPANLTFVVAGELMILYELNIRKLNGG

SEQ ID NO: 353810 - protein, 151 aa, Zea mays
  unsure (1)..(151): unsure at all Xaa locations
  Clone ID: MRT4577_85849C.1.pep
TARKPGAXPRRPADGAEQXPSAXXGRTRXRRRGSGPSDEPPAGPXARGDGGGVGRGGGEERSAWAGRRGQGRQARAFICVRRRVGRAEVVRCACAARQCQLETWKGWVDGWLDRSIDQSSRRRGEELGQARKAGSQTKGKLETTPAGHXVP

SEQ ID NO: 353811 - protein, 46 aa, Zea mays
  Clone ID: MRT4577_8584C.1.pep
LVGTGVAESFGHPFLVPCYRGSSFLQPEGRGGSAVYYNGVALPADG

SEQ ID NO: 353812 - protein, 81 aa, Zea mays
  Clone ID: MRT4577_85850C.1.pep
MQTAGALFISPDLIRCCTRGLIRPVSASFLNSPVNSSKQPSYSNFPLQVARREFQTSVVSRDIDTAAKFIGAGAATVGVAG

SEQ ID NO: 353813 - protein, 102 aa, Zea mays
  Clone ID: MRT4577_85851C.1.pep
KDRDKDGFFGEGVQLQHQHGGGIKNMGVYIKKRGGLIYSSKKRGPNIYKRGGGKKKGGAGHMGSMGVRGKGQTTPAGGMGGGPQLKNGWDKKRKCKLHLALP

SEQ ID NO: 353814 - protein, 53 aa, Zea mays
  Clone ID: MRT4577_85852C.1.pep
KTGHTPNKQRQPLVICDTTTSYYNTKNYNHYSTTLTTNSHYPTSLIKHTRKSV

SEQ ID NO: 353815 - protein, 60 aa, Zea mays
  Clone ID: MRT4577_85853C.1.pep
CHPQAAHQGLGYLGLGTGNPHATFYKTLTGFIGVAYRLHWLLCGALMWSPCKGFVGDLPL

SEQ ID NO: 353816 - protein, 156 aa, Zea mays
  unsure (1)..(156): unsure at all Xaa locations
  Clone ID: MRT4577_85854C.1.pep
HDATHPVAHCSGYSEEHCLSWIQGDAEALSFEDGSMDGYTIAFGIRNVTHIEKALSEAYSXVLKQGWRFLCLELSHVDVPIFKXIYDAYSFSMIPAIGELVDGDRQXKTGNMLTRPVNLKPWQEKFAQMIQEAGFQRVEYENLLSGVVAIHSGLKL

SEQ ID NO: 353817 - protein, 152 aa, Zea mays
  unsure (1)..(152): unsure at all Xaa locations
  Clone ID: MRT4577_85855C.1.pep
MQHDMRKAADSGLWKPAVAGTDASCIVTGTAGYLPPXYYMSPYMAGNSAFYCIXLSTLELMYVHEPIXTDNSCLNCXNIGAWARTYIASGNMHPIIDESLDRGCSHLPSLWKTAWVAIMCLNANGAQRPILSAVLRAIHYTIAMVADARFQS

SEQ ID NO: 353818 - protein, 77 aa, Zea mays
  unsure (1)..(77): unsure at all Xaa locations
  Clone ID: MRT4577_85856C.1.pep
AFGIRNVTHIEKALSEAYSXVLKQGWRFLCLELSHVDVPIFKXDEKFAQMIQEAGFQRVEYENLLSGVVAIHSGLKL

SEQ ID NO: 353819 - protein, 119 aa, Zea mays
  unsure (1)..(119): unsure at all Xaa locations
  Clone ID: MRT4577_85857C.1.pep
RKHPGIPIGPLFQKFDGKCVFFDLYVRPCTLVRVFPEGHYGLFQGRCVIFGGVGLSTAFFSKECPPPEKGRAGFPKIVNFGSPQPGFFFXPKKYGFKKKFPKKRTWGWFPLAGGFVLWP

SEQ ID NO: 353820 - protein, 246 aa, Zea mays
  unsure (1)..(246): unsure at all Xaa locations
  Clone ID: MRT4577_85858C.1.pep
ILKSRSSLGYKQVREEDKSKLVGNVFSSVASSYDLMNDLMSVGLHRLWKDRLISKLNPFPGMKHLDVAGGTGDVAFRVLERVKSVCHRAMQXLLLKPTRPPTRPRTRGCDFSDHEMDQSSXSVGLDEXQVFVVCVSLIKGTHIYVCDINPNMLNVGKKCVAERGPEHEXSNRFCCLCLKCGLCCSTVGFYFQVIAKNIVXWIQGDAEALSFEDGSMDGYTIAFGIRNVTHIEKALSEAYRSANLEP

SEQ ID NO: 353821 - protein, 55 aa, Zea mays
  Clone ID: MRT4577_85859C.1.pep
SQQAKKAALLQILWCLTSRFVPLQNIITSVCPLWLVFPDTTKSLIASMLRKVFRF

SEQ ID NO: 353822 - protein, 78 aa, Zea mays
  Clone ID: MRT4577_8585C.1.pep
SYTRFAACLGTTESAAWMCRCSFIGTKRCSQYYETEKQSTTTTPRRTLSYNFCITKTKNNSNASKVMNQDMTWKQWRI

SEQ ID NO: 353823 - protein, 237 aa, Zea mays
  unsure (1)..(237): unsure at all Xaa locations
  Clone ID: MRT4577_85860C.1.pep
YWWXESGATVHVANSLQGLXTNHMLPKGQRTIRVAKXVEAVVKAIXDLHLSLDDCFIFLLSNFLYVHSLXKNLIXSISRLDDENVHCHLSVRKCIIQVNHNNVGLAIXQDMLYLLSHYDILNVIETSXNDANQNXEKVKKHDXETSSKLRYYRLGHISRRIIEHIVRKKILHPLEFTNLEHCRKCIKDIFMKQXKKTSKHSMRVLEIMHTXCGPFSIRIVDSFGSFITFIDNYSHES

SEQ ID NO: 353824 - protein, 305 aa, Zea mays
  unsure (1)..(305): unsure at all Xaa locations
  Clone ID: MRT4577_85861C.1.pep
MAMQAARRLASLKLQRRLLLPSQAESPSISIPTAAAAAAFLHSHATSFGYKQVREEDKSKLVGNVFSSVASSYDLMNDLMSVGLHRLWKDRLISKLNPFSAMKHLDVAGGTGDVAFRVLERIKSVSHRAMQGTLTETEEDTXXYVCDINPNMLNVGKKRAAERGYGEEHCLSWIQGDAEALSFEDGSMDGYTIAFGIRNVTHIEKALSEAYRVLKRGGRFLCLELSHVDVPVFKEIYDVYSFSVIPTIGELVAGDRQSYQYLVESIRRFPNQEKFAQMIQEAGFQRVEYENLVGGVVAIHSGLKL

SEQ ID NO: 353825 - protein, 83 aa, Zea mays
  Clone ID: MRT4577_85862C.1.pep
MGEGKNKRISKGKNGGKKKTRCPIYKNDGYDINAPAVFIVRNIGKTLGSRTQVTMIASDGLKHRVYEVCIADLQGDKDQAYTK

SEQ ID NO: 353826 - protein, 72 aa, Zea mays
  Clone ID: MRT4577_85863C.1.pep
KGKFKKRAHALSRYYLFGTKIKTKKGWSFDAAKQNYLGALANLHDEICKNFLNQMLPEKKLFVLKKTAGFFP

SEQ ID NO: 353827 - protein, 154 aa, Zea mays
  Clone ID: MRT4577_85864C.1.pep
MTLPIQLLTAASGYSEGHCLSWIQGDAEALSFEDGSMDGYTIAFGIRNVTHIEKALSEAYRVLKQGGRFLCLELSHVDVPVFKEIYDVYSFSVIPTIGELVAGDRQSYQYLVESIRRFPNQEKFAQMIQEAGFQRVEYENLVGGVVAIHSGLKL

SEQ ID NO: 353828 - protein, 84 aa, Zea mays
  Clone ID: MRT4577_85865C.1.pep
CLELSHVDVPIFKEIYDVYSFSMVPAIGELVAGDRQSYQYLVESIRRFPNQEKFAQMIQEAGFQRVEYENLVGGVVAIHSGLKL

SEQ ID NO: 353829 - protein, 156 aa, Zea mays; identical to SEQ ID NO: 353816
  unsure (1)..(156): unsure at all Xaa locations
  Clone ID: MRT4577_85866C.1.pep

SEQ ID NO: 353830 - protein, 71 aa, Zea mays
  Clone ID: MRT4577_85867C.1.pep
LVRWGQFAVLEQLGAVPAPWILAQVLVRPIGGHLALSTVAGRRSGGPARTPVRPCSSSGGRLVDPHQSHRL

SEQ ID NO: 353831 - protein, 403 aa, Zea mays
  Clone ID: MRT4577_85868C.1.pep
MGVHNRVVHVLPLCSRPRPNLPRIPQPPTLTFHPPRSHSSRSRDPRGAHLPSRSAHLHPPPSILRTATHPAAAIPAALTFHPAARTFILRDRSRISHRRRCSAIKGIRGQQTAWRSPRRAGEEACADTRQDAPAEAEPPPRRPPVFYSSVFAQIEEIGWKQLVSATGEGVSCTPVSPSVSCHDSCIDFSRLGCTKSVSFVKAEHLNGGKIRQTRIEDYSYDKDVVEIKLPDTDLSSDYGVHFVKDVCIDEGVLPDQKISSEKQVDQKVSINFDSREEISADSTKTAHELKSEIVVLPVKCDTHDNIVEQNSSCKKRDLEDNNTTDVSTESNDEGLNPKQLPFHEVAQDYQKVDSVISESNENQDWLFTGDATHQGLEKYVMTKLFNRVFASVLEDVKSDEELF

SEQ ID NO: 353832 - protein, 143 aa, Zea mays
  unsure (1)..(143): unsure at all Xaa locations
  Clone ID: MRT4577_85869C.1.pep
HDATHPVAHCSGYSEEHCFSWIQGDAEALSFEDGSMDGYTITFGIRNVTHIEKALSEAYSXVLKQGWRFLCLELSHVDVPIFKXDXLVDGDRQXKTGNMLTRHVNLEPWQEKFAQMIQEAGFQRVEYENLLSGVVVIHSGLKL

SEQ ID NO: 353833 - protein, 119 aa, Zea mays
  Clone ID: MRT4577_8586C.1.pep
NERNPFTFWLGAVYNTTGLYRLLIAVAFSLGDRTPKIKKKDRNESKRRPLEVQAETMDSKQWSPSNSGANRGRASRRRSAAGARWSAAFSCLGVGAVSAAAAWGRGRPAAEARHESRAE

SEQ ID NO: 353834 - protein, 136 aa, Zea mays
  Clone ID: MRT4577_85870C.1.pep
ICQAGVFVGIALALLLFVSFGRLAEIFSKDPMVIQIVRSGVLFVSASQPINALAFIFDGLHFGVSDFSYSASSMMVVGAISSLFLLCAPPFFGLLGVWAGLALFMSLRMTAGFMRLGWRAGPWWFLHRKEPKYRLQ

SEQ ID NO: 353835 - protein, 50 aa, Zea mays
  Clone ID: MRT4577_85871C.1.pep
GPNPHGLVICFGHKNYCFETNPVLTANRGFTKRGPPITFLWGVTKDRTHY

SEQ ID NO: 353836 - protein, 61 aa, Zea mays
  Clone ID: MRT4577_85872C.1.pep
YDCQGGRGREDNLETLRSIPGGSTPVTRQANRTGGSQITAVCCSLGWTPAAQHKGYFIGPS

SEQ ID NO: 353837 - protein, 43 aa, Zea mays
  Clone ID: MRT4577_85873C.1.pep
SMMALREMARGFPIFSLEHQLPQLAPAPPTASNHNRNIVVPNL

SEQ ID NO: 353838 - protein, 83 aa, Zea mays
  unsure (1)..(83): unsure at all Xaa locations
  Clone ID: MRT4577_85874C.1.pep
KKKKXKRKKKKKKKKKKKKKEKEKKRKEKEKKKKKXXKEKTKQEKKEKKQKRTDKKKKKKKRHPPEGNKRKRKKREXXKXKKG

SEQ ID NO: 353839 - protein, 56 aa, Zea mays
  Clone ID: MRT4577_85875C.1.pep
FSHLLQQLPRKRTFILTFASTTPTSTQTSATTTTTCSPTSSPSTTSYSTYLSTTSF

SEQ ID NO: 353840 - protein, 218 aa, Zea mays
  unsure (1)..(218): unsure at all Xaa locations
  Clone ID: MRT4577_85876C.1.pep
RGRPGRTPQQCAAFYARPPVNCAAFHCKPFVPPMPPPRLPSPPPPMLPSPPPPRLPSPPPPMLPSPPPPSPPPPSPPPPSPPPPLMSPPPPSPPPPSPPPPPLLPPPPQPHSPPPPLSSPPPPPPLPQPHSPPPPLSSPPPPPPLPQPHSPPPPLSSPPPPPPLPHSPPPPSPAPAPVYHPPPPXPPCPPCPVLPPPLPCTATHQWPPPPPILPRSHS

SEQ ID NO: 353841 - protein, 94 aa, Zea mays
  unsure (1)..(94): unsure at all Xaa locations
  Clone ID: MRT4577_85877C.1.pep
MLQLLPAQCKGARHGTLSVLRAIAVAFTYTRCARCLGRLMAFDPSGLSRTPEGXPGALIEXPSALVYGEVINGRYAMLGAVGAIAPEIFGKMGI

SEQ ID NO: 353842 - protein, 249 aa, Zea mays
  unsure (1)..(249): unsure at all Xaa locations
  Clone ID: MRT4577_85878C.1.pep
LRGWPGICDLPRLXQLTFAYNFFXGEPPACARVVPRDSDRSNCLPNRPAQRTPQQCAAFYARPPVNCAAFHCKPFVPPMPPPRLPSPPPPMLPSPPPPMLPSPPTPMLPSPPPPSPPPPLTSPPPPSPPPPSPPPPPLLPSPPPPQPHSPPPPLSSPPPPPPLPHSPPPPSPAPAPVYHPPPPPQCPPCPVLPSPLPCTPTHPWPPPPPYYPGPFPPTDPVRYASPSPPQQHHPWPSVYPVQYGSAPPP

SEQ ID NO: 353843 - protein, 238 aa, Zea mays
  unsure (1)..(238): unsure at all Xaa locations
  Clone ID: MRT4577_85879C.1.pep
GADGQAVDAVAVTRHDARARRRTPQQCAAFYARPPVNCAAFHCKPFVTSRPPPXPSPPPPMLPSPPPPMLPSPPPPRLPSPPPPMLPSPPPPSPPPPSPPPPSPPPPLMSPPPPSPPPPSPPPPPLLPPPPQPHSPPPPLSSPPPPPPLPHSPPPPSPAPAPVYHPPPPPQCPPCPVLPPPLPCTPTHPWPPPPPYYPGPFPPTDPVRYASPPPPQQHHPWPSVYPVQYGSPPPPPLH

SEQ ID NO: 353844 - protein, 375 aa, Zea mays
  Clone ID: MRT4577_8587C.1.pep
MGAEAAHGHPQQQPPSSLRPGREAAAPPAVVGLQLSALIDHVARVDWSLLDRVPGDRGGSQQVSIDELNHILDEVNAHILPSRNDLTPVTTIAGGSVANTIRGLSAGFGISTGIIGACGDDNQGLLFVNNMSFSGVDLTRLRAKKGHTAQCVCLVDASGNRTMRPCLSSAVKIQANEFRKEDFKGSKWLIVRYAQQNMEQIVEAIRIAKQEGLSVSLDLASFEMVRDSRSKLVNLLETGNIDLCFANEDEAREVIGGSLESDPEEALAFLGKYCKWAVVTLASKGCMAKHGKQVVRVPAIGESNAVDTTGAGDLFASGFLYGLVKGLPLEECCKVGACSGGSVTRALGGEVRPENWQWMYKQMHARGLLLPELKN

SEQ ID NO: 353845 - protein, 56 aa, Zea mays
  Clone ID: MRT4577_85880C.1.pep
GTSSINFNSKKSSQLNPRMLSQCLHERSCPRFLTFVTHHRAMYIYYPNLGESSPQQ

SEQ ID NO: 353846 - protein, 539 aa, Zea mays
  unsure (1)..(539): unsure at all Xaa locations
  Clone ID: MRT4577_85881C.1.pep
MPLDELADKGPSSSEEVQLAPSDSKFRSLSPAPIPLPTLPSIRSISTVSSLESERAAYEFLAQTPVRSTDAHLVEFSEAMRTVAKALRRVAEGKAAAQAEAAEWKRKYELETAHKHRSKIKGYSSCINNDLDKLVSQLTLETPTSDQLGCCGKHGICAHEILQDEVPGPIPRSNHKVVGRKASFKLSWGCNGDKNGQHKHDFVSFEKGDITTAERSNKXDLTEMGIATTNSAFXPNRIPTLCVFFVLXIRWLREYKNVNSFVEPRVSKELLTEDSYYNFVQTWDNDEEIKMLRTKVDLIITLGGDGTVLWXIIVQRTCSSGCCICPGITGLHDAXPSEQYRELLDNVLNGPFSITLRNRIQCHVIRDEAKDEIVSEEPFLVLNEVTIDRGISSYLTNLEVYCDSSFVTCVQGDGLIISTTSGSTAYSLAAGGSMVHPQVPGILFTPICPHSLSFRPLILPEYVTLRVQVPFNSRGNAWASFDGKDRQQLSPGDALICSISPWPVPTACLVDSTTDFLRSIHEGLHWNLRKSQSFDGPRD

SEQ ID NO: 353847 - protein, 557 aa, Zea mays
  unsure (1)..(557): unsure at all Xaa locations
  Clone ID: MRT4577_85882C.1.pep
DERRRLSGGFRGAANGGGGXVDPSWRFPSRRLRDAYVALQTWKRQAIFSDPSNLTADWVGPGVCNYTGVYCAPLPSGPDRGALAVAGVDLNHGDIAGFLPPELGLLADLALLHLNSNRFCGVLPRALRRLRLLHELDLSNNRFVGPFPDVVLDLPALRFLDLRFNDFEGTVPPRLFDRPLDAIFLNHNRLRFQLPDNLGNSPASVLVLAHNAFGGCLPASVANMSGTLNEILLINNGLSSCFPPEIGLLRELTVLDVSFNELAGPLPPELALMRKLEQLDVAHNLLTGAIPPGICDLPRLNNFTFAYNFFTGEPPACARVVPRDSDRSNCLPNRPAQRTPQQCAAFYARPPVNCAAFHCKPFVPPMPPPRLPSPPPPMLPSPPPPMLPSPPTPMLPSPPPPRLPSPPPPSPPPPSPPPPSPPPPLTSPPPPSPPPPSPPPPPLLPSPPPPQPHSPPPPLSSPPPPPPLPHSPPPPSPAPAPVYHPPPPPQCPPCPVLPPPLPCTPTHPWPPPPPYYPGPFPPTDPVRYASPPPPQQHHPWPSVYPVQYGSPPPPPLH

SEQ ID NO: 353848 - protein, 209 aa, Zea mays
  unsure (1)..(209): unsure at all Xaa locations
  Clone ID: MRT4577_85883C.1.pep
MPLDELADKGPSSSEEVQLAPSDSKFRSLSPAPIPLPTLPSIRSLVHSVSDESVNVDVAASHQSENGSISTVSSLESERAAYEFLAQTPVRSTDAHLVEFSEAMRTVAKALRRVAEGKAAAQAEAAEWKRKYELETAHKHRSKIKGYSSCINNDLDKLVSQLTLETPTSDQLGCCGKHGICAHEILQDEVPGPIPRSNHKXVGRKASFN

SEQ ID NO: 353849 - protein, 91 aa, Zea mays
  Clone ID: MRT4577_85884C.1.pep
VPYGQFTELGCPGRSTCRHLNPLFWYLAVKFWPFCLAYALLWVVLLVSRLYKVCDLAYVTPSEHFLPCLASALECQRKPRPSLQGGRRIRA

SEQ ID NO: 353850 - protein, 446 aa, Zea mays
  Clone ID: MRT4577_85885C.1.pep
MREILHIQGGQCGNQIGSKFWEVVCDEHGIDPTGRYVGTSDLQLERVNVYYNEASCGRFVPRAVLMDLEPGTMDSVRTGPYGQIFRPDNFVFGQSGAGNNWAKGHYTEGAELIDSVLDVVRKEAENCDCLQGFQVCHSLGGGTGSGMGTLLISKIREEYPDRMMLTFSVFPSPKVSDTVVEPYNATLSVHQLVENADECMVLDNEALYDICFRTLKLTTPSFGDLNHLISATMSGVTCCLRFPGQLNSDLRKLAVNLIPFPRLHFFMVGFAPLTSRGSQMYRSLTVPELTQQMWDSKNMMCAADPRHGRYLTASAMFRGKMSTKEVDEQMLNVQNKNSSYFVEWIPNNVKSSVCDIPPIGLKMSSTFIGNSTSIQEMFRRVSEQFTAMFRRKAFLHWYTGEGMDEMEFTEAESNMNDLVAEYQQYQDATAEDEEEYEEEEEEDPAA

SEQ ID NO: 353851 - protein, 531 aa, Zea mays
  unsure (1)..(531): unsure at all Xaa locations
  Clone ID: MRT4577_85886C.1.pep
MREILHIQGGQCGNQIGAKFWEVICDEHGIDHTGKYAGDSDLQLERINVYYNEASGGRFVPRAVLMDLEPGTMDSVRSGPFGQIFRPDNFVFGQSGAGNNWAKGHYTEGAELIDSVLDVVRKEAENCDCLQGXLVCLSIPPDLMFSHNFPSGVMATPALLDLGIMRHCHCSELVDLNSLAXLSCSSFCRMIPVPLSDCRVRRLTVIAMDYYASPLLPXFQVCHSLGGGTGSGMGTLLISKIREEYPDRMMLTFSVFPSPKVSDTVVEPYNATLSVHQLVENADECMVLDNEALYDICFRTLKLSTPTFGDLNHLISATMSGVTCCLRFPGQLNSDLRKLAVNLIPFPRLHFFMVGFAPLTSRGSQQYRALTVPELTQQMWDSKNMMCAADPRHGRYLTASAMFRGKMSTKEVDEQMLNVQNKNSSYFVEWIPNNVKSSVCDIPPIGLKMSSTFIGNSTSIQEMFRRVSEQFTAMFRRKAFLHWYTGEGMDEMEFTEAESNMNDLVAEYQQYQDATAEDEEYEEEEEEDPAA

SEQ ID NO: 353852 - protein, 241 aa, Zea mays
  Clone ID: MRT4577_85887C.1.pep
MREILHIQGGQCGNQIGSKFWEVVCDEHGIDPTGRYVGTSDLQLERVNVYYNEASCGRFVPRAVLMDLEPGTMDSVRTGPYGQIFRPDNFVFGQSGAGNNWAKGHYTEGAELIDSVLDVVRKEAENCDCLQGFQVCHSLGGGTGSGMGTLLISKIREEYPDRMMLTFSVFPSPKVSDTVVEPYNATLSVHQLVENADECMVLDNEALYDICFRTLKLTTPSFGDLNHLISATMSGVTCCLR

SEQ ID NO: 353853 - protein, 446 aa, Zea mays
  Clone ID: MRT4577_85888C.1.pep
MREILHIQGGQCGNQIGAKFWEVICDEHGIDHTGKYAGDSDLQLERINVYYNEASGGRFVPRAVLMDLEPGTMDSVRSGPFGQIFRPDNFVFGQSGAGNNWAKGHYTEGAELIDSVLDVVRKEAENCDCLQGFQVCHSLGGGTGSGMGTLLISKIREEYPDRMMLTFSVFPSPKVSDTVVEPYNATLSVHQLVENADECMVLDNEALYDICFRTLKLSTPTFGDLNHLISATMSGVTCCLRFPGQLNSDLRKLAVNLIPFPRLHFFMVGFAPLTSRGSQQYRALTVPELTQQMWDSKNMMCAADPRHGRYLTASAMFRGKMSTKEVDEQMLNVQNKNSSYFVEWIPNNVKSSVCDIPPIGLKMSSTFIGNSTSIQEMFRRVSEQFTAMFRRKAFLHWYTGEGMDEMEFTEAESNMNDLVAEYQQYQDATAEDEEEYEEEEEEDPAA

SEQ ID NO: 353854 - protein, 118 aa, Zea mays
  unsure (1)..(118): unsure at all Xaa locations
  Clone ID: MRT4577_85889C.1.pep
TSXXFXXCSXXKRSGKGGXXSXXHPFRXNGXXSTKEKQWGPRRAPLITXXLVRTRXLHQGXSQXSINAVADXXIMXXHSRRRGSPXWYTNSIFXXNGXRGXXMXLRXXCGPHXXAGLR

SEQ ID NO: 353855 - protein, 420 aa, Zea mays
  Clone ID: MRT4577_8588C.1.pep
HWVPRGRPGGAKTALPAIPSHLLHHRHIAADLIPPPLEESAEPTEGDHMGAEAAHPQQQPPSSVRPCREAAAPAVLGLQLSALIDHVARVDWSLLDRVAGDRGGSQQVSIVELNHILNEVNTHILPSHNDLTPITTIAGGSVANTIRGLSAGFGISTGIIGACGDDNQGLLFVNNMSFSGVDLTRLRAKKGHTAQCVCLVDASGNRTMRPCLSSAVKIQANEFRKEDFKGSKWLIVRYAQQNMEQIIEAIRIAKQEGLSVSLDLASFEMVRDSRSKLINLLETGNIDLCFANEDEAREVIGGGLESDPEEALAFLGKYCKWAVVTLASKGCMAKHGKQVVQVPAIGESNAVDTTGAGDLFASGFLYGLVKGLPLEECCMVGACSGGSVTRALGGEVRPENWQWMYKQMHARGMLLPELKN

SEQ ID NO: 353856 - protein, 72 aa, Zea mays
  Clone ID: MRT4577_85890C.1.pep
HIYGIWICPVCSRAAPPAHHRSVSGTGEAYMLPTLLFLLMISSPPTLKESYSFRPQRLVTYLEPHAWKGLHI

SEQ ID NO: 353857 - protein, 34 aa, Zea mays
  Clone ID: MRT4577_85891C.1.pep
WSTELRIENQTSTPSFSQVRSVQTAAGRCTHNSP

SEQ ID NO: 353858 - protein, 107 aa, Zea mays
  Clone ID: MRT4577_85892C.1.pep
RWGAFLRPRLKGIFSPGVGECPRVGPNFLPGGGFFIPGQIFLGDGVGLFRGFFLSPFFPKKPGFETIFPVGFFSGDAPFPPFFERGGWAPSFFGDWDSPPKGTFFFL

SEQ ID NO: 353859 - protein, 139 aa, Zea mays
  Clone ID: MRT4577_85893C.1.pep
RPGPPGHASQQPLPCRERGGPSPGPRTVVSVRGKHRDLGSLAHLHRAERKNGGRTEKLRRHGPAPRLLWCTATGFRRHLQCKSCGRSGWIDAGGPWDCLPGNLHSGRATLSGDRSDYAIPFGEEHVVQVEPHIKEFDLI

SEQ ID NO: 353860 - protein, 93 aa, Zea mays
  unsure (1)..(93): unsure at all Xaa locations
  Clone ID: MRT4577_85894C.1.pep
MHKSKPKAIHSHNTSGDNCIAIEPNATSHLPKLCLANTDHIPNLLSPNEHQSTVIAIYTLSQYITTSTVDGHFSLALXSTSFYAEQDSHIFHT

SEQ ID NO: 353861 - protein, 115 aa, Zea mays
  Clone ID: MRT4577_85895C.1.pep
LVTEAKRGRTPELPRAAGFPPRRRAPTNALHETWRRYRCTIGGAAPGHGGGVSPFSLHSSVPLDGGAPGSRGLGVCPERTQRCADQVTALCALYTVMAAAKHGRVPAGLEEPNRP

SEQ ID NO: 353862 - protein, 93 aa, Zea mays
  Clone ID: MRT4577_85896C.1.pep
MSAESCSWSPRPNVGAHPNYPGPLDSHHDDRIPPTHCTAHGSGTSAPEEARRRAMAVEFLCSPTILPFRSMEVRQAPEVSVFAPNGHNGERTR

SEQ ID NO: 353863 - protein, 105 aa, Zea mays
  Clone ID: MRT4577_85897C.1.pep
DVFFFFYGLFFGVCFCLFVIIPFIFKAELYMAGEPFGLPNTVLTRTSLSHHRHHGTNEIEVLCVPLLPWYLSTEGPNWGKKCGGKTLEKIRFRPHTGGEVHVLTS

SEQ ID NO: 353864 - protein, 96 aa, Zea mays
  Clone ID: MRT4577_85898C.1.pep
KLAGFFALEQKNPLPSFFGGLPTGPVPWGIHFPVFFFGGPIILFYAFTRTGAGVSPGVGRRPWPPKKNTKSSHLGWPPLASPVQMFPLGYYVCPGG

SEQ ID NO: 353865 - protein, 94 aa, Zea mays
  Clone ID: MRT4577_85899C.1.pep
YLKLIYLHLQPPSLTLFPFPKFPIHLLHPYQSHQPSLQLVIHSYSITTTITLSFTLTSTPTIHYFNTSINTTSLPTIFTSSITHNTPILLTQLT

SEQ ID NO: 353866 - protein, 187 aa, Zea mays
  unsure (1)..(187): unsure at all Xaa locations
  Clone ID: MRT4577_8589C.1.pep
LSAPFGGGHQFSARPWPEAVRVFFWPAVNLAGAVFTTQNXVXAFLGETLNLLAGLGGFPFEAFLGGGGPKAVSNAGPGVFGCSLSEFVVGALSGRTFVALPGPLNSLLVWSPRKVPSLSRLLVRAFVTSYGPPPPNAGWRAVFKVLRRDPRGAPRSGLWGCNGGGGNKTGITLSPNKKEKDCFPLQP

SEQ ID NO: 353867 - protein, 161 aa, Zea mays
  unsure (1)..(161): unsure at all Xaa locations
  Clone ID: MRT4577_858C.1.pep
FFCLFFFFFFFFFFFFFFFFFLIQEKGPDQKKPPKXPSPXGGPARGFFFFNKRGPKPEGXPPGARQQGPPPPRGPERPDRENPGEAPKKREGGGQPPQAGGGGPEREHHPPKQNPXPPRGKGKPPPQERPPPAGEPRQPGTTRGRPXARKGGPPTRTPGGT

SEQ ID NO: 353868 - protein, 130 aa, Zea mays
  unsure (1)..(130): unsure at all Xaa locations
  Clone ID: MRT4577_85900C.1.pep
LARGATHPFTIFHLSPSIIHQMHHPWGGCNGTGESIIYNDLCPWCKGEKVFQDNNVLEVHVDKGMQHNQKITFPGESNKTPDTVTXDXIVFFLHHKDHSKFKIKGENLFYXHTFFLTQSLFCFQFLFTHL

SEQ ID NO: 353869 - protein, 604 aa, Zea mays
  Clone ID: MRT4577_85901C.1.pep
HASADAWARARLANGVAGGSQNGFHDADRIARKGEEPSSAILNGRVHGAVSADETLSLITQNIASTERPAENAAAVRTEQHKANLVLTPGMNASRSSHDAVEVAGEGKTGNETLLSAEGGERLGPSLNGTSEGIKGRLNNDGSVPHTSKVEREEGELSPNGDFEEDHFVPFEDGTSKGKEDSTSRPFHGRPGEVVPSSAEAAGENDADADDEGEESAQRSTEDSENASEAGEDASGSESGDGEECSREDHDEEEEDMDHDDQDAKAESEGEAEGTTETHDVEGGISLPLSERFLYSVKPLAKHVPTALHDREFSRVFYGNDSFYVLFRLHQILYERLLSAKTNSFTAEKKWRNSKDTNPPDLYAKFMSALYNLLDGSSDNTKFEDDCRAIIGTQSYVLFTLDKLIYKVVKQLQAIATDEMDNKLLQLYLYEKSRSPGRFFDLVYHENARVLLHDESIYRFECCSSPTRLSIQLMEYGHEKPEVTAVSIEPNFSSYLFSEYLCSTPDKKLSEGVYLGRNKRKYSNNDEPSDSLKAMDGINVVNGLECKISCKTSKVSYVLDTEDFLFRLRKRRKILRGGNVPDRLQISSISAAKVQRFNRFLSKP

SEQ ID NO: 353870 - protein, 230 aa, Zea mays
  unsure (1)..(230): unsure at all Xaa locations
  Clone ID: MRT4577_85902C.1.pep
ASYVLGCEFEPLELHILKKKKKKKKKKKKKKKKKKKKKKKKKKKKKKKKPFSFGRPPRGGNRRRRRRPTQGEKISAGPWAGDKRPENNRENRGTTRPLTGPPPAKDPGPPKTRPKKGDNKVPLGDRXIKVXQPGKRKRPTQGTPDLAQNLGAPGANIWKRGKPLAAGEKQGITTPGENSLATMGPTENNXLXATPKKKEMGEAMVKATKSPPEKEPEGAPPNGLENQAAA

SEQ ID NO: 353871 - protein, 1751 aa, Zea mays
  unsure (1)..(1751): unsure at all Xaa locations
  Clone ID: MRT4577_85903C.1.pep
ESRSPTSGVLKCLHIYSQEIITRSELKNLVNDILQHYPDLMEGFNEFLEHCENIDGFLAGVFNKRPTTRIVKTEDKEKDRSXREDRDRDREKEREKERERLDKGSTFNSAXSHKPSMFSGKEKYNLSKPISELDLSNCQRCTPSYRLLPKNYPMPPASNRTDLGASVLNDHWVSVTSGSEDYSFKHMRKNQYEESLFRCEDDRFELDMLLESVNAATKRVEELIEKMQDNSVKPESPIRIDEHLTPLNLRCIERLYGDHADAWVDVLRKNASVALPVILTRLKQKQEEWSRCRSDFNKVWAEIYAKNYHKSLDHRSFYFKQQDTKNLSTKSLLTEIKEINEKKRKEDDVLLAIAAGNRRPIVPNMSFEYIDSEIHEDLHKIIKYSCAEVCNSSDQLDKVMRIWTTFLEPILGVQRKHGSEDPDLVKSKSRTTKSGIANVGESTAEPDQATAXLEGGRESMDAGKVAELRRVDLRGLRPGGPGWVQACAAVAASMEELGCVVVAHGALDGELRRDLFGRAMPELFALPLPAKQGTLSGHIGGHIGPDPERDPDVKSLRINGATNAGKVHAFXSHVARRWESLFLLVNWNVCQGHAGAGPRGTKDGAALPVIPARLQIIAPRRPRLRRPAVRYGALAPVXPATTTEQRSRKSLTGTIEMVVTAETAQGGPSADKWLRRVIXDQAXREAKLRVSTKRLSVCRIKKEKLQECAAQEGLNSTXALGGIQVYQEQWRRCWLLDFNLGPIAXGFASGLETWENMASFHPSKAGTESTVGTVRFEEMGKDINEEXGQMNIWRTNKPKCVGXFVNGSCTSCRVDFPSHAPRISSEXVGSILIVIRACVKLLYWFEHEFPALAKXIPCPLSATRCXKIQDILGGSLSHPEVKIIHXAHAEESYEESLFRCEDDRFELDMLQLMEYGHEEPEVTAVSIEPNFSSYLFSEYLCSTPDKKLSEGVYLGRNKRKYSNNDEPSDSLKAMDGINVVNGLECKISCKTSKVSYVLDTEDFLFRLRKRRKILRGGNVPDXCRFHQYLLQKCSASIGSYPNHRIIWHTNVSKPVAGVPAAWLEQXSIDVAESPFGITXGRHRVNTAKRRGSCRPXVSLLFRKHSVYMYFQHDCCESLXTKSMVGLFGEGYTGAGIVSKHNNDDESEQGLPSRARIANGVAANTQNGFHDADRIARRGEESLNVTLNGRVHGAASADETPSLSTQNIASTERSAENAAVVRTEQHKANLELTPGVNASRSSHDAVEVAGEGKAINETLPSAVGGETGRLGPSFNGISEGIKGRLNNDGSAPHISKVEREEGELSPNGDFEEDHFVPFEDGTSKGKEDSTSRPFHGRPGEVVPSSAEAAGENDADADDEGEESAQRSTEDSENASEAGEDASGSESGDGEECSREDHDEEEEDMDHDDQDAKAESEGEAEGTTETHDVEGGISLPLSERFLYSVKPLAKHVPTALHDREKFSRIFYGNDSFYVLFRLHQILYERLLSAKTNSFTAEKKWRNSKDTNPPDLYAKFMSALYNLLDGSSDNTKFEDDCRAIIGTQSYVLFTLDKLIYKVVKQLQAIATDEMDNKLLQLYLYEKSRSPGRFFDLVYHENARVLLHDESIYRFECCSSPTRLSIQLMEYGHEKPEVTAVSIDPNFSSYLFGEYLCSTSDKKLSEGVYLARNKRKYSDNDEPSDFLKAMDGIKVVNGLECKISCKTSKVSYVLDTEDFLSRLRKRRKILRGGSVSDSSQFSKIYAAKVQRFNRFLSKA

SEQ ID NO: 353872 - protein, 101 aa, Zea mays
  Clone ID: MRT4577_85904C.1.pep
RSMNTCKSSSPPYAGATPSASSFTLVNGFLVKGLLSMNAPSVFLQPLHFFCLLRMFKHCSTIIKLGFVRSEQSSQCNIMRDSSVSYASAPPKVFGASGAPY

SEQ ID NO: 353873 - protein, 45 aa, Zea mays
  unsure (1)..(45): unsure at all Xaa locations
  Clone ID: MRT4577_85905C.1.pep
ESSCDQXXKXPRSISPLLILNTHASSRYPPIIKSTTASTTPSSPT

SEQ ID NO: 353874 - protein, 114 aa, Zea mays
  Clone ID: MRT4577_85906C.1.pep
KPQWTLQPKMFIDNGKLLLNNSGKTILVVFGRGKEKMPKKKKPKKKGGGGNQRDFFYPFFTSRFIGEVTPAGDKKKNKKSFSHPRQRRGEEQQTLGPWFFCFFPLPPPPLGPNL

SEQ ID NO: 353875 - protein, 150 aa, Zea mays
  Clone ID: MRT4577_85907C.1.pep
MAGSSAVYTSCRPHARAFLLPADQRGGLLPAAAWRRGGAAPRASLVAARTATEEAVYEVVLRQAALVEDLQGRRAAREAEAGRRRWRDEQVEQEGDAELGWGLLGDAYDRCGEVCAEYAKTFYLGTQLMTPERRKAVWAIYVWCRRTDEL

SEQ ID NO: 353876 - protein, 289 aa, Zea mays
  Clone ID: MRT4577_85908C.1.pep
MNVKGGSRIPVPPPGASALVKVAVFGGAAVYAAMNSLYNVEGGHRAIVFNRIQGIKDKVYPEGTHFMIPWFERPIIYDVRARPNLVESTSGSRDLQMVKIGLRVLTRPMPERLPHIYRTLGENFNERVLPSIIHETLKAVVAQYNASQLITQRETVSREIRKILTERARFFNIALDDVSITSLSFGKEFTHAIEAKQVAAQEAERAKFIVEKAEQDKRSAIIRAQGEAKSAELIGQAIANNPAFLALRQIEAAREISHTISASANKVFLDSNDLLLNLQQLNVSSKQKK

SEQ ID NO: 353877 - protein, 39 aa, Zea mays
  Clone ID: MRT4577_85909C.1.pep
KTEAPCRSERLAKYNQILRIEEELGDKAIYAGKNFRHPA

SEQ ID NO: 353878 - protein, 80 aa, Zea mays
  Clone ID: MRT4577_8590C.1.pep
HAVLSLGPSLGKVIRRCSLWKHCLWWISVQCQCRTVSRLQYCQGDGHAGLRLSARSATRGPQGRSREPLRGLLRRLLLPE

SEQ ID NO: 353879 - protein, 67 aa, Zea mays
  Clone ID: MRT4577_85910C.1.pep
PLAIYFGGFIPNAVRSTTSHRQYTVLRIFKVRPWHTGHLAIYVALPAAGPYLQLNRFHGRLSVKHKR

SEQ ID NO: 353880 - protein, 103 aa, Zea mays
  Clone ID: MRT4577_85911C.1.pep
WTVTCSKCEAKQMQESGDTGGPPLDAVDEKEWECRDIDGGDALAPVDRCVETLAKSMRCWGRKGYDVFAEPAQMVKTQMVKTDGAFREGTHGRWSQPPTPQSR

SEQ ID NO: 353881 - protein, 84 aa, Zea mays
  Clone ID: MRT4577_85912C.1.pep
LKSISTSSLLCTHFFYQLLIGGLPFHVFLFSHDFFPLHLLFFFSNIISFLCGVFLHSCVGENFFASPFFVFRNITPFFGCVFIR

SEQ ID NO: 353882 - protein, 50 aa, Zea mays
  Clone ID: MRT4577_85913C.1.pep
RVRRTPDSLRRERKRVGAMTWVQAPGSGGAREALGFCRWFCAAPRASAGG

SEQ ID NO: 353883 - protein, 439 aa, Zea mays
  Clone ID: MRT4577_85914C.1.pep
MRPAVVTVLLLVAAAASPAAALYSAGSPVLQLNPNNFKSKVLNSNGVVLVEFFAPWCGHCKQLAPAWEKAAGVLKGVATVAALDADAHQALAQEYGIKGFPTIKVFSPGKPPVDYQGARDVKPIVEFALSQVKSLLRDRLSGKASAGSNGKTSGGSSEKSEPSASVELNSRNFDELVVKSKDLWIVEFFAPWCGHCKKLAPEWKKAAKNLKGQVKLGHVDCDAEKSLMSKYKVEGFPTILVFGADKESPFPYQGARVASAIESFALEQLEANSGPAEVSELTGPDVMEEKCASAAICFVSFLPDILDSKAEGRNKYLELLLSVAEKFKKSPYSFVWTAAGKQANLENQVGVGGYGYPAMVALNVKKGAYAPLRSAFQRDEIIEFVKEAGRGGKGNLPLNDAPTVVASEPWDGKDGEVIEEDEFSLDELMGDSSSANDEL

SEQ ID NO: 353884 - protein, 169 aa, Zea mays
  unsure (1)..(169): unsure at all Xaa locations
  Clone ID: MRT4577_85915C.1.pep
CSILCQQKHAVQSFFLKFPLLWYYTPCAGCFLPCSFVWTAAGKQANLENQVGVGGYGYPAMVALNVKKGAYAPLRNAFQXRNHVSSLVLLIIIPSLVSCXLETLLXKVISCSEFVKEAGRGGKGNLPLNVAPTVVTSEPWDGKDGEVIEEDEFSLDELMGDSSSVNDEL

SEQ ID NO: 353885 - protein, 93 aa, Zea mays
  Clone ID: MRT4577_85916C.1.pep
PIPRIFHCEHSCFFLAITDGLQSNKCRVRALSGTQGIIPNRITAVCGQLKQQSPKVGIVFALWVKTHHLVSYSPGTQSAKLDRAVAPRAEFRA

SEQ ID NO: 353886 - protein, 55 aa, Zea mays
  Clone ID: MRT4577_85917C.1.pep
FWGGFFIFIFFYTAHVTIYLVISFYHKTPLQNQGTTAPHITGLKRARERRIKRHR

SEQ ID NO: 353887 - protein, 149 aa, Zea mays
  Clone ID: MRT4577_85918C.1.pep
IADGKPPIPRRGPSREPTPSRLLSLPLSRHRSPPSFIIAYPPSVVASLHHVRSHGAEQSDVCCTSHRSRKVGLAHHSTGITDYAQHKSTKLARLPDISISGDHGNTEKDPCVCRDGERIQQHLFTMVYIGGRSEGQTKGIDWRDEYQSI

SEQ ID NO: 353888 - protein, 58 aa, Zea mays
  Clone ID: MRT4577_85919C.1.pep
ALFLQHSAEIFFELKTWRIVQILSCSPVLACNSFLQGVASLCNRRCLNHLFVPRCVKV

SEQ ID NO: 353889 - protein, 82 aa, Zea mays
  Clone ID: MRT4577_8591C.1.pep
FGGSPQSIKNPMVSFNQEVIQFGQPMYNQPGASVFGPTPGVEAGPTPGSGPTQNYGDVFSPAFPNTNLGVIYACPFFYQGWG

SEQ ID NO: 353890 - protein, 94 aa, Zea mays
  Clone ID: MRT4577_85920C.1.pep
MFSWILRGCRDECSATDQLKQARDVFVAKEAVLQKKISQEMERAKEFTKSGNKQAAMQCLKRKRYYESQMNQVGSVRLRIDTKEKMIADNMVNK

SEQ ID NO: 353891 - protein, 53 aa, Zea mays
  Clone ID: MRT4577_85921C.1.pep
KLAILHSISGDEILQAGMQHKADRGRCYRYRCRHTEFMHLCTGMKGVFLTRSS

SEQ ID NO: 353892 - protein, 72 aa, Zea mays
  Clone ID: MRT4577_85922C.1.pep
KAGGTTHFNNNLIKRGHVSAGHCRIFLHRKHPVGLGNTCGIHHHRILFYKYHPFYFIKVGMRYFHKLRNKYY

SEQ ID NO: 353893 - protein, 85 aa, Zea mays
  unsure (1)..(85): unsure at all Xaa locations
  Clone ID: MRT4577_85923C.1.pep
FALPYNMTHHYYLKTVTTEKDEMITIAGNNGQTPSXIDVQLPYQYNIQLAKNMTCIKILRNLKAHWLTHGHPXDLYYLINNVITI

SEQ ID NO: 353894 - protein, 70 aa, Zea mays
  Clone ID: MRT4577_85924C.1.pep
IGLKIMYFISSKTDTRSVNTTSNSKYTCPSVSSSSSLHDIATFLPKNVDHYPFFLSSSPKSDQSSSSSSA

SEQ ID NO: 353895 - protein, 128 aa, Zea mays
  Clone ID: MRT4577_85925C.1.pep
MGSTDERFGSPFPDADVPALPGLAISQDGRHWARIEGDHHTGALFSVAEEGEKSRGWEARCIVAPKVVMHADGDLRMYYHSFDEMSQRHAIGLARSRDGIRWKKTGKVLEGGRAGCFDECGVQHGHVV

SEQ ID NO: 353896 - protein, 101 aa, Zea mays
  unsure (1)..(101): unsure at all Xaa locations
  Clone ID: MRT4577_85926C.1.pep
FSIDSPEXGRPADEVRVRCEALVRCPSTLRSACYTECVTCEAAGAASFGMSPAARGKLRLSKKEPQDLLREGARLLFRAANAGMANQLINSIAGDKDYAPP

SEQ ID NO: 353897 - protein, 134 aa, Zea mays
  Clone ID: MRT4577_85927C.1.pep
MSDERVKAEALQILGLFQVLPRLVVFDLDYTLWPFYCECRSKRDSPSLFRHARGIMYALKEKGIDMAIASRSPTPDIAKVFLDKLEFQSMFVAQVSKMGVTSVLVENGVNLDMFKLGLSNFATNCAASSRKDDE

SEQ ID NO: 353898 - protein, 173 aa, Zea mays
  Clone ID: MRT4577_85928C.1.pep
MSDERVKAEALQILGLFQVLPRLVVFDLDYTLWPFYCECRSKRDSPSLFRHARGIMYALKEKGIDMAIASRSPTPDIAKVFLDKLEFQSMFVAQEIFSSWTHKTEHFQKIQRKTGIPYKSMLFFDDENRNIEAVSKMGVTSVLVENGVNLDMFKLGLSNFATNCAASSRKDDE

SEQ ID NO: 353899 - protein, 93 aa, Zea mays
  unsure (1)..(93): unsure at all Xaa locations
  Clone ID: MRT4577_85929C.1.pep
KXKXKNSFDLVXXXKMVVDDWKRVYLKXKSNXXEVXIKGFWXMXEREGXCLWLCDXXXNDEKXVXFVXXEKVGGXLXXMDXXXKXXFGKMFVI

SEQ ID NO: 353900 - protein, 91 aa, Zea mays
  Clone ID: MRT4577_8592C.1.pep
FYRVRGSLRQGRSELGNEEWSDLPTSLSVLTFRQGQMCNGGESDVVFCLVLVVGGRTLGVGLILVLVSWLCRVVRLSVRTIPVPGLTGVAP

SEQ ID NO: 353901 - protein, 71 aa, Zea mays
  Clone ID: MRT4577_85930C.1.pep
IRTYLFQGFCNSRVYFNKYFMQNNIFIYNIGMDYHRYWGPIIFFWGGGERTVRTPTGPALKPSENPQVPFV

SEQ ID NO: 353902 - protein, 115 aa, Zea mays
  unsure (1)..(115): unsure at all Xaa locations
  Clone ID: MRT4577_85931C.1.pep
GVVSEAAASERFQAVRHPHIPSLSFRGKTDFFSPNLGWPEDVAWHPAGETIFAVYTADNGDSQVSMTNLISGQLXVTFLPEKPHTNGIINNISFMPWSDACFVTGGSDHXAVILW

SEQ ID NO: 353903 - protein, 123 aa, Zea mays
  unsure (1)..(123): unsure at all Xaa locations
  Clone ID: MRT4577_85932C.1.pep
ASPFSYHRFRGNPNAGHNTXDYNXLPGKYSPGTFSTLKLNIPPSLMDANRNINLHSMRXYLDRYYPDGXSNQVQKLXEYQLRILHLYKPLDLESYNMHSSLVFLPTFLESFMSNTQECFRSII

SEQ ID NO: 353904 - protein, 112 aa, Zea mays
  Clone ID: MRT4577_85933C.1.pep
QTLYQDKAPGRQLRLFDVRLRQSEVHAFGWKQESSESQSALINQSWSPDGWYMSSGSADPVIHIFDIRHHGQNPCQSVQAHQKRVFKAVWHRTLPYLTSISSDLNIGIHKYS

SEQ ID NO: 353905 - protein, 56 aa, Zea mays
  Clone ID: MRT4577_85934C.1.pep
GTSRPAGIFDIRHHGQNPCQSVEAHQKRVFKAVWHRTLPYLTSISSDLNIGIHKYS

SEQ ID NO: 353906 - protein, 96 aa, Zea mays
  unsure (1)..(96): unsure at all Xaa locations
  Clone ID: MRT4577_85935C.1.pep
GIAQVNATIASLANNIIVGGAVLTRLDVLLTCGPPKVPLGPNITTNYNGKWLTASATCYGXINGAXAPDIGCACWINNLNLPHYSGLTLCANDAIF

SEQ ID NO: 353907 - protein, 291 aa, Zea mays
  Clone ID: MRT4577_85936C.1.pep
GLVTLWQVETRGPSLSFRGKTDFFSPKHRWPEDIAWHPDSETIFAVYTADNGDSQVSMTNLISGQRKVTFLPEKPHTKGIINDISFMPWSDVCFVTGGSDHGVILWEDKDDLWKPKRVHKDFHSSAVMGVAGMQQKKTILSVGCDKRIIGFDLSAGRTEFKNLIDSKCMSVLANPCDCNLYMVQTGAPGRQLRLFDVRLRQSEVHAFGWKQESSESQSALINQSWSPDGWYMSSGSADPVIHIFDIRHHGQNPCQSVQAHQKRVFKAVWHRTLPYLTSISSDLNIGIHKYS

SEQ ID NO: 353908 - protein, 155 aa, Zea mays
  Clone ID: MRT4577_85937C.1.pep
MADEEFEYQENTEGGLITPSTAGDIKKNQFMLIKGAPCKVMDKSTSKTGKHGHAKCNIVGICQLTGKKYQDVLPAHAAVMVPKITRTEYQLLDLTKSDDGGGFCSLLDEKNNTIELPLEGEEAEKLIADYDPNNTDEDILVAVLAVAVLDGGETG

SEQ ID NO: 353909 - protein, 63 aa, Zea mays
  Clone ID: MRT4577_85938C.1.pep
QWLRQLAVGARRSPVERPAEVDVWCTGQCTIQFPLNFIIKMSMSCVFECKFHLTVRWVPDKTS

SEQ ID NO: 353910 - protein, 60 aa, Zea mays
  unsure (1)..(60): unsure at all Xaa locations
  Clone ID: MRT4577_85939C.1.pep
ERGRREEVSRVRXSAGAXASRXXLFSTXAWYARRXXGLKRVWVAWVGWRLGFAVVFGGAY

SEQ ID NO: 353911 - protein, 117 aa, Zea mays
  unsure (1)..(117): unsure at all Xaa locations
  Clone ID: MRT4577_8593C.1.pep
VSRIKKCGSLEVLPSRAMGQAVVXLKVGMSCXGCVGXAVKRVLCKMERVQSXDVDIMGQKVTVKGNVTPDAVLQTVSKTGTKTSVWEAEAVTNESRHTCRRHRLTRSNIWKCPAKKC

SEQ ID NO: 353912 - protein, 70 aa, Zea mays
  Clone ID: MRT4577_85940C.1.pep
VIISNDFHPCVFFFFSDPGKKKIPLWVAHKGPQPSWGGGQIFLPPGGPSPFSLRSARFGFWNYPPEKVAP

SEQ ID NO: 353913 - protein, 68 aa, Zea mays
  unsure (1)..(68): unsure at all Xaa locations
  Clone ID: MRT4577_85941C.1.pep
KNQNPPKPVFGSPAGKLFVXKXNTSAPFVKNAGKQKQSIVELADLAGKENLTGFKVPKLLKPEMSGKS

SEQ ID NO: 353914 - protein, 85 aa, Zea mays
  Clone ID: MRT4577_85942C.1.pep
CEKKLGPVTSLIGSKHCNLSGKTRNRPYKPHLLGGSNTNDKRGGDQERTTACRSPLKASVSTPGLPKVFTQKKAPLGRRFFRLEG

SEQ ID NO: 353915 - protein, 41 aa, Zea mays
  Clone ID: MRT4577_85943C.1.pep
AFSKSWPCSLVKKITLVHSDGLYVLAVLYHLLIKLQPQQYP

SEQ ID NO: 353916 - protein, 46 aa, Zea mays
  Clone ID: MRT4577_85944C.1.pep
VHTGDHTWAFIKWARTQSSQTREMAALYNKETDTPLASTRAHLTIA

SEQ ID NO: 353917 - protein, 99 aa, Zea mays
  Clone ID: MRT4577_85945C.1.pep
GCDHSSPGGINSRLWLAFGAPIQSVMNKTFAGCYDRERHSPATASAWGKGKQRDPRLEGELQGSARGSLTRLADHGGRGNDVRAAMETIGWASSTWEED

SEQ ID NO: 353918 - protein, 110 aa, Zea mays
  Clone ID: MRT4577_85946C.1.pep
RCLISIVGVITHLTFALELFGEMLGRKRPARMESWNIGGRRSAAAATDVSLEQSGFDKMQINLVYTVFHTCTYCLANYKIISVFWFGFKSTLMYEILIGTHLYYFLLYYY

SEQ ID NO: 353919 - protein, 156 aa, Zea mays
  unsure (1)..(156): unsure at all Xaa locations
  Clone ID: MRT4577_85947C.1.pep
AGXTHTSGXCXCQPPATVHLPAAVHLPPTVHLPPPFLXRPCLHXXPPXEKKKXXHVPPTXHXPXPPCHYPTXPAGAXPHGXAHPCPCQQPXPSPGRRXGTXGVGSTPILGQCGEFLGHXCRPTGTPYCLGKCQSVREGGWQQFRVVGXEERFQAIL

SEQ ID NO: 353920 - protein, 144 aa, Zea mays
  Clone ID: MRT4577_85948C.1.pep
DYHRRGRGRVLTAAVARRGPEDATIHRPVASTPVYGSRSELLSNHVINQIDMCKGDDDFWFKLFAKHLERAKWTFLFHDKPVMNKTFAGCYDRERHSPATASAWGKGKQRDPRLEGELQGSARGSLTRSADHGGRGNVVRAVGT

SEQ ID NO: 353921 - protein, 217 aa, Zea mays
  Clone ID: MRT4577_85949C.1.pep
MGSLPAAGERPHAVMMPYPAQGHVTPMLKLAKLLHTRGFHITFVNNEFNHLRLLGAQQSQAAVDRLCSLPGFRFATIADGLPPSDLEASRDTPALIYSTMTTCRPRFKELVVKLNEEAEASGGAVPPVTCVVADSITSFAISVARELGLRCAVLWTASACGFMGYYHYKDLLDRGIVPLKEEAQLSNGYLDTIIDWIPAMPKDLRVRELPSYLRTRT

SEQ ID NO: 353922 - protein, 83 aa, Zea mays
  Clone ID: MRT4577_8594C.1.pep
CWGKGPGVFFKYEDVFKKKGEMLIKFRVKLIKNQGLRSHEYVNLDPLKWKPDFPAPLFIFPPFIDIVCWKNYYGSFFFFFFFG

SEQ ID NO: 353923 - protein, 320 aa, Zea mays
  Clone ID: MRT4577_85950C.1.pep
MHWCSRGRPGLLLSLIPISPSLAAGGLRMAGGSGEAAMSPPSSSASGKRGRDPEEDVYVDNLHSHKRYLSEIMASSLNGLSVGDSLPDNIMESPARSETASCYRDEILSQYSPMSEDSDDYRCYDTQLNPSGNHPDAMISPSTSPMSSPHRHQRPQSSLLPSNPYPLPSCSLSSVVCSHARRGSDNEGRFPSSPNDMCHVADLRRTALLRSVQMRVQGPHSYDLSFGIRQGQDHAHEHEGEHDHEHEHLEDLEGTEGSSCNKSIVNEVTYNQRRDHDFGRSEHEIDYINNSTSDDCVSDLKFKQEDKSHSKFDIPMHKNS

SEQ ID NO: 353924 - protein, 73 aa, Zea mays
  Clone ID: MRT4577_85951C.1.pep
RYGHWSCTEICVDCKQKLDWRSYLLRRTGRSPPCARSSHGSTATVSMISSAQSSRSLHTVSLILVSTLAVAPS

SEQ ID NO: 353925 - protein, 170 aa, Zea mays
  unsure (1)..(170): unsure at all Xaa locations
  Clone ID: MRT4577_85952C.1.pep
GVVICXFPTDXLYAMGSLSXIVALVVSAIVGXHVAIYFTYSGRPYPRGALIQSTQLTRVFCCVMHELVXSIALAMWLWASGTGGLHRSKNIHHXMDYTGPTVQNRLFEGSVFLALDAAVYWLDCQMLALNARADYHDXXDRSEEYGQMYAAQVEELSKVRSYADMLGRVL

SEQ ID NO: 353926 - protein, 131 aa, Zea mays
  Clone ID: MRT4577_85953C.1.pep
DRGRDAWVENDDTSNRQAHNLSARENWKFTTDEDSTGGAFSMSNLSTKLQNLVQILTNSVEVSASELCAKSALDVQSSEALLSALQCLDLICRIFVHEVKKPQLKFSIPKNQHGPDWLRSSLLVHLNNLWG

SEQ ID NO: 353927 - protein, 63 aa, Zea mays
  Clone ID: MRT4577_85954C.1.pep
LLYASFYSPFTVCFFGDTSLYKLFLCNILVCSMCPCQFLLRFGLLNPFTRFTQSLFICRLFSV

SEQ ID NO: 353928 - protein, 60 aa, Zea mays
  Clone ID: MRT4577_85955C.1.pep
KARKRRPKPRLMVIQRTWINPSTLLVEELNLELRRRRRKRRHKLKEEPQEETGAADITPK

SEQ ID NO: 353929 - protein, 66 aa, Zea mays
  Clone ID: MRT4577_85956C.1.pep
QCPRYKQYQLLLVVQYFIFIDYSATVDHASSFTSGDHRRPRHKQSYSVTLFPRPYQPNSIIPWSDL

SEQ ID NO: 353930 - protein, 51 aa, Zea mays
  Clone ID: MRT4577_85957C.1.pep
TVGKIAVSMVSSAKAVHVSLKCRGCRCVNAMTRKMRHDLSVHSSHLGYFYN

SEQ ID NO: 353931 - protein, 86 aa, Zea mays
  Clone ID: MRT4577_85958C.1.pep
MAAKIFGLLMLLGLSASAATATIFPQCSQAPIASLLPRPLPRVSDGNHFNYRPQHQWSTYTCLTYTIQSTWHYAKHRHTHTVNLCS

SEQ ID NO: 353932 - protein, 94 aa, Zea mays
  Clone ID: MRT4577_85959C.1.pep
GAFFFFFFEVPLLDIIMCLPCTQKHLTPLLVPTEPQYPSYYTNLFPPRPVIELFFSSAIGKLLFTHHSTRMSHQATSMVEDLGALALEPPEEEK

SEQ ID NO: 353933 - protein, 125 aa, Zea mays
  unsure (1)..(125): unsure at all Xaa locations
  Clone ID: MRT4577_8595C.1.pep
TALTIDGEVXAWGRGEHGRLPRVRDKSSHMVPLKVELLAGEDIVQVSCGGTHSVALARDGRMFSYGRGDHGRLGYGRKVTTGHPMELPINLPPLSSSRDGRWQAKYVACGGRHTLAIAEWTEATD

SEQ ID NO: 353934 - protein, 34 aa, Zea mays
  Clone ID: MRT4577_85960C.1.pep
HVHGDRNQEIINAEESSTGTRVPAGSRCQSPIVV

SEQ ID NO: 353935 - protein, 78 aa, Zea mays
  Clone ID: MRT4577_85961C.1.pep
MGGGPPAGPHFSPPEGFLPNKERLWGGGGPHFQPPLVETFPRFPLGGPFGEPGANNRGKKIFSWGKVKPLFPKFLPEN

SEQ ID NO: 353936 - protein, 78 aa, Zea mays
  Clone ID: MRT4577_85962C.1.pep
MPQEVADIKKFIEICRRSDASSARIKKNKKTNNIKFKVRCQKNLYTLVLKDTDKAEKLKQSLPPTLQLTDVSSKKKSA

SEQ ID NO: 353937 - protein, 76 aa, Zea mays
  Clone ID: MRT4577_85963C.1.pep
HNRLCWLKHLLAAPSKNRAPSYLPIRSGCHLLSTDVACPLPNLHAYRCWNTVPPAELACIISNSTSLLSEIICHHR

SEQ ID NO: 353938 - protein, 304 aa, Zea mays
  Clone ID: MRT4577_85965C.1.pep
MVFGQVVIGPPGSGKTTYCNGMSQFLSLLGRKVAVVNLDPANDALPYECAINIEDLIKLSDVMSEHSLGPNGGLVYCMDYLEKNIDWLEEKLKPFIEDHYLLFDFPGQVELFFLHSNARSVINKLIKKMDLRLTAVHLIDAHLCCDPGKYVSALLLSLSTMLHLELPHINVLSKIDLIENYGNLAFNLDFYTDVQDLSYLQYHLEQDPRSAKYRKLTKELCDVIDDFGLVNFSTLDIQDKESVGNLVKLIDKSNGYIFSSIDSSAVEFSKIAAAPLDWDYYRTAEVQEKYMKDDEFAQLTSRMQ

SEQ ID NO: 353939 - protein, 174 aa, Zea mays
  unsure (1)..(174): unsure at all Xaa locations
  Clone ID: MRT4577_85966C.1.pep
MEIQSLCKESDTDTRNLIDLNETLPIIDDPEIESHESGEIVPHEPNGPSQDSIAIAAAAETLVEMWNNSDRPAYQPDILHWFADLAISKDNTLLDKDSDDDFEAATLKLRETKSNEYHSTPRTTQEDNTNFGHCSAASLVSKPXRGRGRGRRQRKHFQRDILPGLASLPKHEVS

SEQ ID NO: 353940 - protein, 31 aa, Zea mays
  Clone ID: MRT4577_85967C.1.pep
MVFGQVVIGPPGSGKTTYCNGMSQFLSLLGR

SEQ ID NO: 353941 - protein, 164 aa, Zea mays
  Clone ID: MRT4577_85968C.1.pep
MQQQQQQAQQYQQQMAGYTQSQMPGTVWMVPSSNNTQGGGAPSSGGSGGGTGESIWTFPQMGSATAAAAVYRGSVPSGLHFMNFPAPVALLPGQQLGLGGGGGGGSGGEGHMGILAALNAYRTQVVTDPAASHGGGGGGGGSGQQQQHGGGRGDRHESMSTSDS

SEQ ID NO: 353942 - protein, 104 aa, Zea mays
  Clone ID: MRT4577_85969C.1.pep
ANNSVQRHTYFLFSYTFFLENQKKKRIHPGTRMATITNLFIKYTYSSTYLLAVARSIFIHEIGPQHHTHFFYMPGPTRASKSLQAGKLLDQAKRPPVLCVGTTR

SEQ ID NO: 353943 - protein, 72 aa, Zea mays
  Clone ID: MRT4577_8596C.1.pep
TNTRGDPIVPDCNLMVFHLSLYCDALQIAFSKYIPNLRGNQLAPFICTHHRNQPYNQHLTCGDTRELYYKNL

SEQ ID NO: 353944 - protein, 61 aa, Zea mays
  Clone ID: MRT4577_85970C.1.pep
SILMLLPSYQYSAPTRWPLSSNCAHRLSFSHLPLTSPSACLPDEPLIERWPPLDFLSVRVQ

SEQ ID NO: 353945 - protein, 108 aa, Zea mays
  Clone ID: MRT4577_85971C.1.pep
PCGAYAGFPLYPFQVSGLFPPTSVVGSHPGFFFNQDPFFPLTFLFVAQFNASFLVVHGTPILGRSLLFPPPQCPTRHGRVSSFHSYSHCFSPQLGFIPGVFPFPLFLF

SEQ ID NO: 353946 - protein, 59 aa, Zea mays
  unsure (1)..(59): unsure at all Xaa locations
  Clone ID: MRT4577_85972C.1.pep
CTPNLDXTRILTVRHSGASNRLSTRPARSSFLQVFWRLISCDQLQVSMSHQVPVYSLYV

SEQ ID NO: 353947 - protein, 42 aa, Zea mays
  unsure (1)..(42): unsure at all Xaa locations
  Clone ID: MRT4577_85973C.1.pep
SSAGPDSYAATPNLLRTASQEAAMVSGSGVCFKRIEXDARHH

SEQ ID NO: 353948 - protein, 61 aa, Zea mays
  Clone ID: MRT4577_85974C.1.pep
GAENALPCPIRLSCSLDSTGMVVVMSPAHSPAGANAWHKVVPASYSSREFVSCLSCRPMVC

SEQ ID NO: 353949 - protein, 70 aa, Zea mays
  Clone ID: MRT4577_85975C.1.pep
VVVSESLMRSRLMLQTYQCAGVLHFCLSRLCLLSLKTPAISGGHMNPCSVKTIINHVGRPPTRELVVPAI

SEQ ID NO: 353950 - protein, 74 aa, Zea mays
  unsure (1)..(74): unsure at all Xaa locations
  Clone ID: MRT4577_85976C.1.pep
CILWLEPGRTSTVVACRSCHYPDQQCTCVRGLGAAPQHASRTDAATTYENGLQESRTGCRKHSITHVVLRRRAX

SEQ ID NO: 353951 - protein, 58 aa, Zea mays
  Clone ID: MRT4577_85977C.1.pep
IELKWESSPWIPGIPSHQISPQRISAFPPSIPMEKPIHQKECNKIVVIWISENTKINS

SEQ ID NO: 353952 - protein, 131 aa, Zea mays
  Clone ID: MRT4577_85978C.1.pep
EPCIDREVVVVVVNKWSWAGPFAAACRSSAVGTSWRDGIRKILWVRAQGRSGVCCIGRYSWRWPPSVGGSGCPLLAVKDQVVSAHSAHQQQRHGGGEGLHPLSLYLSLYGRLGRAALPLGLGRFLLVGRQY

SEQ ID NO: 353953 - protein, 110 aa, Zea mays
  Clone ID: MRT4577_85979C.1.pep
MSASSTPVDASGEPIPTSSVLMAASKHIAVRCRPENVAFLNCKKKDPNPEKCLEKGRQVTRCVLSLLKELHQKCPKEMDEYAGCMYYYTNEFDFCRKEQQAFEEACPISE

SEQ ID NO: 353954 - protein, 389 aa, Zea mays
  Clone ID: MRT4577_8597C.1.pep
MATPLRATAVLAWGSGEDGQLGMGGNEEKDWPHFVEALGPYAVTAVVAGSRNSLAICDDGRLFTWGWNQRGTLGHPPETKTESSPGPVDALAGFKIVQAAIGGWHCLAVDDKGRAYAWGGNEYGQCGEEPERKEDGTRALRRDIPIPQRCALKLKVRQVAAGGTHSVVLTQEGHVWTWGQPWPPGDIKQISTPVRVQGLEKVRVIAVGAFHNLALTEDVILWAWGNNEYGQLGTGDTQPRSQPIRVEGLSDLSLVDIAAGGWHSTALTIQGEVYAWGRGEHGRLGFGDDKSSHMVPLKVELLAGEDIVQVSCGGTHSVALARDGRMFSYGRGDHGRLGYGRKVTTGHPMELPINLPPLSSSRDGRWQAKYVACGGRHTLAIAEWTEATD

SEQ ID NO: 353955 - protein, 103 aa, Zea mays
  unsure (1)..(103): unsure at all Xaa locations
  Clone ID: MRT4577_85980C.1.pep
MSASSTPVDASGEPIPTSSVLMAASKHIAVRCRPENVAFLNCRKKDPKPEKCLEKGRQXLKELHQKCPKEMDEYAGCMYYYTNEFDFCRKEQQAFEEACPISE

SEQ ID NO: 353956 - protein, 110 aa, Zea mays
  Clone ID: MRT4577_85981C.1.pep
GRSHRRLIFHIGLWAIPDVRHKSISIMHKRICNNITSGILIPWVIKTVWCRIDHHSENRYVRIHSILLTNIKHVEFVLLKNLFIMGVVSLRTSSHVNPSPKCGFKRRKNR

SEQ ID NO: 353957 - protein, 68 aa, Zea mays
  Clone ID: MRT4577_85982C.1.pep
EKKKGGGGVKLGTKLGGVNWGPNLKFPKIFSGPKGGKEVNCTFHPSKLLGVPQKKGQGPGTALTNLPF

SEQ ID NO: 353958 - protein, 110 aa, Zea mays
  Clone ID: MRT4577_85983C.1.pep
MSASSTPVDALGEPIPTSSVLMAASKHIAVRCRPENVAFLNCKKKDPNPEKCLEKGRQVTSCVLSLLKELHQKCPKEMDEYAGCMYYYTNEFDFCRKEQQAFEESCPISE

SEQ ID NO: 353959 - protein, 223 aa, Zea mays
  unsure (1)..(223): unsure at all Xaa locations
  Clone ID: MRT4577_85984C.1.pep
MHSFRALARAAPRATARLTASSTRASIRPAFTSSIRTQTPRALTAAFSTSRPVFDASAQELAAKLTSELQLESENADSSQTASDSNVQNFLSRTDWQLHDVDGEQIVKLSRKFEDELIEVRFTIADFNNPYPEHEDADDALLDDEMDYPEGQSGGAHTKGAINQGNSRDGNFKVAPEDNIAPADREGLRDHEDDSEPAFPANVNVLISXPSKKTPGASASPRL

SEQ ID NO: 353960 - protein, 131 aa, Zea mays
  Clone ID: MRT4577_85985C.1.pep
FLDSSMISLPAASVMNTYTRTKQLLAQPVRTYVSTTMHASMARRRCMLYLAEHPAERRRGPVVSGVVPSEVRRARTPGRRTAPGSSSPFSPRHRLPASHQAAAGLLQAAAAVLQCYDYGLATGRGILCGLV

SEQ ID NO: 353961 - protein, 110 aa, Zea mays
  Clone ID: MRT4577_85986C.1.pep
MSASSTPVDASGEPIPTSSVLMAASKHIAVRCRPENVAFLNCKKKDPKPEKCLEKGRQVTRCVLSLLKELHQKCPKEMDEYAGCMYYYTNEFDFCRKEQQAFEEACPISE

SEQ ID NO: 353962 - protein, 231 aa, Zea mays
  unsure (1)..(231): unsure at all Xaa locations
  Clone ID: MRT4577_85987C.1.pep
MMITGGQRNPARLQVSSSFLLALVFASSVLVGIVAGGSFYEECDATWEPQNCWAYDDGNRLSLALVSSSSGSMIRSKRQFVYGTVSTMIQLXSPATXRRHRHHLLYVVXGDNHDEIDFEFLGNVSGQPYTIHTNVYAAGVGNKEMQFKPWFDPTADYHNYTISWTPCMIAWYVDGVPIRVFRNYAASHGVAFPTSQPMYAYSSIWAAEDWATQGGRVKGDWSXAPFVGSYT

SEQ ID NO: 353963 - protein, 117 aa, Zea mays
  Clone ID: MRT4577_85989C.1.pep
MEGDLDTDDEGSWDLVGRDIRLKAAFLCIDLGRVIALCGGEERSKALIALGEERKKALNALGDALFEPMDELGDAVESRSLPLTQARYSDTADALREVVAVLALSLDLEFGPDDPDE

SEQ ID NO: 353964 - protein, 115 aa, Zea mays
  unsure (1)..(115): unsure at all Xaa locations
  Clone ID: MRT4577_8598C.1.pep
ATLPVTFSLGASLLAHPFSLLMLRGLLGGWXFLYLFRPSDQPVGLFGRTFSDLETLVGLGGASFILVFFTSCGGLIIYGLVGWGALVAGHGAVQGLVDLFLYEAKRAPLVPTRAK

SEQ ID NO: 353965 - protein, 95 aa, Zea mays
  Clone ID: MRT4577_85990C.1.pep
FNIKARKHKWQNFGNATRDNPSCCLAWDWAAIDCFQAPNEVLNGSGGTWGGRGSSWVSRGVFSRACTWGGGGPWGAGPKIFFLPRGSPGAHKVWA

SEQ ID NO: 353966 - protein, 113 aa, Zea mays
  Clone ID: MRT4577_85991C.1.pep
GSKPGPHPGKERGGPTPIMGNPRGGAGVNTAGRALSGFRGTAAEKKTNASPRGKNNGQRTTRSRRSLRRAATQGGRDLNKHKASHGPKLIGPGSGFQRPGDDPDAPRGGAHKT

SEQ ID NO: 353967 - protein, 154 aa, Zea mays
  unsure (1)..(154): unsure at all Xaa locations
  Clone ID: MRT4577_85992C.1.pep
PASAHAVRXGIRRKTSSITRWFSICVDDTSKKGRYTNTVNLLRKYFGDFLIATYLNAVQESCYDDAYIGGIEREVLLKTLDTLWKDHLVNMNKLSSAVNVRSFGHRNPLEEYKIDGCRFFISMLSATRRLTVESLVHYWSSPMESEEIFNTEDQ

SEQ ID NO: 353968 - protein, 49 aa, Zea mays
  Clone ID: MRT4577_85993C.1.pep
ASQLSLSKNPPSLFDFLCRCHEDPFNKRSVVSLYCARIHPYSIKSGFYF

SEQ ID NO: 353969 - protein, 62 aa, Zea mays
  Clone ID: MRT4577_85994C.1.pep
EKISLLCLPFLVAFVPAVCSCFCVASLFLLVQFWLASPCSVLDGPCLKPISLPLKKKKKKRP

SEQ ID NO: 353970 - protein, 85 aa, Zea mays
  unsure (1)..(85): unsure at all Xaa locations
  Clone ID: MRT4577_85995C.1.pep
PYVINRTITCWGRGSLTARGTDSSALTSEGGNTGHPXSMCDQVSDAELDACLPQDPHGNVACETCTKTNIVMGSGEITTKATVDY

SEQ ID NO: 353971 - protein, 61 aa, Zea mays
  Clone ID: MRT4577_85996C.1.pep
PQQHRQQLTTHLPLRPRTTTHQLPHMRKSKHKHDETENTKHSNHHSSNNTLDRITNRNFKY

SEQ ID NO: 353972 - protein, 186 aa, Zea mays
  Clone ID: MRT4577_85997C.1.pep
MASLGLPGPSSYHDLCCYGAGIAGNIFAFVLFISPLPTFRRIVRNGSTEQFSATPYIYSLLNCLVCMWYALPFVSYGVVLVATVNTIGAAFQLAYTAVFIAYADAKKRLKVSVLLAGVFCVFGLIVYVSMALFDPKPRRTFVGYLSVASLIFMFASPLSIINLVIRTKSVEYMPFYLSLSMSLMSM

SEQ ID NO: 353973 - protein, 103 aa, Zea mays
  unsure (1)..(103): unsure at all Xaa locations
  Clone ID: MRT4577_85998C.1.pep
TYPTFFFYNPKTXISGVYPTRGGLFSLFLLGEQTPLPSLKKGPPGDVTTCPLPPWGGGPHFSSIHPPKKPHLPASARLSPTTNFFPGGPPPPPPIGPWIPFSN

SEQ ID NO: 353974 - protein, 60 aa, Zea mays
  Clone ID: MRT4577_85999C.1.pep
CVRTKPMLIDSAGLYFLNGLEMLSAPIVIVLLPTMIIAEICIDLKSTLDPSLSSPRRACY

SEQ ID NO: 353975 - protein, 98 aa, Zea mays
  Clone ID: MRT4577_8599C.1.pep
VRETTTLDRCPCISTTTVSDIARVDCQQCCLPPYPHRHPCLRLETLSFTPRLLQPPPTSTMPPCSTPSTLSFSSSTHPPRRRKQMRMLIGENKLHWSD

SEQ ID NO: 353976 - protein, 86 aa, Zea mays
  unsure (1)..(86): unsure at all Xaa locations
  Clone ID: MRT4577_859C.1.pep
TSVTLNPGWIVPDLISPMIIPGGGGGXXXXIIVSPMMMPNMMTVPQCYSGSISHIIQQQQLPFMSSPTAMAIPPMFLQQPFVGAVF

SEQ ID NO: 353977 - protein, 59 aa, Zea mays
  Clone ID: MRT4577_85C.1.pep
LKKNTFRFLTPPTKLLNQKPNLPNSFPFFTPIHIPSTIYTQIPPKILHLKQQLRLTTQP

SEQ ID NO: 353978 - protein, 55 aa, Zea mays
  Clone ID: MRT4577_86000C.1.pep
GGFFFSPGRLFRASAKKKPKAPHGFVAFFFLTPWVPPFWAGFLFLSRAQPGFGSP

SEQ ID NO: 353979 - protein, 107 aa, Zea mays
  Clone ID: MRT4577_86001C.1.pep
APQLMWGWSLFWAPRVFPFCFRFVFFLGFLAGYLFSPGTVLSLFLPSLGPGLGPLVTAPRGLEFPLWVVSAQGLGRVSISRLGVQILVWGPPLRFLNPLVKGFRGLY

SEQ ID NO: 353980 - protein, 286 aa, Zea mays
  Clone ID: MRT4577_86002C.1.pep
MAGDDHVVVDVNGLAKSKDDGGSKKLSEDANGSAPAAASLSAAVDLVQEEEEEEGDGEEEPLIQAAECRICQEEDSVKNLEKPCACSGSLKYAHRACVQRWCNEKGDTTCEICHEEYKPGYTAPPRVQPDETTIDIDGDLVMDLRDPRILAVAAAQHRLLEAEYDGYASTDASGAAFCRSAALILMALLLLRHALSMSDNEGNDDDASTIFSLFLLRAAGFLLPCYIMAWIFSILHRRRQRQEEAALAAAEVAFILQSARGRALQFAIAPDSPATPQHEPVSQQQQ

SEQ ID NO: 353981 - protein, 131 aa, Zea mays
  Clone ID: MRT4577_86003C.1.pep
ASASATVASGNGGALSPTQSPTSSARAIPATAKPQNAGPARPYHQSAPVKVPVRPLRKPATGRWDEFDDDADFGRGDAAMLPPHEMVARASAGGAGPAAPFSMLEGAGRTLKGRDLRRVRDAVLRQTGFLD

SEQ ID NO: 353982 - protein, 103 aa, Zea mays
  Clone ID: MRT4577_86004C.1.pep
FILSPSDGPFEASHESPLSLVRFCLHPVYSFIATHLPCSEACSRRPVVHSAKSAGPSLFGGGPAPGPRRHKEGANDFFYFLIGGAIDIWKTEANPSLTVRVSR

SEQ ID NO: 353983 - protein, 636 aa, Zea mays
  Clone ID: MRT4577_86005C.1.pep
MLSTRTAAVAASASPASPWKLGGRSEGGASCDGCRTYRNTLRRRAAPAKVRALPPRRVDAVAMVSNAETETEKEQEEAAAASEELPVMPWATSVASGYTLLRDPHHNKGLAFTEEERDGHYLRGLLPPAVLSQELQIKKFMNTLRQYQTPLQRYIAMMNLQETDERLFYKLLIDNVVELLPFVYTPTVGEACQKYGSIFGRPQGLYVSLKDKGKVLEVLRNWPHRNIQVICVTDGERILGLGDLGCQGMGIPVGKLALYTALGGVDPSVCLPITIDVGTNNEKLLNDEFYIGLRQKRATGEEYDELIEEFMAAVKQFYGEKVLIQFEDFANHNAFDLLEKYSKSHLVFNDDIQGTASVVLAGLLAALKMVGGTLAEQTYLFLGAGEAGTGIAELIALEISKQTNAPIEECRKKVWLVDSKGLIVDSRKGSLQPFKKPWAHEHEPLKTLYDAVQSIKPTVLIGTSGVGRTFTKEIIEAMSSFNERPIIFSLSNPTSHSECTAEQAYTWSQGRSIFASGSPFAPVEYEGKTFVPGQSNNAYIFPGLGLGLVISGAVRVHEDMLLAASKALADQATQDNFEKGSIFPPFTSIRKISAHIAAAVAAKAYELGLATRLPPPSDLVKYAENCMYTPVYRNYR

SEQ ID NO: 353984 - protein, 115 aa, Zea mays
  Clone ID: MRT4577_86006C.1.pep
SAENVLLTTYGSLQPPLGKHRLKIAEIISAFLSIGSASAKTRLFELGAIKHAIHLFCESPVNNFLHYHVENIICSCLEREQDRLIGPVLRDLLLVTRILEAKKNFEYVLDLTKHT

SEQ ID NO: 353985 - protein, 63 aa, Zea mays
  Clone ID: MRT4577_86007C.1.pep
MALLSATSPAKAHLSALLSCHDEPQQHQHALPVPHPRCFRGGKARRRARGRCAASMRPPTNKL

SEQ ID NO: 353986 - protein, 821 aa, Zea mays
  Clone ID: MRT4577_86008C.1.pep
MLVTFGFVHNSRTEHVVFDIVDMEYPYNAIIGRGTLNAFEAILHPTYLCMKIPSEQRPIVVHGSQEAARKTKGNWTDSKAIHNIDGAEVCEQYKYKREKATSADQPKPMLLCEDIVEQKVLLGSQLSKEQEKTLIRFLFHNKDVFAWSTNDLCGVNRDVIEHSPNVDPSFRPRKQRLRKMSDDKAEGARNEVKRLLSAGVIREASWPEIKSRKMCFGVKKGKFLGCLVSTKGIEANPSKIEAILRMEPPSMKKGAQRLAGRLASLNRFISRSAERNLPFFEILKSAEVFQWGPAQQKAFEELKKYLIDLTTLIPPSPGAPLLLYVAASHSAVLADFIADWTPGAQEEETNKDAKAWTMFCDGSWGTFGAGAAAVLVAPSKVRTCYAAKLDFSCTNNIAEYEALLLGLRKLRAMGIRRAILKTDSQVISGHVDKSSKARDSKLEKYLDTVQRLEASFEGFSVKNIPRGENEHADLLAKSAAQGLPLPSEVFFETIKAPSVELMERAVLAISPVHSEDWRTEIISFLQGNCLSDDEVYNKRMEARTRPYIIIEEELYKHGVYSPLLKCLSRTEEYFSKWIEAKPLATITSVTVQKFFWQNIVCRFGVPKAITVDNGTQFDVETFKDFCDQIDTKIHFASVRHPESNDLVERANGIIMTGIMKLIFNQPRGKWPDELIKVVWSHNTTISRSTGFTPFKLLFGDEAITPEEAKAGSIRTAASAEDEADCPVAKDAIEGTRLQAVENINKYQAETIKWRDRKVRLKNIKPGHLVLRRVANPDTVGKLQLKWEGPFLVVSSSRPGSYRLKDMDDNDIPRSWNADELR

SEQ ID NO: 353987 - protein, 644 aa, Zea mays
  Clone ID: MRT4577_86009C.1.pep
MPPFPAATTTSHLALLVLLSSSSLFFLYKSLRLRRKPSPAPARTATPTLLFASVTGTSKTLAARLSARLTADAGFPVRATDAATFDPDDLPSVHLLLLVIPTHDGGAPPPSAAFLSRWLEESAADFRAGALLLSGLRFAVFGVGSRAYGETFNAAARSFSRWLRALGAVEVVPLGEGDIDSGDLEAVFEEWNRRVLRVVKGEEVSYGANEKNNGLDELELEGEDWDDDDEEMVDAEVDMEDIAGKAPARRKNGNLEGVLANGVHNGVKDMVTPIIRTSLEKQGYKIIGSHSGVKICRWTKSQLRGRGGCYKHSFYGIESHRCMEATPSLACANKCVFCWRHHTNPVGKSWKWKMDDPLDIVNAAIDQHTKMVKQMKGVPGVKPEKLDEGLSPRHCALSLVGEPIMYPEINALVDELHRRHISTFLVTNAQFPEKIKALKPITQLYVSVDAATKESLKAVDRPLFSDFWERFLDSLKSLHEKDQRTVYRLTLVKGWNAEEIDAYAKLLDLGQPDFIEIKGVTYCGSSATSKLTMENVPWHSDVKEFSEVLASKSGGVYEVACEHAHSCCVLLAKVDKFKINGKWHTWIDYDRFHELVTSGKPFNSRDYMAMTPSWAVYGAEEGGFDPDQSRFKKERRHGTAALRS

SEQ ID NO: 353988 - protein, 114 aa, Zea mays
  Clone ID: MRT4577_8600C.1.pep
KIGLYTRGLIPRGIIPNKNKPKTHQKNTRHLQIRAPRPISPSPFTQISSTKMPFLMRKLYTRRLVSLWLLSLQLQLQKCQVPNSLLTNSGLPHPSFPIETPKIKSPDVNLQPRD

SEQ ID NO: 353989 - protein, 49 aa, Zea mays
  Clone ID: MRT4577_86010C.1.pep
MTSTGTRSRACDYRVELVRVSKFVIRISGLMDGLTRIKEVSIGLSIAEL

SEQ ID NO: 353990 - protein, 119 aa, Zea mays
  Clone ID: MRT4577_86011C.1.pep
PRLAAACITDPLPSRIDAPHHGSRWALGAPHHGSACITDPAGRWPRLHGSTASGLAPHPVVAGEQRRRRLPCQRPSSPSLPGWRADASSAPLPAPPPSLRQRPRVVASRARLNACHQHD

SEQ ID NO: 353991 - protein, 46 aa, Zea mays
  unsure (1)..(46): unsure at all Xaa locations
  Clone ID: MRT4577_86012C.1.pep
FLLQTTPLIPCTDKNKDCFPXKQILHITLKKHSSLFSQTNIYHLII

SEQ ID NO: 353992 - protein, 111 aa, Zea mays
  unsure (1)..(111): unsure at all Xaa locations
  Clone ID: MRT4577_86013C.1.pep
VQPRRRTYTASVSARTHAYSPATSQAQRGHAWQVDTPPGRRXRRHASSKQAASWLETCASLSATTAGSQFICGASTPVQVRLFGESASLAPHAFRMSSVAPPARLGGLCXP

SEQ ID NO: 353993 - protein, 52 aa, Zea mays
  Clone ID: MRT4577_86014C.1.pep
REFIPFCRFGPVVELFPRIFKPSKLLKSDPPPHQCLKVFPGYPGPKCAPWIS

SEQ ID NO: 353994 - protein, 64 aa, Zea mays
  Clone ID: MRT4577_86015C.1.pep
MSSSRFYCPITGVLHEFKLYYSNPRQNYKKKAKIIIRIRIYDKLHILTNLCQMFNKKENGIRLF

SEQ ID NO: 353995 - protein, 63 aa, Zea mays
  Clone ID: MRT4577_86016C.1.pep
PGPGGCQKKNWSRQVGILQETGTNTQLEPTWLKKFGYTGIMDKKKTRSAPAHFIGYRGPGLNY

SEQ ID NO: 353996 - protein, 81 aa, Zea mays
  Clone ID: MRT4577_86017C.1.pep
FFFKIERTNENASSGKRQPLPGHRKQQMGQYHPWWPVDSLDDHVREPTSDGTVAGNIDRPVVPSGQAIAPSAGTSLREVEG

SEQ ID NO: 353997 - protein, 211 aa, Zea mays
  Clone ID: MRT4577_86018C.1.pep
EEQLVQGSGERGKVVYNTKGSYSETCEVDGDVRINSTALSVTLVPASSSERREWRIWPYCRKNMPDIKMVTVTQLEDKSSAPPCTVTYNIPAVLFALGGLTGNFWHDFGDVLVPLFIASRRYDGEVQFLISNMKPWWPAAYKTILQRLSKYDAVDLDGDGDGDAHVVRCFPHVTVGIHMHNGLSIVPEWAPGPPGGRGLTMADFTRFMREV

SEQ ID NO: 353998 - protein, 84 aa, Zea mays
  Clone ID: MRT4577_86019C.1.pep
GGRVGLSDGSLARSPPGELAPPPWPRRRGQPRRARRRPEPGSPPPALPRWPRRSGCGPRQVAHGLAMQRGCMPRVDRTWASLLG

SEQ ID NO: 353999 - protein, 50 aa, Zea mays
  Clone ID: MRT4577_8601C.1.pep
GEKKKIYFLPPSLRVKNHQKFQQLGQPKTPTSHAMGFNLGEPHNFHMNLL

SEQ ID NO: 354000 - protein, 72 aa, Zea mays
  unsure (1)..(72): unsure at all Xaa locations
  Clone ID: MRT4577_86020C.1.pep
WPPCDVVGLSPRSGEAEAPLRSRSSPSSEVEAESEPWGRARRSPSFEVEIESEPWXRARRRPSSEAEAVSEP

SEQ ID NO: 354001 - protein, 134 aa, Zea mays
  Clone ID: MRT4577_86021C.1.pep
WFFDPPQFSPADLSGPRLWALFAFPLFVRDVPRALLFQVFCGSHLGAPGLDFLSCRGFPAAPRGRSGFAGSPLFGAFVCILLLFWLILPPATVDLIGPPPDSLGPPSLYQWCSWGPIPKRKQKNEDKKRKTKRE

SEQ ID NO: 354002 - protein, 44 aa, Zea mays
  Clone ID: MRT4577_86022C.1.pep
APAPPHRARRACASPVSCPAGPASASSPPGPPPSPGPGAFAWAL

SEQ ID NO: 354003 - protein, 59 aa, Zea mays
  Clone ID: MRT4577_86023C.1.pep
DHSDKYLTCNSLFPYFCIIYIVDMVCCPLVGTSLLYQLSRNITFVSTKVCLLVLLSLYI

SEQ ID NO: 354004 - protein, 83 aa, Zea mays
  Clone ID: MRT4577_86024C.1.pep
MATSSCPVPLLLLCLSVLMFCSFAAGSLDQELDMTWGDGRGKVLDNRRLLTLSVDRTFCYGVQSRHEYLFRKIDMQLGMVPGN

SEQ ID NO: 354005 - protein, 34 aa, Zea mays
  Clone ID: MRT4577_86025C.1.pep
EQQHPIKSKRLLKALLSRRKTEKDDTLYTFLDEY

SEQ ID NO: 354006 - protein, 142 aa, Zea mays
  unsure (1)..(142): unsure at all Xaa locations
  Clone ID: MRT4577_86026C.1.pep
MESYMLSATYVALQEGGGLAEFFGFTSSLSLPMRRNATSDDFMFVVSFRIHAEEKSSETRCATTEAKMKEAIQXSRRIRRNFLQRWHGRDDASPLEDIPIYDTEGCKQAAHLFKYDSTVGIFYADVKPCDDNGISLDGKVIQ

SEQ ID NO: 354007 - protein, 68 aa, Zea mays
  Clone ID: MRT4577_86027C.1.pep
TIDGPGDKSKPEGQTNSLGKSYPIKTKLQTKTTTCSDFHFIGGGEKNCSGYAAFESDLHVWFCQPLKI

SEQ ID NO: 354008 - protein, 70 aa, Zea mays
  Clone ID: MRT4577_86028C.1.pep
QIFNYISFHHLIKSPFIHIINTTTIQFKLFNNYNTHHFHNFHIKIPLIYHKINPPSLKFHTTFNTYKPNL

SEQ ID NO: 354009 - protein, 159 aa, Zea mays
  Clone ID: MRT4577_86029C.1.pep
MNSSFSFYLFSYQVHEKSILLPLLPGSLLALEEPRMYGWFVYFALFSMYPLICRDQLLLQYIAVLSLFFLIYYSPGGSYGKRSNISCKAKLVLSLPFLCSLLLHITYLQIEPPKRYPFLFDALIMFVCFSQFVILAVYTNYKQWMLDSNSRSIGVKKDL

SEQ ID NO: 354010 - protein, 123 aa, Zea mays
  Clone ID: MRT4577_8602C.1.pep
MVNDLDHLPGPLELIHGDSALYADEHTNAQLHNMSSFIKPTLTLLSRTNYQTYYQYEPTVESLTALSHTFDTKRLQLPTVNIHIPGPLYMTYEEAHDVNSSAHSVPTSPSTRFYPYNDNFYID

SEQ ID NO: 354011 - protein, 192 aa, Zea mays
  Clone ID: MRT4577_86030C.1.pep
TLYSTRICLMTSRFWYKFGMVDHACAVHSIVFKAEVHAHPVSAFPSPFSRRLVCDFSRCRWQHHAAIACMVTVVHRPHVSTSLHDCGSKAQRHGPFVNQHIRDPSWHAWKKHDSALESWESSREAPSGPRSLCLLCVPETRNLVTLVVGDRERRILGACRVGRQQRPPSRLRRRRLERENRDREGVQHTRWG

SEQ ID NO: 354012 - protein, 71 aa, Zea mays
  Clone ID: MRT4577_86031C.1.pep
AGRVLGRGPCPALGGARCAISFLCGFMVPLLLKKEFLAPPDFFLPPPINGRPALFYNKNLFGAALHTRFLA

SEQ ID NO: 354013 - protein, 85 aa, Zea mays
  unsure (1)..(85): unsure at all Xaa locations
  Clone ID: MRT4577_86032C.1.pep
PVQXSVXQTSXGRAKXXXKTQXLAQLXXAXIXXXQGTSTXHFCXNXMSCPHHKPNIDGYNVKDFDHTRVANLTEIWKSLKRLRLL

SEQ ID NO: 354014 - protein, 85 aa, Zea mays
  Clone ID: MRT4577_86033C.1.pep
LCVFVSNKKRRNCNYKKKSFVKKCSNQHIPSSCSVNISQSAKPKLIKTSGCGCLNNYLVLFDPNASSPVKRLRNISVVNLTGVSF

SEQ ID NO: 354015 - protein, 155 aa, Zea mays
  unsure (1)..(155): unsure at all Xaa locations
  Clone ID: MRT4577_86034C.1.pep
FGRGRPPPLPFSHAQCGRSWCRRDLCVWRPPSTPSSPSPTRRLKPSRAPASPPETPPXSPQSLSPSKACAPSPSPNVSPSXXPSPVPPPLPATPSXARSLPPXTLTEPEPIPPSXAPASPPPPPPXPPPXSPAPPPPSHSLLRAPHPVRRNGSGG

SEQ ID NO: 354016 - protein, 36 aa, Zea mays
  Clone ID: MRT4577_86035C.1.pep
VLVCRHGQTQGVKREGDELSNCCSVVSNSKRLGLDI

SEQ ID NO: 354017 - protein, 310 aa, Zea mays
  Clone ID: MRT4577_86036C.1.pep
LSVIQLLAYCSRPVAIFNTELSVENFKAAMSIPTTLGLDPTVANSVHQVINRSLGSIIPRNVQKAVLEGLFSLGRAQVSDYILNEKNPIGSLRLARLRSILDEGKSLQLQFPAEDLGFHYAEGALVVEASCEKTHEGEKLQHSKRASREYIPSAKVGSRLPHMLVREVPASSEGAFSTLDLVSGDKLEFVLIIAPVKESYEIARATLKIADELTLSARVCVMWPRGSTDAEVEESRSELTPWTNYIDVEEVPRVSGGSWWEMCRISRKSVLLVRPDEHIAWLTELDRVRDAESEIRRVFSHVLCLNSHRV

SEQ ID NO: 354018 - protein, 189 aa, Zea mays
  unsure (1)..(189): unsure at all Xaa locations
  Clone ID: MRT4577_86037C.1.pep
MAKSEEHHLXSKADAGATKTYPXEAGTARNNGFLVIKNRPCKVVEASTSKTGNHDHAXKCHXVAIXIFHGKKLEDIVPASXHQCDXLPYVNRTDYHLTDIAEDGYRTLLTSHGNTSDDLILPADETLEDHIKERVKSVKDLVVTVQTAMDEEHICSLKDVTPRNFLGFADGTLLYLYLNRNTSVSPKDC

SEQ ID NO: 354019 - protein, 373 aa, Zea mays
  unsure (1)..(373): unsure at all Xaa locations
  Clone ID: MRT4577_86038C.1.pep
EDFSAKVCEQIMFKLVGWEPADVHVLDIKPWAMHAEVAEKYICCNNRVILSGDAAHRFPPAGGFGMNTGVQDVHNLAWKLGLLLNGVASPSILQTYESERRPVAIFNTELSVENFKAAMSIPTTLGLDPTVANSVHQVINRSFGSIIPRNVQKAVLEGLFSLGRAQVSDXSLNEXKNPIGSLRLARLRSILDEGKSLQLQFPAEDLGFQMVKIMQIFLVSFTSSFSYAEGALVVEASCEKTHEGEKLQHSKRASREYIPSAKVGSRLPHMLVREVPASSEGAFSTLDLVSGDKLEFVLIIAPVKESYEIARATLKIADELTLSARVCVMWPRGSTDAEVEESRSELTPWTNYIDVXEVPRVSGGSWWEMCRIS

SEQ ID NO: 354020 - protein, 196 aa, Zea mays
  Clone ID: MRT4577_86039C.1.pep
VLGGVKENPAAANSAESDGLGRFAVDEHNRRENALLEFVRVVEAKEQVVAGTLHHLTLEAVEAGRKKLYEAKVWVKPWLDFKELQEFSHKGDATAFTNADLGAKQGGHEPGWREVPVEDPVVKDAAHHAVKSIQERSNSLFPYELLEILRAHAQVVEDFAKFDILMKLKSLEGAFVLNQHQPAEHDESSSQTDVTV

SEQ ID NO: 354021 - protein, 97 aa, Zea mays
  Clone ID: MRT4577_8603C.1.pep
FKTQQGVQSGVFEKISFKGKGPASWVFPRWGIFKRKENFAQRGGFLNFKPRGAKILWKKKFGETGGGKPKNRRLPINFFVKKFWITVPSNYLFQHFG

SEQ ID NO: 354022 - protein, 30 aa, Zea mays
  Clone ID: MRT4577_86040C.1.pep
SKKKKKKKKKKKKKKKKKKKTKKKKKKKKK

SEQ ID NO: 354023 - protein, 247 aa, Zea mays
  Clone ID: MRT4577_86041C.1.pep
MRVAATRTAAAAAAHPPSAFLLLLVLLGCASLAIGGAAMAGHVLGGVKENPAAANSAESDGLGRFAVDEHNRRENALLEFVRVVEAKEQVVAGTLHHLTLEAVEAGRKKLYEAKVWVKPWLDFKELQEFSHKGDATAFTNADLGAKQGGHEPGWREVPVEDPVVKDAAHHAVKSIQERSNSLFPYELLEILRAHAQVVEDFAKFDILMKLKRGSKEEKIKAEVHKSLEGAFVLNQHQPAEHDESSSQ

SEQ ID NO: 354024 - protein, 84 aa, Zea mays
  unsure (1)..(84): unsure at all Xaa locations
  Clone ID: MRT4577_86042C.1.pep
FTNRLPENDCRYAIYDGGVIPXEDVHKSRIFYILWSPSSAKVKSTMLYASSCEHXDSALNGIHVELPATDAREISLDAITDRAR

SEQ ID NO: 354025 - protein, 83 aa, Zea mays
  Clone ID: MRT4577_86043C.1.pep
TSLPRVSVISISLHMPQNATCKPKPEPHSQQQLGLYYQTSGSGRHTICPRDLRVNCSGVRIRRRHDDGMGADDGSQSVVPCRP

SEQ ID NO: 354026 - protein, 51 aa, Zea mays
  unsure (1)..(51): unsure at all Xaa locations
  Clone ID: MRT4577_86044C.1.pep
LFFIFLFFFCFLFXLFFVFFFIFFVFFLFIFMVLYVFYYVFLFLVMDVFVY

SEQ ID NO: 354027 - protein, 35 aa, Zea mays
  Clone ID: MRT4577_86045C.1.pep
IVHLYRPDIDMVLRDVPFHQGVETEVVVTAMNNHL

SEQ ID NO: 354028 - protein, 41 aa, Zea mays
  Clone ID: MRT4577_86046C.1.pep
QRPGQFQSRSLSPRLHKTATQILGAYQSSGSDGGRISTVHI

SEQ ID NO: 354029 - protein, 81 aa, Zea mays
  unsure (1)..(81): unsure at all Xaa locations
  Clone ID: MRT4577_86047C.1.pep
KXXSSKNXPXFXSYPHSSXPPKLSFKRRKIPLILLLTIFLSSLTKKNPSYITHIYSFLTLNIYIFYYTYSKHPFIFIYLYT

SEQ ID NO: 354030 - protein, 45 aa, Zea mays
  Clone ID: MRT4577_86048C.1.pep
SQKIFLNRKSDDYDVENRFPLSITNLNCGKRYAHYYHLEDVVKNM

SEQ ID NO: 354031 - protein, 81 aa, Zea mays
  Clone ID: MRT4577_8604C.1.pep
MTSKAIVLITGANRGIGYGVARRLIREHPDYHVIIGSRDATQGREAASTLRAEEAASSPSISSVELDVTSDTSITAAKETI

SEQ ID NO: 354032 - protein, 79 aa, Zea mays
  Clone ID: MRT4577_86050C.1.pep
PLETFISFTSGRHTFALSALHGRPLGKLQQHANIYTLGSVINQLESSRLESLVKHHLDRSLNLKLDIDHFLDDGPTYGH

SEQ ID NO: 354033 - protein, 156 aa, Zea mays
  Clone ID: MRT4577_86051C.1.pep
GKWANRDQVRKMMKDRGIRKEPGRSWIEVKNAVHAFFVGDRSHPLSDQIYKFLSELNDRLSKIGYKQENPNLFHEKEQEQKDPTAFVHSEKLAVAFGLMTLPPCIPLRVIKNLRVCDDCHSWMKFTSEVTRREIVLRDVYRFHHFNSGSCSCGDYW

SEQ ID NO: 354034 - protein, 65 aa, Zea mays
  Clone ID: MRT4577_86052C.1.pep
GARVSYVSACTLAKIDQVIPFSKASSPGSSNRQMGTPRTREELMHVKKHNRVHTAVASSCRTTNS

SEQ ID NO: 354035 - protein, 70 aa, Zea mays
  Clone ID: MRT4577_86053C.1.pep
LLNIVLLVLIRRGFLKGLPYKQMYNFNANFNFILLLPIKFLNPIKKKKKKNKKKKKKKKKKKKKLKKKKT

SEQ ID NO: 354036 - protein, 89 aa, Zea mays
  Clone ID: MRT4577_86054C.1.pep
LRGMRTGEAKVWSTKKVDLQRDASSSNERQVRTEGGPADVDLRQHNVIHTEHSSNRGKSTSCKNNSTKSTSCQNLPIAILTCPANSRCQ

SEQ ID NO: 354037 - protein, 72 aa, Zea mays
  Clone ID: MRT4577_86055C.1.pep
QIVAHAHAAIHGQNGQAHPCPTCRQPSPKIGNNNHLFCWACQKHFCALCHKAVQKPAQHYGPKGCKQHTADP

SEQ ID NO: 354038 - protein, 64 aa, Zea mays
  Clone ID: MRT4577_86056C.1.pep
FVQLTILAVPINPPGLVLHYSLWFWARSRGQPKAFGPIGKICTNLKLYAYAIRMFQLLPGFRSS

SEQ ID NO: 354039 - protein, 246 aa, Zea mays
  unsure (1)..(246): unsure at all Xaa locations
  Clone ID: MRT4577_86057C.1.pep
HLLGEDEYEPTGTTQPEGTLDAMKDVVNRQECHTACLEDVGKXAVCSSCLFSFCTLCRNRRHIGEQCMSPEERLMILEKRQESGNVQGDQMKVLQELRSLKEIMKDSKQCPKCRMAISKTEGCNKMHCENCGEYFCYQCNRAITGYEHFRGSCVLFPQEELDRWEMQMNQRVGRQIVAHAHAAIHGQNGQAHPCPTCRQPSPKIGNNNHLFCWACQKHFCALCHKAVQKPAQHYGPKGCKQHTADP

SEQ ID NO: 354040 - protein, 172 aa, Zea mays
  unsure (1)..(172): unsure at all Xaa locations
  Clone ID: MRT4577_86058C.1.pep
MTDSTEFKAVTTCNTCKPATISRDDTEAADARSLKNLNSTAPLSNSRTRRNGPHILSWLLPKSKRKPKPDVSPNTVECENMSQLLKDWGVFSLDSLRKEVVEANEHRDAALQEVSEMKLSLGELTAKLVSLEAYCSELKKALKQATSAEDMQSHSKRSARPXSGSRDSFLPV

SEQ ID NO: 354041 - protein, 81 aa, Zea mays
  unsure (1)..(81): unsure at all Xaa locations
  Clone ID: MRT4577_86059C.1.pep
SPCRYSSYMVGSYRFVVDVIDGHSLELPEHSVLSMRLTSKHDTQAVSRPWRLSRSLRVDHATCTGGQRXTLCDSSKSSRCQ

SEQ ID NO: 354042 - protein, 82 aa, Zea mays
  unsure (1)..(82): unsure at all Xaa locations
  Clone ID: MRT4577_8605C.1.pep
HSSGRSSQSSNLTMSSARGGFSRPGLGANTRCCAPLPTQSISKTTSQGVVIHKRPQAPTYPTPIKSFHKDXLESNSTGTTLN

SEQ ID NO: 354043 - protein, 49 aa, Zea mays
  Clone ID: MRT4577_86060C.1.pep
TKPGSCFGAYFNIRGLKKRVGFTPSPTNRGCTRIPIGVPQVARPPTNNF

SEQ ID NO: 354044 - protein, 128 aa, Zea mays
  unsure (1)..(128): unsure at all Xaa locations
  Clone ID: MRT4577_86061C.1.pep
MGATELWDLLASDSEQFVEMCRVYQHLKLKNWFVRSRLQYGADFVAHCHRPTLAHSXSWXVALEGKAFDTRCALMKVWSELLCVLWDSSSVAKTLLLLTISTKSYELGYLDCLEQMIVHERTITRWIS

SEQ ID NO: 354045 - protein, 87 aa, Zea mays
  Clone ID: MRT4577_86062C.1.pep
QVTVTRWSRRHVTRGSDKRSTNIVEWRKKTVETRAPSFDEKEREGCMSKYDIAYICPSAKNPISHYSPVLNWTNTKKMLPQLSSCNL

SEQ ID NO: 354046 - protein, 64 aa, Zea mays
  Clone ID: MRT4577_86063C.1.pep
KWFSQTRSWNTAASGSHLACAIEEIGVSRHASQALDPQDRLSWFFHFAFVFFFCFIFFFFFIFF

SEQ ID NO: 354047 - protein, 78 aa, Zea mays
  Clone ID: MRT4577_86064C.1.pep
SPSPAGPVRFAFSWRRWMREDRRKQGGEGLYWPASSWYSCITLLHRPLLARPSSPVSFCLFVPRILNLLSRSIPDPIE

SEQ ID NO: 354048 - protein, 70 aa, Zea mays
  Clone ID: MRT4577_86065C.1.pep
LPPMLVFFGAFFFLLPWGLWIMDWEWGPPLVKKSICTGGVVCVSGLGSPGECETWVKLVPLIPNWGVFPP

SEQ ID NO: 354049 - protein, 33 aa, Zea mays
  Clone ID: MRT4577_86066C.1.pep
LFAYYYIMIHAHCLHRLAADQLAPRLKSYANVG

SEQ ID NO: 354050 - protein, 150 aa, Zea mays
  unsure (1)..(150): unsure at all Xaa locations
  Clone ID: MRT4577_86067C.1.pep
RGRRPRCCARQRCATAPRSRPWLSRTRSPTTRRHRRTPSLRXPPLPPRRRLQPPAARPRAPARLPAPAPPPPRRRRPPPRPPRGVRGRRARRRRRGRAPAPXRLRRSPXRLRPVVHRGRXTSRRSGRTRPPRRRTAASCGRASSSTAMGT

SEQ ID NO: 354051 - protein, 187 aa, Zea mays
  unsure (1)..(187): unsure at all Xaa locations
  Clone ID: MRT4577_86068C.1.pep
SALTYAVLQHISAPKAAMLPAAFSRFMTPSSAHLQDREFKTATVLDVLKCXGKMADGSWLWCTTXDSRYDTVKSMTHDNGRCLVVDKPGQNKSIAGIVTDIDYLRKIIVRGKSSQSTNVXGDLMTEENDLFTVNPDTKVLPAMQLMTXNPVRHIPVIDGTKMLRMVSIGDIVRALMAHHMAELNRLM

SEQ ID NO: 354052 - protein, 124 aa, Zea mays
  Clone ID: MRT4577_86069C.1.pep
MDGHGGGAGAGKLTRTPSSLLRSPTVRNCSSFQAVVVDDPEPDDKKAQAHPKPPPHHLHPGGGPAHPRLVLALPLAFLLVLLLLRGGGVGHHLALLSASAAVSLATAATIERVTCSLPRAISCI

SEQ ID NO: 354053 - protein, 89 aa, Zea mays
  unsure (1)..(89): unsure at all Xaa locations
  Clone ID: MRT4577_8606C.1.pep
ERTPLARPRVTKRXRSHKGAQPITRRGRTPSTVXXRHLSLXHGLEIPXTAREXRNXKTLXXSXDESDAPRRGLSVYLVLTGLSGRLDTR

SEQ ID NO: 354054 - protein, 62 aa, Zea mays
  unsure (1)..(62): unsure at all Xaa locations
  Clone ID: MRT4577_86070C.1.pep
RVSQRDVFCVATPVDLTTWPDDTYKINNGGILRLKVKIYYDAYNKGHSPPYNECRXTEEVVI

SEQ ID NO: 354055 - protein, 131 aa, Zea mays
  Clone ID: MRT4577_86071C.1.pep
RRKSLRQLCHCKYVPHIRHMLPTPHRATRRLRHSCAFMFLETLSRQSRHRRIPFVSVLRLSRSARCARAEEQGPADTHAGVPDAGARDRPGLLDRAALAELLRPRAVREHRPLPRDHSSRIAISAPLTARS

SEQ ID NO: 354056 - protein, 229 aa, Zea mays
  Clone ID: MRT4577_86072C.1.pep
MAAEQKRHNSSHDITVDGPAPDACPPATNPTNGNSQPHDTQPPANGSSQPEEVIESYELMLDLSKYILLLATLVATVTYAAGFNPPGGVWQETVDATGQFAGDSIIRTTSYHRYLVFYYCNATAFASSLVIILAILFLTLMEEKKKNRVTLLPLRAVMVVDLLSVMGAYAAGTCRDKPTTIFSSVLVVAVVAYLALQMVLASLPEDKHSYIDAVHEKRLRKVLMLLATF

SEQ ID NO: 354057 - protein, 65 aa, Zea mays
  unsure (1)..(65): unsure at all Xaa locations
  Clone ID: MRT4577_86073C.1.pep
RNDRRHHIRLIRNISSRHQHLQRTLHLISRRIRRSIIQVHNTRRTQRILXPRILKHTQSPISSNI

SEQ ID NO: 354058 - protein, 102 aa, Zea mays
  Clone ID: MRT4577_86074C.1.pep
HASGEASASAYADVYSAFAEIDTIHVVEKRDTHDNVRDVPKVNPLAPLATINPEELHSKILPIFAGRPAIMACQRHGSCGEPVSGDTERHQLLDHRVEHTCP

SEQ ID NO: 354059 - protein, 92 aa, Zea mays
  Clone ID: MRT4577_86075C.1.pep
LHTILTILKASGSLQPFLGHPLSNLLPLQIDFCNNSSVFLHSMSQLVVFRYRLSHSPLVIDRFSRYNILWHVAIPGTAPLPPPPILFSRRRL

SEQ ID NO: 354060 - protein, 128 aa, Zea mays
  Clone ID: MRT4577_86076C.1.pep
TRPDEDEMADFIVEEDEIDGNGQVVRRKKFKKKVPRQAAGVSSSALQEAQDIFGDVDELLALRKQELEREALNSGELRGARLEDEFEPFILAEKYMTSKDEQIKENDVPERMQLSEELTGYPPTDKTT

SEQ ID NO: 354061 - protein, 78 aa, Zea mays
  Clone ID: MRT4577_86077C.1.pep
SLYCSFKLSLPPTQSFFFYKYKNTGPTTGKGAHHKNPHRRGRQLGPAAPINNYSDPKGQHKRTAGGGGDPEKPHRGRG

SEQ ID NO: 354062 - protein, 74 aa, Zea mays
  Clone ID: MRT4577_86078C.1.pep
KHMYLTDYTTLQGKKHYTYNYLHNTNIIMFCSNTNIHSDPHFFKRTVLNKLVHLTIKNNKTLFHLLTVKPLVII

SEQ ID NO: 354063 - protein, 55 aa, Zea mays
  Clone ID: MRT4577_86079C.1.pep
RTATLFSYVSALDWKLAEAARKVAASRSVSTRSALDAMMIAIGEISVSFFSLNCN

SEQ ID NO: 354064 - protein, 60 aa, Zea mays
  Clone ID: MRT4577_8607C.1.pep
CMDSYVRPSFRSSAPQRPAWIYLSWMNHKCLHNHKQIFTLVPPTYPGRVAGRSGSTLQYP

SEQ ID NO: 354065 - protein, 96 aa, Zea mays
  unsure (1)..(96): unsure at all Xaa locations
  Clone ID: MRT4577_86080C.1.pep
PPAGSPTHEVSIFVKQLKVRNWVLPERPGLKTXDCVISLFDRNLYLGNWLQGNIRQDTIEDPEEPFLAQQSCRGGLLXKGRDVVYVTVNVHEQHTD

SEQ ID NO: 354066 - protein, 70 aa, Zea mays
  Clone ID: MRT4577_86081C.1.pep
GTCVMFQPICRPNQTFHPDLSCEAIPSIQTDLRCQRFDPPNISNHGISSGTLLAPGCYYLSYTSKDNYTY

SEQ ID NO: 354067 - protein, 127 aa, Zea mays
  Clone ID: MRT4577_86082C.1.pep
HPRAGGKVPTDSPRPCRPVVHPTAAASPRGDRRTAGCRRRRRSSAPSWDWALRCTPTPSASFPTCAMMMNSCSDLFVSDLYFFATCCQYTWSGLWIPHDLVVASASTFQLWPCNKMSLPNGSDGSQL

SEQ ID NO: 354068 - protein, 92 aa, Zea mays
  Clone ID: MRT4577_86083C.1.pep
TNLLRGAFYKNMRVSTSQISTTNKNNQLTNGHHLYINWLPPLLKETPQTAPLVKTGRPTPANMDRRVHRASSLRLPLLQLAWVIHPHPEQPE

SEQ ID NO: 354069 - protein, 97 aa, Zea mays
  Clone ID: MRT4577_86084C.1.pep
PRVRHSPRPCRPVVHPTAAASPRGDRRTAGCRRRRRSSAPSWDWALRYPWEHVLGMGLGAVFVNQLVKFDEKLKEDLDKMLERARLANEQRYIDDDE

SEQ ID NO: 354070 - protein, 80 aa, Zea mays
  Clone ID: MRT4577_86085C.1.pep
MPATPTIIGALLGLGTQMYSNALRKLPYMRHPWEHVLGMGLGAVFVNQLVKFDEKLKEDLDKMLERARLANEQRYIDDDE

SEQ ID NO: 354071 - protein, 247 aa, Zea mays
  unsure (1)..(247): unsure at all Xaa locations
  Clone ID: MRT4577_86086C.1.pep
MPAGRSAPARGAAVAAMLLLTMLARLPCLEAQSSRRPTVLTVDMTGKGDYRTIQEAIDAIPAAANNSTSAAIVTINVNPGIYTEKVVVNKAGVSLVGRSATSTIVTWSGPWNQNHQSEFALYVQATDFVAKGLTFQNTLGRKDNGPAVAAKVDADKAAFYDCRFLSYQDTLLDATGRHYYRGCYIEGATDFIFGTGKAFFESCHLHSTSDAKGAFTAQRRSTESENXGFSFFKCEXTGTGVATAILG

SEQ ID NO: 354072 - protein, 74 aa, Zea mays
  unsure (1)..(74): unsure at all Xaa locations
  Clone ID: MRT4577_86087C.1.pep
XXXLWGGESNFFIXLFSFLFWLSSKLLILHVFPICICSAPLQMSKSISSLRYLIFSPALGSRLVRMQSTITNQH

SEQ ID NO: 354073 - protein, 98 aa, Zea mays
  Clone ID: MRT4577_86088C.1.pep
GTLVFGRVLSPQLLLIALCYSTIQTLAHRHHIPFDHATNRVNAASLFFSFGYVKKNRKKTIRVNAASLFFSFGYVKKQKQKKKTKEKGYKAGVSSRLF

SEQ ID NO: 354074 - protein, 80 aa, Zea mays
  unsure (1)..(80): unsure at all Xaa locations
  Clone ID: MRT4577_86089C.1.pep
RQIKATVMQLISVLEHMQRAGGRTMVLLDTGPGHRLAAIVVDSFEIGXDEQLSMLDSVHLNVILXRASELVDRRLLTILV

SEQ ID NO: 354075 - protein, 168 aa, Zea mays
  unsure (1)..(168): unsure at all Xaa locations
  Clone ID: MRT4577_8608C.1.pep
MIIMRYPVLTAAFSAAAIGFLIGISFLVQITPKVYPSSFVADDADSSTLGDSNVLGRFSTARNSCSRATSTXGHLLLRHPSSSXNATAAEVVVVGPGKPKGAARLPPGIVVEDSDLHLRRLWGNPHEDTPXRKYLXVLTVGYSEKDSVNAIVQKFSENFDIMLFHYDG

SEQ ID NO: 354076 - protein, 56 aa, Zea mays
  Clone ID: MRT4577_86090C.1.pep
HFSLSPTLEQIHIILQIHSQKLKTYNTKHHTQPNHTPKVKPPYSTMDSLTTDTHIQ

SEQ ID NO: 354077 - protein, 161 aa, Zea mays
  unsure (1)..(161): unsure at all Xaa locations
  Clone ID: MRT4577_86091C.1.pep
CVQDTKKHFKNVNAPKHGRLDDLGGDFAPKASSGPHQXRDGLAVILVITNRLRXDSSYXPDVIAILKLLHAPLDAEARRHNTYLAXLMDVLXITHTDDNYRVVYDTKGRLRLPPIRDDDDLPELCKRTAVHDGHNAXPYLNTYDSRTIRYRDTLIXANDTI

SEQ ID NO: 354078 - protein, 75 aa, Zea mays
  Clone ID: MRT4577_86092C.1.pep
TAVPLLLDPVGMTYMPFYMNACFDDYRALFYTTTDGTYCMESVLILCYMYCMHQIILITFIDTASLIFYTFYERR

SEQ ID NO: 354079 - protein, 140 aa, Zea mays
  unsure (1)..(140): unsure at all Xaa locations
  Clone ID: MRT4577_86093C.1.pep
AEVFLRVTGGEVGAEXSLAPKIGPIGLSPNKSGEDIAKETDKDWKGLRVTRQAHXQNRXAKGCVGPSGGGLVIXRWLXEPERDRKNVKSIKHRGDINLXDVIEIAKTMQNRSMCKALVMTRKEILGTXYSVVCTVDGEDP

SEQ ID NO: 354080 - protein, 47 aa, Zea mays
  Clone ID: MRT4577_86094C.1.pep
QRRVPIFLFFFFLFVATIYDLFVEKVLVFVLINVYVPVLLTIAAVSF

SEQ ID NO: 354081 - protein, 59 aa, Zea mays
  Clone ID: MRT4577_86095C.1.pep
RKPTHQPTSRNRHRHVSSGGAPVALAGLRRGRGRAASALSARVVPAAAAPRRPGRVRQG

SEQ ID NO: 354082 - protein, 152 aa, Zea mays
  Clone ID: MRT4577_86096C.1.pep
SAQVPRQGACASSHRANPVQRPRQPKRRAPSCTSRPSRRAQRLPPPPSRSHAQEALCFFQNEPAVRFFREKQPPDAQFIPLVAHFLATISPSDLAEPPPEPRPAGAPPLVRRGELAPSSLPFPILSPTVCVRCVCSPSSRRSSFPGETSPCH

SEQ ID NO: 354083 - protein, 89 aa, Zea mays
  Clone ID: MRT4577_86097C.1.pep
EFFCFFFVFPLSLFRPGRVSSLGALIHSQQKVYRCICSVVRLIIRGFFCFPDNRLCLGVRFFFFTPVAMIVQMVFWNWSRINFKNNPLP

SEQ ID NO: 354084 - protein, 58 aa, Zea mays
  Clone ID: MRT4577_86098C.1.pep
RVTMEFLHDVTNAMMLSSVTTCVKCLTNLFRLKFKFTNHETIMVKVLPLTCSRYYTSF

SEQ ID NO: 354085 - protein, 45 aa, Zea mays
  Clone ID: MRT4577_86099C.1.pep
LRASTSHRRRTGRAGAGPCPRACTCTPTCLIGWLRRHRGSRTGTL

SEQ ID NO: 354086 - protein, 96 aa, Zea mays
  Clone ID: MRT4577_8609C.1.pep
MADTIVFTCDRQKPKALNRLHSRTRRMTNPCHIWAKPMIWKSPTTPENPTGVDPTSRSPYYAPCVDPLHTRTPVDAPNLTYPPHDAFLKTPMVIPQ

SEQ ID NO: 354087 - protein, 102 aa, Zea mays
  Clone ID: MRT4577_860C.1.pep
GPVIRFIPPGHRPELFVRFIPPEKLLGQPFLFFREVVKLFSLGRELKGALGLPPLWPELSFEGGPLFWPRLVPLVCVRGAFPLVCQVCRPWWLSDMGCFCFY

SEQ ID NO: 354088 - protein, 66 aa, Zea mays
  Clone ID: MRT4577_86100C.1.pep
SVFRAIKWANGLGPPCNNLSHQTELVPVGLVPPPIFLAPECSGLKGPTLKNVQVLFFTPPVCSFFP

SEQ ID NO: 354089 - protein, 91 aa, Zea mays
  Clone ID: MRT4577_86101C.1.pep
APFHEPPPVLQGQDKLGVRGSSSWGPTLALCLYGLDFRWYKRGPVLLPAPMGHMIEGETALPFFKEGGPLARIDRLDVGLRKIVHISGATF

SEQ ID NO: 354090 - protein, 72 aa, Zea mays
  Clone ID: MRT4577_86102C.1.pep
MDNPEMQRFLQQEQQKAMMNEMVGKLTSVCWDKCITSAPGSKFSSGESTCLTNCAQRFLDMSVMIAKRFEMK

SEQ ID NO: 354091 - protein, 250 aa, Zea mays
  unsure (1)..(250): unsure at all Xaa locations
  Clone ID: MRT4577_86103C.1.pep
MSSSPILGPSRADCQSPYDEEHMDWASSVPKKYHRVPRLLRRSNVILVLIDIFIVTVLVHIFWPLITLLRRNEELFGARLTFTLNDTSISPTLPEQQTIPRIFHQTSANETIPEAWTDLVQSCKTTYSDFTYMHWTDDKARDFISEEYPWFIDTWDNFPFNIQRADAXXRYFVLPTTGGMYLDMDTLCNASIPFEQIEAIGAXTTPVFQSTTPTGVSNDMMITSARHPAFTKXLSRIQLYHDITKPWRPS

SEQ ID NO: 354092 - protein, 132 aa, Zea mays
  unsure (1)..(132): unsure at all Xaa locations
  Clone ID: MRT4577_86104C.1.pep
SARDNLMXGSMLERAKSLVITEKERQQYXWSARTQVSMWYDNTETENRKLHHYTNKFWSGLLMSYYRPRDEMCFSLLNEEXQENRSLQLEEWRKDCSYYSNEWKLGKEVFSHKDTGDTSAIVRSLYRKYLRP

SEQ ID NO: 354093 - protein, 69 aa, Zea mays
  Clone ID: MRT4577_86105C.1.pep
KIAGDPDTLKATLGDQQLSEAYDMTRPLGDGSIDERPTYKIRTQSRIPEQSSAHRHAGTVSEPMRQMLP

SEQ ID NO: 354094 - protein, 96 aa, Zea mays
  Clone ID: MRT4577_86106C.1.pep
NLARGIFALSVCPRQPTSISSPGGDDGPKKFWPEVVGPPLEKTKRGFLLDKPHPDIFVFPVGPPVTMDFPPHRGRIFVDPVAGAPPPGWGFNFPNE

SEQ ID NO: 354095 - protein, 86 aa, Zea mays
  Clone ID: MRT4577_86107C.1.pep
RTAMVTRLTARADRPGDGATRQETVASAMEGAWQPWGKEVDAMRKMAGGGHGSSREGVEGELQEGAGAVGAGGWGERVHQVEDARG

SEQ ID NO: 354096 - protein, 112 aa, Zea mays
  Clone ID: MRT4577_86108C.1.pep
LLECVMTPETIDDFRHKDMSLEIKKWNDDSLGTCDSCRSPATSAGTASWSFPSSVFDSNGPRLAANAPSLVQYTPMHYQFHWIRTRLDTPHVWPPCLPRQQSPEERCIDRMP

SEQ ID NO: 354097 - protein, 92 aa, Zea mays
  unsure (1)..(92): unsure at all Xaa locations
  Clone ID: MRT4577_86109C.1.pep
TAGTFSKEXXRAELVFGAGXPPQKARVWGAPCXXLNRAPLRLSSSACDLELKKPTEXSQRGWDPMCIRGCKGDLILALLKPAAGKLSTCVXV

SEQ ID NO: 354098 - protein, 73 aa, Zea mays
  Clone ID: MRT4577_8610C.1.pep
LTRRPTRPGQATRLTASLLVYDVSLAVRGDIRTGSTNPGRPIGSCELSCAYPTLIFCLYGLVHAINEYRLRVN

SEQ ID NO: 354099 - protein, 112 aa, Zea mays
  Clone ID: MRT4577_86110C.1.pep
MASRCFFPRDASGADGRHQQSKGAAEALEQLRHGGRLLSREDVGGAVRVRIVVSRRELKQMVAALGDDDGAGAAAAAATSERRHRQRGAGAGAGAGPGAEQRLQSLRRSARR

SEQ ID NO: 354100 - protein, 70 aa, Zea mays
  Clone ID: MRT4577_86111C.1.pep
RPPFFFFFWCINIIINRITWVCTYVLLRDNSYIDNQTTIMVCTRTFDPTARNPMESYRAFFLFHNIKKTP

SEQ ID NO: 354101 - protein, 55 aa, Zea mays
  Clone ID: MRT4577_86112C.1.pep
SICCTGLKSTPGGGMWRAVYQMTEKLSRLCLSRNYDITRTSSERVLSLSATKGGQ

SEQ ID NO: 354102 - protein, 142 aa, Zea mays
  Clone ID: MRT4577_86113C.1.pep
STFATQAFRCFQTPCKYGRRLGGGGGASPRDPNGPGAQNRQEKGGTEGGGRGNKRKRGKRSARPLKSTGEKPNRGGKRTGRRNKQNKPKAGPKAKNPTPSNQMEGRGRAPPKGGKFTGPQRKPGANGNGGKLKLRGGGRGLS

SEQ ID NO: 354103 - protein, 114 aa, Zea mays
  unsure (1)..(114): unsure at all Xaa locations
  Clone ID: MRT4577_86114C.1.pep
RPGPPXASVLRPPPRPASXFPXVGVXLLXVLVALPXXXALLXVLXXFXXCXCXPPPSFXXXLXAXXLWXFXGXGXXXLVXPXLLPXXGSPLXAFXRGLGXCGLRCVSXLFGKVG

SEQ ID NO: 354104 - protein, 486 aa, Zea mays
  Clone ID: MRT4577_86115C.1.pep
MGDTSSSSHSRQDPSLLGYGFHGAIANSTPPANFFDQGGGGTYFGELEEAFMHQVASLRRTQQAATVSAPHHGDTKPFPTAAGATAATATATARPPPTLDIFPAWPMRSRLHTPKECSNVTADSTDDSESSSKNHSNHSSDQLGAAAAANMASQFEQASQQQLQHKNMATSSTPRTGKALDPKVIRRLAQNREAARKSRLRKKAYIQQLESCKLKLSQMEQDMQRARTQGLFLGGDPGASTSSGAAMFDVEYARWLDNHSRRLAELNGALHAHLADGDLRAIVDDALTHHDELFQLKAMAAKSDVFHLITGVWTTPAERCFLWMGGFRPSDLLKTLLPQLDPLTEQQVVGICSLQQSSQQAEEALSQGLEQLHQSLADTMAGGSLTDDANMSFMSQMALALGKLANLEGFVIQADNLRQQTLHQMHRILTVRQAARCLLAIGEYHNRLRALSSLWASRPREILVTDEGNCEISIAAQPSQNQFSTF

SEQ ID NO: 354105 - protein, 47 aa, Zea mays
  unsure (1)..(47): unsure at all Xaa locations
  Clone ID: MRT4577_86116C.1.pep
IKSSFWRGIHGYCGLSFVLKRGELKGAMEXIAGFKELVLGGAKMNGA

SEQ ID NO: 354106 - protein, 85 aa, Zea mays
  Clone ID: MRT4577_86117C.1.pep
HYRYRLRAPWVSAMLIANHCGRKEASPVTAPKRWLHPNPQAMRIPLSRLTQPYCLFNNLRRQTIHHLKTELLLHMHSRGSAPETS

SEQ ID NO: 354107 - protein, 169 aa, Zea mays
  unsure (1)..(169): unsure at all Xaa locations
  Clone ID: MRT4577_86118C.1.pep
QKSAPNALLFXCQMKPISRSDRKAIVSTPLAPIFSPRTSLHSPPPAKQPPEVTLGVSVLFVQAVPSRAYCVLMTTTCTLSFVPRRTACRSSSISPSAVKHHESAIHLQASRNRRSSFDDQVIKLSEFYETEDPEHLFGEGCLWCNLCSGKEEGVEADLQEFQDFNEFED

SEQ ID NO: 354108 - protein, 73 aa, Zea mays
  unsure (1)..(73): unsure at all Xaa locations
  Clone ID: MRT4577_86119C.1.pep
PPTDXXRLRGQSLRRALHRRNRKPTQSACLFRXCQIPTVGIGFCHSNTSVGVRFRENSFYQNRPKSECKXCES

SEQ ID NO: 354109 - protein, 66 aa, Zea mays
  Clone ID: MRT4577_8611C.1.pep
LNRFSLDRNAKFSTHPNYKVPLSLHLGPDTSEARGAADMPAFPGAVKSLGFRCCSPTKRFLEPFFS

SEQ ID NO: 354110 - protein, 117 aa, Zea mays
  unsure (1)..(117): unsure at all Xaa locations
  Clone ID: MRT4577_86120C.1.pep
YKIISFYLPYRGCLINKKQTIVXVRSASPLCAWHKATVMHIQVASCRKSSVXSMSFCVSATFQSGSSYPPPRRWCIAFVVFVSPPPPVYCSGAVHIKAKKALPNTSLLFMDDSSKLP

SEQ ID NO: 354111 - protein, 113 aa, Zea mays
  Clone ID: MRT4577_86121C.1.pep
GFFVYFIDGAKQKKKLLKHSRHDTTAARASLCTGGRRQATTTTHSHSNHTFPHLFLQLATSSSGRPGHLFKPPFLIRKRVKGITGTRVSLALLLAAIGAGGESCPPPNLHKNH

SEQ ID NO: 354112 - protein, 87 aa, Zea mays
  unsure (1)..(87): unsure at all Xaa locations
  Clone ID: MRT4577_86122C.1.pep
TPLQHXXKDXTXLPIXYPRHXSTXXVTSXXLTPXXXVPSPSXIIISSSSRTSSSSXSTXCWEXXRXXIISGQSDRAAGVSQVKKRER

SEQ ID NO: 354113 - protein, 46 aa, Zea mays
  Clone ID: MRT4577_86123C.1.pep
KPRLLSFHPGPNNNYTSLITLIWSCKTFQPKTGCALQLWHLRSFAI

SEQ ID NO: 354114 - protein, 144 aa, Zea mays
  unsure (1)..(144): unsure at all Xaa locations
  Clone ID: MRT4577_86124C.1.pep
KKNKIERKKSKHHVKKKKISPSSSRATTTRSRPTGFSKTPGGEKNPASGGGEYDTFLKEEKAPLFLHHLREGGDIPAGDFALYKKRXAPPPPGGVHRDKIKEEEGAAAAVPAGGYGFHEQGVFEXEXKDGEKDTPEKKHHHLFG

SEQ ID NO: 354115 - protein, 49 aa, Zea mays
  Clone ID: MRT4577_86125C.1.pep
GSTGFVILGAHPIIHSDGVVWPGIIKCNIGIGDKKRKLIMRQFIELIIF

SEQ ID NO: 354116 - protein, 67 aa, Zea mays
  Clone ID: MRT4577_86126C.1.pep
KGERIFWNPPKELNYSRGFWKTGPGPGGEPTFPIGGRIKVGGKYGKRCFLGEIVIRLKFHTKIEPEG

SEQ ID NO: 354117 - protein, 312 aa, Zea mays
  unsure (1)..(312): unsure at all Xaa locations
  Clone ID: MRT4577_86127C.1.pep
GRYGPHPHGRGXVYVGGNRRGNGGGGGRRGSEHHGFFDGGRRGGGRRDGHGPVHHQRGHQPTYIRTPTLAVVAGAPPPPPPFVSPATPQAPPYGTPMGFPDMAPQVYYYAAPTSEGIQGLPFMPHPASPQAVLIDPFRKGLLDQIEYYFSDANLCKDLYLRQRMDDQGWVPLPLIAGFPQVQKITNNIQFILETVMLSNVVEVQGDKLRRRGAWENWLLPKQNYSAGSSSGSLPPVTSNIDSLTSQFRFVGLEGATYHATMPVMHGEALLTRSATSVSLGYHASTMGGLPSNGSEPLLGPKSARNLLRSDTF

SEQ ID NO: 354118 - protein, 57 aa, Zea mays
  Clone ID: MRT4577_86128C.1.pep
CVESRDTQGGMYEFNGVVMPDVRKGDIRNSLGACSAIILEAERTFGGGYRLNEAVHL

SEQ ID NO: 354119 - protein, 77 aa, Zea mays
  Clone ID: MRT4577_86129C.1.pep
NSDLDLACHGAISSGIALVLTAIVLFLWLTAPVLTRYICYAANRNPLPMALCHHASPRLSAVLRDHLRAATHLPYTI

SEQ ID NO: 354120 - protein, 58 aa, Zea mays
  Clone ID: MRT4577_8612C.1.pep
TTSLLYNSSSWTIVTKTLFFCLTIQKMIKLPTSTLIYFFSSRTLTYFKLYNFAPYPSG

SEQ ID NO: 354121 - protein, 126 aa, Zea mays
  unsure (1)..(126): unsure at all Xaa locations
  Clone ID: MRT4577_86130C.1.pep
EPLAGPVFGLLAKGLAMILWGGKKNRGASNNPNGKGDDTSKPMTDPFCRGTRNSPRELTLINGGRRNSVGLHRKGFRELYCLSPGSKYQWSGRFAYGVXGPALLNLLMFNPENTWGGVYTLCNPNL

SEQ ID NO: 354122 - protein, 159 aa, Zea mays
  Clone ID: MRT4577_86131C.1.pep
LANAAAFPMVLKAALELGVFDTLYAEASRSDSFLSPSEIASKLPTTPRNPEAPVLLDRMLRLLASYSVVKCGKVSEGKGERVYRAEPICRFFLKDNIQDIGSLASQVIVNFDSVFLNTWAQLKDVVLEGGDAFGRAHGGMKLFDYMGTDERFSKLFNQT

SEQ ID NO: 354123 - protein, 140 aa, Zea mays
  Clone ID: MRT4577_86132C.1.pep
MWIEGGINPQLVKIHLNPHGLSTKRKGLTGFIIFANLFCNMQMQSFIIFSYVLTCMLVLFHLQGALALSGMPDAQSKPVLLCSLNDNTVRLYDLPSFSDRGRLFSKKEIRAIQMGPGGLFFTGDGTGELKVWQWVDLAQT

SEQ ID NO: 354124 - protein, 88 aa, Zea mays
  Clone ID: MRT4577_86133C.1.pep
MRARWQGGSLPARASRRGQNKGTCATRHGRSRGGVSTRGGGGGGAGETAGGGVRTHAAAAPPGWPPLQWRWRCPPQRGLWGRIARCRR

SEQ ID NO: 354125 - protein, 171 aa, Zea mays
  unsure (1)..(171): unsure at all Xaa locations
  Clone ID: MRT4577_86134C.1.pep
SVLGSRSHRIRVPSTQPWLDCQPPPRSSSSSSPSSPSRTAVPSQSQQSTTPSPNQPTPTGTTTRARRQSGRGSTRCCGGGSASTSTTTCAATVSTTSNTXEEEEATTAPETTGSMGXSGTGSTSTTTTTRTRRRIWRRGSSSATLMSTTRTATTRRMSKWKRWSGGSGRRS

SEQ ID NO: 354126 - protein, 119 aa, Zea mays
  unsure (1)..(119): unsure at all Xaa locations
  Clone ID: MRT4577_86135C.1.pep
RRSRSHRVRFPSTQPWLDCQPPPRSSSSSSPSSPSRTAVPSQXSRARHRARINRRRXPSATTTCYPTPRSTLRRAPPAPLKRRPSXGAAAAWVRTPPPAFSPAPPPPPPLVETPPRDLP

SEQ ID NO: 354127 - protein, 42 aa, Zea mays
  Clone ID: MRT4577_86136C.1.pep
LAKGGKMPPLLFAGMNHSIGHPDLRIHLVGQNNETFSTEATA

SEQ ID NO: 354128 - protein, 65 aa, Zea mays
  Clone ID: MRT4577_86137C.1.pep
EPFLSWKGRLGDFYSMHMRSLNVHLKRRSCECFFLVTSVKTRKPLLKMSLNLSSFFSVLACKHLF

SEQ ID NO: 354129 - protein, 123 aa, Zea mays
  Clone ID: MRT4577_86138C.1.pep
MNISNYLQVDYLLGDNPMKMSYMIGYGDRYPQRIHHRASSLPSIRDHPQPMACKEGTPYFNSSGANPNPLVGAVVGGPGEDDAYEDDRADFRKSEPTTYINAPLVGVLAYFVGNPNPGHNTRH

SEQ ID NO: 354130 - protein, 141 aa, Zea mays
  Clone ID: MRT4577_86139C.1.pep
TNVTLETPGKSKKWHPKFYRRDESRKNLLMGQWLDFVRDNHVQEGDICLFLPTKDEIRHTFMVYILHETTHSRCGAGFQRVGPCLGGASSAKMASEVHIEDEPTTGEHVSSDSDMPENSHEPLESGDSDDPFEPPYFVPCR

SEQ ID NO: 354131 - protein, 72 aa, Zea mays
  unsure (1)..(72): unsure at all Xaa locations
  Clone ID: MRT4577_8613C.1.pep
ALYDFDFVPGENFQKTXFFFFAWSPSTSRIRVKILSPPSKAPLKYELSGFPFEIQAPAPSEVALGVFRERAP

SEQ ID NO: 354132 - protein, 110 aa, Zea mays
  unsure (1)..(110): unsure at all Xaa locations
  Clone ID: MRT4577_86140C.1.pep
MEGDRTNLHAAIEASPARAETNAECSPMPXATTTHILPPVTRMILXHPAVQAYRLQHGGAGSVIQQPIVTGXQQGLAHVAVQTIVAHQERHSLPGLSHLAMVNPDSYLDM

SEQ ID NO: 354133 - protein, 65 aa, Zea mays
  Clone ID: MRT4577_86141C.1.pep
HPQQNGSGNKCYQQLFLNETIVEDCSLGVPWNGREISGGPQLVIGSIPFRGMSFPRGSSESESQQ

SEQ ID NO: 354134 - protein, 229 aa, Zea mays
  unsure (1)..(229): unsure at all Xaa locations
  Clone ID: MRT4577_86142C.1.pep
LCALPSATMAPSSLLPAGEQQLHGAQIFFQQRASSLQVASSLLPGRRAPCSPAPRARTHLPAPFFPLALAPCRRAARPLPPCAAALPTPPWSAQGPSDPSSSSELTVAHGAPTPCYTFSRPPLPSAPFSLLAVDVGALSKTASFQRPLHLLWKTASPHGVLVFSLLDLASRARCRDTLAAAPPRALPARRYAQPTACCLAWCVRSPARLFSVVSNCRCGALCRXXTSSL

SEQ ID NO: 354135 - protein, 168 aa, Zea mays
  unsure (1)..(168): unsure at all Xaa locations
  Clone ID: MRT4577_86143C.1.pep
AATHRSRLPPPLIGTSVFTGSPEPYRRSRSEPPPPPXRHGSPSCHPAEETXSPSPVPSSPRAPRXTPPPSPSNDPDDDHSPSSSPPPNPGAPRNPSSSXPGHQGSPPXSPTSSPPRRNPSNLLRPNPARGPPSKPSXRGSPXSMTSAQPSSRPPPLDPGAAPSFLHHN

SEQ ID NO: 354136 - protein, 43 aa, Zea mays
  Clone ID: MRT4577_86144C.1.pep
PLYVEIYPGMFPFQVLNFLLLKKNHFRLLRVILVYIKICPAFS

SEQ ID NO: 354137 - protein, 124 aa, Zea mays
  Clone ID: MRT4577_86145C.1.pep
ATVVCNLAIVVAATEPGCAGHAPVLRACVAIRGRVSTALALALPTNLGMAAAEALFGLRVVAQRRRDGRLAPGVAGEAFSIAYIHAICVVLEIIVTCMFYRSCKRSEADELRELEPEEKGDLQA

SEQ ID NO: 354138 - protein, 89 aa, Zea mays
  Clone ID: MRT4577_86146C.1.pep
SRLVLRQGQEAGLGDPGDGGGAVRAPLAGPAHQAGRHAPLGSLCQPQGPRQACRRSQHHFIGPLCVMVTMVIRTTHQHRCLDAVPQLST

SEQ ID NO: 354139 - protein, 185 aa, Zea mays
  unsure (1)..(185): unsure at all Xaa locations
  Clone ID: MRT4577_86147C.1.pep
RLPCKNQYPFSSTLSSSSIKAPVIPSEVFTRSNLQRLKAMELVGKLXFLKXIPEMDVRNRLPNLKKLRLMKTMVSQEFINQLGGLQFLSTLELTSNSFRELVFTEGFCSLKELTLHEETLERLEIHESALPELGDLDIVGHRDKLHVVIHGHSVLVQHIEAEDEDIFKVTEVITTQQVQVEDNKV

SEQ ID NO: 354140 - protein, 219 aa, Zea mays
  Clone ID: MRT4577_86148C.1.pep
MLRLRDDDASESPPPRRRPVAVAALPRGAGVARAYPAVVATHLLNAFLMLSANAAAFSLLLLAFGAADLLGLTSRAWTLALSAAGAIAYSLAVGVAAVVCNLAVVVAATEPGCAGHAAVLRACVAIRGRVSTALALALPTNLGMAAAEALFGLRVVAQRRRDGRLAPAVAAEAFSIAYIHAVCVVLEIIVACVFYRSCKRSEADELRELEPEEKGDLQA

SEQ ID NO: 354141 - protein, 50 aa, Zea mays
  Clone ID: MRT4577_86149C.1.pep
SVMIVHGRVVVILGSSFSRARLDSAPFAPANGLWTIKYQLLGGRANTRAG

SEQ ID NO: 354142 - protein, 395 aa, Zea mays
  Clone ID: MRT4577_8614C.1.pep
MDVALRDHLRRRRDEEDDDMMLFFFPMLHILGSSSNIVREKKRRHTSKLSGEEHVQELLQGHLKNCRVAFRMEPEIFKSLASYLRREGLVRDTRIKVEEKLAFFLYMLSHNASFEDLIEEFGHSGDTYHRHIKHFFDLVVPTLSKQFLKPPNPNHVHQKIERNPRFYPYFKNCIGAIDGTHVPISISPDKAAPFRNRKGTLTQNVMVACDFDLNVTFISTGWEGSATDARVLRAAMNNGFQVPPGKFYLVDGGYANTPSFLAPYRGVRYHLKEYGAGRRRPQNYKEIFNHRHAVLRNHIERALGVIKKRFPILKVATFHKIENQVKIPVAAAVLHNIIRSLKGDEQWLEDQAENVQGNVVDIPDGDQSNDQGSEQGNNLRDTIAQQMWIDYQQCN

SEQ ID NO: 354143 - protein, 135 aa, Zea mays
  Clone ID: MRT4577_86150C.1.pep
VECRITHPVPFSVEGSGIPFRGHPPRGSLRSRHASSVLELKDKADHLRYENRWSRRRAEADVKLPWDHRRGRRPRPAEGGAAGEMGAPRRPGSSAFITFAFAFAVGGGQLGRSRRRGLVEMVAVRPRSQWGVVAP

SEQ ID NO: 354144 - protein, 55 aa, Zea mays
  Clone ID: MRT4577_86151C.1.pep
LPCNWYCIIGHLDGGYIYINRIRTHHPGVGYMYYLVIGIVLSATYKSEPLHISPF

SEQ ID NO: 354145 - protein, 83 aa, Zea mays
  Clone ID: MRT4577_86152C.1.pep
KHSCGGSRCTVASRLKNPVSGRSGTNLSHPSIGCVPSESNRIYGVNRTLAQLTKGPRPFAHGTGVVFGRSFDRQAFVGAPHRI

SEQ ID NO: 354146 - protein, 121 aa, Zea mays
  unsure (1)..(121): unsure at all Xaa locations
  Clone ID: MRT4577_86153C.1.pep
GGGCRSSKLTLPYTRLHRSTFFIPKLNSISLAVHLQRWESQNLAHPNLNPLHAHFPFFRXRKKEQTRPHXPLXHILNLNGEWHSPCTLTSTPVVVTXTPTVTLSLAIALPPFPFFFFLSFM

SEQ ID NO: 354147 - protein, 85 aa, Zea mays
  unsure (1)..(85): unsure at all Xaa locations
  Clone ID: MRT4577_86154C.1.pep
ERINSNQCVKIPRGIVVCVKSRIVTIKGPRGVLKRYFKHLXLVIQMVXPRSLGVGKWFGSXKKNWLSFEXVCFLLRDMIKGVACG

SEQ ID NO: 354148 - protein, 91 aa, Zea mays
  Clone ID: MRT4577_86155C.1.pep
RNTTPFSRNETTNLLLFLPVSASVHHLRMAAEEADATSFTTHPVRSLTRAPVTFLPPRPPPSTLIYLRGARSPSNAASFSGCLAVSTSHSR

SEQ ID NO: 354149 - protein, 52 aa, Zea mays
  Clone ID: MRT4577_86156C.1.pep
LSPLGGGEGKLVLTKQSHLGAPPLSDCKLNGVWPPQGSSPLRINVQLEQHEI

SEQ ID NO: 354150 - protein, 134 aa, Zea mays
  Clone ID: MRT4577_86157C.1.pep
GRKILKVFYRSYINELIHSIFLASLEYLKATPGHHSEGFFPRSPKQTKKRFLLLKAPWPGCFQPGPCPIPTKTLGFTLHNTPHVYVPPPGGDMHSTKKKGRAPPFSLKKTPLEGAGPPPGLELKQAPLGAGGDP

SEQ ID NO: 354151 - protein, 111 aa, Zea mays
  Clone ID: MRT4577_86158C.1.pep
QLNTYRQNTRLAAASAAVRTATAITVEIKYCREAIITAARLKLQQATVRQNTVVSREYCSENTRDRSLHVLHWDRKNTDLRANEQERTPLFKSQENQASRVCKIGMTWNCR

SEQ ID NO: 354152 - protein, 588 aa, Zea mays
  unsure (1)..(588): unsure at all Xaa locations
  Clone ID: MRT4577_86159C.1.pep
IGGILMMWSLFTKWSNTNVSHQGKNKRSGQKLRFKEARDNKYAHDVTGSEECLGENFGTAYTKKGKGKGTKVGLGVKQHKFHMMYGFDPQEYNLIRFVDPLTGATLDEQIHADIRLIQEHFAEIREEAVINDTIERQQIYGNPGLQAFFIQHGSASALRVVLTPHSPTRVVTGNNIAGFPEYEGTLRQTGTAITIPIGQVPIANEAGVAHESKSMMFGLGDYTPISQQLCLVQNDSDGVKRNVFSIGYGSYLISPAHLFKYNNGEITIRSSRGLYKIRNSVDLKLHPIAHRDMVIIQLPKDFPPFPMRLKFTQPSRDMRVCLVGVNFQQNYSTCIVSESSVTAPKGNGDFWKHWISTVDGQCGLPSVDTKSKHIVGIHSLASTSGNTNFFVAVPENFNEYINGLVXANKWEKGWHYNPNLISWCGLNLVDSAPKGLFKTSKLVEDLDASVEEQCKITETWLTEQLQDNLQVVAKCPGQLVTKHVVKGQCPHFQLYLSTHDDAKEYFTPMLGKYDKSRLNRAAFIKDISKYAKPIYIGEIKYDIFDRAVQRVVNILKNVGMQQCVYVTDEEEIFRSLNLNAAVGALYTG

SEQ ID NO: 354153 - protein, 778 aa, Zea mays
  Clone ID: MRT4577_8615C.1.pep
MNGTHPWTSMSGGACSNLGYARDMNGNVPISTTNSSGPSIGVSSLVTDANSSLSGGAQLQPSTSMNGDSLMRVPASPMSFSSNNISGSSVIDGCIMQQSPPQEQMQKRRSSSVTSQHVIDAGGALHAQKKSRTDVSQGDIMQHQLIQHLIHGQNSLHFQGQQNPQLQAFIQQHKLAQLQQRQQQHLLQPFSQMQQPQVGIPRQPQLRPPLAQTGMQLGGPVRTPIERGVCSRRILQYLFHKRHRPENNSITYWRKIVEEYFAPRARERWCVSSYENRGNSSAAAPQKALDTWRCGICNTHAGKGYEATYEILPRLCQIRFDHGVIDEYLYFDSPNEFGLPNGQMVLEHAKVVQKSVYEHLHVIHEGHLRIIFTPELKIISWEFCSRRHEEYTTRKTIAPQVNNLLQVVQKYQAVVTESGSAGISNNDAQTICNMFVTASQQLAKNLEHHTLNEHGLSKRYVRSLQISEVVNHMKDLIEFSHKSKLGPKESLNSYSKTTAKFENMHDSRQAMAAANLANNQSNTKLMGVKQETSTSANNQTPGAGAIGNNNLPIAAPLNTYQNMLRSSGASTISLQQEASSVFKGPTAMHNGMQLEAARSFLGPNQVQFQHHPPSSSFQQQQQNSFHGFGVNPQYQQHVLNQLLQEVKNSNNRSKAQQPPLDAPPPNASGGGLAPGVATPNVIAATGEQGQHVNNSSSNHNGTVKGAAGTGPSNVINNSTASMASARNSSFKSVSSSPAAAGNAVSSKVDDSFHQLEDLDDMIANELVESGLFGAGHGW

SEQ ID NO: 354154 - protein, 117 aa, Zea mays
  Clone ID: MRT4577_86160C.1.pep
TRCMLAFLVRVGICGITTTQLSFGSCRATAKRLSNSLFALELCMQLRASDSMCASIALRSSLCFYLEHYVWPPLGLNHHQVSDAFFPSWMSPIREERGCFRHLHLSFPLKFVILSWC

SEQ ID NO: 354155 - protein, 53 aa, Zea mays
  Clone ID: MRT4577_86161C.1.pep
KGFFSWPSFKPKPSFLEPIFFPQKKKKKEKKKKKKKKKKKKKKKKKKKKKNRG

SEQ ID NO: 354156 - protein, 676 aa, Zea mays
  Clone ID: MRT4577_86162C.1.pep
MSLGAEVIELSSDEDEEPVPSTTALVRHAPSSPPDVKPHLLADVDVKPLLLLPPPLHPPGYGALVPVKTEEPVPVATVSSPPRALPPPRLCRQFWKSGDYVVARRNPDAAGPGGRNRLRINPKFLHSNATSHKWAFGAIAELLDNAIDEVNNGATFVRVNKFKNPRDGNPSLLVQDDGGGMDPEALRRCMSFGFSDKQSDAFIGQYGNGFKTSTMRLGADVIVFTQNQNNWVPTRSIGLLSYTFLMETGCDDVLVPTVDYQYDLTTTSYVQMLRHDQKLFSSNLAILLKWSPFSTEAELLKQFDDMGDHGTKIIVFNLWFNDDGDMELDFNSDKKDILITGAHKKVKTNSLDKVAAQNYISTRLRYSLRAYASILYLHVPDTFRIILRGCDVEPHNVVNDLMYRECVLYKPQIAGLTESSVITTIGFVKGAPDIDVQGFNVYHKNRLILPFWKVANNSYGKGRGVVGILEANFIKPTHDKQDFEKSVLYQRLEFRLKEMTYEYWDLHCHRVGYDNKKLPKATRAINRANHMNGGSSPTSAPPRLLAVDIPTSSSSIPRLSASAAREKISSLDSLPKSMIGLKRKFNPFGAVAASADQDGLHHMDKIDVSQRRRFNEYKTLTLENDKLRNECLQYEGSEKQLVLKEQKLRSEIAEVEKKYQELLGELRSLDVKKEKQ

SEQ ID NO: 354157 - protein, 97 aa, Zea mays
  unsure (1)..(97): unsure at all Xaa locations
  Clone ID: MRT4577_86163C.1.pep
KGQVLISSHWVPAEHLESVVDQPKDLRRWNEAFDFYHRSSEXYYRECGRTHPASDALAHGVSPWEDKSALKAIKTNDEVHTTLKYYTKEQMAVDLYH

SEQ ID NO: 354158 - protein, 62 aa, Zea mays
  Clone ID: MRT4577_86164C.1.pep
TGVVDLISSLTVGACTGRQRYRDSGPQSRASGVAWMRFGRLQGSLSTMGCRFVLGQWDVRST

SEQ ID NO: 354159 - protein, 374 aa, Zea mays
  Clone ID: MRT4577_86165C.1.pep
MPRAATGAITAAFLRAQAPHMAPLASRIARAFPGLATAAATRFAPSSSASSPRLGLVPRFRSARSFSGARASPVSGAVSGSSTSEEGQQLQSELIFLGTGTSEGIPRVSCLTHPTKICPVCTKAAEPGNPNRRRNTSILLRHATPSGTTNIVVDAGKFFYHSALQWFPTFGLRTIDGVIITHSHADAIGGLDCLRDWTNNVQSSIPIYVAERDYEVMKMTHYYLIDTSVVIPGAAVSALQFNIIKEEPFMVHNLEVIPLPVWHGQGYRSLGFRFGDVCYISDVSDIPEETYKLLENCELLIMDALRPDRSSSTHFGLPSAREQVRKIKPKKTLFTGMMHLMDHEKVNSDLARLIGTDGLDIQLSYDGLRIPVRL

SEQ ID NO: 354160 - protein, 245 aa, Zea mays
  Clone ID: MRT4577_86166C.1.pep
MEETPPQPQAAHASPPFPAIFTPPSALSSTSLRGSPTVPSPAHFSTPPGPPVFSSPLRPAAVPFRTTPISPQAVPLASRTASSSSSVSLPTSSEPHTMNGAATPHSHAPSVAPSLEDSSIDSPYVLFSARKVLKQKKLLNAPSLGFGALVSPGREVSPGPEALERDPRRCLNCGAYVNLYCDVLIGSGQWQCVICKKLNSSEGEFVVSSKQDLVQWPELMSSTVDYVHPRNRRPGLIPVPVLRVS

SEQ ID NO: 354161 - protein, 126 aa, Zea mays
  unsure (1)..(126): unsure at all Xaa locations
  Clone ID: MRT4577_86167C.1.pep
RNIDRSAPEPEALFVDSQYKVYVGNLAKTVTTEVLKNFFSERGXILSATGSHIPGTSKSKGYGFVTFSSEEEVEAAVATFNNAGHRRRGNILANTCSRRDVLRLDFDNKVIKTFNVISICHTIFVP

SEQ ID NO: 354162 - protein, 68 aa, Zea mays
  Clone ID: MRT4577_86168C.1.pep
RLVRFQHHGHDVLHELVEGQPGRRLVRECVALCGGHIYHRMDRVCTWAVISGRVCAGVTVVNVRYDIH

SEQ ID NO: 354163 - protein, 234 aa, Zea mays
  unsure (1)..(234): unsure at all Xaa locations
  Clone ID: MRT4577_86169C.1.pep
LLRPSTAAAWALPASPSPCAPLSASPSGPPPRLRCRAGARXRVSASSAVLEAPEAVAARKLYVGNIPRTVTNDELRDMFAAHGTVERAEVMYDKYTNRSRRFGFVTMSTAEEANAAVEALNGTEVGDRKIKVNVTESFLPNIDRSAPEPEALFVDSQYKVYVGNLAKTVTTEVLKNFFSEKGNILSATVSHIPGTSKSKGYGFVTFSSEEEVEAAVATFNNAELEGQLIRVNRA

SEQ ID NO: 354164 - protein, 182 aa, Zea mays
  Clone ID: MRT4577_8616C.1.pep
ARNSARATTMSLLEAHMRGAPDGVYTRDFPDRPPVMFDFTGDATAANRSFMLTSKGTKVKTLRYNETVEVVLQNTAVLGAENHPLHLHGFNFFVLAQGPGNFNAHRHVRKYNLVNPQQRNTVAVPGGGWAVIRFTADNPGVWIMHCHLDAHLPFGLAMAFEVEDGPTPDAVLPPPPPDYPRC

SEQ ID NO: 354165 - protein, 70 aa, Zea mays
  unsure (1)..(70): unsure at all Xaa locations
  Clone ID: MRT4577_86170C.1.pep
MLHLRKGVLTGLIQEILPTRIAVKQAMKKLSPSQQGLNRXAGFSGRMPCAELADNIEQCGRRTLPDTNII

SEQ ID NO: 354166 - protein, 87 aa, Zea mays
  Clone ID: MRT4577_86171C.1.pep
RSDNTVGCLRIRSGAYYGHGLQDFKGSLFYMWILCKLICRRYGPPSFLHRRRSWISDRAKGSLLRHACFLVDVRRANEHADARQDLP

SEQ ID NO: 354167 - protein, 65 aa, Zea mays
  Clone ID: MRT4577_86172C.1.pep
QQALAQVTAQAVHSQYNMINHTDYSIPFSSTTAPALITAQHANSSANVDQHRRNQLVTCSMARRS

SEQ ID NO: 354168 - protein, 99 aa, Zea mays
  Clone ID: MRT4577_86173C.1.pep
KMSGAKFSGHAFDTKDPHGKQRVLCTHQVVTRPGSKMFMLFRFRRICSSFVMRHPSAGVFIVCGVVHANMIGVHIKAAEGAIEVIVEVHDLPDLSPMHS

SEQ ID NO: 354169 - protein, 59 aa, Zea mays
  Clone ID: MRT4577_86174C.1.pep
ANNFADSSVKIKHVGCSAVSYFLVYLPRKFKSLLISVAGRNTVVYYSCNVSIHDPSKNR

SEQ ID NO: 354170 - protein, 137 aa, Zea mays
  Clone ID: MRT4577_86175C.1.pep
MSRRSLNPSRRVADGGLPTVGGLFHPKSRSPPVLTIALVVLGVILLVAYFNSGSGVTVTSRESVTRSEGNPGQQKAKVSELPKFGRPAKLRSSSWWTRYFVQTGLTENEGPLKKFEEATSKNKYKPGCQIFHLSSPR

SEQ ID NO: 354171 - protein, 79 aa, Zea mays
  Clone ID: MRT4577_86176C.1.pep
ISHLEPLLLEAYNPELHNRLITLSLTYLIDTKPCVTLIFLSNIRLATSLLRVTVQVYGNDHIWQPECSTPMLWHSDAFK

SEQ ID NO: 354172 - protein, 260 aa, Zea mays
  Clone ID: MRT4577_86177C.1.pep
MSRRSLNPSRRVADGGLPTVGGLFHPKSRSPPVLTIALVVLGVILLVAYFNSGSGVTVTSRESVTRSEGSCTSEVMRVLPYLKKAYGNAMQKVLHVGPDSCTVVSNLLKEGKVEAWGVEPYDLEDTDSTCKSLVRKGFVRMSDIKFPLPYRPDSFNLVVVSDALDYLTPRYLNKTLPDLARVSTDGLVIFAGNPGQQKAKVSELPKFGRPAKLRSSSWWTRYFVQTGLTENEGPLKKFEEATSKNKYKPGCQIFHLSSPR

SEQ ID NO: 354173 - protein, 260 aa, Zea mays
  Clone ID: MRT4577_86178C.1.pep
MSRRSVNPSRRVADGGLPSFGGPFHPKSRSPPVLTIALVVLGVIFLIAYFNSSPGVTVTSKETVTRSEGSCTSEVMRALPYLKKAYGNAMQKVLHVGPDSCTVVSNLLKEGKVEAWGVEPYDLEDTDSTCKRLVRKGFVRMSDIKFPLPYRPDSFNLVIVSDALDYLTPRYLNKTLPGLARVSTDGLVIFAGNPGQQKAKVSELPKFGRPAKLRSSSWWTRYFVQTGLTENEGPLKKFEEATSQNKYQPDCQIFHLSSPR

SEQ ID NO: 354174 - protein, 71 aa, Zea mays
  Clone ID: MRT4577_86179C.1.pep
AIFFFFFGGAQEKPLCFNLKGFHGCGWFVPNVGPPFFGLPPFLKKKGFVFEAKTKWCVRPPVWGTVLYKTL

SEQ ID NO: 354175 - protein, 45 aa, Zea mays
  Clone ID: MRT4577_8617C.1.pep
IGYLESAVVAIKEVNTICSSALRAYSARVRTISLSSTNIQPRHCS

SEQ ID NO: 354176 - protein, 266 aa, Zea mays
  Clone ID: MRT4577_86180C.1.pep
MSRRSLNPSRRVADGGLPTVGGLFHPKSRSPPVLTIALVVLGVILLVAYFNSGSGRLKILGVTVTSRESVTRSEGSCTSEVMRVLPYLKKAYGNAMQKVLHVGPDSCTVVSNLLKEGKVEAWGVEPYDLEDTDSTCKSLVRKGFVRMSDIKFPLPYRPDSFNLVVVSDALDYLTPRYLNKTLPDLARVSTDGLVIFAGNPGQQKAKVSELPKFGRPAKLRSSSWWTRYFVQTGLTENEGPLKKFEDATSKNKYKPGCQIFHLSSPR

SEQ ID NO: 354177 - protein, 41 aa, Zea mays
  Clone ID: MRT4577_86181C.1.pep
ACGNWGLDNTFRCETCPYKGFPPFKLGKKVTLNGNFLACDI

SEQ ID NO: 354178 - protein, 100 aa, Zea mays
  Clone ID: MRT4577_86182C.1.pep
MVRAVTAHPTPPESPDAISVALGALRLAPRGPQLFASYDAETSSYHGGPSNSFGAFPPRHAPVVIAALVARGHLPTLDDLEFVGMARGGGDLIFDALCTD

SEQ ID NO: 354179 - protein, 99 aa, Zea mays
  Clone ID: MRT4577_86183C.1.pep
GLCAQTELRGRRRHGLHFQGILAAHHDRLCSRHAPPRRKIWYVRALELGREEKNRDGGGMGRRKHSWSRMLASRRRLHSAERERERERGGAEGPHSHEE

SEQ ID NO: 354180 - protein, 57 aa, Zea mays
  Clone ID: MRT4577_86184C.1.pep
LSNLLLGAHRRRRARLQPGHLAAGSGIRGAAGIAQSSQREEIRGVLREKWLLASSEE

SEQ ID NO: 354181 - protein, 77 aa, Zea mays
  Clone ID: MRT4577_86185C.1.pep
SRLTVRWISTKGTCRPHRMQLNSRDVCKSRRCKGSSPRLWVQLIRFLLGLAKYGSIGFTEISTLKSLKQCRKLNTAG

SEQ ID NO: 354182 - protein, 73 aa, Zea mays
  Clone ID: MRT4577_86186C.1.pep
NSVWSQPVKLTVDEGDSELVDFNAHYDRRCPSPDNRIRRKGEATALSVGPVVCLFDVMVTRLTRVGAVDYTRL

SEQ ID NO: 354183 - protein, 113 aa, Zea mays
  Clone ID: MRT4577_86187C.1.pep
QQLDNLRRKEQILEDQNTFLYRMINENQQATLTGEVKLGEMTAPLAMLPPPAAFTHSTYYGGESSSGGTALQLMSAAPQLQHADLGFRLQPTQPNLQDPAAACGGLHGHGLQL

SEQ ID NO: 354184 - protein, 97 aa, Zea mays
  unsure (1)..(97): unsure at all Xaa locations
  Clone ID: MRT4577_86188C.1.pep
XKANQXXGSDXGPGKKXREREXXKHXPXRENKXXTGTARXAXXXTXXGXEQSRREXXEXXGXXPKEXXRGXXPXQGPKXGTKKQKXXRSXEKKXXTP

SEQ ID NO: 354185 - protein, 83 aa, Zea mays
  Clone ID: MRT4577_86189C.1.pep
HGGVILIELLSHHLYPSSYSPYRDACGFARPGLLDLARPFLDLVRPNSTIHLLFDLIFSSHTLLSSHLTPFYLFLLLFYVYPF

SEQ ID NO: 354186 - protein, 199 aa, Zea mays
  Clone ID: MRT4577_8618C.1.pep
MSVPGVASPIADRFYCPPPHRHLLDKQHRQHPPLTASAAEEPAKPTPELGRDPSPSPSPATNLESFIASTAVRVPARCSPRTPGCRAGAPYYELADLWEAFGEWSAYGAGVPLLLNGTDGVVQYYVPFLSAIQLYGSRLPSSSKTKSCRYLNEGSDGDNAPETSSDVSNESDNDNDNEKSIGRTTQCSEILYLYPIKES

SEQ ID NO: 354187 - protein, 123 aa, Zea mays
  Clone ID: MRT4577_86190C.1.pep
VLSLLSPSLSPYSSPRPSVSLAFLFTAAAAPVHYHTNRHRGDLHFWEKLSGFVLLPAAGRPAGGKLDRARSPMEGTMKHSNAATERSSVTAKPREQEVSAWHEEAGERLVWTPGAAVQLMLCA

SEQ ID NO: 354188 - protein, 55 aa, Zea mays
  Clone ID: MRT4577_86191C.1.pep
HPRPCNKGTVPRLRSCFREHLALYPQGTIAYKGTSACSSLRSTSVLHVNFYGRVI

SEQ ID NO: 354189 - protein, 66 aa, Zea mays
  Clone ID: MRT4577_86192C.1.pep
PVDYLHPLSIHFDDGAVLEIMSCLIDERATSFKLKQYSGPWTYRCLGYAHVPVLSSLLYPKRFGLL

SEQ ID NO: 354190 - protein, 98 aa, Zea mays
  unsure (1)..(98): unsure at all Xaa locations
  Clone ID: MRT4577_86193C.1.pep
MGGYVKTHKSYADSTRLPVKPTRRRPGKTDYRTRIRLINQXKNRYSTPKYILAVRVTNKAISVHIISASIAVHMVLASAXYYEIPRHGLXVGLPNYVR

SEQ ID NO: 354191 - protein, 169 aa, Zea mays
  Clone ID: MRT4577_86194C.1.pep
MPTTTAETLSLVTRNVTVAPLVLLSAVDHYNRTVSTKTKRRVVGVLLGQNDGNDVRVSNSFAVPFEEDDKDPSVWFLDHNYVESMNDMFKKVNAREKLIGWYHTGPKLRASDLEINELFKRYTPNPLLVIVDVQPKESGVPTDAYFAVDEIKDDGTTTARTFGHTPSVI

SEQ ID NO: 354192 - protein, 133 aa, Zea mays
  unsure (1)..(133): unsure at all Xaa locations
  Clone ID: MRT4577_86195C.1.pep
KKSPPGAQCANPPPPRVGRFFIPPGPPGFPPGNRAVGPPPXVSWPPPXGPPGLFPFFFGPFFCVGLLPVPLSPPETALPLLPPXLNRPPMGKAGAPPXRPGIPGLTQNWGPVCKKAPFFSRPPHRLGGDLCFG

SEQ ID NO: 354193 - protein, 83 aa, Zea mays
  Clone ID: MRT4577_86196C.1.pep
PFMLAPVPIYPAQCPINGFKSWNKCCDLPPRYSEDHLMVCFRIMVELPQKPSHGNLPGVHKKSPPFKCSYAAKSEPPPFLLEA

SEQ ID NO: 354194 - protein, 39 aa, Zea mays
  Clone ID: MRT4577_86197C.1.pep
LRLDFFISLQIFGYLFMDYFYIYLYGWFIVKKKKKGVAP

SEQ ID NO: 354195 - protein, 207 aa, Zea mays
  unsure (1)..(207): unsure at all Xaa locations
  Clone ID: MRT4577_86198C.1.pep
MRICATMGRRLLLLVQGMSLVAELLFLSMCSPLMRDYRTSFSDSDFTADRHTREGARAICNVEPAETWHNVHVAAWVIDNIXKPPDSSMQSGRPYAHRADLKVCQYCDALAIPERXHTRATFPKQLPTSFXEXPLLILTDPRTDHQPIKECALPNIPTIAFWDTDSPMRYVDIAIPANNKGRNSIGCLFWLXATMGLQMRGTILPGH

SEQ ID NO: 354196 - protein, 45 aa, Zea mays
  Clone ID: MRT4577_86199C.1.pep
QLADTPIASSYSDLNAYNHKPAHRSFTPLSFQPISMTNCVNQRFL

SEQ ID NO: 354197 - protein, 133 aa, Zea mays
  unsure (1)..(133): unsure at all Xaa locations
  Clone ID: MRT4577_8619C.1.pep
FGRTKKLVCVAYDKHLSELIHVCEVPIELIVPDMLRLKVFQYMLLEGRSMLTDIDXLKIRRRAGGKTPQIYDVCQNDDKELVDYYHKHLYQADTNEGXDIFPQYDRSLLPPDCSRXSRTKSGVRISRTRFQKT

SEQ ID NO: 354198 - protein, 145 aa, Zea mays
  unsure (1)..(145): unsure at all Xaa locations
  Clone ID: MRT4577_861C.1.pep
ARPQGAAGAPRAAPERRRPDAAPRPEATAAEPARPGDDSSRRRGGPPPQPRAARQKXAXXXEPPXGTAXQGKXNXXXXQTPXENDTKXGPSKPXGRGANGXXXXXXNRETNEKXATKKKNNDXDNRGEAPRTRREXKHXRHPRHE

SEQ ID NO: 354199 - protein, 225 aa, Zea mays
  Clone ID: MRT4577_86200C.1.pep
MATSSDGGGDQRRLLSIPKEGERIIAPTRRPDGTLRKAIRIRAGYVPQEEVAIYQSKGALMRKSGPDVPPGYDPALVADAKPKTKAAKRNERRKEKRQQASLANDKGKSMNIEGTDAGETDKVLSSKTDKQKDSVESVTKQMSGIAISESHAMPSTNTINNSQPESSAPDIDKKIRALKKKIRLAEAQVQGDPEKLKSETLEKIKKIDGWCMELKLLEDSRAPAA

SEQ ID NO: 354200 - protein, 225 aa, Zea mays
  Clone ID: MRT4577_86201C.1.pep
MATYSDGGGDQRRLLTIPKEGERIIAPTRRPDGTLRKAIRIRAGYVPQEEVAIYQSKGALMRKSGPDVPPGYDPAQVADAKPKTKAAKRNERRKEKRQQASSTNNKGKSMDIEGTDAGETDKALSSKTVKQKDSVESVIKQISGIAISESHATPSTNTTNNSQPESSAPDIDKKIRALKKKIRLAEAQVQGDPEKLRLEALEKMKKIDGWLKELKLLEDKRAPAA

SEQ ID NO: 354201 - protein, 230 aa, Zea mays
  unsure (1)..(230): unsure at all Xaa locations
  Clone ID: MRT4577_86202C.1.pep
MEARRTGRDLLASFVLAALAAQAFVAVVESRASPAEKASQGDDVKKPDCVPGMDPRSFPGIGSGSHGGGITPVTPSHGGSTGTPSHGGGGGGGDLPSPSHGGTTLPSPSHGGSGGDLPSPSHGGTTLPSPSHGGSGSTPTSPSTGGSPSHGGSGSSPTAPSTGGGYGGSPSHGGGAYGGSPXSTPGSGGAYGGGSPSPAHGGGAYRSSPTPAYGDAPSHGGIGTLSSTPF

SEQ ID NO: 354202 - protein, 156 aa, Zea mays
  Clone ID: MRT4577_86203C.1.pep
MEARRTGRDLLASFVLAALAAQAFVAVVESRASPAEKASQGDDVKKPDCVPGMDPRSFPGIGSGHGGGITPVTPSHGGSTGTPSHGGTTLPSPSHGGSGGDLPSPSHGGTTLPSPSHGGSGGDLPSPSHGGTTLPSPSHGGSGSTPTSPSTGGSVA

SEQ ID NO: 354203 - protein, 103 aa, Zea mays
  Clone ID: MRT4577_86204C.1.pep
MDSHISFDSSGVVLTYNTVEADSVQKLVSDLRRLSNARSFALGMRRLIGVKFQDKLDDNQLTMEVTSQSVNKGNSDAADKLSEQMRKTFRIEAVGLMSLWFSY

SEQ ID NO: 354204 - protein, 108 aa, Zea mays
  Clone ID: MRT4577_86205C.1.pep
MASPHAGDDVKKPDCVLGMDPRSFPGIGSGSHGGGITPVTPSHGGSTGTPSHGGGGGDGDLPSPSHGGTTLPSPSHGGSGGDLPSPSHGGTTLPSPSHGGSGSTPTSP

SEQ ID NO: 354205 - protein, 89 aa, Zea mays
  unsure (1)..(89): unsure at all Xaa locations
  Clone ID: MRT4577_86206C.1.pep
DDVYYXCGIKFITDDVFLNEPSADSPASLYQTIGGNIKIFEEEEVEFISVPVPEFADSDPAIIVHDFNKKLTAYLDLNLDKCYVIPLTL

SEQ ID NO: 354206 - protein, 69 aa, Zea mays
  unsure (1)..(69): unsure at all Xaa locations
  Clone ID: MRT4577_86207C.1.pep
RGGRAPVPAKKKTDIVTNPLFERXAEQFCIGGTFPPKKDLHRFVKGPKVVRIQRQVRILKQRLKVPPAL

SEQ ID NO: 354207 - protein, 122 aa, Zea mays
  Clone ID: MRT4577_86208C.1.pep
HVEPGRRHRRGAPADAEEVSGAQLAVVHAAAEPCGAGEAAAGQRVHDELMEVCLVGRRPFFSRGGPAASSPQLPAAGGAAEARSTEQRASRSRAVVVVVGGARRRRAHLGRLHQERRRRVLG

SEQ ID NO: 354208 - protein, 171 aa, Zea mays
  unsure (1)..(171): unsure at all Xaa locations
  Clone ID: MRT4577_86209C.1.pep
XGEEDGDGDTVSVKSFETCCVMPEEAHVVVPVHHRLMSAAHDGNDQSRVPGGADEEGAATLIQSAFRGFMSRRQLQEARARTRTRTRGREPEPDGAKDQEPSSPTWGPSVATSCWSSRRRVVSWATSAPLTRRARRCSSSGPAARVVVAPAXSVPSQXGVGRQHGELQRVQ

SEQ ID NO: 354209 - protein, 138 aa, Zea mays
  Clone ID: MRT4577_8620C.1.pep
MTSVYIPVQGTEEEVQVALDQLPHDASDILDILKAEQAPLHLWLIIAREYFKQGKIEQFRQILEEGSGPEIDEYYADVKYERIAILTALGAFHTFLGKVDRAPQKESHFKDATQYYNRASRIDETEPSTWIGRGSTVF

SEQ ID NO: 354210 - protein, 57 aa, Zea mays
  Clone ID: MRT4577_86210C.1.pep
LFAGLLLKLGWKPHYGDLFWRAWLTFKKRVSGFHITAFRPFEKWGEKLGKLKGAPLD

SEQ ID NO: 354211 - protein, 66 aa, Zea mays
  Clone ID: MRT4577_86211C.1.pep
MAAIFVIRGGGAWSSNTTESLTLMRRKQVVIAILGKASEEEETPDYQVTSPRTFITMLVVHACSIF

SEQ ID NO: 354212 - protein, 494 aa, Zea mays
  unsure (1)..(494): unsure at all Xaa locations
  Clone ID: MRT4577_86212C.1.pep
MSSYSGDRSSSSSLRPTNTSFDSYKFDFGINSSRSSGSRPLRDQRPGAATNPPTRPATGATWMHQPASAKPSWTHQPSPAAASAPTMAGPGSGPTSMVGDIFGRSWSSAAPSSGFGIPQANNPGLFSDLLGSALGSSRSQSNAPLRSAAAPQASRPAGEKPNVNASSSPFSMGGMAGALPKTTGAPMGSGGYGVGGRPMKPVGMAATAAAQPMGQQRDPFGSIDPFAAKPGSMNAVKQANSVKPDQGFGAFQGVNSSVAAGFGSFQSTDAGSGGFQSAGTTTPSXYTTASTSFNAYSXAAAVNSSMDPLDNLFASTTSAPTAAAASNGDSGGDMFGEMDGWVDVEAEFAGGDSGGTTTELDGLPPPPSGLTISAAKAKGMDSYKGGQYADAIKWLSWAVVLIEKSGKDADIVEVLSSRASSYKEVGEYKKAITDCSKVLDQDKDNVSVLVQRALLYESTEKYRLGAEDLRLVLKIDPTNRLARSTIHRLNKLAD

SEQ ID NO: 354213 - protein, 104 aa, Zea mays
  Clone ID: MRT4577_86213C.1.pep
GIGGFGFVIPPKSEKGPRVKTLGFREFLGYFRQKPRPFFAPDRGVALSLGSNYKSMGLVPVPFKDQMVGLKVFRVINRAGVGIFGNKIGIKTNLFRTPLKNWPP

SEQ ID NO: 354214 - protein, 179 aa, Zea mays
  Clone ID: MRT4577_86214C.1.pep
VRKKKKKKKKKKKKKKKKKKKKKKKKKKKKKKKKKKKKKKKKKKKKKKKGGPVFWGPNFPPPAWQNLVFFLVTPILIHRPFFYHRSTGKTLAFPHLNRLEKLPFFPGGLYRKRPPPVPLSKNFHTLIGNGTPLFSGPLTGGGWFFPPRDPFPFPGPLGPLLLVFSLFFFPIFAVFPLKF

SEQ ID NO: 354215 - protein, 271 aa, Zea mays
  unsure (1)..(271): unsure at all Xaa locations
  Clone ID: MRT4577_86215C.1.pep
MRRLSRAVALLLLLLPLALAATTTMAAAVVAKAPAAAAAPPNVTAEMAKGGCKAFADLLAASPDASSTYQSAVEGGMTAFCPSDDAVRAFLPKYRNLSADGKAELLLFHAVPVHYSLGSLKSNNGPMNTLATDGAARSFNFTVQSQGDAVTIRTAAAAXPARVESTALDKDPLAIYVIDAVVQPVELFKPAPSPSPTPAPAPAADAPKAGNGKAAARQRHPAPAVADAPGPAAEDDAAPVDQKDVKKSAADGAPCSRWWLAAALAAASALV

SEQ ID NO: 354216 - protein, 115 aa, Zea mays
  Clone ID: MRT4577_86216C.1.pep
TARLTGLSVPPLAFSQPSPTAKCLEVYRRTPDLRCVTAHPETPIRCGGSLRPRRYSDARSPPPRASPFRYCPSLLYPFFVISAKEIPPRCLVSADLSRLRESSTCSLESKHLLDY

SEQ ID NO: 354217 - protein, 193 aa, Zea mays
  Clone ID: MRT4577_86217C.1.pep
MASPSDRRPIVISGPSGVGKGTLINMLFTRHPDQFTLSVSHTTRNPREGESDGVHYHFVTKDAFRDLIAKDGFVEHAQFGSNLYGTSKATIEEQTAKGKVVVLDIEMEGVKQVKASTIDARYVFVSPPDTEELEKRLRGRGTETEESIQQRLTRAQDELAWARSAEFDKILVNDDLEKTYQELDAFVYTEKSD

SEQ ID NO: 354218 - protein, 59 aa, Zea mays
  Clone ID: MRT4577_86218C.1.pep
MAFEKNQSNPMREINEQKLVLNISVGESGYRFTRSAKVLEQLIGQTPVFYKARNTVRSF

SEQ ID NO: 354219 - protein, 54 aa, Zea mays
  Clone ID: MRT4577_86219C.1.pep
THTFSYFQLAHTFHFIQDMLKTECDSYNQLRILFKSKNLFSLDHIIFPDFQLIS

SEQ ID NO: 354220 - protein, 114 aa, Zea mays
  Clone ID: MRT4577_8621C.1.pep
LAQPYMNNYGESHRRGGERKNRAISTTPRVHHLPTSLSLGDRSRSPSSANGTCGQHIQEFGGGDELLARDWPNPHRESSTGTTTSTGLIIVFSSGQTLLNYSAHHTHRSRPFNS

SEQ ID NO: 354221 - protein, 88 aa, Zea mays
  Clone ID: MRT4577_86220C.1.pep
ENVTVSIPIDSDKTTRYLIAFGLSLTNGAATDKYFQDCRLELFFLKKHRCNWPHEKVKDEKDNVTLVMCCCNAIASYQHQMLSICQTT

SEQ ID NO: 354222 - protein, 118 aa, Zea mays
  Clone ID: MRT4577_86221C.1.pep
FPFNHLGALNLAFYLEQQQFPFSQVPGASPQQFFPFNQRGALNPPAFLQQHQLFPFSQQGGGSPAPFLKPPPGVPFYQPGGPNAGPPLQLQQLGPFNPLVLANPAGFSPQPPMGGAPL

SEQ ID NO: 354223 - protein, 415 aa, Zea mays
  Clone ID: MRT4577_86222C.1.pep
LLSAISIICRGTGDVELFEALLQDFVECAGFLDYFKAVWLPRLGAWITVLKATALASAQVASAIESYHHLLKLRLLNEADESVYWRADWLVDKLGTKVHSYYWLDEFSGKNSFSRYWRSEWSSGPNPWCQGMQIPDSDVVIEGNYASVVSQKNKEKSHVVLNPGSEFALCDCSWSMKGNLCKHVIKSAKVCRDRGLALPSLAMFHYYQALANLVHCPPSDTLISDHAMALAVSVKTQLDAVLCAVNGSSSIRPGFQDPQSTSKTREAEIEEANSENGVCTSQPQPGAGDDEDQAIRTGKRRKSGNASGDTEDGSIYQDSLARKKCKSGEASGDDEEASTEEGSRACESRKPGEASTNNEEVSIGQGSRDHEKRKSGEPPGNEGTSATQATEPSETETSQATNGLVRSLLPSSECT

SEQ ID NO: 354224 - protein, 44 aa, Zea mays
  unsure (1)..(44): unsure at all Xaa locations
  Clone ID: MRT4577_86223C.1.pep
VGGGXXXFSSAXSAXALXXXXVAFXSPPLPFVALKSAPXARVDP

SEQ ID NO: 354225 - protein, 85 aa, Zea mays
  Clone ID: MRT4577_86224C.1.pep
AAAFLHVTIVAIFAATWRLTSKKTLVTDIVGHNLEIELKNNTKNHALEKRKQTNWKHKNSQKILKYNKVICIKKYRANNISKFSN

SEQ ID NO: 354226 - protein, 100 aa, Zea mays
  Clone ID: MRT4577_86225C.1.pep
AHRRVVVMPQMRRHADGGCRERRQESSQERDPCAHGGGPSRLTSSRCPRVCARVRIVTRTKIPLAHSPLESAQTVLLPSGTGPHQGLAFDSLAHPSLLPP

SEQ ID NO: 354227 - protein, 173 aa, Zea mays
  unsure (1)..(173): unsure at all Xaa locations
  Clone ID: MRT4577_86226C.1.pep
IRHEAVPLHCPEGQGTRAAVATRCSPYPAPSVPSSRRFDRLGHPPAAASAPPQPAPCSHRRRAARPRLTKLPVPPRRCRNPSRGHEHGHHLRATIPSEPDTPGREPHPAHQTPMDSAASAALKPSALDLLAALLTXRDPEGGAHWACALGENRHLFLLLTTCVGVLGGCGGAL

SEQ ID NO: 354228 - protein, 76 aa, Zea mays
  Clone ID: MRT4577_86227C.1.pep
MAMDLLAMPVLLSADSAAAVLVLLSVATVVALKHLLSSWRRSPRRRLPPSPTPLPVIGHLHLLRPPVHRTFHELAT

SEQ ID NO: 354229 - protein, 94 aa, Zea mays
  Clone ID: MRT4577_86228C.1.pep
KEKSLSALGYASYLFLRSAEMNSLVLSVLTGKCGIKMSEILVDVIIALKLQHNIIARYKQWWRRVGKYETHETLPSTGTTDSPSDTEPQSPQTD

SEQ ID NO: 354230 - protein, 68 aa, Zea mays
  Clone ID: MRT4577_86229C.1.pep
IVPNDLIKKQPDKYQSESVQSICTPYRDYTQTLTSLLMEILCVQRSKLTIAKIAIMTFMIHQWAPRRH

SEQ ID NO: 354231 - protein, 98 aa, Zea mays
  Clone ID: MRT4577_8622C.1.pep
RSTGYSMSRPRAPTTTTTNGGTLDQGIPWGGMNYFFIMGHPDDPHVAWTFLLQQQLVAVYGHPAIQTSYLHFGSIDQLILGQSTGGLMGPPTETPHLP

SEQ ID NO: 354232 - protein, 109 aa, Zea mays
  Clone ID: MRT4577_86230C.1.pep
RVQSVQVVARSSKDASFFLQAKINSFRIQEHDKAKHGFVSYLLRVKLSMKRRKSVGIIQSRRDLTQLDLTLRILLLEVSASSSHFSLILGMFFFKNCDLPSHSYQGVIK

SEQ ID NO: 354233 - protein, 47 aa, Zea mays
  Clone ID: MRT4577_86231C.1.pep
WRSVRVTAVVATDTAQIDYSSNVSEFPMEAYDLLRNDTYNGTHVPGG

SEQ ID NO: 354234 - protein, 56 aa, Zea mays
  Clone ID: MRT4577_86232C.1.pep
MAHANVWNSHPKTFGKGSRQCRVCAHRAGLIRKYNLNICRQCFREYASDIGFNKYR

SEQ ID NO: 354235 - protein, 108 aa, Zea mays
  unsure (1)..(108): unsure at all Xaa locations
  Clone ID: MRT4577_86233C.1.pep
MVALAAASTAFAAKSRLARAPSSPAARFSVSCSASGNNGGAGEMAQSLAAXAKTFSVALALPSVLLSSVVTSPSPAVCHIAGLTPCMESKAFATAEKQSITKLHPSLK

SEQ ID NO: 354236 - protein, 164 aa, Zea mays
  Clone ID: MRT4577_86234C.1.pep
MAEEKKPHPQPPPSWSALRLDLAGLVLSLLPVYADCACFAAVCPQWRAAARQLQLPPLPLLALPDGTFYSLMYDKPFHFPGCGFSGYENVCGSWLIFSRDDGCFMVNPFSRATVTLPALSSVRLRPPNASASKWAEGGSVESANLYITWMRINEADNLRISKLI

SEQ ID NO: 354237 - protein, 157 aa, Zea mays
  Clone ID: MRT4577_86235C.1.pep
SMVQRPSRSRAQKIRSPPFPPGSTTGVLPLLPRQSRVAPPSYHGGCTPMLGDPATRPDMVVVVALPTSSCDQMAVPCSGEQLLGGWSIICLGDTTVVTSKVLGSTLQGSVKHPGHQPQLLHRRLVDFIAGGQHLPPYGNRCRRGMQIPAGLEGPNRP

SEQ ID NO: 354238 - protein, 56 aa, Zea mays
  Clone ID: MRT4577_86236C.1.pep
LKLQKIFYLGGLVLIFKQIICGPDEPFINETTLDSQNLKFSQPAVGIAIFRVSISS

SEQ ID NO: 354239 - protein, 56 aa, Zea mays
  Clone ID: MRT4577_86237C.1.pep
WGGQLPGCLRFEHGLSIFCEMWFASCGRYSAAAVTFTFLGSGLVSRFGVVVYKGPP

SEQ ID NO: 354240 - protein, 114 aa, Zea mays
  Clone ID: MRT4577_86238C.1.pep
MVPGFRNKYNRSYCDKTVLLFSLFLWLQICIDPSFRGSRFSLVDRGFIYVIAHIRGGGEMGRKWYEDGKLLKKKNTFTDFIDCAEHLIKSKYCSREKLCINGRAQVAIDECCLI

SEQ ID NO: 354241 - protein, 57 aa, Zea mays
  unsure (1)..(57): unsure at all Xaa locations
  Clone ID: MRT4577_86239C.1.pep
MSCCEGNCGCGSGXKGGNGCGGGRKMNPDMVEQVTTTTQALIMGVEPSKGHAEGGFK

SEQ ID NO: 354242 - protein, 48 aa, Zea mays
  Clone ID: MRT4577_86240C.1.pep
TGYFFTAGEKLFQINQHFYTHCQEKNLTSFYQSTTPNSYITKLNRKEG

SEQ ID NO: 354243 - protein, 405 aa, Zea mays
  Clone ID: MRT4577_86241C.1.pep
MASSAAAASSASALFRLPGSGHLRAPPRSGWRDHRRSRRATVRCSFAPVETARIKVVGVGGGGNNAVNRMIGSGLQGIEFYAINTDSQALINSQAQYPLQIGEQLTRGLGTGGNPNLGEQAAEESRETIATALRDSDLVFITAGMGGGTGSGAAPVVAQISKEAGYLTVGVVTYPFSFEGRKRSVQALEALEKLEKSVDTLIVIPNDKLLDVADENMPLQDAFLLADDVLRQGVQGISDIITIPGLVNVDFADVKAVMKNSGTAMLGVGVSSSKNRAQEAAEQATLAPLIGSSIEAATGVVYNITGGKDITLQEVNKVSQIVTSLADPSANIIFGAVVDDRYTGEIHVTIIATGFPQSFQKSLLADPKGARIVESKEKAATLAHKAAAAAVQPVPASAWSRRLFS

SEQ ID NO: 354244 - protein, 269 aa, Zea mays
  Clone ID: MRT4577_86242C.1.pep
VRIDVPPTSPGRAALKVWEELVNVLRKDGADPAAAFVHRKKVQHAEKSIRDAFLALYRGLDLLNKFSSLNVKAFTKILKKFVKVSEQQRKTDLFSEKVKRSPFSSSDKVLQLADEVECIFSRHFAGNDRKVAMKYLKPQQPRNTHMITFLVGLFTGTFVSLFIIYSVLALVAGIFSSTGNTAYMEIVYHVFSMFALISLHVFLYGCNLLAWKSSRISHNFIFDFSPSTALTHRDAFLVSASIMCTVVAALVVNLFLSTPGRPTPTRCPA

SEQ ID NO: 354245 - protein, 61 aa, Zea mays
  Clone ID: MRT4577_86243C.1.pep
VLYVWGPFSMSHFFLLLVIKVVKCLFFLGYDKIRRGYVLNKEDFFFLNHVRKMVCDLSVGV

SEQ ID NO: 354246 - protein, 54 aa, Zea mays
  unsure (1)..(54): unsure at all Xaa locations
  Clone ID: MRT4577_86244C.1.pep
TFISPIKPSLQQHPYSFTNIQSFXXLIFFXXPQSXPPXXXXXXXXXXISRGEGG

SEQ ID NO: 354247 - protein, 52 aa, Zea mays
  Clone ID: MRT4577_86245C.1.pep
CMERSLHPFTWMRWINKSQWMLSVVQQQQFKLSARDGRYITTVVFRLDQAQA

SEQ ID NO: 354248 - protein, 112 aa, Zea mays
  Clone ID: MRT4577_86246C.1.pep
PCTYLTCSQTKQLAADCNKQNIHPKYLTVARQQFALCSGARARQHGSLKWRVAGRYPVILTGVDVGAVGDVHDAGDLVRVPAGVSPEILTMPSEILTGVDVGAVEAVGDPAG

SEQ ID NO: 354249 - protein, 60 aa, Zea mays
  Clone ID: MRT4577_86247C.1.pep
SDQLKHHRLGRPPGICPGHPGGPPAPLIGSLIGGWIKAGHSLRRGKVVGQQFLPTNYQPA

SEQ ID NO: 354250 - protein, 68 aa, Zea mays
  Clone ID: MRT4577_86248C.1.pep
QARAITLLSFSTHHWTTPRRNYTSPTRYSPPRNNDNTVHYYLPLSSPHRSLPLIPVRHTYIQLPINTL

SEQ ID NO: 354251 - protein, 77 aa, Zea mays
  Clone ID: MRT4577_86249C.1.pep
LGSPYAVVRCKPRERPPCEAESCSPSRRPGAGRHGPLSMRSSASTCCGRPFILQCWFGSFKLGVALACRLMVIWLSS

SEQ ID NO: 354252 - protein, 248 aa, Zea mays
  Clone ID: MRT4577_8624C.1.pep
MASSMAAAASASASASSPRATKAVVAALADPLKVMISGAPASGKGTQCELIKTKYQLAHISAGDLLRAEIAAGSENGKRAKEFMEKGQLVPDEIVVNMVKERLRQPDAQENGWLLDGYPRSYSQAMALETLEIRPDTFILLDVPDELLVERVVGRRLDPVTGKIYHLKYSPPENEEIASRLTQRFDDTEEKVKLRLETYYQNIESLLSTYENIIVKVQGDATVDAVFAKIDELLGSILEKKNEMVSST

SEQ ID NO: 354253 - protein, 93 aa, Zea mays
  Clone ID: MRT4577_86250C.1.pep
GQDIIVNSIRSPSMGGGRAPRCHQPRRGARGSSATSSTASPRSSSTSWSWRRSGRRVRPSQRGRRRGSRRLHTPPGEAAGLLVTSSRPHHLHA

SEQ ID NO: 354254 - protein, 80 aa, Zea mays
  Clone ID: MRT4577_86251C.1.pep
LCLVLSPAICHTSTSACSLLSCHRLIFFQSSNMPSSLKRASGNMNLFISCNCYTRSEMFDIPHISLNLFVEPLDIMHIMV

SEQ ID NO: 354255 - protein, 48 aa, Zea mays
  Clone ID: MRT4577_86252C.1.pep
QEHPSCPGPRALEASIVVLLPSASLWKGAPGPQGLVGTTRQDGLLGEP

SEQ ID NO: 354256 - protein, 62 aa, Zea mays
  Clone ID: MRT4577_86253C.1.pep
ALPSDTIASGAIVSAILPSASSASISNPEPYAAKGAVRCVRPTVWVGEGTQFGSSGAAIERD

SEQ ID NO: 354257 - protein, 86 aa, Zea mays
  Clone ID: MRT4577_86254C.1.pep
HLDILSLPGAYLNTPTSTHTKKNLDLFAACNGQYSWKGNMDIIFFGGFSFGVTTEKRDTHFKKKQRLYPRLVMNILPGRVFVPTLF

SEQ ID NO: 354258 - protein, 57 aa, Zea mays
  Clone ID: MRT4577_86255C.1.pep
VDFKSVVHIVCDNKRVNACEVVDKVSCDGQLGRENVDNNENVDVDLVFRHGFRSHRT

SEQ ID NO: 354259 - protein, 85 aa, Zea mays
  Clone ID: MRT4577_86256C.1.pep
MRYPVADRKNYIFYLSFDLVFLWGKRGEKKKKKKKKKKKKKKKKKKKKKKKKKKKKKKKKKKKKKKKKTRKKKKKKKKKKKKGGG

SEQ ID NO: 354260 - protein, 119 aa, Zea mays
  unsure (1)..(119): unsure at all Xaa locations
  Clone ID: MRT4577_86257C.1.pep
KXGEGRKXXVGFGRGGXKREFGFVXFVERXSXLKGVNFFLXYEXDGEGVELFMGKXLXDRKVDYXXRGGGXXNYXXXXYGGGGXXGDXYGXYGGGGXXLGXXLLYXXGXVGGGMRMVXM

SEQ ID NO: 354261 - protein, 69 aa, Zea mays
  Clone ID: MRT4577_86258C.1.pep
KPNLDANNKDDELLIPRESEPPSCRPHSYRPPVLMIPSAWGGCFIFYWYHITKANISCQRELLDAITRN

SEQ ID NO: 354262 - protein, 126 aa, Zea mays
  Clone ID: MRT4577_86259C.1.pep
TDRGHGPMHVFESGLKVKEYDLLRRLFSHRGFVGLGIQEHIALGIEYDPSTGIYGMVLYVVLERCGSRVARRRRHKSRVGIQHRVPKEVSIKWLQVKYEGVILHGAQASAFYPSRVGQNSSRFISM

SEQ ID NO: 354263 - protein, 57 aa, Zea mays
  unsure (1)..(57): unsure at all Xaa locations
  Clone ID: MRT4577_8625C.1.pep
MRQCKTAFLSXRKKKKKKKKKKKKKKKKKKKKKKKKKKKKYKKKKKKKKKGGGGGPF

SEQ ID NO: 354264 - protein, 47 aa, Zea mays
  Clone ID: MRT4577_86260C.1.pep
IFFLTPFFPPPKKKKKKKKKKKKKKKKKKKKKKKKKQKKKKKKKKNT

SEQ ID NO: 354265 - protein, 154 aa, Zea mays
  Clone ID: MRT4577_86261C.1.pep
HRPAVRYALLRFRSSSLPRRPGPARHCGSRQRSCGPAVCRPAIGAQHRHQAIPAAQRRAAAARSGAPRCRPAAARSSVAWLGARLRAGRLGAALRLCTSAGRCSACSGLWVLHCSAARSTEYGLKKRIGRISSSRGSGSEAKVPAAPALPHGPL

SEQ ID NO: 354266 - protein, 90 aa, Zea mays
  Clone ID: MRT4577_86262C.1.pep
PVGRRQPLPQPLPSLSPSARLPSARSRIARSFLDALLCRARCLLLCCAPISHGHCALAPARPELSGSPRCPSPYARDRVPAPCSPRVPLV

SEQ ID NO: 354267 - protein, 85 aa, Zea mays
  Clone ID: MRT4577_86263C.1.pep
RPVLEKGRAFNLFLLFYFLLLGRYIFKMVTIFGEGMENHSHFFKQYYKRPDLFFNSSLYLNNVWSLLTLEEIKNRGCDGICVFAI

SEQ ID NO: 354268 - protein, 189 aa, Zea mays
  unsure (1)..(189): unsure at all Xaa locations
  Clone ID: MRT4577_86265C.1.pep
SPDHSIRPGAHTPVPNPCTVVHSPPIPPSRPPPRAIDDDHRGLRPHVCGQAEIWICSPLLRRSAVSSWRKNSGAHPGPQPVTFLPPHPPXAASPRPXPDWPHKMPTVAPIAPTRSPHPPRPQPPRRRHPRPXRVVAVVTPPKVPAPCYRGRRPAAASCRARRHARHAWPHGRVHRLLREGAPDPDVRAR

SEQ ID NO: 354269 - protein, 47 aa, Zea mays
  unsure (1)..(47): unsure at all Xaa locations
  Clone ID: MRT4577_86266C.1.pep
LPVMLLHPSTYXHPDLHFPLFKLLPGRPGPQICCTNRTSXPREEERA

SEQ ID NO: 354270 - protein, 244 aa, Zea mays
  unsure (1)..(244): unsure at all Xaa locations
  Clone ID: MRT4577_86267C.1.pep
PRVRGRVGESINLFRYFSGEGVQQGLWGMLEGTVVSVPEKGARRHPRGDNIQIDTKNILFICGGAFVDLEKTISERXGRDDSSIGFRAQVRSNMRSGGVINAEITSSLLKSVESGDLIAYGLIPEFVGRFPILVGLSSLSEDQLVEVLTEPKNALGRQYTKLFEMNDVKLHFTEEALRLIAKRAISKNTGGXRGLRSILESILTEAMYEGQLQERPNGESEIDTEAPSRVAHVEVPGNNNYVYK

SEQ ID NO: 354271 - protein, 98 aa, Zea mays
  Clone ID: MRT4577_86268C.1.pep
MIKKDTRGDLFWFKKIKDFFKQKGLKPKKKLFFFFVPGRALSGFPIFFGFKGIKKDFYLFRVLINFNPPHPHGFLVGKKKKKKKKKKKKKKKKKKKKK

SEQ ID NO: 354272 - protein, 559 aa, Zea mays
  Clone ID: MRT4577_86269C.1.pep
MSAAVRSRAAAAALSAARRIHAGHAAGQKQQGSNSTGAFRRPWTLFRRQQQEERSHVPRAAAPVLDAVADHRAGGSDGAEPPEIWRQPGEAPVAPEGVGAVGRIDVVRVAAPGGEDFDGKDGGGESGGWGGAHLGRRFPTPKEICRGLDKFVIGQQRAKKVLSVAVYNHYKRIYCESLINRSAADCSQSDSCTSDTDMVELEKSNILVMGPTGSGKTLLAKTLARFVNVPFVIADATSLTQAGYVGEDVESILYKLLAAADFDVAAAQQGIVYIDEVDKITKKAESINLSRDVSGEGVQQALLKMLEGTVVSVPEKGARRHPRGDNIQIDTKNILFICGGAFVDLEKTISERRHDSSIGFRAQVRSNMRSGGVINAEITSSLLKSVESGDLIAYGLIPEFVGRFPILVGLSSLSEDQLVEVLTEPKNALGRQYTKLFEMNDVKLHFTEEALRLIAKRAISKNTGARGLRSILESILTEAMYEIPETRTGKDKIDAVVVDEESVGSVNQHGIGAKILCGEKALDVYLANHNNKESTGQLQERPNGESEIDTEAPSRVASM

SEQ ID NO: 354273 - protein, 83 aa, Zea mays
  unsure (1)..(83): unsure at all Xaa locations
  Clone ID: MRT4577_8626C.1.pep
RGRPGPPENEEIASRLTQRFDDTEEKXKLRLETYYQNIESLLSTYENIIVKVQGDATVDAVFAKIDELLGSILEKKNEMVSST

SEQ ID NO: 354274 - protein, 47 aa, Zea mays
  Clone ID: MRT4577_86270C.1.pep
EYYLFVLPNIMFILLFEHLSQIILFAHINVHSWELEWCPMQCFIVSA

SEQ ID NO: 354275 - protein, 83 aa, Zea mays
  Clone ID: MRT4577_86271C.1.pep
LAIGSPWRSSDEDTSQRRSRHRRAPLGLSLGCLRVSPRKGRKRSREGCASGALLAGQSCVCRSLRSHALHSEPRQPLWNLSRC

SEQ ID NO: 354276 - protein, 319 aa, Zea mays
  unsure (1)..(319): unsure at all Xaa locations
  Clone ID: MRT4577_86272C.1.pep
MAGMAPEGSQFDAKQYDSKMTELLXLTLPIYCLSLWRPCEALLFAQPSXAYEFAXQGDTGEFFTSYDEVHESFDDMGLQENLLRGIYAYGFEKPSAIQQRGIVPFCKGLDVIQQAQSGTGKTATFCSGILQQLDYGLVECQALVLAPTRELAQQIEKVMRALGDYLGVKVHACVGGTSVREDQRILASGVHVVVGTPGRVFDMLRRQSLRPDNIKMFVLDEADEMLSRGFKDQIYDIFQLLPSKIQVGVFSATMPPEALEITRKFMNKPVRILVKRDELTLEGIKQFYVNVEKEEWKLDTLCDLYETLAITQSVIFVNT

SEQ ID NO: 354277 - protein, 84 aa, Zea mays
  Clone ID: MRT4577_86273C.1.pep
SVLMLRISLCRISYSVAILMVFLYPLLCLVVMLLASIMELLSISPYCPYRLIVAIEPCICVPVCVIRRCTQLIVQVGNVLSQKI

SEQ ID NO: 354278 - protein, 49 aa, Zea mays
  Clone ID: MRT4577_86274C.1.pep
SLRRLVHFQLGSQACASSAPRRLRTRKSATLGAIGGDGLLLLRFEQLAQ

SEQ ID NO: 354279 - protein, 128 aa, Zea mays
  Clone ID: MRT4577_86275C.1.pep
VFAAAAADVAAGVAAEGSSPEEAKIQAENAAHLSVALAENAIVILVLVEDHLRSQAQHFCTSLTGDSITSSTSMTSLADSQSNSLSTAGKEPMAAGVSRRASLSSDAGGLPLDVRNTWRLNVIAFYQL

SEQ ID NO: 354280 - protein, 40 aa, Zea mays
  Clone ID: MRT4577_86276C.1.pep
RRASVQRSIDPAQPYSSQAPDSVAAAPGRHYTALPSKLIR

SEQ ID NO: 354281 - protein, 98 aa, Zea mays
  Clone ID: MRT4577_86277C.1.pep
TKQKSFLDNFLEIFGKPLYQIIKPPDGLIKLFVGGKFFPPHRRVGRKNGDLDIVSPPVCPKRSLKTVGSPLKGPRGGIKLNILPSSKTREKKKKKIVP

SEQ ID NO: 354282 - protein, 64 aa, Zea mays
  unsure (1)..(64): unsure at all Xaa locations
  Clone ID: MRT4577_86278C.1.pep
TVATVAARIDGGAARGGTRVSTLGIVAHVEPHQNGTPENPGTARLPTPRLFEATRRVDEXYDTG

SEQ ID NO: 354283 - protein, 73 aa, Zea mays
  Clone ID: MRT4577_86279C.1.pep
PRVRGRVGKGCFYTTSGGLQSFEHPLHEVKAVPRVDSQGQMCGSTFKVDSESKKKQDASIPRVGSAADWSNQF

SEQ ID NO: 354284 - protein, 249 aa, Zea mays
  unsure (1)..(249): unsure at all Xaa locations
  Clone ID: MRT4577_8627C.1.pep
MASSMAAAATATALPLPSGTTQRPSAQGRLLFTAAPARSLRLRPAGRRSARSSPRATKVAPPTPHLRVIRFGWISSWLSVRGWGCVYFCSLAELRRILRTCIGEAVVAALADPLKVMISGAPASGKGTQCELIKTKYQLAHISAGDLLRAEIAAGSENGKRAKEFMEKGQLVPDEIVVNMVKERLRQPDAQENGWLLDGYPRSYSQAMALETLEIRPDTFILLDVPDELLXEGWVGRRLDPCTGEIYHL

SEQ ID NO: 354285 - protein, 254 aa, Zea mays
  unsure (1)..(254): unsure at all Xaa locations
  Clone ID: MRT4577_86280C.1.pep
MLAVFDPTVAKCPEGLRXPGRRGGRWSRRGRRXALMKGFSDSHDGAVTVSLGPSGALAYSAANQSPLVPRLFGAVNDIFCLFQGHIENIANLKQHYGLSKTANEVTILIEAYRTLRDRGPVPASQVVRDLSGKFAFILYDTLSKSTFVAADADGSIPFFWGVDYENHLVFSDDVGILKTGCGNSYAPFPKGCFYTTSGGLQSFEHPLHEVKAVPRVDSQGQMCGSIFKVDSESKKKQDASIPRVGSAADWSNQF

SEQ ID NO: 354286 - protein, 47 aa, Zea mays
  unsure (1)..(47): unsure at all Xaa locations
  Clone ID: MRT4577_86281C.1.pep
KDGKKGKVXIRLSTLKTGRXYTHSYXLLVLHXWGVKXMGXLHLXIQF

SEQ ID NO: 354287 - protein, 253 aa, Zea mays
  Clone ID: MRT4577_86282C.1.pep
MGVEEERDGEEQRRPLLSSTPPAAADPQQQQYQFLGRSTSSVLRGGGGGWEGPEVSADEKGWRLFLKGHIRMVAVTNLLRASGDKPDVLDEVEIRQLLIDHIGHRCCWGSHPARTWKITSIEDCNVYVGTLETFIEERYIITKKEPFESGNIDGREKGPLPGLWELDLRSKFPVLFVPEKEVTVKIPHSDIIEKCSDCEGRGEKPCPTCNAGTMIANIQGKAGDLRQMQGAAVMMIGEGRRKGARVGCIELEE

SEQ ID NO: 354288 - protein, 67 aa, Zea mays
  unsure (1)..(67): unsure at all Xaa locations
  Clone ID: MRT4577_86283C.1.pep
MAGMAPEGSQXDANNYDSKMQELMNQGDTDEVFPSYDEDHHSFDDMALQEHLLREIYDYGFHKPLCP

SEQ ID NO: 354289 - protein, 124 aa, Zea mays
  Clone ID: MRT4577_86284C.1.pep
GRTNPSANPSGGVGFSFPSGPGSVSGGFPGFGFGVNRTKMPAPNVENRCFVGGLAWATDNNSFKNALRTNGKVLESKTILNRKTQRSPGFGFLTFSTEEAIRNPIKGINRKKLNGLNITVNKAN

SEQ ID NO: 354290 - protein, 93 aa, Zea mays
  Clone ID: MRT4577_86285C.1.pep
TKAHLDLGLQESCYSCREKPTRLTILGLCKTENPPRMGCKQHMSLRNATLLGPDPHAIVPPYPRSPAMGQPPTARRKDSHRLLHEHTWCYHTM

SEQ ID NO: 354291 - protein, 456 aa, Zea mays
  Clone ID: MRT4577_86286C.1.pep
MGVEEERDGEEQRRPLLSSTPPAAADPQQQQYQFLGRSTSSVLRGGGGGWEGPEVSADEVRSAAGFHTFQGPPPNGDNAYAYPPSIHSAMLSPSPSHAPPSPHPNEGLAIVPQGPYPYGGSYQPSESVGRDVLDEVEIRQLLIDHIGHRCCWGSHPARTWKITSIEDCNVYVGTLETFIEERYIITKKEPFESGNIDGREKGPLPGLWELDLRSKFPVLFVPEKEVTVKIPHSDIIEKCSDCEGRGEKPCPTCNAGQAHGFYKANQMTQCGACHGRGLLAHQDGSDTVCGMCNGKGMLPCIACGSRGLVTCNTCTGYGSLLAQSMAHVQWKTLSARKVSAARGAASVPEEVFHRAKGVQLCNIQAYQCTPAFFADSYPLNQFSSEVIASRLPVPPSARVISERHIISVVPVTRVTMARRKQSFSFYVVGYSRDVFIRDYPSKFCWGLCCCFEWLGK

SEQ ID NO: 354292 - protein, 34 aa, Zea mays
  unsure (1)..(34): unsure at all Xaa locations
  Clone ID: MRT4577_86287C.1.pep
TTSERAICICLSSMSLGLLRTGSGRRSTESEYEX

SEQ ID NO: 354293 - protein, 91 aa, Zea mays
  Clone ID: MRT4577_86288C.1.pep
EPTCTDLRSNPSTTNTGETLPWMLAKHDGKQPIKTSLPRPLDCSKVLYTVDTGQIDPAFGPQHTSQEHDLKTTPEISNQAFSAKPQLYHER

SEQ ID NO: 354294 - protein, 51 aa, Zea mays
  Clone ID: MRT4577_86289C.1.pep
IIAGRLDFGMQGYLDMAQGMLIDPPPMAGSSTSGGGGDDDDDDGEVKLWSY

SEQ ID NO: 354295 - protein, 78 aa, Zea mays
  Clone ID: MRT4577_8628C.1.pep
LTTSTSGWDILFMHVTIIPHLHVHTYIMQKKLRSNSLPWRMKKRYLLLTLYWRQQHDGTYAIIYNSVMHHKRRPEKGY

SEQ ID NO: 354296 - protein, 69 aa, Zea mays
  Clone ID: MRT4577_86290C.1.pep
SKKKKKKKKKKKKKKKKKKKKKKKKKKKKKKKKKKKKKKNKKKKKKKKKKKKKKNGQRHKMEKTLASPN

SEQ ID NO: 354297 - protein, 56 aa, Zea mays
  Clone ID: MRT4577_86291C.1.pep
AFFYSFIRWHDRLNSFLSRFYNCGRIQAEQGAQAQVSGVYYGKMDEITVWKAGEYM

SEQ ID NO: 354298 - protein, 81 aa, Zea mays
  unsure (1)..(81): unsure at all Xaa locations
  Clone ID: MRT4577_86292C.1.pep
SEKRRVMRIEEASEELQLRRSSFARTRQPRRXLRAFASRSPHPSQLDPSQSLGSASASLVDPDPPLCSMDICDHVQEWCAV

SEQ ID NO: 354299 - protein, 163 aa, Zea mays
  unsure (1)..(163): unsure at all Xaa locations
  Clone ID: MRT4577_86293C.1.pep
HEDQGMEISDPRQESRKPNISNLHGGESSDGIVAGYRIAESAEAEEPRPASEPARMRSEPRRCVNGEPRQRGGEEEEPEGGHGKVAAAAAADVRRGAEVVPRPALVAEHTAERADEPRIXARGRIGPRIQLSGGRGGVEAAQEERTRASRHGRSAEPGGRFHL

SEQ ID NO: 354300 - protein, 81 aa, Zea mays
  Clone ID: MRT4577_86294C.1.pep
LYALFLLEILCTLCSYRSNRTSLFDGIEEGGIRATSYSSHEIDEQENDGAIDGLQDRVSILKRVLCNFNFLKHSNSVDSFM

SEQ ID NO: 354301 - protein, 81 aa, Zea mays
  Clone ID: MRT4577_86295C.1.pep
RIPNIYFFFFFFFFFFFFFFFFKHLYHFAAPAFYGLIVQCQETHLIHRFYHELSWFTHGSKPHLAYLKSLVYSNSRPDGRD

SEQ ID NO: 354302 - protein, 45 aa, Zea mays
  Clone ID: MRT4577_86296C.1.pep
PYTAAALIFYFLFIVFMAKQYISIKITINILHITTNYKTILSLLF

SEQ ID NO: 354303 - protein, 51 aa, Zea mays
  Clone ID: MRT4577_86297C.1.pep
AAATATPWCKGEQVTSEKKVREAHVEKGMQRNQMITFPGEADDAPDTVTGD

SEQ ID NO: 354304 - protein, 104 aa, Zea mays
  unsure (1)..(104): unsure at all Xaa locations
  Clone ID: MRT4577_86298C.1.pep
QTGSVAFLDPKGLYASISKANIFIQCSQSNISSVVXTXLKSEDSSMYQITIAXPYSIQHAIATSLLPLSRLFLQKPXPLLQQIPMVPFMAQKIRPQHLQQLVLP

SEQ ID NO: 354305 - protein, 60 aa, Zea mays
  Clone ID: MRT4577_86299C.1.pep
NMYPQRWIFTDQYIYKSNFFTRHKLIIEVPNPNPKRIYEANSIRQYQITLSVGKKQLKVQ

SEQ ID NO: 354306 - protein, 284 aa, Zea mays
  Clone ID: MRT4577_8629C.1.pep
MASSMAAAATATALPLPSGTTQRPSAQGRLLFTAAPARSLRLRPAGRRSARSSPRATKAVVAALADPLKVMISGAPASGKGTQCELIKTKYQLAHISAGDLLRAEIAAGSENGKRAKEFMEKGQLVPDEIVVNMVKERLRQPDAQENGWLLDGYPRSYSQAMALETLEIRPDTFILLDVPDELLVERVVGRRLDPVTGKIYHLKYSPPENEEIASRLTQRFDDTEEKVKLRLETYYQNIESLLSTYENIIVKVQGDATVDAVFAKIDELLGSILEKKNEMVSST

SEQ ID NO: 354307 - protein, 274 aa, Zea mays
  unsure (1)..(274): unsure at all Xaa locations
  Clone ID: MRT4577_862C.1.pep
PDEPEYXKYPLTFDQAILGIDGDPFINSLDRNTAPGFPFSTRRNGKKGKTLWFGDSMEYDLTGPHAMALRQEVEDLELSVLNGVRPEVVWTDTLKDQKIPVAKANAGKTRLFSAAPMHYAIALRKVCAPFVAHLSRMRIRNTICVGVNPFSCEWSAIAQKLSSKGQHVIAGDYSNFDGSLPAQLVYAATEIMADWYDIHWEYVEAHKRNIVGDNILGKSEFLMYLRRLYYEXCVHHLHIMNFERGSLMYYVRNGIPSGCPVTAPFDSIVNLMAL

SEQ ID NO: 354308 - protein, 197 aa, Zea mays
  Clone ID: MRT4577_86300C.1.pep
SAVLALAVAWRPVLWVAVLADVGTCLLVVLHSMLLLRDGAARRPRCCASATACKSKQASKPCCATVKPVATTRHRHGHGHGHGHAGAGKPGTLGGDKQGKDCHGCCQKESKPPEDAVVIAIPGRAVEHRKEAFPHENAGAGGCCAAAHGAEDEVCIVISARSPCCSTARSRSGSPKDALCCHGSGGKDGGAISALVC

SEQ ID NO: 354309 - protein, 129 aa, Zea mays
  Clone ID: MRT4577_86301C.1.pep
SPIRDGPWSTGRRPSPHEKAGAGGCCGGASAAAPTGALQRTVPKTRCALSSAPGRPAAAPRGVGLVLPRMHCAATAPVVKTAAPSQPSCADLTYQHYHSWNTIVLYIKKLLMSYAIDRKLFLLRVLIFL

SEQ ID NO: 354310 - protein, 234 aa, Zea mays
  unsure (1)..(234): unsure at all Xaa locations
  Clone ID: MRT4577_86302C.1.pep
PTRPLKYSSIAIEENGHGSARHRSQSSRLFLIRLLPLSRRRGGRSNSIASHDPGREPGVAXTGNVSAASAAAPGPKPASAGAGKGAEGQSVVRRLQSELMALMMGGDPGVSAFPEGDNMLHWVGTIAGSAGTAYEGTSYRLALAFTAEYPYKPPKVRFDTPCFHPNVDVHGNICLDILQDKWSSAYDVRTILLSIQSLLGEPNNDSPLNTQAAALWANQEEFRKMVEKLYKAAA

SEQ ID NO: 354311 - protein, 183 aa, Zea mays
  Clone ID: MRT4577_86303C.1.pep
MTRGENQESQTGNVPAASAAAPGPKPASAGGGKGAEGQSVVRRLQSELMALMMGGDPGVSAFPEGDNMLHWVGTIDGSAGTAYEGTSYRLALAFTAEYPYKPPKVRFDTPCFHPNVDVHGNICLDILQDKWSSAYDVRTILLSIQSLLGEPNNDSPLNTQAAALWANQEEFRKMVEKIYKPAA

SEQ ID NO: 354312 - protein, 202 aa, Zea mays
  unsure (1)..(202): unsure at all Xaa locations
  Clone ID: MRT4577_86304C.1.pep
PACTGLLLHGRPSRSFQLPGRVLHHELCHKHHSXWSLDRQPPQQEHGRVRHTQPQLXPTQYNAGXWQNALLQQCCWQQPQHTTXACVYYYXDSXSNLKNCDEFLMHHIGPLVMPSVQSLELQPSRFQVLLEHDVCIYKHIEPRYIXHKRIYSMVQSIMQEGLHQRLCXLCGSQRASHRXGGTVDSSTVPTMNVRLAPLILPK

SEQ ID NO: 354313 - protein, 115 aa, Zea mays
  unsure (1)..(115): unsure at all Xaa locations
  Clone ID: MRT4577_86305C.1.pep
PSAEESGISPKDIFELLEEFKDIFESPNALPPVRPYHHHIPLVPGSAPVNVRPYGYSCLHKTEIERQLAELLKAGLSVSPFASLVLLVXLVQKKDRTWMFCIDYRKVNDIQSRTP

SEQ ID NO: 354314 - protein, 67 aa, Zea mays
  Clone ID: MRT4577_86306C.1.pep
SEEAKAVHTRFRSQDNNTRTLLRSREKLLKRKITRVYQQSGDGKFVTGCCVMGQLETQWSQSPLGIG

SEQ ID NO: 354315 - protein, 123 aa, Zea mays
  Clone ID: MRT4577_86307C.1.pep
MASDTGKKLIQIDVSSDTECPWCFVSKKNLEKAMEQSMGKSDFEVRWHPFFLNPDAPNEGVKKSDFFKMKFGTVQYEGAKSRMTEIFRGLRLEYDMSRLTGNTMDSHRLITHAGTPSYDKQNA

SEQ ID NO: 354316 - protein, 64 aa, Zea mays
  Clone ID: MRT4577_86308C.1.pep
SDRDQLLRVLLFSQYILLGCTLFQTRDPPYASLMSLPAHSILNRCERSCPISLSHRGLEMHRLS

SEQ ID NO: 354317 - protein, 217 aa, Zea mays
  unsure (1)..(217): unsure at all Xaa locations
  Clone ID: MRT4577_86309C.1.pep
MEGCAKFMASDTGKKLIQIDVSSDTVCPWCFVGKKNLEKAMEQSMGKFDFEVRWHPFFLNPDAPKEGVKKSDFFKMKFGXLSNMRIFRGLGLEYDMSGLTGNTMDSHRLITHAGHQGYDKQNALVEELFLNYHCQGKYIGDKQVLLDAARKVGIEGAEELLEDPTKGVHEVQEELKKYSSDISGVPHFVINNKYQLSGGQPPNEFMRAFEMAAKDGA

SEQ ID NO: 354318 - protein, 113 aa, Zea mays
  Clone ID: MRT4577_8630C.1.pep
GWRHGERRPSRSSPCGGVNRGGEAAAPVVVPWCGTAVERRKRRKRPWGAAVAAGAGSGRTRLRRAPQAMKPRRGRAGEIEGRRAQSVNLSGSPPRASTSARAEAMHPGRTRGT

SEQ ID NO: 354319 - protein, 62 aa, Zea mays
  Clone ID: MRT4577_86310C.1.pep
SWPLPLDTVGNVFSPSLCFVSQGPVFASAAHGSVHQGPVQLIQRTAGKNKQPKKKKKKKKIQ

SEQ ID NO: 354320 - protein, 225 aa, Zea mays
  unsure (1)..(225): unsure at all Xaa locations
  Clone ID: MRT4577_86311C.1.pep
MASDTRKKLIQIDVSSDTVCPWCFVGKKNLEKAMEQSKGKFDFEVRWHPFFLNPDAPKEGVKKSDFFKMKFGPVQYEGAMSRMTEVSSCELALXFRGLGLEYDMSGLTGNTMDSHRLITLAGHQGYDKQNVLVEELFLNYHCQGKYIGDKQVLLDAARKVGIEGAEELLEDPIKGVDEVQEELKKYSSDISGVPHFVINNKYQLSGGQPPNEFTRAFEMAAKDGT

SEQ ID NO: 354321 - protein, 241 aa, Zea mays
  Clone ID: MRT4577_86312C.1.pep
MPGRLLSVRIPSLAKLGAPRCAKSMASDTGKKLIQIDVSSDTVCPWCFVGKKNLEKAMEQSRDKFDFEVRWHPFFLNPDAPKEGVRKSDFYKAKFGPVQYERVISRMAEIFRGLGLEYDMSGLTGDTMDSHRLIALAGHQGYDKQNALVGELFLNYFCEGKYIGDKQVLLDAARKVGIEGAEELFQDPTKGVDEVQEELKKYSSGISGVPHFVINDKYQLSGGQPPNVFMRAFEMAAKDGA

SEQ ID NO: 354322 - protein, 73 aa, Zea mays
  Clone ID: MRT4577_86313C.1.pep
HSSRSRCSLQPPPPIHLPSPLHLTPTFHLPPPVHIPPPIHLSPSVHLSSSVQVPSTIHLPTSPCQYPTQPTKS

SEQ ID NO: 354323 - protein, 91 aa, Zea mays
  Clone ID: MRT4577_86314C.1.pep
SNLSLLSNYIPFYYHWMLVCQRTALTFQSNYLQRTEVLQLLQSNSLYTSDTLTTRHYKESLLERIILACWKRGSLPNKPGFFLNQKVTDCL

SEQ ID NO: 354324 - protein, 57 aa, Zea mays
  Clone ID: MRT4577_86315C.1.pep
VEFSAFPNSTVCALEAGYTASTKHLVHVVHKLVSQQQWQMATTSSRMSSPGRPRGTQ

SEQ ID NO: 354325 - protein, 79 aa, Zea mays
  Clone ID: MRT4577_86316C.1.pep
VDGRSSPYIGGRRGTNCCRCGSPWSVLLDVLRIAVEIRNLVDIRRSQHVRVVAYMLAQIRVQMPVSVTRYMQCVIMEVA

SEQ ID NO: 354326 - protein, 110 aa, Zea mays
  Clone ID: MRT4577_86317C.1.pep
MDSSATDGARLPPPRAGSRLCVRCGERKAALKRPKTLEQNSLFKAGERVAIGASGGKDSTVLAYVLSELNRQHNYGLDLFLLSVDEGITGYRDDSLETVKRNEIQYGLPL

SEQ ID NO: 354327 - protein, 363 aa, Zea mays
  unsure (1)..(363): unsure at all Xaa locations
  Clone ID: MRT4577_86318C.1.pep
MDSSATDGARLPPPRAGSRLCVRCGERKAALKRPKTLEQICRECFYIIFEDEIHQTIVQNSLFKAGERVAIGASGGKDSTVLAYVLSELNRQHNYGLDLFLLSVDEGITGYRDDSLETVKRNEIQYGLPLKIVSYKDLYGWTMDDIVKAIGLKNNCTFCGVFRRQALDRGAALLKADKIVTGHNADDIAETVLLNILRGDIARLSRCTFITTGEDGPIPRCKPFKYTYEKEIVMYAYFXAGLLFHRMHLFTKCIPWFCXEFIKDLERMRPRAILDIIKSGENFRISTTTRMPEQGTCERCGYISSQKLCKACVLLDGLNRGLPKLGIGSTKAGARADSDGKQRTKRSERNTSSLQGKHGNFDF

SEQ ID NO: 354328 - protein, 55 aa, Zea mays
  Clone ID: MRT4577_86319C.1.pep
QTQPSSHCRRGEEAIDRIQIGLHRPTSCTTPIPPICSSRDSHLIAYAPIDYNIIL

SEQ ID NO: 354329 - protein, 286 aa, Zea mays
  Clone ID: MRT4577_8631C.1.pep
MASSMAAAATALPLPSGTTQRPSAQGRLLFTAAPARSRCRSLRLRPAGRRSARSSPRATKAVVAALADPLKVMISGAPASGKGTQCELIKTKYQLAHISAGDLLRAEIAAGSENGKRAKEFMEKGQLVPDEIVVNMVKERLRQPDAQENGWLLDGYPRSYSQAMALETLEIRPDTFILLDVPDELLVERVVGRRLDPVTGKIYHLKYSPPENEEIASRLTQRFDDTEEKVKLRLETYYQNIESLLSTYENIIVKVQGDATVDAVFAKIDELLGSILEKKNEMVSST

SEQ ID NO: 354330 - protein, 36 aa, Zea mays
  Clone ID: MRT4577_86320C.1.pep
SNVLGYPDAGGRVVYIFDLVRAMENEMLFRIKNRRH

SEQ ID NO: 354331 - protein, 173 aa, Zea mays
  unsure (1)..(173): unsure at all Xaa locations
  Clone ID: MRT4577_86321C.1.pep
MKDGFFVTKMVATDLPLYLCWNLIDVNFASWNVNLFMSCCSNYTGAAGNGSAFYFPRWSYYSCLXVGSFSHLPGGHHEHAXRRDSLGTNVSSSLITWGITALAFWLDCXEIHIVVHRXCSLRVLKDFFIILDFTQLLYELMLHTGLFSDSAGYRDHYYFFCHALGEPNGVTTV

SEQ ID NO: 354332 - protein, 61 aa, Zea mays
  Clone ID: MRT4577_86322C.1.pep
MFLSILYSYQRSALEDIQKMIRELQLDENRKRELATALHVQFKDWLYASGNIRQLYCLQGD

SEQ ID NO: 354333 - protein, 106 aa, Zea mays
  unsure (1)..(106): unsure at all Xaa locations
  Clone ID: MRT4577_86323C.1.pep
FRLHXPTDEELMVHYLLMKALSMPCPVPIVPEANIYRCNPXHLPAQGVDYEKRVGYLSPPRSAXYPNMVRLNPTTGSWYWNVTSTHRSCSTCAWPLNTAAPRYCDW

SEQ ID NO: 354334 - protein, 74 aa, Zea mays
  unsure (1)..(74): unsure at all Xaa locations
  Clone ID: MRT4577_86324C.1.pep
QPHSWISFYFIYDRNYYEACAFTYRSHYVHKLLSMNKIPYLMIPLNISHYIIIXKLILNLNLLLNLSSFVTTLI

SEQ ID NO: 354335 - protein, 143 aa, Zea mays
  Clone ID: MRT4577_86325C.1.pep
ADSVEGDGDDSLVLTMETFEHLGFLVQFSEGTSLSQAATLFACSDPDMPDVPVPAAQVLDWMSQKIAFSLEYSAERSAAKESNQQTMSDLDVTMAEANTSHPRNSTPSANPAYYRNVTFVEGFSKTSVVKHASDVKGNSIKVH

SEQ ID NO: 354336 - protein, 632 aa, Zea mays
  unsure (1)..(632): unsure at all Xaa locations
  Clone ID: MRT4577_86326C.1.pep
MFLSTLYSYRPNIPPPRSPRGGQHDPPWCQFLLCCQFRRRTRRSSLRPPRPTPRVAAMADEALDQPPDAAPSPSLAPATPPAPATSSPAALLRPRREAFEHGLLPIPKLIFPEGMLAQTLAQLKEKLAASVPDGRVRAAALAEALQIPQEQAALALGTLAAVLPAEDPVLGDGAMDGAAADIRDMLLFLYIQSYKRLVPRSAHKDSPAVADVWPSTSAFDGYLSALSPIQLVRSNSRRFMPSQADEEIHQLSYLQKHMANILTLLADSVEGDGDDSLVLTMETFEHLGFLVQFXQKLNFLNQAAFFACSDPDMPXVPVPAFLQIHLGIFSLLRVAATXLGCKHQAYSCFLALDNVREYVIGNXNHTLXTFLHPVLLNGSSXNPLLDQMXVLTDVKGNSIKVLNCHDSVIYILAPLKYATVYGCSDATVVLGAVGKVVKVEHCERVHIIAAAKRICIANCRECIFYLGVNHQPLVLGDNHKLQVAPFNTCYPQLHEHMMQVGVDPSVNKWDQPFVLGVVDPHDSLSHPAGVADVKAESATCLDPDLFTNFLIPSWFGDEGQEPINCNPFPLPEIYGTSQSKKRSALEDIQKMIRELQLDENRKRELATALHVQFKDWLYASGNIRQLYCLQGD

SEQ ID NO: 354337 - protein, 39 aa, Zea mays
  Clone ID: MRT4577_86327C.1.pep
ESVRCLLGAGDPIILRPQERQPRLLEETYYAVANNRTRR

SEQ ID NO: 354338 - protein, 94 aa, Zea mays
  Clone ID: MRT4577_86328C.1.pep
EPCAPTRIRPGPLVRPLAQVHGQNGQHLDAHRERRQDQAQLPEGQPLLPHIERHIRAVVLSLLVHLWMHASSFILGLNCAVFTNDCNELFSLVP

SEQ ID NO: 354339 - protein, 574 aa, Zea mays
  unsure (1)..(574): unsure at all Xaa locations
  Clone ID: MRT4577_86329C.1.pep
MADEALDQPPDASPSPTPATPPVPATPSPAALLRPRREAFEHGLLPIPKLIFPEGTLAQTLAQLKEKLAASAPDGRVRAAALAEALQIPQEQAALALATLAAVLPAEDPALGDGAVDGSAADIRDMLLFLYIQSYKRLVPPSAHKDSPAVADVWPSTSAFDGYLSALSPIQLVRSNSRRFMPSQADEEIHQLSFLQKHMANILTLLADSVEGEGDDSLVLTMETFEHLGFLVQFSEGTSLSQAATFFANSDPDMPAVPVPAAQVLDWMSQNIAFSLEYSSERSVAKESNQQTMSDLDVTMAEANTSHSRNSTPSANPAYYRNVTFVEGFSKTSVVKHASDVKGNSIKVLNCHDSVIYILAPLKYATVYGCSDATVVLGAVGKVVKVEHCERVHIIAAAKRICIANCRECIFYIGVNHQPLVLGDNHKLQVAPFNTCYPQLHEHMIQVAVDPSVNKWDQPFVLGVVDPHDSLSHPAGVSDVKAESATCLDPDLFTNFLIPSWFGDENQGPTNCNPFPLPEIYGTSQSKKISKRXIRELQLDENRKRELATALHVQFKDWLYASGNIRQLYCLQGD

SEQ ID NO: 354340 - protein, 88 aa, Zea mays
  unsure (1)..(88): unsure at all Xaa locations
  Clone ID: MRT4577_8632C.1.pep
GGIKNVPGNXNALQLQELGGFPVNGPTXKANVFLGFKKLFKAKPQGVVGPRFFFPFKGKEGEVNKFYKIKVWEKPWENFNQFQEFNPF

SEQ ID NO: 354341 - protein, 243 aa, Zea mays
  Clone ID: MRT4577_86330C.1.pep
IGYLEAGNSIKVLNCHDSVIYILAPLKYATVYGCSDATVVLGAVGKVVKVEHCERVHIIAAAKRICIANCRECIFYIGVNHQPLVLGDNHKLQVAPFNTCYPQLHEHMIQVAVDPSVNKWDQPFVLGVVDPHDSLSHPAGVADVKAESATCLDPDLFTSFLIPSWFGDEGQEPINCNPFPLPEIYEAFQSKKRSALEDIQKMIRELQLDENRKRELAAALHAQFKDWLYASGNIRQLYCLQGD

SEQ ID NO: 354342 - protein, 213 aa, Zea mays
  unsure (1)..(213): unsure at all Xaa locations
  Clone ID: MRT4577_86331C.1.pep
MSNYHDDHVEDMEDDYDMDDPAEDMVDAHHERGLRDSDSEDDEYAHSNDKIPDTSAADARKGEDIQGIPWERLAITRENYRQTRLEQYKNYENIPNSGEAAAKECKPTVKGGMYYEFRQNTRSVKSTILHFQLRNLVWATSKHDVYLMSHYSVLHWSALSGVDTELMNVQGHVAPREKHPXSLLEGFSQTQXSTLAVKDNLLVAGGFQGSYLQ

SEQ ID NO: 354343 - protein, 57 aa, Zea mays
  unsure (1)..(57): unsure at all Xaa locations
  Clone ID: MRT4577_86332C.1.pep
RALSSRSGLRSRAXCAXLPLRWWSSCGLGPRGPAVGXLVVVXLRXACVRLRRPRVVA

SEQ ID NO: 354344 - protein, 115 aa, Zea mays
  Clone ID: MRT4577_86333C.1.pep
VGLLVYTLILKLESSAEPGGPSLKVEEQDHHFVGDPSFQGPFVFWGWGQRTCRAKKPLLFRQVHNLVGLLDLQQPLNKVRRHLKKLVPRVHGQGRHQFQVPGFLPRKLGLQDPLN

SEQ ID NO: 354345 - protein, 63 aa, Zea mays
  Clone ID: MRT4577_86334C.1.pep
MQVLAIRPLSYQCVTRKDIHSSGSSAMRGIVTIKGQNVTPLIYSMSPSLVLEGPSDQDFSAAH

SEQ ID NO: 354346 - protein, 250 aa, Zea mays
  Clone ID: MRT4577_86335C.1.pep
MQQGDTSVGVVRDVFNPCLSESGFDKHLTRAIFIDLDSTDVGTGFGLWSSGANNKNTSMVEQMPRYGVFRSTKVAKVMEAIDRGLFVPPGSSLYHDSPLLLGYNATLLAQHMHVACLELLEKNLQHIICIWDAGKEESIEGRTLHWVVAHGHLSAIEALAKENMDQDSMHNEGHSTLHYVAVYEREDVAVAEVLVKHHVNLQIKDKVLNALPNIQPWPPPMLLVILADGVQVRPLPWPIFLLSCRRSLLR

SEQ ID NO: 354347 - protein, 68 aa, Zea mays
  Clone ID: MRT4577_86336C.1.pep
GTVSPCKKGWGPGPVLRPMVWGGTDEGIFFNQKFAPGSRAQDVRSAIQRFRPRNQVRHSDRDPFTVTD

SEQ ID NO: 354348 - protein, 105 aa, Zea mays
  Clone ID: MRT4577_86337C.1.pep
GCFAVVLGLCPWSSLMFCFPSARLGLVRSSPLAVALGPRVLGLLPFARRPSPPVRPSWPRSFPAPSPVCRSLGPCRPSHFRSCPCLSVVPLVLCFRLSSLLIPPL

SEQ ID NO: 354349 - protein, 63 aa, Zea mays
  Clone ID: MRT4577_86338C.1.pep
GPPPLFRAWKTGGEVYSVTPNTKATESDTVFDCLKNAKRLLMVTRRRNKSRLFSHFKNKTGNQ

SEQ ID NO: 354350 - protein, 58 aa, Zea mays
  Clone ID: MRT4577_86339C.1.pep
EIYYGQQEVKGNYVEPFENGPAPSNGLNNSQWPGGIINKQNGLLPTPLNVNGRVWAAP

SEQ ID NO: 354351 - protein, 137 aa, Zea mays
  unsure (1)..(137): unsure at all Xaa locations
  Clone ID: MRT4577_8633C.1.pep
SDALIIPQCSLAPSAVIPQFLPPDTSWGFXHLAVRAXNMQQQALGASVLHHPIAQLQHQSLPHVTIQAITTQQQQQFXLPVLSHLYMVNPAAYLQDLMLASNPLAMANVVADQPHQQLRPILPTLRLLAMVNPAVYL

SEQ ID NO: 354352 - protein, 69 aa, Zea mays
  Clone ID: MRT4577_86340C.1.pep
PAGTYTLATSWGKNTCYAIDTRIITTQKNNTMAQASQLDLLGVVEADIRRPPTGRTGKEYGKQGRRWTP

SEQ ID NO: 354353 - protein, 37 aa, Zea mays
  Clone ID: MRT4577_86341C.1.pep
RSLAEHYGLKPSLGTHKPRECLPLNHIMRNRLKYPLT

SEQ ID NO: 354354 - protein, 75 aa, Zea mays
  Clone ID: MRT4577_86342C.1.pep
HWKAIDNLYERGSFAAPIFLCSLAGCYDDCDVGVANLAVSVLLYISERLWRVVMTVRSTVSCIMYSVDCKVAMSL

SEQ ID NO: 354355 - protein, 75 aa, Zea mays
  Clone ID: MRT4577_86343C.1.pep
FGSGSCISLQMNDIMASSDLSSLGNFAALTGTSWVSQGTVTISSCSSVQQLLPYDCCVAHFLANLPGSSCDLASR

SEQ ID NO: 354356 - protein, 46 aa, Zea mays
  unsure (1)..(46): unsure at all Xaa locations
  Clone ID: MRT4577_86344C.1.pep
LRPKPLPILLWSGFIAGTHPNAHHHPVPTXNPKVDRTLTRSQKRTR

SEQ ID NO: 354357 - protein, 94 aa, Zea mays
  unsure (1)..(94): unsure at all Xaa locations
  Clone ID: MRT4577_86345C.1.pep
MSAGTARGKCIPSRSDQAGSQGGKTCWXIRXLHDVFRAAAQIPRDQTLGDGDDRYNTFFTETGAENEAHRAAFAEPGPPVRYEARXTGTYRQLF

SEQ ID NO: 354358 - protein, 366 aa, Zea mays
  unsure (1)..(366): unsure at all Xaa locations
  Clone ID: MRT4577_86346C.1.pep
PTRPDELKDINDQPHGTWEEVYRNVKRVDRLKNELHERDDKELERTGQPLCIYEPFFGEGTWPFLHQSSLYRGVGLSSKGRRPGADDIDASSRLPLLNNVYYRDILGEFGAFFALANRIDKIHKNSWIGFQSWRATARKVSCSXEAFQRMYGVHLDRDLDSLLHMPNDGDTWSVMQSWVLPTRSFLEFVMFSRMFVDALDAQMYDKHHQTGHCILSLHKDQHCYSRLLELIVNVWAFHSARRMVYVNPATGEMQEQHHLSGRRGQMSVQFFSYATLKSMDEELAEEFDLDHPDRRWLWPQTGEVFWQGLYERERSMRQHDKERRKQQSREKIQRIKSRARQKTLGKYIKPPPDDTVVSNDTTTVDL

SEQ ID NO: 354359 - protein, 329 aa, Zea mays
  Clone ID: MRT4577_86347C.1.pep
PASAHASAHASADPSGEFGAFFALANRIDRIHKNSWIGFQSWRGTARKANLSNNAEFAILEAVQSQKHGDSFYFWVRMDQDPRNHTYKDFWSFCDAINAGNCRLAVLEAFQRMYGVHLDHDLDSLLHMPNDGDTWSVMQSWVLPTRSFLEFVMFSRMFVDALDAQMYDKHHQTGHCILSLHKDRHCYSRVLELIVNVWAFHSARRMVYVNPQTGAMQEQHHLSGRRGQMSVQFFSYTTLKSMDEELAEEFDLDHPDRRWLWPQTGEVFWQGLYERERIMRQQEKERRKQQSREKIQRIKNRARQKTLGKYIKPPPDDTGGSNDTTSVDL

SEQ ID NO: 354360 - protein, 218 aa, Zea mays
  Clone ID: MRT4577_86348C.1.pep
MRKTACVTGGSGYVASALIKMLLEKGYAVKTTVRNPDDREKNSHLNDLQALGRPLEVFRADLDEEGRFDEAVAGCDYAFLVAAPAIPRPDDDPDEKEVVVEAAARGAVNVMRSCVKARTVRRVVLTSSASAVCSRPLQGDGRHVLQEDSWADVDYLTATKPPYWAYAVSMVLMEKEACRFAQEHSIELVTVCPVATVQGAGGQKDPRQRPRLPLLAIR

SEQ ID NO: 354361 - protein, 113 aa, Zea mays
  Clone ID: MRT4577_86349C.1.pep
SRGSKSVRIRPGRSQSLGRCHRALQLCQRLHARVRVALSLQPVQFPVTLLPLQLVAFVTIVLAYKHLNPLLDLSAAITTSNMNSLLLRLLPSIIHPAIQEPISNAQASQRTNK

SEQ ID NO: 354362 - protein, 87 aa, Zea mays
  Clone ID: MRT4577_8634C.1.pep
MTYITNRCVLLSCNQECKQQYSRRQASHQTLLFPEASVPLTPLLRQELVFGGALVTRLPVPHGTPFQCGLCPWQNSTRTRPVPLRTR

SEQ ID NO: 354363 - protein, 114 aa, Zea mays
  Clone ID: MRT4577_86350C.1.pep
CMFGPLDKAAGLECWQAMEHDVLGEHSYMSHIDFLQTSFGSTHAAMAGSRRIDSTQLARNSSYYCETPPEHAALARSWTSIGESALLHLYMTQLRYSLTMNECALYTVPHLCLP

SEQ ID NO: 354364 - protein, 117 aa, Zea mays
  unsure (1)..(117): unsure at all Xaa locations
  Clone ID: MRT4577_86351C.1.pep
MDPTSRPAVVIDNGTGYTKMGFAGNVEPCFITPTAVAVNESFSDQTRATAKGNWLAQHSAGVMADLDFLIGEEALARSRSSSTYSLSYPIRNGQVDNWDTMEKFWQQCIFXNYPQCD

SEQ ID NO: 354365 - protein, 152 aa, Zea mays
  Clone ID: MRT4577_86352C.1.pep
MGKSKKGGSSSHHSGDKRKREPSPPSEDFGDSEYSEEEFSSESEGSPVYTSPPVSSDDSDDSQGIAAEVWTYIRAVECSGLEGSDESEVSSDEENSSDSSEEESGGDGDDGGDGGGDGDGDGGKGDDKGDDDGGDGKSGSGSSKASGKAPLA

SEQ ID NO: 354366 - protein, 119 aa, Zea mays
  unsure (1)..(119): unsure at all Xaa locations
  Clone ID: MRT4577_86353C.1.pep
RPGLLTPQISPVLSLPSPSAATRAHHAVAPPLVNGSVHPVHRPWPPPPSPQPSSTTRAQHVAAPPLVNGSVHPVHQPCPDTLTHTWWEEEXXPPSAGGAGEEXXXLXGXLXSXXLRLGG

SEQ ID NO: 354367 - protein, 104 aa, Zea mays
  Clone ID: MRT4577_86354C.1.pep
LQLNKFEPAQLRLDNLLNKYEVVKNLAKDLPYTKSTRMDNMNQPTNLKRLTRTRNITRGSATTTKVSYSSLRSPQRAGSFPTLILHKPTTKVKAISSQISSKSG

SEQ ID NO: 354368 - protein, 141 aa, Zea mays
  unsure (1)..(141): unsure at all Xaa locations
  Clone ID: MRT4577_86355C.1.pep
PVLWPPELPPLGGLNPLPPPKGPGPXSVRGPTEKGPFPRGPLPAXGRFLKGFGPPGXPPWKPASKGKPINVGGPPPLAPQASPFMFRGSWWGGIVSGRQFPPGNTYPPGSPKGGPKXGPQGPAPSVWEFPPGRGPPGGNIF

SEQ ID NO: 354369 - protein, 68 aa, Zea mays
  Clone ID: MRT4577_86356C.1.pep
NLSLHVMLYHFFLPFKLSPLLNTLLWGDALMEPSCFKLIAAKQWVKQLKIGMQQTKLGSTSQIKIPCT

SEQ ID NO: 354370 - protein, 84 aa, Zea mays
  Clone ID: MRT4577_86357C.1.pep
PPRVRGRVGGAWAMMMGRTCRPWLDLQYQCQLPTTDQPVVYQSIPPYSDYDISEISCVLPFYIIFQPPEKTHGLSIYWKKQQLL

SEQ ID NO: 354371 - protein, 68 aa, Zea mays
  Clone ID: MRT4577_86358C.1.pep
LYEPKPPWFTNVFVQASRATVLYGVIGRVGRVSPRVPCGGNSPFHLFDGLAVQTLKKTNKKKERAAAD

SEQ ID NO: 354372 - protein, 70 aa, Zea mays
  unsure (1)..(70): unsure at all Xaa locations
  Clone ID: MRT4577_86359C.1.pep
RPGSPRIGALYQSVYHTIAVKAALADFSATYVFGVDCSGSXIXFNDIIDNQVATPSGLVDDTVAHVFGLF

SEQ ID NO: 354373 - protein, 182 aa, Zea mays
  Clone ID: MRT4577_8635C.1.pep
MYGQGGSFNPHYRHGPPPPQQQAGVTGSFPQQPVPPPRPPYPQHPGVRPPAGPYQHGVLPHQNQPYPFAQHGRMHQMPMLPPQQRGYGSMPMPGSLPPQQAMHQAPPQYPPLPPPPPRPPGFVHDNVLPPSLPPPPPPSPPPPPPPPPPEAAAAASYSPPHTLVVAQSCGAEAEAKEGASEG

SEQ ID NO: 354374 - protein, 409 aa, Zea mays
  Clone ID: MRT4577_86360C.1.pep
FSCGHDERHSLLATPGETTPAAANPNPVLRPAALSLLVPFYRGNDERQSLPPYGRCPGLLRSLRRRRALPGNNSMALVAPRPGMELANIQHHPNQAPGPGGKQRTSSLEAPIMLLTGHQSAIYCMKFNPAGTVIASGSHDKDIFLWYVHGECKNFMVLRGHKNAILDLQWTTDGTQIISASPDKTVRVWDVETGKQVKKMAEHSSFVNSCCPARKWPPLVVSGSDDGTAKLWDLRQRGAIQTLPDKYQITAVSFSEAADKVFTGGLDNDVKWWDLRKNETTEYLKGHQDMITGMQLSPDGSYLLTNAMDNELKIWDLRPYAPENRNIKTLTGHQHNFEKNLLKCSWSPDNRKVTAGSADRMVYIWDTTSRRILYKLPGHNGSVNETAFHPTEPIIGSCGSDKQIYLGEL

SEQ ID NO: 354375 - protein, 344 aa, Zea mays
  Clone ID: MRT4577_86361C.1.pep
MFSAPGNNSMALVAPRPGMELANIQHHPNQAPGPGGKQRTSSLEAPIMLLTGHQSAIYCMKFNPAGTVIASGSHDKDIFLWYVHGECKNFMVLRGHKNAILDLQWTTDGTQIISASPDKTVRVWDVETGKQVKKMAEHSSFVNSCCPARKWPPLVVSGSDDGTAKLWDLRQRGAIQTLPDKYQITAVSFSEAADKVFTGGLDNDVKWWDLRKNETTEYLKGHQDMITGMQLSPDGSYLLTNAMDNELKIWDLRPYAPENRNIKTLTGHQHNFEKNLLKCSWSPDNRKVTAGSADRMVYIWDTTSRRILYKLPGHNGSVNETAFHPTEPIIGSCGSDKQIYLGEL

SEQ ID NO: 354376 - protein, 222 aa, Zea mays
  unsure (1)..(222): unsure at all Xaa locations
  Clone ID: MRT4577_86362C.1.pep
MFSAPGNNYLALVASRPGMELANFQQQPNQAPGPGGKQRTSSLDAPIMLLTGHQSATYCMKFNPAGTVIASGSHDKDIFLWLAHGECKNFMVLRGHKNAILDLQWTTDGTQIISASPDKTLRVWDVETGKQVKKMAEHSSFVNSCCPARKWPPLVVSGSDDGTAKLWDLRQRGAIQTLPDKYQITAVSFSEAADKVFTGGLDTMSKWWDLRRXEVTEHLKGI

SEQ ID NO: 354377 - protein, 163 aa, Zea mays
  unsure (1)..(163): unsure at all Xaa locations
  Clone ID: MRT4577_86363C.1.pep
MDAIKKXMQMLKLDKENALDRAEQAEADKKAAEDRSKQLEDELVSLQKKLKGTEDELDKYSEALKDAQEKLELAEKKXTDAEADVASLNRRIQLVEEELXDRAQERLATALQKLEEAEKAADESERGMKVIESRAQKDEEKMEIREIQLKEAKHIAENADRKY

SEQ ID NO: 354378 - protein, 105 aa, Zea mays
  unsure (1)..(105): unsure at all Xaa locations
  Clone ID: MRT4577_86364C.1.pep
WVVXSSSQSAHASALQILVSSSVPGXFRALVGWSMRPCVRDPSWSCPGWGPIPHQLSSPESAPLVPVTQPRTLXXHRARRPFPWPRSPEEGDXXAGSLXRTXXGV

SEQ ID NO: 354379 - protein, 69 aa, Zea mays
  Clone ID: MRT4577_86365C.1.pep
HHSREHCNRAWRGYGSALDGLIALGVSPILVRQGRNCFRPMRKHVAWKVPVPQCDHFIRAVWVKLKSVV

SEQ ID NO: 354380 - protein, 68 aa, Zea mays
  Clone ID: MRT4577_86366C.1.pep
MYVSSETPVQTNQIKHSMQRITKALRLHGRQLRHAVLQHMNMNQGIFFWATLISRIQSESPAVIIPHM

SEQ ID NO: 354381 - protein, 128 aa, Zea mays
  unsure (1)..(128): unsure at all Xaa locations
  Clone ID: MRT4577_86367C.1.pep
RTRGARTKQTSRMSTGGKAXASELATKAARKSAPTTGGVKKPHRYRSGTVALPEIRTYHKSTELVIRKLTLQRLVLEIAQDFKTDLRVQSHAALALQEDAEAYIVGVFXDTNLCTIHTXRVTIMPNDI

SEQ ID NO: 354382 - protein, 70 aa, Zea mays
  Clone ID: MRT4577_86368C.1.pep
YIPGEKTDKVLLSCTCLTDELCRTYSDIYLCCSKNFSISIRSKYFLVAMICIIIYHVQQHIYISVIKLFD

SEQ ID NO: 354383 - protein, 94 aa, Zea mays
  unsure (1)..(94): unsure at all Xaa locations
  Clone ID: MRT4577_86369C.1.pep
TTYHTNIKIHPYTQIYQPPNHIHYSSPEHNHNIKLTYNTYTTTNILMHHHRNHYNSNLEPHQHHYRHMPRNQLHHQHQSPQPPPXHCTKKQPTP

SEQ ID NO: 354384 - protein, 82 aa, Zea mays
  Clone ID: MRT4577_8636C.1.pep
TSFSSGNSIGNSEIQNSEFQTLSQRSNVFTLIPNSNPNGPIDKTCITNLYVLCQNMGLGRVPWTRTPENLSLCAAGRQTTFL

SEQ ID NO: 354385 - protein, 84 aa, Zea mays
  unsure (1)..(84): unsure at all Xaa locations
  Clone ID: MRT4577_86370C.1.pep
TGLDQQISYIAYKPILTDLHDLHNDPSTPYIARTVXTNISSXDATIICPSYSPYTXCVFLDTTHFTPDYPFXPATDAFKTKVYH

SEQ ID NO: 354386 - protein, 60 aa, Zea mays
  Clone ID: MRT4577_86371C.1.pep
PPPFRFGNSAIFFVLRFLTKTVCVSFWQLAHPPKIKSPPEAEKYFPATKNALGDVLPKLG

SEQ ID NO: 354387 - protein, 190 aa, Zea mays
  unsure (1)..(190): unsure at all Xaa locations
  Clone ID: MRT4577_86372C.1.pep
PGIPVSWSASSGGGGEGRRLLRALIAEXSCAPLMLRLAWLSAGAFGVSSWAGGPFGAVKLXSVLGGGANAGLGXAVRLLVPXWGEFPVLSCAGFSXLAGVVAVGVXGGPVFPFLPGGVGLPVAFVGGRLPGAPGGSGHLGXVFGLPGGLGGLGLGGLSGGPALGXAPLGRSGSLGGWAAPPFGCWAPFNF

SEQ ID NO: 354388 - protein, 40 aa, Zea mays
  Clone ID: MRT4577_86373C.1.pep
MKKDKRASGTGKKGGKGAKGKGGQKGMRGKAGKKAGKAPR

SEQ ID NO: 354389 - protein, 173 aa, Zea mays
  Clone ID: MRT4577_86374C.1.pep
NSARGSFSIFYAEQPSTLPPPTMQCSHAGELPPATWAHVRADSILRLLASVTLTRHRPVQAVLVDSQPVALAIAAAHRALATAAARESRRPHARSCRNPPCACHCPSSRASPATLLAASLQESPAAVASRRGRTRREKMTCALWGPCVSDRKRVVDVGAFWAIRKYNSWSNCI

SEQ ID NO: 354390 - protein, 65 aa, Zea mays
  Clone ID: MRT4577_86375C.1.pep
GFWDRRAGFPYLVKLGPPFFLKKKPLLFPLSKKKKKKKKKKKKKKKKKKKLKRKKRKKKKKKKSL

SEQ ID NO: 354391 - protein, 127 aa, Zea mays
  unsure (1)..(127): unsure at all Xaa locations
  Clone ID: MRT4577_86376C.1.pep
HLLXSQSRRCVGSNTESEQQHKKEISSYSHMLTVVLFFYAPRSLFLPALRTFDARPTRSPHGGVGLQQPLIPSKXTPALSHMQRLMQDIRLLPLIPLPTHVHVHNYLNHLLLHIQHMQDDTSQDPLF

SEQ ID NO: 354392 - protein, 145 aa, Zea mays
  unsure (1)..(145): unsure at all Xaa locations
  Clone ID: MRT4577_86378C.1.pep
MAPRKGKEKKEEQVISLGPQVAEGENVFGVCHIFASFNDTFVHVTDLSGKETICRVTGGMKVKADRDESSPYAAMLAAQDVAQRCKELGITALHIKLRATGGNRTKTPGPGAQSALRALARSGMKIGRIEDVTPIXPSDSTRMNG

SEQ ID NO: 354393 - protein, 79 aa, Zea mays
  Clone ID: MRT4577_86379C.1.pep
IFLFFFYFERGGFIGIGWLQQTTSTIFERDNNACEAEGDSSTYQDQRGGVLYSFQGLGKKWARTPWTPADTKDLSLSMS

SEQ ID NO: 354394 - protein, 232 aa, Zea mays
  Clone ID: MRT4577_8637C.1.pep
MELELEAAARRFHLWFRGLRSLRRDLASARWSDDPTAQLPAQVGRFVAHLESYCAARAGLDPVWTLSAPWATPAERGAAYWLAGWRPTTLVHLLYTESGRRLEAQLPDLLLGVRSGNLGDLTPAQLAQVDDLQRRTVAEEDALAREMALVQEGHGVVVLPAAPDGSGGLDVAGLVRRARAVLDRADALRLRTVKRAVEILEPAQAAELLVAAADLEIGFREFGLKHGSGRMT

SEQ ID NO: 354395 - protein, 197 aa, Zea mays
  Clone ID: MRT4577_86380C.1.pep
IVKELDVTFLTYLLVITLTLCMLAVLEIKWSGINLEEWWRNEQFWLIGGTSAHLAAVLQGLLKVIAGIEISFTLTSKSGADDENDEYADLYIVKWTSLMIPPIVIMMVNLIAIAVGFSRTIYSEIPQWSKLLGGVFFSFWVLAHLYPFAKGLMGRRGRTPTIVFVWSGLLAITISLLWVAINPPPQNSQIGGSFQFP

SEQ ID NO: 354396 - protein, 114 aa, Zea mays
  Clone ID: MRT4577_86381C.1.pep
IKKPNFLHCCIRNDKSKTISLKFKRHPIHTETATRINRQTPHPDLPSRGDHQIQPRQEMSTSYPLHGGRRPKGLQHISPQAYAQNHARTNEPTREKQGAGKMADLALLLFIRDR

SEQ ID NO: 354397 - protein, 55 aa, Zea mays
  Clone ID: MRT4577_86382C.1.pep
NRMTVLEDLEASGSHSEFCIKADRCIGGSSVCYEAYAFPGRNVAPVRVIQSPAPL

SEQ ID NO: 354398 - protein, 96 aa, Zea mays
  unsure (1)..(96): unsure at all Xaa locations
  Clone ID: MRT4577_86383C.1.pep
VGPSVTSIEALLXSVPETSYGALSYTPRGEICLMGHTMFSEYYKRPTLTEEVFXDIWLHTGDLREWQSNGTMKIMDXRXNIFKLSQGEYVAGDVLA

SEQ ID NO: 354399 - protein, 149 aa, Zea mays
  Clone ID: MRT4577_86384C.1.pep
MPTRLSKTRKHRGHVSAGKGRVGKHRKHPGGRGLAGGQHHHRTNMDKYHPGYFGKVGMRYFHKQQNHFWKPIINLDKLWSLVPQETRDAYVKGEKKDTVPVLDLLPLGYSKVLGKGRLPEIPLVVRARWVSRLAEEKIKQAGGVVELVA

SEQ ID NO: 354400 - protein, 43 aa, Zea mays
  Clone ID: MRT4577_86385C.1.pep
AAPRRQLGNSAPQPATVTKQARLRSIRRLERRRRAQVSDRGAA

SEQ ID NO: 354401 - protein, 59 aa, Zea mays
  Clone ID: MRT4577_86386C.1.pep
LKIQIYPNCLNSRCKTGSLLEQDHITTKPEILELASKVLIWLKILMWSSGAKMENLGLN

SEQ ID NO: 354402 - protein, 578 aa, Zea mays
  Clone ID: MRT4577_86387C.1.pep
MATPPPPLPPMPPRHVSCGSLLQELQELWGEIGQDEMKRDRMILQLEEDCLNVYKQKVNQTRKQKADLLQELSLGEADIDKILSALGERETFPRSEKLGGTLMEQLAKIEPVLEDLRRRRDERVNEFKAIQSKIVCLQAEISGAIDHGDPAAPVVDENDLSLKRSGELKEHLNDLQTEKNGRLQKIDIQTNSIHEMCNIMSIDLKMALKDVHPSYAELGRSKPMSISNSSLDRLSEKVHALNHEKKQRLRKLQDLGSTLIELWNLMDTPTDEQRFFDHVTSLIKVSPTTAMPQGCLAHEIIEKVETEVKRLTKLKASKMKELVFKKLTDLEEIYRSVHMDIDSDSERQTLNDLIDSGRADLSELLARMDRRIAEAKEHALSRKDILEKVEKWTLASEEETWLDEYERDQNRYNAVRGAHINLKRAEKARILVSKLPSLLENLTAKIKAWEKEMGIPFIFNKVRLLDCLDEYTCTRQQKEEEKRRSRELKKLQEQFATEQGAKFGTKPSPIRPLSSRKPLGQSSNANIIGGTPTSRRVSTPMSRKGRPSSGRVQEAVKTAVAPANYVALPKDCSDISTL

SEQ ID NO: 354403 - protein, 113 aa, Zea mays
  unsure (1)..(113): unsure at all Xaa locations
  Clone ID: MRT4577_86388C.1.pep
PNQVEFLEEVIREGFAPPGVKGIVMWGAWPPKGCXVMCLPDNNFKNLPQGALVDRFLDEWRKVPKKPMPATNGVFEAEFFPGGYRVPVKHGSLKEPIVQRVALAPKSGAPIKA

SEQ ID NO: 354404 - protein, 153 aa, Zea mays
  Clone ID: MRT4577_86389C.1.pep
MGDWVPRGRPGWATNRRRIGSLRLATVQLAITREGPPRPSASGRRRFAAVRASAETMATEKLGIKVERNPPESRLSELGVRQWPKWGCEKSKFPWTYSAKETCYLLQGKVKVYPEGHGEEFVEIGAGDLVVFPKGMSCTWDVAEAVDKHYNFE

SEQ ID NO: 354405 - protein, 108 aa, Zea mays
  Clone ID: MRT4577_8638C.1.pep
AAFFFFFLRRDNTYICCDLIAFGKHKPRIAQSPCAIFPASLGSRKNTHVDLGLQGNERMKQARPKTGRRDEVHGDTAVSGKKQQISHGCCLADWRRRRRSPGRPRGTQ

SEQ ID NO: 354406 - protein, 94 aa, Zea mays
  Clone ID: MRT4577_86390C.1.pep
RQQKTLPPQAQRPPPVGLRLLPHCLGTKYLAYLNGSKFSTSVHLFYGNREGPLKKWELKIGSASSTEPFESHFKWESIFLYLIKKANCFTKQSF

SEQ ID NO: 354407 - protein, 417 aa, Zea mays
  Clone ID: MRT4577_86391C.1.pep
LSQRILPSHVWSIAMEIGLSGGDYVSLGWHEKEDLKCAVSCLRDNKQVSTIGLWGRSMGAVTCLLYGAEDPSIGGMILDSAFTNLYDLMMELVDVYKIRVPKFTVKMAVQYMRRIIQKRAKFDIMDLNVLRLAPKMFIPVLFGHGLNDMFIQPHHCDRIHQAYGGDKNIIKFDGDHNSPRPQSYYDSVSIFFYKSLHPPLLPAARSKLHMGAFKVGNITNENFFFEIINGLRPANTAGCSSSTDAPNIPHDGTSVIELLSDSMNQLSIKNENHLLQDFLLDENHSLPEIDSDSVGSRLQDKRSRRNEESFSFTSSNRESWGRCSSLGAASDESFSGDNNDKQNLTVKALATPVRQNQRQSQRKPIEKAKQKKIQALWKKIKREKVEMGDSLSSRLKMCLGQSPQHKRNRSSGTITTS

SEQ ID NO: 354408 - protein, 102 aa, Zea mays
  Clone ID: MRT4577_86392C.1.pep
PLWAASLVPCDPTFIFRCSWSIDMNSHDLDFCHQPSSPDSTSALHKPRNMLHGHTHVPVSPHNSIQDITLVDNHSSQEHISTLCLQLLGIPAIISFCSVAVW

SEQ ID NO: 354409 - protein, 292 aa, Zea mays
  Clone ID: MRT4577_86393C.1.pep
MEPEDPSIGGMILDSAFTNLYDLMMELVDVYKIRVPKFTGDKNIIKFDGDHNSPRPQSYYDSVSIFFYKSLHPPLLPAARSKLHMGAFKVGNITNENFFFEIINGLRPANTAGCSSSTDAPNIPHDGTSVIELLSDSMNQLSIKNENHLLQDFLLDENHSLPEIDSDSVGSRLQDKRSRRNEESFSFTSSNRESWGRCSSLGAASDESFSGDNNDKQNLTVKALATPVRQNQRQSQRKPIEKAKQKKIQALWKKIKREKVEMGDSLSSRLKMCLGQSPQPKRNRSSGTIPTS

SEQ ID NO: 354410 - protein, 484 aa, Zea mays
  Clone ID: MRT4577_86394C.1.pep
MIEQFVNFVIRPPRSEYNPDQYLWEKEFILAGRKYKRLDLELTNARGYILKCSHYVPAFIPENTALPCVVYCHGNSGCRADANEAAVILLPSNITVFTLDFSGSGLSGGDYVSLGWHEKEDLKCAVSCLRDNKQVSTIGLWGRSMGAVTCLLYGAEDPSIGGMILDSAFTNLYDLMMELVDVYKIRVPKFTVKMAVQYMRRIIQKRAKFDIMDLNVLRLAPKMFIPVLFGHGLNDMFIQPHHCDRIHQAYGGDKNIIKFDGDHNSPRPQSYYDSVSIFFYKSLHPPLLPAARSKLHMGAFKVGNITNENFFFEIINGLRPANTAGCSSSTDAPNIPHDGTSVIELLSDSMNQLSIKNENHLDFLLDENHSLPEIDSDSVGSRLQDKRSRRNEESFSFTSSNRESWGRCSSLGAASDESFSGDNNDKQNLTVKALATPVRQNQRQSQRKPIEKAKQKKIQALWKMCLGQSPQHKRNRSSGTITTS

SEQ ID NO: 354411 - protein, 155 aa, Zea mays
  Clone ID: MRT4577_86395C.1.pep
SDDMFIQPHHCDRIHQAYGGDKNIIKFDGDHNSPRPQSYYDSVSIFFYKSLHPPLLPAARSKLHTGAFKVGNITNENFFFEIINGLRPANTAGCSSSTDAPNIPHDGTSVIELLSDSMNQLSIKNENHLLQDFLLDENHSLPEIDSDSAWITIAG

SEQ ID NO: 354412 - protein, 206 aa, Zea mays
  unsure (1)..(206): unsure at all Xaa locations
  Clone ID: MRT4577_86396C.1.pep
MGAFKVGNITNENFFFEIINGLRPANTAGCSSSTDAPNIPHDGTSVIELLSDSMNQLSIKNENHLDFLLDENHSLPEIDSDSVGSRLQDKRSRRNEESFSFTSSNRESWGRCSSLGAASDESFSGDNNDKQNLTVKALATPVRQNQRQSQRKPIEKAKQKKIQAXGKKIKREKVEMGDSLSSRLKMCLGQYSKHKRNRSSGTITTS

SEQ ID NO: 354413 - protein, 149 aa, Zea mays
  Clone ID: MRT4577_86397C.1.pep
LKKKKKKKNKKKKKKKKKKKKKKKKKKKKKFKKKKKKKKGVFPLAGPPLGGIFAFFPPPGGLWGFLLGAPFPLLGGGFPFPWPAFFQTLGLGNPWVSPFYSLCSPSPFSPLGFYRKGPPRCPFPTFAHLNWQLAPPFTGPLTPGGGGVP

SEQ ID NO: 354414 - protein, 97 aa, Zea mays
  Clone ID: MRT4577_86398C.1.pep
CSCSRLCSWPWWCCGVQCRVCRGSILAHSSPRSRVRPAATSLYSSRRCSSSPRHLRARLIWRQTSSCHTYSSLLAGRAPHSVVLSPPVTIAHPHQDI

SEQ ID NO: 354415 - protein, 44 aa, Zea mays
  Clone ID: MRT4577_86399C.1.pep
KGDPCPEKKKKKKKKKKKKKKKKKKKKKKKKKKKGRRSRIELDR

SEQ ID NO: 354416 - protein, 71 aa, Zea mays
  Clone ID: MRT4577_8639C.1.pep
DPSWDSFKNAVSCSHGQINVTQMDSYVPRYGTVVQTLVICIARLSARFPPFIVSAWGLRSRGAGARYGITG

SEQ ID NO: 354417 - protein, 78 aa, Zea mays
  Clone ID: MRT4577_863C.1.pep
SPPRLDLGGVGLFAPSPPRVEGPGQGNNPFGCSGINGGTRAYHSALPILKPFWEGRMQVSLLLPFAYFATAPQAGSSP

SEQ ID NO: 354418 - protein, 71 aa, Zea mays
  Clone ID: MRT4577_86400C.1.pep
YFKPYYFQNSKKNTWRYLNWLKPPLAKMEPHHLKRHQINPFFLKPFHPHFRSQKYLEGPLLPQIFGPRLKF

SEQ ID NO: 354419 - protein, 85 aa, Zea mays
  Clone ID: MRT4577_86401C.1.pep
HFNLREDVMERKKESPLANTMIMTDLDICGPKRIPKDSDYDSMIIHITIKSHTDSIYIHTGSLSKKFESHLHVFNSQGTTRRNKE

SEQ ID NO: 354420 - protein, 177 aa, Zea mays
  unsure (1)..(177): unsure at all Xaa locations
  Clone ID: MRT4577_86402C.1.pep
GPPGGPPPGGRVPGRGAPRPPPPSPPXGGWSPRGNPPPPPPPEGRPQTLPFWGGVGPPPXGAPPPXKKGPPXGGGAPXGGGKFSPGGGKKGPPNPXPGPGGAPPXGPTPGXGGGPPPTTGGVGPGFAPPRDPPRKKVPXRGPLGGVSSGPPPPVFGGDFPLFAGGLLFRLKGACAPS

SEQ ID NO: 354421 - protein, 122 aa, Zea mays
  Clone ID: MRT4577_86403C.1.pep
VPSVSANKLESGNCMDLKKKKKKKKKKKKKKKKKKKKKKKKKKKKKKKKKKEKKKKKGGPWGPIFCPFWGGLLAPWGKKGKKWFPGENGFPFKFQKNLRPGGIKGKPGGPNGGGYLNLLGWG

SEQ ID NO: 354422 - protein, 130 aa, Zea mays
  Clone ID: MRT4577_86404C.1.pep
FLYSVELVKRIFGKAKVRSLGQPYYLEIRAEHQWWTAGGVLQARQSGGFSCDTGDAARDVSARDSGCAMGSCGVEILHRLVRASPDVDKHAVHFSRRVSQFLTERKEKRINGHRFLMVILEAGTKARLVV

SEQ ID NO: 354423 - protein, 202 aa, Zea mays
  unsure (1)..(202): unsure at all Xaa locations
  Clone ID: MRT4577_86405C.1.pep
LGTSPAGSRFLLSSTSSPALCCRRLPRTPDRCYRQIPNXPLPLARXYCRYAPDPPIXRYYDVGFYKKPVDEFPYCVFLVSXHIENVSSDDLDAVRIVCCKYXMTMSEXLCHYSLPIPVHPXFHDLLIREMLSCVVTDRLQTVLXSTCVKISVTCXAMLDIDAXLLSVRCEDNCASLACSLLRMAKLQLPAQLKIIENRKWMF

SEQ ID NO: 354424 - protein, 220 aa, Zea mays
  Clone ID: MRT4577_86406C.1.pep
KEFPKRDLDEEAHIFSGMMIALSGLISSSHGYFKEQIMKHGGKVKNSVLGATCVVASPAERDKGGSGGFAEALERGTPVVSENWIIDSIEKKEAHPFAAYDIVTDVVLEGRGLPLGQLDPSEEAIETLAAEVKLAGKRSVHKDSKLDKDGGCVFEKDGIIYNCAFAVCDLGCQMNELCIMQLVMVPGNRLHLFYKKGPIGHDQMAEERVEDFGSRVNDAI

SEQ ID NO: 354425 - protein, 152 aa, Zea mays
  unsure (1)..(152): unsure at all Xaa locations
  Clone ID: MRT4577_86407C.1.pep
MVRCYQGQTEPSARLTMAAAALILIILAEFTDTTGRADRLVKATVQVQRDFLGFGTLLAPWSGGMAVSAVQETKDGKAKTDDGMTEKNGLEFSIWKGIRFKEEEVGYGNLLRTDEVMELLVKEGGXYMSTLMTLFIGSFTVCDLLPSVGAGV

SEQ ID NO: 354426 - protein, 60 aa, Zea mays
  Clone ID: MRT4577_86408C.1.pep
ITTPIPPRPGPGGTPTLPSKRTIQRPGRGVTGAVLLVLSLFLLLRITIIIISSLVQSLSY

SEQ ID NO: 354427 - protein, 36 aa, Zea mays
  Clone ID: MRT4577_86409C.1.pep
TSKTNSQQLKLAERFRMGQVMNQLIVSYILKVAISC

SEQ ID NO: 354428 - protein, 99 aa, Zea mays
  Clone ID: MRT4577_8640C.1.pep
ISTNNGGRILVLLALLAHLVSATNAFIIPQCSLALSAIIPQYLPPVTSMVLEHSFVQAYRLQLALDLSVLQQPIAQLQQQFLAHLNLQTILSQQQQQFS

SEQ ID NO: 354429 - protein, 372 aa, Zea mays
  unsure (1)..(372): unsure at all Xaa locations
  Clone ID: MRT4577_86410C.1.pep
MVHETRSRVHAAAQEEGKLASKKQKPDNETKERGQNVPSKNKKSADNEGKDGEPEAPTKSKKLKAEESEPNGREAAAREFAEFCKAIGERLSLEDMRKILQANEQDASGSEDAVVPRCEDMMFYGPLEKCPVCEGQLEFKEWKYECTGNYSEWARCTFSTNDPSRRSGSIEVPDDIKDDFIRKWLKQQEGKEFPKRDLDEEAHIFSGMMIALSGRMSRSHGYFKEQIMKHGGKVKNSVLGATCVVASPAERDKGGSGGFAEALXALPDILLFLTCSLIXCHKNRXMVELNLTTNTAXERGTPVVSENWIIDSIEKKEAQPFAAYDIVTDVVLEGRGLPLGQLDPSEEAIETLAAEVFCLDLVHFACASHKFI

SEQ ID NO: 354430 - protein, 135 aa, Zea mays
  unsure (1)..(135): unsure at all Xaa locations
  Clone ID: MRT4577_86411C.1.pep
GSNGIFYNQDWQSMPGVTPGPYGGIQVWHMPAQPRIFGYDSVCRFGAVALGHPWGNAPGXSANRLALKSXVQARXEGRSIACEGSAVXELSVKCSPDLAAACPICKEIGLYGYKVMDATSISVNCHNSSLEHKDH

SEQ ID NO: 354431 - protein, 100 aa, Zea mays
  Clone ID: MRT4577_86412C.1.pep
HTTVSVVNVRLGGAFQSHVVLRHCCRGVGALACCLGASMQKQGYHQRGPRWCASRVFTGARCGAPASIFGVVCSQSRRQRWHVWGGKGVSTGSTALGKEI

SEQ ID NO: 354432 - protein, 40 aa, Zea mays
  Clone ID: MRT4577_86413C.1.pep
ASDQASDFEHSGSHQVNLPMKSLSIWVPGNELFMRFMTLL

SEQ ID NO: 354433 - protein, 117 aa, Zea mays
  Clone ID: MRT4577_86414C.1.pep
PGQAEGSCSCSCWSPETAPQGGGFCSLGAQKGHQVSPCAPNGGGQGPGPRESACARGGVFFRAGTWQYNTGFFCSVRYGYWGLSVCVCVCFVRNPVRSKQLLSRERVRCGLQITWAK

SEQ ID NO: 354434 - protein, 71 aa, Zea mays
  Clone ID: MRT4577_86415C.1.pep
GYYLVNEPVVHFVWQSNQESSVLVMSRAFDDYYIEDCGVILALEVTQRRIDNSDQFVILTTVRVAFMPACL

SEQ ID NO: 354435 - protein, 74 aa, Zea mays
  Clone ID: MRT4577_86416C.1.pep
MVKVLMGGKAPILLQGRFPGRKAIIVRVFQEGTRDRPYWHFLFSKLSQFPKKVFPKGSPQKTAKKSRVKCFIKL

SEQ ID NO: 354436 - protein, 62 aa, Zea mays
  Clone ID: MRT4577_86417C.1.pep
PTVQYCLTLFCSAVDHFPMLSSYASFPDLTTACWKTQFNLRPTHHWHYLYPVSIYLTIPWAY

SEQ ID NO: 354437 - protein, 37 aa, Zea mays
  Clone ID: MRT4577_86418C.1.pep
TTLSQQSISQPTIALISSGNSDLLLCLSNFSTVFPNK

SEQ ID NO: 354438 - protein, 46 aa, Zea mays
  Clone ID: MRT4577_86419C.1.pep
TQSIDRKLSNSYTTKSLPFPNLFPLFIPTHSLIFKLLYKPTLFFEP

SEQ ID NO: 354439 - protein, 132 aa, Zea mays
  Clone ID: MRT4577_8641C.1.pep
PGPANAIKAGVSRCGKPWRLARFTKRPRYFFSPRGSRSLGPPWRPRHPPWLPRPPQQPRAIRPGVRRRRAWPRLLPTWRASGNGRPWRTLPRRRFPGPKGRPPPRRPRTPSWLTKPSLFPWCVVPLLVCCCC

SEQ ID NO: 354440 - protein, 389 aa, Zea mays
  Clone ID: MRT4577_86420C.1.pep
MFSFKSRQQSQGFMGESDVKEQQLNRLQEELRKEKEKARALDEIQDLKGELEAARDSEKKMLLSLQAQTKQLEQTKVSLEEAKIEIASLRDSRQPFKNFRRRGLMSFSFADPGEAETWSLQRELRLAVESEEKCNKAMDDLAIALNEQTTEAREANVKLSLAQAELNNARTQVETLKASLESAEGKLQLALEEADRLKVESDELAAASKEKERGLVDCIKMFEEDLSKGQEENDKLIELQRVTRDENSRLREMLKHAVGEANVARESLEIARVENSRLNEEMFKKESTLQSINQEYESLKISEAAAQSSIKELKDMIDAMFSSESTKTSAEASPREAKGSKMKETSVAADYVYSDVERSTRLDDIKNPGKQKKKTILRKFGEIMKKRNS

SEQ ID NO: 354441 - protein, 98 aa, Zea mays
  Clone ID: MRT4577_86421C.1.pep
VSTSFRVVGPGLLPPPVGRRPSPPLVITPPAITPPTSAMKTETALLFTTIPMLRLNGMNILILSCQCVSKTRSPVRSSDRAGSKRCGWHPGTGKRSTA

SEQ ID NO: 354442 - protein, 43 aa, Zea mays
  unsure (1)..(43): unsure at all Xaa locations
  Clone ID: MRT4577_86422C.1.pep
MFGXXPXKXDNTKYYEILGVPKSASQDDLKKAYRKXAIKXHPD

SEQ ID NO: 354443 - protein, 56 aa, Zea mays
  Clone ID: MRT4577_86423C.1.pep
TKIHYPQNNNISHPHILIDEKNHLNLHSFLSLHPSLSTNYPIHFTNFTQTTNQFNL

SEQ ID NO: 354444 - protein, 52 aa, Zea mays
  Clone ID: MRT4577_86424C.1.pep
LQQRQQLLIPLAVANPLVAAFLQQHQLLPYNQFSLMNPALSWQQPIVGGAVV

SEQ ID NO: 354445 - protein, 70 aa, Zea mays
  Clone ID: MRT4577_86425C.1.pep
QHQMTTRLHANRTATSAAILIMPLNPLQVPLDDTSDSATPLTARHLTVHRPVPQISTAPEYSIAPASPLC

SEQ ID NO: 354446 - protein, 44 aa, Zea mays
  Clone ID: MRT4577_86426C.1.pep
SISYILWSVKLRTSYAFITHMKYVFMLEVHNHSSFVCCSRPKLF

SEQ ID NO: 354447 - protein, 97 aa, Zea mays
  Clone ID: MRT4577_86427C.1.pep
HTVVFAWHAGDVICAKKKKKKKKKKKKKKKKKKKKKKKKKKKKKKKKKKKKKNKKKKKKKLTPKKKKIKGGGFHPRGGSFPYTPSPRGVFCVLNPPF

SEQ ID NO: 354448 - protein, 68 aa, Zea mays
  unsure (1)..(68): unsure at all Xaa locations
  Clone ID: MRT4577_86428C.1.pep
HMLXGTXAAATRRFHKTATATRSSLFPTTKQQRTRPCLAQGVRSTPRTSWRRASTGRGQDSPYRCSST

SEQ ID NO: 354449 - protein, 122 aa, Zea mays
  unsure (1)..(122): unsure at all Xaa locations
  Clone ID: MRT4577_86429C.1.pep
MASKTLSLLALLALFVSATNAFIIPQCSLAPSAIIPQLLGGGTSMGFEHPAVQAYWLHQALAAGVLEQPIAXFQHHSLAHXTIXSIATHLLHALCLLAVAXPFRLLASPLLASNPLALAFVA

SEQ ID NO: 354450 - protein, 107 aa, Zea mays
  unsure (1)..(107): unsure at all Xaa locations
  Clone ID: MRT4577_8642C.1.pep
MRGLYKGSRGDIPDXGIGRRDRYFVDPSDGSGTKDNKYTVDQAEAPEVNGLHELKKTTDKSNIRHEAIWESATTLEQIPLGNEGASESGQXCVDALRKGSEYRLTGS

SEQ ID NO: 354451 - protein, 62 aa, Zea mays
  unsure (1)..(62): unsure at all Xaa locations
  Clone ID: MRT4577_86430C.1.pep
MRTHALNELLKADPKDEDLXTLWAIIRCFTCPDRYLQKVMRLALGGMDTDQDDLTRVVSTRA

SEQ ID NO: 354452 - protein, 187 aa, Zea mays
  unsure (1)..(187): unsure at all Xaa locations
  Clone ID: MRT4577_86431C.1.pep
KPDGKNRPTGQKRKGKKQKKRGVKPRQMEGSPREKPPHPARQKXPPKGGGQLPRRXGQNFGKGKGGGPFQKXPQRGKRGSSPKRXLGNPKGFPKKTFKNPGQANGKPPKKGPNGPPKKKAHPPPGEGKPKKRPKGGSAKGFFFFLFFFFFFFFFFFFFFFFFFFFSFFFFFFKPAHGRTDERAIAST

SEQ ID NO: 354453 - protein, 100 aa, Zea mays
  Clone ID: MRT4577_86432C.1.pep
IYLFGVRRKNDGPLYFFVSLAAYALRRGGVPPPAWHPKPNANSSLRQIAHRRNLFTYTCASPHKLHMTPTADRSLFFVSTTPARFEQKNQFPCWHLWCTW

SEQ ID NO: 354454 - protein, 38 aa, Zea mays
  Clone ID: MRT4577_86433C.1.pep
ATYTCEGRILAVTLGCEFVLFVRPFNYPQLWHFESGFK

SEQ ID NO: 354455 - protein, 93 aa, Zea mays
  Clone ID: MRT4577_86434C.1.pep
GIIFAPSDKDGQTKEANNDQQEEGSSLMRTLVAKRVKSINCGASASQSESEKSLAEENEEHSTRFHIMERWKVNLTRVAILGRMAGDCPASPM

SEQ ID NO: 354456 - protein, 140 aa, Zea mays
  unsure (1)..(140): unsure at all Xaa locations
  Clone ID: MRT4577_86435C.1.pep
RTTGADFFFLKPGMPGSNPGTGMEMGITPIGTSGMGRELVGGSNIIGVDLRVREDLAVLNGAQKCAWXIVIPIGEAEAYVLSAMCGMDRQLGTGRALLIILQVWFRXFIVVCGDELLQKSCGLGSDMLMMVATTVCENMI

SEQ ID NO: 354457 - protein, 40 aa, Zea mays
  Clone ID: MRT4577_86436C.1.pep
KHKVAVVGPTRSECGYLGHDLQRRRRRLSCQQRFRLFLGK

SEQ ID NO: 354458 - protein, 128 aa, Zea mays
  Clone ID: MRT4577_86437C.1.pep
ATPTFQPPSIKALLSCGLHHPCAPGTVRPLLCASLKPGAECQGQQPAQRLCSPGPSPGPAVGSGEEPRRGLAARSHEHMQGRVSLLSSCPWEDPESAGHFSPTLGQQPPGHALTPLHPNRLYPAHPLG

SEQ ID NO: 354459 - protein, 518 aa, Zea mays
  Clone ID: MRT4577_86438C.1.pep
MDAPGASTTTLLLYGALLLVGFLFIAVARRSNAGLPPGPTGLPLLGSLPSLDPQLHVYFARLAARYGPIFSIRLGSKLGVVVTSPELAREVLREQDLVFSGRDVPDAARSISYGGGQNIVWNPVGPTWRLLRRVCVREMLGPAGLDNVQGLRAREFGATLAHLHAQARAAAPVDVGAQMFLTVMNVITGTLWGGNVGSEGERVALGREFRHLVAEITDMLGAPNVSDFFPALARFDLQGIRKKSDALKERFNQMFARIIEQRVDAERAGGEPPAPDFLEYMLKLEKEGGDGKASFTMTNVKALLMDMVVGGTETTSNTVEWAMAELMQKPELLAKVRQELDAVVGRDAVVEESHLPQLPYLHAVVKETLRLHPALPLMVPHCPSADATVGGYRVPAGCRVFVNVWAIMRDPAVWKDPRDFVPERFLDGAGEGRRWDFTGSEMEYLPFGSGRRICAGVAMAQRMTAYSLAMLLQAFDWELPAGARLELDEKFAIVMKKATPLVAVPTPRLSKPELYYSA

SEQ ID NO: 354460 - protein, 220 aa, Zea mays
  Clone ID: MRT4577_86439C.1.pep
MNLFAGVGGGAADGGGTGTALLELTPHKMAVCHLVQVFAPAAQAGGDVVPPFPFESLTHHNRLGLFLFTLTRSCDDFLEPPLEEFLKQLRAVDDLTNGWFCEQLTSALSALNSPDDLFNFFDKLRGVFTAPEGASAEDVFLDPNSQLGVFLRCCILAFNSMTFEGVCHLLADLVMYCNSADASYDLAEHEDFNSEMGNLMDADIGSHAGIFDKFHQGYAS

SEQ ID NO: 354461 - protein, 41 aa, Zea mays
  Clone ID: MRT4577_8643C.1.pep
GIQFQTIRISNRGHGISLSTGAEIPGLPTGPCGPRTPIRVS

SEQ ID NO: 354462 - protein, 84 aa, Zea mays
  unsure (1)..(84): unsure at all Xaa locations
  Clone ID: MRT4577_86440C.1.pep
VFRGGPSEEGTRGLKEMFKSLVSAKRGPFPVVXFRKGVAPRGPQLTGPEVHQLMESPDPVGSGPLVFGGFLPGAMPLDRGGVFF

SEQ ID NO: 354463 - protein, 81 aa, Zea mays
  Clone ID: MRT4577_86441C.1.pep
FSTLKFTSAVQLVANPNGGDHRMEGKAAVVVGGDGVDVRLDHGDPVPHPNSELLEAHVRRSPRSHTPYWGSANRGNRPVRI

SEQ ID NO: 354464 - protein, 107 aa, Zea mays
  Clone ID: MRT4577_86442C.1.pep
RPSFQSFGDFERFGGSSDRGGGFRDSGSRYHGGSGGFRRSSSDFGRPSFSRSDRFGDFGDSDFSRRGNADFGRSRSSDDSGSSRYPRGYGGSGTSDSGNFGGFKGSK

SEQ ID NO: 354465 - protein, 98 aa, Zea mays
  Clone ID: MRT4577_86443C.1.pep
SKEGPLLIQKVPHMRNTAEKTGLDQPTSVNSTLPAEDIMRLTTRITTDRTTDRASHKKKHHWLAHNLLPKAIIKSSWATQRLVHMCANILHQTYPHIS

SEQ ID NO: 354466 - protein, 36 aa, Zea mays
  Clone ID: MRT4577_86444C.1.pep
LGMQIGLMESVGYPFAFILLPKYELHTVHQRSNGGQ

SEQ ID NO: 354467 - protein, 102 aa, Zea mays
  Clone ID: MRT4577_86445C.1.pep
LFGLPGIQQPLQKIESISTAYKPRGEPACEHFIEFNRKIPGTHSAYLSTLARKRLGPFYPTLASRPKKLLIEGVHALHLLLLSHLLAGGGKPSSRRLYTTFA

SEQ ID NO: 354468 - protein, 70 aa, Zea mays
  unsure (1)..(70): unsure at all Xaa locations
  Clone ID: MRT4577_86446C.1.pep
MVKAVAVLGSSDGVKAPIFFTQXGKGPYNCNRRGFCLKPCLHWFHGPSLGDPTHGFMVTGPHFHSANQGP

SEQ ID NO: 354469 - protein, 108 aa, Zea mays
  Clone ID: MRT4577_86447C.1.pep
SVPWPSTGSSSFKAAGAPLSMRVPQANTWLSSCPMAWARNSLRPRPCSSPGRGCSRRPLLVAGRKSRITAASSFSLPDSPPVAVMVTCNGGFPPASRRRPPQGLPSRP

SEQ ID NO: 354470 - protein, 143 aa, Zea mays
  unsure (1)..(143): unsure at all Xaa locations
  Clone ID: MRT4577_86448C.1.pep
AWAGPTPRARAYSHPGANTWVGTPTNAAAGNQAPSRWPSGPGLEPIVRMEDLRASTEIKKVPSKPTSKMLLAAIDESHRGTYDFIYPPIDLKTFPGKRGEEIHQGEGGXLAYAGIQGKSVLVAHCQNSSLMNEDKRCRPILFH

SEQ ID NO: 354471 - protein, 106 aa, Zea mays
  Clone ID: MRT4577_86449C.1.pep
RNHKPGVLLHNGPMKKTYETRVGLPKTHWALAYKLRQYGCNMVFRPGTGLTKNEPVPIFEGFFFQQGKKDNSFMLDRGQKPTSGNNRDFMADALHQRGGRGGPEAK

SEQ ID NO: 354472 - protein, 43 aa, Zea mays
  Clone ID: MRT4577_8644C.1.pep
SPCLSASAPYRTSFSAIFSSNQFMLNLSISCHQTTVIICSICS

SEQ ID NO: 354473 - protein, 58 aa, Zea mays
  Clone ID: MRT4577_86450C.1.pep
IFVVRRCYESLIHVDMRIQWVLNAPLRNVNDRLILVNSIFSLHVHFLWQFRLIMFVHN

SEQ ID NO: 354474 - protein, 58 aa, Zea mays
  Clone ID: MRT4577_86451C.1.pep
SYPKEAFFVFSGGGLINADMYELLYVSAINQSFVVVVVVVGMHVGAHAHVFQCVSLLC

SEQ ID NO: 354475 - protein, 97 aa, Zea mays
  Clone ID: MRT4577_86452C.1.pep
GRKFPTAAQGPLQRALKKPMPLALLRNPCLQHMTPYFLIKPGGFPQPRLKNHKHKEFPGLICCIGKKTLCPKREKTVYFHIFLTNRNPLKTKPPGAA

SEQ ID NO: 354476 - protein, 513 aa, Zea mays
  Clone ID: MRT4577_86453C.1.pep
LPRREGSGGDASDACGSASASRSSSARRSKGVRLRLRLRRRRQEPGPAATPGGEGQGGAGVQVQDDLALPLGMSFAAVLAQVVNTKNRSGERLQPALLSKICTSAVKESLRNIYGNKLDSFMRNFEKSFSSTLTTLHLVNEMPVYGQGPVPQCSSKHEDSEASSKLSTGGTQNLTREIKQERLNSVESQLVLYAGGYQQMTRRAHSLSSPEADQRILNAFERSLKEQTRSNELKEFEISLSMRKLKLKQSQLELNSYSHMLDKIKLSLGFQKASFQVEKFKTQMQDTRHAQIMRTLIDFLVSAVIIMSVCFGYGTYTYSYQRITDITAACSATSKGSKSWWMPNSVSNFNTGLLFIRCHVIAATRMFFGIVMILAVVWLAFQRSAVSVSSMPVTFNIILLGVICGYAGRFCTNTLGGDGNMWLICWEVLCSVHLIGNCYPSVLYRVLHGPISVSHSKESVWFPYWIRRWMFYAVLGFFIPALNGLLPFASLSDWNNHFTKELKSIFIDERIEA

SEQ ID NO: 354477 - protein, 35 aa, Zea mays
  Clone ID: MRT4577_86454C.1.pep
HPYLVWIRAAGSCRQGQPIWFIVLYAIRHSERVSA

SEQ ID NO: 354478 - protein, 33 aa, Zea mays
  Clone ID: MRT4577_86455C.1.pep
PRVRTNSVMFLTVLINLTECGLQPYVVKISPRR

SEQ ID NO: 354479 - protein, 49 aa, Zea mays
  unsure (1)..(49): unsure at all Xaa locations
  Clone ID: MRT4577_86456C.1.pep
VISDVARSLELEAHRLCSQCCCIIHLYXVVADFYIRTRTRVLRGSRSCR

SEQ ID NO: 354480 - protein, 119 aa, Zea mays
  unsure (1)..(119): unsure at all Xaa locations
  Clone ID: MRT4577_86457C.1.pep
MRRYLALLITASVLMAPFAETLGAMYTKPWIGLVHATLELAWPAFITWSQWAAARSDLFPCDLCADLAKLYTEAPAHSFTYTKTTDEIAVARKLSYIVENFXEDPVASVKAAQAHRAAL

SEQ ID NO: 354481 - protein, 80 aa, Zea mays
  Clone ID: MRT4577_86458C.1.pep
PKPPISPLLLFFTSPASMRSGAGLWAWECPPPCTHLRPRLTTSNITRGRQDGAVSCRSPRSSRMRPALSANPYTAAKAGS

SEQ ID NO: 354482 - protein, 123 aa, Zea mays
  Clone ID: MRT4577_86459C.1.pep
MMEVVKRMLCRRRFTMFITELIMHMTMFANLMYVMHDKMRWEVDFGLDILFVQVLATELHSVQDCMKDFMKLYIQLDTADVMEVVSPVSAPVADVLVDYFCNTLCEVALEVELYVYAYMPIGA

SEQ ID NO: 354483 - protein, 168 aa, Zea mays
  unsure (1)..(168): unsure at all Xaa locations
  Clone ID: MRT4577_8645C.1.pep
MRRVHATRLSCKCNTRDTTSRRTXRKAQFTGPSSTRRVLMYGGLTTYLSEKNKARSITIRKDEKVXDVRGSYEAREXKVLQENMPRCFIHVESTSLDNVYASRVNVLILTCYGMDRGVNFDKDRKARRSSGRSGSDSSMMLARTILLDKAVTSCDAASSSSLSVQKIL

SEQ ID NO: 354484 - protein, 43 aa, Zea mays
  Clone ID: MRT4577_86460C.1.pep
TFICTFMETAIRCYEHFLYPWSLILCFIFLQYDIMICYVVKSL

SEQ ID NO: 354485 - protein, 96 aa, Zea mays
  Clone ID: MRT4577_86461C.1.pep
RATTEFFLTTFFHILFDIKLVYKVNNSKLVKDEFNLGPFFSQLQALANRPTSCICISLASTYLYGSSIWLHIWLIMTLIYMFRFPMKIHSYQYMLP

SEQ ID NO: 354486 - protein, 165 aa, Zea mays
  unsure (1)..(165): unsure at all Xaa locations
  Clone ID: MRT4577_86462C.1.pep
DRRRRRPATFLRCLLLRSTAGGHGGARAGKTITLXVELSDIIDNVKVKIQDKEGIRSDQQQLIFGGRQLEVXFMLADYNIQKESTLHLVLRLRGGMQIFVKTLTRKTITLXVESSDTIDNXKAKIHDKEGIYTDHQRFIFAGKXLDDGRTLWVYXNVDXESTLHL

SEQ ID NO: 354487 - protein, 73 aa, Zea mays
  Clone ID: MRT4577_86463C.1.pep
PHNRCQSLWQPRCQHLMQVEPHLRFQANLGFGLHSIPQEQPQSGQVLILSADQIAQDLTAMCGLHSSLLMPYL

SEQ ID NO: 354488 - protein, 127 aa, Zea mays
  Clone ID: MRT4577_86464C.1.pep
QTTQRRRPTKNTRGRRKARKHPLVQLTPPPPAAASFLARESLVGCLIPKLRARGIELSPPKIRIGAAGFGFLLGAADWSTLLLWWLRGCSASADHVRAGDSRVHQPARRRLRAAGARVQLARLGAVR

SEQ ID NO: 354489 - protein, 150 aa, Zea mays
  unsure (1)..(150): unsure at all Xaa locations
  Clone ID: MRT4577_86465C.1.pep
VQLTPPPPAAASFLARESLVGCLIPKLRARGIELSPPKIRIGAAGFGFLLGAADSSTLLLWWLRGCSASGDHVRAGDSRVHQPARRRLRAAGARVQLARLGAVRGRGVPVGAELPPPRXRRGRLVLPIFVPVRGPAGNGARGARRALARQ

SEQ ID NO: 354490 - protein, 174 aa, Zea mays
  unsure (1)..(174): unsure at all Xaa locations
  Clone ID: MRT4577_86466C.1.pep
LAESQCDPTKXRACRSHDTTVTTTNAXGAPVGNDNEVLTCGXPRGPMLLEDYHLSEKVAHFSFXRMLERVVHAPGASAKGFLQCTHXDMTSVTCADFLRAPDXTTPVIVRFXVSDPXRTSQETMRDPRGMAAKPYTRDDNWDLVGTNLRDLFIRYGMKFXTTMHPFKTSPRSDT

SEQ ID NO: 354491 - protein, 105 aa, Zea mays
  Clone ID: MRT4577_86467C.1.pep
NLKKNKKKKIDGDKINRSCSISLYLLLLNLIENMGVLFLDILGGGLFEDPLLCSPFLRLAFFFCLGLLIIYLWGSFFSFLFENPRVTPLLFPVVLTSFVAAGCFF

SEQ ID NO: 354492 - protein, 54 aa, Zea mays
  Clone ID: MRT4577_86468C.1.pep
AHFVECSGTAFFLLLAGRSRFCSSDVSFESNQRWAMATLLARSSSLHGPGTLHN

SEQ ID NO: 354493 - protein, 80 aa, Zea mays
  Clone ID: MRT4577_86469C.1.pep
IKKQNKRPRTNHPHSDHQEWVTHNILRANAIGLPATKKDNIRAPLTFNPPRRDKKAPLKDGRRAPRGKEIWRFCPKGGPG

SEQ ID NO: 354494 - protein, 110 aa, Zea mays
  Clone ID: MRT4577_8646C.1.pep
PLQPVCSIPPPVFVKGGRGAPPISFAREGSRSPPGSARGGPRPGSLSPRCKGLGARPVLGISRGQGRGSPAPGVWVLPPKRGGLEDSPRFEKKKKKNNKKKKQKRKNTTT

SEQ ID NO: 354495 - protein, 68 aa, Zea mays
  Clone ID: MRT4577_86470C.1.pep
KRNLLHIASSWVNGFILKYKRSALYLRPPITELYPARVTRVVAPIKCLVQPNDHIIAGFSSVVYTTQL

SEQ ID NO: 354496 - protein, 180 aa, Zea mays
  unsure (1)..(180): unsure at all Xaa locations
  Clone ID: MRT4577_86471C.1.pep
MHPRSGTRYSTYDESSRYYTEAPTGGPRNNDSDLRWKPAXQKRKPIVAPPTSSPXDHDKMQKXHGPDRRMLPVAGTLGGSEXPKDARTDPGDYXYDAFGLSKKPXGRRQXQAYDVIDARWCMLGAAGAVIAQACNKPFADCGPEDVCHETEALLLDKNTLSDRRNSIAIKLWGFAIVRRG

SEQ ID NO: 354497 - protein, 46 aa, Zea mays
  unsure (1)..(46): unsure at all Xaa locations
  Clone ID: MRT4577_86472C.1.pep
MVYIKNQKTRAYSKRFQVKFKRMRQGKTDYRAMLRLTIQDXNKIHT

SEQ ID NO: 354498 - protein, 52 aa, Zea mays
  Clone ID: MRT4577_86473C.1.pep
HKQALPFKQLTALNSAAYLQQQQLLPFMQLAAAYPRQFLSFNQLAALNSHAY

SEQ ID NO: 354499 - protein, 150 aa, Zea mays
  Clone ID: MRT4577_86474C.1.pep
QPLIPNAPFNYPLQQDGNPQYSSAPFQMQLPDTGSEQGSMSNVQPPAGPMSFPEGPQRPWGMRLMSNPFQSMALGQGMIDGAGDPQGGGGLAFMQAGFGGMPDGSMNTGMPDRGDGRGILAQMHMQMQMSLPPPPPTQPPPGSQQTFNRT

SEQ ID NO: 354500 - protein, 57 aa, Zea mays
  Clone ID: MRT4577_86475C.1.pep
KNFVPQEVFVCRFHYFRAGGVTCAELRCGPSQHYQFLEMNYMSKFPCRCQPPIRLKR

SEQ ID NO: 354501 - protein, 483 aa, Zea mays
  Clone ID: MRT4577_86476C.1.pep
MLQIRLSKIGSSDSGGAAASTAAGAGAPAAVGAAAALGGSILESVTVACPDHLVIADLPVAKSLGAVTASAAAATRAIGRRSRRPLGERVHICSRCEFPIAIYGRLIPCEHAFCLSCARSDSSCYLCDERIQKIQSVKMMEGIFICAAPMCLKSFLKKADFEFHVPDVHANLLQTNLEKEEERNESDAPNIPCASAGDTQRQSQMPEMSTARAPPPRPGVSQDREERSRYHQSREQTPLRPPPLSKPPFHGRHSYPPGDTQAENNPPQGFDRPYNWASQSRQESPGAVTPLRQESDHSTQDRQQLMANAPFMFPPIPPHQGNFMMPMNMNQPLISNAPFNYPLQQDGNPQYFSAPFQMPPLPDTGSDQGSMSSVQPPVGPMSFPEGLQRPWAMGMMGNPFHPMALGQGMVDGAGDPQGGGGLAFMQAGFGGMPDGSMNTGMPDRGDGRGVRAQMPTPMQMQMSLPPPPPTQPPSGSQQTFNRT

SEQ ID NO: 354502 - protein, 150 aa, Zea mays
  Clone ID: MRT4577_86477C.1.pep
MTYQRHRRRPANWTLVFTWEIKKRSRVPRQCPQQGFCYARRRCHCRADTQVGQGFRPNSLVPAHERGCGPTTMPSRGFVPSRGVTIVDPTRNQASPGGNQHISWCGCRCCRHSIRVQPPQTGRNWTRRHLELTERQGRAHPVDEHAGGEG

SEQ ID NO: 354503 - protein, 107 aa, Zea mays
  unsure (1)..(107): unsure at all Xaa locations
  Clone ID: MRT4577_86478C.1.pep
LAVVYHRRAWKTLGVPKLNRLAEHPLLAGWRITKRARTVRLSNQLPSLIGNWTPPCSGPXSPAVVGVPPSLPVPLASALAPVLLVFFLSFLATLAGFPRKVLNGGFL

SEQ ID NO: 354504 - protein, 91 aa, Zea mays
  Clone ID: MRT4577_86479C.1.pep
KNIEGQKLLKAHFEARDTKVKVEESSDSSNSLDRPPDVPESSMHSSEDTVDLKVNGTPNKDASVVNPVLEESVSGIPVTAKNESLPSARTK

SEQ ID NO: 354505 - protein, 72 aa, Zea mays
  unsure (1)..(72): unsure at all Xaa locations
  Clone ID: MRT4577_8647C.1.pep
RSLISRAGLHTTCLTLSYLSPDIIIKKGYYCTLAYIXFFSLILFVLLACYLSFHDSYLVHMYLMITIAYLKY

SEQ ID NO: 354506 - protein, 35 aa, Zea mays
  Clone ID: MRT4577_86480C.1.pep
FKRTHADTWSIQKDAFTEDELEVLRDTSSSSSYFA

SEQ ID NO: 354507 - protein, 185 aa, Zea mays
  unsure (1)..(185): unsure at all Xaa locations
  Clone ID: MRT4577_86481C.1.pep
MAAATSGAVLNGLGSSFLSGGNRSQTLLATAIGGKVGAAAVTVSPRRLIVVAAAAPKKSWLPGVRGGGNLVDPEWLDGSLPGDYGFDPLGLGKDPAFLKWYREAELIHGRWAMAAVLGIFVGQAWSGVPWFEAGADPNAIAPFSFGTLLGTQLILMGWVESKRWVDFFXPDSQSVGWATPWSRTS

SEQ ID NO: 354508 - protein, 141 aa, Zea mays
  Clone ID: MRT4577_86482C.1.pep
QVTLNLPSGKLYTKVAIVTTLINPLAKYALLVAPITAAVEERFYLPAGSAPARVSVSTVVVVSTAVVASTVPFFGYLMSFIGSFLSVMATVIFPCLCFLKIYRAEGISRIEVAAIAGILMMGVFVAVTGTYTSLQQIIGSL

SEQ ID NO: 354509 - protein, 138 aa, Zea mays
  Clone ID: MRT4577_86483C.1.pep
SAFGVRVNSSEVSTGMPLPWQNTLNHAISFLSILLMCFAVNFPQLFAFSLRWNLRSDRCSRHQWLYSQETSRVYVRCSRTQSTQADVSSAVPRTAPTTKNWISVSRADETSSHEYAPPQPDRPHTRASVAPRVRGRVG

SEQ ID NO: 354510 - protein, 182 aa, Zea mays
  unsure (1)..(182): unsure at all Xaa locations
  Clone ID: MRT4577_86484C.1.pep
MAPARAPENSSRRRRRSRWEQSNDDSAANNSGGEGGTGGRKRKTRWAEEEPRPAIALPDFMKDFAAEMDPXEVHALNARLLRXISRLLQSGLPLXDDRPRGXRSPSPEPVYDNLGIRINTREYRAXRERLNRESQXEIISQLIXRNPAFKPPFDYRPPKXQKKLYIPMKXEYPGYNFIGLII

SEQ ID NO: 354511 - protein, 91 aa, Zea mays
  Clone ID: MRT4577_86485C.1.pep
MFGPPPPPPRPTPTPTPAPTPTYGPPTPTPTPVPEPRPPAPEEPEPFFKKKPKLKFMRKKKPCPPLADDDTTRRPAAAGGQGQEKVPMKLN

SEQ ID NO: 354512 - protein, 95 aa, Zea mays
  Clone ID: MRT4577_86486C.1.pep
QLEDFPMDAHACPLKFGSYAYPNSEVVYVWTNGSTKSVVVAEDGSRLNQYHLMGQTVGTENISTSTGEYTIMTAHFHLKRKIGYFVIQTYLPCIM

SEQ ID NO: 354513 - protein, 122 aa, Zea mays
  Clone ID: MRT4577_86487C.1.pep
QKTGACAYTYTGVVWVQRTRSRLYMHGARTYTLGGTTGTDTYIHTYKQERGLPTRRICTSTGSHPTPLQATNVWLGLISLGLDLGPARRPNGFSGSCVPPSMGDQSRSTHHQWEGQSPAPTG

SEQ ID NO: 354514 - protein, 134 aa, Zea mays
  unsure (1)..(134): unsure at all Xaa locations
  Clone ID: MRT4577_86488C.1.pep
MEEHKEACANCSARASLYNWYTGRGLPQVEHRLFSTNETTIRALRPATVAGSPTDEPGYLXCQITLKIFRDPMVTLYGVTYERAVLVEHLHMDDDYPPRRQNHDEHQVVTNLNIKVSSCKLYTERPQLRPTSLN

SEQ ID NO: 354515 - protein, 290 aa, Zea mays
  Clone ID: MRT4577_86489C.1.pep
RTQGGRVGDDDGKDDEEGGDADADAEGRREKSATGSPAEFDFDPDVIAAFRKALDEDPPPPPPDDPGNEGCVEKKPDGPGGEVGVKVKQREREIQRFPGIVRARVSAFQQRIDAKLLAKLAPPPPPDSARKVVLYLTSLRGVRKTYEDCWSTRSVLRSYGVRVDERDLSMHSGFKDELHAALGSSPNAGRLPQAFADGRHLGGAEEVRRMHEAGELARALEACDVVVAPPPSSGGKGVVLDACSGCGGVRFVPCEDCSGSCKVFVEEVGTFRRCPECNENGLVRCPLCSS

SEQ ID NO: 354516 - protein, 92 aa, Zea mays
  Clone ID: MRT4577_8648C.1.pep
EQAANNPDNLQIQEQIVRLKDEIAEKKSHIHMLEQRMVQSLETTEGPAIKTELSQTFSKLSTQLSEKTFELEIMSADNRILQDQLQAKVTEN

SEQ ID NO: 354517 - protein, 79 aa, Zea mays
  Clone ID: MRT4577_86490C.1.pep
RSRTEARKRPRYTPDPAPVGDSNQVAPRRGALLGVGPQQRFPHPPPQTGPVCWDIKNGALPSPTSRIPSLRARADVTAL

SEQ ID NO: 354518 - protein, 81 aa, Zea mays
  Clone ID: MRT4577_86491C.1.pep
LEFRCCRRALISGCDRGDGRLQSIKQLADQEEGRCEISYILKPNRNGNDEAIHVVKKNFEPSDRQSPVDARSQSSPLEAPR

SEQ ID NO: 354519 - protein, 102 aa, Zea mays
  Clone ID: MRT4577_86492C.1.pep
TGFISCAVGAFLPANFFPNFIFPGVWPICFFFKFCSNCGFPQFPFWFCLENPFGFFGRPALLFLTFLFFFKKKKKKKKPKKKKKKKKKKKKKKKKKKKKKKK

SEQ ID NO: 354520 - protein, 178 aa, Zea mays
  Clone ID: MRT4577_86493C.1.pep
GEGGLPGFKPPFAFESNFSPGSRQYPHRACQTPGYAAMKSDREDLRVTFAPNTFLYRILTMGPSWLLKRGRRLPRPTIAGPVEEMDQQGRRGGDLGRTCKDPRCQVVGGPGGWTANIPDLEEHGRAGGRTPKPPRWVPAGDRREREREPVARSEREPPSPGPGGRRNGERRRRSPPSP

SEQ ID NO: 354521 - protein, 63 aa, Zea mays
  Clone ID: MRT4577_86494C.1.pep
TSSSIRIGESLDPPPTGEGKKNDVSPRSVRIVGRIATLLYIFRWTSTSGAVIDQSIHVHASPP

SEQ ID NO: 354522 - protein, 171 aa, Zea mays
  Clone ID: MRT4577_86495C.1.pep
MPNPNVFFDVSIGGSPAGRIVMELFADQVPKTAENFRALCTGEKGTGKSGKPLHYQGSSFHRVIPQFMLQGGDFTRGNGTGGESIYGEKFEDENFNLKHTGPGILSMANAGPGTNGSQFFICTVKTSWLDGKHVVFGKVIEGLDVVQAVERVGSQTGKTSKTVTIEKSGQL

SEQ ID NO: 354523 - protein, 79 aa, Zea mays
  Clone ID: MRT4577_86496C.1.pep
GPEKAKHAGFQIVLVKLSQKIKQPLSPYLTVGGSMHASQTMFYFPLNFFQLLKTPPLDLPPRKPCKAFEGIHETIKIYL

SEQ ID NO: 354524 - protein, 82 aa, Zea mays
  Clone ID: MRT4577_86497C.1.pep
IIVLCFQKERLKKQCFCSTRRDALLKIWKLQLSKKMKIQSSCYSTTQRSICFFTNRYGKCLFCARHCLGTGDSDEQNHLFFL

SEQ ID NO: 354525 - protein, 47 aa, Zea mays
  unsure (1)..(47): unsure at all Xaa locations
  Clone ID: MRT4577_86498C.1.pep
PHNGDTRSTQPRPLTQEHNPSTNDHISXHTADNKDIRNXGHXHNVXG

SEQ ID NO: 354526 - protein, 42 aa, Zea mays
  Clone ID: MRT4577_86499C.1.pep
CVAGIRSTRSLESLLYCKQGDYHTFVAWLRTQMSCSRSFNMD

SEQ ID NO: 354527 - protein, 72 aa, Zea mays
  Clone ID: MRT4577_8649C.1.pep
LKGGGYFVGNGGKLVDFRNDWGFWGGILGGFFFYLRGNEGGGFLLPGGFFVRLMVIKGGFFKRGIFWDIMGF

SEQ ID NO: 354528 - protein, 52 aa, Zea mays
  Clone ID: MRT4577_864C.1.pep
ICMCDVSCYVFCYLNGRSRDLISLRHASGTIPVNSRTWYSVRLYASSSPIID

SEQ ID NO: 354529 - protein, 214 aa, Zea mays
  unsure (1)..(214): unsure at all Xaa locations
  Clone ID: MRT4577_86500C.1.pep
FFGFSEYSAGLAFAENDTSTADTGKLGSTDVSPARRPSSDVSQHFCGQVPEFQQASPALVSSPSTKRGPRWSGGPAQGAATGGDLAGVLLPWTSYEFFGFWCXSAGLAFAENDTSKADSGKLGSTDGSPAGRPSSDASQDFFGQVPEFHQWSVPELPSPPTASGLHWQGGPRQGAATTTDVAAVFVPDISSPENPFWCYATAAGQAPTKRRRRC

SEQ ID NO: 354530 - protein, 213 aa, Zea mays
  Clone ID: MRT4577_86501C.1.pep
VRYLHITMNEHAILHINLGENDTKASNRQVHAIRACSLGLEMCICLYYRSLYSSTTTLGLFGILSRQRLYLRHLHLGNLGCVAADCEEHLPKARKVFQAVHARHRHERKLKALKLRHCSSQKAQRWQHRRGKAQQLELLEPSSLHKDLPSLVQNLEHVRLLHRRIHGENEREEVWELAKDHQSTRRERGQGKGQALQVVQVDDPVRHLGQHAG

SEQ ID NO: 354531 - protein, 73 aa, Zea mays
  Clone ID: MRT4577_86502C.1.pep
SGLWDRIHSIKQCESWNFQTQTRPEIPSGSRQGPLTGFVPCAPSQLFRSSVPVPAKANCLIEGGGSCLNLNFG

SEQ ID NO: 354532 - protein, 81 aa, Zea mays
  Clone ID: MRT4577_86503C.1.pep
TSLESFGDSVPLLHYVLFSLHPPSRTWSRPWLLWKRLLLPGAHAGPDGMGAGELDAGYHRRELRALLFANCRSVYQYLTLM

SEQ ID NO: 354533 - protein, 158 aa, Zea mays
  Clone ID: MRT4577_86504C.1.pep
LPWEVCSSLRNYPFPTGQTPESKIPMQSKLHLASDDTTGDKTEHHGCHKRKACLVSTAGCLHFLRKPHMPAPLCGSSVGGCGSRRVHHPTAKVREAHERHRASRCSAGHCAGPSARSTGARRMKVQGAAGALGCRKSGQVAAAREEQGEERRERRGRR

SEQ ID NO: 354534 - protein, 145 aa, Zea mays
  Clone ID: MRT4577_86505C.1.pep
LPWEVYSSLRKSPVPTGQTPESKILVQSKLHLASNDTTGDKTDHHGCHKLKACLVSTAGRVGSATVLAAWRVAAGSEAAQRLLARSGQRRLGQPLGPGRLGSLARTKAGSGTASAGCRCSRPRAVALGRWSGGFLAAAARESGAR

SEQ ID NO: 354535 - protein, 54 aa, Zea mays
  Clone ID: MRT4577_86506C.1.pep
SYCIHIIILVIFGPIAIPTGSWFLHGISLVILKLNVFPLGSPPRGVGLRHKNLV

SEQ ID NO: 354536 - protein, 198 aa, Zea mays
  Clone ID: MRT4577_86507C.1.pep
PPTVVLGLVETTCHLFLSLLRLCSAPFPHPQQNSCHGKSIRHSGNPRFQRDRHQKAKSSCRANCIWHLTTPLVIRPITTAATSSRPAWCRRPAVELCAEFSWAPHRDEDWRTRVGSATVLAAWRVAAGSEAAQRLLARSGQRRLGQPLGPGRLGSLARTKAGSGTASAGCRCSRPRAVALGRWSGGFLAAAARESGAR

SEQ ID NO: 354537 - protein, 125 aa, Zea mays
  Clone ID: MRT4577_86508C.1.pep
IKSVELCAEFSWAPHRDEDWRTGVGSATVLAAWRVAAGSEAAQRLLARRCNPSSQRPSAARSAPRDWPPGLDRSDEGRQRHFLCGLQVLTASCRRARALEWRLPGGGCQGEWRALGLGGGRLGLG

SEQ ID NO: 354538 - protein, 77 aa, Zea mays
  Clone ID: MRT4577_86509C.1.pep
RPGGVSFGFKPPRLFFFVPPGEGPIGWAPKAPRQSPSFAFKKKKKKKKKKKKKKKKKKKKKKKKKKKKKKKKNSREG

SEQ ID NO: 354539 - protein, 125 aa, Zea mays
  Clone ID: MRT4577_8650C.1.pep
LGQKPLLFPPKYARQGVGPTTTAPWGRGGHTTHQPIAAESAPLRPRTRGFPTKNISLLGGTPPRTGKGPRAPARGAPRPGPLPLAPRSFYPYPRPYPLGPGCFAGPTVLPPTPRVWGSPRLDGPL

SEQ ID NO: 354540 - protein, 185 aa, Zea mays
  Clone ID: MRT4577_86510C.1.pep
LPWEVCSSLRNYPFPTGQTPESKIPMQSKLHLASNDTTGDKTEHHGCHKRKACLVSTAGCLHFLRKPHMPAPLCGSSVGGCGSRRVHHPTAKVSRNEESVAGTTIKVSPYREAHERHRASRCSAGHCAGPSARSTGARRMKVQGAAGALGCRKSGQVAAAREEQGEERRERRGRRSGDFLPAGSR

SEQ ID NO: 354541 - protein, 124 aa, Zea mays
  unsure (1)..(124): unsure at all Xaa locations
  Clone ID: MRT4577_86511C.1.pep
SRFCSKAYRNVQRCFAVDRLXPRPXXNQPKRGKSIATIWXFLTALILMLLDNVLLLVVNCVCVLWLALPLKNYKTMNSNWKNHRLRLCVLLCLKFCLDVFHQRLQPSMYVPIFDPPKKFVVFVL

SEQ ID NO: 354542 - protein, 57 aa, Zea mays
  Clone ID: MRT4577_86512C.1.pep
SILHTGCEGRSEARLVRSFFASKTADEMQMYCNAIKQGFASVFAVKHVVNQRTLDSL

SEQ ID NO: 354543 - protein, 110 aa, Zea mays
  Clone ID: MRT4577_86513C.1.pep
PLLEPPPIRGPVAHHCHGDWFAHRHQFLNHLKPEKGSVKKPEWIKPPPLKRPCKLGLPQNPSGDRYVMSPSGFLPVSKQPKAARVACISLAKKAYKKGFGKIILQPPKDC

SEQ ID NO: 354544 - protein, 52 aa, Zea mays
  Clone ID: MRT4577_86514C.1.pep
IPPKGQPWGNGARIKANVQGSHLTVGSRFALEPPELHCRRRTGNEDGMGTRV

SEQ ID NO: 354545 - protein, 127 aa, Zea mays
  Clone ID: MRT4577_86515C.1.pep
GTTCKTKEDGLCNQQTISSIIPVLHRLSSTMGQVCQPSPVPRAPHWSDGSTARARRREHGAGEEAPRPRQEGHGNSLERRVGRVIGKAFGITTWGRSAHRLRTKGGTMSDERSASRRCGGRGATGIR

SEQ ID NO: 354546 - protein, 79 aa, Zea mays
  Clone ID: MRT4577_86516C.1.pep
LGTKTSFIAPNHYNISSTTLNSPHKHHLLRHYNPNYKRGANQERTTTCRSHIKTLLSTPDHQKLLTEKKGPLKHKVSPT

SEQ ID NO: 354547 - protein, 108 aa, Zea mays
  Clone ID: MRT4577_86517C.1.pep
GAHSGQPVPSRRRISSRSWRYLVVYLVRPYHARQIQHVIQSANHISLFPDKIIQQLVLINSNRTTPKCSIQTTDSARSAQLCDTCCIRLRHRLVQVPTSPPMLKLGFV

SEQ ID NO: 354548 - protein, 116 aa, Zea mays
  Clone ID: MRT4577_86518C.1.pep
AEMGFTGPSQVFIKKDTKIGGFFKPNMPACPQGPRAFFFQLGGKPPLMVNPTHPPTKPRLPKGPPNPRETCFGFHPEQNKVLPFGFPLNGSDEPFEPLGPLPVEKTLKRLAPLEGY

SEQ ID NO: 354549 - protein, 90 aa, Zea mays
  Clone ID: MRT4577_86519C.1.pep
RAARDIILEKASYRRAFSETRCHSGNKISVALHDRGPSGPAHLPHTHHYLRPPQIHPRPPQRLPLQRRPQTLFPKTPSSTHDMNLPDTAS

SEQ ID NO: 354550 - protein, 50 aa, Zea mays
  Clone ID: MRT4577_8651C.1.pep
FSKASLRTSLTGRIPALRNVMALLDISLYTDGVISKMPSTIALVTDGETY

SEQ ID NO: 354551 - protein, 89 aa, Zea mays
  Clone ID: MRT4577_86520C.1.pep
MAVPGPALRPRPNVAHGLRGGWRGMPTTRGRILSPCGDNASEAKLSLPPEPYNPEVDPSLKGALEIIRITNEAIDEGVNRLLDEAADKV

SEQ ID NO: 354552 - protein, 121 aa, Zea mays
  unsure (1)..(121): unsure at all Xaa locations
  Clone ID: MRT4577_86521C.1.pep
EKKQPHWLASLFFFSSTAFAGRGVNLPWGGASGKARVTMLKTAAKAKPAAASGSPWYGPYRLLYLGPLSGEPXAYLTGEFPGDFGWYTVWLFADPETFAKNRELEVIHSRWAMLGALGCFF

SEQ ID NO: 354553 - protein, 102 aa, Zea mays
  Clone ID: MRT4577_86522C.1.pep
DTDWVHHERFPRVRPRVRPTERRHEARPQSRTGKNGSQEGKTPAKNVERESGAWVNKSPNRSRGKCLEQKHGPQNGRPKQKPKESWGPQEQLTHSNRGHPTK

SEQ ID NO: 354554 - protein, 110 aa, Zea mays
  Clone ID: MRT4577_86523C.1.pep
ITKIISLNTIHLKTLRRTRITSLILIITTSLRPMPTTKTHHHVHLIISLLQLRITTLRLRHHTLSNIKRIYLRPNTTIITMSTTNSSGPGTKDNNCNHNRRSRQSRPARL

SEQ ID NO: 354555 - protein, 187 aa, Zea mays
  unsure (1)..(187): unsure at all Xaa locations
  Clone ID: MRT4577_86524C.1.pep
IDTFLSQNCIHTHKLQLLGITSMLIASKYEEYSAPSAEEFXNITAGTYAKAEVLEMEQQVLNDLGFHLSVPTTNTFLRRFLRAAQASRTAHLTTLNYLASYLAELTLISYDFMKFLPSEVAASSIFLAKWTLDQSDHPWNPTLEHYTSYKSFDIRTCVRALQELQHNTSNCPLNAIREKYGQQKFEC

SEQ ID NO: 354556 - protein, 211 aa, Zea mays
  Clone ID: MRT4577_86525C.1.pep
MEVTGTRRALPITAFALMAMALASLEPVLAGRDGDALTALRKGLEDPDGALTDWDPNLVDPCTWFHVVCDGDNRVIRLDLGRLNLSGPLAPELGQLDQLQYMEIFGNSISGSIPSEFGSLVNLISLDLSSNSISGAIPAALGNAKSLKFLRLDHNRLTGPIPRELAGLPNLGIVDFSNNDLCGAIPTDGAFQNIPRSSFDNNPRLHEGGEF

SEQ ID NO: 354557 - protein, 140 aa, Zea mays
  Clone ID: MRT4577_86527C.1.pep
HNHSHSTFLQAQRVFRFRPQKSLSAHINLHGYVDNQVLGSVIVRAHFVRLATTDQVPRPWRYTRKCSVNICLHGLHRGPSTDTSDVLCEWNHCCLEPRSLRTVPLFLVFVHIKQLFTVHVSKDSHMHIFIVSYFRCESME

SEQ ID NO: 354558 - protein, 55 aa, Zea mays
  Clone ID: MRT4577_86528C.1.pep
GKKATLFLLIIHTKGQFIRYTSVNLGHQDRTQNESVCATKVRKTADPGKLSLGQI

SEQ ID NO: 354559 - protein, 118 aa, Zea mays
  Clone ID: MRT4577_86529C.1.pep
LAMHACLHISCLHRGRQLLASFSTLKRTLLMRTTHALPLHAPAAVRRGGSVAARRLAVHDAAQRLLDGRDELVPPAGRGVAAGAPAIAFDVVVVVVSFSFPIVVVGGGGDEQHVADAA

SEQ ID NO: 354560 - protein, 50 aa, Zea mays
  Clone ID: MRT4577_8652C.1.pep
FHWRRLTLSHPQHSPSLASYVLPTYHYKYPASPHHHHQPTNPHSHIPIIG

SEQ ID NO: 354561 - protein, 54 aa, Zea mays
  unsure (1)..(54): unsure at all Xaa locations
  Clone ID: MRT4577_86530C.1.pep
LVFGPRLNSKRVACVVKLLKKKKKKKKKKKKKKKKKKKKKNXXEKKKKKKKGPL

SEQ ID NO: 354562 - protein, 301 aa, Zea mays
  Clone ID: MRT4577_86531C.1.pep
RARRRVLAPPPPPPACVAEMFLEEEIAVAEDSDEIVPVMEPVLVADTSEEMETGVNAARDVRAMKDHIDLESSQSQQPKKPPPKEMEIAGSFWLAASVFSKKWQNWRRKQKLKKQEAAGSKAAAAAMPPPEKPSKPSFLRRSRFRRGEAGSEFAGGRRSCDTDLRFSLDAGRMSVDGMGFAWDQPRASWDGYLFGAGAGAGIALGRAPPPLSRLPPILSAMEDSPAGIVERSDGQIPVEDDSQPEPDPDANVPGGSAQTRDYYMDTSSRRRRSLDRSSSVRRSFEVTDPKPVAVPVPVPVP

SEQ ID NO: 354563 - protein, 69 aa, Zea mays
  unsure (1)..(69): unsure at all Xaa locations
  Clone ID: MRT4577_86532C.1.pep
PPFFFFFFLYFFLYFFFINXXKHKTRGYTYTRGASKITXHNPSSNLPPVSPKYFPTNPTIINTLIKNNF

SEQ ID NO: 354564 - protein, 165 aa, Zea mays
  Clone ID: MRT4577_86533C.1.pep
KKKKKKKKKKKKKKKKKKKKTPPLFNVLLNHQKEAEEKRKRGKGRLGRLNLAAKVHGLGLPMPCQGLVTPLMKFSHLLANKGFKVTFVNTDGNRAAGEPALKASGGGGGVAPLGGEIHLGSIPDGLADNKDRRDFRRFVNAYTRHMLGYLKRLLANMKVAGGPRA

SEQ ID NO: 354565 - protein, 192 aa, Zea mays
  unsure (1)..(192): unsure at all Xaa locations
  Clone ID: MRT4577_86534C.1.pep
GHPALFCFSGPFPVLLGPKVQXPPLPPXPGQTGNPPXGEQRPPPPTRPPEPSGSITNKGEXPXPNPPLPALGPIPXPPGPPGFPPANRPLTPPPXFELPPPLAPPGFPLFAPPPHGARKCDPKPLSPRPPLTPSPPPPWPPPPPPKPPPPLPPTSPPPPPPQPKKKKKKKKKKKKKKKKKKKKKKKKKKLVL

SEQ ID NO: 354566 - protein, 146 aa, Zea mays
  unsure (1)..(146): unsure at all Xaa locations
  Clone ID: MRT4577_86535C.1.pep
MSSRKGDGPFIXIDLGTTYSXIXVWHCDRVLIIANDQCNRTTXPSYVAFTDCERLIGDAGTNQXHMNLINSVFAAKGLMPRRDRDATGHSDMKVRPFKVLXAAVESPLIRVTSQGXDDAALHHDEMCCMDLIMMREIAEAYLVRTI

SEQ ID NO: 354567 - protein, 107 aa, Zea mays
  Clone ID: MRT4577_86536C.1.pep
ARNSARAGVLDAVNRVMLYSLLDAQVDAGFGAARGLCAGYSDERDKACLTVWTGKVDCNYAAADADNARADNGYLALLRLSCNACAHRGPFADMSERLYSLFNESQK

SEQ ID NO: 354568 - protein, 176 aa, Zea mays
  unsure (1)..(176): unsure at all Xaa locations
  Clone ID: MRT4577_86537C.1.pep
MMLSRAKPAVGGDLPHTDKRKKXGRKIPKLEELLSQRDFTGAITLLEFKRHVGEQEEDTNLWIGYCAFHLGDYKRALEEYENATKEENCNPEVWVNLACTYFFLGMYKQAEAAGFKAPKSRLQNRLLFHLAHKFNDEKKLMNFHQNLQDITEDQLSLASIHYMRSHYQEAIDIYKR

SEQ ID NO: 354569 - protein, 204 aa, Zea mays
  Clone ID: MRT4577_86538C.1.pep
MAASFLRPFLPAQPLLSARRPHLPAAPTTSTTTVRCTATPKPATSTPKPISQEEANSREQQRPQEPNAAPAPDEANGNPNSIPDEETPASAAVTTSFAVARRLPSAISPDRRPRTALTQEEPPNYEIGWKRSKKLPLEKPRGWAIADFLEKLEGLLARGRYGSAQLLGTVAGVVTERAREEAEVLGAEGGVEDGCGTVVFRWLR

SEQ ID NO: 354570 - protein, 58 aa, Zea mays
  unsure (1)..(58): unsure at all Xaa locations
  Clone ID: MRT4577_86539C.1.pep
ALSRPQAGHLPIKNQFSFVSWXXKQLFRSPSLLGQAFXPHPVLXSSSTLEHWSIFTPS

SEQ ID NO: 354571 - protein, 66 aa, Zea mays
  unsure (1)..(66): unsure at all Xaa locations
  Clone ID: MRT4577_8653C.1.pep
AAFFFFFFDTNSVKQKLMCGWGETTYDFNVQSRHSREGNHYKXSXMKQQXXENTLXRXXNKXQEPY

SEQ ID NO: 354572 - protein, 377 aa, Zea mays
  Clone ID: MRT4577_86540C.1.pep
AYGYYFHMATADGLLKRDKGKHRPFVLSRAFFAGSQRYGAVWTGDNSADWDHLKSSIPMVLILGLTGLPFSGADVGGFFGNPEPDLLVRWYQVGAFYPFFRGHAHHDTKRREPWLFGERRTAIIREAIHMRYSLLPYFYTLFREASVNGIPVMRPLWLEFPEDKETYNNGEAFMVGPSLLAQGIYEEGQKSVSVYLPGKESWYDLRNGSPYKGSVTHKLQVLEDSIPSFQRAGTIVPRKDRFRRSSTQMVNDPYTLVIALNSSGAAEGELYMDDGKSYDYQQGAFSHRRFVFADNKLTSFNIAPDNLSKKFTSGCVIERIIVLGLRSGVKKAIIEPGNQEVEIESGPISLRSGSSPVVPTIRRPNVRIADSWTIWIA

SEQ ID NO: 354573 - protein, 60 aa, Zea mays
  Clone ID: MRT4577_86541C.1.pep
KGAYRLSDSFHFPVFQQNKFHDSSIKYCAEECLTANPCPNRSCGPRNLHMFRYLRCHRCI

SEQ ID NO: 354574 - protein, 917 aa, Zea mays
  Clone ID: MRT4577_86542C.1.pep
MDPPRRRLPAALVVFLLLLAAASPVARAWKKDEFRNCNQTPFCKRARTRAPHSLDAPLSLAAGSLAVSPDGSISAELSHPSRPRPLVLRLSALPPHALRLQIDEDYSTATPPHRRFHVPDVLLPDLEARTLHLPEPKTAAGVSTVALSSDLDVVVRHDPFELTVRRAGSGDPVLSFNSHGLFDFEPMRESKPEDDTWEEHFRSHTDKRPRGPQSITFDLSFYGADFVYGLPEHGSTSLGLRPTRGPGVEESEPYRLFNLDVFEYLHESPFGLYGSIPFMIGHGGRASSGFFWLNAAEMQIDVLAPGWDGVTDHENGRIDTLWMAEAGVIDAFFFVGSEPKDVIKQYISVTGTPSMPQQFATAYHQCRWNYRDEADVDGVDAGFDEHDIPYDVLWLDIEHTDGKRYFTWDHSAFPNPEEMQRKIADKGRKMVTIVDPHIKRDSSFHLHKEATDKGYYVKDANGNDFDGWCWPGSSSYPDMLNPEIREWWADKFSYENYKGSTPTLYIWNDMNEPSVFNGPEVTMPRDAMHYGDVEHRELHNAYGYYFHMATADGLLKRGEGKDRPFVLSRAFFAGSQRYGAVWTGDNSADWDHLKSSIPMVLTLGLTGLPFSGADIGGFFGNPEPDLLVRWYQVGAFYPFFRGHAHHDTKRREPWLFGERRTAIIREAIHMRYSLLPYFYTLFREASVNGIPVMRPLWLEFPDDKETYNNGEAFMVGPSLLAQGIYEEGQKSVSVYLPGKESWYDLRNGSPYKGSATHKLQVLEDSIPSFQRAGTIVPRKDRFRRSSTQMVNDPYTLVIALNSSGAGEGELYVDDGKSYEYQQGAFIHRRFVFADNKLTSFNIGPDDLGKKFRSDCVIERIIILGLRSGVKKAIIEPGNQELEIESGPISLRSGSSPVAPTIRRPNVCIADSWTIRIA

SEQ ID NO: 354575 - protein, 211 aa, Zea mays
  unsure (1)..(211): unsure at all Xaa locations
  Clone ID: MRT4577_86543C.1.pep
MLQTRYVSDPEFVILDVHCIRIEFFGDEIDRIREVNALTGEVLAERDHVAIFPASHFVTREEKMKVAIENIEKELEERLKELNDNGKLLEAQRIEQRTRYDLEMMREMGFCSGIENYSRHLTLRPAGATPYTLLDYFPKDFLIVMDESHVSXPQVXAMYNGDXARKLLDHGFRLASALDNRPXMFDEFEEKANEQGGINLLIPVTKTTQES

SEQ ID NO: 354576 - protein, 48 aa, Zea mays
  Clone ID: MRT4577_86544C.1.pep
YSSRSCYGKCMTLICGPRMVVHWCVSIIGGTCYFSGVRSGYIRLTKDF

SEQ ID NO: 354577 - protein, 47 aa, Zea mays
  unsure (1)..(47): unsure at all Xaa locations
  Clone ID: MRT4577_86545C.1.pep
NXPDSRRASRCSSCTTRSSASMGVVVPSWVRWLTILVAWGTSPLFIS

SEQ ID NO: 354578 - protein, 130 aa, Zea mays
  Clone ID: MRT4577_86546C.1.pep
RRFNGLKRDTAGRRSGHCRASQAPARLCGYGSALTTECAGRTLGWARTQGRNAGEPQQGQAEGPPPQVSMPWPRDQQTTARELDARSREKRARAGRVEEHGRRAENRGARTELQRHWALRWREMEKGEKQ

SEQ ID NO: 354579 - protein, 67 aa, Zea mays
  Clone ID: MRT4577_86547C.1.pep
SATCTRPNRGFSPMLLMDGCCLCMPRINVDGASVWVARFMMNIDMFSNITYFLTANLRSHISERICH

SEQ ID NO: 354580 - protein, 42 aa, Zea mays
  Clone ID: MRT4577_86548C.1.pep
KRCLLSHITWLHAGVVGRSALFFAGTRAPAHIPSSDPPARAA

SEQ ID NO: 354581 - protein, 102 aa, Zea mays
  Clone ID: MRT4577_86549C.1.pep
KTNPKDAGFINFWSRSKRGGGPPPLGVFPPLFLLASPALVNPFLAPGKTPSGGLFKLEGRGVPPNAPLKYERDVFLRVPGTAGGGAQTFFFWGKFALPPKWG

SEQ ID NO: 354582 - protein, 398 aa, Zea mays
  Clone ID: MRT4577_8654C.1.pep
MDVPRSNKQPTSTPQNTPANAAPISSRAQQPNVGTIKEEELDRAAAGLFAANPALVSMMQAKLGSLVGRSSGYIESLPGSVRRRVAGLKGVQKEHSKLEAEFQEEVLQLEKKYFAKFTPLYEQRAKIVNGSTEPTEEQVKVGEQQDEDDEDDEEAGEKELNKDEGKGVKGIPEFWLSAMKNQISLAEMITDRDEAALKHLTDVRMEYLDRPGFRLIFEFEENEFFTNKTITKTYFYQEENGYGGDFIYDHAEGDKIDWKTGKDLTVRVESKKQRNKNTKQTRVVKKTVPTESFFNFFDPPSPPQDEDDDASSDIEERLELDYQLGEDIKEKLIPRAIDWFTGEALQYENIEDFDEGEFEDEDDEDEDGLSDDRDEDEESDDENDGTKPKQEAAECKQS

SEQ ID NO: 354583 - protein, 90 aa, Zea mays
  Clone ID: MRT4577_86550C.1.pep
QKQPQMEELLVLQKQLHLDSSLATNSIPVIRISSYKSFPRLGAGRGRRRRKRRELAAPHRPLLIVGQVAGRRHVAAELHGAVDRRRTEED

SEQ ID NO: 354584 - protein, 210 aa, Zea mays
  unsure (1)..(210): unsure at all Xaa locations
  Clone ID: MRT4577_86551C.1.pep
PRPSRVAGAVPRXARPSHDCLYRAVDIYLKTHPELDEIQREKVCSVMDPLKLSYQARTHASQNKRLPLQAALSALYYDELKLRSAATADVVXHAVVGRREGLRAGQXAADAALARENEALRSELARMRAYLSGMERSKGGRSTPPSSPSRRAKKASFLGSVSRTMSRLNPFRSGGWMAKVTTSNAAAGGRQSKTMMQHVVTPKRRRASIS

SEQ ID NO: 354585 - protein, 68 aa, Zea mays
  Clone ID: MRT4577_86552C.1.pep
SARQSGRCGGFHREHGNAQHCPESKTACPSSRVVQPRPPLRERAVPVAITSVGRRLSEDRLVWRACAR

SEQ ID NO: 354586 - protein, 125 aa, Zea mays
  Clone ID: MRT4577_86553C.1.pep
GIKKRKFFFSPVGITVPQNLFFDPGHFLNTPIKMGDSPPRVSTTHTGGPGGGQPTGFWGGTPRKKSQKTPLSGSKALQFKVFRARARFCPKNHFKRGPQIYENPRGKNPPQNRCKSPRETCRGCP

SEQ ID NO: 354587 - protein, 137 aa, Zea mays
  unsure (1)..(137): unsure at all Xaa locations
  Clone ID: MRT4577_86554C.1.pep
MPVYSAVNHGLRANSIRLHRLDYLISRRSEGSLALMDVLDGELYLVDFLLRGGRSTCMLWDXRVAHVXGMKNLHKLLKGEHVVGLTNDWLKKDNPXSVRHAGTQVXSTHHRRNVIDTLKXPLXLLHMAPILGPSGYP

SEQ ID NO: 354588 - protein, 67 aa, Zea mays
  Clone ID: MRT4577_86555C.1.pep
RNPALQPYRLQQAIAASNIPLSPLLFQQSPAYLGEALVNHRDTAETRVLCTKYLELLLSQTHSPSHC

SEQ ID NO: 354589 - protein, 48 aa, Zea mays
  Clone ID: MRT4577_86556C.1.pep
SPSLSASWGLSLVFGSTAPWAPPGEMAVWRVAALPLKNPPSVYRAGQR

SEQ ID NO: 354590 - protein, 49 aa, Zea mays
  Clone ID: MRT4577_86557C.1.pep
QPQSLEPSLDCFTGLGNHKHKDVYPWLVIVPFWAQTASSRASRLESFVA

SEQ ID NO: 354591 - protein, 114 aa, Zea mays
  Clone ID: MRT4577_86558C.1.pep
GGLGPLLGPPGFMFLPPLFIFLGNCKGIPFFFGTSLLLLFPPLLMHLFKGKAGLLCGWGPGFRGGTRGLPEVAPWGREKTPFSFVGGAGANFFGQKCVVYFGAPPWDLKVWRGR

SEQ ID NO: 354592 - protein, 77 aa, Zea mays
  Clone ID: MRT4577_86559C.1.pep
IFIHCALNFFFFFFFFLFFIIIIGIFFFFRTQKSVQIHTGEARRLDGTITIRVAAEGLKRIAASASAFSSARSGRFS

SEQ ID NO: 354593 - protein, 90 aa, Zea mays
  Clone ID: MRT4577_8655C.1.pep
GPKLVFFFPGLVFLAFGAPGGGLITRIGLIGFFYRVGFVVLLLGFGCWVDLGLGKSPCYFWRCGVLILGGLELSPGKSPVGRGWFCCPPV

SEQ ID NO: 354594 - protein, 124 aa, Zea mays
  Clone ID: MRT4577_86560C.1.pep
MLTQLFGVASFNSVMNKKKGNTRTKPLPPSKRLRQEAQRVLKERVQDIADKKGVKLRFCNLKECESHILSLDSPCENTRTEIGWPQGVPFVHPHDLPNKAKLGFLEAYEPGWTASQQEMESQPQ

SEQ ID NO: 354595 - protein, 40 aa, Zea mays
  Clone ID: MRT4577_86561C.1.pep
GVPFVHPHDLPNKAKLGFLEAYEPGWTASHQEMELSSIET

SEQ ID NO: 354596 - protein, 107 aa, Zea mays
  Clone ID: MRT4577_86562C.1.pep
MAVEALAAVLSAEGIAEEAREGLVLALVAEDLGRVVTTLFCADANGAAVLDAMLTSARVDADSKTAIADRPELFPDLVRILKDSSCHAAIRCMVAAVQVRCRPARAF

SEQ ID NO: 354597 - protein, 121 aa, Zea mays
  Clone ID: MRT4577_86563C.1.pep
FCLFFFVFFFFFFFVWVFFKKIILLITIKPIRVLHDRQNKQGPVKTRPTTTTPTLPPPPGPTPYIHTPADTLHRAPPDPSWIYPPQTRRIIFWGRNHFSRADLPKKVPKGGGGKGGPGKGS

SEQ ID NO: 354598 - protein, 52 aa, Zea mays
  Clone ID: MRT4577_86564C.1.pep
YVGLILNQLIYPFSANLLKVVNFLPCGLCVCSQYNYRGPYSEIMMFSGKIEK

SEQ ID NO: 354599 - protein, 37 aa, Zea mays
  Clone ID: MRT4577_86565C.1.pep
FYISFCRSSSTTFPGLIHLYYNPLKTRSAYHKILSTI

SEQ ID NO: 354600 - protein, 108 aa, Zea mays
  Clone ID: MRT4577_86566C.1.pep
AEPVVRQRRRTPAPTTTRASCPRTFSLLATGERWRRGGMACLPACPVQLDSSPMLLATVLLASVGICKNATLGMAMGLFRSGDVKTCLRSQQGLYCYKIFCTCDLIHM

SEQ ID NO: 354601 - protein, 39 aa, Zea mays
  Clone ID: MRT4577_86567C.1.pep
TKLATGVHHKRAMSIDTEISHVNHNYPYCTSSRILISTL

SEQ ID NO: 354602 - protein, 119 aa, Zea mays
  unsure (1)..(119): unsure at all Xaa locations
  Clone ID: MRT4577_86568C.1.pep
FGLIYVLVRVKGNLSSTPSHRNTESTRRRPEVDTDNSGLTDHGEPSVVIAYSNKAEXDDNSPVVPLHPDKDGSGHTIYDESXKVRQEPGTEDVYSEDTTYDADXDNDGWTDHNEPAITT

SEQ ID NO: 354603 - protein, 51 aa, Zea mays
  Clone ID: MRT4577_86569C.1.pep
HALVASYWYPSPTARLGVSHITFDSPCIGYLSTSTIASCNRNLHHRPRRRL

SEQ ID NO: 354604 - protein, 161 aa, Zea mays
  Clone ID: MRT4577_8656C.1.pep
MAYRADDDYDYLFKVVLIGDSGVGKSNLLSRFTRNEFSLESKSTIGVEFATRSIHVDDKVVKAQIWDTAGQERYRAITSAYYRGAVGALVVYDVTRHVTFENVERWMRELRDHTDANIVIMLVGNKADLRHLRAVPTEDAKAFAERENAFFMETGVLEALN

SEQ ID NO: 354605 - protein, 62 aa, Zea mays
  Clone ID: MRT4577_86570C.1.pep
KTTCFYQQITKEEGKKKNRYNHHHLINVFLHLLLHAYFLLVDHGLRVATIQMYNGARARMSP

SEQ ID NO: 354606 - protein, 79 aa, Zea mays
  Clone ID: MRT4577_86571C.1.pep
TETGFTSRVPYLTGKSLRVAGLSLSSGSSVGVGAGAERALAGGNRLHQGRTRLHQRRSYSARALAGDVRPRMGQGRVLL

SEQ ID NO: 354607 - protein, 107 aa, Zea mays
  unsure (1)..(107): unsure at all Xaa locations
  Clone ID: MRT4577_86572C.1.pep
QHLASDAGKDVTRKVGLVYQMNIAPHNIGVDEEIFEVELKNDEVNKGPYQGKSDATVSFADDXDFLGIAAVKTNAQIAFIRGAIMIEESISASQKFTPDIFTEPDKV

SEQ ID NO: 354608 - protein, 103 aa, Zea mays
  unsure (1)..(103): unsure at all Xaa locations
  Clone ID: MRT4577_86573C.1.pep
GAAAGMDHGGEGRVAAARRTLRAGVDKSRASGXSLARAGPRLEEIQAALPALEAAVRPIRAPHAELAAAGPHIDRAESPAGSVLKVFDAVHXLEPPLLAPGAA

SEQ ID NO: 354609 - protein, 107 aa, Zea mays
  Clone ID: MRT4577_86574C.1.pep
AVSKIASLQEFIPHDFDASDHGTSSFPVSAVHRIGILDIRIFNTDRHAGNLLVKKLGPGADNFGEQTELIPIDHGLCLPECLEDPYFEWIHWPQASVPFSEEEEEVG

SEQ ID NO: 354610 - protein, 96 aa, Zea mays
  Clone ID: MRT4577_86575C.1.pep
RIFSILWLCVGREDGLAAVNIHGSAGGGSAYSMAYEGTFTLTFVTGRAVWIGAYLARLGVRCIPRCDQPIIVTGVSALDKLLGRQVRLAGRALARA

SEQ ID NO: 354611 - protein, 78 aa, Zea mays
  Clone ID: MRT4577_86576C.1.pep
PRVRTGKASEHQSGSRSANELLPPSASFVKLSDMSPKQWSAFLDKFQELLPGALSARKHAAGVVGQRSMPRLGTSCQF

SEQ ID NO: 354612 - protein, 77 aa, Zea mays
  Clone ID: MRT4577_86578C.1.pep
VLLRPGQSPSLGGAYPLFVSPVPRPILLRCLSTGRTCTRTTKGSLLGDGWNIHPRWTGERWQTSHSWSCTVRSSRIG

SEQ ID NO: 354613 - protein, 93 aa, Zea mays
  Clone ID: MRT4577_86579C.1.pep
DPRVQPGKGRTRTMGGPQLALKRGVKKGGGIKGKEKPGEKRFPGKKATQQTSQKQKGQRRGGQKRGGPKKKGHPQKGRFPEGKPCRPEPIRNR

SEQ ID NO: 354614 - protein, 216 aa, Zea mays
  Clone ID: MRT4577_8657C.1.pep
MAYRADDDYDYLFKVVLIGDSGVGKSNLLSRFTRNEFSLESKSTIGVEFATRSIHVEDKVVKAQIWDTAGQERYRAITSAYYRGAVGALVVYDVTRHVTFENVERWMRELRDHTDANIVMMLVGNKADLRHLRAVPTEDAKAFAERQNAFFMETSALEAMNVEDAFTEVLAQIYRVVSKKALDIGDDPAAPPRGHTINVGGKDDVSAVKKSACCSS

SEQ ID NO: 354615 - protein, 135 aa, Zea mays
  unsure (1)..(135): unsure at all Xaa locations
  Clone ID: MRT4577_86580C.1.pep
DRSTKRGFVVWDPLTGSRQHGGMPSASYPSHSCRYTSYTGAVVCAKAGCDDDHLDCQAGPFRVVCVETNLLKPVFACATSYSSVTGAWSAPVPNHDSHDFNYYXEKLXKQSLLVGDAVYFLFQDDQSILTYDLGR

SEQ ID NO: 354616 - protein, 47 aa, Zea mays
  Clone ID: MRT4577_86581C.1.pep
TPLYQKKNRGRVVQAQGKRSRPAAAAAAALERQSITWAARRNSLLTV

SEQ ID NO: 354617 - protein, 88 aa, Zea mays
  Clone ID: MRT4577_86582C.1.pep
SVNGPCFFNHLQRPATKDAWVIGGLNVLGIINEPTGAGIGYGLDKEATNVGEKNGLIFDPGGGTFDGFLLTIGGGIFEVKGTTCDTHF

SEQ ID NO: 354618 - protein, 97 aa, Zea mays
  Clone ID: MRT4577_86583C.1.pep
FKADRWKFPLIGANLSPREKFKGDPGQQGAQSLIKKFPMCQLFFQNFCPPKNLLLFSCFPLFSFPLPLKVNNGGLFLQLLIFFSPPKCNCTGPPVIV

SEQ ID NO: 354619 - protein, 64 aa, Zea mays
  Clone ID: MRT4577_86584C.1.pep
PPPVRSPCTQIIKPPPVPFNLGKRATPNQFPPSEIKFPPVSPKVSPPPRNLKPPFKALRPPPFM

SEQ ID NO: 354620 - protein, 39 aa, Zea mays
  unsure (1)..(39): unsure at all Xaa locations
  Clone ID: MRT4577_86585C.1.pep
RRRPXPASARMAATTAGSWTEHKGVAQTVRPRARVATDR

SEQ ID NO: 354621 - protein, 73 aa, Zea mays
  Clone ID: MRT4577_86586C.1.pep
PPNCNRVGGFCLAFLKGHWGPALTIPRGRVSPCSQVVDPNPSDPLVPKIAPLFKPDRPKLENPAGPWSQRYAR

SEQ ID NO: 354622 - protein, 77 aa, Zea mays
  Clone ID: MRT4577_86587C.1.pep
LEDLTNQEHSNTGFIFPEPSQNNDSSCNPLYRQVRHTHTHTHHWSRRAKVQSRHVSGPKARGSRRCKLNRSLCLLQG

SEQ ID NO: 354623 - protein, 147 aa, Zea mays
  Clone ID: MRT4577_86588C.1.pep
TADAWGGGSAKRERYTHGFSASQMAALTALCGALVPSLPPADRRNGHHHNPQPEEDGGSNKVVEEFLLASAADPPVPGEVAELMSRKCLPEALALVRAVLWLLGTRLGSLALCGARCLSGRFPFVRRFDELPLEHREAALRRWSRQT

SEQ ID NO: 354624 - protein, 36 aa, Zea mays
  Clone ID: MRT4577_86589C.1.pep
IRGGKQPLEALLIYWCKNHSLCIHEPVAVTIDCPHS

SEQ ID NO: 354625 - protein, 166 aa, Zea mays
  Clone ID: MRT4577_8658C.1.pep
KYMTLAPSRDAHAAARDLHEGVWRHPGAPAETAAPPRRREKGGGRQGESIKRRRGRWKRRPAATAGRPPAAPATEEDVAEGAEGEAAGNRPVSRESNPRDGGKSGGGFLGFHCFVPKSDSTGQAYPVLSRIGLGWEGSTSERDRSSRRSCRSLGLFDLRLRPPVWL

SEQ ID NO: 354626 - protein, 65 aa, Zea mays
  Clone ID: MRT4577_86590C.1.pep
IPTRPELLRVLYPVFIHCFMDLVAEGHMHNARSFFHTFREAHKVMHSRDLQKLEGILSPSHLEVI

SEQ ID NO: 354627 - protein, 113 aa, Zea mays
  Clone ID: MRT4577_86591C.1.pep
RPGMNTSIRRTYEALWSDPTHQFTREDFKSPSTTWINKPWIRVQRTVKLQWLSSYSNGRDDVAGSDSARIWSDHPLCESDKGLVYTRSALLKVQCDHSQNNFCYFTPTVIWDG

SEQ ID NO: 354628 - protein, 51 aa, Zea mays
  Clone ID: MRT4577_86592C.1.pep
CLHSRLIKFYSSRFSSFFFFFFFFFFFFFLEYQLFLLAVITLLDDTTQMRV

SEQ ID NO: 354629 - protein, 390 aa, Zea mays
  unsure (1)..(390): unsure at all Xaa locations
  Clone ID: MRT4577_86593C.1.pep
MSSDDEVREEKELDLSSNDVVTKYKTAAEILNNALKLVVSECKPKAKIVDLCEKGDSFIREXRSFCVLVLLVASFLLICILTWAYCLEXQTGNVYKNAKRKIERGIAFPTCVSVNNTVCHFSPLTTDDAVLEENDMVKIDMGCHIDGFIAVVAHTHVIANGPVTGRAADVLAAANTAAEVAMRLVRPGKKNKDVTEAIQKVAAVYDCKIVEGVLSHQLKQFVIDGNKVVLSVSNADTKVDDAEFEENEVYAIDIVTSTGEGKPKLLDEKQTTIYKRAVDKNYNLKMKASRFIFSEISQKFPIMPFTAXGDLVAHIKFTVLLMPNGSDRITSYPLQELKPTKSIEDNAEIKAWLALGTKSKKKGGGKKKKGKKGDAAGDPMEATNDATSQE

SEQ ID NO: 354630 - protein, 40 aa, Zea mays
  Clone ID: MRT4577_86594C.1.pep
FGVFFFFFFFFLVFFFFNQASALSVQTTCHVYNYMIKTLE

SEQ ID NO: 354631 - protein, 392 aa, Zea mays
  Clone ID: MRT4577_86595C.1.pep
MSSDDEVREEKELDLSSNDVVTKYKTAAEILNNALKLVVSECKPKAKIVDLCEKGDSFIREQTGNVYKNAKRKIERGIAFPTCVSVNNTVCHFSPLTTDDAVLEENDMVKIDMGCHIDGFIAVVAHTHVIANGPVTGRAADVLAAANTAAEVAMRLVRPGKKNKDVTEAIQKVAAVYDCKIVEGVLSHQLKQFVIDGNKVVLSVSNADTKVDDAEFEENEVYAIDIVTSTGEGKPKLLDEKQTTIYKRAVDKNYNLKMKASRFIFSEISQKFPIMPFTARALEEKRARLGLVECMNHELLQPYPVLHEKPGDLVAHIKFTVLLMPNGSDRITSYPLQELKPTKSIEDNAEIKAWLALGTKSKKKGGGKKKKGKKGDAAGDPMEATNDATSQE

SEQ ID NO: 354632 - protein, 65 aa, Zea mays
  unsure (1)..(65): unsure at all Xaa locations
  Clone ID: MRT4577_86596C.1.pep
ALQKAFGYVFLVGFQVPFKVLGLWLFMGXKMXEIVLAFVFDKEVWGWAYVCLSDHAQKGRVHALV

SEQ ID NO: 354633 - protein, 392 aa, Zea mays; identical to SEQ ID NO: 354631
  Clone ID: MRT4577_86597C.1.pep

SEQ ID NO: 354634 - protein, 321 aa, Zea mays
  Clone ID: MRT4577_86598C.1.pep
MATGELDSLQRDIKAPLYSSVSVNGESIPLEPDLVARRTLSEGQFPSVLDVTNALEAKWTGKDDPVSSKVTMPESTASSEDSEEHMGDNTPSYASILLSKLGDSAADHSNWIEMPFLLFYRSLNKQWNRSNRFDALNEYSPEYVPFLREVERHIGPKFFFPIGISDTVVGVYDDEPTSIISYALASHEYHLQMSDELEREMTDTSLPLCDSRSVSLTELDECTSELLRSVVSTEDIILSMSGRKNPLASDSLVPRKVSHIKVNFGDEGPLGQVKYTVICYYAKQFDALRRLCCPSERDFVRSLSRCKKWGAQGGKSNVFFA

SEQ ID NO: 354635 - protein, 111 aa, Zea mays
  Clone ID: MRT4577_86599C.1.pep
GLKCSFQKNRKKIFFRMLFIGISQPNPKVANFRKSCQARNLRRPLANKKRSPRVRMGRVSPPRKTQMESRILSFRRPKNPPDPVHAASSTTMDRVTKRVKALKKKKKKLTN

SEQ ID NO: 354636 - protein, 52 aa, Zea mays
  Clone ID: MRT4577_8659C.1.pep
LADIWEEIVLPSKVLNIVTRLGPDAGAPLSAHPDVDKVAFTGNFETGKNIIA

SEQ ID NO: 354637 - protein, 61 aa, Zea mays
  Clone ID: MRT4577_865C.1.pep
LVGCKGFSTPRVAKGASRQPYTTRQSGWLRQWHRLLAARTRLTDPPAGGQQMLWLLACNLT

SEQ ID NO: 354638 - protein, 49 aa, Zea mays
  Clone ID: MRT4577_86600C.1.pep
VLQAIEQQHPQSGPFSGLLPCHLAHLLTPMCGLQYRTPCPRDAAGVVPL

SEQ ID NO: 354639 - protein, 96 aa, Zea mays
  unsure (1)..(96): unsure at all Xaa locations
  Clone ID: MRT4577_86601C.1.pep
STFPPPPTXKGEDVIIWGRDINHPKHFSLLFLPMKHSSLHLYKVNSFPIYDPKKPCHFTSFLATMLSSLTLFLSLKSQYPNSIIRKPVDAVTMIET

SEQ ID NO: 354640 - protein, 74 aa, Zea mays
  Clone ID: MRT4577_86602C.1.pep
SCIVAALRITLCSELTPSISLAFSASAKAAPILPNVRADLGSGRLGHRTELTCLRLFLVARASTRYALSTSSKH

SEQ ID NO: 354641 - protein, 267 aa, Zea mays
  Clone ID: MRT4577_86603C.1.pep
MASITLLSLAPTAIFLHIPAFTSSSVVGPGILAGRWAAPRALPLRALPPRRVTVVCSSAAAAAEASDAAAPVEKFRLDNLGPQKGSRRRPKRKGRGIAAGQGASCGFGMRGQKSRSGPGVRRGFEGGQMPLYRRLPKLRGIAGGMHIGLPKYVPFNLKDIVRGGFKDGDEISLESLKSRGLINPSGRERKLPLKILGDGDVSVKLNIKAGAFSASAKEKLEAAGCSLTLLPKRKKWLPQNYLKNQARAEEYFAKKKAGAGESDSGSA

SEQ ID NO: 354642 - protein, 156 aa, Zea mays
  Clone ID: MRT4577_86604C.1.pep
MNQSPSDLFPLYYPLASPDQQIIYRRVLSPPRNRDLERGDPPLVSSQIAVTQVLAWCSGVVARCLGAMAAIPPLDHWRLGDCSPGLGITVVPCYVGDQAHLNQITGEEQVAQEEDYYEECWGSSSLPKVLKEKTPSDKTIQRHTRHDDTDGSRSYG

SEQ ID NO: 354643 - protein, 75 aa, Zea mays
  unsure (1)..(75): unsure at all Xaa locations
  Clone ID: MRT4577_86605C.1.pep
CIFPSSYLLFVVVLPFSEVLDWSTFSVVLAERRAYRRTSRXFLWHAXATPIKYDFFHMILHSIWLSRANQVELDG

SEQ ID NO: 354644 - protein, 93 aa, Zea mays
  unsure (1)..(93): unsure at all Xaa locations
  Clone ID: MRT4577_86606C.1.pep
LLRDGSSGLSTRLADPAPQNGRIVSRIKNQPYXPQCLYCPGGPEPSSTIYYARTKKKGDDEFPYCVHIVSXEKDNDSREELEAARIACHKYMT

SEQ ID NO: 354645 - protein, 120 aa, Zea mays
  unsure (1)..(120): unsure at all Xaa locations
  Clone ID: MRT4577_86607C.1.pep
LAWLRSVWPAAATEAPPGKNTIVVGVHQSQHMFYPLQWHCITYSRQASRXQYRLVVVTAKPTAVFAVGLTGPSASDVLPYVEADLKRLRLLVFEKAKGLCTQANDALFEALEGDAWNVLC

SEQ ID NO: 354646 - protein, 43 aa, Zea mays
  Clone ID: MRT4577_86608C.1.pep
SVTNINLTIVYSSKIKIISNLFFKNSRLSQILDLSRYCRLQYT

SEQ ID NO: 354647 - protein, 287 aa, Zea mays
  Clone ID: MRT4577_86609C.1.pep
MYPYRMSNVAIGYLNLATLLASIPVIGAGLWLAKGSATPTCSSILQAPLLAVGFAVLLVSLAGFVGACFHVAWALWLYLAAVMLLIAFLLGLTVFGFAVTAGGGGEQVYGRPYREYRVADYSPWLQRHVRDARYWRPALACVVGSRACPKIHNWTPMDYLQHDLTPIQSGCCKPPTACQYSGGVAVGAQDEDCYRWNNAPGVLCYQCDSCKAGVMEQVRQDWHKIAVLNVVVLVALVCICSCGCCAFRNARRSLSEYPYGVNQMSKIDPRWDYYWWRWWRGRREQLY

SEQ ID NO: 354648 - protein, 51 aa, Zea mays
  Clone ID: MRT4577_8660C.1.pep
ELKYRSESVKSYVGAPTNIWLQLHALWIDQHACRHTCMSSQTDAYHATRDR

SEQ ID NO: 354649 - protein, 251 aa, Zea mays
  unsure (1)..(251): unsure at all Xaa locations
  Clone ID: MRT4577_86610C.1.pep
MVAKILCLIMLLGLSTSAATASIFPQCSQAPIASLLPPYLSPAMXSLCENPILLPYRIQXAIAARILPLSPLFLQQSSSLSQKLPLVHLLLLNIHVHQLLQLVLITYAVYSQQQQVPLVHLMAHNISAQQLQQLVLAKLADYSQQQQFLPINQXAALNSADYPHQQQLLPFSHLCVDYPRQFLPFNRLAAXNSLAYVPRQQLLPFSQLAAVRPAAYLTQQHLLPYYLHNAPNVGTLLHXDTLLTYDQLALT

SEQ ID NO: 354650 - protein, 68 aa, Zea mays
  Clone ID: MRT4577_86611C.1.pep
ATSDCRGIGEHGWAGGHVFCETVTCVSDGLLQRNCEGFMRKRELSFGLASTVASISFYLINNLFVTPP

SEQ ID NO: 354651 - protein, 86 aa, Zea mays
  Clone ID: MRT4577_86612C.1.pep
GNKVFSASCLSNAVVVVVRCAIFVRFACARILWYLQLVVVVARTRVRCNCRLGEWMLRVIRVSGGRPCVLTAIEASEPCGIMKEFF

SEQ ID NO: 354652 - protein, 98 aa, Zea mays
  Clone ID: MRT4577_86613C.1.pep
MDQVQGDTPYGAGTFPAEGSRCQREVDLNHPSPQGKFFAGIPKKLKGSACICTSPFVKYHKPFPDSYNPANRLVLCSSPGGLNANVVPWVPPPGINFQ

SEQ ID NO: 354653 - protein, 41 aa, Zea mays
  Clone ID: MRT4577_86614C.1.pep
HGGFIAALEFPSDCYHTIWNVVTYRPPAVEYSDSMAERVLA

SEQ ID NO: 354654 - protein, 77 aa, Zea mays
  Clone ID: MRT4577_86615C.1.pep
ACRYRFFFPVLTHSYTFTRPCLCYHFIPEPSRRPVRKTRPHARQAVTRRRAARLLRTRPCVLTVLHCLRPPRCLDPC

SEQ ID NO: 354655 - protein, 73 aa, Zea mays
  Clone ID: MRT4577_86616C.1.pep
FKFVGLSKFLSHFVVIAHVFSPFIHVLCSALSTKSVLNGRLIINKADIIHTIRSNMVDYPMIHIMCLKLLTCH

SEQ ID NO: 354656 - protein, 221 aa, Zea mays
  Clone ID: MRT4577_86617C.1.pep
MARRPARCYRYCKNKPYPKSRFNRGVPDPKIRIFDLGRKRANVDDFPLCIHLVSNEYEQLSSEALEAARICANKYLVKNTGKEGFHLRVRAHPFHVVRINKMLSCAGADRLQTGMRGAWGKPNGTVARVNIGQILMSVRTRDANRAIALEALRRSQYKFPGRQKIIVSKNWGFTPLRREEYLDKKAAGRVKVDGAYVQFLSNHGSLERNIRRFPDAFKSEA

SEQ ID NO: 354657 - protein, 71 aa, Zea mays
  Clone ID: MRT4577_86618C.1.pep
MVSPNVRPRIIKKRTKKFTRHQSDRYDRVKLNWRKPKGIDNRVRRRFKGERFMPNIGYGSAASTKFMLPNG

SEQ ID NO: 354658 - protein, 80 aa, Zea mays
  Clone ID: MRT4577_86619C.1.pep
WSRSSSAFRLPGGQELENLLHLTVPLAPTLWRGTAGKRLPHNRGPRKLVVIAASSAQQKHQVNLVRHGGPRWRFVGRSPP

SEQ ID NO: 354659 - protein, 223 aa, Zea mays
  unsure (1)..(223): unsure at all Xaa locations
  Clone ID: MRT4577_8661C.1.pep
MTAQTKKRGATENGDGVGLGLAAFIANNEDVGPVVRHAFESGKPEALLHSLQNIVKNKEVEIEEICRLHYEEFILAVDELRGVLVDADELKGTLSDENLRLQEVASALLLKLDELFEIYSVNSNVGEALATLKICLQVTNLCKVCNRDITEAKLLSALKTLELIEKDYLQNIPLKLLKKXIHKQVPMXKLYIEKKFVVELMEWLVYIRRTAKDIGQVAINRHL

SEQ ID NO: 354660 - protein, 248 aa, Zea mays
  Clone ID: MRT4577_86620C.1.pep
VLIVGCLSFQGYVVGYCKAAKALLSVISSLHTRAHDVSSCDRKIHISRFTNSNYHQNIVVAVKEAEHLNWQSRLRIAMGVLYCLQYMHQQNTPVTLKNLNSSYIYLTEDDAAKVSDISFSVDKREDDEYDAPDEYSTAYKFALLLLETISGRRLALEDDGLLVLWARRYLTCASPVMGMIDPTLNSVPEEHARAFSELIRLCLSEGRRQRPPMAEVPKRMQEIPGVTQDQAIPRNSALWWAELEIMTS

SEQ ID NO: 354661 - protein, 97 aa, Zea mays
  Clone ID: MRT4577_86621C.1.pep
GRGIFCFYFFLPLSSSLTVFNPTLPGLAQLPAYNTARRPIRLTTPHKHHTFFFQLLVPIRHHLQASDIDGTTYLQFRVVTSAPLESLLVPKQGSNTV

SEQ ID NO: 354662 - protein, 51 aa, Zea mays
  Clone ID: MRT4577_86622C.1.pep
SGCEGKFYYTRSAFLSAGEAYPGFAHGGSQVQGKGENGVFFVHPMPGNRQF

SEQ ID NO: 354663 - protein, 85 aa, Zea mays
  unsure (1)..(85): unsure at all Xaa locations
  Clone ID: MRT4577_86623C.1.pep
TFMNLIIFLCLCPSVEKQMYFKVQISAKYVDAYGCEIIDLCIILFHNFSNCMHVDLMQSATLIFAYKLLIAYDHSLFQQKLVXVX

SEQ ID NO: 354664 - protein, 96 aa, Zea mays
  Clone ID: MRT4577_86624C.1.pep
SPSPVLRGACVFIWLPGLLSIFFSLLSPRGEGIFFRGVFCPPPAPRVAWSLGVFCLKLLLWSFATFLLGHGFQSFFPWCPAFVGVACKKILMDSNT

SEQ ID NO: 354665 - protein, 77 aa, Zea mays
  Clone ID: MRT4577_86625C.1.pep
QTRGSPRTLARTCPSPPLPSPSYTPSSRVAISEQGGARRLLITRSPRPPRRHITWMPRHGRLLQLRVRRLVPSRMID

SEQ ID NO: 354666 - protein, 104 aa, Zea mays
  unsure (1)..(104): unsure at all Xaa locations
  Clone ID: MRT4577_86626C.1.pep
MQYHPENDRNKNRLPRRMPRLNVSTNTNLEGADTSAILAQISENVVNIVVKPEDKLMLDLYESMPMAFGGTHEAIDXGELVSIGGLNPDVYNILNAGIAAILDY

SEQ ID NO: 354667 - protein, 42 aa, Zea mays
  unsure (1)..(42): unsure at all Xaa locations
  Clone ID: MRT4577_86627C.1.pep
RSIHRHRRKRIPSWPLXRWTCPRGSRSRSPPICLLRMGRAVS

SEQ ID NO: 354668 - protein, 228 aa, Zea mays
  unsure (1)..(228): unsure at all Xaa locations
  Clone ID: MRT4577_86628C.1.pep
MSGAGEYQEMAASVPPALKAITLTHVRYHRGDRVGLFLAWVSLIPVFISLGGFISHFMFRRELQGICFALGLLVSQVLNELIKHSVAQSRPASCELLETCDSHGWPSSHAQYTFFFATYLSLFXCSGGRRRAXVMASFSWPLAFLTMLSRVYLGYHTVPQVFAGAVVGLVFGAIWYWFANTILAQYFPMIEESXLGRWFYIKDTSHIQDVLKFEYDNARAAREESATG

SEQ ID NO: 354669 - protein, 534 aa, Zea mays
  Clone ID: MRT4577_86629C.1.pep
HASALAHAIANETGVPFYKISAPEVVSGVSGASEENIRGLFQKAYRTAPSIVFIDEIDAIASKRENLQREMERRIVTQLMTCMDQFHQNIGSGSSNLEAESSEKKPGYVIVIGATNRPDAVDQALRRPGRFDREISLGVPDENARKQILKMLTQHLRLEGEFDLFKIARATPGFVGADLKALVDKAGNLAMKRIIDERRARCCIEQDGSSKHDWWRQPWDESEVDELHITMNDFEEAAKMVQPSLRREGFSSVPGVTWDDVGGLDSLRKEFDRCIIRCIKHPEDYEVFGVNMQAGFLLFGPPGCGKTLIAKAVAHEAGANFIHIKGPELLNKYVGESESEVRKIFTRARTNSPCILFFDEVDALTTKRGKEGGWVVERLLNQLLIELDGADQRQGVYVIGATNRIDVIDDAVLRPGRFGKKHYVPLPGADERVSILKAHARSKPISTDVDLDALGRRAECNNLTGADLASLVNEAAMAALEERLEFRDKGTSSLSSSSLIEMPHFERALSKIKPSVSEQQIKNYEALSMRYSSN

SEQ ID NO: 354670 - protein, 68 aa, Zea mays
  Clone ID: MRT4577_8662C.1.pep
YYNSFQMLVIAKVSHRGSCVHERSSVKCKCCISVIHFWVFIPCVTRFKARNHQMLGKTCIKNRLSFLY

SEQ ID NO: 354671 - protein, 79 aa, Zea mays
  unsure (1)..(79): unsure at all Xaa locations
  Clone ID: MRT4577_86630C.1.pep
MRKNMASPQASSSNSKSFEPSNKKQRKXAQRRVQHVGVQGPYIKTKXSHIPITFSQEDLHLKDYPHRDAMLISCRRGRE

SEQ ID NO: 354672 - protein, 43 aa, Zea mays
  Clone ID: MRT4577_86631C.1.pep
RPDSRLVVFFFFFLPSHDRLTVYKILFNNGTVRLSDINLRIHL

SEQ ID NO: 354673 - protein, 113 aa, Zea mays
  unsure (1)..(113): unsure at all Xaa locations
  Clone ID: MRT4577_86632C.1.pep
NHGAENEGHPYKLATRADAELDXCLAQDPDXKVACETCTKTTRRRXDGETTTXASADNEKIXRDTSREIGPTYDDQGLDAHRCKGQVNIEQQPPNNAQGAHGHYTKPAEEIGT

SEQ ID NO: 354674 - protein, 465 aa, Zea mays
  unsure (1)..(465): unsure at all Xaa locations
  Clone ID: MRT4577_86633C.1.pep
MAKPTPVASAEEAAAMRRRLRRLVAAVAAGSADAEAFDEAAEALAKLRDAELGPRKDRTSDGRENKRSTEAAVPEHFLCPISSEIMRDPVVLASGQTYDRRFIQEWLSAGNRTCPQTQQVLSNTIITPNHLVRSMISQWCTDNGITLPPVENQDEDLVTNNERETFRKLFERIVSSSSDLSEQREAIKELRLRTKCNSSLRAAIGERPDSISQMISVASSPELENSAEVVEDTVTAILNLSIHESNKKIIGDDPLAVPFLIKALQSGTMEARSNAAAAIFSLSALDGNKARIGELGAMRPLVELLEHGSTAARKDAASAIFNLCTLHENKSRAXKSGAVDVTLRAVACAGDGSGSGSLVDESLAVLALLSGDHEAVEEVGETGGVASMLHVVKDDPCKRNKENAAAVLFAVCVYDRTRLREVAEHEKLNGSLGWLARNGTSRARRKAAGILDKMKRSMHHPHYSC

SEQ ID NO: 354675 - protein, 104 aa, Zea mays
  unsure (1)..(104): unsure at all Xaa locations
  Clone ID: MRT4577_86634C.1.pep
KPTERQAQQAHPTNTPLGKTGSAHKTKKKGSPRVYPDTSCRNHRPGSDSRAHKTKTKKTQHRGRTMGPPPAPPPLALQVLFFSRTNGAXRSSAPRLGKQRRRRC

SEQ ID NO: 354676 - protein, 118 aa, Zea mays
  unsure (1)..(118): unsure at all Xaa locations
  Clone ID: MRT4577_86635C.1.pep
PTRPPTRFIFSNLGKLYCLLIRFSITKTLDRYEKNRYXRPHTTAQIKENXLIHTSLNEYFKLKSKLTKLHTTHMNMLDENLYSLSVKXLKHLEKQHNSSLMHIISTXSQHILDQLTDL

SEQ ID NO: 354677 - protein, 31 aa, Zea mays
  Clone ID: MRT4577_86636C.1.pep
DSRVDSRVRHTVICYTPLHKVPLDQLARNNS

SEQ ID NO: 354678 - protein, 81 aa, Zea mays
  Clone ID: MRT4577_86637C.1.pep
VHVVLVSMATTLLSVPEYHIRSQWACAQSPARSSQQPPRPQWSSFAKARAHRVTSSSSGTSTGVGTLLGTSVLTFFAYYLQ

SEQ ID NO: 354679 - protein, 93 aa, Zea mays
  Clone ID: MRT4577_86638C.1.pep
VRGGRDRRKEGRKVERQPANKEAKVSSMSVAVAAVFLSSCSLMMSVRGSKGRGRGGIIQSNSTSLVRPSSSSVPYFCSLPSVQLSNELLALSL

SEQ ID NO: 354680 - protein, 52 aa, Zea mays
  Clone ID: MRT4577_86639C.1.pep
FFFAFKKCILGFIFFLKKKKNKKIKKLKLIKIKKNNNIKKKNKKKKKKKKKK

SEQ ID NO: 354681 - protein, 489 aa, Zea mays
  Clone ID: MRT4577_8663C.1.pep
MVSINHVDAMVSINHVDQVQTIEESAIDQAHKTKSGAVDEIHGNLESTFSQLQLSQADTANGMQAMQENTTIHSQPSQLDTLNPTHRSQENSGNQLQSVLTDSSIPKRTTQKCTIDEPSQPGINHIRTDQEFTGNQFPSSLPVDTVISLGDTEECTAGHSQPSNTDSTGQIQANEENTANQVQSSLTDTVIPVPAIQEYATGYSQLSKANTSDKKQANQEYIADQVQSSLTDTLIPVQAIKEYTTGYPHINKADISNQMQVNQENTDDHLYLRQVGCLAQMQIIEQNLPKQPQLSQPDTGDQIRIDLESTTNHLQPNYDENSMLQSGFSWAPEQNRGAPTTDFWKNVESQASSVSMPINGAPLSSFPANVRFQNAAAAAAAAEPALPPQVAPTETGSDQSGLAFQSVFGNIWSDPCIEFAFKTLTGDIPVLDDTTAVTDYFPEQQDLNKGPAPNRAGSVDNSRNHTQVDVNLPPPALDDFYNGNWFPPQ

SEQ ID NO: 354682 - protein, 72 aa, Zea mays
  unsure (1)..(72): unsure at all Xaa locations
  Clone ID: MRT4577_86640C.1.pep
KTPVTTWYRTSSISTTVKKSPGDXPVYTTIDCFTLSHIFXXXISPSGGLXLRLVEVLCRCAITSSLLSPLCG

SEQ ID NO: 354683 - protein, 138 aa, Zea mays
  Clone ID: MRT4577_86641C.1.pep
MPCSFCHSREISISVAAAAEVGGADHRSMSMEGLIPFVCGAISKRRAAKRAVDYERLSSAGAPPTRGWGHERLPGGAYDHPRSQSCRFAARSSPDERGFSRDEGVQDEPSPPGGDGWRGLSKSRRFSSMRLFGCVSGA

SEQ ID NO: 354684 - protein, 103 aa, Zea mays
  Clone ID: MRT4577_86642C.1.pep
SLVLTYAGQTAYLINHVGDFGDGFYKFVPRPVYWPMFVIATLAAIVASQSLISATFSVVKQSVALDYFPRVRVVHTSKDKEGEVYSPETNYLLMLLCVGAIIG

SEQ ID NO: 354685 - protein, 103 aa, Zea mays
  Clone ID: MRT4577_86643C.1.pep
KKACGAFSIKKTGRPLIIGVYAKPIFQGQSTMGVKRPGYSLTEQGFKNFARCRFGLLGTKVGPQLGSETLKLGHDLAVLHTVNNLAWVYFLGTSVAGRICHCG

SEQ ID NO: 354686 - protein, 72 aa, Zea mays
  Clone ID: MRT4577_86644C.1.pep
TPSRRRLPPFKSFLKVFPTPFFSNKLCPLSSLKVSLSSPWGFLTPVPFFVPGSQFFPPFYPFVNTYVFLFFF

SEQ ID NO: 354687 - protein, 187 aa, Zea mays
  unsure (1)..(187): unsure at all Xaa locations
  Clone ID: MRT4577_86645C.1.pep
MKIIPVACLEXNYAYLIVDESTKAAAAVDPVEPEKVLAAASEVGAYIDCVLTTHHHWDHAGGNEKMRLLVPGIKVYGGSMDNVKGCTDQVENGTKLSIGKEIEILCLHTPCHTKGHISYYVTSKEEEDPAVFTGDTLFIAGCGRFFEGTAEQMYQSLCVTLGSLPKSTRVYCGHEASFLALSGPSFL

SEQ ID NO: 354688 - protein, 115 aa, Zea mays
  unsure (1)..(115): unsure at all Xaa locations
  Clone ID: MRT4577_86646C.1.pep
FFVHHLLYLGGLFIYRAGQPILKFKDLNEILNMANTTQYRLTTLVFTNSLNTDNTLTLSLNSYTICLNYFHLFYASIHLGDVQHSSYXREKDFDILNNYLHVKAVPTPINNPSLL

SEQ ID NO: 354689 - protein, 83 aa, Zea mays
  Clone ID: MRT4577_86647C.1.pep
PPPSTHLRRKSRSEEIEAGCNNRFYCLQMQPLFFFPGCSSCWRFFSSALVVSCAIFSFRLKSERYGVRDHACPWLSWDWTCIS

SEQ ID NO: 354690 - protein, 124 aa, Zea mays
  unsure (1)..(124): unsure at all Xaa locations
  Clone ID: MRT4577_86648C.1.pep
MMMRKXSKEAGVTLDYLRRSREKXESWLLPSKGGCACSSLYITATSTTYDXSLHADLRDKVFYLEGHLMPSTIQNDPALILDCKHDIDYNNHIQPKRQYAPQVPKFFDFANKNKDISYTTTRDG

SEQ ID NO: 354691 - protein, 128 aa, Zea mays
  unsure (1)..(128): unsure at all Xaa locations
  Clone ID: MRT4577_86649C.1.pep
LLSCCLVPFSLSLLSWGAVRLCRCWGWLPRWVGRLLLPLARCLCPGLLLLLLSLVLRALLPLLVLSVSPXGGWVPPPPPRFLLSXALACVLRSACWGRSPPGPVLLSACFLGLGCSLSSGSVCVPAAL

SEQ ID NO: 354692 - protein, 73 aa, Zea mays
  unsure (1)..(73): unsure at all Xaa locations
  Clone ID: MRT4577_8664C.1.pep
GGPRFFPRGAPISPVWETEGWALGRRXTRWLRWRWGASRAAALRGRWQGFKFKQAPLLITPGIQASSSPDRPA

SEQ ID NO: 354693 - protein, 112 aa, Zea mays
  Clone ID: MRT4577_86651C.1.pep
DAGLWGHAFWNGKGQVHGGRAVNPLADEICFLHPLQEVCTATAGRLAFNYPVHRQFGLAEHASGRFRQAHSAGAEARFGDGPDYFTDASSGPLELRHDVLEHAGRHLCGTSS

SEQ ID NO: 354694 - protein, 102 aa, Zea mays
  Clone ID: MRT4577_86652C.1.pep
RRRRAHSPTAEDLAREPSMREARTVSNEETPPPPEPRLSLLAAAGEKTCPERKGCTRRRNFQRPNVLECRITTRPHSEKTRPTSPYASEMTENKNTEGGYFF

SEQ ID NO: 354695 - protein, 251 aa, Zea mays
  Clone ID: MRT4577_86653C.1.pep
MALNGGKTTLVQDEEKQQLLLEKHTEKHFTAGEVVRDIIIGVSDGLTVPFALAAGLSGANASSALVLTAGLAEVAAGAISMGLGGYLAAKSEADHYNRELQREQDEIDTVPDVEAAEIADILSQYGLGPEEYGPVVTSLRNNPKAWLEFMMKFELGLERPEPRRALVSAATIALSYVAGGLVPLLPYMFVPEAARAMAVSVAVTLAALLFFGFVKGRFTGDRPFFSAVQTTVVGALASAAAFAMARAVQSI

SEQ ID NO: 354696 - protein, 76 aa, Zea mays
  Clone ID: MRT4577_86654C.1.pep
EPCLQNMLVSCYMCNFYGPSIWAYTQTGRGSIKITFLQFLMCCVLVLCNIRRCTYTCVSGNAMFPLTCQGTREASC

SEQ ID NO: 354697 - protein, 123 aa, Zea mays
  Clone ID: MRT4577_86655C.1.pep
KQMYPIAQRATVWHRLHLNNQQLSRQYYTTQPSNEEAVQVHHTHTSPCVQLPVTVATYAYIAALIFPRQPSRPVMIDMAIWGMRRPAFTILAASPVFIWTARPWPSRRRRRRRERRRRWSGRR

SEQ ID NO: 354698 - protein, 250 aa, Zea mays
  Clone ID: MRT4577_86656C.1.pep
MALNGGKTFVHDEEKQRLLLEEHTEKHFTAGEVVRDIIIGVSDGLTVPFALAAGLSGANASSALVLTAGLAEVAAGAISMGLGGYLAAKSEADHYNRELQREQDEIDTVPDVEAAEIADILSEYGLGPEEYGPVVTSLRNNPKAWLEFMMKFELGLEKPEPRRALVSAATIALSYVAGGLVPLLPYMFVPEAGRAMAVSVAVTLAALLFFGFVKGRFTGDRPFFSAVQTTVVGALASAAAYAMARAVQSI

SEQ ID NO: 354699 - protein, 71 aa, Zea mays
  Clone ID: MRT4577_86657C.1.pep
SSHLEISQIIYNPSQRTNTKTNIMTLSMSFSRWIYQAAPNSLKIMLQEKIEGMKNNCDNISTAELYTPLQS

SEQ ID NO: 354700 - protein, 643 aa, Zea mays
  unsure (1)..(643): unsure at all Xaa locations
  Clone ID: MRT4577_86658C.1.pep
MDFSRRRGRRTAPVAAIRTLHPIDTRSRDPSRPDPTLPRPPALSSPPATPAVPRDPSQARVEDMASTFGATSTVGLMAAPTGKNVRLQRRANFRVKAAKELYFNKDGSAIKKLQTGVNKLADLVGVTLGPKGRNVVLESKYGSPKIVNDGVTVAREVELEDPVENIGAKLVRQAAAKTNDLAGDGTTTSVVLAQGLIAEGVKVVAAGANPVQITRGIEKTAKALVEELRKLSKEVEDSELADVAAVSAGNNYEIGNMIAEAMSKVGRKGVVTLEEGRSSENFLYVVEGMQFDRGYISPYFVTDSEKMSAEYENCKLLLVDKKITNARXDLINVLEEAIRGAYPILIIAEDIEQEALATLVVNKLRGSLKIAAIKAPGFGERKTQYLDDIAILTGATVIRDEVGLSLDKADNSVLGTAAKVVLTKESTTIVGDGSTQEEVTKRVAQIKNLIEAAEQEYEKEKLNERIAKLAGGVAVIQVGAQTETELKEKKLRVEDALNATKAAVEEGIVVGGGCTLLRLAAKVDAIKDTLENDEQKVGAEIVRRALSYPLKLIAKNAGVNGSVVTEKVLSNDNFKYGYNAATGQYEDLMAAGIIDPTKVVRCCLEHAASVAKTFLTSDVVVVDIKEPESAPLANPMDNSGYGY

SEQ ID NO: 354701 - protein, 64 aa, Zea mays
  Clone ID: MRT4577_86659C.1.pep
AATGQYEDLMAAGIIDPTKVVRCCLEHAASVAKTFLTSDVVVVDIKEPEAAPVANPMDNSGYGY

SEQ ID NO: 354702 - protein, 480 aa, Zea mays
  Clone ID: MRT4577_8665C.1.pep
MVSTNHVDWVQTIEERAIDQAQKSQSGSFDQIHGNLESTFSQLQLSQADPANGMQVIQANTTIHSQPSQLDTLSPTQKKQENSSKQLQSVVTDSSIPKRTTQKCTIDQPSQPDINHIRTDQEFTGNQFPSSLPVDTVISLGDTEEFTAGHSQPRNSDTAGQIQANEENTADQVQLSLAETVILVPAIQEYAAGYSLLSKADTTDQTQANQEYIADQVQSCLTDALIPVKAIEEYTTDYSHISKADITNQIQVNQESTDDHLYLRQVDCLAEMQIIEQNLSKQPQLSQPDTGDQIRIDLESTTNHLQPNYDENSMLQSGFSWAPEQNRGAPTDFWKNVESQASSVSMPINGAPLSSFPANVRFQNAAAAAAAAEPALPPQVAPTETGSDQSGLAFQSLFGNIWSDPCIEFAFKTLTGDIPVLDDTTAVTDYFPEQQDLNKDPAPNCAGSVFDSSRNHTQVDVNLPPPAPDGFYDGSWFPPQ

SEQ ID NO: 354703 - protein, 267 aa, Zea mays
  Clone ID: MRT4577_86660C.1.pep
CKDLLHSEPCVLEGYFTMKPNQLITSHVDIHRVYPYEFQPEFSMSHDLGLNLFSQAGTVLGTSLRHHRKICSSGNAMIHGAFNRLNKLSRALYFWLSRPSDPKILRWLESVAATSSRSCQLRFNQMGSHMQNLTKLQFSFPMREEQAVQLILARLASATIGRLLNEQQRACNLLTLAGAVAIVPPLENISSMMLAESITSRNIDSDIRRLVDQPYVEGKCLSCACPSVPSTIFQEDPIEPKTGIKFPTFLEDDSSPSAAVFPFSLKP

SEQ ID NO: 354704 - protein, 579 aa, Zea mays
  Clone ID: MRT4577_86661C.1.pep
MASTFGATSTVGLMAAPTGKNVRLQRRANFRVKAAKELYFNKDGSAIKKLQTGVNKLADLVGVTLGPKGRNVVLESKYGSPKIVNDGVTVAREVELEDPVENIGAKLVRQAAAKTNDLAGDGTTTSVVLAQGLIAEGVKVVAAGANPVQITRGIEKTAKALVEELRKLSKEVEDSELADVAAVSAGNNYEIGNMIAEAMSKVGRKGVVTLEEGKSSENFLYVVEGMQFDRGYISPYFVTDSEKMTAEYENCKLLLVDKKITNARDLINVLEEAIRGAYPILIIAEDIEQEALATLVVNKLRGSLKIAAIKAPGFGERKTQYLDDIAILTGATVIRDEVGLSLDKADKSVLGTAAKVVLTKESTTIVGDGSTQEEVTKRVAQIKNLIEAAEQEYEKEKLNERIAKLAGGVAVIQVGAQTETELKEKKLRVEDALNATKAAVEEGIVVGGGCTLLRLAAKVDAIKDTLENDEQKVGAEIVRRALSYPLNLIAKNAGVNGSVVTEKVLSNDNFKYGYNAATGQYEDLMAAGIIDPTKVVRCCLEHAASVAKTFLTSDVVVVDIKEPEATPVANPMDNSGYGY

SEQ ID NO: 354705 - protein, 579 aa, Zea mays
  Clone ID: MRT4577_86662C.1.pep
MASTFGATSTVGLMAAPTGKNVRLQRRANFRVKAAKELYFNKDGSAIKKLQTGVNKLADLVGVTLGPKGRNVVLESKYGSPKIVNDGVTVAREVELEDPVENIGAKLVRQAAAKTNDLAGDGTTTSVVLAQGLIAEGVKVVAAGANPVQITRGIEKTAKALVEELRKLSKEVEDSELADVAAVSAGNNYEIGNMIAEAMSKVGRKGVVTLEEGKSSENFLYVVEGMQFDRGYISPYFVTDSEKMTAEYENCKLLLVDKKITNARDLINVLEESIRGAYPILIIAEDIEQEALATLVVNKLRGSLKIAAIKAPGFGERKTQYLDDIAILTGATVIRDEVGLSLDKADKSVLGTAAKVVLTKESTTIVGDGSTQEEVTKRVAQIKNLIEAAEQEYEKEKLNERIAKLAGGVAVIQVGAQTETELKEKKLRVEDALNATKAAVEEGIVVGGGCTLLRLAAKVDAIKDTLENDEQKVGAEIVRRALSYPLKLIAKNAGVNGSVVTEKVLSNDNFKYGYNAATGQYEDLMAAGIIDPTKVVRCCLEHAASVAKTFLTSDVVVVDIKEPEAAPVANPMDNSGYGY

SEQ ID NO: 354706 - protein, 92 aa, Zea mays
  Clone ID: MRT4577_86663C.1.pep
GGIAGFGLGSALLGMAAQRGTLPPSTRAVISRRAPTNGYVYWVTTGSRQRLPLGRNCVVVIGRKPITGRMFCFSYSFRDYSAVHEICFYNKI

SEQ ID NO: 354707 - protein, 71 aa, Zea mays
  Clone ID: MRT4577_86664C.1.pep
VLLSWNMIPGPAEVLGSTPDRRANLRQARVGGHHRDHRLPSPTCGDAYAQWSRHTDARKKSTAQTRTPTPT

SEQ ID NO: 354708 - protein, 66 aa, Zea mays
  Clone ID: MRT4577_86665C.1.pep
RSVLAPTPIFLPHRGISCTAAMDASGPVAGEEGAAGRKAGGPRRSRVAAARPAAFPVAGSALIKKG

SEQ ID NO: 354709 - protein, 72 aa, Zea mays
  Clone ID: MRT4577_86666C.1.pep
WYKRTRTVRPTFSISGWHNFLTRDLGGNNDWKFLGVVNEQCCIHAPNKTASPQNFAKRNWVMWKARGEATIG

SEQ ID NO: 354710 - protein, 51 aa, Zea mays
  Clone ID: MRT4577_86667C.1.pep
LHRHYSYLVVAIVRHDDQASRSRIGRPFGNGLCSIRYFGTIPMHVPSSQSL

SEQ ID NO: 354711 - protein, 535 aa, Zea mays
  Clone ID: MRT4577_86668C.1.pep
GRAVAVCRVYAIIAAVSVVLVAARSFTVAWVGLQTADRFFKQILNSILHAPMSFFDTTPSGRILSRASSDQTNVDLFLPFFVWMSVSMYITVISVLIVTCQVAWPSVIAIIPLVILNIWYRGYYLSTSRELTRLESITKAPVIHHFSETVQGVMTIRCFRKEESFLQENLNRVNSSLRMDFHNNGANEWLGFRLELIGSFVLCFTAVLMVTLPSNFVKPEYVGLSLSYGLSLNQVLFWAIWISCFIENKMVSVERIKQFTNIPSEATWRIKDCLPDSNWPTKGDINVIDLKFRYRHNTPLVLKGITISIHGGEKIGVVGRTGSGKSTLIQALFRIVEPSEGRIIIDGVDICTLGLHDLRSRFGIIPQEPVLFEGTIRSNIDPLEQYSDDEIWQALGRCQLKEAVASKPEKLDASVVDNGENWSVGQRQLLCLGRVMLKHSRILFMDEATASVDSQTDAVIQKIIREDFAACTIISIAHRIPTFSISGWLRLMDCDRVLVIDAGLAKEFDRPANLIERPSLFGALVQEYANRSSDV

SEQ ID NO: 354712 - protein, 126 aa, Zea mays
  Clone ID: MRT4577_86669C.1.pep
GPKHFFNTVFLKQKGVSKKPFFTRKGKTPLKPKPRISFRGPGAPGGGTSGTCGRAGLLPGQANYRDIGKSFKKRAIRVPMEGGVPPPSLWVSRGVALGFLSTPKGKWGGRPLGGNRSNRGGRAVGG

SEQ ID NO: 354713 - protein, 125 aa, Zea mays
  Clone ID: MRT4577_8666C.1.pep
VFTKANAQILQKQRVRNIRLLAVKTVRDDCWTKEANDAKRRRHTTGLRRCAMHALALQKLSCCKRGESSWMRYHALITPRYGRLKILLDCGGELIQCAVYEQQLTDDAGRSLLEGPDHTLMEHIQ

SEQ ID NO: 354714 - protein, 100 aa, Zea mays
  Clone ID: MRT4577_86670C.1.pep
WVGILFYHLFLIAKIPDCIFPYFSIFLCPPPPTIVYTPQVAPLNDPRCAELTPKLLLVIYRESTIVARGHSGPDTKSGICITPPTPGGFTVNSFHATGDI

SEQ ID NO: 354715 - protein, 94 aa, Zea mays
  unsure (1)..(94): unsure at all Xaa locations
  Clone ID: MRT4577_86671C.1.pep
ADHSKAKIFIYHIAKTLRAGYKTVPNCEXLTVLXRSLIEGCYITGDYTEQNYLTYMEGAGLSGKLCAQCIGPDYRRLELRSLNSLQSGDGAVPS

SEQ ID NO: 354716 - protein, 50 aa, Zea mays
  Clone ID: MRT4577_86672C.1.pep
FGKPNYGSKGGCKFPGIRFRKMDLAKAIGPTHGNPLVNGRIGRRLGRRLG

SEQ ID NO: 354717 - protein, 54 aa, Zea mays
  Clone ID: MRT4577_86673C.1.pep
SKNHMVHPSWLYIIDSVHAPVPLPDVKHDHIVSSSEVFTFINTKILGHPGAIFH

SEQ ID NO: 354718 - protein, 346 aa, Zea mays
  unsure (1)..(346): unsure at all Xaa locations
  Clone ID: MRT4577_86674C.1.pep
MATTVRLQLVFRPPAAASPCRRRPSSDHLILRRRPDHPRSSSSRRPQQPQSSSTAIRESRQQQVTLKLTYLEINSWVWEVQQQGQAPVRILVDPVLVGNLDFGAPWLFDAPRRIXVKALGVDDLLLAPEARPDVLLITQSLDDHCHVRTLTQLSARAPDLPVVTTPNAQPVLESLPTPFRRVTYIEPGQSTAVNQQVRVLATAGPVLGPPWQRPENGYILMATGEESGPGLLYYEPHCVYDRSFLEEKQLRADIVITPVVKQLLPANFTLVSGQEDAVDLARLLRARYVVPMSNGDVDAGGLLATVLTKQGTTQSFQALLSEALPEAQVLHPTPGVPLQLQLDWTS

SEQ ID NO: 354719 - protein, 48 aa, Zea mays
  Clone ID: MRT4577_86675C.1.pep
VFLGQIFNQKPKNLLGGGNLIRSYVWEPTQGKTKLDLGDEKVGCVNLR

SEQ ID NO: 354720 - protein, 501 aa, Zea mays
  Clone ID: MRT4577_86676C.1.pep
MPPRTAPAATSTPPRKVPLRKLLRAASVACGVQFGWALQLSLLTPYVQELGIPHAFASLVWLCGPLSGLLVQPLVGHLSDRIGPAASPLGRRRPFIAAGAACIAAAVLTVGFSADLGRLFGDDVTPGSTRLGAICVYLVGFWLLDVGNNGTQGPCRAFLADLTENDPRRTRIANAYFSLFMALGNILGYATGAYSGWYSIFPFTVTESCGISCANLKSAFLLDIIVLVITTYTTVTSVQEPQTFGSDEAQNPGAEQEAFLWELFGSLRYFTLPIWMVLIVTALTWMAWFPFTLFDTDWMGREIYRGSPDNPGETQRYHDGVRMGSFGLMLNSVVLGFTSVVLEKLCRKWGAGLVWGVSNILMTLCFLAMLVITYVAKNMDYPSSGAPPTGIVVASLVVFTILGAPLAITYSIPYAMAASRVENLGLGQGLAMGILNLAIVIPQVIVSLGSGPWDQLFGGGNAPAFAVAAGASFIGGLVAILGLPRARIASSSSRRRGGTHR

SEQ ID NO: 354721 - protein, 101 aa, Zea mays
  unsure (1)..(101): unsure at all Xaa locations
  Clone ID: MRT4577_86677C.1.pep
KTRKASLLKGNQNGCGAENIKTVRMSKPPGWGVMATPRSGGTKDPFIFGLSGGLXTGQIKTGAPFRFEGLAKNNQLVRVEEKLGDSPVFPGTKFRAPVEPF

SEQ ID NO: 354722 - protein, 97 aa, Zea mays
  Clone ID: MRT4577_86678C.1.pep
GGKKPFGLIFGGLAPNFCCCNKQAQIINAHQSQFGHISNFLGPPAEQTKILDFLERGTMHFFEHPGTLLLNPNSLTGNMINRGPMITQPGGGFRGNP

SEQ ID NO: 354723 - protein, 122 aa, Zea mays
  Clone ID: MRT4577_86679C.1.pep
HNGGDDNVGGADNGGDGGQPAATVITVAKDGTGNFRTVGEAVAAAPNNSEARTVIRVKAGTYEENVEVLPYKKNIALVGEGRDTTVITGSRSAADGWTTFRSATFGVSGEGFLARDITFRNT

SEQ ID NO: 354724 - protein, 75 aa, Zea mays
  unsure (1)..(75): unsure at all Xaa locations
  Clone ID: MRT4577_8667C.1.pep
MAAKIFCLPTRLGLSASAATETMXPQCSXAPIATILPPYLXSTESSVCKNPTFQPYKIRHAIAIGIXPLSPWVLQ

SEQ ID NO: 354725 - protein, 88 aa, Zea mays
  Clone ID: MRT4577_86680C.1.pep
FVGGVSWATDNHYLHNACGTYSEVLENNTILYRETHWYRSFGLVTFSTAESIMNAIEGMNCKELDGRNMSVNEAHSRRGRGGSYGRYG

SEQ ID NO: 354726 - protein, 308 aa, Zea mays
  Clone ID: MRT4577_86681C.1.pep
MSHYTMHAAINYAALPPTSPLQLPLPYLPPPPPPPLPLPPLLSPPPPAAASSDAGFQSRISPSVLLIILILAVIFFVSGLLHLLVRFLLRPAPRDPGDAYGGDANATAFQGQLQQLFHLHDAGVDQSFIDALPVFLYGAVVGAGGKDPFDCAVCLCEFADDDRLRLLPKCSHAFHVDCHSKRDRSQLSKAVDKRESFSVSKIWMRSGPRRKDVPSGATTSRRASSFRLSSALQRTASDVGATTAKRRADVVSPVTESEYNVSAWDKSASGSVVDWDVESAGGGHGLSSRADEAPSFARRTLLWIRGHL

SEQ ID NO: 354727 - protein, 106 aa, Zea mays
  unsure (1)..(106): unsure at all Xaa locations
  Clone ID: MRT4577_86682C.1.pep
SARGYGHGVFEGYGSGSGLGGGXYPLXGGHGGGDGGGQGRYGYGYGSGYGSGEGFAQGGAHGGCYGTGASGAGGVSKGDSGSGYCTGSGYSYGGRXNGHYYALLKS

SEQ ID NO: 354728 - protein, 72 aa, Zea mays
  Clone ID: MRT4577_86683C.1.pep
RPVQVRAKELLASNLSKLRERCPCMYREIWMDWERRRDGGGSMEGGRWRRRQRGRRRPRSEPNSARACAMLC

SEQ ID NO: 354729 - protein, 95 aa, Zea mays
  Clone ID: MRT4577_86684C.1.pep
GLGRAQTQGTNLFLLGRNPLHNMTTTGARKGQAPPFFFLISGEGPHTPSHADYFIATVPHPHLGFPEGLCNLQLLDGCPKEGGKKTPGRHFDTRG

SEQ ID NO: 354730 - protein, 252 aa, Zea mays
  unsure (1)..(252): unsure at all Xaa locations
  Clone ID: MRT4577_86685C.1.pep
RPLSRRAIHVRAGGPHAGSTGPGARLHDSSDLLSDEVGAEQLTRNIQFFGVESQKKVTESFVVVIGLGGVGSHAASMLLRSGVGRLLLVDFDQVSLSSLNRHAVATREDVGTPKAYCLKKHFSLIYPECQIEARVQLYDSSAEDEILTGQPDFVLDCIDNIDTKVSLLAACVRRGLRVLSAMGAGARADPTRIRVADLRESSNDPLSRAVRYRLKKDHGIEGGIPVXFFMEKPKAKLLPLSGXSKERETPSD

SEQ ID NO: 354731 - protein, 206 aa, Zea mays
  Clone ID: MRT4577_86686C.1.pep
HRELETSIYGENTKNYLVNTYYRPQQVNIHAHGPEQILTMPSSTRDLSKQAVKACYKCFKDSFKSQYENSETSAATTVAGTGSSSGSLASGVTCASHLHTTSQVHRARKIWLTVESSGHRRRCALPMWRAGRRLKVNMRQLETLSQEEAKIRNLRAPRTRSTANTWNNQASRMNVKVTICEGKLYIYSTGRRRRRREERRHLQRRG

SEQ ID NO: 354732 - protein, 72 aa, Zea mays
  unsure (1)..(72): unsure at all Xaa locations
  Clone ID: MRT4577_86687C.1.pep
YLQEQIIGLFSELAAGISDSFLIQQXLVRFYKQFEVNFATLLQIKQLLPFVKLDLHPPGAXFRKXMIGGALF

SEQ ID NO: 354733 - protein, 108 aa, Zea mays
  Clone ID: MRT4577_86688C.1.pep
ETSASTTVAGTVSSSRSLASGATSASHPHTTSQVQLSQKNLADGGIKRASTATRLDHVASRKTTQGKHEATRNTITRRSEDSELTCSEDPVNCEYLEQSSKRNDITRQ

SEQ ID NO: 354734 - protein, 155 aa, Zea mays
  unsure (1)..(155): unsure at all Xaa locations
  Clone ID: MRT4577_86689C.1.pep
LPIALPLHLPTLPAPHLLXNWRAPPLAATPHGARHVPSIRXSSVPASHSIPAAATMWALPPRPRPALGGRSAALVPRACGVRARGRCTQVRTIKRRGGRCRARPSRCKSGDRCSGFVDGSPXVACRRLPSIGCAPRPRCKLRERSSAVPTCKRTF

SEQ ID NO: 354735 - protein, 83 aa, Zea mays
  Clone ID: MRT4577_86690C.1.pep
GRITLHHPSFSVASLIPFCRVAIQRTSKWYFPSPQCSVHSREVFSWLVFTCACTSRVPVHPCAQVAAVVGSRSAAVYKHAQKC

SEQ ID NO: 354736 - protein, 158 aa, Zea mays
  unsure (1)..(158): unsure at all Xaa locations
  Clone ID: MRT4577_86691C.1.pep
HWGRICLHLLCAAMNLTAAHTGLRTHLRXPNNDSITWNQLTTSSRQSSQRTRKLTFTTTSAGACTQNGSSVVTRAEIPPSXCFSSDFSFSAATSPKQFEGAXNEYGQGESDXDHSPSSHHPERIPPSSESYIEANSXHMYXTNVRLLKEMGMDAYTFT

SEQ ID NO: 354737 - protein, 67 aa, Zea mays
  Clone ID: MRT4577_86692C.1.pep
PCLSAGSLPSGQPAPVIGGVPAPLHHILAGAVSPNDPHLVPERPPARSMSTALALAVNIGRAPASLY

SEQ ID NO: 354738 - protein, 34 aa, Zea mays
  Clone ID: MRT4577_86693C.1.pep
RKHPVANQVSHVSRTCLSLLTDFTLANNFVARYM

SEQ ID NO: 354739 - protein, 79 aa, Zea mays
  Clone ID: MRT4577_86694C.1.pep
MSCSCGSSCNCGSSCKCGKMYPDLEEKSGGGAQASAAAAVLGVAPETKKAAQFEAAGESGEAAHGCSCGDSCKCSPCNC

SEQ ID NO: 354740 - protein, 93 aa, Zea mays
  Clone ID: MRT4577_86695C.1.pep
GSYFPFCNCVILSFYELYVVSIFNFFCLILRSKMYPDLEEKSGGGAQASAAAVVLGVAPETKKAAQFEAAGESGEAAHGCSCGDSCKCSPCNC

SEQ ID NO: 354741 - protein, 52 aa, Zea mays
  Clone ID: MRT4577_86696C.1.pep
NTRTLIDRDLTPTFSIREMGNYTLPMITSRSQHECTIQFGSLLYRRVHKDRS

SEQ ID NO: 354742 - protein, 96 aa, Zea mays
  unsure (1)..(96): unsure at all Xaa locations
  Clone ID: MRT4577_86697C.1.pep
MQGKAGTSKNDEGRIRXGRSLGKRKNAAXSGMSKPPPSSLXLFMDEFRRDYQALHPANKSEITLNNEPGEKRFTISYQEKQPYXVDQTGPKKLGYE

SEQ ID NO: 354743 - protein, 122 aa, Zea mays
  Clone ID: MRT4577_86698C.1.pep
GGGGGFFFFFFFFFFFFFFFFIGTRVSFFRYTAFWILFEARFLSFVITEQGVVGGIWDNTVESWEPLQQPQDSPAFQHQLQADIFHRDASAPWHAGGTFFAIYWLAAIYDLQQDAHFLLPTC

SEQ ID NO: 354744 - protein, 147 aa, Zea mays
  Clone ID: MRT4577_86699C.1.pep
DRALLRRGAAERVEDVMLPRSPERMRRLMQLAYHRPRRFTPGFVLRDLAQYLYSDKVEEKKELIKGITLGNKDKFQLTPLPQEVLVLWGEHDQIFPVEKAFQVARKLGANARLEVLKDTGHMPQEEDPKRFNEAILNFLLPAPKSSL

SEQ ID NO: 354745 - protein, 154 aa, Zea mays
  Clone ID: MRT4577_8669C.1.pep
NQQKALCPYTRTTTATRQRHRRHHHLRCRVVSSTPLPSARTGTPSPLPQQKSFSPHRIPFEGEAQLPLSSSLASCFNPRSDLSSRKDSTALGAPSASASASDFLTEPTSPSSSELLQLLLPYSEKIDAILIATVRHKSRQGGSNGEEIWGGARG

SEQ ID NO: 354746 - protein, 86 aa, Zea mays
  Clone ID: MRT4577_866C.1.pep
SKPPLRRWGCPKELIPCMLGVLFIVQRGGTGVFLPPPPFGETAWPFVCMAPENYWGWIKAPSINKNPLACEKKYTSSQSCELLISL

SEQ ID NO: 354747 - protein, 226 aa, Zea mays
  unsure (1)..(226): unsure at all Xaa locations
  Clone ID: MRT4577_86700C.1.pep
CCIPRPPGPARRRACDSWRFAVETDTLRXWETVPARCEXVVGNYMLGGQXIPDSQAVVDEAVAYAEGLKLSGDGKEVWVFDVDETTLSNLPYYAEHGFGSEPYNSTAFGAYTKLANAPALPETQRLYKRLQELGIKPVILTGRREDKRESTAKNLADVGYTGYEKLLLKPQDARVTAVEFKSGERKKLVDAGYVIVGNIGDQWTDLLGEPEGDRTFKLPDPMYYVG

SEQ ID NO: 354748 - protein, 62 aa, Zea mays
  Clone ID: MRT4577_86701C.1.pep
QDCHYPNRRSFSHFVLFIRVQLQVFVIMQQLLLIILHIKNAPTSVFSIRKSTIRIHFNTQTR

SEQ ID NO: 354749 - protein, 67 aa, Zea mays
  Clone ID: MRT4577_86702C.1.pep
VLDLDEIYCVLCIVMGQSDELVLSLKLNMMLFTLVTIVSLLAGSSDDHPQKWKWDMLEVFLLEYPPG

SEQ ID NO: 354750 - protein, 76 aa, Zea mays
  Clone ID: MRT4577_86703C.1.pep
LRIFGKTKALGFLIDHLAGRENQATASSCPNYPNLTPNTSLIARIGMPASFTFTPNWLEGIATPLDAFRTTHLFFL

SEQ ID NO: 354751 - protein, 506 aa, Zea mays
  unsure (1)..(506): unsure at all Xaa locations
  Clone ID: MRT4577_86704C.1.pep
RILHEAQGDEIGRXLVDVGLRVQDARPELVRSARTLLIDPALLGNHFLFPVLSAAAWISGEYVDLTKDPVELVEALLQPRTSLLPISVRAVYIHAVFKVITWCFSAYIGRLGDSDLAMDVMFDRLAADETVNLESNAALGSGDEQDIGASTVQKDPFSHESILYMINLIQTTVGPLINCNEVEVQERAHNLIGFVHLVREIQGLNKRKVADGDKSSRLKELVKTMRAVFCQELGPVYVNAQMKVSPPDGLILNENLVELAGMVSEDDTTPSTSIFFYPRSRHSVDTRDEPAVSIGLSSLSEHRKRHGLFYLQTGKAEDEPNDYPQANDSLPSSSNNSANDDKXKTAERVFAGKKSTATKTRPKVVKLDTEDFLSSMMPSAIVPKEDPLSGALRDVLLGSDAKALSSQKASDMNLEVMLNKANSNESSSQQIENLGSHPASHSRTSKQQNHDKEKVTDRPESDGKEPRKHRSSGRSGHRQGKNKHREKSSAQPDIVPQTPVIQDFLL

SEQ ID NO: 354752 - protein, 88 aa, Zea mays
  unsure (1)..(88): unsure at all Xaa locations
  Clone ID: MRT4577_86705C.1.pep
KQKAKRKLETKVKMNWASGTRATPGCRIATHRPPATRPRIRRNLRQGPTGTPGKWPTEINTALQAETVTLHMPGAQELTRXSAATADP

SEQ ID NO: 354753 - protein, 46 aa, Zea mays
  Clone ID: MRT4577_86706C.1.pep
GGIFFANRDLQMGFAKNAPLIKYYRSPLYTYDGVVGNKNIQFLDKL

SEQ ID NO: 354754 - protein, 82 aa, Zea mays
  unsure (1)..(82): unsure at all Xaa locations
  Clone ID: MRT4577_86707C.1.pep
REHNSVPTLATKIFRSLMLRDLSPSAATVTILPLCSHAPISYQLXPILXPVASSICDNPHLQHYMLQHALTLSILPISHSAV

SEQ ID NO: 354755 - protein, 169 aa, Zea mays
  unsure (1)..(169): unsure at all Xaa locations
  Clone ID: MRT4577_86708C.1.pep
WVPRGRPGAQLITVPYHVVLTFSHPAIAAASSRKIPFXAATTTQSIHFHKALIPDNAVVSADTEVALEDDKNSSMTQVSGALWSQXSYYSKRKLRESFAPSCDIQTRXHQRTNCRHMIYNXQSYNVALHLVSIXILHEETLRLAANVTEIDVLLLYKDICDHEENENQL

SEQ ID NO: 354756 - protein, 341 aa, Zea mays
  Clone ID: MRT4577_86709C.1.pep
AGAPGDSLVPRLRGVRSPVRSIRMLRVHGTFPSFSPDGAHIAVNGDFFSTPGVSVLRSDGSRRWTVSKEPDLFYTTWSPTERGVVFTSKGPIFETPKATVRIARVEFDPADLTDDGRGEGEVRATVRPVGRPEAGNDAFPAVSPCGRWLVFRSGRTGHKNLYDVSTARGEEGGVRRLTEGEWIDTMPSWSPDGSLIAFSSNRHDPANPAVFSIYLVRPDGSGLRRVYVAGAEGSAEADKERINHVCFSPDSQWLLFTANLGSVVAEPISGPNQFQPYGDLYVCRLDGSDLRRLTCNAYENGTPVWGPASAGLGLESLSMGPPAGEDALGQFDEPLWLTCDV

SEQ ID NO: 354757 - protein, 52 aa, Zea mays
  Clone ID: MRT4577_8670C.1.pep
GHRNVLSHRGIVALIRSPMRGVRLTCQSADCCCPGSLVRGKGGAAALNKTCV

SEQ ID NO: 354758 - protein, 97 aa, Zea mays
  Clone ID: MRT4577_86710C.1.pep
IINCFFVFICFFSKMHNCKETIMNAPAVYSSPLLTRKKRGAGGLTTTPHKTRPGQKHPLRPPRGECIRPGPEVFLRGEGVPPNKHERGPISGRPWPP

SEQ ID NO: 354759 - protein, 89 aa, Zea mays
  unsure (1)..(89): unsure at all Xaa locations
  Clone ID: MRT4577_86711C.1.pep
SLVRINPFPLHFISSXRNMVVVDPIAVSSAHQFTVVIDGFETIVHEVVLRLYVCSVAVVCSGFLDVIRLQLVCVRGLGWGYVRFSLCLY

SEQ ID NO: 354760 - protein, 45 aa, Zea mays
  Clone ID: MRT4577_86712C.1.pep
LFFFFFYKIGLHLLSPVNPSSPSRQMLCGVEAEAIIITASQVLKP

SEQ ID NO: 354761 - protein, 41 aa, Zea mays
  Clone ID: MRT4577_86713C.1.pep
LHHLLYSFLSCPIFVPFIIASSRLWLLAYKSECHLSLTNTK

SEQ ID NO: 354762 - protein, 73 aa, Zea mays
  Clone ID: MRT4577_86714C.1.pep
GPASRSEPSSESSSNSSRSSSSKSPSKSSSKSPSKSSSKSLSNSPSLPIASSSSSSSSSSSITAFRPAPPPAA

SEQ ID NO: 354763 - protein, 107 aa, Zea mays
  Clone ID: MRT4577_86715C.1.pep
KKSVVKVRKGNSEIFSTRNRDKPYLLTLAVLYSPNRSPMESCAGEQFANDASFECISPVSGLKHSFASRGAKACQIHVLKVPPSTISCVRKTPNNVVTKRRKRKKTK

SEQ ID NO: 354764 - protein, 83 aa, Zea mays
  unsure (1)..(83): unsure at all Xaa locations
  Clone ID: MRT4577_86716C.1.pep
CCTDLVKLNLSDKTEXMSVEYIWIGGSGMDPRSKSRTLSGPVTYPSSLPHWGYECSNTDXAPGEDTEVIPVPDAIGTDPIKRG

SEQ ID NO: 354765 - protein, 49 aa, Zea mays
  Clone ID: MRT4577_86717C.1.pep
MARTQQLAVVATAAGVSGLNAGNAASIPSKCGVSIPYTISTSTDCSRVN

SEQ ID NO: 354766 - protein, 95 aa, Zea mays
  Clone ID: MRT4577_86718C.1.pep
KSRDNSSSRRAPNIWADPLLWWFGLGFPPSNGEQASKWPVSIPHKATTVKKAPAQARKLSIDSSLPSEKRKFKRKQARVKATFVQNLLLFTLFGD

SEQ ID NO: 354767 - protein, 81 aa, Zea mays
  Clone ID: MRT4577_86719C.1.pep
MARTQQLAVVATAVVALVLLAAATSEAAISCGQVASAIAPCISYARGQGSGPSAGCCSGVRSLNNAARTTISTSTDCSRVN

SEQ ID NO: 354768 - protein, 74 aa, Zea mays
  unsure (1)..(74): unsure at all Xaa locations
  Clone ID: MRT4577_8671C.1.pep
MATEREPSKAAEDGANWHKRDKQRXFLHAHRVGDLDRTNRYYTECCGMILLGQRDVLDEKCSNGFLGFRPTEHQ

SEQ ID NO: 354769 - protein, 92 aa, Zea mays
  Clone ID: MRT4577_86720C.1.pep
ARPIAVIFLFFGIFVFGTDHSQPSWRVVGRFMELSNNRLKFLPKAGPRFRSPILSYPYVKKEPAGESQTDPTAPLQGRAEQRGGRSPSQGDH

SEQ ID NO: 354770 - protein, 120 aa, Zea mays
  Clone ID: MRT4577_86721C.1.pep
MARTQQLAVVATAVVALVLLAAATSEAAISCGQVASAIAPCISYARGQGSGPSAGCCSGVRSLNNAARTTADRRAACNCLKNAAAGVSGLNAGNAASIPSKCGVSIPYTISTSTDCSRVN

SEQ ID NO: 354771 - protein, 56 aa, Zea mays
  Clone ID: MRT4577_86722C.1.pep
DHKRNGDQLRPPQYRGDNLGSRDLTLTLLDPRYTRILTTLNAPLNTLHSFRTILRS

SEQ ID NO: 354772 - protein, 97 aa, Zea mays
  Clone ID: MRT4577_86723C.1.pep
RPFSGPLITSCHCHLLTCDLRISKQPERARASRAAGTSLLKEHGPHAAVGSSGDRRGGLGAAGVSGLNAGNAASIPSKCGVSIPYTISTSTDCSRVN

SEQ ID NO: 354773 - protein, 87 aa, Zea mays
  Clone ID: MRT4577_86724C.1.pep
TRKPVGGGEGQWVLMATGRTPTNIAVIKYWGKRDEALILPINDSISVTLDPDHLLGGATIAVSPSFPSDRMWLNGKVCHRQDPFSGR

SEQ ID NO: 354774 - protein, 117 aa, Zea mays
  Clone ID: MRT4577_86725C.1.pep
MARTQQLAVVATAVVALVLLAAATSEAAISCGQVASAIAPCISYARGQGSGPSAGCCSGVRSLNNAVRTTVDRRAACNCLKNAVAGVSGLNAASIPSKCGVSIPYTISTSTDCFRVN

SEQ ID NO: 354775 - protein, 120 aa, Zea mays; identical to SEQ ID NO: 354770
  Clone ID: MRT4577_86726C.1.pep

SEQ ID NO: 354776 - protein, 120 aa, Zea mays
  Clone ID: MRT4577_86727C.1.pep
MARMQQLAVATAAVVALVLLAAATSEAAISCGQVASAIAPCISYARGQGSGPSAGCCSGVRSLNNAARTTADRRAACNCLKNAAAGVSGLNAGNAASIPSKCGVSIPYTISTSTDCSRVN

SEQ ID NO: 354777 - protein, 120 aa, Zea mays; identical to SEQ ID NO: 354770
  Clone ID: MRT4577_86728C.1.pep

SEQ ID NO: 354778 - protein, 222 aa, Zea mays
  unsure (1)..(222): unsure at all Xaa locations
  Clone ID: MRT4577_86729C.1.pep
IGKAVPPAGTVPHLQRPPTLSVWPLADNWEMPKETVKETDEGGLVRLKYTFKYGDTFVEPDDDWLKSIENVSDELLGVYSKAEDTALSAAFGGRXKKRLNRVFDAVGFVYPDYRYLVRGQKRKGTTAAKESASAAPSEPAPKRKRVKVLTHRPRYTEPATVPEFAGETSSATEAKEPTLLPEIKELAEVPVTEKMEEPKTEEAKTSAEGVKISEILSPSGEN

SEQ ID NO: 354779 - protein, 47 aa, Zea mays
  Clone ID: MRT4577_8672C.1.pep
EMVFEEGRIVLQGAIQVGLGHCLLTVLWQGPIDCKRDNPRNFEHQHC

SEQ ID NO: 354780 - protein, 122 aa, Zea mays
  unsure (1)..(122): unsure at all Xaa locations
  Clone ID: MRT4577_86730C.1.pep
MARTQQLAVVAXTAVVALVLLAAAATSEAAISCGQVASAIAPCISYARGQGSGPSAGCCSGVRSLNNAARTTADRRAACNCLKNAAAGVSGLNAGNAASIPSKCGVSIPYTISTSTDCSRVN

SEQ ID NO: 354781 - protein, 55 aa, Zea mays
  Clone ID: MRT4577_86731C.1.pep
RSDRHVYSRVFTHERRVTMVYLRVAIILMGLLLVTGTNGRMPSEGQLQPSAFAIS

SEQ ID NO: 354782 - protein, 79 aa, Zea mays
  Clone ID: MRT4577_86732C.1.pep
FDAFFYSHAVVSNQVRAFCRTRLTKYDHGSHTPRLLCCRGMDRALARLPIAITQPYSAASTNSLLVCLHGAGGQILTEF

SEQ ID NO: 354783 - protein, 70 aa, Zea mays
  Clone ID: MRT4577_86733C.1.pep
SFTHALKHTYLHSAHPTLFFSLNTPLSIYYLLPSTLFITTFLHHKNSILLIQSLYTIPSLQLLIYYYTNN

SEQ ID NO: 354784 - protein, 80 aa, Zea mays
  Clone ID: MRT4577_86734C.1.pep
TGNKTEAAYHHVVFTWCLNAIEVNSACELVIVVQIAQCMPFCHSIGVFDRISAYTLFPSFCNLHWLVLQHSVQGTRYFYP

SEQ ID NO: 354785 - protein, 77 aa, Zea mays
  unsure (1)..(77): unsure at all Xaa locations
  Clone ID: MRT4577_86735C.1.pep
KKNRPPLTFSLKGGRGPKKTFENPPRGGPPPGGGPRLGKTPPPXPGGPGMGPQGKPPPGGGPRTLVARRTNGNWAGP

SEQ ID NO: 354786 - protein, 75 aa, Zea mays
  Clone ID: MRT4577_86736C.1.pep
ANSRLEQLEDLTDVKSGQRKVRGVHFQQTQWRLTEAGAYPWPHHLWDTAPPWAWRERANPDTLTLSSLSLAGNKC

SEQ ID NO: 354787 - protein, 57 aa, Zea mays
  Clone ID: MRT4577_86737C.1.pep
ILVSLLARGVFLNIIGAINYLFTSWKRLGLISLSHLMTRPYSFSSKDLKFYLHYYWT

SEQ ID NO: 354788 - protein, 133 aa, Zea mays
  unsure (1)..(133): unsure at all Xaa locations
  Clone ID: MRT4577_86738C.1.pep
GRVGVKATPMAGHSIMTDLQSTRXHWWWTPIETLHRAXAYHHDDTGIIKPCQSSKLTTKXDKNPVQITVATTPASTSGSAYYDTTATTSXRGDVGAPQPPNCRYSGXSIRHNHSLTSCPPYLGGPNYVTPTIS

SEQ ID NO: 354789 - protein, 54 aa, Zea mays
  Clone ID: MRT4577_86739C.1.pep
GHVQNGGNPTADGPQQGTNKEDLQKSQLANTHLGPLIKPHAWWLNSNLGKPLWG

SEQ ID NO: 354790 - protein, 102 aa, Zea mays
  unsure (1)..(102): unsure at all Xaa locations
  Clone ID: MRT4577_8673C.1.pep
GSSPQDGYVXXYHSARIDLCHASSSDNSKRGQVFTEMLNNCLDQIRAPTSETRVFMRCDVIFDQSAQGRNLNTMIGRAAHIEFLENDIYARFIMWSFPELFR

SEQ ID NO: 354791 - protein, 64 aa, Zea mays
  unsure (1)..(64): unsure at all Xaa locations
  Clone ID: MRT4577_86740C.1.pep
NFGTYSKHSHYVSLANFENHVLSQSAVLVLLYDRSHMTALTHNMAAIRRAHMITXCALEFLQER

SEQ ID NO: 354792 - protein, 516 aa, Zea mays
  Clone ID: MRT4577_86741C.1.pep
MAECSLATLRVRGQYQGRWTWSNSKLNMPIMDPKRNYALKIHLPCQSKAAREWTSVAFTPFGFHGRDHRVETSVKCYCLQPLMDSESMVSPNLILISDEALLTISMVFAYLAGVVPSGQTSPRVRNQNVSQHIPEPSSSHSGRDLKFLPERNAAFDPNDMWSEVSAKLSKALQAHVQDALLDSREDGLMSDRKNYPLSMLAIHAGPRLRLLLITFQLLEMEVRNISGSSELDGIRWLQVSTTLIDSLIQPVFMKWIEEEQALENGQINEKLMKTISSKLKEGNKILRRFNRFGKSELYLDMLFFLRFGSARCDSYFNVKFLAEHGERILEDLVISLADVIASIYLELMSVDGDMSAEVVGSSLVLCSLSTRELQKLRNEVAINWWLHQYFKSVVSMYEDRFELYVLCSKKCEKTADNQAERANWWRIASGKPNVLTLDYVNISPFSLPARRTKELRALIGWRYYFSLFLELSDIAMPFIRVAISKVSSAVSYFWVSMIGRSLGLIFSGIRQSLGWK

SEQ ID NO: 354793 - protein, 80 aa, Zea mays
  unsure (1)..(80): unsure at all Xaa locations
  Clone ID: MRT4577_86742C.1.pep
MSKSGALHLAADLTGKTNKVDTKAAVNXYDKYPGSYGGKEEARKSIYTDVDNKIYDNATSXLXYGWGKSFHFDHRWNGYY

SEQ ID NO: 354794 - protein, 92 aa, Zea mays
  Clone ID: MRT4577_86743C.1.pep
PRVRPRVRHACDGIRWLQVSTTLIDSLIQPVFMKWIEEEQALENGQINEKLMKTISSKLKEGNKILRRFNRFGKSELYLDMLFFLRFGSARY

SEQ ID NO: 354795 - protein, 300 aa, Zea mays
  unsure (1)..(300): unsure at all Xaa locations
  Clone ID: MRT4577_86744C.1.pep
NEGRSWHGINHHHPATFDTLAMDPVLKQSVVDDLDRFLKRRDYYRRIGKAWKRGYLLYGPPGTGKSSLVAAMANYLRFNLYDLDLSEVRLNSALQKLLIHMPNKSVLVIEDIDCCFDXCRVQERPXMDPNYSSGSGSGSDSSDENWAQPRVAPPKARGITLSGLLNFIDGLWSTCGEERIIVFTTNYKDRLDSALLRPGRMDMHVYMGYCGWEAFKTLARNYFLVDDHKMFPEIQELLSAVEVTPAEVSEMLLRSENGDVALGILAEFLREKRRRGRKETKEEKDATEDKDEEEVAEKAA

SEQ ID NO: 354796 - protein, 71 aa, Zea mays
  Clone ID: MRT4577_86745C.1.pep
SLPARRTKELRALIGWRYYFSLFLELSDIAMPFIRVAISKVSSAVSYFWVSMIGRSLGLIFSGIRQSLGWK

SEQ ID NO: 354797 - protein, 154 aa, Zea mays
  Clone ID: MRT4577_86746C.1.pep
LLELAPRRVANASSKDPPYFFLVKWAWRRYKAGGPFPDVVGETIQDRAVFIYDPVAMFKLGVMCPGGDGPFRPLIKQVLQQLGRFGRPPNVSGGCQDDPGVELGHLPKGKQGCPPVSKRLFNPGSFFGGGEKKGNFLAPPVLIFRLTFLFRDGV

SEQ ID NO: 354798 - protein, 150 aa, Zea mays
  unsure (1)..(150): unsure at all Xaa locations
  Clone ID: MRT4577_86747C.1.pep
MQWEQRREIRDLTIIMDTGIDPKDCQLLXAYADLRFHTLYYLTSMAFKXALSLHVPTAIHNLGGSATLPDLVPALALPAPELLLLGRLMQLLATLLVFAPSDHAQHRLKPLPWLLLEPLLLGRPHLTERLRAATPASTLLATPTTTGRLS

SEQ ID NO: 354799 - protein, 157 aa, Zea mays
  unsure (1)..(157): unsure at all Xaa locations
  Clone ID: MRT4577_86748C.1.pep
MAINPTKAENKIASNTNLCXLLHENTKVLIFPXDATSSHHPQNIRPGLKRDSGAPMSKNTLIRRWIKVYAQNTINHTFDPLMDLLDGNVGLMFTKGDLKEVREEVAKYKVGAPARVGLGDPDDVGDTPGHTGLDPSQTYLFQVLNIPTKIKHGTVEI

SEQ ID NO: 354800 - protein, 76 aa, Zea mays
  Clone ID: MRT4577_86749C.1.pep
RGGPPGLSGHFRLYALAFVSSSRFPLCVAQQLLLSAPRLARLGETSYPRDLELGRLATSALGTPTRSNGRRCLVGM

SEQ ID NO: 354801 - protein, 159 aa, Zea mays
  Clone ID: MRT4577_8674C.1.pep
PAAPPRGLPPFSGRWALQFSRWETGFSAWHVFCGFPPLFGPPGFPLAPPGLHFLGPGRVLSVFPRGHPFPPVPPFGPRAGTPWSRPAFPWNSPPGGGRPPLGGCGRGPWPALVAAGPPCLGGGLSARERKKKKKKKKKKKKKKNKKKKKKKKKKKKKKL

SEQ ID NO: 354802 - protein, 92 aa, Zea mays
  Clone ID: MRT4577_86750C.1.pep
MLLGVDKRRLGQDSAAMEEEDSGGGDYDTVLKAHARSGGGDYGTVLKAHARSGASDGGCVCFIPSTLVSILHSSRCCPSFWIIGGSLDRAAA

SEQ ID NO: 354803 - protein, 82 aa, Zea mays
  Clone ID: MRT4577_86751C.1.pep
TNATFISKCWRSGRSSFLLILAQAAISAFLAWKYSHAYFLTNRLLPWDFYASLSTAMGCFYAYVLLAGGNPPPKKLAAIPPQ

SEQ ID NO: 354804 - protein, 104 aa, Zea mays
  Clone ID: MRT4577_86752C.1.pep
RPALDPVPAPVGVLHDCLLMYEVVEAPCAIKYKNVDVVSTISEFSSSLETASGHWRVDCLLRAERMPFYFAVLDQGAQSVSSGSRHDFWPLLYYLILYPIAQQA

SEQ ID NO: 354805 - protein, 189 aa, Zea mays
  unsure (1)..(189): unsure at all Xaa locations
  Clone ID: MRT4577_86753C.1.pep
MGYGYVDPFLPPQQPQQAAYVAPQQGDYGQPQPQPAPRPPACPYSSSASAPPXPRPTIXPPATSPPPVSSPPPASPLPEPSAPPAPLLPSPPPPAPLPPSPPPPALSPPPPDALPPSLPPSPLPYPTRSPPQAPPPPLTTDQPRVQPRVYPSPPPXSLPPPPXSTXSPPAPAPSNSPSPSPAPAAQAPG

SEQ ID NO: 354806 - protein, 219 aa, Zea mays
  Clone ID: MRT4577_86754C.1.pep
MAAAAQLHGSAAATVAYRGTRAYSVPSSCRWPQSGSPKLSISTSGVSMKPFGFAAKLSTKCANENARIEELDLRSDQMKELQVDEHAIPQKRSAKIHDFCLGIPFGGLLFSMGLLGYIFSRSTISLVLGIAPGLATLLLGTLSLKFWRSGRSSFLLILAQAAISAFLAWKYSHAYFLTNRLLPWGFYASLSTAMGCFYAYVLLAGGNPPPKKLAAIPPQ

SEQ ID NO: 354807 - protein, 270 aa, Zea mays
  Clone ID: MRT4577_86755C.1.pep
MTASSSGRSQSASMASVPSLLRRRLVAEAFRAGPVGPRRARIRFRLSCPTSMAAAAQLHGSAAATVAYRGTRAYSVPSSCRWPQSGSPKLSISTSGVSMKPFGFAAKLSTKCANENARVEELDLRSDQMKELQVEEQVIPQKRSAKIHDFCLGIPFGGLLFSMGLLGYIFSRSTISLVLGIAPGLATLLLGTLSLKFWRSGRSSFLLILAQAAISAFLAWKYSHAYFLTNRLLPWGFYASLSTAMGCFYAYVLLAGGNPPPKKLAAIPPQ

SEQ ID NO: 354808 - protein, 124 aa, Zea mays
  Clone ID: MRT4577_86756C.1.pep
SPGACPKNRRKGGEIVWRYFAVCGAIPRGLRRRRAQPACYPRDHLLAASPHTGTRLLLKTSRPLEKELLLVDFPLETLRTDHCPENGRTGIDASDMLYTTATQKDMRVAPPPAVCTVRGKGSGI

SEQ ID NO: 354809 - protein, 310 aa, Zea mays
  unsure (1)..(310): unsure at all Xaa locations
  Clone ID: MRT4577_86757C.1.pep
GRAESSSAAHGLQELLEELMQCMAQPNVSDLFPFLSALDLQGCRRRVAVQLGQVLQVLDDITDRRLASSSSSSTSSKGGDRRDDFLDILLDLQSTGKITRDNVTLTLFDIFAAGSDTMALTVVWAMAELLRNPGVMARLRAEVRDALGGKDAVEEXDAAGLPFLQAVVREAMRLHPAAPVLLPHKAVEDGVQIGGYAVPRGCTVIFNSWAIMRDPAAWERPDEFLPERFLARDLDFRGKQLEFVPFGSGRRLCPGVPMAERVVPLVLASLVHAFQWQLPAGMSADQVDVSDKFTTTSVLAFPPIKAVPLL

SEQ ID NO: 354810 - protein, 54 aa, Zea mays
  Clone ID: MRT4577_86758C.1.pep
SPALRIPPICRLDLVAMGLAAAARGVLFSPRRRRYHLTDAAACIEGVVLQERVP

SEQ ID NO: 354811 - protein, 221 aa, Zea mays
  unsure (1)..(221): unsure at all Xaa locations
  Clone ID: MRT4577_86759C.1.pep
MATQPPSTATAAVDLYETASQPDAPAAGDAYTFLEFNTQGDDFDYPDFPELSQPPPRSTPLTSSIPGAGTSSSSWPAPPPPPSDAASPXPISRLKTSTPRXASSSSPSPRSASKARPSAAADGLASGVVALNFEDPVGTGAVEDGYDYSKGDFVEHACRYCGIHNPACVARCNVPSCRKWFCNSRGNTSGSHIVNHLVRXKHKEVCLHKDSPLGETFXRCY

SEQ ID NO: 354812 - protein, 133 aa, Zea mays
  unsure (1)..(133): unsure at all Xaa locations
  Clone ID: MRT4577_8675C.1.pep
IVRSPGEREGARCPPRFLDIQLKCAGXSSRYGTAERTGRAQKIXSLFTKKPVHKPMPAVESSSSPDIIDELCTCYGPDRRIYLPDALLDRSEVPENLAGDVFEDYGYHPFDLGKKPDDFATHHPYELIHAKWD

SEQ ID NO: 354813 - protein, 75 aa, Zea mays
  Clone ID: MRT4577_86760C.1.pep
MRLRLIFVASTLAALLSRILLVESSVTMCLANYAFILQFGKTTELSRREREELEKQKAHERYMKLQEQGKTEQAR

SEQ ID NO: 354814 - protein, 108 aa, Zea mays
  Clone ID: MRT4577_86761C.1.pep
ARQLDWTSSSPRAPSSQAPLAEAQTCLQAEELIATTTASCVLLCISALYYQLRLVPDLKRLCLINDTRPSTSNKRKTLHQQIRCCYPMIWGSEIMLRESLLLRYLSRS

SEQ ID NO: 354815 - protein, 115 aa, Zea mays
  Clone ID: MRT4577_86762C.1.pep
FQAPLFLPDLPSRRRSSSLIRAAGLPHCIRDAALPLWTISPSRSTSSSSPAGSGRSASRAAKGGAVASCATNSPRRHALSYDEVVASRATNSPRRLPLPPLHRGAAHFDFAYDEE

SEQ ID NO: 354816 - protein, 453 aa, Zea mays
  Clone ID: MRT4577_86763C.1.pep
MTTTTKQLRRVRTLGRGASGAVVWLGSDEASGELVAVKSARAAGAAAQLQREGRVLRGLSSPHIVPCLGSRAAAGGEYQLLLEFAPGGSLADEAARSGGGRLAERAIGAYAGDVARGLAYLHGRSLVHGDVKARNVVIGGDGRARLTDFGCARPAGGSTRPVGGTPAFMAPEVARGQEQGPAADVWALGCMVVELATGRAPWSDVDEDDLLAALHRIGYTDDVPEVPAWLSAEAKDFLAGCFERRAAARPTAAQLAAHPFVVASAAACAAIRGPAKQEVVPSPKSTLHDAFWDSDAEDEADEMSTGAAAERIGALACAASALPDWDTEEGWIDLQDDHSAGTADAPPAPVADDFISWAEPSDAELEPFVAVAAAAGLPHVAGVALAGATAVNLQGSYYPPMHLGVRGNEIPRPLLDHHGDALEKGQGSHRVCNRETEKVTMKRISLKEVHLSL

SEQ ID NO: 354817 - protein, 117 aa, Zea mays
  Clone ID: MRT4577_86764C.1.pep
QKKGQGPFPWLIKKKSLWEKDSPPRGTLGPRREAKGRPAPSGKQGKTKGGYEGGKGWQKGPPNFGPAGLSRYGPGTEPTTGAPTGVKNKLRGAFFFFPPQARRTGPLKSSPRQTQGF

SEQ ID NO: 354818 - protein, 136 aa, Zea mays
  Clone ID: MRT4577_86765C.1.pep
KKKKKKKKKKKKKKKKKKKKKRLYLFSKPPLRGFSLRFGIPLGGRFLACFFEGPKGALFLLLIGPYTGPFLCGFTIGKPLFFPPLIWLNPIPLFLNGVVTKRPLPKWLFQHLGPLNAPWTPFLTPLLNRAPPGVPP

SEQ ID NO: 354819 - protein, 58 aa, Zea mays
  Clone ID: MRT4577_86766C.1.pep
GRVGARAPERSYPQPRRARPAAQPRRRRALLFSTLCGACKFLGFVSKHSVHLFFIFHT

SEQ ID NO: 354820 - protein, 72 aa, Zea mays
  Clone ID: MRT4577_86767C.1.pep
LGGKIVPNIELRNIGRENPRTAPLIHISPVAHVTIHNGTIGHMRTLNPTKTKVDLRHVLCRRRDERICSKLN

SEQ ID NO: 354821 - protein, 68 aa, Zea mays
  Clone ID: MRT4577_86768C.1.pep
STKSEILTSNIFVILILPFVQSTFKNTGPFSGALATNRSHLSCSGSIWFLGQQLLCSPANRKANTIKI

SEQ ID NO: 354822 - protein, 116 aa, Zea mays
  Clone ID: MRT4577_86769C.1.pep
QHAMRDLQNAAKLWFFSLSFITVFSILQRLHAWERLLMTAMSYAYLFFVMTSSSFLCGGGARLLGPFSSLRRSGLPGALAAVFLSGFCAVSVLSPSPISRGSQAPGASAAGLGISP

SEQ ID NO: 354823 - protein, 107 aa, Zea mays
  Clone ID: MRT4577_8676C.1.pep
ALVMGGTAAGNTLRHEYNFPSYQLPLVVLGRRSFASTRLILISVHTSPLVQRDRNDEWKVAWLSTIRWDGRNKPVPKCGQFKGLPLLFLDPPCLPHRAGKGTKVWTL

SEQ ID NO: 354824 - protein, 86 aa, Zea mays
  Clone ID: MRT4577_86770C.1.pep
KREISNLTTFVAIAIVPTDAELLQAQADLWRHSLYYLTSMARQPGHRDRDTNVRFRLLQGTPVAHILMRRAGKRKRRRHRQGLPRH

SEQ ID NO: 354825 - protein, 99 aa, Zea mays
  unsure (1)..(99): unsure at all Xaa locations
  Clone ID: MRT4577_86771C.1.pep
GRDRDRRGSRXKEPAPGGEEKGGEGREASRSSEGGGGMERNRLVEAVVSGGGGGDRSTGEGCDGTGGSRTYKREELFVRGRTEGEEKIDQRRGRPAGSR

SEQ ID NO: 354826 - protein, 63 aa, Zea mays
  Clone ID: MRT4577_86772C.1.pep
MAMALASATAAALFRSVLSAPHGAGARVRPHRRQSFLAPLHTAKGPGLRPEELEGKVKEKNKK

SEQ ID NO: 354827 - protein, 96 aa, Zea mays
  Clone ID: MRT4577_86773C.1.pep
SRSPQDQVMSPPPNDNGDRNDSHRGDSPQGRQDSTSRTLTPFPGNRRPAPNGPRPSPIRDRHPSHIADHSPSPNVHGLNDRPDDDPARGCYRTGNK

SEQ ID NO: 354828 - protein, 55 aa, Zea mays
  Clone ID: MRT4577_86774C.1.pep
PLELLNHPVILSSSLRMVLRTSPSPRISVSSGSRDHNSVSLLKEAKIQGKHLEAF

SEQ ID NO: 354829 - protein, 218 aa, Zea mays
  Clone ID: MRT4577_86775C.1.pep
MADDYFQFGFTGQEMVADDCSAPVFANSSSDAVTAAVGNGMSLLSYGVDGDGDGRRPMSGPPYGTGGNGGGRPPSSSRIGFRTRSEVDVLDDGFKWRKYGKKAVKSSPNPRNYYRCSAEGCGVKKRVERDSDDPRYVVTTYDGVHNHAAPGPGAASYLCQPPPPRGATATATPFSPPRSASAPAPLAAAPSWSAACDAWWEAQLHAAAAVAHSSESSY

SEQ ID NO: 354830 - protein, 66 aa, Zea mays
  Clone ID: MRT4577_86776C.1.pep
PQVYLYLVPLDANLHTVRQFTIRQTNSSTQLGAREHEFPWRPKQTKTTQTKNKKGAARDIDPRVRV

SEQ ID NO: 354831 - protein, 128 aa, Zea mays
  Clone ID: MRT4577_86777C.1.pep
FAGIFERLKEGDAAKFFQLFSSKNLSLFNKEEAPASDVAEKMARSFFLKREKGFPLELEKTGNSKRLGFGGDLPVLKLGIWVELELILQLFGVGPCLAAPFAAFYVLAGFSFGVSCMLFGWSSLSLGP

SEQ ID NO: 354832 - protein, 219 aa, Zea mays
  unsure (1)..(219): unsure at all Xaa locations
  Clone ID: MRT4577_86778C.1.pep
RWSPDGLRIVVSGDGKGKSFVRAFVWDSGSTVGEFDGHSKRVLSCDFKPTRPFRIVTCXDHSNFVNCIRYAPDGSKFITVSSDKKGLIYDGKTGEKIGELSTEGNHTGSIYAVSWSPDSKQVLTVSADKSAKVWDIMEDASGKLNRTLSCPGIGGVDDMLVGCLWQNDHLVTVSLGGTFNVFSASNPDQEPVTFXAGHLKTVSSLVFFPQXRPKTILST

SEQ ID NO: 354833 - protein, 86 aa, Zea mays
  Clone ID: MRT4577_86779C.1.pep
GIRTRSESPLLGKGKHCQYLQQAASELSTGLDVGCRGSIRKAGAGAALHYSSWLPLTCRDGDQLKCPECCRCAPRMRVPRGLCRGA

SEQ ID NO: 354834 - protein, 57 aa, Zea mays
  Clone ID: MRT4577_8677C.1.pep
CKETKSVFGLRNEVIHLLLKKKKKKKKKKKKKKKKKKKKKKKKKKKNKKKKKYNIKK

SEQ ID NO: 354835 - protein, 600 aa, Zea mays
  unsure (1)..(600): unsure at all Xaa locations
  Clone ID: MRT4577_86780C.1.pep
MAVVDESGVDEAGALFDGAARGAGEVNEAARGVGGAARGVGRDASEGVEVARGAALLIFYGMQHYLSIAGSLVFVPLILVPAMGGSDEDTATVISTMLLVSGLTTILHTFLGSRLPLIQGSSFVYLAPALVIANSEEFRNLSDNCIQDPIWGLFEKGRSIGAKSLGGFLGQSLLFVYQKFKHIMRELQGAILVGSVFQIILGYTGLMSLFLRLINPVVVAPTIAAVGLAFFSYGFPQAGSCVEISMPLILLVLLCTLCMGQVVPLSVALVWAYAFFLTADGAYNFKGCRSNIPSSNILLDSCRRHLETMRRXRTDVSTAWKTAAWVRVPYPFQWGPPTFHFKTGIIMIIVSLVAPVDSLSSYHAASLLVNLXPPTRGVVSRPIPLNPCILSAVRVWGQSYVSTLSSQLRHSVKWTSSHSQRXLNYAVTALLSINVXGSLVALSLHLNRSHIPRGGSCYMGTLPIAGEGFVLVQVGKVCRHLXLLGVAVKIIFIPLVPAVHLPSILFXGHVKGNTVAEIGLVIKVGSNIKFPVNAHPTINVVVALLVALILDNTVPGSKQERGVYIWTDPKSLEVDPATLEPYRLPEKVSCWFRWAKCVGI

SEQ ID NO: 354836 - protein, 610 aa, Zea mays
  Clone ID: MRT4577_86781C.1.pep
MAQLVETYACSPATERGRGILLAGDPKTDTIAYCTGRSVIIRRLDAPLDTWAYPDHAYPTTVARFSPNGEWVASADASGCVRVWGRYGDRALKAEFRPLSGRVDDLRWSPDGLRIVVSGDGKGKSFVRAFVWDSGSTVGEFDGHSKRVLSCDFKPTRPFRIVTCGEDFLANFYEGPPFKFKHSIRDHSNFVNCIRYAPDGSKFITVSSDKKGLIYDGKTGEKIGELSTEGNHTGSIYAVSWSPDSKQVLTVSADKSAKVWDIMEDASGKLNRTLSCPGIGGVDDMLVGCLWQNDHLVTVSLGGTFNVFSASNPDQEPVTFAGHLKTVSSLVFFPQSSPRTILSTSYDGVIMRWIQGVGFGGRLVRRNNTQIKCFAAVEEELVTSGYDNKVFRIPLNGNQCGDAESVDIGGQPNALNLAIQKPEFALITTDSGIVLLHNSKVISTTKVNYAITSSSVSPDGTEAVVGAQDGKLRIYSISGDTLTEEALLEKHRGAITSIHYSPDVSMFASADTNREAVVWDRASREVKLKNMLYHTARINSLAWSPDSRLVATGSLDTCAIVYEIDKPVASRVTIKGAHLGGVHGLTFLDNDILVTAGEDACIRVWKVVQQ

SEQ ID NO: 354837 - protein, 43 aa, Zea mays
  unsure (1)..(43): unsure at all Xaa locations
  Clone ID: MRT4577_86782C.1.pep
YQLSGGAWIFLQIRKKSVPFXXAXGVKKTASRLISRGLEDVFF

SEQ ID NO: 354838 - protein, 501 aa, Zea mays
  unsure (1)..(501): unsure at all Xaa locations
  Clone ID: MRT4577_86783C.1.pep
PCVSSEFGSSTMLLVFGLTTILHTFLGSRLPLIQGSSFVYLAPALVIANSEEFRNLSDNKFKHIMRELQGAILVGSVFQIILGYTGLMSLFLRLINPVVVAPTIAAVGLAFFSYGFPQAGSCVEISMPLILLVLLCTLYMRKISLFGNHIFLVYAVPLSVAIVWAYAFFLTAGGAYNFKGCSSNIPSSNILLDSCRRHLETMRRCRTDVSTAWKTAAWVRVPYPFQWGPPTFHFKTGIIMIIVSLVASVDSLSSYHAASLLVNLSPPTRGVVSRAIGLEGISSFIAGVWGTGTGSITLTENIHTLETTKMGSRRALQLGAAVLVVCSFFGKIGALLASIPLALAASVLCFTWALIVALGLSTLRYTQAASSRNLIIVGFTLFISLSIPAYFQQYEPSSNLILPSYLLPYAAASSGPVRTASSGLNYAVNALLSINVVVALLVALILDNTVPGSRQERGVYVWTDPKSLEXSRTTVDPATLEPYRLPEKISCWFRWAKCVGM

SEQ ID NO: 354839 - protein, 383 aa, Zea mays
  Clone ID: MRT4577_86784C.1.pep
VHLQNKIMCMGQQQGALYILEKNLIYTVVNGIHVRVVLGSTLESSVDVLACSSKSVTDMVRIFHKLIIPTILYLSSSLMFEESIIRPDCVKYLIPHRFLQTQQLPLKRMKQILLSLPAESMYGYEHTWSAIESNKRIILQSGSDHARELLSDDDFHEVLHRRYYDLQHLATELAVNPDNQQQHEIIPETDVVDPSILGIAKGVEMVLQRLKRVEQGIRDLKEEIASLRYYEYHLLTELHRKMDYMMNYNTQLEERKVPQMFYLVSLDNRSKQLVTRILPGMRSLRVHMLCEFRREMHVVEDQLGCDLIQVDNQTVKSLLPYMSKFMKLLTFALKIGAHFIVGMGEMIPDLSREVVRLLDSSALYDTTASAMSVGALVFSVHTK

SEQ ID NO: 354840 - protein, 218 aa, Zea mays
  unsure (1)..(218): unsure at all Xaa locations
  Clone ID: MRT4577_86785C.1.pep
GPSGSPGGVWGTGTGSTTLTENIHXTLETTKMGSRRALQLGAAVLVIFSFFGKIGALLASIPLALAASVLCFTWALIVALGLSTLRYTQAASSRNMIIVGFTLFISLSIPAYFQQYEPSSNLILPSYLLPYAAASSGPVHTASSGLNYAVNALLSINVVVALLVALILDNTVPGSRQERGVYIWTDPKSLEVDPATLEPYRLPEKVSCWFRWAKCVGI

SEQ ID NO: 354841 - protein, 67 aa, Zea mays
  unsure (1)..(67): unsure at all Xaa locations
  Clone ID: MRT4577_86786C.1.pep
RAPPVEKPSAAKINGAKQVVVGVTSQTNNYPRVDGXNIGNFLRGGPSTKGHVVPGGGFSLGNLLGGN

SEQ ID NO: 354842 - protein, 139 aa, Zea mays
  unsure (1)..(139): unsure at all Xaa locations
  Clone ID: MRT4577_86787C.1.pep
TGKRGGGAAVAVLPVGLLQAQLASRESRLQQLLPQGGAHYSLVACCSYCLLPLATVYVLALPISSNGEDAAATARVHRLFAVGRQAAAGGQHQRRSGGGADALPGAAPGXRRCGGGGAXGGAAPRRAQAAGLRARRXRP

SEQ ID NO: 354843 - protein, 102 aa, Zea mays
  unsure (1)..(102): unsure at all Xaa locations
  Clone ID: MRT4577_86788C.1.pep
PYINTPCFLHKQHPNNGGYHTYYRLLALTPLFSXATNAFIIHTXSLAPXSIITQTLSPVTSTRSKHPPAQAYSLHQAFAPSFLQQPISQVQQQCLAHLTIQT

SEQ ID NO: 354844 - protein, 195 aa, Zea mays
  Clone ID: MRT4577_86789C.1.pep
MMCLSCSPSGDGVVMTTVAVMEQWADKQQQAASTNAAAAAAQMPFLALLQGAGVVVEAEQQEEQHHDGRKRQAFARAVSDLDLLESCVTQAVAPAAAASAPVAGRTERRRKRQRPRARAAPPPEKRKKPEEAESQRMTHIAVERNRRRLMNDHLASLRSLIPSSYTPRGDQATVVGGAIDYVKQLEQQLVALQAA

SEQ ID NO: 354845 - protein, 40 aa, Zea mays
  Clone ID: MRT4577_8678C.1.pep
ARWNVTYEVHCCSPCAKRRALRPTLFFHIYVLVIKNVCYF

SEQ ID NO: 354846 - protein, 111 aa, Zea mays
  Clone ID: MRT4577_86790C.1.pep
WERGTGPAGRPIRPTGPKRGLPTSANVEGGPKGVYPGKPAGQSTVRRFERLAPPVKTRNQRAKTRDPKIGTPENAQTIVFFFLISFLFFFFFFFFFFFFFFFFFLYFFFFF

SEQ ID NO: 354847 - protein, 66 aa, Zea mays
  unsure (1)..(66): unsure at all Xaa locations
  Clone ID: MRT4577_86791C.1.pep
EKVQVEARTVGTRLMVNYAXSARSQTKLLWRLKEILTCRSLVXLGIRANXLIEPCNIWLPPKIHSR

SEQ ID NO: 354848 - protein, 110 aa, Zea mays
  Clone ID: MRT4577_86792C.1.pep
PQHSKQGAEATFIFIPTYVLLCHWTRLRPAAILFLLKGNVSPPVPTPVILSFFLVRYRCSAKWGAAWFKLQSKLRFASLRLSFICALPTAGCVRPLEGNLELWKDGPANL

SEQ ID NO: 354849 - protein, 89 aa, Zea mays
  Clone ID: MRT4577_86793C.1.pep
GGKQPLLMECLNKRLIHTCMLMGADAVYHHIRLGVHNMSEQLIKEDHMFIDKIFQTNSRAGLLTKRQPRDRIDIKRKKLMKQMDKGNLG

SEQ ID NO: 354850 - protein, 50 aa, Zea mays
  Clone ID: MRT4577_86794C.1.pep
NCSQFGLRHLLCLMCHLGGLVIHFFPVGCFFWQVKVMFKILFAYLDVNKT

SEQ ID NO: 354851 - protein, 129 aa, Zea mays
  Clone ID: MRT4577_86795C.1.pep
MASTTAAVPEVALRSGGARPMPAIGMGTATFPVVPETTVKAVLEAVEVGYRHFDTAAMYATERPLGEALAEAVRRGLLASREEVFVTSKLWCTQCHPHLVLPSLRESLQNLQMEYVDLYLIHWPISLKP

SEQ ID NO: 354852 - protein, 138 aa, Zea mays
  unsure (1)..(138): unsure at all Xaa locations
  Clone ID: MRT4577_86796C.1.pep
RAPRGCPWRWSLVRRPCSKISSGAARVAGAXRRGPGRGREAREPPRLAGWLGVVQAKRAEAGPAGGSRGGGRRGALVPGVSGRRMEAPPHQRGGAATRKEYRAARSRRGRGCWGGLPGKPSCWRQLCLGRPPPAPSSA

SEQ ID NO: 354853 - protein, 68 aa, Zea mays
  Clone ID: MRT4577_86797C.1.pep
KKTSSTARDVNMNIYKSFITSTVDKCPNLSIGILGTKKRRSDCSWEKWPETDDCSRARFSVSSSRTRG

SEQ ID NO: 354854 - protein, 74 aa, Zea mays
  Clone ID: MRT4577_86798C.1.pep
SQLKKEAAVLFSSIVYMAGCYVHAYPFSSQVCFLHGTQVFFCNICHLSLVPSSISLSKQRTCVIVLWFQNNWAV

SEQ ID NO: 354855 - protein, 348 aa, Zea mays
  Clone ID: MRT4577_86799C.1.pep
MGLLLEQKLRELTSGVRSPYTKPAEGAQAYHTSTALEDMASACETSSIASTDYDRESLQSFSDGKATLPYTDLATRSVQSSQPVKYDHGVTDRSELEHLGQSPLFTWEVSISTETCSSSESWRRPANGGTRLFSSTEGATTSDSTRFNKLLEADASSEYSDTASSITVATAEIPRSESSSSWHMDSRQEVEFIREILNASSPCRGISPYLERFSNGNSSGILDPHLLEELNGGTRLLAGEEGKGHRLRRRLLFDCVNESLSVKCAHYFSAGYSLWFTGMAVLQSLSAAEMHREMTSLTVAEEWMVDELVYREMSGPMGSWVDFRTEAYQAGGDVAAELLGSLVDERGC

SEQ ID NO: 354856 - protein, 61 aa, Zea mays
  Clone ID: MRT4577_8679C.1.pep
QIPKVQVFLAFPPKKNNGVSFLGGPKKKKKKKKKKKKKKKKKKKKKKKKKKKKKKKKKKNT

SEQ ID NO: 354857 - protein, 84 aa, Zea mays
  Clone ID: MRT4577_867C.1.pep
VVSMENKNEEIKDAIRKELEGTEYEVSSLTPLSGGTANFIYLARLHKPLSGGVSEVVLKHGEAYVALHPDFKLEMVRCNIEEEG

SEQ ID NO: 354858 - protein, 109 aa, Zea mays
  Clone ID: MRT4577_86800C.1.pep
VSAAVKAPPPLHALWLEAPMTPTPFMSVQGHSGQFPNLLVYAEKRWSGTHSLFAEFHSTESLDGILHGRVLDCIAEQCQWQRSSRVLRVMSFASAHRVQITIPYFVHRK

SEQ ID NO: 354859 - protein, 58 aa, Zea mays
  Clone ID: MRT4577_86801C.1.pep
RPLSCSTSEASNSSTSLASSKKISRVWIKQQILRGAHHVLDVMVEPEIVVVLVAFKTD

SEQ ID NO: 354860 - protein, 49 aa, Zea mays
  unsure (1)..(49): unsure at all Xaa locations
  Clone ID: MRT4577_86802C.1.pep
FELVFSPPGPGRPGFLGLLPKVPFFSGALEIXCQGKEKFQCGSPVFWKW

SEQ ID NO: 354861 - protein, 138 aa, Zea mays
  Clone ID: MRT4577_86804C.1.pep
DLYLESKCEAPWSSGHNPPMRESRPNVAVQLPSRPLLSTLSQTVKEDVEASETHLGAITVGALTPMMSPNESTRTKGLKTEGNTGFCLLNACHKQCIAPKICLSSISITLSSVQSLRLWLCKVPCIVSRHGLQTTDKH

SEQ ID NO: 354862 - protein, 91 aa, Zea mays
  Clone ID: MRT4577_86805C.1.pep
SRAQTYWHRQAVLNVVDDPRMRTKRVGRPTVMWRLLVLCSVAVVCWIQAPRRHQPLPVPLSIYMLKGSLCLLLPALVYLHISLCPHHISSS

SEQ ID NO: 354863 - protein, 49 aa, Zea mays
  Clone ID: MRT4577_86806C.1.pep
LLVSSSLVVFSTRARASGWSLYPYRGCLGLCIWCHDVGSFLGLKMQSFI

SEQ ID NO: 354864 - protein, 62 aa, Zea mays
  unsure (1)..(62): unsure at all Xaa locations
  Clone ID: MRT4577_86807C.1.pep
MGVRAAAAAVALVAVLGLLAPXAAALTPYCAALLVPCSSMTTTGTPSVTCCGPALGAGCLCL

SEQ ID NO: 354865 - protein, 48 aa, Zea mays
  Clone ID: MRT4577_86808C.1.pep
QKQERSSVRYRGTGDEVCNYHFPIQLCCTKKGPSLMFQPTDFKTSLTS

SEQ ID NO: 354866 - protein, 69 aa, Zea mays
  Clone ID: MRT4577_86809C.1.pep
GKNLRFKEKKKVFPFWRKMFWRTFYYLGPFGASIIFFQGLHLTKGGFKKEGVFRFHGNLFSQFWNGFYS

SEQ ID NO: 354867 - protein, 79 aa, Zea mays
  unsure (1)..(79): unsure at all Xaa locations
  Clone ID: MRT4577_8680C.1.pep
TILAISSVFVXRXGGLNQTQTRXIIAYSSIAHIGXITAILPYNPNLTLXHLTIYILLTVPIFITLITNSATTINTLSLA

SEQ ID NO: 354868 - protein, 79 aa, Zea mays
  unsure (1)..(79): unsure at all Xaa locations
  Clone ID: MRT4577_86810C.1.pep
KSQFEQLLGIPLASVQEMLKRTGGIAGRQALRSLSGGVDATVAGHLXLGGHEHTSLDLEXRVSIKXAESLXTRDXLLVP

SEQ ID NO: 354869 - protein, 79 aa, Zea mays
  Clone ID: MRT4577_86811C.1.pep
RCIKKKKKKKKKKKKKKKKKKKKKKKKKKKKKKKKKKKKKKKKKKKKKKKKKKGPPFLKIQIFLPRPPKTIFFFWGPQI

SEQ ID NO: 354870 - protein, 44 aa, Zea mays
  unsure (1)..(44): unsure at all Xaa locations
  Clone ID: MRT4577_86812C.1.pep
IILXXGXRRSRDLGWVTFSXXXXXXNPIXGMNGKELDGRNITFN

SEQ ID NO: 354871 - protein, 87 aa, Zea mays
  Clone ID: MRT4577_86813C.1.pep
AQKTRNFMGQKTHYPGGTKWENYLGKNWGGNSGRVLEELPPSGRGPWAWGIQRGGFLPDTGFLSPAKTSLRDLSTSFLNKEPFRRGT

SEQ ID NO: 354872 - protein, 88 aa, Zea mays
  Clone ID: MRT4577_86814C.1.pep
DRALALQTHAKSGHIQPAGHLNTSVNLPVRVNLAPPVDLGPRVKRPRGAHGGGAGPRLGVDPEHSSQHLRADHHLHRHPCLLRRARAL

SEQ ID NO: 354873 - protein, 120 aa, Zea mays
  Clone ID: MRT4577_86815C.1.pep
MNAPDRYERFVVPEGTKKVSYERDTKIVNAASFTVEREDHTVGNILRMQLHRDPNVLFAGYKLPHPLQYKIIVRIHTTSQSSPTQAYTQAINDLDKELEYLKQAFEDEKNRYEDRMKQGF

SEQ ID NO: 354874 - protein, 65 aa, Zea mays
  Clone ID: MRT4577_86816C.1.pep
TYFFFFFLGVLFKGFFADFPPTNPSLFKTKLSMPKKPGGVQVNPTQKKITKLPHKKKKNGSWSHP

SEQ ID NO: 354875 - protein, 51 aa, Zea mays
  Clone ID: MRT4577_86817C.1.pep
FITPMQMTPRDPPNKLLHGMIIPWLGAGEGSERAHQQAPGGGTAHRRRGRS

SEQ ID NO: 354876 - protein, 66 aa, Zea mays
  Clone ID: MRT4577_86818C.1.pep
MLSSSLPGGTRLDLDGNPIASLTICIIGAGGFIGSHLCEKLMGETHHTVLSVDAYCDKDTHLVEPP

SEQ ID NO: 354877 - protein, 44 aa, Zea mays
  Clone ID: MRT4577_86819C.1.pep
MRKLFFSESACKETKLHSAPHSWLPLERGKLSKFSGHAAAGSSM

SEQ ID NO: 354878 - protein, 141 aa, Zea mays
  unsure (1)..(141): unsure at all Xaa locations
  Clone ID: MRT4577_8681C.1.pep
GRDSTSSLSNRSAHPETDLFTMATSQLRAIGVLARSARVSQRAFTTSARQFEAAVSTKTNEASPAAADENKPAVINQAPNRVGVWSRSQKPRAQAMTGPRFEQTDFDLQPQPKAAIEMIHKQPVTWTHDRIVACNGXGXPE

SEQ ID NO: 354879 - protein, 69 aa, Zea mays
  Clone ID: MRT4577_86820C.1.pep
KKKGPRVHAKSVTYTRASFVVSGENQLRRFRRVKTSLDFVQIWVGGCIFTESVVYWTGRGLVHKTKTLG

SEQ ID NO: 354880 - protein, 80 aa, Zea mays
  Clone ID: MRT4577_86821C.1.pep
TCISRSCFIIQVVHPGSASPCVLVSLLLGFARLRCAFVDEGEPGVGQSQIVRTGHDGRTRCRMCDCASVCMAKREVERVG

SEQ ID NO: 354881 - protein, 98 aa, Zea mays
  Clone ID: MRT4577_86822C.1.pep
LERRVFFNARHTKKRENPERTKQTRPPRTLKGARIKGPRTRQAPGRQQFQARGGKRPNDTKGEVIWAHASRYTEEKRNKPCRKRMHATQRGNRGPLEL

SEQ ID NO: 354882 - protein, 77 aa, Zea mays
  Clone ID: MRT4577_86823C.1.pep
RIILFPFLSYVQLATSRSLLTIMLSTLLPYQQLRQASMHALQNELTTHGLNQWCWLLLIVRDRITLISFGLQMSNVT

SEQ ID NO: 354883 - protein, 54 aa, Zea mays
  Clone ID: MRT4577_86824C.1.pep
MMSAYRFIKCVTVGDSADCKTCMLIYYTYNTFHTDYVTTVFDNFSANVEVDGNT

SEQ ID NO: 354884 - protein, 54 aa, Zea mays
  Clone ID: MRT4577_86825C.1.pep
GCVRRKILVSLVKDRSPKGKWDSVSCQVSYTHNSSRPGVYNKSVSVVPWAAKNR

SEQ ID NO: 354885 - protein, 137 aa, Zea mays
  Clone ID: MRT4577_86826C.1.pep
LQKNITSMASVPETGKKANEYPRCTYSSWILCLPGCCIISLSHNHYSIRRWLILMTIGHLLVVTLKNRNMFDICKSSLKNYTSVWSMCYSTHVLSVLLQHEDFEPIMYMPYIYIYATGSATLYSHLVCTGNTRHIRN

SEQ ID NO: 354886 - protein, 85 aa, Zea mays
  Clone ID: MRT4577_86827C.1.pep
PKKEKGEFPPIFFYEQTPGNPPTTHIGLTYLAQKKNPGFGKSFNPKNPRGTKPNVKGFFFFYPLSPPKDFPKPTFFFKPGLRPSQ

SEQ ID NO: 354887 - protein, 95 aa, Zea mays
  Clone ID: MRT4577_86828C.1.pep
GFDKLDFRISITKVRPDRRWVIQGRNLYLAGMHMSKNLYGRSTHKTEGLIKFYHYHHFINVIEQPCPEFVPMPVNLTKTMFQGVPYLYHDNIKLL

SEQ ID NO: 354888 - protein, 79 aa, Zea mays
  Clone ID: MRT4577_86829C.1.pep
NVILIFIEVFRSHFLWIQDRLNKLSNNSNSYMNVFASLYLENVELEFPKEFRSHFLWLQDRPNKKSYNSNSYMNICASL

SEQ ID NO: 354889 - protein, 85 aa, Zea mays
  Clone ID: MRT4577_8682C.1.pep
PLHFFLMSITSFTLWGFHAIAENAFIDLLRPQRIVPHLGCHATPALVPGVSCSQTNSYSHGVNAPRVREALPGDQCWLQCQETFS

SEQ ID NO: 354890 - protein, 83 aa, Zea mays
  Clone ID: MRT4577_86830C.1.pep
EFFFFFFFFFFFFFFFFFFFFFFFLKKKKVLGIPTRGGNPKGIQRANLNPGGGLGLPFPQKAKFDKPQRGPKPKKKTFPEVGG

SEQ ID NO: 354891 - protein, 53 aa, Zea mays
  Clone ID: MRT4577_86831C.1.pep
NMALSMVFTWSGSVYGIILLVQSLMSGRESSMAFIFRPMLASDLQSWYKWELD

SEQ ID NO: 354892 - protein, 202 aa, Zea mays
  unsure (1)..(202): unsure at all Xaa locations
  Clone ID: MRT4577_86832C.1.pep
AGVGTVREYLLRCDLLTGLKSCSRPGVLITXVLLQNDGLFSXRIFLEHGXYSEFYSGRVCAGSSELKGSKDFTKLCAGLSILGYISSESDGTCTKAFSQLLTFLGHRYPKIRKAAADQVYLVLLQNDDLIVSENMDKAQELLAETCWEGDVEEARRRRSEINEMAGFRVTTSQKSGKQETRTVAASTDENRSYSSLVDFSGY

SEQ ID NO: 354893 - protein, 80 aa, Zea mays
  Clone ID: MRT4577_86833C.1.pep
VGSCLSSLPWGTLTRPIPTLEQSCWLSYLLQSVYPRLRHQCLGSKIKRGMIYSLWSLGMVTRPRAFPETTKVCPLWREQG

SEQ ID NO: 354894 - protein, 73 aa, Zea mays
  Clone ID: MRT4577_86834C.1.pep
LFGPLLQLSQRTISGSLLKYLSKLQVDEEPGIRTNTTILLGNIAGYMNDGVCLRDTTIVLFVFLVDTLFYVMY

SEQ ID NO: 354895 - protein, 148 aa, Zea mays
  unsure (1)..(148): unsure at all Xaa locations
  Clone ID: MRT4577_86835C.1.pep
MKLLRRPLSVLPPGRHGEAEHADRDLCKHYLCAKLMTGGGPEDRFDLADACARSSIEPNRASFDLAAQENRSTDXMCDGAMKIIERMLHIRTDLDDESYDSAVGLIIKQNHDGSCLQYKKLTLTSCYTPSLTVFTACIRECDVWEGGH

SEQ ID NO: 354896 - protein, 458 aa, Zea mays
  Clone ID: MRT4577_86836C.1.pep
MAASGEGASLPSPAGGEDAHRRRVSYFYEPSIGDYYYGQGHPMKPHRIRMAHSLVVHYGLHRLLELSRPYPASEADIRRFHSDDYVAFLASATGNPGVLDPRAIKRFNVGEDCPVFDGLFPFCQASAGGSIGAAVKLNRGDADITVNWAGGLHHAKKSEASGFCYVNDIVLAILELLKFHRRVLYVDIDVHHGDGVEEAFFTTNRVMTVSFHKYGDFFPGTGHITDVGAAEGKHYALNVPLSDGIDDTTFRGLFQCIIKKVMEVYQPDVVVLQCGADSLAGDRLGCFNLSVKGHADCLRFLRSYNVPMMVLGGGGYTIRNVARCWCYETAVAVGVEPDNKLPYNDYYEYFGPDYTLHIQPKSVENLNTTKDLENIKNMILENLSKIEHVPSTQFHDRPSDPEAPEEKEEDMDKRPPQRSRLWSGGAYDSDTEDPDSLKSEGKDVTANFQMKDEPKDDL

SEQ ID NO: 354897 - protein, 66 aa, Zea mays
  Clone ID: MRT4577_86837C.1.pep
ETLASAPCHGSSGPRLRTVRASIESTAAGSHRNNWCPDQCQHTFWRLRWGTRIKIYQISPQWPIQR

SEQ ID NO: 354898 - protein, 54 aa, Zea mays
  Clone ID: MRT4577_86838C.1.pep
THWTLNTSRCTKSSTDAVNYFAPTMYDSCTKTLSFCTSLTNPALTLIPHTVIAA

SEQ ID NO: 354899 - protein, 121 aa, Zea mays
  unsure (1)..(121): unsure at all Xaa locations
  Clone ID: MRT4577_86839C.1.pep
QFQTVFFKMRPAIILNGFSSHQLKLIQQVLRKNFRDLIFVCTFGEDDTSEKKVVYSDTDEDRILLMKDVQEDLLKNREERIKSAIGIRHVIDLLSSERKLIVGPCCFLDVAHXSSPFARPF

SEQ ID NO: 354900 - protein, 76 aa, Zea mays
  Clone ID: MRT4577_8683C.1.pep
ESPEALGLLEVVVGGALVDAQDLVVVKSSCVLQSFLPSMLPIAFTIWLACENVFKRNPGHLHVPRCGYSFEVEKLT

SEQ ID NO: 354901 - protein, 113 aa, Zea mays
  unsure (1)..(113): unsure at all Xaa locations
  Clone ID: MRT4577_86840C.1.pep
MEFGFRAGNRTQRRPSPDRRVTAQQAGPFHGDHPQPSPLQWEDAARRERIKREVERRLIEEEVRLELALERARLHGGFGPAPFLGTDGFVEPVQSPPXPPGRFFRADGPSMTP

SEQ ID NO: 354902 - protein, 96 aa, Zea mays
  Clone ID: MRT4577_86841C.1.pep
TIASNKLGEARRQFGSECVLAQLAQALRRADQTTRTYSVAAKERTVRKALNTALHKESAADPGGPSKREEGGEYQGAYKISKGVLDKYRPKRALET

SEQ ID NO: 354903 - protein, 164 aa, Zea mays
  Clone ID: MRT4577_86842C.1.pep
MVKIPSPRRLFRSRSRSTTIIGGGGADICAMVAEHERIEWEVRPGGMLVQKRRSTEDDAAAAVEYILVRVSTTGWQWHDVSIDATATFGDLKVMLSLATGLWPREQRLLYRGKERDDCEHLHMVGVQDKDKVLLLEDPAVKERKLRSTTLAQLMGVPCHSFIQV

SEQ ID NO: 354904 - protein, 125 aa, Zea mays
  unsure (1)..(125): unsure at all Xaa locations
  Clone ID: MRT4577_86843C.1.pep
RPGNSSPLSDLSRAPTRPMSSPLNGMLRARLRGAARVRGGGGEGDARWTTPRHEERPNGHLFHRAPPPPGESPKCADWELPCHVTSFPTDVIHVADLNTKPDLTINTXAHQNVLDLLPHPELAVA

SEQ ID NO: 354905 - protein, 166 aa, Zea mays
  Clone ID: MRT4577_86844C.1.pep
MVKIPSPSRLFRSRSRSSTTIGGAGADICAMVAEHEKIEWEVRPGGMLVQRRRPSPEDDAAAAVDVEYILVKVSTGWQWHDVSIDAIATFGDLKVTLSLVTGLWPREQRLLYRGKERDDREHLHMVGVQDRDKVLLLEDPAVKERKLRSTTLAQLMGVPCHSFIQV

SEQ ID NO: 354906 - protein, 218 aa, Zea mays
  unsure (1)..(218): unsure at all Xaa locations
  Clone ID: MRT4577_86845C.1.pep
MVKIPSPRRLFRSRSRSTTIIGGGGADICAMVAEHERIEWEVRPGGMLVQKRRSTEDDAAAAVEYILVRVSTTGWQWHDVSIDATATFGXPPSSFCTVLHCVALRAACNLHALHCPCCCSLCDHIPLFAKLRLMMMIQQPNAGDLKVMLSLATGLWPKEQRLLYRGKERDDCEHLHMVGVQDKDKVLLLEDPAVKERKLRSTTLAQLMGVPCHSFIQV

SEQ ID NO: 354907 - protein, 167 aa, Zea mays
  Clone ID: MRT4577_86846C.1.pep
MLVQKRRSTEDDAAAAVEYILVRVSTTGWQWHDVSIDATATFGTSAVVVLYRIALRSVMQSACSPLSLACSLCDHMKLVNGELFAKLRLMMIQQPNAGDLKVMLSLATGLWPREQRLLYRGKERDDCEHLHMVGVQDKDKVLLLEDPAVKVRKLRLSTLAQLMGLPA

SEQ ID NO: 354908 - protein, 57 aa, Zea mays
  Clone ID: MRT4577_86847C.1.pep
KKNLAPSLFSALANIPASINIKFVGPRYLVSVLVGGCIRISITLVVCLWYRMQHYFC

SEQ ID NO: 354909 - protein, 74 aa, Zea mays
  Clone ID: MRT4577_86848C.1.pep
SNLTEGTSSVHETVRLVHQLTVRGSAFNSASEVPLLRRLNALVGELDAMHKVARDFNIGSPMEVVNLIYFFYNP

SEQ ID NO: 354910 - protein, 42 aa, Zea mays
  unsure (1)..(42): unsure at all Xaa locations
  Clone ID: MRT4577_86849C.1.pep
YPPSESGSYPLRSPIISVRGTTXHPYHYYSHQCCTAFSKNDE

SEQ ID NO: 354911 - protein, 54 aa, Zea mays
  unsure (1)..(54): unsure at all Xaa locations
  Clone ID: MRT4577_8684C.1.pep
MRTAWPLLLVATALHSTSAARARRTCRFPXVFNFVXSXSDTXGFWAAFPVHRGA

SEQ ID NO: 354912 - protein, 96 aa, Zea mays
  Clone ID: MRT4577_86850C.1.pep
EYDLICNWLGNSRWVHSMEWSGQKDFVSSSDLSFVVDGAEAGVLKSHGPLSFLKVHNAGHMVPMDQPKASLEMLRRFTQGKLKESLPEMMVLKAAM

SEQ ID NO: 354913 - protein, 61 aa, Zea mays
  Clone ID: MRT4577_86851C.1.pep
LHEFLLELQEAYSRHALSNCEFLSTGLIDHNQNVTHSIFLLYVLNPIHARQPEPIYSSDAT

SEQ ID NO: 354914 - protein, 78 aa, Zea mays
  Clone ID: MRT4577_86852C.1.pep
SERALIKSEPLDLDPLVQIKGYPFGWWSFICAPAFLGNQPAVLGMRGLSLLKFYRFAPAFLGNYACSPRKWEIRESDL

SEQ ID NO: 354915 - protein, 66 aa, Zea mays
  Clone ID: MRT4577_86853C.1.pep
RLNPFVFLFHHNYKDENPHFFWLPHTNNKRNFSYLIKPQTTCVKKFGSSQKKKPGRITQLGTEKLK

SEQ ID NO: 354916 - protein, 57 aa, Zea mays
  Clone ID: MRT4577_86854C.1.pep
SHQPSPYGVHPKGEVNPWEHVLGMGLGAVFLNQPVKFDEKVKEDLDKMLECARLPNE

SEQ ID NO: 354917 - protein, 111 aa, Zea mays
  Clone ID: MRT4577_86855C.1.pep
MDEDVDDWDGVLRSEPADAGLLQDALHDFYPFTRPRAGGGRRGLSAAGTDARAAAALVAPVKPDAFVVPSPFAGVEGDGEYPMMPQGLLEDVIHSPAFVEVVAAPPSVPTR

SEQ ID NO: 354918 - protein, 62 aa, Zea mays
  unsure (1)..(62): unsure at all Xaa locations
  Clone ID: MRT4577_86856C.1.pep
KNIVQLVSTTDTHLIREKLGNKTKHLRLQIILGNLXRETKILNXALFTSSWFISSXLXPFPT

SEQ ID NO: 354919 - protein, 84 aa, Zea mays
  Clone ID: MRT4577_86857C.1.pep
KLTHEELVEEAMGYMFAGSGTTSSTLTYLLYELSKPENAAIQERLRTGVLAISDDDIVAIRNNAYINAVIKETLRAHPTIISTI

SEQ ID NO: 354920 - protein, 177 aa, Zea mays
  unsure (1)..(177): unsure at all Xaa locations
  Clone ID: MRT4577_86858C.1.pep
MGYAAAITLRGMMIGSAAVRLALEWFLEGDHCHLEEPYAGGVYHGFSDPAGFLATRVFPLARATYRYSPILSFLLVPNSLLHGDXLSSIFSAAHLLAXAHKHXILECTXIPDNMRMRTVEDCLFHPFTFTVAKRGNCEXIVWAGILCIHICVMNELDVXADYCYAVIVHFRVXPIIY

SEQ ID NO: 354921 - protein, 89 aa, Zea mays
  Clone ID: MRT4577_86859C.1.pep
GIVSICRSIRLDAALEAVMFPARVPVVDAGLPDLDRDALLHLGRGGAGGSTGSGGGGRGAGEEGGRRSESEPAFVKTPDGMPGPAGSKR

SEQ ID NO: 354922 - protein, 44 aa, Zea mays
  unsure (1)..(44): unsure at all Xaa locations
  Clone ID: MRT4577_8685C.1.pep
MAAVDTFLFTSEXXSGGGXDKLXDQVSDAVLDACLAEDPDSKVA

SEQ ID NO: 354923 - protein, 95 aa, Zea mays
  Clone ID: MRT4577_86860C.1.pep
LRGEPECHDHAASHPSRLIGEMIMQHETLDEAEDEAESQVKGDLAGARVNGPPRGATDVAVGGVGTRHESIGYCASLQVPFRALECSYMAGARTN

SEQ ID NO: 354924 - protein, 78 aa, Zea mays
  Clone ID: MRT4577_86861C.1.pep
EPLKRAPLFFFYLFFIMLFLLQIYFVFFYILFFFFFFFFFFFFFFFFFFFFEPNSWSISKPQFKYTVISVKTGWEKTA

SEQ ID NO: 354925 - protein, 44 aa, Zea mays
  Clone ID: MRT4577_86862C.1.pep
TKIQSDFSLQRNGPIHVVMYRKEWSSFLGIGKSCLFGSFYIHII

SEQ ID NO: 354926 - protein, 56 aa, Zea mays
  Clone ID: MRT4577_86863C.1.pep
QQEAAGLRGPWVLTPPVLVTSVLLLLVAAAVLPLALVLDPLEPLRRALFHLPHAGG

SEQ ID NO: 354927 - protein, 193 aa, Zea mays
  unsure (1)..(193): unsure at all Xaa locations
  Clone ID: MRT4577_86864C.1.pep
MALACFPLPTSDSGTGHPCHKAEGVRSSPWLPMTRNANSYHCMXAASFRTQSGDTSGPPCRHPQRRQARRRVHPXVGRIPRQLLXRCDGRDNTSSFDEGAMQRTPPRVKHWTHLFMYQSTFSILEDDAKTCKNTSISINWKRINSVHYLNSSKLTRFPTRNGPLYGFAPSDVNKRHNTLKYISAIEDTSLIIR

SEQ ID NO: 354928 - protein, 107 aa, Zea mays
  Clone ID: MRT4577_86865C.1.pep
GRFFFFFFGGDKEGRPKPGAGGRSKKTQHIPTTDKQEPEDTQHERRHLHHLTGYWAPTIPQRGSHKHRRRPDKLEDRAKRPNPHDRATRKPTGAQPTPEEPHRTRPA

SEQ ID NO: 354929 - protein, 73 aa, Zea mays
  Clone ID: MRT4577_86866C.1.pep
PGGSNMLQVGPGNFLPKQTLDNLTTYRPFDNIGMLMLFIELLGVSPVSWASEYLCEKNTGCFGTERVGFHSPT

SEQ ID NO: 354930 - protein, 44 aa, Zea mays
  Clone ID: MRT4577_86867C.1.pep
TLKKKKYKKKKKKKKKKKKKKKKKKKKKKKKKKKKKKKKKKKPP

SEQ ID NO: 354931 - protein, 105 aa, Zea mays
  unsure (1)..(105): unsure at all Xaa locations
  Clone ID: MRT4577_86868C.1.pep
GPARGARLLLWSQSRRLLLQLQVEAEPPSSSAVCQDGRTPLNADRAGECMCATDFILCGNFKRGGGWTRGHSWQWVDSLPGWSVGRPYHGKKFEVTKGRXKKKKE

SEQ ID NO: 354932 - protein, 77 aa, Zea mays
  Clone ID: MRT4577_86869C.1.pep
QICVSALLVLRWLLFRFVHEQGIGPWIHLPQDVSRHAGSTQREPVCHQYTPVKSQAQLMGRRGVPRFVRIQHQPNSE

SEQ ID NO: 354933 - protein, 116 aa, Zea mays
  unsure (1)..(116): unsure at all Xaa locations
  Clone ID: MRT4577_8686C.1.pep
FAPPLKGGGGLNNPLFWPPFYGGEPWPPSXPGGXKRKPPHMGPPRGXKGAPPPPGGEEPLFQGRKGPPPQKGQGGPHDHGIGGEKNPAGAPPKTQPPPGXAGAREKPPPPGPPMGP

SEQ ID NO: 354934 - protein, 42 aa, Zea mays
  Clone ID: MRT4577_86870C.1.pep
VDPADVILWLMDCGTGHASYLLHTSECLTSRSSTLDAPYRWP

SEQ ID NO: 354935 - protein, 139 aa, Zea mays
  Clone ID: MRT4577_86871C.1.pep
IDSKEQEPTNTRHNKLQPRKAWGTVPLTPGPTIITTRCTLYLAHVTLEAYRTSARDSHWWVRARLTPAHTHSERRQGPDATEQKNPERYCHVRARAINPNSGHAYPLGPGRSRCVRTVPLPGLLRLLRSNSLRLGGRVL

SEQ ID NO: 354936 - protein, 85 aa, Zea mays
  unsure (1)..(85): unsure at all Xaa locations
  Clone ID: MRT4577_86872C.1.pep
DAWGLGYGGNKKLDGRHSQGQLMQMTMMVPPSLXREXHSLNKEDRLVRYCWLVVKHRDAVYGLEFCYEDGGRNELSGFSLACRKD

SEQ ID NO: 354937 - protein, 44 aa, Zea mays
  Clone ID: MRT4577_86873C.1.pep
KTRRLSRALVFTLTPIKSVVGLGELADSLGFLTCSFRAVGHPLH

SEQ ID NO: 354938 - protein, 183 aa, Zea mays
  Clone ID: MRT4577_86874C.1.pep
MEYQAPAPAAGAGGRGCYNCGDASHRAAECPTKGTPTCYNCGEKGHVSRECSSPQAEKTCYRCGGTGHISRECTKDGGAPMGGRGGGSQECYKCGQVGHIARNCSQGGGYGNGGFGGGRGGYCGGAGGYGGARQTTCYSCGGFGHMSRDCTQGQECYNCGEVGHLSRDCPQETSSERGCYRFK

SEQ ID NO: 354939 - protein, 142 aa, Zea mays
  unsure (1)..(142): unsure at all Xaa locations
  Clone ID: MRT4577_86875C.1.pep
MSPAPSSHHSQINSRKEKRMRKVDTFAPHNDGHQWRKYGEKKINNTNFPRYYYRCTYKDNMNCPATKQVQQKDHSDPPLYAVTYYNDHSCNXPSSRSPPPSSSCRPRPAAPSATTPFSAAAAVPGGGGRCRQIWIYQVFHFL

SEQ ID NO: 354940 - protein, 53 aa, Zea mays
  Clone ID: MRT4577_86876C.1.pep
CNMGPNFYDKICIKPQLTLAWRGHHLFVVVAAKKKDKPSVSMGGPCATGDGPK

SEQ ID NO: 354941 - protein, 191 aa, Zea mays
  Clone ID: MRT4577_86877C.1.pep
PAGPRLHPPTSPEPPPRTIRAMRPTRCHEPDREPRLPLQFASPPLSARRCKKSDSASARVSEKSIFAGKEHDSISQPPSTSLCTYKDNMSCPATKQVQQKDHNDPPLYAVTYYSDHSCNSAFLPLFPSEFQLRTPSGKAVSICFDSSSGAPAQEPAAVASVATNASGGSPSSSAAEARRGTPPDISYPLDL

SEQ ID NO: 354942 - protein, 131 aa, Zea mays
  unsure (1)..(131): unsure at all Xaa locations
  Clone ID: MRT4577_86878C.1.pep
MSPAPSSHHSQINSRKEKRMRKVDTFAPHNDGHQWRKYGEKKINNTNFPRYYYRCTYKDNMNCPATKQVQQKDHSDPPLYAVTYYNDHSCXQRLPPALPLRVPAADLVREGRLHLLRLLVRDRRRAAATTN

SEQ ID NO: 354943 - protein, 153 aa, Zea mays
  unsure (1)..(153): unsure at all Xaa locations
  Clone ID: MRT4577_86879C.1.pep
PTSLHFAVCFFQLSASKPAASRCSFHSHTAASCPPRRRYYYRCTYKDNMSCPATKQVQQKDHNDPPLYAVTYYSDHSCNSXPPALPLRVPAADTVREGRLHLLRLLVRGAGARAGGRGVRRHQCQRRLALFQRRGGAARHTAGYQLPARPAVV

SEQ ID NO: 354944 - protein, 95 aa, Zea mays
  Clone ID: MRT4577_8687C.1.pep
RGGVALFFGPPEDPGSPHFCPLGPAPPKFFFFFKTSLAPGGFSPLLLTPFFSVGKQLPHVPPLGLYTVFRLKNGRCVAPPAPPLYAGKKIRASPP

SEQ ID NO: 354945 - protein, 200 aa, Zea mays
  unsure (1)..(200): unsure at all Xaa locations
  Clone ID: MRT4577_86880C.1.pep
MSPAPSSHHSQTNSRKEKRMRKVDTFAPHNDGHQWRKYGEKKINNTNFPRYYYRCTYKDNMSCPATKQVQQKDHSDPPLYAVTYYSDHSCNXPSSRSPPPSSSCGHRPGRPSPSASTPRPGRRRKSRRPWRPSPPMLAAARPLPAPRRCGEARRRISVTRPTCGGLTRTRGAPAPWSRSWRPAPPSATTPSRPAPCRRRW

SEQ ID NO: 354946 - protein, 70 aa, Zea mays
  Clone ID: MRT4577_86881C.1.pep
MVNAIKGLFISCDVPMAQFIVNLNASMPPSERFIVHMLDPTNMFVQPHVAHMIRSKIGEFRDQNSYEKPQ

SEQ ID NO: 354947 - protein, 82 aa, Zea mays
  Clone ID: MRT4577_86882C.1.pep
LTRERSNAPPTLLISQMFQTDFEHSLHHQTRALYDSTAILSTTLCLHLTVHETKDFMEAIGAGANLTIIAHLPCSILLCLTT

SEQ ID NO: 354948 - protein, 116 aa, Zea mays
  unsure (1)..(116): unsure at all Xaa locations
  Clone ID: MRT4577_86883C.1.pep
RRVRSSLRPTVELEVSLRPASFLSTGLWSSDQLAMDGGFPALLDPTALSLALPVTQGPQGHNKLSKDDYLAICLAAFAGTRGSSLVVKAAAGLRRQETGGINKQSWCPPXPAPAAH

SEQ ID NO: 354949 - protein, 175 aa, Zea mays
  unsure (1)..(175): unsure at all Xaa locations
  Clone ID: MRT4577_86884C.1.pep
MSSLARPMLRSPALRVAARRFESTTAQKAAENAKQAATRAQEGLSRVTSTAGPAIAGYAKGVASTLGKVGGRTGKIIGFVERQVPFVVYYSKVGLELGKFVFHNQKMSPPNMATFQTTYQNLIKSIQNRTIIQSSQNLVQQVRNIGPAQLAAGGVVAAEVLGFFTVGEMIXRFKL

SEQ ID NO: 354950 - protein, 94 aa, Zea mays
  Clone ID: MRT4577_86885C.1.pep
PTLQAQTVTTSKARRTNVLSLQFRLDARAPTVTNGANAAQFFLFAPAHLHHNENTNEVCLAQAPDLYPSSDPPRDPALEVQRASDAQHNLADAV

SEQ ID NO: 354951 - protein, 49 aa, Zea mays
  unsure (1)..(49): unsure at all Xaa locations
  Clone ID: MRT4577_86886C.1.pep
YVSDKRRSXITXLTRTLCAYSXRTQXSAHDHRASINRANMQSAQLNKKA

SEQ ID NO: 354952 - protein, 39 aa, Zea mays
  unsure (1)..(39): unsure at all Xaa locations
  Clone ID: MRT4577_86887C.1.pep
NVPWEMFVXSCKRFRIMKGKEALGLGLAPKAMAKSKNRS

SEQ ID NO: 354953 - protein, 66 aa, Zea mays
  Clone ID: MRT4577_86888C.1.pep
VARNLARAHRFFLCNDVYDAQCFLYYQVGEEEPFLQSVHHIGAREVNPCPGQELCPMTCVEDRVHL

SEQ ID NO: 354954 - protein, 119 aa, Zea mays
  unsure (1)..(119): unsure at all Xaa locations
  Clone ID: MRT4577_86889C.1.pep
PSTQKXKQIGRRYSIRRRLLLXGTPIQNRLQELRXLLNSLLPKXXHSSHXXEERXNAPFACDASLNDEXEPLLIIHXSHQALXPXLLRRNTDDLQNYLPAKTQAILTRDPSAWQKAHYQ

SEQ ID NO: 354955 - protein, 290 aa, Zea mays
  unsure (1)..(290): unsure at all Xaa locations
  Clone ID: MRT4577_8688C.1.pep
MAFFSSGSRVLVEILTRMQSAERPMPVDHTFFESGSIRYHVEASASDPENVFLSISTXALLRLRGGCSCTLVEXLPELTLQEARKTYHRFAEMVEPPREGYVLTLKLNFSGLTRPKDRVKAINQVSLLQSVVLSSQLKHMLGSLGSSGTMRLVYNNQREPFFVSKTAEKINAIFPMRFRDDTDAWVLLSFLQELQEVGNSFARAPKCSWSPIPPPELRGENVHHLTTNGGFVSFGVLSRHVRGKRAAKTAWILLNFQSYVKYHIKVLLPLAATVHRPVHVRFHYYRTVGG

SEQ ID NO: 354956 - protein, 63 aa, Zea mays
  Clone ID: MRT4577_86890C.1.pep
LWPERLLILSHGDVYRDAMLLAYPSTLAVKFDHFRGLGHNGGSTEFWSLALWSNFASGWSHAC

SEQ ID NO: 354957 - protein, 49 aa, Zea mays
  unsure (1)..(49): unsure at all Xaa locations
  Clone ID: MRT4577_86891C.1.pep
SGDQVWVAHYIVERITFMAVLMMTFYPXPIPGYCNDSPPHTNYITDYTW

SEQ ID NO: 354958 - protein, 215 aa, Zea mays
  unsure (1)..(215): unsure at all Xaa locations
  Clone ID: MRT4577_86892C.1.pep
MLVTLMNLLRACWRPSSNRHARTGSDVTGRQDGLLWYKDAGQHVNGEFSMAVVQANNLLEDQCQIESGPLSFLDSGPYGTFVGVYDGHGGPETACYINDHLFQNLKRFASEQNTMSADVLKKAYEATEDGFFSVVTRQWPVKPQIAAVGSCCLVGVICGGMLYVANVGDSRVVLGRHVKATGEXVLAIQLSAEHNVSIESVRKXLQSMHPEDSTL

SEQ ID NO: 354959 - protein, 60 aa, Zea mays
  Clone ID: MRT4577_86893C.1.pep
SLIFFFKRWSCPGQEQQRAAVSWPPQSGEGRSAMANSGKTNQGPSLLHFVRRLQKPGPKH

SEQ ID NO: 354960 - protein, 69 aa, Zea mays
  Clone ID: MRT4577_86894C.1.pep
RSCLTLHKISLSHVSPARPSPAHGRLRRRSRRPDRAPPSRSPPRPSPRPPLQPPIAPRPSGENPIVEPS

SEQ ID NO: 354961 - protein, 195 aa, Zea mays
  unsure (1)..(195): unsure at all Xaa locations
  Clone ID: MRT4577_86895C.1.pep
MLVTLMNLLRACWRPSSNRHARTGSDVTGRQDGLLWYKDAGQHVNGEFSMAVVQANNLLEDQCQIESGPLSFLDSGPYGTFVGVYDGHGGPETACYINDHLFQNLKRFASEQNTMSADVLKKAYEATEDGFFSVVTKQWPVKPQIAAVGSCCLVGVICGGMLYVANVGDSRVVLGRHVKATGEVXGCQLSAEHNV

SEQ ID NO: 354962 - protein, 87 aa, Zea mays
  Clone ID: MRT4577_86896C.1.pep
QPKFFLFRDMHEGGLNNSVEGYQEIKLPYQIVAIVFGALKDAAAKKYDLEAWVPASQTYTELVSCSNCTDYQSRRLENRYRQKKNNE

SEQ ID NO: 354963 - protein, 132 aa, Zea mays
  unsure (1)..(132): unsure at all Xaa locations
  Clone ID: MRT4577_86897C.1.pep
PREKHGPPKPKGARGGGPPPPNLGGRGGIKNPGGPXGGLFPRKNGPPIPKGPRGGGPPPPNLRERGGLKNPGGPILRPXNGGGXKNGQYPPPEGDPGKGTPKNKPPGSGQNWGGRGPPXVKGGKTHHRMGPP

SEQ ID NO: 354964 - protein, 106 aa, Zea mays
  unsure (1)..(106): unsure at all Xaa locations
  Clone ID: MRT4577_86898C.1.pep
PKNFHLPSTDHRAYCGVSGRLNRTRGVWRQMRERIAWRGDLFLPFQHPDKRCPWTAYPPADTARTTAPPCTLSLPSPCLSYPLSPQHAPPRHPCXPPRTGATPTAG

SEQ ID NO: 354965 - protein, 47 aa, Zea mays
  Clone ID: MRT4577_86899C.1.pep
TSMSTTGPSETTTSPTTALTTMSRPTSMPLTWQGKSYITISKFTVSA

SEQ ID NO: 354966 - protein, 86 aa, Zea mays
  Clone ID: MRT4577_8689C.1.pep
TPEQVCCCCTTRYRNEASGKAQELICLPCRWRYPPPQCTCYRFPSCHGCSEPIQILPVISRFRLKSTTSVNEISVTVKTSVYSHRV

SEQ ID NO: 354967 - protein, 129 aa, Zea mays
  Clone ID: MRT4577_868C.1.pep
HAPPPLPWLVSCGPPVLFFFFFFFFFIVECNGDSEKGNPIYSPPGQGSHHIFYLISRWAQHTRIHDWGLLFERQFNVQRPPPRPSPGFSSTRGARFGFPELRNCPLDQPSCIPEPFKDFGTVLSTLRSA

SEQ ID NO: 354968 - protein, 62 aa, Zea mays
  Clone ID: MRT4577_86900C.1.pep
CLGSSSNIRRPSSLSLQHQESFEFNYIYSIESSESLPCRSYIVQLSSQSPCSICVPGSTIHI

SEQ ID NO: 354969 - protein, 51 aa, Zea mays
  Clone ID: MRT4577_86901C.1.pep
PQNVGSLKPALLCVVETPHLQEAAQDTYCSEFAAPRKNQLCFSDAEGGCST

SEQ ID NO: 354970 - protein, 248 aa, Zea mays
  Clone ID: MRT4577_86902C.1.pep
SSNPQPANPDHVVVPVLGGVNQVAPRQQQRDDWDILKAIVYGGLVESVTSLSVVSAAASSGAKTLDIFILGIANLIGGLPLIFHNIADLRDIRDVDGNDEQVGHYWLQLGKRSKARLHMVMALLSYMVFGLLPPVLYGLSFRESNDRENKMMAVAGASLACIALLALGKAHVHTRTYFKTLMYYLMIAVSSSGLSYVAGVLITRLLVQYGIIEQGGSARAPPGVVAVRLCCWCRVVCMGLILKSLKFL

SEQ ID NO: 354971 - protein, 82 aa, Zea mays
  Clone ID: MRT4577_86903C.1.pep
MFFRRHLLSCFLLLLLLSRLPSSIVLGFRTSRGEEGKSELMRRHDEHEFPPAVSPSKEVDAASKFTVSRRMVPQGPNPLHNR

SEQ ID NO: 354972 - protein, 103 aa, Zea mays
  Clone ID: MRT4577_86904C.1.pep
KENTKLNQERSKSEFFVKEDEANDTVQNALCHKSNRYPPRPLLSDSSRHQGESDFQKPFVGGFAILPDDEEPCEKRYGGANINCRTVQPTHNTNNLLCPVHDD

SEQ ID NO: 354973 - protein, 104 aa, Zea mays
  Clone ID: MRT4577_86905C.1.pep
VSSRYDPCNALCTRTSRNRLSSIVLWYAHFVIMSGFDCALYRTHAKSIKASSFGSCVAAPPFFILLQLFHSPLCFFNVGHCQCVQCVMDLCHIYSGLTDHCIGP

SEQ ID NO: 354974 - protein, 74 aa, Zea mays
  Clone ID: MRT4577_86906C.1.pep
WWLCGKEKFCLGFFLDPFFGPLHFFSRGFLLNCVQRGVNFVNRNKGHVGFGSTPVLFSGPVPFFIKHMDPSIYI

SEQ ID NO: 354975 - protein, 116 aa, Zea mays
  Clone ID: MRT4577_86907C.1.pep
SLISLPFLSLPFFFFFSPFINFLVRHITTFFLLNPLFYLLFFLFNHIPFSPLSPLITCPCPVFPHHNRLPFSSPLSPPPFAFLLSLSGSFFSPFSLPFYFSFSLYPPFFLFFSLFF

SEQ ID NO: 354976 - protein, 200 aa, Zea mays
  Clone ID: MRT4577_86908C.1.pep
FNGLASSPSRPSPRRCRRHHHPRCGNLRRAPSPHNTPQSSPRSASPSPPARFCAPDLYRPVATPPLWLGLGQGFAAASPAAPGSSLFLPGRDPPPLHLTFDAMGVPHPPWLSPSRASSRRCEGRHGSAAPFLLHHGRRLTLPSQQAPYKRVGPQLLRSSAILRCTWIWRFQGLHGFRIGLSFGISLDLGQANHAAAPSSS

SEQ ID NO: 354977 - protein, 46 aa, Zea mays
  Clone ID: MRT4577_86909C.1.pep
HRAVNRRDRTHAGWIRVRRERPGNGRHILHLIGRRTPHYSKEAFYL

SEQ ID NO: 354978 - protein, 141 aa, Zea mays
  Clone ID: MRT4577_8690C.1.pep
FPPWGLCLPSWKPVFWRCGPFAMWGVCPGICPLFLRVFFVFFSPLVFPWLGQTFVVVCFWVFGRWVCSALPPFFFLLSPVCLVVCYLLTLGPVSPLLGLWPFCVSACGPQRFCSRPLGFWLAGFVFLCPPTPLFWVSPCFL

SEQ ID NO: 354979 - protein, 183 aa, Zea mays
  Clone ID: MRT4577_86910C.1.pep
MWGERAHHKHGHHHDNVGSRDQQPKFIADNYSSVDEVIAALREAGLESSNLILGIDFTKSNEWSGRHSFGRKSLHAISGTPNPYEQAISIIGRTLSPFDDDNLIPCFGFGDASTHDHSVFSLYQENRPCRGFEEVLDRYRQIVPHLNLSGPTSFAPLIYAAMSVVESSNCQYHVLVIIADGQL

SEQ ID NO: 354980 - protein, 75 aa, Zea mays
  Clone ID: MRT4577_86911C.1.pep
TGSRISTESSISSAKELIKDMEGNLHRLSESSKREKKNLIKKLSYMKEDLSRSASKNNVEARMFILSQYLFVVAC

SEQ ID NO: 354981 - protein, 119 aa, Zea mays
  Clone ID: MRT4577_86912C.1.pep
PMPTTRCDWPNQPQLKTFPFLQRLCDAEVSLPLVLSSQATASQTPCSFTTSFFQPHVLRPRFQNSRKREKKHPPMSLSHRLLSFLHAFGICWRKKTSQIFPVYHFISWGLSPDRRLKEL

SEQ ID NO: 354982 - protein, 61 aa, Zea mays
  Clone ID: MRT4577_86913C.1.pep
LGIRLERHYPKYHLPHSLLTHRLIFLKTQRDYIPPPQMQNIQSMPMQILKPLRYCPKSGKM

SEQ ID NO: 354983 - protein, 137 aa, Zea mays
  unsure (1)..(137): unsure at all Xaa locations
  Clone ID: MRT4577_86914C.1.pep
MTNEDKRMQLLDKLKYMERELVATKGWESALQEQLLKELGDYKXAYCGQVMKINELEVQLNRLXSRISTESSISSAKELIKDMEGNLHRLSESSKREKKNLIKKLSYMKEDLSRSASKNNVEARMFILSQYLFVVAC

SEQ ID NO: 354984 - protein, 130 aa, Zea mays
  unsure (1)..(130): unsure at all Xaa locations
  Clone ID: MRT4577_86915C.1.pep
MADKVFCLLMLPDPSASVGTXSIFQHCSQAPIASLISPYLSPPVTXMCENPIVQPYRIQQAIATGILPXSPLIIHHPSALLQQIPAVHWVAHNITAHQLPQPALANLTAYCQLHQAIAFNQLAALNSAAY

SEQ ID NO: 354985 - protein, 61 aa, Zea mays
  Clone ID: MRT4577_86916C.1.pep
FLWGTGMHRKLSQETDEPAPLELFAFPWTNSSARQVYLFVTVNSGPVGLFKNWQYACCENK

SEQ ID NO: 354986 - protein, 45 aa, Zea mays
  Clone ID: MRT4577_86917C.1.pep
VVPFPSMVPPRDIQRCAADPNPQSGLAYQTSMTFCQQAFIVYHHS

SEQ ID NO: 354987 - protein, 56 aa, Zea mays
  Clone ID: MRT4577_86918C.1.pep
LRSILSSVCCRQMNGLLLFERLLNHELLHVSKSVCDGINAINSVALLEGQPLILEF

SEQ ID NO: 354988 - protein, 114 aa, Zea mays
  Clone ID: MRT4577_86919C.1.pep
NPFPTRTTTIGSNLSPVLWHETDKGIFFNPSLKIRSHLESNPRTKVCYLGLLSNQLEVLSQCSSSSSLICKRFAEYFDVEQLNQTNYFVLPSFQITKCFRFSRYITFAIHLDIH

SEQ ID NO: 354989 - protein, 161 aa, Zea mays
  unsure (1)..(161): unsure at all Xaa locations
  Clone ID: MRT4577_8691C.1.pep
MSLAGGGDGCSRRGECGGRLELPRQQPPMVVDVGCNCRAPRLLSSLISSLKSHARGVGRPNPNSSRHASSSSWSSSATTAFTSSTSLTTATTTFSSLDHHPSSWVPSTCAADTNAAVYVVDDDAEPARPAQRRRRRRQRRRGRXREGSDVGGGGGGGGGGV

SEQ ID NO: 354990 - protein, 213 aa, Zea mays
  unsure (1)..(213): unsure at all Xaa locations
  Clone ID: MRT4577_86920C.1.pep
SAGSTKLVKMASEGNKDVPHEALTVDHSSISGSKRKRGRPRKYEYPVNELPQKVQPIQSAPPLLHCTQDGSSLASHASGGGAHGNWSAQPRNSANASLQGNSGKDDFLGKHFVGKLTKKVPGFSLITVKVKDNQVLKGWVPDEINLRPITPKDDLAPELPMLRPSQVRKRASAIHMQPALPVXMHLENVTLAKPLQMRRPXEKTIAKHAVPLA

SEQ ID NO: 354991 - protein, 114 aa, Zea mays
  Clone ID: MRT4577_86921C.1.pep
WLSSPKRARARPLLAMALQLRRFLPHGYGQRHRAVTHVLSPPPPLAMGGTAKSKVLWGVPWSISVYYPLVTQKDILCLCTTLCKPDLEGIKHTSYYRPPLRQSPYFSFVSSTFS

SEQ ID NO: 354992 - protein, 54 aa, Zea mays
  Clone ID: MRT4577_86922C.1.pep
WVSPRSLVVFRRPVSLFWVFVCFVLTSVVRVCKFASSSSPARVLVLAAAWSYAW

SEQ ID NO: 354993 - protein, 203 aa, Zea mays
  Clone ID: MRT4577_86923C.1.pep
GILTIFRSAGSTKLVKMASEGNKDVPHEALTVDHSSTSGSKRKRGRPRKYEYPVNELPQKVQPIQSAPPLLHCTQDGSSLASHASGGGAHGNWSAQPRNSANASLQGNSGKDDFLGKHFVGKLTKKVPGFSLITVKVKDNQVLKGWVPDEINLRPITPKDDLAPELPMLRPSQVRKRASAIHMQPALPVPMHLENVTLASLCR

SEQ ID NO: 354994 - protein, 130 aa, Zea mays
  unsure (1)..(130): unsure at all Xaa locations
  Clone ID: MRT4577_86924C.1.pep
MGGKSRPPKGILESYTIKGSERVIKPGDWGLMRASDASKPPYVERVEEIEEEGSRGTNVKVRVGGYYRPKESIGGRGPFHGSKEVFLSDHYDVQRVDTIEGKXNVHSFRSYTKLDFANGEDFLCRFENKS

SEQ ID NO: 354995 - protein, 193 aa, Zea mays
  Clone ID: MRT4577_86925C.1.pep
PDLGAFPPPVPPFGNPSNTTLWFELGFLGAQGRVPPGGPVWQLPFGWGFKCPRPVWGPVPRVGPPPPSPWVGCFAPFPAALGPLPVPPIQWVLFFFPPLRFFPGPWCPSPIPGGSDFIWFWAPSVDFPPSPQCFFSLLEGRLNFFRFFSPFSFFFSSGLGEKKKKKKKKKKKKKKKKKKKKKKKTKKKKKKGP

SEQ ID NO: 354996 - protein, 34 aa, Zea mays
  Clone ID: MRT4577_86926C.1.pep
ANYLVVFLLSPPLIQKPKGEAAPLRGYWVLWTKV

SEQ ID NO: 354997 - protein, 65 aa, Zea mays
  unsure (1)..(65): unsure at all Xaa locations
  Clone ID: MRT4577_86927C.1.pep
CNPSPKYXSRRRYEEIVKXEVSSYLKKVGYNPDKIAFVPISGFEGDNMIERSTNLDWDKGPTLLE

SEQ ID NO: 354998 - protein, 44 aa, Zea mays
  Clone ID: MRT4577_86928C.1.pep
LIIRDNNGLVDLVSSLFFLLCHCFSLGSVCVWAVFRHHLSVAYI

SEQ ID NO: 354999 - protein, 57 aa, Zea mays
  Clone ID: MRT4577_86929C.1.pep
MCIKKNSVFMATKKKKKKKKKKKKKKKKKKKKKKKKTKKKKKKKKSLYKKKKKKKLV

SEQ ID NO: 355000 - protein, 170 aa, Zea mays
  Clone ID: MRT4577_8692C.1.pep
GEPPPVPCRVPGKWGPVPGGLGPAPRGFGFFPGGGPKRVLRFPGLGDVFPWSGGSPKPLGNLVRAPFVCLLKPWGFLPPDFWGRPRFSLTPFPRYRALRGRPPRGFGLGAPPGPVGAWGGLCCLKAPFLFWLRPVAPFGFCFPRGVFCPPPLDIPALFFFRWGPPIPPHS

SEQ ID NO: 355001 - protein, 79 aa, Zea mays
  Clone ID: MRT4577_86930C.1.pep
KEWGASSRASRSFPMEQVQLGSSDAGRTVKRDGPLRYLCRFRALKSLQVFFFFVLASAVEAALEELGSWKPFPVYPPRA

SEQ ID NO: 355002 - protein, 58 aa, Zea mays
  Clone ID: MRT4577_86931C.1.pep
EEEKRRSRDHRKLHTLLLKEKALIFGSPPSTSKTCSFNWRTSNYHTNSNSAGCMNFCA

SEQ ID NO: 355003 - protein, 56 aa, Zea mays
  Clone ID: MRT4577_86932C.1.pep
IKVVCCCKKKKKKKKKKKKKKKKKKKKKKKKKKKKKKKKKGKKKKKKKSSLGPKPP

SEQ ID NO: 355004 - protein, 792 aa, Zea mays
  Clone ID: MRT4577_86933C.1.pep
MATATEDTISDAREGDDWTQPHMTAKINNNVQCRNQCHGAIVATNESASMTEQGSGVDHTQSKPRDTDEDIEVDGSQDESTATNVPNPYDKVYSNIPEETHMLSDTTLQGKDSYPIYRHCDDNHKEKVRGYELDNRWVVPYNPYLLCLFNCHINVEACGSIKAVKYLFKYIYKGHDRASVVMRDASKAADDVDEIKHYRDARWVTPPEALWRIYGFELSQISPPVMQLQIHLPNMHMVAFHERQMVERVVNRPGVDRSMLTAYFEANRLHEEARGILYRDFPEWYTWQSGKGKVWQQRKRDTGGQVGRIVSAHPAEGERYYLRVLLNHVTGAASYVDLRTVDGVTLPTFREAAERRGLLESDNTLDECLTERALFQMPSALRRLFATILKHKDSMPEDYQHRSQNKTHVEQMVLIDIRNMLQSMGKDIKTFPLPPIIDMYDDAIGTTREVYEEESIQPTVGDVALKDSLNEEQRAAYDKIMSVVDTDQGGLFFMDGPGRTTHSRFKIPLTIDDGVVCSFTKQSGTTELLRKASLIIWDEASMTKRQAVEALDNSMRDIMGRPALPFGGKTIVFGGDFRQVLPIVRKGSRAQVVTSLLWMSYLWESMSHLKLVSNTRAKNDPWFVEFLLCVGGGTEETNSDGDIRLPDDVCVPYSGSDNDLDSLMDFAFPNLNENMSDSTYITSRVILSTRNDWVDMINVKMIDRFQGEHMVYHSFDIAMDDPHNYYPPEFLNTLTPNGLPPHVLKLKIGCPVILLWNIDPANGLCNGTRLVVRGFQRNSIDAEIVLGQHVGK

SEQ ID NO: 355005 - protein, 71 aa, Zea mays
  Clone ID: MRT4577_86934C.1.pep
HASADAWGRILSGLPVGGQTRTRKVLSLAESVFTPFQSSRKPVRASDFNSNRRYSRTHNALLWGSFVWLVQ

SEQ ID NO: 355006 - protein, 250 aa, Zea mays
  Clone ID: MRT4577_86935C.1.pep
MVTTAGYAGKVWQRRKRDTGGQVGRIVSAHPAEGERYYLRVLLNHVTGATSYVDLRTVDGVTLPTFREAAERRGLLESDNTLDECLTECALFQMPSSLRRLFATILVYCEPSDVGVLWQKHKDSMSEDYQHKSQNKTHVEQMVLIDIRNMLQSMGKDIKTFPLPPMIDTYDDAIGTAREVYKEESIQPTVEDVALKDSLNEEQRAAYDKIMSAVDTDQGGLFFVDGPGGTGKTYLYRVLLATLRNQGRIA

SEQ ID NO: 355007 - protein, 1377 aa, Zea mays
  Clone ID: MRT4577_86936C.1.pep
MKTCETVNFEISGDVHLGSVSLSDGCSAIDFTNFATQVPNNNTSPTDNFIERERQRHRERRAKMSVDQRNELNKKHREARQQNKGQHMMSTVSGDVDEKVNVNQDDDSDWLHRNETFKADDVFTMRDLLTPGGVHETVSNTPNHNLERATYFRERYPCDWVIPEIASNPFLPASTQTEDVNSLHMSTGPLRRKHVPRGERQAILARQNRQFEASISRNMATTTEDTISDTMEGDDWTQPHMTAKINNNVQCRNQCHGAIVATNESASMTEQGSGVDHTQSKPRVISNVDDDDGVVFEDDADENEGYLFAGQYEDTDEDIEIDGSQDESTVTDVPDPCDKVYNNIPEETHMLKTVPNCGYCTAKKFEYETPGFCCRGGKVELAPLETPPQLKRLWDSADSDARHFRDNIRFFNGHFSFTSLYCCLDSMTTNIEGSERQGQFSKSVMLHGKDSSSHCIHSYHGCYDALSYPLFFPRGELGWHANIPKVGVSMDEVDAYRVTHRASNANDEDAESLSHLSVSVRDYYCYKFQIRPGGRLRVDLYHGLVDSMLDGDIRAEKVGKRTVLSTSFIGGPHDMRRRYMDAMALVRKFGKLDIFLTMTCNPNCDEIRRELLPGQTLQDRPDLVVRVFHAKLQELKHRLTKQDILGKVRAYVYVMEFQKRGLPHAHFLFIMQRKYKLTCHEQYDLLISAEIPSNKYLELRKMVIKHMMHGPCGSLNPHCPCTKGRKSCKNHYPRPFSDTTLQGKDSYPIYIRRDDDHKEKVRGCELDNRWVVPYNPYLLRLFNCHINVEACGSIKAVKYLFKYIYKGHDRASVVMRDVSKAYDDVDESKQYRDSRWVTPPEALWRIYGFELSQISPPVMQLQLHLPNMHMVAFHERQMVERVVNRPGVDRSMLTAYFKANRLHEEDRGILYRDFSEWYTWQSGKGKVWQRRKRDTGGQVGRIVSAHPAEGERYYLRVLLNHVTGDASYVDLRTVDGVTLPTFREAAERRGLLESDNTLDECLTEHALFQMPSALRWLFATILVYCEPSDVVVLWQKHKDSMSEDYQHRSQNKTHVEQMVLIDIRNMLQSMGKDINTFPLPPIIDAYDDAIGTAREGKIAVATATSGVAASIMPGGRTAHSRFKIPLTIDDGAVCSFTKQSGTTELLWKASLIIWDEASMTKRQAVEALDNSMRDIMGRPALPFGGKTIVFGGDFRQVLPVLRKGSRAQVVASSLRMSYLWESMSHLKLFSNMRAKNDPWFAEFLIRVGGGTKDTNSDSDIHLPDDVCVPYSGSDSDLDNLIGFAFPNLNENMFDSTYITSRAILSTRNDWVDMINVKMIDRFQGEHMVYHSFDSAMDDPHNYYPPEFLNTLTPNGLPPHVLKLKIGCPVKLLQNIDP

SEQ ID NO: 355008 - protein, 94 aa, Zea mays
  Clone ID: MRT4577_86937C.1.pep
GGKRGFLPCSQKNNFLLSPTGLNQRGQYPFALYFLTQGALSPSLEKKYFFPPGGWDRYFPFKIFHPGGFFFPIWLRAQKIGPPPLALFKKVFFC

SEQ ID NO: 355009 - protein, 66 aa, Zea mays
  unsure (1)..(66): unsure at all Xaa locations
  Clone ID: MRT4577_86938C.1.pep
MSVGEHFFQYPMSTSGMTLHICQXKNSHHIIKAYFIAFGRTLRXAIDYDLRYQGTISDSKGVLSRS

SEQ ID NO: 355010 - protein, 88 aa, Zea mays
  Clone ID: MRT4577_86939C.1.pep
HEAETGRPDAASTLRSRFYDAAADGEREEDAVQKAQEVEEHPVGGAANEADYQPNEPQGKENKTQLEEQGGGAGAKGQTARGEGRSRK

SEQ ID NO: 355011 - protein, 50 aa, Zea mays
  Clone ID: MRT4577_8693C.1.pep
ARPKESRELDDKDHGPSESLSYWTPNVTVNLVEDYTRYPNNNEPAIAASM

SEQ ID NO: 355012 - protein, 54 aa, Zea mays
  Clone ID: MRT4577_86940C.1.pep
MYPKGALVHWYVGEGMKKANFSKPRKDLPALEKNYKKVGAEFHKGEDGAKGDEY

SEQ ID NO: 355013 - protein, 86 aa, Zea mays
  Clone ID: MRT4577_86941C.1.pep
TKCLFECKQQQQQRGDLLTTHKNVFGQAFNMYTTKRLPWMRFQFLQEQQWALQTFEDTLHTCWSGGTKQSLGDVFHFLLGLTWKAS

SEQ ID NO: 355014 - protein, 75 aa, Zea mays
  Clone ID: MRT4577_86942C.1.pep
PLPIGFAVFLVHLAPIPITGTGINPAGSLGAPVIYTQPHAWVDHWIFWVGPLMGVGLAAISPQVIIRAIPFKSRF

SEQ ID NO: 355015 - protein, 81 aa, Zea mays
  Clone ID: MRT4577_86943C.1.pep
QSIGAGFFFFFGGKPLLFFLRYDGKRTPFGGAFLGAGNFLTWSILHLRARSFRGAWERYQSPGGGCPRSTPSCWESWARCI

SEQ ID NO: 355016 - protein, 178 aa, Zea mays
  unsure (1)..(178): unsure at all Xaa locations
  Clone ID: MRT4577_86944C.1.pep
GAKVGIRRATEAAGIPYTYAVPXLFAGFALPNIGQLLAPGPPADKAVVLGDGXTQAVFVEEGDIATYTVLAADDPRAENKVLYIKPPANTLSHNELLSLWEKKTGKTFRREYVPEEAVLKQIQESPFPLNIILAIGHAAFVRGEQTGFEIDPAKGVDASELYPDVKYTTVDEYLNRFL

SEQ ID NO: 355017 - protein, 140 aa, Zea mays
  unsure (1)..(140): unsure at all Xaa locations
  Clone ID: MRT4577_86945C.1.pep
VLYTSVISPATVFYDGDANANRSSGSRCGIHGRDGEAQDLCRLGARCLVLLPYMWILVFLFQHNLLIYAIFILFLCIIVFSNILLIYRIIXIFLYFILFFFLLNYFYLLLFFIYVFLFILFFFFILYFFYFSLSFIFFVF

SEQ ID NO: 355018 - protein, 309 aa, Zea mays
  Clone ID: MRT4577_86946C.1.pep
MASEKSKILVVGGTGYLGRHVVAASARLGHPTSALVRDTAPSDPAKAALLKSFQDAGVTLLKGDLYDQASLVSAVKGADVVISVLGSMQIADQSRLVDAIKEAGNVKRFFPSEFGLDVDRTGIVEPAKSILGAKVGIRRATEAAGIPYTYAVAGFFAGFGLPKVGQVLAPGPPADKAVVLGDGDTKAVFVEEGDIATYTVLAADDPRAENKVLYIKPPANTLSHNELLSLWEKKTGKTFRREYVPEEAVLKQIQESPIPLNIILAIGHAAFVRGEQTGFEIDPAKGVDASELYPDVKYTTVDEYLNRFL

SEQ ID NO: 355019 - protein, 72 aa, Zea mays
  Clone ID: MRT4577_86947C.1.pep
PPRLLFLKPPTPLCPPQKKGYFPGCYNPFFTLPFKSTLWAPCGGRCPPGTKEPLFKRGGGGPFGPPPGGQTS

SEQ ID NO: 355020 - protein, 77 aa, Zea mays
  Clone ID: MRT4577_86948C.1.pep
REVHPSGGGGGGGGARFPYAAAGQRDRGFGSQTCGRLAGVLWFCKFRGANREVSNAILRGVAGLDLGPGAGEVVRRR

SEQ ID NO: 355021 - protein, 98 aa, Zea mays
  Clone ID: MRT4577_8694C.1.pep
GSERTLLQRSAEDGPPLRMAYARHVRLRRRHLDAAQLRRRGPGPRRQQQQRRCQGHRRDQLLGGGARRPLLQDRAIELLAGVTSCSQIPPSGSADPPP

SEQ ID NO: 355022 - protein, 162 aa, Zea mays
  unsure (1)..(162): unsure at all Xaa locations
  Clone ID: MRT4577_86950C.1.pep
VLFTHVQWFYVMCESQQIHLWSYGRPHETWRXTLVVXYVPPSFPXLALSIEGAIDGMIEIGCLSRVXAVHTMIXVMSVRFVVCSRFXLECXSWQRLLSMIDYCSCIYEVVSVPCKIQSLLQTPMRRTLANNSGAQPPLQVDPFHSVPHMPPSKREQSVGDQE

SEQ ID NO: 355023 - protein, 58 aa, Zea mays
  Clone ID: MRT4577_86951C.1.pep
LVRRHLASNRFFTLAMVPRSSSHLLDLHLLLSLEPHCLTKIFGRVGERKGGRVGGRVG

SEQ ID NO: 355024 - protein, 67 aa, Zea mays
  Clone ID: MRT4577_86952C.1.pep
SSKHVATLPKSRVPLLIKGWGHSASGRASSCAHIYLYSIHVTSPKEGDGDSTSLFICCLVHRTLSFS

SEQ ID NO: 355025 - protein, 97 aa, Zea mays
  Clone ID: MRT4577_86953C.1.pep
NISVSSPSTSVLQHSSCIDEDRRSDLRSKGRERNPRKAKMIYRNWSLLSSTVVIWGGVATAGLAGIFLLGGKEKFNGYLCREGERLRQQDRATMGRS

SEQ ID NO: 355026 - protein, 56 aa, Zea mays
  Clone ID: MRT4577_86954C.1.pep
MLSDVSIPEHHELISHSTDTVLCTVAVNTELTTIHADHISTQHVRTQFNLDDRLGQ

SEQ ID NO: 355027 - protein, 204 aa, Zea mays
  unsure (1)..(204): unsure at all Xaa locations
  Clone ID: MRT4577_86955C.1.pep
MAPKIAIVYYSMYGHIKKLADAELKGIQEAGGDAKLFQVAETLPEEVLQKMYAGPKAADIPVLEDPAVLEEFDGILFGIPTRYGNFPAQFKAFWDRTGKQWQQGSFWGKYAGLFVSTGTQGGGQESTCLAAMSTLAHHGFIYVPLGYKTTFADLANLNEVHGGSAWGAGTFAGGDGSRQPSELEIRVAVAQGKAFYEXVAKAHQ

SEQ ID NO: 355028 - protein, 48 aa, Zea mays
  Clone ID: MRT4577_86956C.1.pep
HRRHARNRDSMSASAFHRTVERFQRYRKQQNYWLRLVEFTFKSNPFRF

SEQ ID NO: 355029 - protein, 91 aa, Zea mays
  Clone ID: MRT4577_86957C.1.pep
GFTSSWSVPSGVLCPVPLAQYVWPVSPIAFSVSLAHRVLFGIGSLFCLFRLHPFIWSCVSVLPVSLLGGVSLSLGFCARLPKILAICWSSS

SEQ ID NO: 355030 - protein, 151 aa, Zea mays
  Clone ID: MRT4577_86958C.1.pep
MASPRPPHGHLTLRIINKAVNITPPTNNKRLLPSLKTATINTIPVIDDSNIFNEKHVIHLFNHKMTPLIENENCWRSGSPDNTQLLDDHAGNFLHLDPDHIEQLNTIADADPQEYGCCLSQQHTCWKMTLMMYHSMIMKKLLINQLLIARN

SEQ ID NO: 355031 - protein, 70 aa, Zea mays
  Clone ID: MRT4577_86959C.1.pep
WIVQGLTIVLSLAEDPPRHSYVGISLSIGACKQRPYMVAVASLAVRPRSNQPAPYFARHCWYPTVLARVL

SEQ ID NO: 355032 - protein, 172 aa, Zea mays
  Clone ID: MRT4577_8695C.1.pep
LRALPPDAPLPFPVPAPFHPQAPGPGGTVPATPPNPTPPQPLTPAPPSSFSTRPPHPWEISARAWLESFPDGRPPTEPEVDAYIDVHRPELPSLPRSQLHQRLLALRGDQVLDADQSAFPYRFQRTDLWKPVYQWLESLELDSLVATQQISDWLTSNPKIMDRMVEKHSKYH

SEQ ID NO: 355033 - protein, 155 aa, Zea mays
  Clone ID: MRT4577_86960C.1.pep
PQSDRRGSPTPRRAPWRTQRNDALPAHAGTLGWCPHRQLSRAYCIPLHHSKLLMIVVNHQHGHVPRLPLPIPSPPQPPQAILRGLLLLLAFQMMVPADNAAESPDDNDPHIDSPQKAYLISSVKEILTIMDLNVKGDLYLPILTIIIAYPSCVNV

SEQ ID NO: 355034 - protein, 66 aa, Zea mays
  Clone ID: MRT4577_86961C.1.pep
VRYSLSLSLSKRRRRLTCCTTALLLLHDKIRRGAYSLPEFNSSSRYSSSCYCLLHNVRYHGETKEG

SEQ ID NO: 355035 - protein, 61 aa, Zea mays
  unsure (1)..(61): unsure at all Xaa locations
  Clone ID: MRT4577_86962C.1.pep
PADMALCTVILYIQLAAYLPFWDEDQHRLYQHIMADANDIPXRECNTVTPEAKNLISTMLT

SEQ ID NO: 355036 - protein, 95 aa, Zea mays
  Clone ID: MRT4577_86963C.1.pep
AAYVCLSFACSGRLWRAAAMALRYPMAVGLNKGHKVTKNVSKPRHSRRRGRLTKHTKFVRDMIREVCGFAPYERRAMELLKVSKDKRALVLDREG

SEQ ID NO: 355037 - protein, 111 aa, Zea mays
  Clone ID: MRT4577_86964C.1.pep
PAGNPSSLNFTSHSLSIMSQPTLTADYTSPESEPFQVSHTLSAISSTASTTDKASYLKGLRASIAETRATVNHELSEPGQCEIAGEGERDSDESRHSRQSRSHWTRGRCPS

SEQ ID NO: 355038 - protein, 48 aa, Zea mays
  Clone ID: MRT4577_86965C.1.pep
AVVTTQSTRSSANNAEYAGKVMRSNCQVRWRAHLDSTLIGTVSSTVVY

SEQ ID NO: 355039 - protein, 64 aa, Zea mays
  Clone ID: MRT4577_86966C.1.pep
KNILLNSWRYGFFPHPFVFRAVNPPRKRLIWDYLFFLKSATQYRGPCLFENHIWGFPFFKPTND

SEQ ID NO: 355040 - protein, 67 aa, Zea mays
  Clone ID: MRT4577_86967C.1.pep
FRPGPTLIFRNYPYPFRPLLKKKNQKKGLCLVFLHTAPLFASSGAAAAMEAVTDKGCHVTSSGRGQH

SEQ ID NO: 355041 - protein, 68 aa, Zea mays
  Clone ID: MRT4577_86968C.1.pep
CLSISALRVCLRIYFYGYLLVVMAQVGVRRLVVTSPSRVVSAVIRATSPRLWSSSRSVIQSGRRPRAE

SEQ ID NO: 355042 - protein, 59 aa, Zea mays
  Clone ID: MRT4577_86969C.1.pep
PQAFDDTACSKFHVPTECQNGLSSICIPAETRHLPHTVCFYQIDGDNASLTHLLHHYNS

SEQ ID NO: 355043 - protein, 69 aa, Zea mays
  Clone ID: MRT4577_8696C.1.pep
PYCGNLRLLEPKGSNCRSQTLTRSTPNICNQLNHQLRRLMRPLRLPLVIPCRVAVDQPDAQAGLRGGSW

SEQ ID NO: 355044 - protein, 115 aa, Zea mays
  Clone ID: MRT4577_86970C.1.pep
YAAVRSESGSPRADAWVDECHHATGNHPYTRIMKEFYHGSEHKPNVFGMTASPIIRKGVSSDLDCKNQLSELENILDSKIHSVVDREEIELCVPSAKEVNRYYEPRTVSFDDLSE

SEQ ID NO: 355045 - protein, 89 aa, Zea mays
  unsure (1)..(89): unsure at all Xaa locations
  Clone ID: MRT4577_86971C.1.pep
KNESEEKTPSNPYKKKRIDGSTPKRPDIYLKINEXSLXETSNSVTKHNKVAXEEDESLFEKSVTVNAGWXDVKKYPEEYALNPTLLNTA

SEQ ID NO: 355046 - protein, 45 aa, Zea mays
  Clone ID: MRT4577_86972C.1.pep
RKHIRSLAKSLYHMLTRLYSRNRDNLTLLPRSINVPHALQALVST

SEQ ID NO: 355047 - protein, 387 aa, Zea mays
  Clone ID: MRT4577_86973C.1.pep
IQGKQILMLARKLRLEGQFDFLKIARATPGFVGADLKALVNNAGYLAMKRIINKRRAQYCSEVKVKWWKQLSWDAGEMESVHVTMNDFEEATKLVQPSLRREGFSSIPDVTWDDVGGLDSLRKEFHRYIRCIKSPEDCDVFGVRMQDGFLLFGPPGCGKTLIAKAVAHEAGANFIHIKGPDILNKYVGESESEIRKIFNRARINAPCIVFFDEVDSLTTKRGKEGGWVVERLLNQLLIELDGAGQRKGVYVIGATNRIDMIDDAMLRPGRFGKKHYVPIPGARERVSILKALARRIPVSSTVDLDVLALREECSNFTGADLASLVDEAAMLAMAERWMYLDSRTSTSPSSLIEPSHFEEALSKVKPSISKKQKRLYEKMRKKHLSTT

SEQ ID NO: 355048 - protein, 1131 aa, Zea mays
  unsure (1)..(1131): unsure at all Xaa locations
  Clone ID: MRT4577_86974C.1.pep
MACIKSAQRAALTALAPDAPYLAAGTMTGAVDLSFSASANIEIFRLDFQSDSPDLPILASAPSPDRFNRLSWSRPGAVEGDSFALGLLAGGLSDGSVAVWNPLSMISSEGKAEDAMVARLEKHTGPVCGLEFSELTPNRLASGAEQGELCIWDLKNPVEPIVYPPLKSVGSHAQAEISCLSWNPKFQHIVASTSSNGMTVVWDLRNQKPLTSFSDSNRRKCSVLQWNPDMSTQLIVASDDDNSPSLRVWDVRKTISPVREFVGHSKGVIAMSWCPYDSSFLLTCSKDNRTICWDTVSGEIISELPASANWNFDLHWYRKIPGVIAASSFDGKIGIYNLEFSGLYATGDAVGAPVRPRAPAPKWLKCPTGASFGFGGKLVSFHPVAPTQGAQTSTSEVHVHNLVIEQSLVSRSTEFEAAIQNGDKSSLRALREKKSQESLSDEERETWGFLMIMFEDGDFARTKLLAHLGFEPPQAPPASSPDELSQTLADTLNLDHATITDYADAQFLTDNGDDFFNNPQPSEASLAEDLVSTNGQQTEQEMSGDVVPSDPSIDKSIQHALVVGDYKGAVNQCLSANRIADALVIAHAGGSALWESTRNHYLKNSISPYLKVVSAMVGNDLMSFVSTWPLSSWKETLALLCTFAQKEEWHVLCDTLASRLLNIGDTLAATLCYICAGNIDKAVEIWSRTLKSEDGGKIYVDLLQDLMEKTSTHACCYGPRLLNLITRXLVENYAELLASQGLXLKTAMEYLKLLGLHEHSNELAILRDRIACSMEENDNARSYVSESTATPSLYGTNQSYTAPDHSQNVYQQVPQPYNVPSNTYSEAYPQQPTGAYGYNNTYQPQQPTHMFVPPSAXPALSXQPGPSPVPVPQQTVKAFTPANPAGLKNPGQYQQPNTLGSQLYTGTXNQQYPSGPSASYPSGPPTTFHQPVSPVQYQPVAPPVSSFGPSAPVPATVPNQMFPHSAAANSTSRFMPSNNQSFAPRPGLSPAQPSSPTQVQAQPAPPAPPPTVQTADTTKVSAELRPVIGTLTRLFDETSKALGGSQATQAKKREIEDNSRKIGALFSKLNSDDISPNVSSKLRQLCSAIDASDFATAMHLQVLLTTSDWDECNFWLAALKRMIKTRQNFRM

SEQ ID NO: 355049 - protein, 516 aa, Zea mays
  unsure (1)..(516): unsure at all Xaa locations
  Clone ID: MRT4577_86975C.1.pep
MTSHISYLWYKFDMSLFMKSKLTVKLKQFAQKEEWHILCDTLASRLLNVGDTLAATLCYICAGNIDKAVEIWSRTLKSEDGGKTYVDLLQDLMEKTITLALATGHXKRFSASLSKLVENYAELLASQGLLKTAMEYLKLLGSDEHSHELAILRDRIACSTEENDNARSSVSENTSTPSPYVPNQPYTTPDHPQNVYQVPQPYNVPSNTYSEAYPQQGTGAYGYNNAYQPQQPANMFVPPSTPPNTQQQPGPSHVPVPQQTVKTFTPANPAGLKNPGQYQQPNTLGSQLYTGATNQPYSSGPSAPYPSGPPTTFHQPVAPVQYQSAAPPVSSFGPTTPVPGTVPNQMFPHSAATNSTSRFMPSNNQSFAPRPGLSPVQPSSPTQVQAQPAPPAPPATVQTADTTKVSAELRPVIGTLTRLFDETTKALGGSQATQAKKREIEDNSRKIGALFSKLNSGDISPNVSSKLIQLCSAIDASDFVTAMHLQVLLTTSDWDECNFWLAALKRMIKTRQNFRM

SEQ ID NO: 355050 - protein, 52 aa, Zea mays
  Clone ID: MRT4577_86976C.1.pep
QVYAVHLVRSRIQAHCSIPRTEPKGDGHLVHSDIKSLWLRPCLHALEIIVIF

SEQ ID NO: 355051 - protein, 395 aa, Zea mays
  unsure (1)..(395): unsure at all Xaa locations
  Clone ID: MRT4577_86977C.1.pep
HYLKNSISPYLKVVSAMVGNDLMSFVSTWPLSSWKETLALLCTFAQKEEWHILCDTLASRLLNVGDTLAATLCYICAGNIDKAXEIWSRTLKSEDGDKTYVDLLQDLMXXXIALALATXQKRXXXXXAXLXIRHEAELLASQGLLKTAMEHLKLLGSDEHSHELAILRDRIACSMEENDNARSYVSESTATPSLYGTNQSYTAPDHSQNVYQQVPQPYNVPSNTYSEAYPQQPTGAYGYNNTXXXXXXXXXFVPPSAXPALSXQPGPSPVPVPQQTVKAFTPANPAGLKNPGQYQQPNTLGSQLYTGTANQQYPSGPSASYPSGPPTTFHQPVSPVQYQPAAPPVSSFGPSAPVPGTVPNQMFPHSAATNSTSWLLILPRRVGEIGLILWFSYTF

SEQ ID NO: 355052 - protein, 444 aa, Zea mays
  Clone ID: MRT4577_86978C.1.pep
PGRGFYNGQQIEQEVSGDAVPSDPSIDKSIQHALVVGDYKGAVNQCLASNRMADALVIAHAGGSALWESTRNHYLKNSISPYLKVVSAMVGNDLMSFVSTWPLSSWKETLALLCTFAQKEEWHILCDTLASRLLNVGDTLAATLCYICAGNIDKAVEIWSRALKSEDGDKTYVDLLQDLMEKTITLALATGQKRFSASLSKLIENYAELLASQGLLKTAMEYLKLLGSDEHSHELAILRDRIACSTEGHFKQNDNVSSVSVSESTGTPSPYVTNQPYTTPDHSQNVYQQVPQPYNVPSNTYSEAYPQQGTGAYGYNNAYQPQQPANMFVPPSTPPNTQQQPGPSHVPVPQQTVKTFTPANPAGLKNPGQYQQPNTLGSQLYTGATNQPYSPGPSAPYPSGPPTTFHQPVAPVQYQSAAPPVSSFGPTTLYQNSPYQMFPILLLL

SEQ ID NO: 355053 - protein, 175 aa, Zea mays
  Clone ID: MRT4577_86979C.1.pep
YINLLYHGRNNMQAWGLIVLLISKAAGQAPGIPEMEHDRSAGVLHSQRALAEVCEMIRISHLVHQGLVNLQPLTQAGQDLSLHGDMTFGNKIALLSGDYLLGNSCAELAGLRNQDLVELISSAVRDLTEAEFIGDRDEQNNPLPSAPPKVPRRVTSDIHDDYDIHLANDVLEPIE

SEQ ID NO: 355054 - protein, 68 aa, Zea mays
  Clone ID: MRT4577_8697C.1.pep
TITAGYGSGGYCFCAVSVGTVKGLLNENNALPAIPCDLSEMGLSRANAAVYVAYRLWTQWVPWNTDCH

SEQ ID NO: 355055 - protein, 63 aa, Zea mays
  Clone ID: MRT4577_86980C.1.pep
VWGFFFFFFLLFFFFPAKFLQNTDFPPPVNNKVPVDGKSHWATNLQVTRGEQSFLWRGKTNLK

SEQ ID NO: 355056 - protein, 120 aa, Zea mays
  Clone ID: MRT4577_86981C.1.pep
SVCCSSEKNLIGHCGPFLSKLCRNLALLQKFPDLQASAMLALCRLMIIDAEFCEANLQILFTVAESAPSETVRSNCTIALGDLAVRFPNLLDPWTEYIYARLRDPSVSVRKNAGLVLSHL

SEQ ID NO: 355057 - protein, 111 aa, Zea mays
  Clone ID: MRT4577_86982C.1.pep
SSSFSVSSSSSSSAPPVPRGVTFSGASRPCRRVTGTLYGHRRGRVVLALQETPRCLPSLVVELALQTHALLRELGNPAGARIVLETERRAGLEGRPSARRRRPDGRGGAVR

SEQ ID NO: 355058 - protein, 52 aa, Zea mays
  Clone ID: MRT4577_86983C.1.pep
FLQSLISKNHSKLLNYSLGQAILPTIKAFHTISSSIHSQHILHLQRSDYHPS

SEQ ID NO: 355059 - protein, 100 aa, Zea mays
  Clone ID: MRT4577_86984C.1.pep
GPTNSIFKERGPLKHTPKSDTFFHANPTTWISFITHWGGGGRFSNGSQWKRGKTPNNSKRYVNSKEGGASKNGSNHESHPLGLSKGGFSKPFYNRQAGKK

SEQ ID NO: 355060 - protein, 38 aa, Zea mays
  Clone ID: MRT4577_86985C.1.pep
GLRFKKKKKKKKKKKKKKKKKKKKKKKKKKKKKKKKRG

SEQ ID NO: 355061 - protein, 307 aa, Zea mays
  unsure (1)..(307): unsure at all Xaa locations
  Clone ID: MRT4577_86986C.1.pep
MPSASLRLAVVGAGAAGLVAARELRREGHXPVVFERAAAVGGTWLYTPPATSSDPLGAAATHSSLYASLRTNLPSRKLGDKGSGEEEFYDAVVVCNGHYTEPRLAVIPGVDAWPGKQMHSHNYRVPEPFLDQVVIIIGASASAVDISRDIASMAEEVHIADRSAPASTCNKQPGYDNLWLHSMIDHAQEDGTVVFQDGSSIKADVIMHCTGYLYDFPFLGDDSTITVDDNRVDPLYKHIFPPEVAPHLSFIGLPWKVXPFPLFELQSKWVARVLSGRIXLPSEDRMMEDVKAFYLKLEXHGWPKRYT

SEQ ID NO: 355062 - protein, 440 aa, Zea mays
  Clone ID: MRT4577_86987C.1.pep
MPSASLRLAVVGAGAAGLVAARELRREGHAPVVFERAAAVGGTWLYTPPATSSDPLGAAATHSSLYASLRTNLPRETMGFLDFPFAAGAAGSRDPRRFPGHEEVLRYLEAFARRFDLLRLVRFETEVLSVRREDGGRWAVTSRKLGDKGSGEEEFYDAVVVCNGHYTEPRLAVIPGVDAWPGKQMHSHNYRVPEPFLDQVVIIIGASASAVDISRDIASMAEEVHIADRSAPASTCNKQPGYDNLWLHSMIDHAQEDGTVVFQDGSSIKADVIMHCTGYLYDFPFLGDDSTITVDDNRVDPLYKHIFPPEVAPHLSFIGLPWKVIPFPLFELQSKWVARVLSGRINLPSEDRMMEDVKAFYLKLEAHGWPKRYTHNFANYQFEYDDWLAEQCGHPPVEEWRKQMYAVTSMNKAARPESYRDEWDDEHLVAEANEYFKKFL

SEQ ID NO: 355063 - protein, 80 aa, Zea mays
  Clone ID: MRT4577_86988C.1.pep
ALLRVPMWDMQKPSTIWAVSWFPGPLMQDPCMFCVVSLTLEQFPSVLRPLFVVPLSPSRVRMSRRIRFVIWSPLFVERII

SEQ ID NO: 355064 - protein, 176 aa, Zea mays
  Clone ID: MRT4577_86989C.1.pep
IDIGPGAGVHGGEIISAGRPEEVMNDPASLTGQYLSGKKFIPLPLERRQDNGRFIEVRGARENNLKDTSVKFPLGTFIAVTGVSGSGKSTLINEILHKSLAMKLQRAKSRPGEHKEIKGAEHLDKVIDIDQSPIGRTPRSNPATYTGVFDDIRDVYASTNEAKVRGYKKGRFSFNV

SEQ ID NO: 355065 - protein, 98 aa, Zea mays
  Clone ID: MRT4577_8698C.1.pep
RGYQRCCGVLCCTCLGPGRKGGGNRGWSGTGVSQNTEILGESPSTFLLTPLEVGAFQETENVTRMPAVSSEPVWLRLSATSTCQSVHVLLALLVIQVS

SEQ ID NO: 355066 - protein, 53 aa, Zea mays
  Clone ID: MRT4577_86990C.1.pep
QPDRITTHDHGEMKAEYLQGGIIRSHNRHTHTHTPRYGRNPTSTKDTPDPTKM

SEQ ID NO: 355067 - protein, 155 aa, Zea mays
  Clone ID: MRT4577_86991C.1.pep
MASLSSAAITAPSFTAAPARAVVSRRSFTVRASLRKATATAAVAVAASVLLAGGGAMAQEVLLGAGDGGLVFEPSQFTVKAGDTITFKNNAGFPHNVVFDEDEVPSGVDATKISQEEYLNAPGETYSVTLTVPGTYGFYCEPHQGAGMVGKITVN

SEQ ID NO: 355068 - protein, 155 aa, Zea mays
  Clone ID: MRT4577_86992C.1.pep
MASLSSAAITAPSFTAAPARAVVSRRSFTVRASLRKATATAAVAVAASVLLAGGGAMAQEVLLGAGDGGLVFEPSQFTVKAGDTITFKNNAGFPHNVVFDEDEVPSGVDASKISQEEYLNAPGETYSVTLTVPGTYGFYCEPHQGAGMVGKITVN

SEQ ID NO: 355069 - protein, 155 aa, Zea mays; identical to SEQ ID NO: 355068
  Clone ID: MRT4577_86993C.1.pep

SEQ ID NO: 355070 - protein, 155 aa, Zea mays
  Clone ID: MRT4577_86994C.1.pep
MASLSSAAVTAPSFAAPAPARAVVRRRSFTVRASLRKATGTAAVAMAASALLAGGAMAQEVLLGAGDGGLVFEPSQFTVKAGDTITFKNNAGFPHNVVFDEDEVPSGVDATKISQEEYLNAPGETYSVTLTVPGTYGFYCEPHQGAGMVGKITVN

SEQ ID NO: 355071 - protein, 60 aa, Zea mays
  Clone ID: MRT4577_86995C.1.pep
AQHHTNQIQQSFRVIIVGPDSNASWLLGVLTHLNLPLLRPAPIVTLANGNNLAYSYRYYK

SEQ ID NO: 355072 - protein, 391 aa, Zea mays
  Clone ID: MRT4577_86996C.1.pep
MSHRKFEAPRHGSLAFLPRKRAARHRGKVKSFPKDDPKKPVHLTAAMGYKAGMTTIVRDLDRPGAKLHKKEIVEAVTVIETPPMIAVGLVGYIETPRGLRSLTTVWAEHLSDEVKRRFYRNWYKSKKKAFTKYAKKHSESSGQSITRELERIKKYCTVVRVLAHTQIHKTPLKQKKAHLMEIQVNGGSVADKVSYGHGLFEKPIGPACIFEQDEMIDVVAVTKGHGFNGVTARWGTKKLPRKTHKGLRKVACIGAWHPSHVQWTVARAGQMGYHHRTSVNHKIYRIGKGDADDNAATEIDVTKKTITPLGGFVRYGEVKNDFVMLKGSIPGVKKRVMTLRKTMFPQTSRRALEKVSLKWIDTSSEFGHGAFQTPAEKKQYQGTLKKDLSSA

SEQ ID NO: 355073 - protein, 106 aa, Zea mays
  Clone ID: MRT4577_86997C.1.pep
IDKWPRKIQVATGAAALKGKLHAFNQNISDQVAGYMRDPSRMINRMDLTNSAVRVFGKDVGEPGTPEEVRAFTTFPLKIFQTVFGLHQCTEVYRPVVNSSSFFPLR

SEQ ID NO: 355074 - protein, 41 aa, Zea mays
  Clone ID: MRT4577_86998C.1.pep
PSTSSHKHANRSVTLISMSTIRTKIFTTTFTFTFIIIPFPL

SEQ ID NO: 355075 - protein, 122 aa, Zea mays
  Clone ID: MRT4577_86999C.1.pep
LRAGVPAASSPTRPLARNTPHQSVSDRYVCEICGQGFQRDQNLQMHRRRHKVPWKLLKREAGEAARKRVFLCPEPSCLHHDPSHALGDLVGIKKHFRRKHSGHRQWACVFSRIVWGSIAWLI

SEQ ID NO: 355076 - protein, 82 aa, Zea mays
  unsure (1)..(82): unsure at all Xaa locations
  Clone ID: MRT4577_8699C.1.pep
FIFLRIFVNYELLSKCVLNEDGFGVLVNGKNVFLLIFLSNILLESKCVFYFKVXWVGGGVVFNKNRSGFXXXCLKIKKXXXX

SEQ ID NO: 355077 - protein, 71 aa, Zea mays
  Clone ID: MRT4577_869C.1.pep
TNAPQTGHYWHWGYFQRIGSSTQTMYSSCRKRTILTLVFKRLGVPRSKGGAKTCLANKPPENPLQIAQHVL

SEQ ID NO: 355078 - protein, 100 aa, Zea mays
  Clone ID: MRT4577_86C.1.pep
RVGQHSRTSPLVGRAWWSTGSGPAVALTPAGVPLRSTPARSVSVDASPASPSGAGAATMTGWAALSSFPVSPAILVVSVRRLFASSAYRCVGSPSGLPRP

SEQ ID NO: 355079 - protein, 81 aa, Zea mays
  Clone ID: MRT4577_87000C.1.pep
KLGWNPDVLSSYPTILSFSHEKRVLPRYRVLHILASRGVIKKGIRMSHLTMPEKKFKERYVDKHQEEIPQVLEAYGARTEA

SEQ ID NO: 355080 - protein, 40 aa, Zea mays
  Clone ID: MRT4577_87001C.1.pep
SGVYEDHGPMRINPVLSIRIGKPDIILDKSDSGFVADAYA

SEQ ID NO: 355081 - protein, 84 aa, Zea mays
  Clone ID: MRT4577_87002C.1.pep
WKGIGGDLGLTHGKGGFWKAIGWASGFSSADGKPARDYWGPKEPAGDGRGGIGSLKGPLFFFFLFWFFFFFFIFFFFFFFFFFF

SEQ ID NO: 355082 - protein, 94 aa, Zea mays
  Clone ID: MRT4577_87003C.1.pep
AAVNIPGHLRGLLDLPAGPRQALLPPLVLHGLVFLQLEHLVLQVGDGSLVCSLVSRSVGALPRSKASTMGLASGVPKEENLPLSDSSTTATLAP

SEQ ID NO: 355083 - protein, 37 aa, Zea mays
  Clone ID: MRT4577_87004C.1.pep
ANCTLMFRNLTLFLDLSSKVDFPPREYTSQGWDLRPC

SEQ ID NO: 355084 - protein, 78 aa, Zea mays
  Clone ID: MRT4577_87005C.1.pep
PFPRCGAPSPAVFAAPAVVLPAGPVVCVRCSQSRFVCAPSFPARLLFALSAMVSASVFGRGGVVPFPTPGVFGARVFT

SEQ ID NO: 355085 - protein, 80 aa, Zea mays
  Clone ID: MRT4577_87006C.1.pep
IFVDEIIAKKHQHQLLSVTRNGGEELVNLKHLRLYHPLVPLTRRRTRRLSRRRRIGLINSSLHSWHQPEKTPPSVVLAAV

SEQ ID NO: 355086 - protein, 264 aa, Zea mays
  Clone ID: MRT4577_87007C.1.pep
LGTSRPAGNIHHCQNRITMSQLAISRVALRYSLHGTSRTSLRLIEAPGRILPALRFTTPQCSSHTARGFSSNPQLQKKAGKANRSHARTDSNPPVNKGVAPTPTDEAYDVSGLELQILKAIEKLTHELSQLRSGGKLNPDIVESLKVQLGTAGHGKETVRLGDIAQVVPRGRVLNVICGEEGHIKPITTAIAASPHSLTPLAPEPSNPLTIQVPLPPPTGESRRAAVESAVKAAERADKLIQQGPAGTQQEAPKVRHQPRSAPG

SEQ ID NO: 355087 - protein, 72 aa, Zea mays
  Clone ID: MRT4577_87008C.1.pep
ASLVVSFCWIWILWNVLMVYSVFMIGFGCCRRKVGFFHVILAVSHGLNSCPLPLPQSLVVVLHTKKKKKRPA

SEQ ID NO: 355088 - protein, 220 aa, Zea mays
  Clone ID: MRT4577_87009C.1.pep
MKTSVVILAAASLASAHYTLPSLNGDAAWSHVRQAKNWQDNGFVGDVTSNDIRCNQLKAGTSTLSVAAGSSVKVSVNPNAYHPGPFQSYLAKVPEGQDINTWDPTGAVWFRIYAEQPKFGSQLTWLSAATYDIKIPQCIAPGKYLMRNEHIAIHTAQSKGGAQFYLSCGQLEVTGGGSKAPSNLVAFPGAYKATDPGILININYPIPTSYTNPGPPTFTC

SEQ ID NO: 355089 - protein, 124 aa, Zea mays
  Clone ID: MRT4577_8700C.1.pep
MDYGGGGGSGIWIRAAVAVAAGAAIAARAVRRKSVDSSAVFVGVPAMVAHTVAGYRFAGLLLVFFFTSSRVTRVGEARKRALDPEFKEGGQRNWKQVLSNSGIASILVVLIASVTGGTDRCLDS

SEQ ID NO: 355090 - protein, 65 aa, Zea mays
  Clone ID: MRT4577_87010C.1.pep
IEAISVVPQTTGGRVYYYYPFSALSDPAKLFNDLRWNISRPQAFAAVMRVRCSPDLGDPDCTLHA

SEQ ID NO: 355091 - protein, 50 aa, Zea mays
  Clone ID: MRT4577_87011C.1.pep
ASLFWFLLVSSVSSFQLFIQVVAPASDRHPMVMRDTFITLIQRAILVLIV

SEQ ID NO: 355092 - protein, 96 aa, Zea mays
  Clone ID: MRT4577_87012C.1.pep
KKKKKKKSKNSKKKKNKKKRKEKKREKEKTIKTKKNNGGRFKKSKLTSPSLQLHTFFTGSPKSIPLPPFFQIYNLGNPFLYPINWNSSPFPFFKLL

SEQ ID NO: 355093 - protein, 65 aa, Zea mays
  Clone ID: MRT4577_87013C.1.pep
PPRISQVRGACRTNRSAAAALPLVRTLLIRLVVLDAGVYVMVDTDGVSGYPTVEYRGSSRVELSA

SEQ ID NO: 355094 - protein, 117 aa, Zea mays
  Clone ID: MRT4577_87014C.1.pep
AHCFTLYVLTGLRTYVSLNRRGRPDASAAIARLSYTTSPPSVWGLFTKGLRYEVGGSKLRIVARFPGQPISRGSVISPQGGIRDRTLRRPQMTLRSHLPGVLIRVSLTNIRNNLPST

SEQ ID NO: 355095 - protein, 136 aa, Zea mays
  Clone ID: MRT4577_87015C.1.pep
MVVLTKGELEQIPLPAVQRAAPPPAAVPEVDLAAGDAAAARAVARACEDHGFFKVTGHGVPPHLLARLEAAAAAFFALPQREKDRAAGCPFGYASKRIGANGDLGWVEYLLLAVTAAGAAAAPGSACEGAEPTCFR

SEQ ID NO: 355096 - protein, 646 aa, Zea mays
  Clone ID: MRT4577_87016C.1.pep
MPLAAAAAAVAACPSPIGLTRSLCRIEAHPRRRRRFRLEANSSASTSAPAPTAADEGGGAGLCPVVRFDMADFTVADRVSVGLHGRSDEMIFEATVCDPSSELYGSTVVLRQLKSLQAKRRGRRALEVLKKLARRQMMYHSYALQVHGYIAPCNAVEEEDVPLVLVHGYHGSHSLRHWLQLSDWIPTLEATLALDEEQVRRVGDDSVGGPAVTRQLRLIRILMRDLLIGVNYLHSHGLAHTELRIENVHVSPIDKHVKVGILGNAADFQDNDLSSSTIASNNDRRKMMIAFDMRCVGFIMAKMVLRELMDPSTFFKFKSFLTKGNDPSCLREFLLPTLYQNSPSGNIGLQMLDRQWGAGWNLLALLLATKPEERISCVDALRHPFLCGPKWRINPSANLIRWGLGSTAVRMAEDYIYGRHQRRRLSYFVELMEVLNPSLRTQNWLHLLPGRWRLLYCTGRHIGLTLRQPSPRVLISAVYLTVSSESVDQVFSLTSDVGFRIMPEPNWPHDKSGSEGVLSVTASARIAAGRIYINEHDSKEDMVTSSMRYLHGNKWRKFSQIKELPSSLPAVNIAMDEIHVSISCTSTMTVNSAQKALKEIRTQTPPEMFDLSKIVCGTYIDARLMILRGVNGSALLFTRANPMIDA

SEQ ID NO: 355097 - protein, 78 aa, Zea mays
  Clone ID: MRT4577_87017C.1.pep
NSQVVTRQLRLIRILMRDLLIGVNYLHSHGLAHTELRIENVHVSPIDKHVKVSSLFFCLCKIVVFYPYNHALVVYHVH

SEQ ID NO: 355098 - protein, 234 aa, Zea mays
  unsure (1)..(234): unsure at all Xaa locations
  Clone ID: MRT4577_87018C.1.pep
MLFKSLAVWLSLGSLALSSPLRAEPLDASDDFPSFEEIVKRQDGACTNTPRTRSCWSNGYSIATDFDAKSPPDGTTVTYNFEISNVTKPNPDGSGGNRPMMLINGQYPGPVVRAKWGDTIIVNVKNNLAHNGTGIHWHGIRMLNSXRXDGVPGIXTECPIAPGXTRQYKFRATQFGTTWYHSHWSAQYGDGXVVGTXSLDGPATATNDCXDLGTLPLXDWYYTPGLYPKRGGAT

SEQ ID NO: 355099 - protein, 84 aa, Zea mays
  Clone ID: MRT4577_87019C.1.pep
PRPPPEAKKKIKDPVGGAIRGGDTTHLVWVGGFKTKMKGLGGISPPPFPKMSQGKGGGMGAPAGMDGDAPFGGRGAGPKIGGGV

SEQ ID NO: 355100 - protein, 221 aa, Zea mays
  unsure (1)..(221): unsure at all Xaa locations
  Clone ID: MRT4577_8701C.1.pep
GVPAMVAHTVAGYRFAGLLLVFFFTSSRVTRVGEARKRALDPEFKEGGQRNWXPTLIGRKQVLSNSGIASILXLIASVTGGTDRCLDSKESTLTALIDGVIGHYACYNGDTWSSELDILCKAEPQIITTFXRVRKATIGGVTIDGLLAAAAGFLIGLAFVLIGFFTTQCDPDVFWNQLLAIPLXTAAGLCRKLIDSFLSATSXYSGFYSVRKKGKPTNFNI

SEQ ID NO: 355101 - protein, 84 aa, Zea mays
  unsure (1)..(84): unsure at all Xaa locations
  Clone ID: MRT4577_87020C.1.pep
IFKVLKQVHPVIGISSKGMFIMNSFINDIYDKLAVXAAKLARYNMKPTITSRXFQTSVRLVLPGELAKHAVSXGTKAVTKITSS

SEQ ID NO: 355102 - protein, 72 aa, Zea mays
  unsure (1)..(72): unsure at all Xaa locations
  Clone ID: MRT4577_87021C.1.pep
AGTCFARFGISNVSLVWGSCPVKGATCCKDHARCCPPGSHVYNVRVGTWXVSKNSSLSVXSFKRTFSKLSTA

SEQ ID NO: 355103 - protein, 90 aa, Zea mays
  unsure (1)..(90): unsure at all Xaa locations
  Clone ID: MRT4577_87022C.1.pep
TGIGMASTGGATTEGKGIASPLLAAVHIXGVIQEMRATTGNTLNPQRTAKNEAKINKRGKESSPAELRHKEDLLVPSRGKKEAGSGKNGQ

SEQ ID NO: 355104 - protein, 103 aa, Zea mays
  Clone ID: MRT4577_87023C.1.pep
RTVAEIVRSGEHRNDPSSCAFPALPRYNIAPSSASSPHQHSLTALSLPIPAPLPPPPLQPSRRLLRRPAADRPRRNATMGLFTVTKKATTPFEGQKPGSSGLR

SEQ ID NO: 355105 - protein, 299 aa, Zea mays
  Clone ID: MRT4577_87024C.1.pep
MDERLSDGAGSSMGKAIAADVRREVAADVAALSSAHGLVPGLAVVIVGSRKDSQTYVNMKRKACAEVGICSIDVDLPEDISETALVAEVHRLNADPAVHGILVQLPLPKHINEEKILSEISIEKDVDGFHPLNIGKLAMKGREPLFVPCTPKGCMELLSRSGVTVKGKRAVVVGRSNIVGLPVSLLLLKADATVSVVHSRTPDPESIVREADIVIAAAGQAMMIKGDWIKPGAAVIDVGTNSVDDPTRKSGYRLVGDVDFAAASKVAGYLTPVPGGVGPMTVAMLLKNTVDGAKRGIVE

SEQ ID NO: 355106 - protein, 81 aa, Zea mays
  Clone ID: MRT4577_87025C.1.pep
HQILPAATHSREGEYEAFIGCHIPNEVTVYPPTDICSKGRSKRIKKSKEGGGSKKKQGRVPRLCKICKQLVLHDSRNCPGK

SEQ ID NO: 355107 - protein, 57 aa, Zea mays
  Clone ID: MRT4577_87026C.1.pep
LEPLSPNFLVMASHSLQSAPVTIATLPNSYAMENISSKLCPPRSHGRGSKLYRRLAL

SEQ ID NO: 355108 - protein, 135 aa, Zea mays
  Clone ID: MRT4577_87027C.1.pep
MSGSKVYTLEEVAKHNTKDDCWLVIGGKVYNVTKFLEDHPGGDDVLLSSTAKDATDDFEDVGHSTTARAMMDEYLVGEIDAATIPSKVKYTPPKQPHYNQDKTPEFVIKILQFLVPLAILGLAVAVRIYTKSGSA

SEQ ID NO: 355109 - protein, 293 aa, Zea mays
  unsure (1)..(293): unsure at all Xaa locations
  Clone ID: MRT4577_87028C.1.pep
MAQIIDGKAIAADVRREVAADVAALSSAHGLVPGLAVVIVGSRKDSQTYVNMKRKACAEVGICSIDVDLPEDISETALVAEVHRLNADPAVHGILVQLPLPKHINEEKILSEISIEKDVDGFHPLNIGKLAMKGREPLFVPCTPKGCMELLSRSGVTVKGKRAVVVGRSNIVGLPVSLLLLKADATVSVVHSRTPDPESIVREADIVIAAAGQAMMIKGDWIKPGAAVIDVGTNSIDDPTRKSGYRLVGDVDFAAASXKVAGYLTPVPGGVGPMTVAMLLKNTVDGAKRGIVE

SEQ ID NO: 355110 - protein, 49 aa, Zea mays
  Clone ID: MRT4577_87029C.1.pep
MSRRLSIPVKLVHEAAGHIVTGDLKTGEVYRGFIVECEDHWNWQLGNIN

SEQ ID NO: 355111 - protein, 160 aa, Zea mays
  Clone ID: MRT4577_8702C.1.pep
MYPPKASGDPAAGAAPVTGFPVGGPAASSQWSSGLLDCFDDCGLCCLTCWCPCITFGRVAEIVDRGATSCGTAGALYAVLAYFTGCQWIYSCTYRAKMRAQLGLPETPCCDCLVHFCCEPCALCQQYKELKARGFDPVLGWDRNAAAATMLPPSAQGMGR

SEQ ID NO: 355112 - protein, 151 aa, Zea mays
  Clone ID: MRT4577_87030C.1.pep
VIGPYANELGNVLTNTVKSVGVPVDPLAFSGLLGIVVTSLNLLPIGRLEGGRIAQALFGRGTAALLSFGTSVLLGAGAISGSVLCLAWGLFATFIRGGEEIPAQDEITPLGNERLAWGFVLALVCLLTLFPNGGGTYSASFLGDPFFRGGI

SEQ ID NO: 355113 - protein, 69 aa, Zea mays
  Clone ID: MRT4577_87031C.1.pep
HFHQLPPLRTGHNLHSTTGENSRLLLYQSLKDANQLDPMEPAPDPITPLINKRVTTCRGIATVLTRPKL

SEQ ID NO: 355114 - protein, 52 aa, Zea mays
  Clone ID: MRT4577_87032C.1.pep
RGVTGSDTNEYCLYHIYFIKKKKKKFKKKKKKKKKKKKKKKKKKKKKKGRPF

SEQ ID NO: 355115 - protein, 63 aa, Zea mays
  unsure (1)..(63): unsure at all Xaa locations
  Clone ID: MRT4577_87033C.1.pep
FSLQRXRARGTGCXXAVXATRSARAPCDALLPPLPSPALPCRGGSLVRDMRVTAITHRLSGGG

SEQ ID NO: 355116 - protein, 295 aa, Zea mays
  Clone ID: MRT4577_87034C.1.pep
GVQVLDDNDNLQIIKNSDLEELRELGSGTFGTVYHGKWRGSDVAIKRINDRCFAGKASEQERMRTDFWNEADKLASLHHPNVVAFYGVVVDGPGGSVATVTEYMANGSLRQALQRHEKIFDRRRRLLIAMDVAFGMEYLHGKNIVHFDLKSDNLLVNLRDPQRPICKVGDLGLSKVKCQTLISGGVRGTLPWMAPELLNGSSSLVSEKVDVFSFGIVMWELLTGEEPYAELHYGAIIGGIVNNTLRPPVPESCDPQWRSLMERCWSAEPSERPSFTEVGKSLRAMASPTKAQQSK

SEQ ID NO: 355117 - protein, 477 aa, Zea mays
  unsure (1)..(477): unsure at all Xaa locations
  Clone ID: MRT4577_87035C.1.pep
MPDMNMHAAIPSEEDSCFKDMHTVKLNKGPGEDSIKRQLQAVAEGVAASVLQPPFPEKTVVFSGDHIDSHGAEVDVKFQDEGNNQSDKISQGVQVLDDNDNLQIIKNSDLEELRELGSGTIGTVYHGKWRGSDVAIKRINERCFAGKASEQERMVXMLCFKLNPPCSIFSFVSRXDDFWNEADKLASLHHPNVVAFYGVVLDGPGGSVATVTEYMANGSLRQALQRHEKIFDRRRRLLIAMDVAFGMEYLHGKNIVHFDLKSDNLLVNLRDPQRPICKVGDLGLSKVKCQTLISGGVRGTLPWMAPELLNGSSSLVSEKVDVFSFGIVMWELLTGEEPYAELHYGAIIGGIVNNTLRPPVPESCDPQWRSLMEQCWSAEPSARPSFTEVGTNLRAMAPLLPRHNNRNRWFSLASRVLLFSRLFQSSNRGGAYHGWPAFFLYMNKLKKNTRMWHAYRVDGWLMLKKKKKKKKKKLEEG

SEQ ID NO: 355118 - protein, 109 aa, Zea mays
  unsure (1)..(109): unsure at all Xaa locations
  Clone ID: MRT4577_87036C.1.pep
AAAVDDDACMPAMQLASQTILSMTLKNALQLPLLDVLQNEAGGGNAQLPHEEEVPRMSEGSDDPTDVAAMAHRLLRLLSSNEFSRRPTEELGXKHERRYSDEPVCKWLT

SEQ ID NO: 355119 - protein, 181 aa, Zea mays
  Clone ID: MRT4577_87037C.1.pep
PRVRAKLRHLDVQKESGNIIVGMPHGIGYLTDLQTLTMFNIGNDMLHCSISELNNLNGLRGHVHVTRLENIMTANDAREANMMGKHLLEALTLEWSYQDEGMDDDMGKEIASEILQNLQPNSNIMELIIRNYAGDLFPVWMQDNYLCKLTSVTLDNCHGLSELPYLGDLPSLKYLFIQRIN

SEQ ID NO: 355120 - protein, 160 aa, Zea mays
  unsure (1)..(160): unsure at all Xaa locations
  Clone ID: MRT4577_87038C.1.pep
PAAAETEPTNPTKXTKAXGXDXXXHXKNTXETXXAXRKXXXTKAKRXXEXXXAHKQAXPXRRXGGXXGXTXQXKXXHXXGQGRXPXKXXRXXXDXXKXXESXXEXKXXXXXTXXXXHXQXNQXQKQRRRTNRXXGRXNXXXXXPXHXEXXXXEKEEPXKK

SEQ ID NO: 355121 - protein, 58 aa, Zea mays
  Clone ID: MRT4577_87039C.1.pep
TDQKEIVTRIGSSAKPPVVVAFVREATTNIHGERTAFASHVYTRGLTQAICITTTTVL

SEQ ID NO: 355122 - protein, 81 aa, Zea mays
  Clone ID: MRT4577_8703C.1.pep
WMPRRCAAAMWVIHKELVWCFNWPSQRLRVRDSRLVCCPGLKLGYSRSLIWIIGLTKVRIKMCHGGVGPYACLPRTGAAGA

SEQ ID NO: 355123 - protein, 62 aa, Zea mays
  Clone ID: MRT4577_87040C.1.pep
FFFFFFFFLSSARLLIFLAKPLKCLSTWPLVQKQRRGPRKWETKRRKGSRLTRTSSLCNPKH

SEQ ID NO: 355124 - protein, 94 aa, Zea mays
  unsure (1)..(94): unsure at all Xaa locations
  Clone ID: MRT4577_87041C.1.pep
SLVVSAPGVASCVGVRAGAFSGSFPVPASAPASVGXXAAXVAASSAAAFSLPLWLPGWWAGLCACLXRSRLARAVAGAPKAARGGSSLAWTLGR

SEQ ID NO: 355125 - protein, 140 aa, Zea mays
  unsure (1)..(140): unsure at all Xaa locations
  Clone ID: MRT4577_87042C.1.pep
XLIYLGLRFLRKSILSRGESVECDDDGGVGGDRCCYLVGEEDAVWLLRLVLPYVNEVLLNLRSLFSGEPATTMKLALILFAMARCGNFVTLWTLAKLVFFGVFIIPKVCSSYSTQLARYGRFWLERLRDAWESCTHKKAV

SEQ ID NO: 355126 - protein, 94 aa, Zea mays
  Clone ID: MRT4577_87043C.1.pep
SSLQGRTELKRDEARRKQEDECTKLMCDGIEATGGGGGPRPARAVNSSSSSSINRFTIYLPSQQPAVACFNHRAAGRRRPERDGGERKERKEED

SEQ ID NO: 355127 - protein, 134 aa, Zea mays
  unsure (1)..(134): unsure at all Xaa locations
  Clone ID: MRT4577_87044C.1.pep
SEYRCXVSSLSCATDDHSLHNAFSTYGEGLDSKIILDRDTQRTRGLGYVTFSTKEAISNAMDVMNGXELNWRNITVKEAQTRAGRXASTDXYGGDRGGGGYGCSNRRDGELCYSCEGTYTGHCIYGGGGCIYCK

SEQ ID NO: 355128 - protein, 154 aa, Zea mays
  Clone ID: MRT4577_87045C.1.pep
LSARPPSPRLAVSPHAAAAKMPFKRFVEIGRVALVNYGKDYGRLVVIVDVVDQNRALVDAPDMVRCQMNFKRLSLTDIKIDIKRIPKKATLIKAMEEADVKTKWENSSWGKKLVVQKRRASLNDFDRFKVMLAKIKRGGAIRQELAKLKKEVAA

SEQ ID NO: 355129 - protein, 76 aa, Zea mays
  Clone ID: MRT4577_87046C.1.pep
VICITAGAGPNGNSTSQVGGSRWFRSGQATPRHNYAFELESVLTELKHQYQNICIDSNGLFGWNIAVKKTVGDCEM

SEQ ID NO: 355130 - protein, 110 aa, Zea mays
  Clone ID: MRT4577_87047C.1.pep
PWGCCANIRQTENGTQRPLITRRQGAASFKYLVEQDQQQPKIQRQDIYNEYQQTEGVLTIEQFKELEIKNLSLAVKQCKGKIFGDNGAARLLGINPTTLISRLKKLGIEY

SEQ ID NO: 355131 - protein, 133 aa, Zea mays
  unsure (1)..(133): unsure at all Xaa locations
  Clone ID: MRT4577_87048C.1.pep
MTLKXRNGGRNRHXRDHVKYILWFNCLLCCPKDNAMKQCLLRNITXQDAARYAQEALVHDGYVFPKMDAKGLTEYXCAIHAHIXIPVTSTENRRNRQPPERSRLRTDGPRPGEGPTGPGAAATKAPPAAVPRA

SEQ ID NO: 355132 - protein, 94 aa, Zea mays
  Clone ID: MRT4577_87049C.1.pep
SLSCAITSTALPSSKSGASLRRLTDSPPAATNPPETTAYALNSKLAESIPLAPGFFSSGKALFTIKSNVTWKAQYLLLHHTHLPAFHNSATDSL

SEQ ID NO: 355133 - protein, 60 aa, Zea mays
  Clone ID: MRT4577_8704C.1.pep
AFYVMFYSHLFKNLPTKGKGLFHKNKTFLQKPRFEPKTSQTLPEHVTTEADMHLCATQYT

SEQ ID NO: 355134 - protein, 48 aa, Zea mays
  Clone ID: MRT4577_87050C.1.pep
PFWKAQISNLRQCIRMNKTWAAFPGSLGKLFQHHLQKKGCRMNMPPYH

SEQ ID NO: 355135 - protein, 53 aa, Zea mays
  Clone ID: MRT4577_87051C.1.pep
IDSGSNIFPRGIFNKLFGKTASLVFLFGISKENVPNAPLVAIYPNFKKKKRAA

SEQ ID NO: 355136 - protein, 185 aa, Zea mays
  Clone ID: MRT4577_87052C.1.pep
MAPPITSLSSLMASVSASAGRRGLLALGAGFLASAALLSPAGDAGATRIEYYATVGDKMCDLSLVKSGLAYCDVEVGTGVQPPRGELINVHYTARFPDGTLFDSSYKRGRPLTMRIGAGKILRGLEQGISGGGGVPPMLVGGKRKLMIPASLAYGPEPAGCFSGDCNIPGNSTLLYDLFLVGIYK

SEQ ID NO: 355137 - protein, 63 aa, Zea mays
  Clone ID: MRT4577_87053C.1.pep
RTRGRTRGGGGGVPPMLVGGKRKLMIPASLAYGPEPAGCFSGDCNIPGNSTLLYDLFLVGIYK

SEQ ID NO: 355138 - protein, 223 aa, Zea mays
  Clone ID: MRT4577_87054C.1.pep
MAPPITSLSSLMASSPIPTPPPLPKTSGRALSVAPCGSASSSSPSTSSTPHPVAASAGRRGLLALGAGFLASAALLSPAGDAGATRIEYYATVGDKMCDLSLVKSGLAYCDVEVGTGVQPPRGELINVHYTARFPDGTLFDSSYKRGRPLTMRIGAGKILRGLEQGISGGGGVPPMLVGGKRKLMIPASLAYGPEPAGCFSGDCNIPGNSTLLYDLFLVGIYK

SEQ ID NO: 355139 - protein, 117 aa, Zea mays
  Clone ID: MRT4577_87055C.1.pep
STLHKQPWRHAHRVLRGELINVHYTARFPDGTLFDSSYKRGRPLTMRIGAGKILRGLEQGISVAAAVPGMLVGGKRKLMIPASLAYGPEPAGCFSGDCNIPGNSTLLYDLFLVGIYK

SEQ ID NO: 355140 - protein, 544 aa, Zea mays
  unsure (1)..(544): unsure at all Xaa locations
  Clone ID: MRT4577_87056C.1.pep
MGNQCPNGTLGSDYYNRPASRFADGCLEDDRYSDLKKFDKPWPEVNSFKPTAVGILKRGLDPTSITVLERKTADVREHYIIGRRLGQGQFGTTFLCTEISTGCEYACKTIPKRKLITKEDVEDVRREIQIMHHLSGHKNVVSIKDVYEDGQAVYIVMELCAGGELFDRIQEKGHYSEQKAAELIRIIISLVAMCHSLGVMHRDLKPENFLLWDKEDDLSIKAIDFGLSVFFKPGQVFTELVGSPYYVAPEVLHKRYGPEADVWSAGVILYVLLSGVPPFWAETQQGIFDAVLKGHIDFDSDPWPKISESAKNLIRKMLCPCPSERLKAHEVLRHPWICENGVATDQALDPGVLSRLKQFSAMNKLKKLALRXIAERLSEEEIAGLRQMFKAVDVQNRGVITFGELRQGLKRYGSELENREISDIMEVADNDNNVTINYEEFIAATVPLNKIEREEHLMAAFTYFDKDGSGYITVDKLQRACGEHDMDDTFLEEIILEVDQNNDGQIDYAEFVAMMQGNKVGLGWQQMETTLNVTLRDAPQVHCH

SEQ ID NO: 355141 - protein, 122 aa, Zea mays
  Clone ID: MRT4577_87057C.1.pep
PLRPGPHFLRGTVVPQEGSPYVRPWTHACPSPIPVFFLGGAEGEAPPGPGKKKPWFPPLQFNRRANPGSPRSLVGPPRFFCWGGPKPGRPPQASNSFPPRPPTWLAGGPVSPDPPEMNYPIW

SEQ ID NO: 355142 - protein, 90 aa, Zea mays
  unsure (1)..(90): unsure at all Xaa locations
  Clone ID: MRT4577_87058C.1.pep
KHPGPFFRQDRRNGPCLHGQLVQQAPQFNQACPAPPSFNSINPSRAVKFCLDSRLPKXLFVMGKTSTPVISLIFCLFKIQGFFXFFFAFL

SEQ ID NO: 355143 - protein, 98 aa, Zea mays
  unsure (1)..(98): unsure at all Xaa locations
  Clone ID: MRT4577_87059C.1.pep
MADGXDIQPLVCXNATXMLKASFLAGEDAPRPAYXPSIFVRSRHTGVMLGMGHKDAYVGDEAQTKRGIFSLKHPIEHGIVRNXYDMEKIWHHTXYNET

SEQ ID NO: 355144 - protein, 421 aa, Zea mays
  unsure (1)..(421): unsure at all Xaa locations
  Clone ID: MRT4577_8705C.1.pep
MRGFQLLLIIVALLAGELHCARAASAADAPEAAPQSPEAPTADEQTPPQAPGPTSPPPPPRRRGSPHRRPPAPTDQQDPAPPRLVVPPQEPPAPAPPGMTINRTTGCTTLLVLGDSTVDPGNNNHLPTTARANFLPYGLNFYGRRPTGRFTNGRLATDMLAEKLGXYPXIPGFFDPNLRLAQLRRGVSFSSGGSGYDDSTANRINVXSFSEQVHNLFRYKLLIRTLLGPRRAERLGNRAAFVISTGTNDLLSVYLASNRSNAISMELYENHLTAHVANYTQAMIMLGGRRFIFVGLPPMGCLPIARTLVGTGSDRCDETLNQLANSFNSKLIQLLNFINFQHQIRTSYIDTYTTIHDAXGLTEVSRGCCGSGVIEVGQTCRGRRTCGDPSKYLYWDAVHPTERTNQVIANMMMDSIGELYS

SEQ ID NO: 355145 - protein, 333 aa, Zea mays
  unsure (1)..(333): unsure at all Xaa locations
  Clone ID: MRT4577_87060C.1.pep
CGSHGGRNGGGGGGXKVYKSDLKKLENLMSKLNPSAQEFVPSSRRXPSRRGGGEAGGXRVLSADAPVFVSAAEYYGAAGGHLEIGGGGGKVVVGGEGRDSSSDGSSNGGGGGSRHQPNRRRRNSFNHGRRRGAGGRPRRGDREDSVRRTVYVSDIDQHVTEQKLAEVFSNCGRVVDCRICGDPHSVLRFAFIEFSDDAGARAALTLAGTILGCYPVRVLPSKTAILPVNPKFLPQTDDEKEMVSRTVYCTNIDKKVTEEDVKGFFQQACGKVSRLRLLTDIVHSTCIAFVEFAQAESAIMALNFSGMVLGSLPIRVSPSKTPVRPRSPRVMSN

SEQ ID NO: 355146 - protein, 109 aa, Zea mays
  unsure (1)..(109): unsure at all Xaa locations
  Clone ID: MRT4577_87061C.1.pep
WSPVLSPESVPVAAYVADAIKQDVXTGFVALQVKVDGRVKWKVGNWVSGSYHLFVSCPAVLSAGYPGVNNTVWSLKFAVNWALLIWFMSRCQFSFSCGPGRGNKLFNLL

SEQ ID NO: 355147 - protein, 249 aa, Zea mays
  unsure (1)..(249): unsure at all Xaa locations
  Clone ID: MRT4577_87062C.1.pep
WDPRGRPRIHSPGGTTAPRFARERKGLGVSARWPLPPCASPTPATSSGRGSSKSCSPVGTQSGHLPPRRLVVLDLDETLVCAYESSSLPSTMRTHAVEAGLHRFDMECVLSEKDTEGRQRINRVTVFERPGLHEFLQRTSEFADLVLFTAGLEGXYREHVKDLSCLSKDFQRIVLVDNNPYSFLLQPLNGIPCVTFSAGQPVDDQLMGTMFPLLKHLALQKDVRPALYEAFHMPEWFQRQGIPQIEQAV

SEQ ID NO: 355148 - protein, 109 aa, Zea mays
  Clone ID: MRT4577_87063C.1.pep
GTPRAGRAGPSATGHLPTLPTAWSRAPALYCRSAPSRRERATRRLRSPNPQPTAARQRRSARPWAPHPTLSPSHGAAAARGSPPSFETSPPRSRPIVAGPLCLGGFPLL

SEQ ID NO: 355149 - protein, 207 aa, Zea mays
  Clone ID: MRT4577_87064C.1.pep
MSKDKHHKHEHHLRRCCGCMASCLLALVLIVAFVSLVVYLALRPSKPSFYLQDLQLRRPISLGDPSLTASAQVTLASRNPNDRVGIFYKRLDVFVTYRDEAVTVPVSLPPQYQGHRDFTVWSPVLSAESVPVAAYVADAMKQDVAAGFVALQVKVDGRVKWKVGSWVSGSYHLFVSCPAVLSAGYPGVNNTASSLKFAQPTGCSVEV

SEQ ID NO: 355150 - protein, 211 aa, Zea mays
  Clone ID: MRT4577_87065C.1.pep
MSKDKHHKHEHHLRRCCGCMASCLLALVLIVAFVSLVVYLALRPSKPSFYLQDLKLLRPISLGDPSLTASAQVTLASRNPNDRVGIFYKRLDVFVTYRDEAVTVPVSLPPQYQGHRDFTVWSPVLSAESVPVAAYVADAMKQDVAAGFVALQVKVDGRVKWKVGSWVSGSYHLFVSCPAVALRGLPRRQQHRDVAQVRPAHRMQRRGVMSL

SEQ ID NO: 355151 - protein, 207 aa, Zea mays
  unsure (1)..(207): unsure at all Xaa locations
  Clone ID: MRT4577_87066C.1.pep
MSKDKHHKHEHHLRRCCGCMASCLLALVLIVAFVSLVVYLALRPSKPSFYLQDLQLRRPISLGDPSLTASAQVTLASRNPNDRVGIFYKRLDVFVTYRXEAVTVPVSLPPQYQGHRDFTVWSPVLSAESVPVAAYVADAMKQDVAAGFVALQVKVDGRVKWKVGSWVSGSYHLFVSCPAVLSAGYPGVNNTVSSLKFAQPTGCSVEV

SEQ ID NO: 355152 - protein, 207 aa, Zea mays
  Clone ID: MRT4577_87067C.1.pep
MSKDKHHKHEHHLRRCCGCMASCLLALVLIVAFVSLVVYLALRPSKPSFYLQDLQLRRPISLGDPSLTASAQVTLASRNPNDRVGIFYKRLDVFVTYRDEAVTVPVSLPPQHQGHRDFTVWSPVLSAESVPVAAYVADAMKQDVAAGFVSLQVKVDGRVKWKVGSWVSGSYHLFVSCPAVLSAGYPGVNNTVSSLKFAQPTGCSVEV

SEQ ID NO: 355153 - protein, 124 aa, Zea mays
  unsure (1)..(124): unsure at all Xaa locations
  Clone ID: MRT4577_87068C.1.pep
MARTQSAAAGAEGAEALLLAAAATTSEADITCSQESYAIAHCLYYARGTASGPSESCCSGGRNPKSADSSATHRTRRSDNCTLRHAXAAGVSGLNAGNTPSIPSKXAASKXYTISTCTYCCKGN

SEQ ID NO: 355154 - protein, 210 aa, Zea mays
  Clone ID: MRT4577_87069C.1.pep
MSKDKHHKHEHHLRRCCGCMASCLLALVLIVAFVSLVVYLALRPSKPSFYLQDLQLRRPISLGDPSLTASAQVTLASRNPNDRVGIFYKRLDVFVTYRDEAVTVPVSLPPQYQGHRDFTVWSPVLSAESVPVAAYVADAMKQDVAAGFVALQVKVDGRVKWKVGSWVSGSYHLFVSCPRRALRGLPRRQQHRDVAQVRPAHRMQRRGVSL

SEQ ID NO: 355155 - protein, 87 aa, Zea mays
  unsure (1)..(87): unsure at all Xaa locations
  Clone ID: MRT4577_8706C.1.pep
PPDSSPDSTEIARPSSAPFHVARGASRPTVFGLLHHXSMATGPLGPCSPWSLLAARVPACAMPLLRGAPLFEKAGRPCSRQPAXVEA

SEQ ID NO: 355156 - protein, 278 aa, Zea mays
  unsure (1)..(278): unsure at all Xaa locations
  Clone ID: MRT4577_87070C.1.pep
HTSAHASAAQGVQAQTIANFYLAFESNLSIIPVINKIDQPTADPDNVKDQLKRPSRPPPRPPPRPSAKTGRGLEQVLPAVIERIPSPPGKCDAPVRMLLLDSYYDEYRGVICHVAVVDGALRKGDKIASAATSRAYEVLDVGIMHPELTPTGVLYTGQVGYVISGMRSTKEARIGDTLHQAKSTVEPLPGFKPVKHMVFSGLYPADGSDFEALSHAIEKLTCNDASVSVTKETXNALGMGFRCGFLGLLHMDVFHQRLEXEYGAQVISTIPTVPYIFD

SEQ ID NO: 355157 - protein, 169 aa, Zea mays
  Clone ID: MRT4577_87071C.1.pep
MRCSGVGFCATAVYQRRGGPHLWPQGSLASCGKGILSLFEEWEAINDLRADMARLQQGMSHMQRMLEACMDMQLELQRSVRQEVSAALNRFIGEQGGESKEIIDDGSKWINVRKGTCCICCETPIDSLLYRCGHMCTCSKCANELVRGGGKCPLCRAPIIEVIRAYFIM

SEQ ID NO: 355158 - protein, 96 aa, Zea mays
  unsure (1)..(96): unsure at all Xaa locations
  Clone ID: MRT4577_87072C.1.pep
VRFPRVAPRVRAGPVCWSLWFSXPPACSXXARLPSLXPCVCXLLFLFCWCSPPFXLXSPPPWVXXVPXLLXXXXXCXVGLCXXXLSFLXXXVLPAR

SEQ ID NO: 355159 - protein, 37 aa, Zea mays
  Clone ID: MRT4577_87073C.1.pep
GTLLLGPASLLTVRAPCLSRPPSSLSASCPPSSCKCL

SEQ ID NO: 355160 - protein, 159 aa, Zea mays
  unsure (1)..(159): unsure at all Xaa locations
  Clone ID: MRT4577_87074C.1.pep
ATXAGNSAREKNLQIEVFGCQDCIVQSCYLSPQSHTCSQEVKEVGSSSDISDTILKESANRDVALGISFPEIDEVGYPHNNLKQKLTLSYHMDGHKSEEPNFITKNSTTETVQLTPRHQFPSSTCRISSIASSSSALFASGSSSDVSITYNPVSNDKAG

SEQ ID NO: 355161 - protein, 127 aa, Zea mays
  unsure (1)..(127): unsure at all Xaa locations
  Clone ID: MRT4577_87075C.1.pep
PRRASXXXRGGGWXRGEVVDVARGRDHDGGESAGERSSDAGGDPPADLCCDDGAGTAAEGGRSSDGAEASGVKNPTWRILGSTPPDEERGGRRKSMAVDGAKGLLEVWGRRAALETSVYCRRASPGR

SEQ ID NO: 355162 - protein, 382 aa, Zea mays
  Clone ID: MRT4577_87076C.1.pep
LGVPSVKHMFPFCDSSSPMDLPLYQQLQLSPSSPKTDQSSSFYCYPCSPPFAAADASFPLSYQIGSAAAADATPPQAVINSPDLPVQALMDHAPAPATELGACASGAEGSGASLDRAAAAARKDRHSKICTAGGMRDRRMRLSLDVARKFFALQDMLGFDKASKTVQWLLNTSKSAIQEIMADDASSECVEDGSSSLSVDGKHNPAEQLGGGGDQKPKGNCRGEGKKPAKASKAAATPKPPRKSANNAHQVPDKETRAKARERARERTKEKHRMRWVKLASAIDVEAAAASVPSDRPSSNNLSHHSSLSMNMPCAAAELEERERCSSALSNRSAGRMQEITGASDVVLGFGNGGYGDGGGNYYCQEQWELGGVVFQQNSRFY

SEQ ID NO: 355163 - protein, 99 aa, Zea mays
  Clone ID: MRT4577_87077C.1.pep
INLFLTNQPGDLSYIFFRRKMPKGKKKKVDPITSPSAVRTASHPQTKKQPPTSILFKLKPKSSQVPRLDPHPDCRLPFNGVPISWLLENTQSKGLVFLS

SEQ ID NO: 355164 - protein, 158 aa, Zea mays
  Clone ID: MRT4577_87078C.1.pep
RKSTRPFSAETIRRCRPSRPSRPQALCTDCIFAAVELINEGFPAFGNITVNRATNATIDSYLNATCAGTPYNVTNDGELPESVVEAATNATSNSTSASNATSAVLPTMNATSAVLPTGTASILSVISSEAPALTGLPVPSASAPARRAMAEKKRWFGL

SEQ ID NO: 355165 - protein, 460 aa, Zea mays
  unsure (1)..(460): unsure at all Xaa locations
  Clone ID: MRT4577_87079C.1.pep
MDLPLYQQLQLSPSSPKTDQSSSFYCYPCSPPFAAADASFPLSYQIGSAAAADATPPQAVINSPDLPVQALMDHAPAPATELGACASGAEGSVASAIDVEAAAASAPSDRPSSNNLSHHSSLSMNMPCAAAELEERERCSSALSNRSAGRMQEITGASDVVLGFXTEDTATAAAXYCQEQWXRWSRLSAELTLLLNTTGALGTRTTLXLHLSPFPQREFLNNLMSXYACVSLSRLRNWLCDDXKFGHRMMMYYSWLACTXASSECVEDGSSSLSVDGKHNPAEQLGGGGDQKPKGNCRGEGKKPAKASKAAATPKPPRKSANNAHQVPDKETRAKARERARERTKEKHRMRWVKLASAIDVEAAAASGPSDRPSSNNLSHHSSLSMNMPCAAAELEERERCSSALSNRSAGRMQEITGASDVVLGFGNGGGGYGDGGGNYYCQEQWELGGVVFQQNSRFY

SEQ ID NO: 355166 - protein, 225 aa, Zea mays
  Clone ID: MRT4577_8707C.1.pep
MYADRSSGRKRSVMDRLGSGGGSRSRSDDAKRFCQDDGTWRRELYKDSRGTQTSSEPTSRNLESNKKSQVQQKVVKKLPVSDLRGKLSGVASQRPQLSSTVQVPKPVKEVIKSNKPVQKRDPAPTTAPPDIKKPSAPAPVPAPSALPKQSQNKIDASLDSLLKSLDLEKYLINFQAEEVDMKALVYMNEEDMKSLGIPMGPRKKILSALAHRKNKSSKSLPTSTS

SEQ ID NO: 355167 - protein, 93 aa, Zea mays
  unsure (1)..(93): unsure at all Xaa locations
  Clone ID: MRT4577_87080C.1.pep
FLGGRKRGTPTTQKKDHKGILATGPFFQKEEDFFLRVTKSFLPLVGTFWVLGRNGARDGRAKVPPHPDGFFFKKIKRGAGKKKKITXKXXKGT

SEQ ID NO: 355168 - protein, 194 aa, Zea mays
  Clone ID: MRT4577_87081C.1.pep
EITTLLLVPGPREGSVERASGGLGVPSVKHMFPFCDSSSPMDLPLYQQLQLSPSSPKTDQSSSFYCYPCSPPFAAADASFPLSYQIGSAAAADATPPQAVINSPATELGACASGAEGSGASLDRAAAAARKDRHSKICTAGGMRDRRMRLSLDVARKFFALQDMLGFDKASKTVQWLLNTSKSAIQEIMADDAS

SEQ ID NO: 355169 - protein, 131 aa, Zea mays
  unsure (1)..(131): unsure at all Xaa locations
  Clone ID: MRT4577_87082C.1.pep
WVPRAGRKKIIVNGVXLHELSISLLKGQKMSNRQSDDLCSICSDGGQLLLCDTCPRAFHRECVGLSSATKGTWCCRYCENRQQRESCLAYNNNAIAAGRVEGVDALEQIFTRSIRIATTLETGFGGCALCK

SEQ ID NO: 355170 - protein, 66 aa, Zea mays
  Clone ID: MRT4577_87083C.1.pep
TQPPTVWMATCNFSRPYIFVSCCDDILIIVEELARGRTTSGMPYIFPWPKHKIPQNSMNDLIVWYP

SEQ ID NO: 355171 - protein, 81 aa, Zea mays
  unsure (1)..(81): unsure at all Xaa locations
  Clone ID: MRT4577_87084C.1.pep
PWPCSSSSSERARAADLLVLLEERARRAGDAVQRRVEEEGERPXDPRXAXPCSSSSGRALVIYSSSXPLWGGGWTXPXLDY

SEQ ID NO: 355172 - protein, 27 aa, Zea mays
  Clone ID: MRT4577_87085C.1.pep
FGSSPNAQIFLRNELSYENGVRPNITL

SEQ ID NO: 355173 - protein, 62 aa, Zea mays
  Clone ID: MRT4577_87086C.1.pep
HSLIQRAIHTLQYLNTMEPQFLPPYGPLSLLIEFTKRHFITMYSFSLSSLFSPILPLIIKLA

SEQ ID NO: 355174 - protein, 71 aa, Zea mays
  Clone ID: MRT4577_87087C.1.pep
RRTKHNYCKVYLFYLLVLQSFELHVSKLCYCCPMEVISYIKNHVLMPRLTVNCMLKIWLHLTMLPCCENFI

SEQ ID NO: 355175 - protein, 54 aa, Zea mays
  Clone ID: MRT4577_87088C.1.pep
CEAGGAAITGVGAGQEAGPAVTSRGSRIGPSSWTSGRLEFSPAAISGFGPKEAG

SEQ ID NO: 355176 - protein, 78 aa, Zea mays
  unsure (1)..(78): unsure at all Xaa locations
  Clone ID: MRT4577_87089C.1.pep
PTRPPTRSSTRSTTRTPTRAAAYKQCGIIAMXDHAQQQQGGWEAVAAMDAIXKIVEIAPIKVYEGATFYTMINRTKDG

SEQ ID NO: 355177 - protein, 106 aa, Zea mays
  Clone ID: MRT4577_8708C.1.pep
APYPESSGMCFQHIFKVWSLMSHDDEMKSALFLQMSMINHAVHAIGLFARSFDGYLIDRLRSLGTTSFVISQSACFCCSVICIVSFCIFSLYKYRFRYFLLIINLK

SEQ ID NO: 355178 - protein, 44 aa, Zea mays
  Clone ID: MRT4577_87090C.1.pep
SLVFQSQTHMHGCKAKNSLSRFEIHSVTISLLMRHKSNIHFFFA

SEQ ID NO: 355179 - protein, 52 aa, Zea mays
  Clone ID: MRT4577_87091C.1.pep
TSFNEVPKLTCSARCGPRMACGILTSLNFCHSSQGQFNCGDPPFNVCLPGGY

SEQ ID NO: 355180 - protein, 54 aa, Zea mays
  unsure (1)..(54): unsure at all Xaa locations
  Clone ID: MRT4577_87092C.1.pep
XRRFIYSFLHHYFQINIFYFLTNFIILHHFHRFHLFFFLCILHNKLHSYLITPI

SEQ ID NO: 355181 - protein, 308 aa, Zea mays
  Clone ID: MRT4577_87093C.1.pep
MKIKKKEFLSLKQRSMSVSEYHDRFIQLSGYAPDEVAEDERKQEHFIEGLNRPLQYGPVAHTFPSFQRLLDKALAIEHKRVQLGDLKRKAISQGLIKSALMLLLKGLTLHLKKDGSQRMCVDYRSLNDVTVKNKYPLPCIEDLFDQMRGARVFPKIDLRSGYHQMKIRPSDIPRTAFSTRYGLYEFTVMSFGLTNAPAYFMNMMNKVFMEYLDRFVVVFIDDILIYSKNDSDHEEHLRFVLQKLRDNQLYAKYSKCEFWIDEVPILGHIISNGGISVDPAKVKEIVECSIPSTITEVWSFLGLAGYYR

SEQ ID NO: 355182 - protein, 819 aa, Zea mays
  Clone ID: MRT4577_87094C.1.pep
MSYKPPTFASSMNPLHADDWLKSVEKLLIIAQCSDRKKVLYASGRLTGPAADWWDSYSTAHDVADTITWAEFATQFRNYHTPTRLMKIKKKEFLSLKQGSMSVSEYHDRFIQLSRYTPDEVAEDERKQEHFIEGLNGPLQYALVAHTFPLFQRLLDKALAIEHKSVQLGDLKRKNKQQTTGSSKGFTIARVNQVSADATAEGANIALDGKFVGDNIRVVRDFPYVFPEELSRMPPDREVEFVIDLLPGTAPISKRPYRMSAEELKELKKQLTELQEDGYICLSSSPWGALVLFVQKKDGSQRMCVDYRSLNVVTVKNKYSLPHIEYLFDEMRGARVFMEYLDRFVVLFIDDILIYSKSDSDHEEHLRLVLQKLRDNQLYAKYSKCEFWIDEVPFLGHIISNGGISVDPAKVKEIVEWSIPSTFTEVQSFLGLLPDEIIEDFRRLNLGIVAHTEGVTIEVKPTLEQEIRKGQIGDAKIQEIKDLITEGRDPEFTEDEQGTEAHDSDYSIHPGSTKMYQDLKQKYWWYGLKRDMAAHVAMCDVCQRVKAEHQRPAELLHPLKIPEWKWEEIAMDFITGLPRTPKGYDAIWVIVDRLTKVAHFIPVKTTYKGSQLVELCIAWIVCLHGVPKKIVSDRGSQFTSRFWKSFHENMDTKLNFSLAYHPQTDGQTERTNQVLEDMLRACAVQHEAEEQVRIIWENLRVAQTRQKSYADNRRRPVEFEEGDHVYLKVSPLRGMRTFKVKGKLSPRFIGPFRIFRRVGEMAYQLELPDNLSDVHDVFHVSQLKKCLCVPEEQLPIEELGVQGDVTYTEYPIKILDTLT

SEQ ID NO: 355183 - protein, 412 aa, Zea mays
  Clone ID: MRT4577_87095C.1.pep
ESRLHRQGIYKASDVTLSPSAVVGANSVVGSVTSIAGHCKVLNSVIGQGCKIGKNVLINGSFIWDNVIIEFFHALSNSLVCDGVHLRAGAVVEPGCVLSFKVEVGKNVVVPAHSKVSLLPQPSNEDSDEELEYADTNSGIADSPPFSSMRSNGDQATVPSEEDELGTSETGTCGVVGYIWTSVDTGIMEEWRQSIAPIPKEKLEELQHAVPDDDRSEDESNNPTLPDKDDSSDSLVEDDDHISKFEKEVEETFQRALGGGVNRDNLILEINGLRLAYSLQHADCAGAVFYSVMKSALLAAQSSNDTLLKTTADALGKWKDLLRNYTKTVDEEMEILLKFEEMCQETTKDFSPLFPKILPYLYDTEVVSEDAILRWAEEKEHADESDKVFVKQSEAFIQWLKEAEEEDDEEEE

SEQ ID NO: 355184 - protein, 67 aa, Zea mays
  Clone ID: MRT4577_87096C.1.pep
SPYVPGDSRDTSPEPRGYRRSQPMRGYGHAAVTGNSLSLELALHRHDKLCSATMSYPENNMGYSELC

SEQ ID NO: 355185 - protein, 109 aa, Zea mays
  unsure (1)..(109): unsure at all Xaa locations
  Clone ID: MRT4577_87097C.1.pep
MLSGRLWHCCRRGGTCSEFXGLRTFGFLPMRCNATCDNLMTATSLTTHSSVTSERPRXRGPSEANLMVNICGLVRICRNFLRCWHXGSSYAWLLDIMDMNDTEGEKQDY

SEQ ID NO: 355186 - protein, 66 aa, Zea mays
  unsure (1)..(66): unsure at all Xaa locations
  Clone ID: MRT4577_87098C.1.pep
GGGGGGGRXGXGGRGKKKXEIRDMRWTSYEGLWESACTRYVKLGILLRAGGLFFFFFFLIRQEQTG

SEQ ID NO: 355187 - protein, 82 aa, Zea mays
  unsure (1)..(82): unsure at all Xaa locations
  Clone ID: MRT4577_87099C.1.pep
NTFFFLGFMEKAWPKKNHLHFQVFNFNIFSVYRXIQRTTCEQNIQLYKTSIGVIYRTLAYFYWGSLVFGFNHNFTSSAWGRT

SEQ ID NO: 355188 - protein, 43 aa, Zea mays
  Clone ID: MRT4577_8709C.1.pep
FMCLIRIKTCLSQTQLEIQEIRAMGYIKSDVDYLISHTLRKSS

SEQ ID NO: 355189 - protein, 85 aa, Zea mays
  Clone ID: MRT4577_870C.1.pep
PKGFFKPVFFLALFWDHPVPRWPFFSQILTKACSSSMPEKSGRSPVLVYTAQKKLFVVCVCKLGVAPPPPGVRSSFRHCLDPANV

SEQ ID NO: 355190 - protein, 160 aa, Zea mays
  Clone ID: MRT4577_87100C.1.pep
MEAAVPSRVALSAASRLPNPHAVTGDRSFIYKGRCQSLAIPMALSAAAPGKGGGVLDRPVEKTTPGRQSEFDVKKSRKMSPPYRVILHNDNYNRREYVVKVLMKVIPGMTVDNAVNIMQEAHVNGLSVVIVCSQSEAEEHCTSLRGNGLRSSIEPASGGC

SEQ ID NO: 355191 - protein, 64 aa, Zea mays
  Clone ID: MRT4577_87101C.1.pep
DHTAAKTDAEEFYAEKRRDPPQTMRSDKCVEENNEVRDIYLNRHEHARYLTLGEGLNIHCQGSL

SEQ ID NO: 355192 - protein, 160 aa, Zea mays
  Clone ID: MRT4577_87102C.1.pep
MEAAVPSRVALSAASRLPNPHAVTGDRSFIYKGRCQSLAIPMALSAAAPGKGGGVLDWPVEKTTPGRQSEFDVKKSRKMSPPYRVILHNDNYNRREYVVKVLMKVIPGMTVDNAVNIMQEAHVNGLSVVIVCSQSEAEEHCTSLRGNGLRSSIEPASGGC

SEQ ID NO: 355193 - protein, 40 aa, Zea mays
  Clone ID: MRT4577_87103C.1.pep
EVNLTPTPLNSDPTHQFFKTTCLIPRYQTHGAIKPPSFSP

SEQ ID NO: 355194 - protein, 160 aa, Zea mays
  Clone ID: MRT4577_87104C.1.pep
MMASVPSRVALSAASRLPNLHAVAGDRSFIYKRRCPSLSIPMALSAAAPGKGGGVLDRPVEKITPGRQSEFDVKKSRKMTPPFRVILHNDNHNRREYVVQVLMKVIPGMTVDNALNIMQEAHVNGLSVVIVCSQSEAEEHCTSLRGNGLRSSIEPASGGC

SEQ ID NO: 355195 - protein, 192 aa, Zea mays
  Clone ID: MRT4577_87105C.1.pep
PSSSLLPPQSPPPQHATTPLALGYHLPSTPLLSPWPAADEHHEEASPLLAPPANEKLPPAQDPVKGCADGVPVVMGEPVTAPAGAEPRESWDSGILSCLGRNDEFCSSDLEVCLLGSVAPCVLYGSNVERLAAAPGTFANSCLPYTGLYMLGNSLFGWNCLAPWFSHPTRTAIRRRYNLEGSFEAFTRQCGC

SEQ ID NO: 355196 - protein, 140 aa, Zea mays
  Clone ID: MRT4577_87106C.1.pep
EWVGEVAFSGYGPVVQTTGADCCDGWLNSGYHLQGVTANSESMGVGVATTVTTHAAGQQPAMWSFCVLDMGTTTGVPAAPNLSVPTQTNSIPSSGGQQFATNLIVHAPYIDEASVATALTLGEVPNPAPDLGAPGRPIMV

SEQ ID NO: 355197 - protein, 82 aa, Zea mays
  Clone ID: MRT4577_87107C.1.pep
CAVLLRVREKKSINTILATFLHKRHSMNSVKQCFTQPYARSTGDSLRTYRGFKKICPKIDVLLDIGQPSSSNFSPFCISKVH

SEQ ID NO: 355198 - protein, 62 aa, Zea mays
  Clone ID: MRT4577_87108C.1.pep
RHPCLSSYHTHATSWHLTISACALFKKYENHERNQISITDAHYPELHSTYTKLIQKTFCRLS

SEQ ID NO: 355199 - protein, 76 aa, Zea mays
  Clone ID: MRT4577_87109C.1.pep
MSFRSIVRDVRDSIGSLSRRSFEVTAAAAAGGLSGRTAAQHRRGRSQSTVHELRDTGVVVQQDESRWGKLPPELLR

SEQ ID NO: 355200 - protein, 76 aa, Zea mays
  Clone ID: MRT4577_8710C.1.pep
EMRLPAADWAQVRLLALTIRSLLLNTPEEHEGNNRCARPKRTARRPSPLLSVLPLSRGQTRRGRLAPSYAVSRCLS

SEQ ID NO: 355201 - protein, 494 aa, Zea mays
  Clone ID: MRT4577_87110C.1.pep
MSFRSIVRDVRDSIGSLSRRSFEVTAAAAAGGLSGRTAAQHRRGRSQSTVHELRDTGVVVQQDESRWASLPPELLRDVVRRLEASESAWPNRKHVVSCAAVCRAWREMCREIVLSPEVCGKLTFPVSLKQPGPRDGMIQCFIKRDKSKSTYRLYLCLSTAVLMENGKFLLSAKRSRRTTCTQYIISMDADNISRSSSTYIGKLRSNFLGTKFVVSDTQPPPYRYSGAAPPPPRAAGRRASRRFDSRKVSPKVPTPAGAGGGSYSIAQVTYELNVLSTRGPRRMHCVMRSIPASAVEPGGTVPGQPERILPRALLEEQEEEEDSSSFRRTGTGTTSFSKSSASIMDRSVDFGGSSSSSFRDFSSARFSDIVDGGGGGDGEQDRERPLVLRNKAPRWHEQLQCWCLNFRGRVTIASVKNFQLIAAAPSLQAQAPAAGAGAPLAPSSQPAPQDQDKVILQFGKVAKDMFTMDYRYPLSAFQAFAICLSSFDTKLACE

SEQ ID NO: 355202 - protein, 72 aa, Zea mays
  Clone ID: MRT4577_87111C.1.pep
KERRGPRPPYFKVKEKEGAPPMKKIFLSMNWVYAQGPVYEVVPVFPSLYHLEPLSLFLFAQAKTKMEKTQGA

SEQ ID NO: 355203 - protein, 62 aa, Zea mays
  Clone ID: MRT4577_87112C.1.pep
AYPMTQKFLKNHPDEDSRNTTRGLRTCVLHQHRKQCRRYHRAPMNRFSRARREGGPRYYVLE

SEQ ID NO: 355204 - protein, 51 aa, Zea mays
  Clone ID: MRT4577_87113C.1.pep
LFFFLNQHRPPLSVAFLSCQDSPASQGILIFSSSQKLNFNMAILSPLIPQL

SEQ ID NO: 355205 - protein, 270 aa, Zea mays
  unsure (1)..(270): unsure at all Xaa locations
  Clone ID: MRT4577_87114C.1.pep
MMPPPVQPLRLHLLFRSETLIPLLRLRPSCDAPHCRTRRYISVRASAAQLAAADVSTAQQPALELGLEAAAAGFVTGKRKATEVAHXRFWRNIVQKGDTVVDATCGNGNDTLALLKMVADETGRGRVYGMDIQDSAIENTSSFLKMAVDDEHQRGLVKLFPICHSRMEEIVPKDAPVRLVAFNLGYLPGGDKTVITVPRTTELALRAASRILSSGGLISVLVYIGHPGGRDELDVVESFSSSLPVDTWVTCKLQMLNRPVSPVLVLLNKK

SEQ ID NO: 355206 - protein, 615 aa, Zea mays
  Clone ID: MRT4577_87115C.1.pep
GLKDNYVQFSELLAKHCRPVDTKDTTSSNEVLSSVQPEQESDWKLAFRIFGNFALLSSVFAFFYVSAHIILASPSIIQGLEFPGLDLPDSAGEVVVCGVLVLQGQRVLNMIARFIQAKRQRGDHGVKAQGDGWLLTVALMEGTNLAATKSSGYSDPYVVFTCNGKTKTSSINFHTLDPQWNEIFEFDAMEDPPSVMKIHVYDFDGPFDEVASLGHAEVNFLKYNNISELADIWIPLKGKLAQACQSKLHLRIFLNNTRGTEVVKDYLDKVEKEVGKKIAMRSPHTNLAFQKIFSLPPEEFLINDFTCHLKRKMLTQGRIFLSPRIFGFYTNLFGHKTKFFFLWEDIEDILLVPATLSSMGSPSLVIILRKDRGMDAKHGAKQLDSQGRLKFHFQSFVSFNVAHKTITALWKARSLTPEQKVQLVEEESETEDFQIEEGESLLGIEDAKMSGVFSCTKPFDVSTLMGIFEGGPLECRVMEKVGCMDYSVTAWEPVRADIYQRQVHYKFDKKSARHGGEAMSTQQKSPLPNKNGWLVEEVMTLEGIPVGECFNLHIRYQLESNASKQKTCTIQVFIGIVWLKSCKNRKKITQDVATSASSRLKKIFNQLEKESIPAK

SEQ ID NO: 355207 - protein, 71 aa, Zea mays
  unsure (1)..(71): unsure at all Xaa locations
  Clone ID: MRT4577_87116C.1.pep
VRLRTGRNGGFTHLLLTCXFSAKRGDLPTSSGSSTGKGFTPEPSAVIGEEGNTHRGFYTIGGGPEPGGPDL

SEQ ID NO: 355208 - protein, 114 aa, Zea mays
  unsure (1)..(114): unsure at all Xaa locations
  Clone ID: MRT4577_87117C.1.pep
PPLVGNSPSIQELFPRVSDQFPAMFRGRAFLPWSPGEGLVXMGFPGAEGTLTALVAGFPRSRDPPPEVEGSQGGGEKEEEPLVFFPGAWSKYDIPCIPVSPRPFEVRVVIPPRS

SEQ ID NO: 355209 - protein, 45 aa, Zea mays
  Clone ID: MRT4577_87118C.1.pep
RSGMSEQRIRCSLHWKKADRGNMESNRLVEERKRRTILGFRGEGL

SEQ ID NO: 355210 - protein, 90 aa, Zea mays
  Clone ID: MRT4577_87119C.1.pep
YPGSHGVFQLPNSVRRALETGSPNGIFMSGKCYGELGDGKPCPRGVWTGFPKIVLKHLINPLILYFPAGQFPFLDGQTFGHVFSQPPWAR

SEQ ID NO: 355211 - protein, 35 aa, Zea mays
  Clone ID: MRT4577_8711C.1.pep
IPGEQFFLFGREFNITQEMDYKDVGSSFSFAHTLN

SEQ ID NO: 355212 - protein, 78 aa, Zea mays
  Clone ID: MRT4577_87120C.1.pep
EDSKVQYLASSEARSRRPVVRSAKSAGHSLFGGGGIKEVRTIFFIGGAIDIWKTETKPEHDCPRNREKLIRKILMAQH

SEQ ID NO: 355213 - protein, 92 aa, Zea mays
  unsure (1)..(92): unsure at all Xaa locations
  Clone ID: MRT4577_87121C.1.pep
TRGLYKLHGGEHLSTVPTIGSNLEKVQYKNLYLNAWDVGCLHKFKPLRRHYFNNTXALINVVDSLDNQRIQRALAQSQAINNDPFMLNRTLL

SEQ ID NO: 355214 - protein, 152 aa, Zea mays
  unsure (1)..(152): unsure at all Xaa locations
  Clone ID: MRT4577_87122C.1.pep
MVLGLLVSPPATVLWTFLGLALLWQVKRLVDYTWWRPRRLQRALRAQGLRGTPYRFPVGDLGDYGRQGKEASYLCNTVREHGKTCVSWFGPVPKVTIADPGVTREVMSNKFGHFEKLQFPTLTRLLAGGVAVYEGEKWVKHXRRILNPAFPI

SEQ ID NO: 355215 - protein, 85 aa, Zea mays
  Clone ID: MRT4577_87123C.1.pep
YQTHGPNLYPLRITQLTSGPTVPNSILGHQEPRAPREGSSCTKLASPTLPNSSKKTRANSTHQHGSKTIHPTCYTAPDRFTPTIP

SEQ ID NO: 355216 - protein, 76 aa, Zea mays
  Clone ID: MRT4577_87124C.1.pep
SSGDTCPHASRAQWITIHGARRIHGLLRDGEKFPHQHALPRFGHTTDVIPDLERTPELAPDHRTPARQLRRPPFSW

SEQ ID NO: 355217 - protein, 90 aa, Zea mays
  Clone ID: MRT4577_87125C.1.pep
KRPSRGTRQNMNHFTMNIQGTNPTLALLSNLKKHLRTRYWVHPYWPPTTYHFSNGIEGTGIVHPIHNTFGPLQPTWIVLKKISLTSCSRR

SEQ ID NO: 355218 - protein, 46 aa, Zea mays
  unsure (1)..(46): unsure at all Xaa locations
  Clone ID: MRT4577_87126C.1.pep
STGTGVHDPEXLGQFIHIQGDQRKNVSNFLVQAGIGNKDHIKIHGF

SEQ ID NO: 355219 - protein, 36 aa, Zea mays
  Clone ID: MRT4577_87127C.1.pep
TTTSLWHVVRDPNSLSRDGDRSDYLYLLDIAKCPSS

SEQ ID NO: 355220 - protein, 69 aa, Zea mays
  Clone ID: MRT4577_87128C.1.pep
WFIYTVDESSQMLWFSARPVIGVHGVVVCLYLNRRVSPARGESGLHQVRAAQGHAARPACCLMTKYGRY

SEQ ID NO: 355221 - protein, 80 aa, Zea mays
  unsure (1)..(80): unsure at all Xaa locations
  Clone ID: MRT4577_87129C.1.pep
PEEMRKRSESSGMSTVAYSFSLNKLVVPVSVQLLPKRTRARNRRTPTRRRRGRGXXIDLLETEKILKKQCXCFLWPPNSL

SEQ ID NO: 355222 - protein, 96 aa, Zea mays
  Clone ID: MRT4577_8712C.1.pep
VVVTQGQKAPRVLPHGVPPPRSPGVALPVSLTRRIMPRRHNVRLQMIDKYPPPYVHARGGGVHQKCVWSTIGGGGPTWFSFFFLGYDWPLQTCFRK

SEQ ID NO: 355223 - protein, 96 aa, Zea mays
  unsure (1)..(96): unsure at all Xaa locations
  Clone ID: MRT4577_87130C.1.pep
MCESKMSEVELDLLNESCIEAAARXRGIDVVLNEETKRETPGIAGLGDKQRFIGSVGAAFFTMIPYTYISQMKRLLGRKFSDPELLRDLASFPFHF

SEQ ID NO: 355224 - protein, 50 aa, Zea mays
  Clone ID: MRT4577_87131C.1.pep
TKSFHSAVHRTRSHGQEWQPLATNYVTRGMWNSCVSNIRGLLGGFGSMFA

SEQ ID NO: 355225 - protein, 34 aa, Zea mays
  Clone ID: MRT4577_87132C.1.pep
VHSSPFSARNSNTAATADSSHSASLTGYSLGGKN

SEQ ID NO: 355226 - protein, 84 aa, Zea mays
  unsure (1)..(84): unsure at all Xaa locations
  Clone ID: MRT4577_87133C.1.pep
FIPYPPTTKGPATTKEKRKSAPKPPPKKRMDKXLDNGTSCPICNHGSRAERRIDMKKLIGQASRINRQENFTTTVKATTEPSDI

SEQ ID NO: 355227 - protein, 240 aa, Zea mays
  unsure (1)..(240): unsure at all Xaa locations
  Clone ID: MRT4577_87134C.1.pep
NFTNIIDLRIYGTKLRGPIPKNFSKLTNLKILMLGDLDGGNSTFDFIADGANIPILSLRKCGIGQFPSNPPNLPNLTYLDLRSNNLSSSIEPLRRYGRLSYLYMGENNFSGPLPSEMFQSSRGLDVSYNPLLNGNLPNNPPDRKWSINYIGTSIDASRTINSENLTLLNCLHMKECNKFNTKPITSFAVNCGGKQXFFRSIANXTFDDDTSILGAAGFHVNTDRQWIVSHVXSDPFTNSS

SEQ ID NO: 355228 - protein, 215 aa, Zea mays
  unsure (1)..(215): unsure at all Xaa locations
  Clone ID: MRT4577_87135C.1.pep
VVRSSCVAPSPVXXVXXSSLVLPGSAXPCPWXFXXPXLLXSSXXXXLXXASSFCPPRCALAXPXPSLXPALWXXXXFXXXLXFSVXXXLVXWLXXXXXXVXPCPSLXXCWPSXXXAFXSAAXGGSCLXXSFSLXSXXXPXXXCPSFSRXXXLLXLXGVVXPLXXXAVSXXXXXGXGXAAARRXXSRXAARPXXXVRRSPSCVRPAGXWRRXXVWG

SEQ ID NO: 355229 - protein, 77 aa, Zea mays
  Clone ID: MRT4577_87136C.1.pep
KNLQKKAGVDTSTKPGGFVIPPRVNQKPENKLWLTQKAVPFVLGKRVSKMSPTPPKINCLTGRIIRDPPPRNSLASQ

SEQ ID NO: 355230 - protein, 186 aa, Zea mays
  unsure (1)..(186): unsure at all Xaa locations
  Clone ID: MRT4577_87137C.1.pep
MASSLARLGAALPRARPRSAALGIGASRRAAPNAFRCQVHSDIKVAPTSDLKDDSKSETWRIKMLYDGDCPLCMREVNMLRERNKSYGAIKFVDISSKDYSPDDNEGLDYETAFRKLYEEVGLGWVYAVTKYEPVATMANAIYGVWAKYRMQITGRPPLEEIIASRKXSKLSKAAGECKDDKVCKM

SEQ ID NO: 355231 - protein, 113 aa, Zea mays
  Clone ID: MRT4577_87138C.1.pep
HIHAPNAFRCQVHSDVKVAPTSDLKDDSKSETRRIKMLYDGDCPLCMREVNMLRERNKSYGAIKFVDISSKDYSPDDNQGLDYETVMGKIHVILSNGTVVTMLIIYKLSKEVG

SEQ ID NO: 355232 - protein, 82 aa, Zea mays
  Clone ID: MRT4577_87139C.1.pep
VLVFILDFLLFFLIIYSASSISFYATSMAFLLLKGQVFNAFFIIILLVFIVNLAFPLSIRDKNLAFMLHSAFCFFHFQLFLK

SEQ ID NO: 355233 - protein, 108 aa, Zea mays
  Clone ID: MRT4577_8713C.1.pep
GSPDLLSFLPVLLLPSPATEVLVGATEEYYDDDGEEEVRSTTTFLSSLVGNRPGVELPGAGFARSFIHSSRSSCPVFEQSESKSRSLIPRSIRVEFSGPKLERFGKYI

SEQ ID NO: 355234 - protein, 199 aa, Zea mays
  Clone ID: MRT4577_87140C.1.pep
MASSLARLGAALPRARPRSAALGIGASRRAAPNAFRCQVHSDIKVAPTSDLKDDSKSETWRIKMLYDGDCPLCMREVNMLRERNKSYGAIKFVDISSKDYSPDDNEGLDYETVMGKIHVILSDGTVVTDVEAFRKLYEEVGLGWVYAVTKYEPVATMANAIYGVWAKYRMQITGRPPLEEIIASRKAAGECKDDKVCKM

SEQ ID NO: 355235 - protein, 93 aa, Zea mays
  Clone ID: MRT4577_87141C.1.pep
MTTMVVGYAVGWRGGAWYARRGLRREQQKLAGMGHMKAHDRWHWRPFNRLRNSRLASKNKRADAHPSTEAPSTSSNAASADVSSASQPAAGSA

SEQ ID NO: 355236 - protein, 156 aa, Zea mays
  unsure (1)..(156): unsure at all Xaa locations
  Clone ID: MRT4577_87142C.1.pep
CRSPSGWWACAAVVVCLPPLPLGFFLAFLSGVLSPSCGAVALLSRPLAAPLPGLPALGGAWGLLSGRPLLWVRASVRVRAPSWLFLAPPFFFSLAVVFXRRVWVVPGVSLLDRLAVRPPFACWRRRVEALSCRPSRRLPGLGGGWGAPCRGPFRAG

SEQ ID NO: 355237 - protein, 234 aa, Zea mays
  unsure (1)..(234): unsure at all Xaa locations
  Clone ID: MRT4577_87143C.1.pep
TGGYRCLKGLLARSPVATRSRRQRGRWRARWPAWERRCHARAHALRPAPCHRRGGTPRRSAPPAAPHRTFAXLVHSDVKVAPTSDFKDSSKSETWRIKMLYDGDCPLCMREVNMLRERNKSYGAIKFVDISSKDYSPDDNQGLDYETSMGRIHAVLSDGTVVTDVEAFRKLYEEVGLGWVYAVTKYEPVASMANAVYGVWAKYRMQITGRPPLEEIMASRRAAGECKDDKVCKM

SEQ ID NO: 355238 - protein, 96 aa, Zea mays
  unsure (1)..(96): unsure at all Xaa locations
  Clone ID: MRT4577_87144C.1.pep
VVEGSVPDPTALLVQTWATTFYTGTGPVGRIVLAAAAKHPHPGQLXSLRGKSPXIVPFTCSICTVAXHRFPVPRMRARNNGQACIAPHYIITTKSF

SEQ ID NO: 355239 - protein, 162 aa, Zea mays
  Clone ID: MRT4577_87145C.1.pep
IQRGGDPPSSPSFARPALTTRIPVLKFAQYTGAHAIAGRHTRVFFTNQLQTSFSEPRLLILTDPRTDHQPIKESALGNIPTIAFCDTDSPMRYVDIGIPANNKGRNSIGCLFWLLARMVLQMRGTILPGHKWEVMVDLFFYRDPEEAKEQEEEAAVAPEFAA

SEQ ID NO: 355240 - protein, 310 aa, Zea mays
  Clone ID: MRT4577_87146C.1.pep
MAAAAGGGAVRALSQKEQDIQMMLAADVHLGTKNCDFQMERYAFKRRTDGIYIINLGKTWEKLQLAARVLDGNDNPQDIIVQSARPYGQRAVLKFAQYTGAHAIAGRHTPGTFTNQLQTSFSEPRLLILTDPRTDHQPIKESALGNIPTIAFCDTDSPMRYVDIGIPANNKGRNSIGCLFWLLARMVLQMRGTILPGHKWEVMVDLFFYRDPEEAKEQEEEAAVAPEFAAITDYQGADQWGGDQWTSDVTATPVAPTGADWGAAPAPVPTGDGWDQAGAPAPVVDGTVPPLVAPTGWDQAAPPPTAQGWE

SEQ ID NO: 355241 - protein, 310 aa, Zea mays
  Clone ID: MRT4577_87147C.1.pep
MAAAAGGGAVRALSQKEQDIQMMLAADVHLGTKNCDFQMERYAFKRRTDGIYIINLGKTWEKLQLAARVIVAIENPQDIIVQSARPYGQRAVLKFAQYTGAHAIAGRHTPGTFTNQLQTSFSEPRLLILTDPRTDHQPIKESALGNIPTIAFCDTDSPMRYVDIGIPANNKGRNSIGCLFWLLARMVLQMRGTILPGHKWEVMVDLFFYRDPEEAKEQEEEAAVAPEFAAITDYQGADQWGGDQWTSDVTAPPVAPTGADWGAAPAPVPTGDGWDQAGAPAPVVDGTVPPVVAPTGWDQAAPPPTAQGWE

SEQ ID NO: 355242 - protein, 242 aa, Zea mays
  Clone ID: MRT4577_87148C.1.pep
APADSLPLPRLNHGASAAAPCFRQPSPCARILPRSPQRHRPTSPAKLPRLQSFSRRAPQLAGRDLAEVFPMAGSLLNPSRGLVRNSTFHGRCVALLVLAQLNAILRSVLSDVELSSVSVSLRTSSSLPRAELSVGLQLAMVSNSCTNRDLRLVFPAALTCVDLCSLRSGCRAGSLHTWCTPSWASRCCAPCVTSHSHHGQQLQKHGRPSLFPIFHAHLGLHPQPLPEIWLNGRTRRSPEFYG

SEQ ID NO: 355243 - protein, 116 aa, Zea mays
  Clone ID: MRT4577_87149C.1.pep
KVWQFLVITCSAFRGLTAIHIGITQSLLCIPFLYHLAHLSIFSPTHLIILIKPILKVAFVLSIHTRNTPKTCCRTQQVPCPPNSIFFTCFENLCFRFDCKSPPERKKKMYTRKKKK

SEQ ID NO: 355244 - protein, 76 aa, Zea mays
  unsure (1)..(76): unsure at all Xaa locations
  Clone ID: MRT4577_8714C.1.pep
FVETYGKGFSRVRGFXIGKKPFKLTHFXEVFSTPHWMVRIYKLKPPKNRVXGKLKKFKASAKTSSPLSAGGKNPWQ

SEQ ID NO: 355245 - protein, 115 aa, Zea mays
  Clone ID: MRT4577_87150C.1.pep
PGRCLAHCLFPCGGAWSDISSGSARQASAGFGVVSVLVVAAAGSVPGVLGSVLRLVCGPFAFFIGWSCCSSRSARLVRGAAAVAYPGRLPGCGRACLRWWQFARGFGRLLLLLRA

SEQ ID NO: 355246 - protein, 68 aa, Zea mays
  Clone ID: MRT4577_87151C.1.pep
KLEGYKRSIWDKTSNQIGETQKALLGCIGGGGLGERKPLFFQFKKIGLFLIRLKPLLTENTQNGGRAL

SEQ ID NO: 355247 - protein, 107 aa, Zea mays
  unsure (1)..(107): unsure at all Xaa locations
  Clone ID: MRT4577_87152C.1.pep
SELKKMGFXEVLGDNDSPVMPIMLYNPAKIPAFSRECLRQKVAVVTVAFPATPLLLARARIRISASHTREDLMKALDVISRVGDLVGIKYFPAEPPKIAEAGHGKRE

SEQ ID NO: 355248 - protein, 50 aa, Zea mays
  Clone ID: MRT4577_87153C.1.pep
LGDIHRGVQESRGLREEARYYFHRHLIRPVLCRGWHLRPPGPPRLLDPRA

SEQ ID NO: 355249 - protein, 135 aa, Zea mays
  Clone ID: MRT4577_87154C.1.pep
VPLLSQSNHASISGETRDTLVNRIQFGGDEVVKAKDGAGSATLSMAMAGARFAESLLRAAQGEKGVVEPTFVESPLYKDQGVDFFASKVELGPNGVEKILPVGEVNEYEQKLIDTCLVDLKKNIQKGVDFVKANP

SEQ ID NO: 355250 - protein, 51 aa, Zea mays
  Clone ID: MRT4577_87155C.1.pep
MEQTFIMIKPDGVQRGLIGDIISRFEKKGFYLKGKCVSFCSRIDCWNTYSV

SEQ ID NO: 355251 - protein, 43 aa, Zea mays
  unsure (1)..(43): unsure at all Xaa locations
  Clone ID: MRT4577_87156C.1.pep
LXYNSYNRHSQSAGGEKARRLAAVKSAWRKEGEVAARSLSNET

SEQ ID NO: 355252 - protein, 148 aa, Zea mays
  unsure (1)..(148): unsure at all Xaa locations
  Clone ID: MRT4577_87157C.1.pep
FSRINEVPDGGLYCPAFGEHIDEWIPXKXPHDEAYNEXTPPGKRCSXITRXKQRKAGREISLAIGLXDTTRYYPPTECTKQGTNSAMIACNXREMLNAXMNVHISTFYQGMRLLARQRHAQNPKSTLDHWPHGHKWSGFMMIHYHMRT

SEQ ID NO: 355253 - protein, 69 aa, Zea mays
  Clone ID: MRT4577_87158C.1.pep
PFDLQFFFFYLGVGPTLKPFFLTGKQKSPRKKKRKRAPAGWDNPGSNIRWGGIQKQCWWCFGSGTWKFF

SEQ ID NO: 355254 - protein, 70 aa, Zea mays
  unsure (1)..(70): unsure at all Xaa locations
  Clone ID: MRT4577_87159C.1.pep
RGTRRGESQACGRPGRAADSPCSRRRSQGKRRGDESGIRSRKEKSRPYKQYIDLPSXFXGRVEKIDWSRK

SEQ ID NO: 355255 - protein, 471 aa, Zea mays
  Clone ID: MRT4577_8715C.1.pep
MQPTTREMQAMAAAGQQISLDDLRAAAGGVHDDFLDQMLGGLPPSAWPELSSAAGGKAPDGGAQAEQMQHQPQHLGGGGGLYDDSALLASRLRQHQISGGGGGEAVKQMVLQQLADLRQEHHVLLQGMGRSTSTGGSRDGGLLLPLSLGSGGSGGDVQALLKAVADSAGGEAAGVFGGSFAGSLHHHQQQQQHFQSHPQQQTAPLPGHGSGGGAGASGGVSQPQAGAACGGAAAPPRQRVRARRGQATDPHSIAERLRRERIAERMKALQELVPNANKTDKASMLDEIVDYVKFLQLQVKVLSMSRLGGAAFLLWTVRVCVVQGRGGVAVAAGSDDGLAVTEQQVAKLMEEDMGTAMQYLQGKGLCLMPVSLASAISSATCHMRPPVGGPGLGVAAAAAHHMAAMRLPPHAMNGGAGAGADAVPASPSMSVLTAQSAMAPNGAGGGTDGEGSHSQQQQRHHPKDAASVSKP

SEQ ID NO: 355256 - protein, 105 aa, Zea mays
  unsure (1)..(105): unsure at all Xaa locations
  Clone ID: MRT4577_87160C.1.pep
STGTSTVCSTRSVRSWNFRSPLMIPTGGPANTRTRSMAELPSDCIQDPHPFVSWDRYFHSNPCITENSVCGTCVCKVFVKCHVPMYDLLQRFPXPVXFDPGXXPT

SEQ ID NO: 355257 - protein, 62 aa, Zea mays
  Clone ID: MRT4577_87161C.1.pep
GCPSGVLFCGVVLVFFEVQSCSVLRFDISVCMYGVSKCGHVCVYPCMLVGEVVFFVSKNPFP

SEQ ID NO: 355258 - protein, 110 aa, Zea mays
  unsure (1)..(110): unsure at all Xaa locations
  Clone ID: MRT4577_87162C.1.pep
MVSGELTCSYAAIILSDEGITITAEKIATIAKAGNIKGETYCAALFAKILQKRTAEDLILSGGSXGDGAAPDAGAAPAGGAAAAAAPAADEKKEEXQDESDDDMSFRLFD

SEQ ID NO: 355259 - protein, 67 aa, Zea mays
  Clone ID: MRT4577_87163C.1.pep
GRSKKPVGAPYRKFSVFRARSPLPPEGLMFNQTLSFAAKKVTGKRGGGFSGQQPPGKTYSACSAGAP

SEQ ID NO: 355260 - protein, 261 aa, Zea mays
  Clone ID: MRT4577_87164C.1.pep
MPPAAAALLRCAPAVPFAARSSAVSRSGMARRLVAASAAAGRLAPAYRGLLLDAGGTLLQVARPVAETYASIGRRYGVTKTKKRIMEGFKRAFSAPWPKTLRYQGDGRPFWRIVVAEATDCTDGDYFEEVYQYYAHGDAWRLPTGADAALRELKDAGVKLAVVSNFDTRLRKLLKDLNVSEMFDAIVVSSEVGYEKPSPEIFNIALDQIGVEASKAIHVGDDETADMAGANATGLECWLWGKDVTTFSEIQERILTTDDPQ

SEQ ID NO: 355261 - protein, 41 aa, Zea mays
  Clone ID: MRT4577_87165C.1.pep
VFSSAITATRGVFQIPRGAPITQSLLSNVLQKAELVLFIFP

SEQ ID NO: 355262 - protein, 109 aa, Zea mays
  Clone ID: MRT4577_87166C.1.pep
SACEIKTRCEEVSICGAGLQRRKLHWSGASCGGMIASPPLAVRGGALCRHNCSRSVAGLWSVMSTSCLFKSAVRSCLSLCSLGRCCVCPSAVVVVCSLVFCLFSHESSL

SEQ ID NO: 355263 - protein, 156 aa, Zea mays
  Clone ID: MRT4577_87167C.1.pep
CGNGPLVCCSAQALCSKSQPRACPVGCGDAGILKPICRCQLVAAPAGMPVSGPEVCPSHTRGRLQKHLWKGVLCVEETHWTCVYCSHATTGGSHTLLCKSAWVSPQHRAGLPSCRKHCVYRSAEATGAPRVRWHRGYGCTAVTEPLRVPGYCCWGA

SEQ ID NO: 355264 - protein, 185 aa, Zea mays
  Clone ID: MRT4577_87168C.1.pep
RCFSLRNLPQCMTSLSHLETVDLGYCAELAELPEGIGNLRNLKVLNLKKCKKLRGLPAGCGKLTRLQQLSLFVIGDSAKHARVSELDNLDKLDGELQIKNIRYVKDPGDTDKVCLKKKNGIHKLSLDWYSRWEDQPNDMEEELSLNMEKELHLLDSLEPPSKIEKLRIRGYRGSQLPRWMAKKMT

SEQ ID NO: 355265 - protein, 86 aa, Zea mays
  Clone ID: MRT4577_87169C.1.pep
IKIVSKKQCPSDTFCISYKESQVSSQFTPHYYRIFAFRTPNRSSGVQTESSCWNNVLASRSVVAAVLGSSHSTLHVGQKDKRSSLP

SEQ ID NO: 355266 - protein, 265 aa, Zea mays
  unsure (1)..(265): unsure at all Xaa locations
  Clone ID: MRT4577_8716C.1.pep
MQRIAKLVYSLAPACTSGASTEVSSIVLSAGASSFCVSIVAPIAVFSALVVFAPGGATIASFRVFSTVVEFSCVTTVAFSTGFPSAVDLSSSTLTSSTVSSVVLASSSGSXSCSLXSSVISPIIGSTIPLFAIFSSGASTVISPSLVSPAGVSASALISVFSSGASTVISPALVSPANLSASSLFSIFPFSSGASSLVSPSAVSSTTPMVAALFSVLSSSGTTFASTVSSTMTIECSIFASAIDSSSEIRPRAEFRAYVRVHATS

SEQ ID NO: 355267 - protein, 124 aa, Zea mays
  Clone ID: MRT4577_87170C.1.pep
PFSLDDTSGSLFNMIVIIDMGHLSVSVCIYTSPASLCTVLIPSSTTAEDVRVFSRPTRRSGDPLWPSVSGVTPQPLSWAPRIQPLCPQAPLRRRLGGVSTGASKSLRRVSATGRRDCRESAFWR

SEQ ID NO: 355268 - protein, 65 aa, Zea mays
  Clone ID: MRT4577_87171C.1.pep
IIFNNVRQRIYSCRLLSILKPAFKDIATTSRGRASTFRKLLLTHLAVETKPPNLTIHDLILPIFP

SEQ ID NO: 355269 - protein, 66 aa, Zea mays
  Clone ID: MRT4577_87172C.1.pep
GRVINSINMPKFQYIINSNNMPKTCVCLLKVVHGECLHIFSIGYYYQYMLPHWYLNVLMFYLNTVT

SEQ ID NO: 355270 - protein, 124 aa, Zea mays
  Clone ID: MRT4577_87173C.1.pep
LVSLHRCPTPASTLTFLRTAGDCSHRREAKQMSTPPCPFSPPPLLTPSHFFSQQEPAMDAPASHYPPDLVLHVEIRPFPTSTRPLANRQNPKSRQPPGARVQAATTASSAQHPVRPNPPPPLVL

SEQ ID NO: 355271 - protein, 153 aa, Zea mays
  unsure (1)..(153): unsure at all Xaa locations
  Clone ID: MRT4577_87174C.1.pep
MGLVSGSWSSTXVVTALPRNGXSEASSSFLDGNTLLRQAEAPRPTFAVRAEAXPNRTIWFPGSTPPPXVDGSLPGDFVCDPWGLGSDPERLRWNVTRXLAHCRCTMLGAMHIFIPELLTKINDLNTPFWYTDGEDQYFTDTTTLCIIELILIG

SEQ ID NO: 355272 - protein, 75 aa, Zea mays
  Clone ID: MRT4577_87175C.1.pep
SVFLGTRPRRARGESHGVPREVGGDGEGARREWQMGKIVCLVGSSSLESGKYGSGLDAPSHFRPTRPHPITHRPE

SEQ ID NO: 355273 - protein, 134 aa, Zea mays
  Clone ID: MRT4577_87176C.1.pep
KRLKLRPRQVEVLFQNRRARSKLKQTEVDCEYLKRWCEKLAQENRRLQREVADLRRLCSAAYPFYGAAAGFGVATARVCPSSCDNDVSEAAISGAPSAAAPPPSTLFASWPPHFGPFTVVVPPLLRRQPSATTS

SEQ ID NO: 355274 - protein, 217 aa, Zea mays
  unsure (1)..(217): unsure at all Xaa locations
  Clone ID: MRT4577_87177C.1.pep
MAATQLRGSAVPGTARRWRAPSGAILRFAPLATSRLPAASLRRRGAFSGLSASVTRESLTTMCMKSKCTSTPIDHATAPEHTEDEVPEPTAVVTASEEINIDQEVAPPHKSAIIHDFCLGIPFGGLLFSMGLVGFLFWRSPVSLTFGVAPGLAILGLAVLSLKGWRSGKSSLPFILAQAAVAAAVAWKHCQAYATTKKLXFPWGFYTALSVLMICFY

SEQ ID NO: 355275 - protein, 94 aa, Zea mays
  Clone ID: MRT4577_87178C.1.pep
TVSQSVVRQGKLESYIYHEAIGRSCVFPCPHGALLSNSVLGCVVWVAHASRLAMCPFVVCPQSIYNMIYTPTLCVPRCTPFSKRKKKKKKKRDR

SEQ ID NO: 355276 - protein, 88 aa, Zea mays
  Clone ID: MRT4577_87179C.1.pep
VFINEALNTRARGRNGELKRRRLLPWARDLVFSYGFHIGTSEHLKLCSIHIVHRKLVNADTIRPTCQSLCSFRRSWEEKTPQSSAHLD

SEQ ID NO: 355277 - protein, 39 aa, Zea mays
  Clone ID: MRT4577_8717C.1.pep
YINYYHHTCVGGVHKSVCSTLPFVVCTVRVFIIAGTQAG

SEQ ID NO: 355278 - protein, 62 aa, Zea mays
  Clone ID: MRT4577_87180C.1.pep
SSLFGGRPLLFYAGAHSKAQGLAHGALADDTLTIELHLQQIAMNRARLLESQRHNPQGQTRV

SEQ ID NO: 355279 - protein, 98 aa, Zea mays
  unsure (1)..(98): unsure at all Xaa locations
  Clone ID: MRT4577_87181C.1.pep
WSVIWWCQQAGQPSQQAPRRTSLRRLYEQQLPLMQSACVGLVVVAVFRGVGQGLGCPCQRRRGKFSRISQPLIEIVHTSASRFPARVGPSSRMEMKXE

SEQ ID NO: 355280 - protein, 125 aa, Zea mays
  Clone ID: MRT4577_87183C.1.pep
MLRGGTGMLGVVNFITFLISIPILGGGIWLASRANSTDCIRFLQWPIIVVGLVLMVVSLMGFAGACYRQTWLLRLYLFAMFFVVLALLFFVVFAFAAFRNAKRIDNDEPVGMARMTKSHPSRFQF

SEQ ID NO: 355281 - protein, 294 aa, Zea mays
  Clone ID: MRT4577_87184C.1.pep
MLRGGSSVLGIINFITFLISIPILGGGIWLASRANSTDCIRFLQWPIIIVGLVLMVISLMGFAGACYRQTWLLRLYLFAMFFVVLALLFFIVFAFAVTDRGDGQVVMNRRFPEYQLSDYGGWLRDRVADPQYWATISACLRDGHACAGMRRLARDPNTGMLVPETPTMFYGRNLSPIQSGCCKPPTSCAFSYMNETYWTQNPGVPTVTNDPDCSRWSNDQQMLCFQCDSCKAGVLAGIKKSWRKVAVLNIVVLIILVIVYVAGCAAFRNAKRIDNDEPVGMARMTKSHPSRFQF

SEQ ID NO: 355282 - protein, 286 aa, Zea mays
  unsure (1)..(286): unsure at all Xaa locations
  Clone ID: MRT4577_87185C.1.pep
MLRGGSSVLGIINFITFLISIPILGGGIWLASRANSTDCIRFLQWPIIIVGLVLMVISLMGFAGACYRQTWLLRLYLFAMFFVVLALLFFIVFAFAVTDRGDGQVVMNRRFPEYQLSDYGGWLRDRVADPQYWATISACLRDGHACAGMRRLARDPNTGMLVPETSTMFYGRNLSPIQSGCCKPPTSCAFSYMNETYWTQNPSVPTVTNDPDCKRWSNDQQTLXRCFQGDKKNWPKVAVLNIVGLITPVIVYVAGCPAFPNPKRIANPQPVGMARMTKSPPNRFQF

SEQ ID NO: 355283 - protein, 674 aa, Zea mays
  unsure (1)..(674): unsure at all Xaa locations
  Clone ID: MRT4577_87186C.1.pep
MGSSPSKATGEDALVLCKDRMRHIRQAIDSRDALSAAHLSYTQSLRSVGTALRQYAESEISPESSLSISEVDKSPSHSSMASPSPSRAVESVASLGHRASPSITPPSTRIHCMKAAATTPLTFVIDQSTAEFVGRESPVSAFVPPPPPLPPELCTTWDFFDPIDAAGTSSSNNENEEREPKQGGTGKPSQLVDTSTKATSEQVAAKLEESEMEKELCAEAEDPSEFITHRAKDFVSSMKDIETRFMRAAEAGNEVSRMLETKKIRLDICAKIPGSPVKXLLPDLCQHFECAXRDVILNQETAQHVSKVVTWKRSVSSLSSSSKSALMTSIIKDDVDDSNSDFVEEFAMVSGSHSSTLDRLHAWERKLYDEIKASENVRKAYDEKCNLLRRQFARGLNAQVIDKTRAVVKDLHSRVSVVIQAVDAISKRIEKIRDEELQPQLVELIQGLIRMWKLMLECHHKQFITITLAYHVKDSTSARQGEHHHHRQAAMHLWNEMDSFSSSFRNWVTAHKSYVEALNAWLQKCVLQPPQDRRRRKRKVSFPPRQAVSPPIFILCGDWLARTEPLPADELCRSLKDVMQLLRDSFEHRDEQNRPRSGESQECGMLENSSEQEAAAKSGSCAASAEGLQSRLTAVLDRLTKFSEASLKCYEELKQNYEMACADYRRVGPNAQLA

SEQ ID NO: 355284 - protein, 294 aa, Zea mays
  Clone ID: MRT4577_87187C.1.pep
MLRGGSSVLGIINFITFLISIPILGGGIWLASRANSTDCIRFLQWPIIIVGLVLMVISLMGFAGACYRQTWLLRLYLFAMFFVVLALLFFIVFAFAVTDRGDGQVVMNRRFPEYQLSDYGGWLRDRVADPQYWATISACLRDGHACAGMRRLARDPNTGMLVPETSTMFYGRNLSPIQSGCCKPPTSCAFSYMNETYWTQNPSVPTVTNDPDCKRWSNDQQTLCFQCDSCKAGVLAGIKKSWRKVAVLNIVVLIILVIVYVAGCAAFRNAKRIENGEAVGMARMTKSHPSRFQF

SEQ ID NO: 355285 - protein, 97 aa, Zea mays
  Clone ID: MRT4577_87188C.1.pep
LQSPLLPPALVAACPCFSALRPLRRWLNHNFWIGGASPPRSLQPCFVDQSTSLQLARAPAQTTSLSSSRGGGARFLRSPAVPFFLRVWPSGSAPPLV

SEQ ID NO: 355286 - protein, 294 aa, Zea mays
  Clone ID: MRT4577_87189C.1.pep
MLRGGTGMLGVVNFITFLISIPILGGGIWLASRANSTDCIRFLQWPIIVVGLVLMVVSLMGFAGACYRQTWLLRLYLFATFFVVLALLFFVVFAFAVTDRGAGQVVMSRRFPEYQLSDYGGWLRDRVADPQYWATISACLRDGHACAGMRRLARDPNTGMLVPETPAMFYGRNLSPIQSGCCKPPTSCAFTYMNETYWEQNPGVPTVTNDPDCSRWSNDQQMLCFQCDSCKAGVLAGIKKSWRKVAVLNIVVLIILVIVYVAGCAAFRNAKRIENDEPVGMARMTKSHPSRFQF

SEQ ID NO: 355287 - protein, 99 aa, Zea mays
  Clone ID: MRT4577_8718C.1.pep
AVVTTQSTFFFFFFFFFYFFFFFFFFFFFFFFFFFLKGTGGMAWGWTGHSAHTGQHNTGGLVFEPQEGQDRARPDTTRGQHLGTNIRSPPRPPPRTRHA

SEQ ID NO: 355288 - protein, 165 aa, Zea mays
  Clone ID: MRT4577_87190C.1.pep
LLQTLLYGVLVYSMIGFEWTVAKFLWYLFFMYFTLLYFTFYGMMAVGLTPNETIAVITSSAFYNVWSLFSGYLIPRPKLPVWWRWYSWICPVAWTLYGLVASQFGDIAHPLEDSPTGQTVAQFITDYFGFHHDFLWVVAGVHVGLTVLFAFLFSFAIMKFNFQNR

SEQ ID NO: 355289 - protein, 137 aa, Zea mays
  Clone ID: MRT4577_87191C.1.pep
MAEEAEGMDRFDMEGDFEGGRFGRDGEFYYRSRRERAPQTRDDAIYGVFAEGDSDYDSEDDEGTRRRRRKRRKDGGGEADLTKPVQFVSTGKFMPTQEPEPEERPGLGRAAAAAADKEEEEEEEDQDDEGDTEMLPA

SEQ ID NO: 355290 - protein, 54 aa, Zea mays
  Clone ID: MRT4577_87192C.1.pep
DYSKTHYFNHYHRHHIHTPSRHHHHYSLPRAVSITPHSYIRTTTLYSSTSMTSI

SEQ ID NO: 355291 - protein, 90 aa, Zea mays
  Clone ID: MRT4577_87193C.1.pep
GRDGTLHSAAAREALRERKWAALSEKADQQRQSNGNGVADAPAQITPMPRVDENDAATEDNSKRLDSLKLQDGRPSLHERDNSVGSARSR

SEQ ID NO: 355292 - protein, 76 aa, Zea mays
  Clone ID: MRT4577_87194C.1.pep
FDKLLLVRTVLILLVGSSDVVFRWGPPSYGLCLLPFASQPRVFGGLIIQRVVAALASFSLFFFLPLIHPSMLSLGE

SEQ ID NO: 355293 - protein, 48 aa, Zea mays
  Clone ID: MRT4577_87195C.1.pep
GKVPQDDPFNPGRGFFFCPLWPLKNQEKVQFHKPSFSRSFNGIKKNAR

SEQ ID NO: 355294 - protein, 47 aa, Zea mays
  Clone ID: MRT4577_87196C.1.pep
SGRIYFFFFLCFIFLFFWFFLVVSIYLVWYYIGYMEKLMGNCIKKWK

SEQ ID NO: 355295 - protein, 56 aa, Zea mays
  Clone ID: MRT4577_87197C.1.pep
NCQVVKDHLHLNLIPTPSYRFTTCPKTTPTSMILLLTPIFKFKTNNSQMTPISYFI

SEQ ID NO: 355296 - protein, 40 aa, Zea mays
  Clone ID: MRT4577_87198C.1.pep
WSCPCPYVSLRSLVVRSVPICDYGQHSITPLMLSAMCTIV

SEQ ID NO: 355297 - protein, 146 aa, Zea mays
  Clone ID: MRT4577_87199C.1.pep
MVVEEIAEGVKNLTVTGDAAASGGEGQRRGGGGSSNRIQVSNTKKPLFFYVNLAKRYMQQHGDVELSALGMAIATVVTVAEILKNNGFAVEKKIRTSTVEINDESRGRPFQKAKIEIILGKSDKFDELMAAAAEERGEVEDGEEQA

SEQ ID NO: 355298 - protein, 60 aa, Zea mays
  Clone ID: MRT4577_8719C.1.pep
CDNFFSHSKHELFSLIKVSELKTSYQGKPSDVHAKNWLGQRIWMQTLEIELLELIYENYV

SEQ ID NO: 355299 - protein, 78 aa, Zea mays
  Clone ID: MRT4577_871C.1.pep
KTIHRWRTSFYSPKALHRVREFVRSCAVCQRNKTQHLHPAGLLQPLPIPSMVWADISMDFIEGFPKVGGKSVVLTIVD

SEQ ID NO: 355300 - protein, 85 aa, Zea mays
  Clone ID: MRT4577_87200C.1.pep
RHSGYHCLDRTNEHMSSYGLSCLEARELEHLGLADAHKSILNNPVLDNLMPLYEFLFDSSLLHFGVFAFHNKILFDLRVQWNATT

SEQ ID NO: 355301 - protein, 27 aa, Zea mays
  Clone ID: MRT4577_87201C.1.pep
GALPPVPFKAWKLFIFGRQAQPLGEYY

SEQ ID NO: 355302 - protein, 60 aa, Zea mays
  Clone ID: MRT4577_87202C.1.pep
LLIPPPPRSHQSFPGIYYCSDPTTQLNTGSWRYITTIGNNNNNKERQGDFYALLLHQRGR

SEQ ID NO: 355303 - protein, 43 aa, Zea mays
  Clone ID: MRT4577_87203C.1.pep
RLCVCDIQLPLVCVVRFDCIIYSLSRTFFIVSPVSYSLIGAIY

SEQ ID NO: 355304 - protein, 243 aa, Zea mays
  Clone ID: MRT4577_87204C.1.pep
MAPQTATRVASGRLVFGAPTTTDGKLVKGGSRLRVRSLDNNGRRVAVEAVNGAARPNGAAAVADVRQVPAPPPPEGDGDGVAFRLGKFAEGRLVYRQQFVVRSYEIGPDRTATMETLMNLLQETALNHVMCSGLAGDGFGATRQMSLRKLIWVVTRINIQVDEYSRWGDVVEIDTWVASSGKNGMRRDWIIRDRNTKNMIARATSNWVMMNRETRRLSKIPDEVRQEVLPFYLDRSIIAAATG

SEQ ID NO: 355305 - protein, 95 aa, Zea mays
  Clone ID: MRT4577_87205C.1.pep
AKGGGIFGTIIGGGGARFIQQVYRPLKSIFPGKKKMRAPTPKITLNRPLGFSNTHKITLNRPLWFFNGGAYKNKILLGGGGPGWAHFHDDGGPCP

SEQ ID NO: 355306 - protein, 106 aa, Zea mays
  unsure (1)..(106): unsure at all Xaa locations
  Clone ID: MRT4577_87206C.1.pep
MASVPAPATTTAAVIVCLCVVLSCAAADDPNLTDYLIHGRVYCDTCRAGFVTNVTEYISGAMVRLECKHFCTGNLERASDGVIDATGNXTIHLIDSHDDDICQVVL

SEQ ID NO: 355307 - protein, 86 aa, Zea mays
  Clone ID: MRT4577_87207C.1.pep
WYLFIFSFLQQDYFHLAHDRYHLIYIFSSCIANFISLFLLFYFFFFIFLFFIFLFFYLILLFVLFFYFYFFFFTFFLFYFFYLFFF

SEQ ID NO: 355308 - protein, 164 aa, Zea mays
  unsure (1)..(164): unsure at all Xaa locations
  Clone ID: MRT4577_87208C.1.pep
GCITAIIRSPLPTRTDCKLPRTQDPWPWAPPPSQRLCPWRRVSGSPSAPAGTRHRSKEYREPPAVALLEPGXELKSWCFYRSGIAEGVGTFLLLYICILSVMRVCKXSPSRCATRXIQGIACPFGGMIFALDYWTAGISGXHINPAATFGLLLERKLSLTREEL

SEQ ID NO: 355309 - protein, 66 aa, Zea mays
  Clone ID: MRT4577_87209C.1.pep
KVSSCKIVCLGLQQRAHELLFHQAWGQFFLEKMHLAGVCPGGQSKIRPFLVPVPGPQEREKWRGCC

SEQ ID NO: 355310 - protein, 37 aa, Zea mays
  Clone ID: MRT4577_8720C.1.pep
HHLLVSNLTTFATATNHKTYNSLLLKVNQIRSVTNSI

SEQ ID NO: 355311 - protein, 113 aa, Zea mays
  Clone ID: MRT4577_87210C.1.pep
MADPLVRARPKRKKVLADYLVRLRWIPALFVALPISALIYLSVFLVNTWSAMKSEKRRQKEHQENVERVVKRLKERDPKRDVSASLGWVSTRESVSTSSSTEEAAVRTSRRKM

SEQ ID NO: 355312 - protein, 72 aa, Zea mays
  Clone ID: MRT4577_87211C.1.pep
LLFFECRRCRSCWEEHSETTRPITGFLEHDYLTCDRRISDLWTVGVSPHSTHLMVAYVRELEHVNVFKLASD

SEQ ID NO: 355313 - protein, 85 aa, Zea mays
  Clone ID: MRT4577_87212C.1.pep
FYLMFIAAFIQFRFICKVSPCHEPSWLADNLRVGLGLTILTVFPCQCCWESDQGDQSAPVLMISPRDPVALERRGKEGTGWHEMS

SEQ ID NO: 355314 - protein, 144 aa, Zea mays
  Clone ID: MRT4577_87213C.1.pep
VYNEQNSVIIYSTRAVMLMQQHEKWLVLAILALVCARSSYRMYCILEDLEQIRAPSSQMEHWSVMRSDQMRGRNAMPFGSIQLGIGLFLAGGWLPCTPSSQSQISVRLRGPAGPGSPQICVGYRRQFGLAGSGCPARPCSCLSG

SEQ ID NO: 355315 - protein, 50 aa, Zea mays
  Clone ID: MRT4577_87214C.1.pep
CLRMQLSRRVSEWFGFFSILTAHSELTWDSCVYTCSMPQQSIRYLDALKR

SEQ ID NO: 355316 - protein, 110 aa, Zea mays
  unsure (1)..(110): unsure at all Xaa locations
  Clone ID: MRT4577_87215C.1.pep
TQIPPVVLRRLANAGALQTTPPGRQGANISLRHDELPGRGRAPLGRSTARTPKGARRVLQLVVFNQRSDTPLPGHAVRIGAAGELPTESCLCLGXPVLPQDLKHQPRAEL

SEQ ID NO: 355317 - protein, 124 aa, Zea mays
  Clone ID: MRT4577_87216C.1.pep
MASASLPLLVIVLLVSVVGACTRAAEAAATRRKDDVITTTTSSSRGSSSPSSSPSPGAAAEKKEKPKGGGGATSAKKPSPPAKCVTSKDCHLKRLVCAKKCTMAAHNKCAAKCSHSCNALPICT

SEQ ID NO: 355318 - protein, 86 aa, Zea mays
  Clone ID: MRT4577_87217C.1.pep
LRTVQLARQSHHAPPCQSHGVPDDPGVNVRAPAKSPHRVRRAAPGHLPSAREAPWPATAPPQGQRPGRSLGRDRVSSVGPARAGPD

SEQ ID NO: 355319 - protein, 588 aa, Zea mays
  Clone ID: MRT4577_87218C.1.pep
MASLVPGVLLKLLQHMNSDVKVAGEHRSSLLQVVSIVPALAGSDLFTNQGFYLKVSDSSHATYVSLPDEQHDLILSDVIQLGQFVHVDRLEAATPVPILRGVRPVPGRHACVGSPEDLVVTSSSTFLLGSGKAAQASSTNGSSKDAGALSLEKEQGRLEKINAPPKSNGTESKKPQLTKSNSNLSKQALNGLLSDKKDVVSSKAKSTSARSTPSSPTSAHSLPASFDKFSSDMKQRVRTKGAEKSPPSRLSLLEKAASVLKATTAGRKSSLGNSISNTLLSFESGPKALRRSWEGKADAKDKGNSDSKPAKAEKKSENRSSSTPRRKSLAEEKPSNKDDSKILTPPRKSSASAPADDSDKVVNNKLSSPIRRTSGVLNNPNVTNLVKVAASNRKLTDASASWTTLPPSLAKLGKELLKYRDAAQMAAVEAMQEASAAESIVRCLSSYAEVSSSAEEQNPQQAVEQFLALHGAISRATIVTESLTKATTTVSTATSPDQSAAGDASTADEETMAVAAERRRRAASWVGAGLATDLSAFSLYNLKPAPASVISPLAVVLVDESAKPAAAKAVPPAKSRLSPAKGRLKAGS

SEQ ID NO: 355320 - protein, 69 aa, Zea mays
  Clone ID: MRT4577_87219C.1.pep
AYLDKGFREFRQSPACSLGPSPARARLRRVSWRSWRPGKMDGVRGPRGTAFANEGLLNAAGYVMEHEPL

SEQ ID NO: 355321 - protein, 122 aa, Zea mays
  Clone ID: MRT4577_8721C.1.pep
SGDRAMETKKKKHPEEHLARRRSTYRWIGDVGSSDYVENCPVQRLLLPNATTFDVGGASSTTVDATSSSAVSMNGGGGGFYVDGGSGGGGRGGSGSVGAAGEERRRGDASRLDRDGERKETA

SEQ ID NO: 355322 - protein, 56 aa, Zea mays
  Clone ID: MRT4577_87220C.1.pep
HIPKNHQHFLYITDPNQGGDYLHNYPPQILISNPPHLLNQTSLPSDSHTSDFSIIA

SEQ ID NO: 355323 - protein, 181 aa, Zea mays
  Clone ID: MRT4577_87221C.1.pep
MDCGHHGVVPRPEHQAPPNCCATEVPQSPTLSSEEFLQFKRKATTIVEEYFSTDDVAATANELRELRVPCYHFYFVKKLVSVAMDRHDREKEKAAVLLSSLYGDVVDRPQLCKAFCKLTESCDDLSVDTPDAVDILAVFVARAVVDDMLPPAFLATQSARLPHGCKGAKVLRRAEKSYLSV

SEQ ID NO: 355324 - protein, 67 aa, Zea mays
  Clone ID: MRT4577_87222C.1.pep
PINPPPPTSKPIFYFQHSLNTGAHNYGLVHNQQTNLKTYSPKLTIFNIKTLTQNTPYILYNIIFPHL

SEQ ID NO: 355325 - protein, 39 aa, Zea mays
  Clone ID: MRT4577_87223C.1.pep
DAVRLPQGDVDVRDMQCDSVTICTTQRTCNRANFASTGP

SEQ ID NO: 355326 - protein, 179 aa, Zea mays
  unsure (1)..(179): unsure at all Xaa locations
  Clone ID: MRT4577_87224C.1.pep
PVAPPRTIPSALLRRRSPHRAGPRADRSRRLGTGKDVLDCIRSLVFKQQTSLSLIGLQDAANTSLANSIATTGSKEAMIPTDGSTTKKDTLGDATISVCDVGGQPGFRQMRDTYCRAGSASVHDVDTEHRENVXLHRESSSDLLXQPSMAVIPXLLHIGNQNDKPDAIPKRTVSHTICD

SEQ ID NO: 355327 - protein, 192 aa, Zea mays
  unsure (1)..(192): unsure at all Xaa locations
  Clone ID: MRT4577_87225C.1.pep
YTLAPYYRLGGGDPAILALLALSAXSAGTXTYXIPQCSQHYSAFRVTARGXQYPPIQXYMXEGGVQTTILRTLALTLEQPYALLQHPYLMHLHIQRTXAQQLQQHIVPTINXNLXANLTVYLXQQQIFSFNKLSVVNPDIYLQAQHILXFNQLVXSTNAFLLXNIFSTSHIESMSNIXVFXLRQQHXLTFYP

SEQ ID NO: 355328 - protein, 180 aa, Zea mays
  Clone ID: MRT4577_87226C.1.pep
ATGRVQTTPLLQSPQNPTFYYVHFTGLTVGARRLRIPESAFALRPDGSGGVIVDSGTALTLLPAAVLAEVVRAFRQQLRLPFANGGNPEDGVCFLVPAAWRRSSSTSQMPVPRMVLHFQGADLDLPRRNYILDDHRRGRLCLLLADSGDDGSTIGNLVQQDMRVLYDLEAETLSIAPARC

SEQ ID NO: 355329 - protein, 56 aa, Zea mays
  Clone ID: MRT4577_87227C.1.pep
DPLLAGVPSLLTMAVGAPGDLSGDVISGDVLQNCCNKHTDVMHLFYSRSSIYGPVV

SEQ ID NO: 355330 - protein, 45 aa, Zea mays
  Clone ID: MRT4577_87228C.1.pep
WANRVHFNYAAPITTLLHKEKIMGRFATPENSPGGGKIHHTRTGA

SEQ ID NO: 355331 - protein, 99 aa, Zea mays
  Clone ID: MRT4577_87229C.1.pep
MLLLLLGLLSPAAYGAPGPAPGSAELRSDFSAARTTPLEGTSEMAVTFDKVYVNVGGDFDPATGQFRCRVPGAYFLSFTAGKAPHKSLSVMLVRNRYEV

SEQ ID NO: 355332 - protein, 62 aa, Zea mays
  Clone ID: MRT4577_8722C.1.pep
PAVRLTATGGARCSCLSHLLLSVFQCQAVTYWFQSIRFAVLFSFPVDVEHWRYIYYLFFGRI

SEQ ID NO: 355333 - protein, 528 aa, Zea mays
  unsure (1)..(528): unsure at all Xaa locations
  Clone ID: MRT4577_87230C.1.pep
MPPTATEATSSSATSATSSTDADAPGPTSPSPSRRAAPTLLLVAFLAALLILSTGDDATAQPLNGVSLQNPEVSFVPSPLAGQFCERVLLSGVPRLHLDSYASQIRVKMNVSQSIPEKFHWKIEVCFHRNASMGLCQCEAGEWQGFQGGMWTAVSSPYGNKYVDLKLADKKPARFTLSIQEEFQKWRLACLGIGFVLLFLSPIISKWVPFYYSSSMALGILAVVLIVIFQGMKLLPMGRKSLFYLAIYGSVLGVGSYAVHYFSTLVSSILENFGLSEELYNPVSIFLLVAIVLTGAGFGYWMVRRFILSKDGSVDAGIAQFVKWAMRVVATFFIMQSTLDPLLALVALAFSWWLCSLLTTKKVQKTMTQKQKQSKVXSANAYSRIAHGXKIQFLSPSKTGFGGTTSRTSATQYGRSNLANRGMVCSALAKRAVPNEDEDHYSTFHNIQPRKYTKQEWEDFTQESTRKALAECTATPEFAQWVGDNARRLQVEKEEDNLSEEEIMESSSSSEETGDEADGAPGLIRLWG

SEQ ID NO: 355334 - protein, 75 aa, Zea mays
  Clone ID: MRT4577_87231C.1.pep
GSRLSLEMPALLRHQPRQRSQTGRLSDIEDGNIRRRLQCKHIPQLYRNQRVDPITGRWLAEINLRYGRHKNVTKL

SEQ ID NO: 355335 - protein, 78 aa, Zea mays
  Clone ID: MRT4577_87232C.1.pep
SDHCQWRLCSGLSCIYGTTMLIITICHWRASPSAIARLAKRCLFSIFSNYLAIIPCWTLNVVAPFMPTSSTQTLKPSI

SEQ ID NO: 355336 - protein, 432 aa, Zea mays
  Clone ID: MRT4577_87233C.1.pep
MESMAQERDALDSPALSIDKRLRSDAVESPLVDDATQPKEGADGYPVKVRKPYTITKQREKWTEEEHGKFLEALKLYGRSWRQIQEHIGTKTAVQIRSHAQKFFSKVVREPGASNSIEIPPPRPKRKPLHPYPRKCADSTVTNAPMGEPKNAPVSSPSGSDQENGSPVSVLSAMQSDAFGSSISNPSTGGTSPASSDDGNNVPEIVNGEENLLTQQIEDRSHQESKQDNSDGELSEEDSSRVQETSLKLFGKTVIIPDPKKVCSSDGGAGDDTQEVMQTSWVGGGVAAYPAHNGWFLPFHSFPAHMYESGDARISPLHMWWPYYGFPAGHPRGFGTGLLNEGAIESDADNSPSVETNSDRTGNVHVQTTTPTIHNNAVKESVGPVEMPESGPSIELKPSANSAFVRVKPSSSVSGDQSLVRGFVPYKRCKVE

SEQ ID NO: 355337 - protein, 433 aa, Zea mays
  Clone ID: MRT4577_87234C.1.pep
MGSRVKEDERNEKIIRGLLKLPGNRRCINCNSLGPQYVCTSFSTFICTNCSGIHREFSHRVKSVSMAKFTSQEVSALQEGGNERAKEIYFKHWDLQGPVIDSSDVHRLRNFIKNVYVERRYSDQRIGEHLAQAKKPSSSRTDDPSPATFKDAKLYMSKNLIDFDSDLEPPQGVAQTDIQKGSSPQTDVGWATFDDATSKKTTTMPSTSSTNFLEGPMLQIADLTSAPQIRFSNAKSLSFAPSNRGNQLNQQNFSPVNTTQYSNTLLNRATSAPVHSQDIFAMSYRPVSSAWNWQPNPSVNMQYGQHRTHYPVGIVNTTQLAHPYPVNPVSLAGGPASAHASTRFPSLTSMQEALPNLGSTAVLSRAPVHQYMVQQHTVQVPNYTFPSGYEGTRGIAATASTYGLPPMDQRLAAQNLQVMNHGSLPRVGGNPFA

SEQ ID NO: 355338 - protein, 61 aa, Zea mays
  Clone ID: MRT4577_87235C.1.pep
ESRQAKMYYIINSSSSTRGSRLLYLIFQYHCLPVAPACGEGRGIPGVRPAFSVRWLASAAP

SEQ ID NO: 355339 - protein, 46 aa, Zea mays
  Clone ID: MRT4577_87236C.1.pep
ELTGSYRLRAGYVITLSFFNTETKHYKYIRTASLYYVGLCIPYYSC

SEQ ID NO: 355340 - protein, 55 aa, Zea mays
  Clone ID: MRT4577_87237C.1.pep
NPWRPGFRPDAILETVVMIYSRSMNKRLRMTLLEIPSSALAIYSGYVMYGKGCHL

SEQ ID NO: 355341 - protein, 143 aa, Zea mays
  Clone ID: MRT4577_87238C.1.pep
TDSSQHPSCSSSSRYVNLEHCIALPPRSVVPWWRTMYADTSSPVDWLPSTNGTTFLVSGMVDSPPAPWVTLTLVAHQHLVLSSCFSSGRIGTPKTVVKTYPGGVTCAMSPSRDFSRQHGEVVLQSSHVRRWLWFGRSRRWCPR

SEQ ID NO: 355342 - protein, 58 aa, Zea mays
  Clone ID: MRT4577_87239C.1.pep
LTGAPHMATNMTGLNYVTPPSDRTKAPSREASFAKHVGADSDPATAKHSFTLHNNSEV

SEQ ID NO: 355343 - protein, 75 aa, Zea mays
  unsure (1)..(75): unsure at all Xaa locations
  Clone ID: MRT4577_8723C.1.pep
GTNVERLGSDPGTFVNHCLPYSVLYLIGNXFFGWNCLAPWFSYPTRTAIRRKFNLEGSCEALHRSCGCCGSCVKE

SEQ ID NO: 355344 - protein, 98 aa, Zea mays
  Clone ID: MRT4577_87240C.1.pep
HYHVLDCVRSDYHLFGVAGQHHRPPRLTLKPDPLGLPQPLIAENNNAHLAQLRTPNRAIRWTRHWWTKRMHTTPMHPTIMISTAGQESSGLLLNKHLL

SEQ ID NO: 355345 - protein, 39 aa, Zea mays
  Clone ID: MRT4577_87241C.1.pep
RTNFAALGSQDDLSLDRATRGSRPLYRTRGSTGAPTFLI

SEQ ID NO: 355346 - protein, 43 aa, Zea mays
  Clone ID: MRT4577_87242C.1.pep
WFNETASGRTVGFCNAFDQAGRDRCETRHCLNCTSLLGGPYQR

SEQ ID NO: 355347 - protein, 39 aa, Zea mays
  Clone ID: MRT4577_87243C.1.pep
CLGGATRGVSCCCLFACAGMEFSCAFLNETSHLFRCLRG

SEQ ID NO: 355348 - protein, 37 aa, Zea mays
  Clone ID: MRT4577_87244C.1.pep
SQAEPAHVSLVDKVFGPPDPHVAFKNNSISPFVRTRG

SEQ ID NO: 355349 - protein, 182 aa, Zea mays
  unsure (1)..(182): unsure at all Xaa locations
  Clone ID: MRT4577_87245C.1.pep
STAAAATRRGRGSCQADRSTQNGDQGRVAACRRRRGARACTGLSAAAAAAAPAAAAPPPATAAAASAPXQPPPPPFPQQAAPAAASSPAASMPGGMRLSFDHMPGKAPGEQHHHHHHAAPPMLYAAPPQGAGAPGGSVLGMGELMRKKRGRARKDPPDGSMGLALAPIFSPRPAGGGGPEPP

SEQ ID NO: 355350 - protein, 51 aa, Zea mays
  Clone ID: MRT4577_87246C.1.pep
IIWFTGNMMKKPNKYSYPVGKRLLQALAIIAYTSTMVTLGSQVLIDSGRQL

SEQ ID NO: 355351 - protein, 58 aa, Zea mays
  Clone ID: MRT4577_87247C.1.pep
MNDASGGGLKLASGFRFHPSDFEIVRFYLNNKVLNTRFNWTGITEGDLNKIEPLDLPS

SEQ ID NO: 355352 - protein, 105 aa, Zea mays
  Clone ID: MRT4577_87248C.1.pep
ALFFFLVTTSSHSSTREQPKNASYARIYIHRYCTWCIARNQRHHVDGDWRRRPVAFIGRMLIASLLQELPLPTWRLLLSIVGLNLRQFLFDGRHSGLTQLKDRLL

SEQ ID NO: 355353 - protein, 87 aa, Zea mays
  Clone ID: MRT4577_87249C.1.pep
EIEALNAKIRHGAIGARRRVRQNVGHGARRHRLASVHGASATFALPGESSRGGEKVSRGSVGGRRAWPSVERRRRCVDLPRLRALII

SEQ ID NO: 355354 - protein, 34 aa, Zea mays
  Clone ID: MRT4577_8724C.1.pep
CHIYSVVLSLSTCVAPPCIEPARPCLIDTMKKNH

SEQ ID NO: 355355 - protein, 90 aa, Zea mays
  unsure (1)..(90): unsure at all Xaa locations
  Clone ID: MRT4577_87250C.1.pep
MCSSMGIGYLPATTEALXQAQEGXASXAISILYRVIQDPSSSAWALRTKEGAITNLTNYLTKENRAEEXRNLLTXLXPFFAGIPKGKTGK

SEQ ID NO: 355356 - protein, 134 aa, Zea mays
  unsure (1)..(134): unsure at all Xaa locations
  Clone ID: MRT4577_87251C.1.pep
MGASTTPLAGGGGLLLLLLPPLAAGGDSMWIVSYREPTQEEARGGGPXWMAAHGPTYNAVGEGERMGQGCRGNLRVRDAHNAAADAGVHSFRLGGGRXPDLTNDEDRATYLGGRSTPDRERRLGDQGLARGQRG

SEQ ID NO: 355357 - protein, 81 aa, Zea mays
  Clone ID: MRT4577_87252C.1.pep
KRKGIILFPVAEALEEEKRVLRPAALDGWIRGGANIAAGPLARGVADAVGGGAFRPYLDAQGPLAPRQATKKSSGWLVVLG

SEQ ID NO: 355358 - protein, 163 aa, Zea mays
  unsure (1)..(163): unsure at all Xaa locations
  Clone ID: MRT4577_87253C.1.pep
MGFPSVCYCVILPQPLILVLQLLDFLRHAVLLCLSSLGLAAPPAADDHAAYXPTRRPWRRRPXAAIKARLPAVRYADLLGARRAPPGPAVCAVCLGALQARHRVRELGNCAHAFHKACIDKWVDKGQATCPLCRAFLLPGLSAGDGDGDGDGELASSSFPFSF

SEQ ID NO: 355359 - protein, 370 aa, Zea mays
  unsure (1)..(370): unsure at all Xaa locations
  Clone ID: MRT4577_87254C.1.pep
LGPSRPAGKKLPARLRSLDLEAIGSQVGAPCGLCLFNTSCFTDSGFPLPQITDMEISKEADPSEFVKPILPILEQNGVVHFLGFGNRLGFDSVPVHLQRLRCRCNFHALKFVPELQRAGSVLVQRLRQVGGMQTEIDKQLFGNNMLDQAFAEQDDGAGTGTPNRYLALHMRFEEDMVAYSLCEFGGGEEERRELQAYRETHFPTLALRSRNTTVSPEEQRXLGXXXLTPXXXGLVLSALGYDRRTXIYXAGSQIYGGAPRLXPLTRLYPNLVTKEDTLTADELXPFKNFSSRXAALDFIACASADVFAVTDSGSQLSSLVSGYAXYHGRGRAPTLHPNRKRYARVLSEEGSIAXGXFQKRVRQMVDEYKR

SEQ ID NO: 355360 - protein, 75 aa, Zea mays
  Clone ID: MRT4577_87255C.1.pep
MGFPSVCYCVILPQPLILVLQLLDFLRHAVLLCLSSLGLAACVVRVRTSLQPGGRLGGRARSVAKPPTYLLHYSC

SEQ ID NO: 355361 - protein, 64 aa, Zea mays
  Clone ID: MRT4577_87256C.1.pep
FPSPGCRVIISWRRGHIQGVFFFPLLHSIVSMWISASCGHLFVIMPSSENLICPHFITPLHRVV

SEQ ID NO: 355362 - protein, 189 aa, Zea mays
  Clone ID: MRT4577_87257C.1.pep
MGFPSVCYCVILPQPLILVLQLLDFLRHAVLLCLSSLGLAAPPAADDHPAYAYAAPPPPPSDLWALQPSSLQQQQQQAAAAALAPPPTPAAIKARLPAVRYADLLGARRAPPGPAVCAVCLGALQARHRVRELGNCAHAFHKACIDKWVDKGQATCPLCRAFLLPGLSAGDGDGDGDGELASSSFPFSF

SEQ ID NO: 355363 - protein, 178 aa, Zea mays
  unsure (1)..(178): unsure at all Xaa locations
  Clone ID: MRT4577_87258C.1.pep
PPSSASSPASRAGASTSPSXRAASSRTTPPSAASTCTYCRWTPPNSRERTRSSSGGRPCAAPSTSSAPSSLTPRRASRPSSPTSXPDXASSPSPRSWTSRATSSSPQPPPCSRSTPTTPSISRSSRXTGAGXSATSSTSPACSTSRAPPSXRXSSXEXSSRSSSSTTAERSSKPTASS

SEQ ID NO: 355364 - protein, 96 aa, Zea mays
  Clone ID: MRT4577_87259C.1.pep
GKRGRRGHHPRSTQQARVHARQRRTPPTSALHQSQRLLHRRVRHFQYSRSRSFLVCERADSRDQRGCREHRGLVHGHRLRERIRTQLLTRSVRYGV

SEQ ID NO: 355365 - protein, 95 aa, Zea mays
  Clone ID: MRT4577_8725C.1.pep
MDVNVRTMATTMPAHVAIAIVLEFLVSGAWCGPPKVPPCKNITDTYGTDWMDAKARSDDKSTDVGPDDNGDGCGYKDVDKPPFNRMGAYGNIPIF

SEQ ID NO: 355366 - protein, 73 aa, Zea mays
  Clone ID: MRT4577_87260C.1.pep
MKSCCVGHDRKKKKKKKKKKKKKKKKKKKKKKKKKKKKKKKKKKKKKRGGRFKESKLTNPGLQGKIFFIGPPK

SEQ ID NO: 355367 - protein, 77 aa, Zea mays
  Clone ID: MRT4577_87261C.1.pep
CCCKSRLLPILPAEPIYVSIAKKKKKKKKKKKKKKKKKKKKKKKKKKKKKKKKKKKRGGPFKKTKFNYPGIEKKKFF

SEQ ID NO: 355368 - protein, 34 aa, Zea mays
  Clone ID: MRT4577_87262C.1.pep
LQNHTSVAPYAPGRRTQHVRVHKAAKSHDECHST

SEQ ID NO: 355369 - protein, 51 aa, Zea mays
  Clone ID: MRT4577_87263C.1.pep
HAVRKKKKKKKKKKKKKKKKKKKKKKKKKKKKKKKKKKKKKKKKKKRGGPF

SEQ ID NO: 355370 - protein, 68 aa, Zea mays
  Clone ID: MRT4577_87264C.1.pep
HAVRKKKKKKKKKKRKKKKKKKKKKKKKKKKKKKKKKKKKKKKKKKGGALLKRTQFYFPVLANVKFFF

SEQ ID NO: 355371 - protein, 60 aa, Zea mays
  Clone ID: MRT4577_87265C.1.pep
KTALSTSIQYILQVLFQKKKKKKKKKKKKKKKKKKKKKKKKKKKKKKKKKGRPFKKTKFN

SEQ ID NO: 355372 - protein, 70 aa, Zea mays
  Clone ID: MRT4577_87266C.1.pep
FRPLALSTPESHNNPIDTMRVLLVALCLLALVSCVSFIHTSAGIQCQAAVVIHRRLFIYRLRCILSPSFH

SEQ ID NO: 355373 - protein, 68 aa, Zea mays
  Clone ID: MRT4577_87267C.1.pep
PTRPPTRPPTRPPTRPPTRPVQFIRCFTALKKKKKKKKKKKKKKKKKKKKKKKKKKKKKKKKKKGGPF

SEQ ID NO: 355374 - protein, 60 aa, Zea mays
  Clone ID: MRT4577_87268C.1.pep
RSLLCQKKKKKKKKKKKKKKKKKKKKKKKKKKKKKKKKKKKKKKKKKKKKKGGAVLKNQI

SEQ ID NO: 355375 - protein, 219 aa, Zea mays
  unsure (1)..(219): unsure at all Xaa locations
  Clone ID: MRT4577_87269C.1.pep
MASSALPSRTLHRRALPSSTPCHPATETFAPGAVSRRRAAVRLLSAGFLTAVAPPPSLAARRGRVVVPPEDYATAPDGLKYYDLVEGKGATAEKGSTVLVHFDCIYRGITAVSSRESKLLAGNRSIAQXPYEFIVGSLPGKERKRDFADNANGLYSAQAAPKPPAAMYTITEGMKVGGKRRVIVPPELGYGKRGMSEIPPDAPFELDIELLEAVSPAKE

SEQ ID NO: 355376 - protein, 54 aa, Zea mays
  Clone ID: MRT4577_8726C.1.pep
ADRYFSAELVPNTATLGCMARTVLPKGTQAAFGGEMPMPRASANKHINQPKVPS

SEQ ID NO: 355377 - protein, 138 aa, Zea mays
  Clone ID: MRT4577_87270C.1.pep
GPPLIPVNSPTREGTERITFSSHVTSLVYLSPFAFDIGTVDCVAGVAVVVFCFANLRIIGTFRGKKKKKKKKKKKKKKKKKKKKKKKKKKKKKKKKKKKKKKKKKGGAPFKEPNFTTPGLQRKTFFMGPPNLNSWPGF

SEQ ID NO: 355378 - protein, 142 aa, Zea mays
  Clone ID: MRT4577_87271C.1.pep
APSGPSIHSISLASSALPSRTLHRRALPSSTPCHPATETFAPGAVSRRRAAVRLLSAGFLTAVAPPPSLAARRGRVVVPPEDYATAPDGLKYYDLVEGKGPTAEKGSTVLVHFDCIYRGITAVSSRESKLLAGNRSIAQVSR

SEQ ID NO: 355379 - protein, 123 aa, Zea mays
  unsure (1)..(123): unsure at all Xaa locations
  Clone ID: MRT4577_87272C.1.pep
LGIDLWPRKRRLFXKNAAFGFKTSVGFGGYLGVMGSPKNVVPAVWKTGFHGDWYKGIRCFRQTCAFGHPGAPNQTNKREAWWISRWTHACPMCGGSWVKIVLALFLATTSLLIAFLPNMYGVP

SEQ ID NO: 355380 - protein, 95 aa, Zea mays
  unsure (1)..(95): unsure at all Xaa locations
  Clone ID: MRT4577_87273C.1.pep
NGLYSAQGAPKPPAAMYTITEGMKVGGKXVSNSAFLPLVYYYTANSIFVVLLVMQRRVIVPPELGYGKRGMSEIPPDAPFELDIELLEAVSPAKE

SEQ ID NO: 355381 - protein, 153 aa, Zea mays
  unsure (1)..(153): unsure at all Xaa locations
  Clone ID: MRT4577_87274C.1.pep
MAPLQRLRRPMSCNLSRRVTELIHAGSDKNSETLKFNTADDISPXAAQAHPYXQDSPQQDGNLNPLKSRAIRMLDHRICEFLMMTKRKHQDARVADVXLHVQANHDTAAPYHILFPVLIMAMPGVTTDQKGVKEILVLMKKVLDTYKVHTDQW

SEQ ID NO: 355382 - protein, 38 aa, Zea mays
  Clone ID: MRT4577_87275C.1.pep
AVAALCVQYESDFRPNMTIVVKALQPLVKAAAATAGGA

SEQ ID NO: 355383 - protein, 94 aa, Zea mays
  Clone ID: MRT4577_87276C.1.pep
LGEKTKYRGYSNLGLEYNPRKYKAHSNLGSKYTINTKLLERSREEEIASVQIWNVGHFKDLQQLACNRRQTKLIDSRSRCRAPFNPNSGQRGRK

SEQ ID NO: 355384 - protein, 76 aa, Zea mays
  unsure (1)..(76): unsure at all Xaa locations
  Clone ID: MRT4577_87277C.1.pep
PRVGCETCTKTNMVMVVGDITTKATVGYENIVRDTCCEIAVTSXDYVGLYADRCNVLVNIDHQSSDIAQGVHWHFT

SEQ ID NO: 355385 - protein, 41 aa, Zea mays
  Clone ID: MRT4577_87278C.1.pep
NNHYSFTCHAQLQITIELQLLTHIASYICERSTWYVFICVT

SEQ ID NO: 355386 - protein, 90 aa, Zea mays
  Clone ID: MRT4577_87279C.1.pep
KGRPFIKNPPLMQATGYKFIIIGGGGGVNPTSMQFFGPLKQGGANEIELGDPSLLRPKGGKHNIPKISRGFLGHSTLQGDTGFFLKSPLF

SEQ ID NO: 355387 - protein, 132 aa, Zea mays
  Clone ID: MRT4577_8727C.1.pep
MPYARYTLPTEYKKAFCDFLREVKFPDGFASNISRCLNAEGTKLQGLKTHDRHILLQRILPVAMRGFLDKDIYEALADLGKFFRELCSRTLKKDVLAEMRKEIPIILVKLEKIFPPAFFDVMVHLAVHLPDE

SEQ ID NO: 355388 - protein, 68 aa, Zea mays
  unsure (1)..(68): unsure at all Xaa locations
  Clone ID: MRT4577_87280C.1.pep
WGRSGAGLAQGAAGHRKKSXSRSVKAVLQFPVGRIVRYLKNGRYSQCVCSGSRIYLDAVLEYLGDDDF

SEQ ID NO: 355389 - protein, 172 aa, Zea mays
  unsure (1)..(172): unsure at all Xaa locations
  Clone ID: MRT4577_87281C.1.pep
LNPAAAEPMVWPXPLRFISELSPEAKAXLEGALMXANREREKRITDTTTKTNNDGGLDDDDEQLCGICLEQACTMEVQDCGHQMCAACTLALCCHSKPNPTTLALQPPACPFCRATITRLLVANSKTTATSNSFRGLTSAIRSLSLSRIARGSGRVADSSLPQSFFEEQGSK

SEQ ID NO: 355390 - protein, 103 aa, Zea mays
  Clone ID: MRT4577_87282C.1.pep
KIFKPGGRKKFPPPLFSFLAKGSNEGKNLAPRIFLGGQKFFPPKAPNVSGALFFKHSLTNPNFLLGISPLFGGCCPVWFFCKKKLFALEKKIWKNLRAVLPFF

SEQ ID NO: 355391 - protein, 54 aa, Zea mays
  Clone ID: MRT4577_87283C.1.pep
HSSCTPITSHTRCKIARGITHSTGHIRRTRGLPTHLCASCNWPPNQILRKLTGA

SEQ ID NO: 355392 - protein, 43 aa, Zea mays
  Clone ID: MRT4577_87284C.1.pep
TTEGILITPRVECGRPVETRGGPPAPKKSYIKVFIIARSLRGG

SEQ ID NO: 355393 - protein, 134 aa, Zea mays
  unsure (1)..(134): unsure at all Xaa locations
  Clone ID: MRT4577_87285C.1.pep
LQLPLEDVPTCGPAPPTTSLSPTVTVPPAGAPARRRRRRPAGAGGLPSVAGLRGGRGAAGPRARVALRPVAPTAGAGPAVPPRPVPVRGADDFLHLVDAHGSFRDALVALAALQVEGPRRAAQGGAGPASRXPR

SEQ ID NO: 355394 - protein, 168 aa, Zea mays
  Clone ID: MRT4577_87286C.1.pep
EINVTRPTGSRAHQTNQPFTSSNTPLSGAFFAFINLLCLIVCFPSHLLCFQTTHELIMNARFVFCVLSLYAGTQLTMAAPLGMLGGLVGGSGGGGPMEMLGGIMGGRRYGRRESSSQEGGPMAMLSSLTGSGRASGEKSEGDSGKGEGHQGMLGSLMGGGGSSPLSMI

SEQ ID NO: 355395 - protein, 74 aa, Zea mays
  unsure (1)..(74): unsure at all Xaa locations
  Clone ID: MRT4577_87287C.1.pep
RLRYFAVEGVSHRHADLGRPAPQPPPRISWVSHPSETSIVHKALTIPTLEDDLVKGGGESXGNGESTPPGLEVP

SEQ ID NO: 355396 - protein, 81 aa, Zea mays
  unsure (1)..(81): unsure at all Xaa locations
  Clone ID: MRT4577_87288C.1.pep
FPPHLAFFPWQIVFSPHNFFFRGEGSSPPPSSVRGWFSCPXGSGARVFFFLKEAAVHLPFVFIKSGASVLARRLPKTFGPV

SEQ ID NO: 355397 - protein, 165 aa, Zea mays
  Clone ID: MRT4577_87289C.1.pep
CRPPVRDRMVENSLPSPDRPNRAARKFDAVVPWPDRADLWHDAPNFNSIGATQCSMLDEQDGWVLTPQFLVDYHGDGKRRIRKSGSSPAWNWANSKRPTHKDTSAQASPATVDLNQWQPGHGRQGTRPWRLISSLAELLDGGKFLGDLEHGEPAERPTPHHICVG

SEQ ID NO: 355398 - protein, 65 aa, Zea mays
  Clone ID: MRT4577_8728C.1.pep
GVSYSSSSSWSEQRSFKIPGSRKRHSAQSIQEQVGDPSGAGATRTNMVTFDGSGCAKKTNGSSSQ

SEQ ID NO: 355399 - protein, 75 aa, Zea mays
  Clone ID: MRT4577_87290C.1.pep
CSTNSCYNGTRILGPMVTRRCAPGPSQVNSLNCSNMDSCSDYLINALCLTKWVAQSLRENPWSYTEKPELWKVSK

SEQ ID NO: 355400 - protein, 34 aa, Zea mays
  Clone ID: MRT4577_87291C.1.pep
RYAWALIDAGKPMHHAAVSVSIYLRTFKEYILNI

SEQ ID NO: 355401 - protein, 50 aa, Zea mays
  Clone ID: MRT4577_87292C.1.pep
TFLHRRKSRMKFFYSTPQSNNRGELSTSRAGLNNTKPHHNKIEFINYNNH

SEQ ID NO: 355402 - protein, 37 aa, Zea mays
  Clone ID: MRT4577_87293C.1.pep
SWYSRKTGIRFMTCVSVVDLTCRIEKSASYDDVKPAI

SEQ ID NO: 355403 - protein, 50 aa, Zea mays
  Clone ID: MRT4577_87294C.1.pep
DLLFFIFFTFTMKSIEQPTTGFEDTYWEPYLFIYDLIQYSSVERASFYTK

SEQ ID NO: 355404 - protein, 72 aa, Zea mays
  Clone ID: MRT4577_87295C.1.pep
IYFHITTTPGTRNNTHSTKHTLPHLFRNNVIFHTIDFNFLHSTNIITELSYFHAELHTQPSELGFLLHSNSP

SEQ ID NO: 355405 - protein, 137 aa, Zea mays
  Clone ID: MRT4577_87296C.1.pep
VLVVPENAGHSPSVITILHSCICTRIILTNLSILVYDTFLIEKDDHMGDGKMERVDLDRSPSPQYDKSAPYSPAYNGKASDSMSPNVQPKADAKYVKPSGKPEPASPLRHSKGRDDDEGIIDDDGEIAEGEMMMKVS

SEQ ID NO: 355406 - protein, 480 aa, Zea mays
  Clone ID: MRT4577_87297C.1.pep
MGAIFDHHKQKVKHDKEPDGGIGGRLDKRKKKGKRRHADMLVAAAVQKGRNFSTEEAIDHFKKMLDAPCTNHRYPVPHAYKDYGLLKKLLSKDVSSGRSPEPGSDYYVSWRHRKLERREGRDADSRHSWVPRNLARHPWKTMLQNIHGRTQLHLPKSQNARSHRGMLLGFLVSEWGIEENPEKVATISNMGPIEDIKWIHWIMGCLASLSRFISCLGERVLPLCKLLWKATVSLGVFSTNLFELTTHYNQSRCEDGQSLNIDPPTHEPIPIIEGKNDLAYPAGCQYYAQQTHLLAQELQMIPITWSFVVLGLDLVGTLRKVPWGYTHVLVVVGMFTKWIEAWPITMITTDQDIKLITNIIHRFEALGANRCPLEPEDYPNHSTEYMPIFMAYGAKVILPTNLKYGAPRVKEYTDERNEPSLQDALDQLDEACDVALHGWHDTNIHYEGTKQQRSSHVVSNLGGAIHNWRSTMAGHLQLEG

SEQ ID NO: 355407 - protein, 125 aa, Zea mays
  unsure (1)..(125): unsure at all Xaa locations
  Clone ID: MRT4577_87298C.1.pep
CFPRCPGESPHKQCAAFXSHPPVVCASIQSKLFVPVPPXPSPPPLYTGPVPPVYPIRNASPPPRGHSDSFAAGEEQYHFPLKLSTAFALHKVPRRHCMWSVTVVITLVVFLVYSAWHIQVCYYEV

SEQ ID NO: 355408 - protein, 78 aa, Zea mays
  Clone ID: MRT4577_87299C.1.pep
AETRVSLFSLCRSYGIAPNAFVADLCYSIMSLQYHDIRKDIAAASRPMICTSHVQTSSRLAALNIKPRVPWASSTTCS

SEQ ID NO: 355409 - protein, 46 aa, Zea mays
  Clone ID: MRT4577_8729C.1.pep
RSLHCGKVMYLSAPFGPGGAGMDWLGWVVTQFGGGIFGPVYRLGWV

SEQ ID NO: 355410 - protein, 41 aa, Zea mays
  unsure (1)..(41): unsure at all Xaa locations
  Clone ID: MRT4577_872C.1.pep
AGRXFVFHLQSPEAHTPTIRHQSTERRSAPTAAPPRDTCQR

SEQ ID NO: 355411 - protein, 86 aa, Zea mays
  Clone ID: MRT4577_87300C.1.pep
MERSNIVLKPTISQQLMDSISPLNLDHGDFSENENSMLNTGDQMKLNEPVSENLNPLIPTDEKYLKSQTEECMPISYLEFKDDPSG

SEQ ID NO: 355412 - protein, 132 aa, Zea mays
  unsure (1)..(132): unsure at all Xaa locations
  Clone ID: MRT4577_87301C.1.pep
MVTPTLAPQGKRDPWGRKKRRTRPGGPPKGGGPAQGGAQPRGPRPXKPGGSPGKGGSRGKGVSGQNSTPHTNPKQKRKSPGGPKKGGTHKKWGGPTGPVPLRKTFRPGKLMKRPKPRERPPAGWGGFPLLGQ

SEQ ID NO: 355413 - protein, 473 aa, Zea mays
  Clone ID: MRT4577_87302C.1.pep
MAGAAAAAVASGVSARPAAPRRASAGRRARLSVVRAAISLEKGEKAYTVQKSEEIFNAAKELMPGGVNSPVRAFKSVGGQPVVFDSVKGSRMWDVDGNEYIDYVGSWGPAIIGHADDKVNAALIETLKKGTSFGAPCLLENVLAEMVISAVPSIEMVRFVNSGTEACMGALRLVRAFTGREKIIKFEGCYHGHADSFLVKAGSGVATLGLPDSPGVPKGATYETLTAPYNDVEAVKKLFEDNAGEIAAVFLEPVVGNAGFIPPQPGFLNALRDLTKQDGALLVFDEVMTGFRLSYGGAQEYFGITPDVTTLGKIIGGGLPVGAYGGRRDIMEMVAPAGPMYQAGTLSGNPLAMTAGIHTLKRLTEPGTYEYLDKITGELVRGILDVGAKAGHEMCGGHIRGMFGFFFTGGPVHNFGDAKKSDTEKFGRFYRGMLEEGVYFAPSQFEAGFTSLAHTSQDIEKTVEAAEKVLKRI

SEQ ID NO: 355414 - protein, 75 aa, Zea mays
  Clone ID: MRT4577_87303C.1.pep
GDEKWRARRAFLVRGYWRWAAAVAAAMSSVSESTTVSRWSELATLRALARDAVEQLLLSWSGTVAWASSLEARAL

SEQ ID NO: 355415 - protein, 67 aa, Zea mays
  Clone ID: MRT4577_87304C.1.pep
AREPPQEPPQSRARERRRRHVGQRDDSQHPEPSRRHRDRRHHTAMERIRRTVLFMAHDGLMRSCALA

SEQ ID NO: 355416 - protein, 45 aa, Zea mays
  Clone ID: MRT4577_87305C.1.pep
SKISCLSPSIFSFISPTREVLQYPTLTYLMMLFHSLTSTPISMFS

SEQ ID NO: 355417 - protein, 108 aa, Zea mays
  unsure (1)..(108): unsure at all Xaa locations
  Clone ID: MRT4577_87306C.1.pep
MVSFEMNDLKKIGLGLTGFGIFFSFLGIVFFFDKGLIAMGNILFLSGLGLTIGLKSTMQFFTKPKNYKXGFWPTLSVFLQRIPIIGWIFQQPFVTSFLDRYRGKRVPV

SEQ ID NO: 355418 - protein, 140 aa, Zea mays; identical to SEQ ID NO: 261495
  Clone ID: MRT4577_87307C.1.pep

SEQ ID NO: 355419 - protein, 109 aa, Zea mays
  Clone ID: MRT4577_87308C.1.pep
KIKKKKKLFFFPLGRNPLGGDFCNFPSLWGGFGLAFRGPISPFRGGFYISLAGVLNRGVGENLGFPQFIPFGAIPLFPSWVISKRARPVRLSKNWATLIGNGPPLLRAL

SEQ ID NO: 355420 - protein, 69 aa, Zea mays
  unsure (1)..(69): unsure at all Xaa locations
  Clone ID: MRT4577_87309C.1.pep
FFIGKSTQSTQFQLVASTNTLSNSLTLKSVKTAEWAQSIRRCRNYXACXXCFTPATTNGMCSPSGLVRT

SEQ ID NO: 355421 - protein, 71 aa, Zea mays
  unsure (1)..(71): unsure at all Xaa locations
  Clone ID: MRT4577_8730C.1.pep
YTSIQDSTSGGEPYNRGPSTHYFLAHTYFAVLLDYXTIHNIRSRFPDIERPTYTNLYRLLFHFISSLTVFL

SEQ ID NO: 355422 - protein, 70 aa, Zea mays
  unsure (1)..(70): unsure at all Xaa locations
  Clone ID: MRT4577_87310C.1.pep
LDWFLTEFEKQCLYGYPDXTWEVTLPAEEVPPQIPEPALGVNCAGDGMNEKDCLALFAVHRDSWLLYVAF

SEQ ID NO: 355423 - protein, 108 aa, Zea mays
  unsure (1)..(108): unsure at all Xaa locations
  Clone ID: MRT4577_87311C.1.pep
PRLRPPKRGGGGDXKAEEKXPRTPAKPTAKPAAKAKAKTDGAKPKPHAKKAARPAEADNTTGGGAPAKKEPAATKTXAAARKAPAXMPMTHNKALTPVRKAPARKAHK

SEQ ID NO: 355424 - protein, 59 aa, Zea mays
  Clone ID: MRT4577_87312C.1.pep
QQSFVNYFTLLIDKGIGILDMFGVCIHLLFVLCKREIRIILNSLLQISIFEAWSTEICS

SEQ ID NO: 355425 - protein, 86 aa, Zea mays
  Clone ID: MRT4577_87313C.1.pep
LLVGCPLVLHHLHLVVRLTRVVRQALNIAHGQWIREHKGKLALALDSLVELVKKSVHRCFSPLSMESPPSCAARLEDLVMQVLADL

SEQ ID NO: 355426 - protein, 56 aa, Zea mays
  Clone ID: MRT4577_87314C.1.pep
WVTTVRISRKAPFSKIFFHALVQPTNPLADSWTSPQSPCWRIRPRADTRLTAACVD

SEQ ID NO: 355427 - protein, 88 aa, Zea mays
  unsure (1)..(88): unsure at all Xaa locations
  Clone ID: MRT4577_87315C.1.pep
VIYHNIALQGVRVRIVIKTDYNQHPHKGYHLLAFXPTTDNICNTSIHGHRVPVPITIQGSAHISVKNVTYHDMSIGLIDNKHHRCHCF

SEQ ID NO: 355428 - protein, 130 aa, Zea mays
  Clone ID: MRT4577_87316C.1.pep
FFFFFFFFFFFFFFFFFFFFFFFLTPFLTQLTLSHGLKNHIKPGGPPRNYFKTTPAFHESPRLGGKPRPYLGGGPQNPTGKFFSGKAHPKNPIKLETNFQQNGGGHLTGPRLIFFFWEPTRITGGRGEKP

SEQ ID NO: 355429 - protein, 67 aa, Zea mays
  Clone ID: MRT4577_87317C.1.pep
LTRILRYTPHICEARTISYHAVSYNRPPMYNACVLYIDPAGATSLRPGTCPSVRLCHCVRKRQSGRV

SEQ ID NO: 355430 - protein, 64 aa, Zea mays
  unsure (1)..(64): unsure at all Xaa locations
  Clone ID: MRT4577_87318C.1.pep
QAALSXRPRRNGLWCXXLETXIHNMWXTHMXSLGQDSYDVHAXGRXCXCXGRFFSFWAFCPPFR

SEQ ID NO: 355431 - protein, 104 aa, Zea mays
  Clone ID: MRT4577_87319C.1.pep
HVTARTSLVVSVTSSGQLMLPSPAPGNYAYPIGSAPAPPRPRPRGRATRPGDARHSPCPALPRRSRHASPSLPPRGSKEKCALREGPRLAPVVLGADRHERSGD

SEQ ID NO: 355432 - protein, 40 aa, Zea mays
  Clone ID: MRT4577_8731C.1.pep
MITWRNDISHNMIAISDMYGEAPKRMAIHCSTGGPSGEST

SEQ ID NO: 355433 - protein, 93 aa, Zea mays
  Clone ID: MRT4577_87320C.1.pep
AFSREGRFAPSFAPPGFTRRLPERTGGGIVNGPQFPPGGGFAPPPPPLGKKKEKKKNKKKKKKKKKKKKKKKKKKKKKKKQKKKKKKKKKKLV

SEQ ID NO: 355434 - protein, 98 aa, Zea mays
  Clone ID: MRT4577_87321C.1.pep
VVVRKIWAKKVSSIRDGLLTFYPRLMKLSRLIYSSGPVVFPFRDLLSESAHRDFDMPGKLPVPIIVPPNLMLGSTYSTINAFSYGHFGVDKGIKSSIR

SEQ ID NO: 355435 - protein, 70 aa, Zea mays
  Clone ID: MRT4577_87322C.1.pep
TLLAFTKLSSNQSLVLLPILPIRTSYDASFTVTRLKVGPPEKFGGCRSPKEGHHAYSLHRQNTQLLKSTS

SEQ ID NO: 355436 - protein, 51 aa, Zea mays
  Clone ID: MRT4577_87323C.1.pep
FPGFVSPSPVGCVRRSESLLDYGHVVARIWSPRSLYTYEWNYGATTLLLFG

SEQ ID NO: 355437 - protein, 415 aa, Zea mays
  Clone ID: MRT4577_87324C.1.pep
MGTGRRGGGGGGVFHRLLALSSLLLLASGEVVFEERFEDGWETRWVESDWKRSEGKAGRFKHTAGRYSADPDDKGIQTTIDARHFAISAKFPEFSNKNRTLVVQYSIKFEQDIECGGGYIKLMSGYVNQKKFSGDTPYSLMFGPDICGTQTKKLHLILSYQGQNYPIKKDLECETDKLTHVYTFILRPDASYSLLVDNRERESGSMYTDWDILPPRKIKDVHAKRPKDWDDREYIEDPDEVKPEGYDSIPKQIPDPKDKKPDTWDEDEDGIWKPRMVSNPAYKGPWKRKRIKNPNYKGKWKTPWIDNPEFEDDPDLYVLKPLKYIGIEVWQVKAGSVFDNILICDDPEYARKVVEETWGANREAEKEAFEEAEKERKAREDREGQKAKDDGGRHRIHRRHKKHYRDHWDDYHDEL

SEQ ID NO: 355438 - protein, 95 aa, Zea mays
  unsure (1)..(95): unsure at all Xaa locations
  Clone ID: MRT4577_87325C.1.pep
RTPTKRISPPGGSSRASRANXPSRAVSQRASSLPPGCSAAGRTGSRSMAEGFRRWESDLLFPAAECVQDSADRMEGVYRLLLHERKVMQDGTSDA

SEQ ID NO: 355439 - protein, 95 aa, Zea mays
  Clone ID: MRT4577_87326C.1.pep
GRAAEVQRRVTMVMNTIYINARNRMAGVSNPYHSIREVWDKMGGRPQACSCGGRPQTCNQCSTPINKVCFFVYLLYLQLNLIYISTKKKKKKPAA

SEQ ID NO: 355440 - protein, 342 aa, Zea mays
  Clone ID: MRT4577_87327C.1.pep
MRTMAIGDVRPHEQQVQDQPSSSTMVQPLTQDEEHVPQDDCMGQGGAQEERDKEEEEVSHAPSTQVHTNIQRDHLVDQILGDISKGLTTCSRIAKFCEHYSFVSSIEPFRSAFLNGSIKEKVYVEQPPGFKDDRYLDQVYKLSKALHVLKQVPRAWYECLRDFFISNVLKPCEEFSGVMKQKFEMSMMGELTYFLGFQVKQLKDDILISQMKYTQDLLKMFGMKDAKPIKTLMGTNKHLDLNAGGKSIDQKGSTFDLTGYSDSNYVGCKVDRKSIFGTSQFLGRSLVSWSSKKQNYVALSTVEVGWIEWEKVDLDKGKGFHCITISMYLVQVIFGVFIAFCS

SEQ ID NO: 355441 - protein, 118 aa, Zea mays
  unsure (1)..(118): unsure at all Xaa locations
  Clone ID: MRT4577_87328C.1.pep
TSTEAGAGEEXKKPAEGGAHXNXKGQGTGGXEXXXRXKRXTQXKKGRSAXXDRQXXDXXAXAXRXEGRRXRGEQTXXEXEXEDGDENDARXHQTGGSASTTKKQQRRSGRTKQKGKKE

SEQ ID NO: 355442 - protein, 224 aa, Zea mays
  unsure (1)..(224): unsure at all Xaa locations
  Clone ID: MRT4577_87329C.1.pep
MGDEAKCSVDVAEGAYIMASIMAVSGIMVTVLVLSALFHFVLRRLGQPSVISHILXAGIVVGPTVLGRAMDLRQLGMRDAGDALGGTIYFVRMVFMFFIGLELDLRYLRRNLRRSLVVACGGSGFCFVLAVLTGPFTYGFLHPGQGHFQPSNIYASTALFAIVITSTASPVLIRIVTELKLSGSETGQIAIGAAFANDMASLTALSVIVVTHTLYGTMPNEKES

SEQ ID NO: 355443 - protein, 166 aa, Zea mays
  Clone ID: MRT4577_8732C.1.pep
QTICENHGRTSTERSGFCRSRRAATTTKAATIASAELMTIAAAKVATTSRAAITTTAASAAMGTGGPAATTTAVAPGVVATTSAVGATTTAAAAAMGMEGPGGTTTAVAPAEVGTTRSETTATTEGTTDRAPPTTTNTGAAPEDGTEASPVVTTLTPKAEVDDTAS

SEQ ID NO: 355444 - protein, 106 aa, Zea mays
  Clone ID: MRT4577_87330C.1.pep
RPTGCPASRAWPSSASPLWRALGAAWAASDGWATFTWPTPAGFPWICWCQSTTSRLAAQLWRFLLGHKHAGFKLQHDDPPATANSRMVYGYRCRNSHDEKKKKKSG

SEQ ID NO: 355445 - protein, 74 aa, Zea mays
  Clone ID: MRT4577_87331C.1.pep
ASNFFAQFFNKIKTKHVQGGVSIFRHIGNRCVRTTKLNKNYGRGGPIPNISSANVVCDRHETLRHHINANRSYR

SEQ ID NO: 355446 - protein, 54 aa, Zea mays
  Clone ID: MRT4577_87332C.1.pep
MEVAERPMASSHLAALVSLLIPCLLALLLLRLAAVLDPDPDAAVPRIKAAAPLP

SEQ ID NO: 355447 - protein, 68 aa, Zea mays
  Clone ID: MRT4577_87333C.1.pep
ALGSSSIRMGSTLLSGCLAFTQDFKNGLAGFTVISYPEDDIFLVIFQCNVVRVDDGVPEQNGALKQRA

SEQ ID NO: 355448 - protein, 154 aa, Zea mays
  unsure (1)..(154): unsure at all Xaa locations
  Clone ID: MRT4577_87334C.1.pep
MGKDKVFESGAGGGEFAAKDYTDPPPAPVIDAAELGFWSLYRAVIAEYIATLLHLYITVATVIGYKHQTXASASGADPPCGPLRVLGISWALAGMIFALEYCTVDISGGHINPVDTFGLFLARKVRLMRALLYIVAQGLGAICAVGLYRASHSA

SEQ ID NO: 355449 - protein, 167 aa, Zea mays
  unsure (1)..(167): unsure at all Xaa locations
  Clone ID: MRT4577_87335C.1.pep
MAALIKLGSLLRQSALASSASTGSAPALFNAARFMCAGQPAGGNKLFVGGLAWATDDHSLKEAFQSFGEVVEARVITDRETGRSRGFGFVSFANEADADSAAKGMDGQELAGRNVRVNFANERPSGGGGFSRGGGGYGXGGGGFGGGGGYGGGGRGGGGYGGDREAF

SEQ ID NO: 355450 - protein, 322 aa, Zea mays
  Clone ID: MRT4577_87336C.1.pep
MSGHGDTATSAKMAKLKELLQKSENHICADCGASDPKWASANIGVFICVKCSGVHRSLGTHISKVLSVTLDKWSDSEVDSMIEVGGNSQANAIYEAFIPEGYQKPHSDSTQEEREKFIRSKYELQEFLKPSLRIVSHQPSDSGKHAGNASHSDGSKSQVGMIEFIGILNVKVIGGTNLAIRDMSSSDPYVVLTLGQQKAQTSVINGNLNPVWNEELKLSVPQQYGPLKLQVFDHDMVSKDDLMGEAEIDLQTMINAAAAFGDPELLGDIQIGRWLKSEDNALVRDSAVVVSGGKVKQGMALKLQHTESGELELEMEWMPLNV

SEQ ID NO: 355451 - protein, 69 aa, Zea mays
  Clone ID: MRT4577_87337C.1.pep
AGKKYNILTNHNLYARALSTLSLSHTHTHVMLCPLFRLQMIQYKAGSSTMEVKKNTHYTSTSASKLPGV

SEQ ID NO: 355452 - protein, 89 aa, Zea mays
  Clone ID: MRT4577_87338C.1.pep
MNVLTSGRGMSGREAEMIDVVLNDRLGKKVRVKCNDDDTICDLKKLVAAHTVTRPEKILIHKLYNIYNDHITLNDYYVHYSMVLELYYN

SEQ ID NO: 355453 - protein, 322 aa, Zea mays; identical to SEQ ID NO: 355450
  Clone ID: MRT4577_87339C.1.pep

SEQ ID NO: 355454 - protein, 84 aa, Zea mays
  Clone ID: MRT4577_8733C.1.pep
CNLTLTIRPSTLFSQRPQWPQYPNDIVVASKQVSCSIQHHDSRISRSASKCGSAISSPLMMLVGAPVAEDHLYKALHRHADNIG

SEQ ID NO: 355455 - protein, 39 aa, Zea mays
  Clone ID: MRT4577_87340C.1.pep
LLVIQVGELFAGILGHPWAIMPEAVMVSSSDLTLLGSGG

SEQ ID NO: 355456 - protein, 35 aa, Zea mays
  Clone ID: MRT4577_87341C.1.pep
WTGESYHTPSRHSIECLGMTLNRHIPQHAPTVIGG

SEQ ID NO: 355457 - protein, 141 aa, Zea mays
  Clone ID: MRT4577_87342C.1.pep
MFNLNTLFVRRIQPALWVGVATTGIVLTREMGSHTVPSTGIPLPHAILRLDLAGATYRLPDEDPAERGSLTTTVTEIVRDMRRSSPTSPGLDQIWRPQDQLFGRKLEPPTDRYTIGPSASLPEVSSASYGWKCGLQTTSLI

SEQ ID NO: 355458 - protein, 82 aa, Zea mays
  Clone ID: MRT4577_87343C.1.pep
GMLKWTAARDALVFFGLAAWLIFGMFWVYNLEGSCLMSAMHSNYDEICCAVYCDNKKSIRKVLEKFSCYGDLFIFVCEFCYD

SEQ ID NO: 355459 - protein, 73 aa, Zea mays
  Clone ID: MRT4577_87344C.1.pep
LLLHLHYGLPPAHAGPAPRFRSHHPVLSCPPACALLVRFIALSPRPLFRSVTWLLFPLRLSLSSVPLGRPFPA

SEQ ID NO: 355460 - protein, 113 aa, Zea mays
  Clone ID: MRT4577_87345C.1.pep
LQHKSPPKNHHGRGAIRTGRNTPGGTRDTKHASGKRASRRVTQQAKAEEEKGKNQLCPNQGGGDQKKGTREPPGGHIGRTPQERAKAEGAHPNQRPSKTNKRPPGRKGPSQGP

SEQ ID NO: 355461 - protein, 37 aa, Zea mays
  Clone ID: MRT4577_87346C.1.pep
LASAFLGQSCPCPACRSDEEERVLSGERMVRTKMAQR

SEQ ID NO: 355462 - protein, 115 aa, Zea mays
  Clone ID: MRT4577_87347C.1.pep
GGGEVFLSVPFYWGYGFFSPIFCWNWIFLGPLDSGFPPLACKKLVLLFFPRFAPFSGFYGRDFYVVLEQVGFFFAPRARCKSRVGFQPGVPKKTPLKWFQVKYEGFFLTRAQTPW

SEQ ID NO: 355463 - protein, 60 aa, Zea mays
  Clone ID: MRT4577_87348C.1.pep
VSFTPTVQEQQKEKLYTELFLKVPLTHSVVHLYPILSCAVLIKMRLAQHWHMLGSVPIYQ

SEQ ID NO: 355464 - protein, 90 aa, Zea mays
  Clone ID: MRT4577_87349C.1.pep
LISYDTYTFGGRRPRSIRTPIPPMLKLDLYYLPAPSLVALRCLYRLTSFNLPYAHEVASPPKIFYSPADVSYHPLTCLPTHHLHRCRYQF

SEQ ID NO: 355465 - protein, 91 aa, Zea mays
  unsure (1)..(91): unsure at all Xaa locations
  Clone ID: MRT4577_8734C.1.pep
GPLLXXPPXSPPPXAGAAXLLLVLLXAAXXRFVAVARAXLPXXAVPRAARLLXPXGXLRAAACGCXXXXXRSXLCAXAXXXXXGGVLVXAL

SEQ ID NO: 355466 - protein, 369 aa, Zea mays
  unsure (1)..(369): unsure at all Xaa locations
  Clone ID: MRT4577_87350C.1.pep
FGTRQSCFSSTDNSLNLDVRLVNAVSSNDPDVIKFLLVMALCNTVVPIKSNDGTVSYKAQSQDEEALVNAAAKLNMMLISKDTITAEICFNGSKFWYELLDILEFTSDRKRMSVVVKEGETGKILLLSKGADEALLPRACPGQQIQRYLEAVEMYSQLGLRTLCLGWRDLKENEYKEWSKNFQKASCSLDNREFKIAEVCNSLEQDLQILGVTAIEDRLQDGVPETIKLLRNAGINVWMLTXGDKQNTAIQIGLLCNLITSGPNSQLLSISGKTEEDVLRSLERALFIMKNTSETKGLAFVLDGWALELILKHSKESFTRLAMLSKTAICCRMTPLQKAQXFKFLKRLILIHGRYSYNRTAFISQYSFY

SEQ ID NO: 355467 - protein, 123 aa, Zea mays
  Clone ID: MRT4577_87351C.1.pep
ASLPADRILLLDAYFSVVISAGMTIAQWRNMGYQNQPEHEQFAQLLQAPHEDAQMIIKGRFPVPRLVVCDQHGSQARFLLAKLNPSATYNSAHDVAPGSDIIFTDDVSFLVFCEHLQRLAVQS

SEQ ID NO: 355468 - protein, 94 aa, Zea mays
  Clone ID: MRT4577_87352C.1.pep
SLVYTTRRIDDAVSVVHGSRRVEDRSSTAAEGYEKQEPHQVRAHEPYRSWHPKRRITIPYLSCISVSCCTCQYGSVSSPSPSPLYHGGAAGDET

SEQ ID NO: 355469 - protein, 99 aa, Zea mays
  unsure (1)..(99): unsure at all Xaa locations
  Clone ID: MRT4577_87353C.1.pep
TCGALHCITTPXTILAILVPPPPPPPKVLSSCLVRYHLMKICKDCLPKKKKNGINKKKISNPKTKKKMARPPSNDPSYPGLDPHPLPSGPPVFPIFWHV

SEQ ID NO: 355470 - protein, 75 aa, Zea mays
  Clone ID: MRT4577_87354C.1.pep
AADTAFLCRRGAHHRLAPLAGGKNHPNPMREIKVHKLDLNISVGESGYRLTRSTNVLEQLSRHTRVFSKARYTAR

SEQ ID NO: 355471 - protein, 152 aa, Zea mays
  unsure (1)..(152): unsure at all Xaa locations
  Clone ID: MRT4577_87355C.1.pep
ISPPHPTPSALPSAPSLQRRPPPPSPPFLTAQSPPXPHAPRSPSAASPSFPXSRPSSAPSPSFPTRAPPPPCVPRPRPXSPDALPPPPRXXPPPRNAPVMFAPLRTPPPRWNKQRSNADPRPPTLHLGVTVAAPWRQLAPSLPPPTPPLLSP

SEQ ID NO: 355472 - protein, 181 aa, Zea mays
  unsure (1)..(181): unsure at all Xaa locations
  Clone ID: MRT4577_87356C.1.pep
RWAVWGRVWVESSHAWRDFYTQPMNPCSVHAACGPFTVCTTTGGGDNNANMSCDCMEGFSIRSPSEWDLDDRAGGCTRNNQLDCATDRFLPVPGVQLAYDPVPMKATDADGCGQACASDCSCTAYSYASTTWXGGGCSIWRGELLNTATASTTGDTLYLRLSAKDLQTLRENQRSGDSTPI

SEQ ID NO: 355473 - protein, 262 aa, Zea mays
  Clone ID: MRT4577_87357C.1.pep
MKAATGSSSVSRALALLLAACLLWKEAACFSASGLNKAFATFYGGSDASGTMGGACGYGNLYSTGYGTDTAALSTALFNDGASCGQCYRISCDYQADPRFCIRGTSVTITATNLCPPNYALPNDDGGWCNPPRQHFDMAEPAWLKIGIYRGGIVPVNYQRVPCVKKGGVRFSINGRDYFELVLISNVGGCGSIQSASIKGSRTGWMAMSRNWGVNWQSNAYLNGQSLSFQVTSSDGQTKTFPDVAPASWGFGQTFATSQQFS

SEQ ID NO: 355474 - protein, 49 aa, Zea mays
  Clone ID: MRT4577_87358C.1.pep
ISHRSACLLPIALAACDGDGADPHLQMHNTTMTCLGIKAVQYTQRSFQP

SEQ ID NO: 355475 - protein, 113 aa, Zea mays
  unsure (1)..(113): unsure at all Xaa locations
  Clone ID: MRT4577_87359C.1.pep
EVLQSKIILDRDTKRCRGFGLVTFSAEEAMRSAVEGMTGKXLGARXIPVREARSPGARGGGGGGWGGGRRDGGGSGGAGGAPGGGGGGSGGGGGPGGANRGGGYGTGPGTWCN

SEQ ID NO: 355476 - protein, 127 aa, Zea mays
  unsure (1)..(127): unsure at all Xaa locations
  Clone ID: MRT4577_8735C.1.pep
MGNCLNTASKRSHRGMLLPEEEESLSEIRRISQLLREEEEDGYEVVAVAPGVTAPAEGLKVKIVLTRGELEWLMAQLKSGEQRLEDVLQHMQAAKGAGGGGGSFAGDNKAGWRARLESILESSETXS

SEQ ID NO: 355477 - protein, 57 aa, Zea mays
  Clone ID: MRT4577_87360C.1.pep
LTDVIRVRLLNYTMFNYMRTWGIVVLVQWSSRNIKCVFGCFIIKKKKKIRAAARDLE

SEQ ID NO: 355478 - protein, 84 aa, Zea mays
  unsure (1)..(84): unsure at all Xaa locations
  Clone ID: MRT4577_87361C.1.pep
HRQSHEQERRQXFQGHVPPLQXHEPQQYQQGQATSVQHQCHCQEXQQTTRXCSSHYYSQSSTLDSCHDFLRQQCRPQVMPCLQS

SEQ ID NO: 355479 - protein, 114 aa, Zea mays
  unsure (1)..(114): unsure at all Xaa locations
  Clone ID: MRT4577_87362C.1.pep
QNSVRMVIVVMVCLDLPAAIPSAIXKPCPYAGLHGLNRTNAGLTTMIGAVRLNPYADYLMHTHCILLPELPYYSGCAQTSAVYXPLRHQCSQHHMRMMDRQNGTQHLLIMIHVE

SEQ ID NO: 355480 - protein, 111 aa, Zea mays
  Clone ID: MRT4577_87363C.1.pep
LAWTFGLIYVLGWSLGLRLVALVFVLFLIVFIIILRLLMVLCLVVLRRIRLRPRSLRCSETYCESVERWLVSSDARSRVFCDQEWWAVKARLNLGFPGTRLRSVESRDASH

SEQ ID NO: 355481 - protein, 82 aa, Zea mays
  Clone ID: MRT4577_87364C.1.pep
HFLHLQLIQHTLMILILSTIETLLLKTQVQLSNLFLEHCLYHMTIPKLASSLVTHHQKTCLLIISKYSMRYYIIYIGLFPTS

SEQ ID NO: 355482 - protein, 82 aa, Zea mays
  Clone ID: MRT4577_87365C.1.pep
MASSSCLASPSGATLCRPRRPRCRVACSAADAGGSTGPAWAKGAGRLACGVLAAWFDQCADNPDMVASHRLPLLSTVPKLCV

SEQ ID NO: 355483 - protein, 114 aa, Zea mays
  unsure (1)..(114): unsure at all Xaa locations
  Clone ID: MRT4577_87366C.1.pep
FGSRRLTGAFYKLGVCSWAKLMKVVTGTAKAVAYVHEAIDPAGVHREYKENHIWIDDEKDGKVSDNGXTKLLGSDKNHITXTIEMGTSGYVALEYAHTGMFNEKNDHNSFDDLS

SEQ ID NO: 355484 - protein, 134 aa, Zea mays
  Clone ID: MRT4577_87367C.1.pep
GGKPPPCFQNRAKKKFRVNGPPQFWKGGKKPLARQAIQPPQKNFWEINPKRGGHKSLKNPGAKRAPQIRETRGTPQGPRDLGWTKKNPPQPKGGFLKKTLNPFFFGFRVGKPVSQGGEVSGGQNSLGGKFVPPP

SEQ ID NO: 355485 - protein, 161 aa, Zea mays
  unsure (1)..(161): unsure at all Xaa locations
  Clone ID: MRT4577_87368C.1.pep
MTSHMASLSSASVTAPSFAAPAPARAVVRRRSFTVRASLXKVTGTAAVLMDASAXLLDDGVMTHEELLDAGXSSIVYKPRQLTVKVGDIIXTFKNNAXFPHNDEFDEDEVPXSSTNTKISQEEYLNAPGETYSGTLTVPGTYGFYCETHQGARMVGKITVN

SEQ ID NO: 355486 - protein, 54 aa, Zea mays
  unsure (1)..(54): unsure at all Xaa locations
  Clone ID: MRT4577_87369C.1.pep
PPFSXXGRTALQLFLYCHAVIQLQTRWSISSHCQNHRFSFIREDNIQVLYVRSS

SEQ ID NO: 355487 - protein, 38 aa, Zea mays
  Clone ID: MRT4577_8736C.1.pep
KGGAGVYLKRGAYGHFGREDPAFPWEVVKPLKLEKPFA

SEQ ID NO: 355488 - protein, 338 aa, Zea mays
  Clone ID: MRT4577_87370C.1.pep
KAQYVVLLSGTPALSRPIELFTQIQALYPTVYKSVSEYGNIYCKGGFFGLYQGASNHEELHNLMKATVMIRRLKKDVLSQLPVKRRQQVFLDLSEKDVKNVRALFIELETLKVKIESSDSKEMIDSLRFAYQNIVNKIYTDSAVAKIPAVLDFLGTMIEEGCKFLIFAHHQPMIDAIEKHLLKKKVKCIKIDGKTPLTTRQTLVTDFQNNDDVKAAVLSIKAGGYGITLTAASTVIFAELSWTPGDIIQAEDRAHRIGQVSSVNVYYLLSNGTIDDLMWDVVQGKLENLGQMLDGQEKTLEVSQRDCRPSPSKKQKTLVGFLKRPSASTSAEEGMPST

SEQ ID NO: 355489 - protein, 43 aa, Zea mays
  Clone ID: MRT4577_87371C.1.pep
DFEDYLSYFNAKGVRHRALKIQILIYNFTSCMQNNIYLYNHIS

SEQ ID NO: 355490 - protein, 60 aa, Zea mays
  Clone ID: MRT4577_87372C.1.pep
VGCASLEDVMTEMTQVLANVISEPSPSMQDLADSLPRGPDHYKKRAPGEKKELAIHSRAE

SEQ ID NO: 355491 - protein, 98 aa, Zea mays
  Clone ID: MRT4577_87373C.1.pep
LLRYPQQFLPLKEVAALTYHDYSQQQLLGPISQLAGVSRSPLVIQPQRCRICRPAALCASTLSQGQRWQPFNQRGMTNPAAFYLPPVIGGGSVGFNKG

SEQ ID NO: 355492 - protein, 160 aa, Zea mays
  Clone ID: MRT4577_87374C.1.pep
LLVFCRESIMSSKKSNGLNVLFVRREDYLAHPRHSGKVESRLSNEQEVYDAIDKWAQGLKCKVNVVNGLFAHMTMKEQLRAILEASVVIGAHGAGLTHLVSATPDTKVLEIISSMYRRPHFALISHWKSLEYHAINLPGSFARVTDVINELRKILEGLGC

SEQ ID NO: 355493 - protein, 101 aa, Zea mays
  Clone ID: MRT4577_87376C.1.pep
NCLLMPFLQSSTLRWLPLIVGFSAKRLSWFVSWYSQTLRCITSTSRIILASTMTEGLVRIVGNPAWIRYINPARIYIEATYHSSILLFLLIFHHLVGPQAW

SEQ ID NO: 355494 - protein, 158 aa, Zea mays
  unsure (1)..(158): unsure at all Xaa locations
  Clone ID: MRT4577_87377C.1.pep
MGAREPAGPPGGGSGPPPLPAQGEWGPPPPDSFPPQPRGPGKQGGHLGKGGPPPPKGGNHPPGAXPPGWPGQPKGGQTIXEPQKNRFNPPPLGXKGPALKQAGALPPPGQTRPPFGQPRAILRPSKGVPTPKRGGAKKEGRGRFPRGGGPPQTEPGPQ

SEQ ID NO: 355495 - protein, 78 aa, Zea mays
  unsure (1)..(78): unsure at all Xaa locations
  Clone ID: MRT4577_87378C.1.pep
PLLFPPFQKFLTKGFVSKAKSPKSLAQVVSPPTLPKSGVYXTWNKDSASFKNHLSQKPTNPEKPKNLWEITKNLVGLP

SEQ ID NO: 355496 - protein, 40 aa, Zea mays
  Clone ID: MRT4577_87379C.1.pep
LQCPSCFCISPVSMYGAPRILYIPVISNLARERTRRRTRG

SEQ ID NO: 355497 - protein, 28 aa, Zea mays
  Clone ID: MRT4577_8737C.1.pep
FLGLIFSLYYFILFSFYRIHHSSSQTRY

SEQ ID NO: 355498 - protein, 110 aa, Zea mays
  unsure (1)..(110): unsure at all Xaa locations
  Clone ID: MRT4577_87380C.1.pep
YRSTGETEEFFTSYDEVFESFDDMGLQENLLRGXYAYGFEKPSAIQQRGIVPFCKGLDVIQQAQSGTGKTATFXSGILQQLDYGXLVECQGLVLAPTRELAQKIEKACAR

SEQ ID NO: 355499 - protein, 221 aa, Zea mays
  unsure (1)..(221): unsure at all Xaa locations
  Clone ID: MRT4577_87381C.1.pep
MAGMAPEGSQFDAKHYDSKMQELLSTGETEEFFTSYDEVFESFDDMGLQENLLRGIYAYGRLGVFCFSEFFFTWYSSYYPFFDVXFEKPSAIQQRGIVPFCKGLDVIQQAQSGTGKTATFCSGILQQLDYGLVECQALVLAPTRELAQQIEKVMRALGDYLGVKVRAYVGGTSVREDQRILASGVHVVVGTPGXRVFDMLRRQSLRPDYIKMFVLDEADEM

SEQ ID NO: 355500 - protein, 114 aa, Zea mays
  Clone ID: MRT4577_87382C.1.pep
EISLHPLTVSLSLLEPAFFLAGTMFLFCWNLVMLASSLQREHASARHGRRSARSTPLAGEGNHHQKMLQPRRGGATSVGPEAATSQTNNGTGNGRAATATAAVDHCWNQLLFLL

SEQ ID NO: 355501 - protein, 414 aa, Zea mays
  Clone ID: MRT4577_87383C.1.pep
MAGMAPEGSQFDAKHYDSKMQELLSTGETEEFFTSYDEVFESFDDMGLQENLLRGIYAYGFEKPSAIQQRGIVPFCKGLDVIQQAQSGTGKTATFCSGILQQLDYGLVECQALVLAPTRELAQQIEKVMRALGDYLGVKVHACVGGTSVREDQRILGSGVHVVVGTPGRVFDMLRRQSLRPDNIKMFVLDEADEMLSRGFKDQIYDIFQLLPSKIQVGVFSATMPPEALEITRKFMNKPVRILVKRDELTLEGIKQFYVNVDKEDWKLDTLCDLYETLAITQSVIFVNTRRKVDWLTDKMRSRDHTVSATHGDMDQNTRDIIMREFRSGSSRVLITTDLLARGIDVQQVSLVINYDLPTQPENYLHRIGRSGRFGRKGVAINFVTRDDERMLFDIQKFYNVLIEELPANVADLL

SEQ ID NO: 355502 - protein, 66 aa, Zea mays
  Clone ID: MRT4577_87384C.1.pep
PCSNDECLTVCSAPKSPGANYGPGRALFICGIISPFQTCYVWIGPILWQYLGGRSMVFVVTPPFFK

SEQ ID NO: 355503 - protein, 443 aa, Zea mays
  unsure (1)..(443): unsure at all Xaa locations
  Clone ID: MRT4577_87385C.1.pep
MAGMAPEGSQFDAKHYDSKMQELLSTGETEEFFTSYDEVFESFDDMGLQENLLRGIYAYGRLGVFCFIFCFSEFFFTWYSSYYPFFDVXFEKPSAIQQRGIVPFCKGLDVIQQAQSGTGKTATFCSGILQQLDYGLVECQALVLAPTRELAQQIEKVMRALGDYLGVKVHACVGGTSVREDQRILASGVHVVVGTPGRVFDMLRRQSLRPDNIKMFVLDEADEMLSRGFKDQIYDIFQLLPSKIQVGVFSATMPPEALEITRKFMNKPVRILVKRDELTLEGIKQFYVNVDKEDWKLDTLCDLYETLAITQSVIFVNTRRKVDWLTDKMRSRDHTVSATHGDMDQNTRDIIMREFRSGSSRVLITTDLLARGIDVQQVSLVINYDLPTQPENYLHRIGRSGRFGRKGVAINFVTRDDERMLFDIQKFYNVLIEELPANVADLL

SEQ ID NO: 355504 - protein, 106 aa, Zea mays
  unsure (1)..(106): unsure at all Xaa locations
  Clone ID: MRT4577_87386C.1.pep
GDRRVRNSSTPIDTNSLAFIGTFVSGVPGCNHLLERGCRPAVFEASAVMGTLWTRVPHSTALQTPRPIYQYSDFPWPHTVTXVFSDHRQVMFYLDTYSRHFCMLDC

SEQ ID NO: 355505 - protein, 418 aa, Zea mays
  Clone ID: MRT4577_87387C.1.pep
MLDVMAGMAPEGSQFDAKHYDSKMQELLSTGETEEFFTSYDEVFESFDDMGLQENLLRGIYAYGFEKPSAIQQRGIVPFCKGLDVIQQAQSGTGKTATFCSGILQQLDYGLVECQALVLAPTRELAQQIEKVMRALGDYLGVKVHACVGGTSVREDQRILGSGVHVVVGTPGRVFDMLRRQSLRPDNIKMFVLDEADEMLSRGFKDQIYDIFQLLPAKIQVGVFSATMPPEALEITRKFMNKPVRILVKRDELTLEGIKQFYVNVDKEDWKLDTLCDLYETLAITQSVIFVNTRRKVDWLTDKMRSRDHTVSATHGDMDQNTRDIIMREFRSGSSRVLITTDLLARGIDVQQVSLVINYDLPTQPENYLHRIGRSGRFGRKGVAINFVTRDDERMLFDIQKFYNVLIEELPANVADLL

SEQ ID NO: 355506 - protein, 414 aa, Zea mays
  Clone ID: MRT4577_87388C.1.pep
MAGMAPEGSQFDAKHYDSKMQELLSTGETEEFFTSYDEVFESFDDMGLQENLLRGIYAYGFEKPSAIQQRGIVPFCKGLDVIQQAQSGTGKTATFCSGILQQLDYGLVECQALVLAPTRELAQQIEKVMRALGDYLGVKVHACVGGTSVREDQRILASGVHVVVGTPGRVFDMLRRQSLRPDNIKMFVLDEADEMLSRGFKDQIYDIFQLLPSKIQVGVFSATMPPEALEITRKFMNKPVRILVKRDELTLEGIKQFYVNVDKEDWKLDTLCDLYETLAITQSVIFVNTRRKVDWLTDKMRSRDHTVSATHGDMDQNTRDIIMREFRSGSSRVLITTDLLARGIDVQQVSLVINYDLPTQPENYLHRIGRSGRFGRKGVAINFVTRDDERMLFDIQKFYNVLIEELPANVADLL

SEQ ID NO: 355507 - protein, 46 aa, Zea mays
  Clone ID: MRT4577_87389C.1.pep
ALSSRGVLAEYGTLLQDLTNNITLEDLEQLKSACKEDIPSEKSEEI

SEQ ID NO: 355508 - protein, 67 aa, Zea mays
  Clone ID: MRT4577_8738C.1.pep
GPLRAPSPPEPRPPPPAPAARRRSAYPPPRSRPPPPPEAAGLSFLSPRGSLPPPAKACPGDSAWRPC

SEQ ID NO: 355509 - protein, 51 aa, Zea mays
  Clone ID: MRT4577_87390C.1.pep
HPGAHQHFRRAQPLEHRQDRVHREVGPLRRRRRRTNGLDRGRRVSGGLIHA

SEQ ID NO: 355510 - protein, 114 aa, Zea mays
  unsure (1)..(114): unsure at all Xaa locations
  Clone ID: MRT4577_87391C.1.pep
CSPLDVGKAPQYAHQPLLQQIVPAYDXVTVANPVSHSQHMLPFXQLTLSDSDAYRQQPHRLLNPLAVANPLVAAFPHQQQLLPYTQFSXPPPPLXRQQPIVEGASFRLHMRCTR

SEQ ID NO: 355511 - protein, 120 aa, Zea mays
  unsure (1)..(120): unsure at all Xaa locations
  Clone ID: MRT4577_87392C.1.pep
HTSKIRHCIRSIVPLKGGSLSEVLNPRSTPRXRNPQKRYLVLPSLLYDGLLEGVASKDTWHGLFLLSTKGHATRFVKTHRVQXAFLIHATEHAYIRLDYXHWKQSLTTDDAKSTMGYLIS

SEQ ID NO: 355512 - protein, 55 aa, Zea mays
  Clone ID: MRT4577_87393C.1.pep
ATSSFDTFLPTVCGLPPPPLTTTTLAALCSASCAYLHSPPSLKAPFLVSSIRCLY

SEQ ID NO: 355513 - protein, 127 aa, Zea mays
  Clone ID: MRT4577_87394C.1.pep
LAAEIFYSSLPANPLVQRFSLLNFSDQLRQMQPSADSRKKKRRRRRRRRLAACYSSRPAAGAAQGQCQCGSSSPGGGGGSGSLVARTPRAFSSCSSYAASSACAPAAAVHLGTQHKLTALLVGLGLL

SEQ ID NO: 355514 - protein, 221 aa, Zea mays
  unsure (1)..(221): unsure at all Xaa locations
  Clone ID: MRT4577_87395C.1.pep
MAMVELLSTELVVPAEETPAGAVWLSNLDLAARRGYTPTVYFYRTNGKPEFFETDAVKDSLARALVSFYPLAGRLGLDAATGRVQIDCTGEGAVFVTARWEQYALDELVGEFVPCDEMRALLVPPTPAPNPPCPLLFAQVTRLRCGGVVLGLALHHSVVDARSAAHFVETWASIARGGAGAGAGNPLPPCFDHRLLSARXXGARAVAYDHPEYKGRAPAAA

SEQ ID NO: 355515 - protein, 51 aa, Zea mays
  Clone ID: MRT4577_87396C.1.pep
CEWPAAPTASEVVLRGECSLHLPRSGRNDLHRARKVIRALPSSCRKCLLPP

SEQ ID NO: 355516 - protein, 38 aa, Zea mays
  Clone ID: MRT4577_87397C.1.pep
MGKEKTHINIVVIGHVDSGKSTTTGHLIYKLGGIDKRV

SEQ ID NO: 355517 - protein, 229 aa, Zea mays
  unsure (1)..(229): unsure at all Xaa locations
  Clone ID: MRT4577_87398C.1.pep
MGTPEFPDLGRHCSVGDCHQIDFLPFTCDRCDFVFCLQHRSYTSHKCPKANNKDVTVVICPLCAKGVRLNPNEDANITWESHVNIDCDPSNYQRATKKKKCPVPGCREQLTFSNTIMCKDCSKEHCLKHRFGPDHKCPGPRKPEPTFPFANMLRRSQKVEPRANSSGSGSSWWSSSLLNAASSFRSSAEAGMQKLSIATSEAVQKAKDXVTPSSSGGGLVEQCVQWSAR

SEQ ID NO: 355518 - protein, 92 aa, Zea mays
  Clone ID: MRT4577_87399C.1.pep
TTETNTPQIHRYFDRRGDSTTGSRLNSWDCCRGNQVQQWYVLYLFMSVSSPPSFSFRTRNNWIYTIKRSKLGRVAPLVFPVLACFISHPLIT

SEQ ID NO: 355519 - protein, 88 aa, Zea mays
  Clone ID: MRT4577_8739C.1.pep
TRDLWLLIRGKAPTYKLAKDSTPSDHVQKPSAPTQDYRRERLDPKEHAQPEGSYCTPTYDDGLAHLSGKDYSKSRLTHIRDTTAPGPH

SEQ ID NO: 355520 - protein, 71 aa, Zea mays
  Clone ID: MRT4577_873C.1.pep
TTTSIYRPPRGPQTTQIPRYRTSLNEPWLTHPPGGRAPSGEGPPSGSWTLLGGGHPPTACPRRSNPTGPGG

SEQ ID NO: 355521 - protein, 175 aa, Zea mays
  unsure (1)..(175): unsure at all Xaa locations
  Clone ID: MRT4577_87400C.1.pep
MAAASYTMVVLXMAAXLAVMMADSTTFTITXSCSYTKXPRTPPQSAPTQLNPRCTRNGKGPPGTSSPRWRSRTSXASAGTRADARRQNEPAXLGCSWSGXASLTLSTATIRXAQNFNKISVIYRYKLTLSXATELNVNMVMCTXDPECPHAYQNPTDMNTRXVRGXSNYELTFCP

SEQ ID NO: 355522 - protein, 69 aa, Zea mays
  unsure (1)..(69): unsure at all Xaa locations
  Clone ID: MRT4577_87401C.1.pep
LPKLTGLAEENMLRQGRQGTYASLSAIPCILESLHFPSSSLPDKGVPVSCTSAATTTHCREWYXLIRLT

SEQ ID NO: 355523 - protein, 93 aa, Zea mays
  unsure (1)..(93): unsure at all Xaa locations
  Clone ID: MRT4577_87402C.1.pep
GCNSCESATTSVDTLKLKLGNVRSVQFGHYVFPNLNSXEVRTIRYLDPFIXAKDTIKINMEPNKIMDFIILYLPLHRLQLVIGLVRLNVSSNS

SEQ ID NO: 355524 - protein, 75 aa, Zea mays
  Clone ID: MRT4577_87403C.1.pep
HAYGVPLPHTGRCHESRSMFPALTHPTHTLSPSHFPDPTNTAQGSSGLSPHPETLTDAMATLTVPYSVPAVFEDC

SEQ ID NO: 355525 - protein, 61 aa, Zea mays
  Clone ID: MRT4577_87404C.1.pep
YPRKIYRAGILRGMPLATPSSTQATGASNTNHNSMRKLKTRLKTALPSGLNPNFLADPVRA

SEQ ID NO: 355526 - protein, 64 aa, Zea mays
  Clone ID: MRT4577_87405C.1.pep
CETTFFQRFALRLSSHQRQWQCFDDVERTICRSIHQDITVVSMVRPSTWIVISSVHFPQAAIIP

SEQ ID NO: 355527 - protein, 78 aa, Zea mays
  Clone ID: MRT4577_87406C.1.pep
YLYMNIFGFLFIENVEFEFLYVCLPNLHIFLEKGNKNTCKFNLYLTSFYFLFNENVPWLFKKEQKSYFLFFPDMRYSK

SEQ ID NO: 355528 - protein, 37 aa, Zea mays
  Clone ID: MRT4577_87407C.1.pep
GVYFLIIWLQKATPLFARVWFFLEKQVIFSSYQLKFG

SEQ ID NO: 355529 - protein, 103 aa, Zea mays
  Clone ID: MRT4577_87408C.1.pep
MSAAVSRRRAKNPCQDFPYVETEEWLAWAHVRMDLLSMILRGVSSRTWVTPLMQQGLTKEHKTYSELFKTAINDVHLSALAAIFGWRTDKMDDPCASGALVGH

SEQ ID NO: 355530 - protein, 70 aa, Zea mays
  Clone ID: MRT4577_87409C.1.pep
DPITSFYAQAFTNTGDSMMVPLYALWSLCIAASGHYTHTMVRCCCQSPSSVDPTDDGAFATVRTPVIYGA

SEQ ID NO: 355531 - protein, 57 aa, Zea mays
  unsure (1)..(57): unsure at all Xaa locations
  Clone ID: MRT4577_8740C.1.pep
GEFFFIXXEDXXEWVEAIGXAIYVDRGNDKEVVWSGXGGYWNVLSATGPCRLMWCGD

SEQ ID NO: 355532 - protein, 55 aa, Zea mays
  Clone ID: MRT4577_87410C.1.pep
IPMSVTSRHVRSTLSILLTYVKHFVSWSSDNMTYHSLITFASRLCRILSSRSCVS

SEQ ID NO: 355533 - protein, 50 aa, Zea mays
  Clone ID: MRT4577_87411C.1.pep
MKRIIRISFTDAEATDSSSEEDTEERGGASQTRRRGKRLVKEIVIEPSDS

SEQ ID NO: 355534 - protein, 505 aa, Zea mays
  Clone ID: MRT4577_87412C.1.pep
MGCFQSKVAGPLPPNDAAALPADKPADPEAANGGADGEGDGDDKEAVKRAVPVFREFALAELRAATKGFSADLIVSESGEKAPNAVYRGRLDGGRLIAVKRFSRLSWPDPQQFLAEAAGVGKVRHRRLVNLIGCCAEGDERLLVAEYMPNDTLSKHLFHWDKQPLPWEMRLRVAYFIAQALDHCNAENRKIYHDLNAYRVLFDEEGDPRLSSFGLMKNSRDGKSYSTNLAYTPPEFLRTGRVIPESVIYSYGTVLLDLLSGKHIPPSHALDLIRGKNILLLMDSSLEGQYANEDASKLVDLASKCLQFESRDRPNIKYLLSSVGPLQNQKEVASHVFMGITKATSVLPTICSPLRKACTGMDLSAVHDILLKTGYKDDEGAENELSFQEWTQQVQEMLNTKKFGDIAFRDKDFKTAIDYYSKLVAMMSTPSATVFVRRSFSYLMNGQAELALRDAMQAQVCMPEWPTAFYLQALALSKLGMETDAQDMLNDGATFEAKKQNGWRS

SEQ ID NO: 355535 - protein, 157 aa, Zea mays
  Clone ID: MRT4577_87413C.1.pep
PAGVEKLLHTITNNRIAVLGFAFKKDTGDTRESAAITLIKDFIQENAQVAIYDPKVEHEQIYMDLSEPGVVDNRKQLDKQITICSDAYEAAKGADAVVIVTEWDEFKSDVLDYKKIYENMNKPAFLFDGRLLVDAAQLREIGFKVHIIGKNELAGTA

SEQ ID NO: 355536 - protein, 100 aa, Zea mays
  Clone ID: MRT4577_87414C.1.pep
TRFRDKDFKTAIDYYSKLVAMMSTPSATVFARRSFSYLMNEQAELALRDAMQAQVCMVRKLGIRLVQALALSKLGMETDAQDMLNDGATFEAKKQNGWRS

SEQ ID NO: 355537 - protein, 92 aa, Zea mays
  Clone ID: MRT4577_87415C.1.pep
CTQGCKHLMTPVTSTEYVIRGNALYCRQIHKLHMEHTPLHMMGACAAAPRSMVFLARRMIGTELLLAGFFGLAPKNEWEPNYEPRRHPFMKD

SEQ ID NO: 355538 - protein, 494 aa, Zea mays
  unsure (1)..(494): unsure at all Xaa locations
  Clone ID: MRT4577_87416C.1.pep
MELDLNVAEVAPEKPAAALEASDSGSSGSSVLNAEAASAGGGGPAPGEEGSSSTPAVLEFSILRSDSDAAGADADDGDATPSPPRHHHQQLVTRELFPAPXLGRARLLPRRPAAAAGHQGPAAPAPAPAXPPPPAQPQPAKKSRRGPRSRSSQYRGVTFYRRTGRWESHIWDCGKQVYLGGFDTAHAAARAYDRAAIKFRGVDADINFNLSDYDDDMKQMKSLSKEEFVHALRRQSTGFSRGSSKYRGVTLHKCGRWEARMGQFLGKKYIYLGLFDSEVEAARAYDKAAIKCNGREAVTNFEPSTYDGELLLTAEASAEVADDVDLNLSISQPASSQSPKRDKNCLGPQLHHHHGRPFDGSAVLKKTKIDAPSELSSAGRPHRSFLPHLVAAEHLPPRSHPFFITHHESDASRRDPSWAAAAAWKVTAAAPPPPTTTLLPLPLPSTSSAAASSGFSNTATTAAAAPSAASSRRFDPPPPSSSSSSSHHHHHHRR

SEQ ID NO: 355539 - protein, 119 aa, Zea mays
  unsure (1)..(119): unsure at all Xaa locations
  Clone ID: MRT4577_87417C.1.pep
GDPDNYTLANXLNTPPHIXPEXYFLFAXTILRSVPXNKLGGVLALLLXSILILAIIPILHISKQQSIXFRPLSQSLYXLLAADLLILTXIGGQPVSYPFTIIGQVASVLYFTTILILIP

SEQ ID NO: 355540 - protein, 56 aa, Zea mays
  Clone ID: MRT4577_87418C.1.pep
RSALVFVSASAVADDVDLNLSISQPASTQSPKRDKNCLGPQLHHHHGRPFDGSAVL

SEQ ID NO: 355541 - protein, 470 aa, Zea mays
  Clone ID: MRT4577_87419C.1.pep
MQLDLNVAEAPPPVEMEASDSGSSVLNASEAASAGGAPAPAEEGSSSTPAVLEFSILIRSDSDAAGADEDEDATPSPPPRHRHQHQQQLVTRELFPAGAGPPAPTPRHWAELGFFRADLQQQQAPGPRIVPHPHAAPPPAKKSRRGPRSRSSQYRGVTFYRRTGRWESHIWDCGKQVYLGGFDTAHAAARAYDRAAIKFRGVDADINFNLSDYEDDMKQMGSLSKEEFVHVLRRQSTGFSRGSSRYRGVTLHKCGRWEARMGQFLGKKYIYLGLFDSEVEAARAYDKAAIKCNGREAVTNFEPSTYHGELPTEVADVDLNLSISQPSPQRDKNSCLGLQLHHGPFEGSELKKTKIDDAPSELPGRPRQLSPLVAEHPPAWPAQPPHPFFVFTNHEMSASGDLHRRPAGAVPSWAWQVAAAAPPPAALPSSAAASSGFSNTATTAATTAPSASSLRYCPPPPPPSSHHHPR

SEQ ID NO: 355542 - protein, 58 aa, Zea mays
  unsure (1)..(58): unsure at all Xaa locations
  Clone ID: MRT4577_8741C.1.pep
VCENAIIIQYRMHQGFTXRMLPVSYLILXNTSXILQQLXLXHILSQSINAHHLRQREL

SEQ ID NO: 355543 - protein, 109 aa, Zea mays
  unsure (1)..(109): unsure at all Xaa locations
  Clone ID: MRT4577_87420C.1.pep
MNSSGTETRDKENKGACXHNGGVTMNNSASRSVSAALQFHGGRIGSYLKKGRYAQRGGTGAPYYLAAAIKYLIAEVLQLAENAGRYNRNTGMIARHVXLAIRNDEELGK

SEQ ID NO: 355544 - protein, 44 aa, Zea mays
  Clone ID: MRT4577_87421C.1.pep
PFRDPRAYDKAAIKCNGREAVTNFEPSTYDGELLLTAEASAEGN

SEQ ID NO: 355545 - protein, 100 aa, Zea mays
  Clone ID: MRT4577_87422C.1.pep
QDGRHGILHHSPRGRTPDRRSHTSQAINVGHQERGLQRQIDPHHKRRTYFTRRRSLCSEPGTLTKTRTTPTATSSLNTSWQSGTTLRTCTPSCCTAAAQS

SEQ ID NO: 355546 - protein, 132 aa, Zea mays
  Clone ID: MRT4577_87423C.1.pep
RLFGGRVGNQWQVELKELPEGERFCCISCSETLSSYYMIISDGTQLLVEPDLRIINKKHVTRSVFMDTIEDLIWPLLCGKMTTAYQSILLSSGVPILHEPFDPDRVTVTCCDLIPEMVNGMGPKEGMPGQDY

SEQ ID NO: 355547 - protein, 169 aa, Zea mays
  unsure (1)..(169): unsure at all Xaa locations
  Clone ID: MRT4577_87424C.1.pep
PIHAGGFDPAHAAARAYDRPTXVIKFHGVDADINFNLSDYEDDMKQMGSLSKEEFVHVLRRQSTGFSRDSSRYIYIGLFDSEVEAARAYDKAVIKCNGREAVTNFEPSTYHGELPTEVADVDLNLSISQPSPQRDKNSYLGLQLHHGPFEGSELKKTKASANDRYTLTS

SEQ ID NO: 355548 - protein, 224 aa, Zea mays
  unsure (1)..(224): unsure at all Xaa locations
  Clone ID: MRT4577_87425C.1.pep
RHWAELGFFRADLQQQQAPGPRIVPHPHAAPPPAKKSRRGPRSRSSQYRGVTFYRRTGRWESHIWDCGKQVYLGGFDTAHAAARXTGLDAQNSSSCESLTELIDXESLAPGTRRAYDRAAIKFRGVDADINFNLSDYEDDMKQMGSLSKEEFVHVLRRQSTGFSRGSSRYRGVTLHKCGRWEARMGQFLGKKSTRPNASFLFLFFIACSDDSTLVVPFLLILYM

SEQ ID NO: 355549 - protein, 133 aa, Zea mays
  Clone ID: MRT4577_87426C.1.pep
VHQEISTGGLQGLFPAGHGRWQQQLLLLPPCRCPLQHHQDFPTPPRQLPPPPHGPPPSGTARRRRRRRAITIPAERIKKPPCKSAGKLAFSPRPLPLSGGCDFFSFAPPAGVVVFCSRSIGFLVLLLLTLPIK

SEQ ID NO: 355550 - protein, 93 aa, Zea mays
  Clone ID: MRT4577_87427C.1.pep
DQVLIRYSPVFSLEPRTPPSRALCSRSHQTSLIAHGASRGDRAARRSKLSTCQLSLYIELGPGPSLMTPLQITIRAGRSFNMQWTLLATRWPF

SEQ ID NO: 355551 - protein, 45 aa, Zea mays
  Clone ID: MRT4577_87428C.1.pep
TQVKPPLKRFFLLKKKKKKKKKKKKKKKKKKKKKKKKKKKKTRER

SEQ ID NO: 355552 - protein, 174 aa, Zea mays
  Clone ID: MRT4577_87429C.1.pep
AASAGRTAAPAAAPSSKHSLEEACEQTAGHEDLCVETLSADPSSKTADTTGLARLAIQAAQRNASETATYLSSIYDDDSLENKTAQLQQCLENCGERYESAVEQLSDATSALDTGAYSESEELVVASQAEVRLCQRGCQAVPNHRNILSARNRNVDQLCSIALAITKLIHGPPS

SEQ ID NO: 355553 - protein, 118 aa, Zea mays
  Clone ID: MRT4577_8742C.1.pep
LGRTDTAPIRIVLLASLVDPPLPSPRFKMQIFVKTLTGKTITLEVESSDTIDNVKAKIQDKEGIPPAPSTWCSSSRWLLSHQSLKLLLLYLGYLVSLPLPMDGTVFQSICMVCVVSRD

SEQ ID NO: 355554 - protein, 353 aa, Zea mays
  unsure (1)..(353): unsure at all Xaa locations
  Clone ID: MRT4577_87430C.1.pep
MAAAEGQWVLMATGRTPTNIAVIKYWGKRDEALILPINDSISVTLDPDHLSATTTVAVSPSFPSDRMWLNGKEISLLGGRFQSCLREIRKRARDFEDKEKGVKIKKEDWDKLHVHIASYNNFPTAAGLASSAAGLACFVFTLGKLMNAKEDYGELSSIARQGSGSACRXIYXGVFVKWXAGEERNGSDSIAVQLADETHWNDLVIIIAVGSSKQKETSSTSGMRDIVETRPLLXYRAXGLCFHSKGLELCSALTIWRLKXKKIMIYFQFWNFNIGSVLXLICGFDYYFFSYDXCAALGVHVFHTVGPGRVWKMEEAIKNRDFESFAKLTCADSNQFHAVCLDTSPPIFYMNDT

SEQ ID NO: 355555 - protein, 113 aa, Zea mays
  Clone ID: MRT4577_87431C.1.pep
LLHFHQAWRWSKGCFCQRSSIDRFSPRTSKRRVVLDLGWNNGLSWGLKPMVSSNQPGPGNGLRFRENTLGSCHVGFVLIDLTVYWSCIMHLRWCSLLSNKDRTRSRLLFFSLA

SEQ ID NO: 355556 - protein, 420 aa, Zea mays
  unsure (1)..(420): unsure at all Xaa locations
  Clone ID: MRT4577_87432C.1.pep
MAAAEGQWVLMATGRTPTNIAVIKYWGKRDEALILPINDSISVTLDPDHLSATTTVAVSPSFPSDRMWLNGKEISLLGGRFQSCLREIRKRARDFEDKEKGVKIKKEDWDKLHVHIASYNNFPTAAGLASSAAGLACFVFTLGKLMNAKEDYGELSSIARQGSGSACRSIYGGFVKWCMGEKDDGSDSIAVQLADETHWNDLVIIIAVVSSKQKETSSTSGMRDSVETSPLLQYRAQTVVPGRVLKMEEAIKNRDFESFAKLTCADSNQFHAVCLDTSPPIFYMNDTSHRIIRXVEKWNHSEGTPQVAYTFDAGPNAVLIAQNRKTAAHFLQKLLYYFPPQDNDLSSYLVGDKSILGVAGLHSMKDVEALPAPPETKIPDQKFKGDVSYFICSRLGAGPKVVSDEGQALIDSVTGLPKGV

SEQ ID NO: 355557 - protein, 420 aa, Zea mays
  Clone ID: MRT4577_87433C.1.pep
MAAAEGQWVLMATGRTPTNIAVIKYWGKRDEALILPINDSISVTLDPDHLSATTTVAVSPSFPSDRMWLNGKEISLLGGRFQSCLREIRKRARDFEDKEKGVKIKKEDWDKLHVHIASYNNFPTAAGLASSAAGLACFVFTLGKLMNVKEDYGELSSIARQGSGSACRSIYGGFVKWCMGEKDDGSDSIAVQLADETHWNDLVIIIAVVSSKQKETSSTSGMRDSVETSPLLQYRAQTVVPGRVLKMEEAIKNRDFESFAKLTCADSNQFHAVCLDTSPPIFYMNDTSHRIISLVEKWNHSEGTPQVAYTFDAGPNAVLIAQNRKTAAHFLQKLLYYFPPQDNDLSSYLVGDKSILGDAGLHSMKDVEALPAPPDTKIPDQKFKGDVSYFICSRLGAGPKVVADEGQALIDSVTGLPKGV

SEQ ID NO: 355558 - protein, 137 aa, Zea mays
  Clone ID: MRT4577_87434C.1.pep
SGSGSIRAQEHHTPEPVIVAESHHAVAVDPRPRHKGGLKVNPRNFTISPGWCPWPRQGGSASHRGSINCSPEHKQRHKTARTVNDSTLALSLDKGTMLSVMFCMYLHSNPRTWASCRHTPARPPPRVRAAPPLADVG

SEQ ID NO: 355559 - protein, 89 aa, Zea mays
  Clone ID: MRT4577_87435C.1.pep
RWRPGLASSPHHPGACREATISNFTSSPETAQAIVLWFDTNVTWGVTAPHPTSSLTNDVCAARLSRVEEIHPRSSHRLQRRSSTRVLTK

SEQ ID NO: 355560 - protein, 67 aa, Zea mays
  Clone ID: MRT4577_87436C.1.pep
LGYAPWCACKRCYQNHICTKFTRSYSCFYCHIPITSGVCNLRKLKTSTLQGPTGKTSTRGTCITTAN

SEQ ID NO: 355561 - protein, 198 aa, Zea mays
  Clone ID: MRT4577_87437C.1.pep
MDLSNISIQWFRIHPKESNKEIISGATRPVYALEPHDVGRYLQAEIDVGGEIAVAKTAGPVDPDAGLVDYVETLVRKPETEFNVVVLQSNGVDQPKESVHVLNVGRLRMRLTKGKSVVAKEFYSSSMQLCGVRGGGEAASQAMFWRPRNDLSLVLAFESTRERNAAIMLARRFAVDCNVCAFTKRYIILAGPGDKTPW

SEQ ID NO: 355562 - protein, 83 aa, Zea mays
  unsure (1)..(83): unsure at all Xaa locations
  Clone ID: MRT4577_87438C.1.pep
MAAKIGXFLILLGNSAIVATATIFPQCSQAPIASLLPPYLSPTVSSMSENPTVQPYRIQXAITTSLLPLLHLILXQPTYLLQQ

SEQ ID NO: 355563 - protein, 185 aa, Zea mays
  unsure (1)..(185): unsure at all Xaa locations
  Clone ID: MRT4577_87439C.1.pep
MTKAATIYGSKTQSDALRPGPLRPENIFRNKFPTYKNGSNGIVIKLADGPEIPPLKEIVAKETAYLLDRRQRLSVRELAMKFEKGLSTATLLSNEVKWRQVVLMERDILLKNLKSVLESLRGQVTGKTKDEIEESISMVEILTVQLSKREAELVQQKEEVXKLAKSLKQMCFTLLYNLCKHVLVI

SEQ ID NO: 355564 - protein, 153 aa, Zea mays
  Clone ID: MRT4577_8743C.1.pep
MQIFVKTLTGKTITLEVESSDTIDNVKAKIQDKEGIPPDQQRLIFAGKQLEDGRTLADYNIQKESTLHLVLRLRGGMQIFVKTLTGKTITLEVESSDTIDNVKAKIQDKEGIPPDQQRLIFAGKQLEDGRTLADYNIQKESTLHLVLRLRGGY

SEQ ID NO: 355565 - protein, 90 aa, Zea mays
  unsure (1)..(90): unsure at all Xaa locations
  Clone ID: MRT4577_87440C.1.pep
PPLGSFGKQVWFHREVPAFVDPGGMPALPGVKTKELLFWVPISEFVVSPSXGPKFVFRPPGGVGGAFPVPPFQLEPEGGPKAGDPPAAPN

SEQ ID NO: 355566 - protein, 496 aa, Zea mays
  unsure (1)..(496): unsure at all Xaa locations
  Clone ID: MRT4577_87441C.1.pep
MTKAATLYGSKTQSDALRPGPLRPANIIRNKFPTYKNGSNGIVIKLADGPEMPPLKEIVAKETADLLDRRQRLSVRELAMKFEKGLNTATLLSNEVKWRQVALLERDILLKNLKSVLESLRGXVTGKTKDEIEESISMVEILAVQLSKREAELLQQKEEVTKFAKSLKQASEDAKRIVEEERANAHTEIETAKGAVQRVQQAVQEHEKMSQNTGKQKQDMEELKKEVREARRIKMLHQPSKAMDLENEIRILRNTFAEKSKDCVSLLKELETHKRLKENGTIPSFDLEGLQCLGSMLRIVGLSGTHMDLSNISIQWFRIHPKESNKEIISGATRPVYALEPHDVGRYLQAEIDVGGEIAVAKTAGPVDPDAGLVDYVETLVRKPETEFNVVVLQSNGVDQPKESVHVLNVGRLRMRLTKGKSVVAKEFYSSSMQLCGVRGGGEAASQAMFWRPRNDLSLVLAFESTRERNTAIMLARRFAVDCNIILAGPGDKTPW

SEQ ID NO: 355567 - protein, 112 aa, Zea mays
  unsure (1)..(112): unsure at all Xaa locations
  Clone ID: MRT4577_87442C.1.pep
KTKTKKNRKATFSKLKQSPTAYTNTIFPQCSQTPITSLLPPYLSPSVSSICXNPILKPYTIQHAISSFILPLSPFFLQQSSTLLQHLPLVHLLSQNIISQQLQHTVLSNLSL

SEQ ID NO: 355568 - protein, 45 aa, Zea mays
  unsure (1)..(45): unsure at all Xaa locations
  Clone ID: MRT4577_87443C.1.pep
FLSCLNFSYPRQFNHLMLSESTLGQDIPESVGGXNAISAXKLWPI

SEQ ID NO: 355569 - protein, 112 aa, Zea mays
  Clone ID: MRT4577_87444C.1.pep
FFYPPWRRVFPPPLRAVGRVHFFFCAPPVLPPPALQFCAPPFIWVGSLVGLPFLSAFCFCLVFRLALLALPFPPPCYSFGPGSAFLCSPSVSGELVELTSTRSRNTKGRPKR

SEQ ID NO: 355570 - protein, 82 aa, Zea mays
  Clone ID: MRT4577_87445C.1.pep
RGCPAQQQSEYPDKAVLEYVLRTVGTFPPIVVASEARTLEERLAEAAVGWAIIVYRCDCAESFNEFNANNITETFRVLLEMS

SEQ ID NO: 355571 - protein, 124 aa, Zea mays
  Clone ID: MRT4577_87446C.1.pep
FWLWSSTGTHISPAMLPPPPVMPALLFRSRSYRPGCEGHSLRPLALGAALHMSADEWLRQRYREWSVVSAEQEAAMPACPSSDARRLRPGSTAGMRAQRGPNRPSPTRRFAEKKSEGDSRPASR

SEQ ID NO: 355572 - protein, 35 aa, Zea mays
  Clone ID: MRT4577_87447C.1.pep
YVSLKTNLDMSLLVLRLETRKLVCWVMTVYLLEQG

SEQ ID NO: 355573 - protein, 56 aa, Zea mays
  unsure (1)..(56): unsure at all Xaa locations
  Clone ID: MRT4577_87448C.1.pep
PRVATRRASLVCXRTWSEAHWLQARSKLHAVQNAIGQIELVKRKLATKTEFVTAET

SEQ ID NO: 355574 - protein, 151 aa, Zea mays
  Clone ID: MRT4577_87449C.1.pep
MAGDGELLPRIAVVGAGIFARTQYIPRLREISHLVVLKAIWSRTQESAEAAAELARDFAPGIECKWGDAGLEEIMGDPSILGVAVVLAGQVQVELSLKMLKAGKHVIQEKPASGSTTEAETALSVYNSFPNKLPYKPIWALGENYRFEPAF

SEQ ID NO: 355575 - protein, 261 aa, Zea mays
  Clone ID: MRT4577_8744C.1.pep
MAPAFPTTLLHQASTSFRFPAGAAGCIRPHCLAPLAAPTTLSLAATPAVPRRLLLPVAAGIWDLISGGAGAAAAASLAVRRGMQLFRQGDVAGSLAEFDKAIEMDPRQKQYLWQRGLSLYYLDRFEEGAEQFRIDVAANPNDTEESIWCFLCEAQLYGTEEARKRFLEVGLDSRPVMREAYALLRSGADPEKLVAKFSSGTDGEVFYSSLYAGLYYESQKDADMAKSHIVAACKSPYGSRSGDYMASLALVHCQCRNWKVV

SEQ ID NO: 355576 - protein, 96 aa, Zea mays
  Clone ID: MRT4577_87450C.1.pep
IWGLGWHIFPLVLKLNCPFAQPIFKGFFNHKRGLKIFLFQDPWELNHFLVETNKFAYWSPGCLNYPKFFFFFKGPIIITIFFFWGLNPIFHLYNVP

SEQ ID NO: 355577 - protein, 56 aa, Zea mays
  Clone ID: MRT4577_87451C.1.pep
PVEHPPEEGNHQHTGHAFTVPRNAPPGQKVGFIASKRTERLRAQVLPTASKAKKTT

SEQ ID NO: 355578 - protein, 69 aa, Zea mays
  unsure (1)..(69): unsure at all Xaa locations
  Clone ID: MRT4577_87452C.1.pep
MQNEEGKTVDLYVPRKCSGTNKIITAKDHASVQMNIGHMDANGLYERHFTTFGHSGXVKAQGDSHNTLD

SEQ ID NO: 355579 - protein, 108 aa, Zea mays
  unsure (1)..(108): unsure at all Xaa locations
  Clone ID: MRT4577_87453C.1.pep
IYESVSIIGICCVHYIGYQITNKRCRVRSRFITVASASYNFDFFFFFILFLFFFFFFFIYFFLXGFVFFYLFFIFFYIFFFYFFFIILYLYFYFIIFFFNFFFFFFYF

SEQ ID NO: 355580 - protein, 433 aa, Zea mays
  Clone ID: MRT4577_87454C.1.pep
ADCAHLTFGSFVYGTLDASLTTKPLESHGDIVTIPDDDYDQSEGRIHDDESKVTLAPAANEYVTPASANSNVENLDITSVQQSEVTRSNFLDVTSNTEYNLSSPPDYATSSAALQDSTSQSYLQENRQFQSISPLPSFMQIQNGLMSPAIPPLREFDPAFSLLLTNPPIMHGTTSSSMSSATVSTQPQENANPVGLPNPQLTQSQPSTSIAPGPPLPQHLLHPYAQTTLPLGYASMIGYPSLPPSYAYLPPAAFQQPYMNSGMFLLQAAAAVPNSSVKYPLPQYKSNIALASLPQPGSLLSSYVGGFGTANNMPGNFPLNQSTTSATATLGFDGTVPSHLEDGNQFVCLQQNENPAMWMHGAGSRGMPPLAASTMYGYQGQSHQTGLRQGQLPSQYGSALGQSQPGLGPEHRNPSDSNLSGAAQANQMWPNSY

SEQ ID NO: 355581 - protein, 280 aa, Zea mays
  Clone ID: MRT4577_87455C.1.pep
IRLERSFIWWMKVLLGCFLLILVGYVFVKWGVPFVFEKVLLPIMQWEASAFGRPVLAIVLVASLALFPVILVPSGPSMWLAGMIFGYGWGFLIIMAGSTIGMVVPYWIGSLFRERLHVWLTKWPQQIALIKLAGEGNWFQQFRVVALFRISPFPYTIFNYAVTVTEIKFNPYLCGSVAGMVPEAFIYIYSGRLIRTLADMKYGNYKMTPVEIAYNAISFVIAIALTVAFTVYAKRALGDIKSPDDGIGKDEEDHGPNGSGVRMNRRQERADARYIELDDM

SEQ ID NO: 355582 - protein, 77 aa, Zea mays
  Clone ID: MRT4577_87456C.1.pep
LYCRLMIRLRPLRSESSCFDQTTFLPGSLMPIMGVRNTAVPSTFLIRAWTGKGSVKPQTNNKSGNTNNYTKKSCSQT

SEQ ID NO: 355583 - protein, 827 aa, Zea mays
  unsure (1)..(827): unsure at all Xaa locations
  Clone ID: MRT4577_87457C.1.pep
MRGGGRGGGGRQPSYAAPDGADAAAIPVASRKMVQSLKGILADRSEGEIYATLCDCGMDPDIAVERLISQDTFHEVRRKRDRKKETKVNHETRPRPFQKYTYRGYKAVSDRSGRDPTGGFKGPVKKEPELQAPLNSSALDVKTSDTTEIFSATINXLPRLMLXNTTSQPLSKVQHGWGGIPGRPSMAEIVKMGRPQAKVGSRSVASSTALPTVGDSVISNTPNLVPEEYNRTVFASEAGHVAADKLPNGAVEVHSLPKDASAFDMLPSAEGTDVEAPSMSASAQGSSMPDANEDDIXICKFGRGQYRKLDXPGQVSASGKDIQSEYTEVVSHVDEGSIEKTDDFQLNGLPFEHNQNLNGDVSTATTQFDHLTLHEGPKLSDDNPAVIIPDHLQVSNADCAHLTFGSFVSGTLDSSLTTKPLESHGDAATVPDDDSIDQSDGRIHDDEGKVTLATDVNEYVTSAANSNEENLDITSVQQSEVTRADFLDVTSNTEYNLTSTPDYATSSAPLQDSASQSLQENRQFQNISPFSSFMQMQNGLLPPAIPPLREFDPAFSLLLTHPPMMHGTMSSSMSNTTVSTQPQENANPVGLPNPQLTQSQQSTSIASGPPLPQHLLHPYAQPTLPLGYASMIGYPSLPPSYAYLPPAAFQQPYMNSGLFHQAAAAVPTSSVKYPLPQYKSNIALASLPQPGSLLSSYVGGFGTANNMPGNFPLNQSTTSATATLGFDGTVPSHLEXETSLFALQQNENPAMWMHGASSRGMPPLAASTMYGYQGQSHQAGLRQGQLPSQFGSALGQSQPGLGPEHRNPSDSNLSGAAQANQMWPNTY

SEQ ID NO: 355584 - protein, 428 aa, Zea mays
  unsure (1)..(428): unsure at all Xaa locations
  Clone ID: MRT4577_87458C.1.pep
PASEASQVQILEEEPVLESIFSXVRKLLRRNSVPIPTIXAEVEHVLKFPSYATLDRLEHRRNIERFKTGGFQMLKSAFRVSHADEEILTLATDGFHSSQAVYQQEIEQLNRWVKEVRLPELEFARVLPLPILFSAAATMFPAELSEARIAWSKSSVLTTIVDDLFDTGDSMEELENLVTLFDLWDAHQEAGFYSERVEIVFRAVYDTCKHLVGKAAAVQNRGVMDHIADLWVDVVRAMMPEAEWRMSGRVPSMEEYLPIGEVSFAIGPIVPMAAYLVGPELPEDVVGSAEYEEMLSLVNLSGRLLNDXLQTYERERKQGKINXLSVLLLADPSYCGSVEAATREVRSVIEASRRKLLRLVLRDGAAVPRPARQLFWNMSKVLHLFYMDRDGYSSPLTNAIDEVLIKPLQMGRRREEDQLPGRVRSNQN

SEQ ID NO: 355585 - protein, 51 aa, Zea mays
  Clone ID: MRT4577_87459C.1.pep
GFPAKKRGASRAVGTAPHFFLRCFIEPFGVSSNFLGVENWIPPSSQNKNHD

SEQ ID NO: 355586 - protein, 136 aa, Zea mays
  unsure (1)..(136): unsure at all Xaa locations
  Clone ID: MRT4577_8745C.1.pep
MQIFVKTLTGKTITLEVESSDTIDNVKAKIQDKEGIPPDQQRFIXAGKQLEDGRTLADYNIQKESTLHLVLRLRGGMQIFVKTLTGKTITLEVGSSDTIDYVKAKNQDKEGFLPDQXWFIFSGKNLRTAPHLVDTK

SEQ ID NO: 355587 - protein, 96 aa, Zea mays
  Clone ID: MRT4577_87460C.1.pep
EEAAEAGAQKRGRGAPPCEAAVLEHVQGAPPVLHGQGRLLISAHECHRRGVDQAAPDGKETRRRSTPRSRPVKPKLGASSATYGIQMLTGGVQVNL

SEQ ID NO: 355588 - protein, 50 aa, Zea mays
  Clone ID: MRT4577_87461C.1.pep
LLLSSLLGHQALEIIKVLPAHVGGVQVPYCCSRVPIHGFREGIVRSLDLN

SEQ ID NO: 355589 - protein, 444 aa, Zea mays
  Clone ID: MRT4577_87462C.1.pep
MREILHIQGGQCGNQIGSKFWEVVCDEHGIDPTGRYMGTSDVQLERVNVYYNEASCGRFVPRAVLMDLEPGTMDAVRTGPYGQIFRPDNFVFGQSGAGNNWAKGHYTEGAELIDSVLDVVRKEAENCDCLQGFQVCHSLGGGTGSGMGTLLISKIREEYPDRMMMTFSVFPSPKVSDTVVEPYNATLSVHQLVENADECMVLDNEALYDICFRTLKLTTPSFGDLNHLISATMSGVTCCLRFPGQLNSDLRKLAVNLIPFPRLHFFMVGFAPLTSRGSQQYRSLTVPELTQQMWDSKNMMCAADPRHGRYLTASAMFRGKMSTKEVDEQMINVQNKNSSYFVEWIPNNVKSSVCDIPPRGLSMSSTFVGNSTSIQEMFRRVSEQFTAMFRRKAFLHWYTGEGMDEMEFTEAESNMNDLVSEYQQYQDATADEEADYEEEEAAAE

SEQ ID NO: 355590 - protein, 73 aa, Zea mays
  Clone ID: MRT4577_87464C.1.pep
AFEVMVGLPTTGGVHPATAAKVGLKARAQFFFSVFPKIKFGRGELYQPDEKLVPESFFNRSGKFVRPQKKRTS

SEQ ID NO: 355591 - protein, 162 aa, Zea mays
  Clone ID: MRT4577_87465C.1.pep
PRQGGVGARVTNKTRGGPAVRKASAQSHKGASAAADNGSDSDAPPEEAKKQPAADKKGGGGGGVAKKRNAVNFLNRMKQGGSAPSTERVSLLETLKLSAAAEQKKAGKGEGKEPAGGSGSKKATPGRRNVGRPPKRAAAPPSPPPSKRAKGGGGGGKRGGRK

SEQ ID NO: 355592 - protein, 81 aa, Zea mays
  unsure (1)..(81): unsure at all Xaa locations
  Clone ID: MRT4577_87466C.1.pep
MKFHFPNYHIFHISETLFLFHNHDSGCITTNELLNVIXTASYXPTDAELQDIINHVDPAGHDTIHFPHFLNLIFFFINHTH

SEQ ID NO: 355593 - protein, 83 aa, Zea mays
  Clone ID: MRT4577_87467C.1.pep
GFVSAKLRAHRAKSIKFKDGYMISSGHPVTLYIDSAVRHVLLRQGVLGIKVKIMLDWDPKGKQGPTMPRLWLWSSFFLCNVHY

SEQ ID NO: 355594 - protein, 72 aa, Zea mays
  Clone ID: MRT4577_87468C.1.pep
AWAGPPQQLECIRSSPVLGPSVGRFVPGPNVSHTIPLLVGPPRYPHACLCLFLPVSLPPAPPLAGKKPFLFC

SEQ ID NO: 355595 - protein, 232 aa, Zea mays
  Clone ID: MRT4577_87469C.1.pep
MASTHAISKKRKFVADGVFFAELNEMLTRELAEDGYSGVEVRVTPMRTEIIIRATRTQNVLGEKGRRIRELTSVVQKRFNFPEGGVELYAEKVNNRGLCAIAQAESLRYKLLGGLAVRRACYGVLRFVMESGAKGCEVIVSGKLRAQRAKSMKFKDGYMISSGHPVNLYIDSAVRHVLLRQGVLGIKVKIMLDWDPKGKQGPTMPLPDLVTIHVPKEEDEFLRPLAAEIQVA

SEQ ID NO: 355596 - protein, 164 aa, Zea mays
  unsure (1)..(164): unsure at all Xaa locations
  Clone ID: MRT4577_8746C.1.pep
KXXRHGARDANXCRXRVXAVGGPRGACFCWAAGGRPTLGRARHSSCRGQVKASAXXLAWAAGXXASRXXGGPGPLSACLACGGGXSGNPSRKARASDPARPTGARXXLRTAAQGXRRQGAVQGRFQRRATAAQRFPLQVAGVQHSPYPPSAPFHRLRPGVNPKT

SEQ ID NO: 355597 - protein, 128 aa, Zea mays
  Clone ID: MRT4577_87470C.1.pep
ESLRYKLFGGLAVRRACYGVLRFVMESGAKGCEVIVSGKLRAQRAKSMKFKDGYMISSGHPVNLYIDSAVRHVLLRQGVLGIKVKIMLDWDPKGKQGPTMPLPDLVTIHVPKEEDEFLRPLAAEIQVA

SEQ ID NO: 355598 - protein, 83 aa, Zea mays
  unsure (1)..(83): unsure at all Xaa locations
  Clone ID: MRT4577_87471C.1.pep
MQELLLQDTATDITASSFIATKPAAAAGFQQXKKLTMMEIPSIFIPEDWSFTFYEGLNRHPDSIFRDKTVAELGCGKTVDIYC

SEQ ID NO: 355599 - protein, 99 aa, Zea mays
  Clone ID: MRT4577_87472C.1.pep
GSFKFETFKPVCRSRLPVCKCESHRPLILQKSLSSFKIQLADWSLYNPPINRHRAMSGLLALASSYALWFCVKCRWYLEPGSIFAFLAAGVFLFLFWQL

SEQ ID NO: 355600 - protein, 104 aa, Zea mays
  Clone ID: MRT4577_87473C.1.pep
CFPDPPLLFPFGVLCPFFGRRPAWLRAGLCSAVLLCAAFSCCVLGLGWVRVSSFTCCLLVSGWVWWCVVACVLPGLSVGLVRGWWACGWPLLGVSGPVVLPGSA

SEQ ID NO: 355601 - protein, 91 aa, Zea mays
  Clone ID: MRT4577_87474C.1.pep
IYMIYIRYICPWNLGYLPINRIYILLIECMNDIRITPLIVLGTFLKLSVYDRPIDRHESSLAELYGFVIKIVCLIDAKAYRRSICSDDTRL

SEQ ID NO: 355602 - protein, 96 aa, Zea mays
  Clone ID: MRT4577_87475C.1.pep
ILGRMEVFSNVRHMSIVGGSGKSCMARVYVQAHPIDSDFKSCICRSPVSPPMSMHSAVLQSPCMLRVVMRDCPGFMVQVGPSPHALYTPCRSSMLL

SEQ ID NO: 355603 - protein, 64 aa, Zea mays
  Clone ID: MRT4577_87476C.1.pep
RVLFSGGGCTQPVDRTIGIQYIEPRTCSLHKVLYLLNSLGYLAITWKLAALCKKWLSQTFTNFE

SEQ ID NO: 355604 - protein, 173 aa, Zea mays
  unsure (1)..(173): unsure at all Xaa locations
  Clone ID: MRT4577_87477C.1.pep
WNSDEGEKARSTRVPARLTPFRLVPIASVSRRFISLDYTLKGCLEMHLELSGFQTPNAGWXELYCLEPXIWGDGQMPGDXTIAGGEDALNTYVTDTGAXKHARWAVVGGLYPAAIDQVRSWTYRQLMHCEQFISXIEDVVKHFARGHYAFDDGYCVTCXLARITRIADXCTGV

SEQ ID NO: 355605 - protein, 56 aa, Zea mays
  Clone ID: MRT4577_87478C.1.pep
SVPSIIIHLSSIGTISHLQYHLSIYPNPDYSACGCCSHCSSITCSLYIDRRLLLWS

SEQ ID NO: 355606 - protein, 90 aa, Zea mays
  unsure (1)..(90): unsure at all Xaa locations
  Clone ID: MRT4577_87479C.1.pep
DAASTQYASSESSTRTYMSRXXQKKVXLIKIRXXNXXXXNNNSPPTHINSQDKNIPYNLHDHTNHPPNKSNPNKTTTKLNKTPTQNQTNK

SEQ ID NO: 355607 - protein, 213 aa, Zea mays
  unsure (1)..(213): unsure at all Xaa locations
  Clone ID: MRT4577_8747C.1.pep
MQIFVKTLTGKTITLEVESSDTIDNVKAKIQDKEGIPPDQQRLIFAGKQLEDGRTLADYNIQKESTLHXVLRLRGGMQIFVKTLTGKTITLEVESSDTIDNVKAKIQDKEGIPPDQQRLIFAGKQLEDGRTLADYNIQKESTLHLVLRLRGGMQIFVKTLTGKTXITLEVESSDTIDNVKAKIQDKEGIPPDQQRLIFAGKQLEDGRTLADYT

SEQ ID NO: 355608 - protein, 285 aa, Zea mays
  Clone ID: MRT4577_87480C.1.pep
SRPAGYDSWSPYNDVSINKQYNYVEDSFARRNVGNNAAPSSSQMPRPAVRSNLNSGLHNDASYHNYDSIMAGTSAMNITSTAETGKVPERVLRGDLDKGQTNYRLEDQHVIVQPPQGRLPWGNPAEGRVPMNRVQSQAKQHLENMDAKQDHKKLLPDPKKSPLDRFMDTSLPSRNMDMRSQRLDFDDVSECEIPWEDLVIGERIGLGSYGEVYRADWNGTEVAVKKFLDQDFYGDALDEFRSEVRIMRRLRHPNIVLFMGAVTRPPNLSIVSEYLPRGSLYKILH

SEQ ID NO: 355609 - protein, 141 aa, Zea mays
  Clone ID: MRT4577_87481C.1.pep
MHQAGGMGRSLELLLIQFLMPDNDTRRQAEEQIRRLARDPQVVPALVHHLRTAKTPNVRQLAAVLLRKKITSHWPKLPPDSKASLKQALIDSITLDHRFFAKYLSPILLRMSALESARFQFTQIVHLAICLRNTLSVFSTY

SEQ ID NO: 355610 - protein, 52 aa, Zea mays
  Clone ID: MRT4577_87482C.1.pep
AQARPPPLFPRWGFLVQALVPGRGPLKNLGDPMADPVNNKGGADAPNLVPGK

SEQ ID NO: 355611 - protein, 277 aa, Zea mays
  unsure (1)..(277): unsure at all Xaa locations
  Clone ID: MRT4577_87483C.1.pep
RTRPASYHNYDSIMAGTSAMFITSTAETGKVPERVMRGDLDKGQTNYRLEDQHVIVQPPQGRLPWGIPAEGSVPMNRVQSQAKQHLENMDAKQDHKKLLPDPKKSPLDKFMDTSLPSRNMDMRSQRLDFDDVSECEIPWEDLVIGERIGLGSYGEIYCADWNGTEVAVKKFLDQDFYGDALDEFRSEVXTFICFYLGVFLNKLFNFHIYSVQLLIYCLIYGYTFXKIRIMRRLRHPNIVLFMGAVTRPPNLSIVSEYIPRYNSYFYYTITVYMECVN

SEQ ID NO: 355612 - protein, 81 aa, Zea mays
  Clone ID: MRT4577_87484C.1.pep
DTIRGRDNKHVLRMRANRNHTVDYLTTKKAPAVPNDDVLDVQPIKILVLKRIHRSDLDTRCALHPTIRVKVIYNGDYLEIY

SEQ ID NO: 355613 - protein, 163 aa, Zea mays
  Clone ID: MRT4577_87485C.1.pep
GRVGSCSGGGGGGSRQQPRSRYHTMMSFLSKHVRRYQSLDDKIVDLCARMEESKRSAGRGAGEESQSQSAALGQFLEETFQLQRFMVATGQKLLETQSRIAAGLARDRCCCGDGEDGVDMKRLMEVAGALLRDVQRGLEVRIARIIGDLEGTLTFHGILRSTR

SEQ ID NO: 355614 - protein, 251 aa, Zea mays
  unsure (1)..(251): unsure at all Xaa locations
  Clone ID: MRT4577_87486C.1.pep
YSSAANLLSIPYLCVLNSPSTKSLHPIIVSGGEGKRREGDGGGDGHGFPXTLSRRELQALCKRNGVRANMTNAAMAEALQGLTSVDGVDEIGTTLCLPTATPGRSAMKSAAKMVAVEEQQHGSPLPRGRRVSVKSPEAIRMEVGGEDEMKENVKTPGVVLRSTRRGIRATPAPLPTPVPACSARATARRTDVRKTGEVAPTPATRRRTASRKAAGAVEADRHAEDVSEDKTSKMTRALDQEAEVVAVASKE

SEQ ID NO: 355615 - protein, 135 aa, Zea mays
  unsure (1)..(135): unsure at all Xaa locations
  Clone ID: MRT4577_87487C.1.pep
GFPVDHAYETHQANALPSPTTTASKILXALLGLFALXWAQPNAGIITKGSLAPRARFPQLLPPVTSMGSDHPTVLAYRLQLALAASALHQPIVQLQQQSLAHLTLQTIATQHPQQQQFMPSLSHLAEVNPVTYLQ

SEQ ID NO: 355616 - protein, 539 aa, Zea mays
  unsure (1)..(539): unsure at all Xaa locations
  Clone ID: MRT4577_87488C.1.pep
KKIAKLQRVIRSMKXQQRKSVEETGSSFYSPLTYLKDAQGFAEKLFSRLQKCNERFEVRMMMLKVIARTIGLHHLVLLNFYPYLQRYVQPHQRDVTTLLAAAVQACHDMVPPDAVEPLFKQIVNQFVHDRSRPEAIAVGLNVVREICMRIPLMMNEDLLQDLVLYKKSHEKAVSIAARSLITLFREICPSLLVKKDRGRPVDPKARPKAFGEVTVASNVPGAELLDENISSEGESSDDESDGFDSDDEMDLTPAPPGTEENMEGSSVANKHDADGDTKEEDDASDDEDGTDQDDSNSDSDELDDDSDVDVGTDISDEDEGDDGELKESINGSEDEALDQNEDSEEEDKSKGSGSKAQKRKLNDYIGQLSSADASLRVLKRLATAKKAEEPSDETGKILSDEDFKRIKELKAKKEAKLALAQHGLIKGVDTRSVTFKMPSSDQLSRKRVDPLELEAHVRRKMSKEERLALVKAGREDRGPYMARAAVKQKKTGGLSNKQKQHKKRMPLAATRAKAARSRQEKKQQRKRSGNQFRGRKAWK

SEQ ID NO: 355617 - protein, 377 aa, Zea mays
  Clone ID: MRT4577_87489C.1.pep
MGVPAFYRWLADRYPLTVSDAEEEEPVELEPGAFVPVDLRRPNPNGLEFDNLYLDMNGIIHPCFHPEGRPAPTTYDEVFKSIFDYIDHLFGLIRPRKLLYMAIDGVAPRAKMNQQRSRRFRAAKDAADAAAEEERLRKEFEAEGRTLAQKEKSEAIDSNVITPGTEFMFVLSTALQYYIQLRLNHTLGWQSVKIILSDSNVPGEGEHKIMSYIRLQRNLPGFDPNTRHCLYGLDADLIMLALATHEVHFSILREVISMPGQHEKCFLCGQVGHLAAECRGPSQPDNSVELPPIHKKKYQFLNIWVLREYLAKDLEIIDAPFKINFERLIDDFVFMCFFVGNDFLPHMPTLEIREGAINLLMSIYRSEFTSMGCYLTD

SEQ ID NO: 355618 - protein, 124 aa, Zea mays
  Clone ID: MRT4577_8748C.1.pep
MQIFGKTLTGKTITLEGESSDTIDNAKAKIQDKEGIPPDQKGFIFPGKQLEDGRTLADYNIQKESTLHLVLRLRGGMQIFVKTLTGKTITLEGESSDTIDNVKAKIQDKEGIPPAQQRFIFAGK

SEQ ID NO: 355619 - protein, 125 aa, Zea mays
  unsure (1)..(125): unsure at all Xaa locations
  Clone ID: MRT4577_87490C.1.pep
GGFLGALKSFLAPQKRXKAGKVFPKGSPKAPRELVPPSPNSLEEDTGGYMAGFPPNPXPPKGSLRGFLGGWGGPPPFPPEDFFFPLEKAFRSLADFFSKGGPSPFFSRGVKNKFLFSPSPPNPPL

SEQ ID NO: 355620 - protein, 253 aa, Zea mays
  unsure (1)..(253): unsure at all Xaa locations
  Clone ID: MRT4577_87491C.1.pep
PAKVDVTPPKVHQPSVAPPPKVDYAIDLFNMLSMDGTTEKEPVSSSNDDNAWDGFQSAEPAPNSEKKDTAKPVESKAQSTTGIEDLFKDSPAVAASSAPVASKSNPQTDIMSLFEKSNMVSPFAIHQQQLAFMTQQQALLMAALKSGNXTPNGSGEXPQMVPGSASVLNANGSNAPNGSLPSHSWPNLGYQNPASIPAAAPQNGVAKAGNNNQDFFSGNFGFGSPGMPANGSTTAGANKSASTPTSSTLPSHQ

SEQ ID NO: 355621 - protein, 117 aa, Zea mays
  unsure (1)..(117): unsure at all Xaa locations
  Clone ID: MRT4577_87492C.1.pep
QAEGRRTVRLVHSAGTYSDAHPSAPRLLRGILRAEGPCALYRGMAAPLASVAFQNAMVFQVYAXLSRVAGPXATSEPPSYASVALAGVSTGALQTLILSPVELVKIRLQLEGGVGAR

SEQ ID NO: 355622 - protein, 174 aa, Zea mays
  Clone ID: MRT4577_87493C.1.pep
MVAAGTYSDDTSGGGCGSMEFWPEFLASSGGREFVAGGVGGMAGVLAGHPLDTLRIRLQQPPAAGAPRRRDAHPSAPRLLRGILRAEGPCALYRGMAAPLASVAFQNAMVFQVYAVLSRSLGPVTFEPSSYASVALAGVSTGALQTLILSPVELVQIPLQLEAAFGARPRGDGP

SEQ ID NO: 355623 - protein, 55 aa, Zea mays
  Clone ID: MRT4577_87494C.1.pep
VFNGVITTSTIEASSLDPPKPSLDYFFPLILAIWSRHACLERYADPCVTISSIIM

SEQ ID NO: 355624 - protein, 58 aa, Zea mays
  unsure (1)..(58): unsure at all Xaa locations
  Clone ID: MRT4577_87495C.1.pep
VGLDRKXVVXWVXXCDXEDXXXXESGXXYEKGWEXLKGGDGVLVXGGFXERGXXGKIL

SEQ ID NO: 355625 - protein, 45 aa, Zea mays
  Clone ID: MRT4577_87496C.1.pep
PPARPHGTSVCLLFSAGASLLLSAWVGPPGVTPVLKPKPPLKKTK

SEQ ID NO: 355626 - protein, 58 aa, Zea mays
  Clone ID: MRT4577_87497C.1.pep
HCGWYRMRAELVLQPLRIDNSGIENRSPKGLLKIAKWSASGFSQYGSRQSSADQDRKK

SEQ ID NO: 355627 - protein, 139 aa, Zea mays
  Clone ID: MRT4577_87498C.1.pep
HASAHASAHASGSPDRLRRLVQLAYHRPRRFTPGFVLRDLIQYLYSDKVEEKKELIKGITLGNKDKFQLTPLPQQVLVLWGEHDQIFPVEKAFEVARELGANARLEVLEDTGHMPQEEDPKRFNEAILNFLLPAPESSL

SEQ ID NO: 355628 - protein, 70 aa, Zea mays; identical to SEQ ID NO: 247442
  Clone ID: MRT4577_87499C.1.pep

SEQ ID NO: 355629 - protein, 462 aa, Zea mays
  Clone ID: MRT4577_8749C.1.pep
MQIFVKTLTGKTITLEVESSDTIDNVKAKIQDKEGIPPDQQRLIFAGKQLEDGRTLADYNIQKESTLHLVLRLRGGMQIFVKTLTGKTITLEVESSDTIDNVKAKIQDKEGIPPDQQRLIFAGKQLEDGRTLADYNIQKESTLHLVLRLRGGMQIFVKTLTGKTITLEVESSDTIDNVKAKIQDKEGIPPDQQRLIFAGKQLEDGRTLADYNIQKESTLHLVLRLRGGMQIFVKTLTGKTITLEVESSDTIDNVKAKIQDKEGIPPDQQRLIFAGKQLEDGRTLADYNIQKESTLHLVLRLRGGMQIFVKTLTGKTITLEVESSDTIDNVKAKIQDKEGIPPDQQRLIFAGKQLEDGRTLADYNIQKESTLHLVLRLRGGMQIFVKTLTGKTITLEVESSDTIDNVKAKIQDKEGIPPDQQRLIFAGKQLEDGRTLADYNIQCLCHCPWMVLSFKVFVWFVS

SEQ ID NO: 355630 - protein, 137 aa, Zea mays
  unsure (1)..(137): unsure at all Xaa locations
  Clone ID: MRT4577_874C.1.pep
EFFSVPFGLFGKSAYACRDSSCSDGTTEGLIKVRDAYPFGVDPVWHGSRSELPFLNSLKMKMSILLGVAQMNLGIVISYFNAKFFRNSLNVWYQFIPQLIFLNSLFGYLAXLLVLSEXTGSLADLIHSMIYMSTHNI

SEQ ID NO: 355631 - protein, 191 aa, Zea mays
  Clone ID: MRT4577_87500C.1.pep
KNVLKDYNIYWHEGAPLPPPSTNGVDDEDQANKHQNIGDPILPSKLQLITKDLPWLVGGAASQQSRFAFWKRTVDRAKRLPAILVNSFPGEGAGDSDRYDPPPGQRILHVGPLFNVNVSLAAGAAENNGSSCVPLEKPNAAAATNMWQADSTCMDWLDRRSPGSVVYVSFGSWVAPIGPERMAEFALGLQA

SEQ ID NO: 355632 - protein, 61 aa, Zea mays
  Clone ID: MRT4577_87501C.1.pep
VKFLVLKCDINKREMCIGEYANMNYYVTGVTCHEKVYDSCMLDQLYIVSIFFNTSRCKVIS

SEQ ID NO: 355633 - protein, 63 aa, Zea mays
  Clone ID: MRT4577_87502C.1.pep
KYPPPPPPSVSTKKTRTLVSSSTLKRPLCCCGELPTQRNGSFIKGLIYVLASAPTEISVKSTV

SEQ ID NO: 355634 - protein, 464 aa, Zea mays
  unsure (1)..(464): unsure at all Xaa locations
  Clone ID: MRT4577_87503C.1.pep
MATYDKAIESYKKAVTTAASLAASAMLVRGVVNELVPYEVRDLLFSGLGYLRSRMSSRHTVVIEETEGWTSNQLYDAARTYLATRINTDMQRLRVSRVDEGKSLMFSMEEGEEMADVHAGAEFRWRLVCRDGAGNGAGNGAGNGHGHGHARGGSYRVEVRSFEMSFHRRHKEKAIASYLPHIXLAEAKKIKDQDRTLKIYMNEGESWFAIDLHHPSTFTTLAMDRKMKRAVMDDLERFVRRKEYYRRIGKAWKRGYLLYGPPGTGKSSLIAAMANYLKFDVYDLELTEVNWNSTLRRLLIGMTNRSILVIEDIDCSLDLQQRADEAQDAGTKSNPSEDKVTLSGLLNFVDGLWSTSGEERIIIFTTNYKERLDPALLRPGRMDMHIHMGYCCPESFRILASNYHSITDHDTYPEIEALITEVMVTPAEVAEVLMRNEDPDVALEGLIQFLNGKKDHAKDDSRQG

SEQ ID NO: 355635 - protein, 114 aa, Zea mays
  Clone ID: MRT4577_87504C.1.pep
NNSGTLVVVGGLKDLFFAKKKKKKKKKKKKKKKKKKKKKKKKKKKKKKKKKKKKKKKKKKKKKKKKKKKKKGGALFKKTKFYSPGLGKLKFFFWGPQNLIPGGPVFKKGGVGEK

SEQ ID NO: 355636 - protein, 133 aa, Zea mays
  unsure (1)..(133): unsure at all Xaa locations
  Clone ID: MRT4577_87505C.1.pep
SFGLYLNIKVSFIDGSSFLDISHDLNTNPFSAKLLKKEVSVLDSTHLXMKWLEQDESACELREELDRVNSENKKLTDMSATVCESYSDLHNHLDKFQSRHSHDIDQTDIPSETISHDPDEFLXGFPIGLSSGK

SEQ ID NO: 355637 - protein, 94 aa, Zea mays
  Clone ID: MRT4577_87506C.1.pep
VIVVWPTREKLAIYPGIIHKRDRCFMTYDYFRLKHTRRGEGKNDAHLCNLCYKVHEFLQKQACSYCIFFRLNCFTAINNFLFSSLCYFYVHVFA

SEQ ID NO: 355638 - protein, 53 aa, Zea mays
  Clone ID: MRT4577_87507C.1.pep
HSGTWSTMYAHALTALLCHVSHQDSVGKERHIANRLGFSGLQLTNGLVIFGDP

SEQ ID NO: 355639 - protein, 168 aa, Zea mays
  Clone ID: MRT4577_87508C.1.pep
RPGRAVIGPGKNIEETDIGQLPYLQAVVKETFRLHPSVPLLPRRAPVDTKVMGYTIPRGCRMFINIWAVGRDKETWPEPETFMPERFLGKTVDLRGGDFDLIPFGGGRRICPGMPLAIRMVHLLLASLLNQFTWRLPVEIEGRGVGMDEKFGLTLIKAVPLCAMATPI

SEQ ID NO: 355640 - protein, 54 aa, Zea mays
  Clone ID: MRT4577_87509C.1.pep
IIYFFLRGAPGSDSSATAERRLRSPVASHCSGPSPTKNKFNIEVNTWSTYQILN

SEQ ID NO: 355641 - protein, 101 aa, Zea mays
  Clone ID: MRT4577_8750C.1.pep
FFFFFIELVVYAFLGDEHETACNVGSRSTAAVERNKKTLPCFSTQQQKERDEKKIDHNKQTNYLRRWGNGPWAPRSMICLLSISLPSPNRPSGVESVYAAN

SEQ ID NO: 355642 - protein, 87 aa, Zea mays
  Clone ID: MRT4577_87510C.1.pep
TLEPCQDEVFASGSDSSLPFPFFSAPSKRSTLTRHRRRLYRAGMYSASSTALFVASILYGDASPCCHTIFVHIYVWYCSTSHVQSLC

SEQ ID NO: 355643 - protein, 259 aa, Zea mays
  Clone ID: MRT4577_87511C.1.pep
MIPLSTARAISPCHIPAALPRTSIGLGNIFRPAHGRPSLYLAASRASGTWTRNDVKTYQHRRVVRGPAYGQCGQGHIGLFSTSTTRRLGIEDKAKEPSASRNNAEQHVPPTSASAKLATTIKSTLKLDKPRHEQIYNLPNMLTFSRLIATPAVGYLIIHDQHLYAFSLFIYAAFSDLLDGWIARRWNLQTVVGSVVDPMADKFLMTTLVTCLAVNGSLPMPLACIILGRDVSLAISALYYRYASLPAPKTMARYWDFSL

SEQ ID NO: 355644 - protein, 42 aa, Zea mays
  Clone ID: MRT4577_87512C.1.pep
GKKKKKKKKKKKKKKKKKKKKKKKKKKKKKQKQPKKKKKKKL

SEQ ID NO: 355645 - protein, 82 aa, Zea mays
  unsure (1)..(82): unsure at all Xaa locations
  Clone ID: MRT4577_87513C.1.pep
VFKTKNKLHRMLNKDKPRNAVRLVFANKKNFPKAIKVVEIPAKLGLPPLGQGPWXIQSPCPPTGKGLXKGLDWLSSNIGKKA

SEQ ID NO: 355646 - protein, 106 aa, Zea mays
  unsure (1)..(106): unsure at all Xaa locations
  Clone ID: MRT4577_87514C.1.pep
RVNAPKHWVLYKLVGSFVXKLFSGPYSPEQCLALILIFKNRLKYAQNYHAAIPILMQRHILDNGKDTTDTTYPVGLMXVIFIPKTLEIYWLLYDTKGRLRITPIWD

SEQ ID NO: 355647 - protein, 112 aa, Zea mays
  Clone ID: MRT4577_87515C.1.pep
EDVLLPGQQGGSSGNQTLLTGNSGGCSNLETCLGCDGLMVVILDREDEGCCCVEHTGHLTPSRSGSPRDVPLRPGLDTRRGGLLILTLFGRGVGNSRGAAIHLGTNRSLYLG

SEQ ID NO: 355648 - protein, 81 aa, Zea mays
  Clone ID: MRT4577_87516C.1.pep
VSRLIRSVLVAVCVCVCVCVCVGGEMSTSYAPMASHVMKSSLFVHSMPRCLSCAAALTMRPGRFTVNAIQPEKATYHVVQP

SEQ ID NO: 355649 - protein, 84 aa, Zea mays
  unsure (1)..(84): unsure at all Xaa locations
  Clone ID: MRT4577_87517C.1.pep
CLXCFVRCWFFLLGPVWFXWLGRWLGCSWCLAAGLRLVFCLRPXSFWCRRGXVRCWLKSLVXXCPASVVRALVLPPRAGFRAFV

SEQ ID NO: 355650 - protein, 86 aa, Zea mays
  unsure (1)..(86): unsure at all Xaa locations
  Clone ID: MRT4577_87518C.1.pep
PVRXPRREPRVDPRVRSKPSADCYEQSHASCGKQSGQHGISPNVLVAEGRCGRGAAAGRGQPRPLQHAITCGQVSFDMEHCLCYAR

SEQ ID NO: 355651 - protein, 145 aa, Zea mays
  Clone ID: MRT4577_87519C.1.pep
PEIIKGEGHGSAVDWWTFGIFLYELLFGKTPFKGSGNRATLFNVVGQPLRFPESPIVSFSARDLIRGLLVKDPQHRLGYKRGTTEIKQHPFFEGVNWALIRCASPPDVPKPVELDRPPKPAPANDKVAPAANQKGPDNFLEFEFF

SEQ ID NO: 355652 - protein, 533 aa, Zea mays
  unsure (1)..(533): unsure at all Xaa locations
  Clone ID: MRT4577_8751C.1.pep
MQIFVKTLTGKTITLEVESSDTIDNVKAKIQDKEGIPPDQQRLIFAGKQLEDGRTLXDYNIQKESTLHLVLRLRGGMQIFVKTLTGKTITLEVESSDTIDNVKAKIQDKEGIPPDQQRLIFAGKQLEDGRTLADYNIQKESTLHLVLRLRGGMQIFVKTLTGKTITLEVESSDTIDNVKAKIQDKEGIPPDQQRLIFAGKQLEDGRTLADYNIQKESTLHLVLRLRGGMQIFVKTLTGKTITLEVESSDTIDNVKAKIQDKEGIPPDQQRLIFAGKQLEDGRTLADYNIQKESTLHLVLRLRGGMQIFVKTLTGKTITLEVESSDTIDNVKAKIQDKEGIPPDQQRLIFAGKQLEDGRTLADYNIQKESTLHLVLRLRGGMQIFVKTLTGKTITLEVESSDTIDNVKAKIQDKEGIPPDQQRLIFAGKQLEDGRTLADYNIQKESTLHLVLRLRGGMQIFVKTLTGKTITLEVESSDTIDNVKAKIQDKEGIPPDQQRLIFAGKQLEDGRTLADYNIQKESTLHLVLRLRGGY

SEQ ID NO: 355653 - protein, 154 aa, Zea mays
  unsure (1)..(154): unsure at all Xaa locations
  Clone ID: MRT4577_87520C.1.pep
PPRARGITGGPAPPPIKRGPSLIRGAFFSPTRPKKGFWGGSLGDRAGGPPVLGPGNLGFFPWAPRKTPKGVGDTGWGYNRGGGRETGGQYGPGWVSLGPSPGLGFKAPKGFFWGPRFFWWGDLNPAPQKGGWFCPGWVFCPPISGFFWXXSPPP

SEQ ID NO: 355654 - protein, 59 aa, Zea mays
  unsure (1)..(59): unsure at all Xaa locations
  Clone ID: MRT4577_87521C.1.pep
MAKQQQEVYFVFMNFDPGFERLTAKRSAKEGSAXTLHAYLSHKHDKLLAKLLQPDSYTE

SEQ ID NO: 355655 - protein, 94 aa, Zea mays
  Clone ID: MRT4577_87522C.1.pep
TRPSFTFLCSIKNCFQRALWIWFSHSSPWSVMISSRHFFTLLPRLRSRHRVRVFRGHGRPELQAGPAADRADPGQCCGFCLVRTGMNARCARAE

SEQ ID NO: 355656 - protein, 95 aa, Zea mays
  Clone ID: MRT4577_87523C.1.pep
VPGRPTRQPTRPNKLTGDKYSVTEIVTRYCLAISKITFFTIKKKKKKKKKKKKKKKKKKKKKKKKKKKKKKKKKKKKKKKKKKKKKGGAPQRVQT

SEQ ID NO: 355657 - protein, 77 aa, Zea mays
  Clone ID: MRT4577_87524C.1.pep
TAFKTPSQSATLEGLTITLLSTEITSTMATEPTVLHDPAEHQRLTKETAYVNWITIVHATDPRKPPDATRGLPHQQA

SEQ ID NO: 355658 - protein, 71 aa, Zea mays
  Clone ID: MRT4577_87525C.1.pep
LCYCKCPSLRRRPRCLRGTWRALTRSLPSPSAASETRLLPALKPQQVPLTPPRVPPFRASGCRRGPRATIT

SEQ ID NO: 355659 - protein, 97 aa, Zea mays
  unsure (1)..(97): unsure at all Xaa locations
  Clone ID: MRT4577_87526C.1.pep
LCLNFINFRLAYSPPSRRFSLSTNPVQNQHTKHVELDLHFVHERVDVRDVQVLHVPTXTTSQFTDIFTKSLPXTSVFXEFLSSLFISMARVSTGLLE

SEQ ID NO: 355660 - protein, 117 aa, Zea mays
  Clone ID: MRT4577_87527C.1.pep
RGRPCAQDQLCVLCRVHRPTLSLSPPNQPVRWTRRRQQRRGIESAPADAAPFHSSLSDAHAHVRGSGRPPEESRTPNLTDLLSKAKAGTGMARCASLGSARSWFTMMMTIPNADDAI

SEQ ID NO: 355661 - protein, 148 aa, Zea mays
  Clone ID: MRT4577_87528C.1.pep
SSLSKTLNKLRAKRMTVKLEMYRRLNNVLIITVVVSLGWITFEVHFKSTDEYNERWRTAWVIQRVWHLIFSLLCAFCLMWAPSQSAARYAYLDDEDRDMEDTQPLIRPGPLSYVDNLAISVSKDTTIIILRTDSGVYAKAAGDGGKRV

SEQ ID NO: 355662 - protein, 158 aa, Zea mays
  Clone ID: MRT4577_87529C.1.pep
GGAQFRAGGGGGAAGYGGGRGGAGSGGGGPRYGGAGSSGGGGGYCGGGACGGGGAPSAGACRACGLGPPGPNFRFCAVGSARPPYPFPSFVVFPGPQGFFRSSRLLLPLCVFGSPGAPGQLLVLWSCPGGQRGPCSPRQGLWFVGPCYSWLVLCSVKT

SEQ ID NO: 355663 - protein, 87 aa, Zea mays
  unsure (1)..(87): unsure at all Xaa locations
  Clone ID: MRT4577_8752C.1.pep
MTLHRSSNRYMISLWYXLDYMDVKGRMSRVDMHRLIGYVRAFTYNSISWQSERCKKTPTNRPWDNCLHRYPVNVANDCQALTYRLRI

SEQ ID NO: 355664 - protein, 108 aa, Zea mays
  unsure (1)..(108): unsure at all Xaa locations
  Clone ID: MRT4577_87530C.1.pep
FLQQQXLFPFSQVGIAYFQQQTTFSFNQLAALNPAAFLQQQILLPFSQLGSASRVSFLTQQQLLPFYQQFGANPATLLQIQQLLPFAQLVLTNPAASFQQHIIGGALF

SEQ ID NO: 355665 - protein, 138 aa, Zea mays
  Clone ID: MRT4577_87531C.1.pep
INQVVLANLFPYFPQQQFFPFNQLFPLNPAVYLQQQLFPFSQVGFAYFQQQQFFPFNQLAALNPAVYLQQQILFPFSQLVTANRVSFLTQQQLLPFYQQFGGNPATLLQIQQLLPFAQLVLTNPAASYQQHIIGGALF

SEQ ID NO: 355666 - protein, 112 aa, Zea mays
  Clone ID: MRT4577_87532C.1.pep
VEDFPNLSLYSDMLWNRGGRTLGVRVSRGGGRRSKRGKSMSTGAGPGGSNIVGVRVGRGLTSPIQRTECHNNFRSLPVGAADVFGLGGSRPNAPSTRLGRATLRNLCNYLVM

SEQ ID NO: 355667 - protein, 55 aa, Zea mays
  Clone ID: MRT4577_87533C.1.pep
VLFCCDALAQRWCTRASYARDCTRYCTRSYTRHCARHCTRHSARIARHHTIRRYY

SEQ ID NO: 355668 - protein, 96 aa, Zea mays
  Clone ID: MRT4577_87534C.1.pep
SFSPPRSLFQDSLDRTVVFSDLHVAYQYSSFPALEIGRYFIRPSISNYSVSTFYIVDNQTEGYVELTTHLRKRSNASPNLYSTNKDHQTAKKRPGN

SEQ ID NO: 355669 - protein, 101 aa, Zea mays
  Clone ID: MRT4577_87535C.1.pep
DEIGRPHGSCRYQSGSGGRQWVDHPVVVVDVHQGSGGQVVDRAHRRRCIPVRSPSAWCGIVFSLSCVLLMYALREDMEPLLLSGFLESFCSEYILPIVSSL

SEQ ID NO: 355670 - protein, 64 aa, Zea mays
  Clone ID: MRT4577_87536C.1.pep
WSYRRTLGRRGTFFCSRCLTSSTRRQFLCSSRVCCDSLLCQNGDLQGPSAPPRRPATPTCGDQR

SEQ ID NO: 355671 - protein, 145 aa, Zea mays
  unsure (1)..(145): unsure at all Xaa locations
  Clone ID: MRT4577_87537C.1.pep
EELMRLQLEATAKSKQLTEVHGAWLPPWLATHYARYMEVVSGHWNYHGKPAVQNVLHKASEKSAHAKKWAEPHIETAKMKWIPVKEKLVVLKKNTEPYVQKVSTRSVEFYESSRDAVTPHVVKVKEFAHPYYQEAKXKFSKPYID

SEQ ID NO: 355672 - protein, 447 aa, Zea mays
  unsure (1)..(447): unsure at all Xaa locations
  Clone ID: MRT4577_87538C.1.pep
MGISRPLVMAMAVALLIAVAGATAEEQEPLLAADAVAGAVEAALGEVETAALRAELGQLRAKISALESDIEERSQELKNKDDAIMNLEKAIEEKSKAITSMLDEIASLQAKSSVAAEEQANKANAKVDKIKKDIEAQSSQKAALEYRANDAEKKVEVLNEKLNTIQKESDEKKRKIKKTERALKVAEEELMRLQLEVTAKSKQLSEVHGAWLPPWLMAQYACYAEVVSGHWDQHGKPAVQNFLHKASEKSARAXKWAXXPHIEDXKMKXIPVKQKLVALKKNAEPYVQKVSTRSVEFYESSRDAVTPHAVKVKVFVHSYYQKAKKFSKPYIDQIAEITKPHVEKIRTTLKPYTKRAVHAYGSFLKSATTYHRQAQASIMDYLHQRDITKSLATKELVWFLASALLALPVFIIYRLLVGTFCSKKNKRPRSSNGNHGHKRYKRRHADK

SEQ ID NO: 355673 - protein, 568 aa, Zea mays
  Clone ID: MRT4577_87539C.1.pep
MEIISSLHGLISLISFTLPLCHSISAYQGNSNFEIPREPSLCLVSCHKGTLPRAGGNDTGWALGRHTSASTHEFASPSDPHVRVVGTKDWSIGLASPTTKREELVAGEGLAGMGISRLLALLLALLIAVAGATAEEPVVAADSGAGAVEAAAALRAEEAAEAAALRAELEQLRAKISALESDIAVRSLELKNKDDVIVNLEKAIAEKSKAITSMQGEIASLQAKGSVAAEEQANKANAKAVELEKQVDKLKKDIEAQSSQKAALESRANDAENKVEELNEKLNTIQKESDEQKRKIKKTERALKVAEEELMRLQLEVTAKSKQLSEVHGAWLPPWLMAQYARYAEVVSGHWNQHGKPAVQNVLHKASEKSAHAKKWAEPHIETAKMKWIPVKEKLVVLKKNAEPYVQKVSTRSVEFYESSRDAVTPHVVKVKEFAHPYYQEAKKFSKPYIDQIAEITKPHVEKVRTTLKPYTKRAVHAYGSFLASATTYHRQAQATIMDYLHQHGVTKSFATKELVWFLASALLALPVFIIYRLVVETFCTKKNKRPRGGNGNGNHGQKRHKRRYADK

SEQ ID NO: 355674 - protein, 383 aa, Zea mays
  unsure (1)..(383): unsure at all Xaa locations
  Clone ID: MRT4577_8753C.1.pep
MQIFVKTLTGKTITLEVESSDTIDNVKAKIQDKEGIPPDQQRLIFAGKQLEDGRTLADYNIQKESTLHLVLRLRGGMQIFVKTLTGKTITLEVESSDTIDNVKAKIQDKEGIPPDQQRLIFAGKQLEDGRTLADYNIQKESTLHLVLRLRGGMQIFVKTLTGKTITLEVESSDTIDNVKAKIQDKEGIPPDQQRLIFAGKQLEDGRTLADYNIQKESTLHLVLRXLKGGMQIFXVKTLTGKTITLEVESSDTIDNVKAKIQDKEGIPPDQQRLIFAGKQLEDGRTLADYNIQKESTLHLVLRLRGGMQIFVKTLTGKTITLEVESSDTIDNVKAKIQDKEGIPPDQQRLIFAGKQLEDGRTLADYNIQKESTLHLVLRLRGGY

SEQ ID NO: 355675 - protein, 144 aa, Zea mays
  Clone ID: MRT4577_87540C.1.pep
RRWPRRGAPPRPRPAAPTPWTGPPPPPPAAPRTRPPPPPAPWAPPPRPPPPSPRPASASRTAATARPARRRGRSSTGTALRRPATTRRGRGRVVHDGGGWREDSEGARAQSNRRRGAFSRLDLGASWNARNLEGIAGRSWGTGR

SEQ ID NO: 355676 - protein, 321 aa, Zea mays
  unsure (1)..(321): unsure at all Xaa locations
  Clone ID: MRT4577_87541C.1.pep
MGISRPLVMAMAVALLIAVAGATAEEQEPLLAADAVAGAVEAALGEVETAALRAELGQLRAKISALESDIEERSQELKNKDDAIMNLEKAIEEKSKAITSMLDEIASLQAKGSVAAEEQANKANAKVVELEKQVDKIKKDIEAQSSQKAALEYRANDAEKKVEVLNEKLNTIQKESDEKKRKIKKTERALKVAEEXLMRLQLEVTAXSKQLSEVHGAWLPPWLMAQYARYAEVVSGHWNQHGKPAVQNVLHKASEKSAQAKKWAEPHIETAKMKWIPVKQKLVFLKKNAEPYVQKVSTRSVEFYESSRDAVTPHAVKVKVF

SEQ ID NO: 355677 - protein, 100 aa, Zea mays
  Clone ID: MRT4577_87542C.1.pep
HFSFKRNRQFFPKKKSRSLFNISPAEPPPKCTHPPVGLIIQTLELPTSPFSIAPHPFQSPWGGFILPQKYRGLLEPPYWGASSTSPFRKGGGTIPSDPPG

SEQ ID NO: 355678 - protein, 306 aa, Zea mays
  Clone ID: MRT4577_87543C.1.pep
KPLVLAPGGFFDQAWFAQLIVRTRPNLLDVITHHIYNLGPGRDTHLIDKILNPSVLDGMRSTFSSLQGLLKSAGTSTVAWVGEAGGAYNSGRHLVTDAFVFSFWFLDQLGMSAKYDTKSYCRQSLIGGNYGLLNTTTFQPNPDYYSALLWHRLMGTKVLATTFSGTNKIRAYAHCARDSPGITLLLINLSGNTTTQVSVSVTTQGAVAAHKHGARKHVGGRKFRHVHVPSFDEAAGGVRDEYHLTPKDGNLRSQIMLLNGRALATDTAGNIPALEAVKMDAAQPIAVAPYSIVFARISHFNAPACS

SEQ ID NO: 355679 - protein, 123 aa, Zea mays
  Clone ID: MRT4577_87544C.1.pep
ETYKSYLHNVRSQSEGKSRKQQKNQELGPYKFTHQQLEKEGVIRRSNVPENRRANIYFMFRSPLPGTFVISLHYKGRARGLLELDLKLDDLLEMQKDAQEDLDLEYVQFNVSKVLTLLNKRFA

SEQ ID NO: 355680 - protein, 234 aa, Zea mays
  unsure (1)..(234): unsure at all Xaa locations
  Clone ID: MRT4577_87545C.1.pep
MATQSHSSSAAAIDMYETASQPDASVAGDAYTFLEFNTQGDEFDYPDFPELSQPPPRSTPLTSSIPGAGASSSSWPAPPPPPSDAASAEPDLTSLDVPTPPASSSSPSPRSASKARSLAAADGLASGVAALSFEDPVGAGAGEDGYDYGKGDFVEHACRYCGIHNPACVARCNVPSCRKWFCNSRXNTSGSHIVNHLVRAKHKEVCLHKDSPLGETILECYNCGCRDVFLLGFI

SEQ ID NO: 355681 - protein, 62 aa, Zea mays
  Clone ID: MRT4577_87546C.1.pep
ACGPATRFVAVHAGYPTPGGGKARKPKKRRRRITPWPLSSGGGQILARRLVVWLAATGRKAD

SEQ ID NO: 355682 - protein, 63 aa, Zea mays
  Clone ID: MRT4577_87547C.1.pep
VLGTNSNHNVDQLNMGYLGTHIKVDRLMNMTGLLNYFSRTDGVSPPCPPEHALGMTYCATLYA

SEQ ID NO: 355683 - protein, 69 aa, Zea mays
  Clone ID: MRT4577_87548C.1.pep
TGVRNDQSVTCYVLSALASFRRRSLGNEHETDLQESRLVIDTQGQACAAGRARATASRRTAGTGMVPAG

SEQ ID NO: 355684 - protein, 72 aa, Zea mays
  Clone ID: MRT4577_87549C.1.pep
YEKLRRNIDIGFYFFSSFFVVNRSLLILHNSIHNRAGHLIVLIHLLLNFALFLSAEPSNQLKATNTPLFGRG

SEQ ID NO: 355685 - protein, 229 aa, Zea mays
  Clone ID: MRT4577_8754C.1.pep
MQIFVKTLTGKTITLEVESSDTIDNVKAKIQDKEGIPPDQQRLIFAGKQLEDGRTLADYNIQKESTLHLVLRLRGGMQIFVKTLTGKTITLEVESSDTIDNVKAKIQDKEGIPPDQQRLIFAGKQLEDGRTLADYDIQKESTLHLVLRLRGGMQIFVKTLTGKTITLEVESSDTIDNVKAKIQDKEGIPPDQQRLIFAGKQLEDGRTLADYNIQKESTLHLVLRLRGGY

SEQ ID NO: 355686 - protein, 97 aa, Zea mays
  unsure (1)..(97): unsure at all Xaa locations
  Clone ID: MRT4577_87550C.1.pep
RVGGRPLGXGLAKVYPGGAFHPLVLLYDPDTAAEVKVKELKYRPXTMFSMLGFLRQXMVPGKGFHKGPSSLQITVHSATAAWAYERELLYPAHSTML

SEQ ID NO: 355687 - protein, 60 aa, Zea mays
  Clone ID: MRT4577_87551C.1.pep
VVRRQQVPFGWTARQVRVSRLARPCVASMNQYSQVLVSMTWFMIICWYGMCRYFSFFLFI

SEQ ID NO: 355688 - protein, 62 aa, Zea mays
  Clone ID: MRT4577_87552C.1.pep
PPAFAFFLRDPVPNPDYGFSVWGIFGRLPGEFFGSFFLRGTWRRPSEPPLWPLDPKPFFNLL

SEQ ID NO: 355689 - protein, 67 aa, Zea mays
  Clone ID: MRT4577_87553C.1.pep
SHIDPNGPPFHGHGRRSTFVVELVYDTDDAHGVVVTLLPLSLDLLVSGVITQVNENDIIGLLGGNRL

SEQ ID NO: 355690 - protein, 124 aa, Zea mays
  Clone ID: MRT4577_87554C.1.pep
RFPKPPKTVPNALLKKKLPKMPKKNPQKKYLPEWLGTKSKWEILSKLPKAKAGPLPKDPLRPVFHGSPFYQLAGQGKKDLFVSVNFSNQNPPTFFFVVSKKIPAWLGKKTSGWAPMAGNGFVFF

SEQ ID NO: 355691 - protein, 78 aa, Zea mays
  Clone ID: MRT4577_87555C.1.pep
WSSCGLDLVFTSASSILIVQLINATTWGASMGPSTDFIQYTRSNVGLHACTSSFTHSLIHIGGLQIPISSAVLSATFS

SEQ ID NO: 355692 - protein, 80 aa, Zea mays
  Clone ID: MRT4577_87556C.1.pep
IDFSHFARTDHRLERYIYRCYSISSYRLSSSHAYLHHCVCWYASRVIKPLSQGGAEGINHSQSEAKHINKHIKQPKRSKP

SEQ ID NO: 355693 - protein, 63 aa, Zea mays
  Clone ID: MRT4577_87557C.1.pep
YNSYDERMHCVQYSSEFRLAAPFHSPLYKRSFGVGLEFTTRSCSTTTTVIVKRSVDHRPPVLA

SEQ ID NO: 355694 - protein, 62 aa, Zea mays
  Clone ID: MRT4577_87558C.1.pep
LVRYRSLDLYLALDAVYRPIWPAFTNKPSCCTAPRVSTGSRAARGSHPSRRPFPESLVPVRS

SEQ ID NO: 355695 - protein, 177 aa, Zea mays
  Clone ID: MRT4577_87559C.1.pep
MQLIVNSEEIIDQCKTVTDVCELTFSSKSPEVNSTETRFGFSLGDAAITEAYVDPSETALLGPIVFRPSNHCMWSSMVLIRNNLSGVEMLPLRAYGGRQSIVLLEESEPAWKLEFSLGSNVHNKSTMTKQEIPSSLCSQQLTKEIHVKNSGDLSLQVTKGKVSRADCGVDGFTVDNC

SEQ ID NO: 355696 - protein, 66 aa, Zea mays
  Clone ID: MRT4577_8755C.1.pep
VTVDDYESVRRQPADDPEPDDARVLEQPVRWNLMQVIMPFLSRFLLYRRFLANTWLHRVKIVYISC

SEQ ID NO: 355697 - protein, 87 aa, Zea mays
  unsure (1)..(87): unsure at all Xaa locations
  Clone ID: MRT4577_87560C.1.pep
MAYIDAYSRAATIVRALEKLIASTSFLGTGSAFRPDATFRGLRCYNTHAHLRLYEEALSEDDXLPEYDRRYGGHNYPVPMLFXNIFR

SEQ ID NO: 355698 - protein, 161 aa, Zea mays
  Clone ID: MRT4577_87561C.1.pep
GCLILVALAVCGLPSLGSAMGVPQRQPNPINFTIGVEGVVWCKSCRYRGYVESRDASPLRNASALLRCRHGRRALSVWSATNAHGYFLVQTGAQAAPFTSRNCKVYVPRSPVRGCRVAVSPGRNKGSPLKFRRFVTRTDGLQARYSAGSFTFAPQDRSKCD

SEQ ID NO: 355699 - protein, 41 aa, Zea mays
  Clone ID: MRT4577_87562C.1.pep
QLTQSWSPLCGQEKLHILIIPAKVQQLQHHLYHYMQEKLDL

SEQ ID NO: 355700 - protein, 510 aa, Zea mays
  unsure (1)..(510): unsure at all Xaa locations
  Clone ID: MRT4577_87563C.1.pep
MGLPWYRVHTVVLNDPGRLLSVHIMHTALVSGWAGSMALYELAVFDPSDPVLDPMWRQGMFVIPFMTRLGITNSWGGWSISGGTVTNPGIWSYEGVAGAHIAFSGLCFLAAIWHWVYWDLQIFCDERSGKXPSLDLPKIFGIHLFLAGVACFGFGAFHVTGLYGPGIWVSDPYGLTGKVQAVNPAWGAEGFDPFVPGGIASHHIAAGTLGILAGLFHLSVRPPQRLYKGLRMGNIETVLSSSIAAVFFAAFVVAGTMWYGSATTPIELFGPTRYQWDQGYFQQEIYRRVSDGLAENLSLSEAWSKIPEKLAFYDYIGNNPAKGGLFRAGSMDNGDGIAVGWLGHPVFRDKEGRELFVRRMPTFFETFPVVLVDEEGIVRADVPFRRAESKYSVEQVGVTVEFYGGELNGVSYSDPATVKKYARRAQLGEIFELDRATLKSDGVFRSSPRGWFTFGHATFALLFFFXGHIWHGARTLFRDVFAGIDPDLDAQVEFGTFQKVGDPTTRRQAA

SEQ ID NO: 355701 - protein, 87 aa, Zea mays
  Clone ID: MRT4577_87564C.1.pep
RTRGEFEDLSALCKNDDSTVSNTVVGASGDLAKKKIFPALFALYYEDCLPKHFTIFGYARRKMTYLKLGTWLAKHWTCRIDKRENCS

SEQ ID NO: 355702 - protein, 231 aa, Zea mays
  unsure (1)..(231): unsure at all Xaa locations
  Clone ID: MRT4577_87565C.1.pep
ARGNLSYFLGIEVHQSSNGLLLTQHKYINDLLLRTNMEASVGSPTPMLPVEKLSLHDGDPLSPEDATRYRSAVGALQYLSFTRPDISFSLSWVCLLLASPXLLLSALPAAVWAGNPDDRRSTGGYTIFLGNNWVSWSSRKHPTVSRSSTEAEYKAVANTTAELIWIQVLLRELGISLSRPPSLWCDNIGATYLSANPIFHRQTKHVEVDYHFVRERVASRQLDVRIISSKD

SEQ ID NO: 355703 - protein, 500 aa, Zea mays
  unsure (1)..(500): unsure at all Xaa locations
  Clone ID: MRT4577_87566C.1.pep
MGLRSPLVLLLLLLFLAATFRPSAAALAPPTGSIVKQLSSVVRWPXPPPRRTGPNSPATPSXDGHVGVALQFESGYFVETLVEGDKLGVTPHTIRVSPVEGGELLAVDSAHSNIVRITPPLSEYSRGRLVAGSFQGHSGHIDGKPSDARFKRPTGVAVDDMGNVYVADTANLAIRKIGESGVTTIAGGKSNIPGYRDGPSEDAKFSTDFDVVYVKKMCSLLVIDRGNAALRKISLPQEDCTYQDSALLSSDLILVIGAVVAGYIFSGFQHGFGFSGSEKVEAPENEQHESSTIGKPPLVVESLKEEPGAGWPSLGTLIADLLKLAIEGVGKLLLSVVPQRMQHGKRKTDLTPLRDRLVMPEDREETAAAAQKLSSTPMRPETAHAPNPVTETAAPKAPKSTKPSKLRDSSTLSSKHRSSKRQEYADFYGTSEPAPVGAAAKVPKDRLRHRHHHREKSGEXSPTAPPITTXPAEAKPADYSDPSYDPYVRSKYAAESGYRY

SEQ ID NO: 355704 - protein, 40 aa, Zea mays
  Clone ID: MRT4577_87567C.1.pep
TQGKLSDEFKRFPFFFPGFPPILKGYFQGFYNPEKFNSGK

SEQ ID NO: 355705 - protein, 48 aa, Zea mays
  Clone ID: MRT4577_87568C.1.pep
PTLTKHKSVWVSYSRSICPHLKILRFKVPQSSEIIYGFAFPKIKKYIY

SEQ ID NO: 355706 - protein, 70 aa, Zea mays
  Clone ID: MRT4577_87569C.1.pep
FVLLCHQFGCVHFLHSINGLQVLVFFWSFLGVLVHGFRPSSGLFVVLWPIFFLMVNSTLGNSRTMVEKDV

SEQ ID NO: 355707 - protein, 77 aa, Zea mays
  Clone ID: MRT4577_8756C.1.pep
RDIVIEVSPFPIKKLVRECCLIFPLGIKKKGCQAPLGTGNPEKGFCRRFRGRRFIGNERTIRLVLLLGRKNAPGRQF

SEQ ID NO: 355708 - protein, 36 aa, Zea mays
  Clone ID: MRT4577_87570C.1.pep
LFKLETESVAFTQTKMTDTMAHGSPTYNAATLIYAP

SEQ ID NO: 355709 - protein, 63 aa, Zea mays
  Clone ID: MRT4577_87572C.1.pep
ASKNTPLDVHYQQPNNGGYQNIMAPNTIALSPNTTNSFNIPQCLLASFFIITQYLPPNTLICS

SEQ ID NO: 355710 - protein, 185 aa, Zea mays
  Clone ID: MRT4577_87574C.1.pep
MPSGGGNGGGSSRSRVMPNLPAGFRFHPTDEELMVHYLMRQAASLPCPVPIIAEVNIYQCNPWDLPAKALFGDKEWFFFSPRDRKYPNGARPNRAAGSGYWKATGTDKAILSSSSTPTIQNVVVGVKKALVFYGGRPPKGTKTDWIMHEYRLSGAADDDCKGSSTRRRVSSSSSSSMRLDDWVLC

SEQ ID NO: 355711 - protein, 130 aa, Zea mays
  unsure (1)..(130): unsure at all Xaa locations
  Clone ID: MRT4577_87575C.1.pep
MPSGGGGNGGGISSSSRVMPNLPAGFRFHPTDEELMVHYLMRQAASLPCPVPIIAEVNIYQCNPWDLPAKALFGXRRETFFFSPGFFLIALACTAPDLTEAFRMVSAGRLGAVQDPQEEQRFPVVVVVGA

SEQ ID NO: 355712 - protein, 34 aa, Zea mays
  Clone ID: MRT4577_87576C.1.pep
HHSSLLFTYSDLTLSDVIKDLCHLKHPFFISGVV

SEQ ID NO: 355713 - protein, 116 aa, Zea mays
  Clone ID: MRT4577_87577C.1.pep
KKAPPSLRSFGPSFKFFGLGNRFSSPSWLDLLPPSMFVFFLFNAVLFFLVAQMFFFQVVPLFFRGKVFFSFCKNGWFLLGPFFFLLALAPFFWEKGFFGAGSFSPPPLKSCLNLKC

SEQ ID NO: 355714 - protein, 44 aa, Zea mays
  Clone ID: MRT4577_87578C.1.pep
RGVLPALASAPFFPASWLLLGCIGPAEPQSKRYLSPTILSPAGP

SEQ ID NO: 355715 - protein, 59 aa, Zea mays
  Clone ID: MRT4577_87579C.1.pep
SGGGRDYFTLSWLPHCRRSFHPGQLVIGVSGVFLLPSYFSDPSAAVRSNKRSDGCDGDR

SEQ ID NO: 355716 - protein, 974 aa, Zea mays
  Clone ID: MRT4577_8757C.1.pep
MPRTRKTAHKSTGPIGVPRHQLAPRHEGSSSGSNDPIGDLKAQVEQLQTELRHQNRVWAQDGQRINELATDVRRLQDELADRDVAVYWAINSRSVAWDNEAKARSRVTELSVVLDNLQMPSRTRAQDGAGTSRGREDTPNPPPVPPMLAEAIAALVNATADNTRFLCEMAGNLFQQHGGRAPPQGSRETSYLEFSETRPPLFVKAEDPLEADEWIRVMEQKFGLIRCTETQKPLFAGQQLRGLASTWWGNFVAVQPARHQPSAPSSRFPAIPSPSTGCFNYGKSGQFIKDCPYLKQNKFNNQQNSGSSNQGKGNMTNNSAGKNVKKTGRIYYTQVTTTPEGEPVMMDTFLVANHPAVILFDSGASHTFISKKFVEKRCIPCTESREGFIIYSLGGQIFTKEVVFHVPVTLAEQDFPTNMIVLKGQDIDVILGMNWLAQHKAILNTDLRTIKLSHSHEEVLLSILVAIPAKPLGRVYEAIVPELQDILVVCEFLDVFHEDLSGLPLERDVEFVIELKPDTAPISRRSYRMPPNELAELKTQLQDLLEKGFIRPSSSPWGCPAIFVNKKDQTLRMCVDYRPLNEIDILFDQLTGARVFSKIDLRSGYHQIRIRPEDIPKTAFTTGYGLFKYLVMSFGLTNAPAHFTYLMNSVFMPELDKFVVVFIDDILIYSKNEEEHAKHLRIALTRLREHQLYAKFSKCAFWLEEIQFLGHVLSANGIAVDPSKNDTKFNWSSRCNKAFEQLKVLLTTALVLAQPDIEKPFDVYCDASSSGLGCVLMQEGRVIAYASRQLCWHEEHYPTHDLELAAVVHALKIWRHYLMGNICHIYTNHKSLKYIFTQSERNKRQRRWLELIKDYELEIHYHLGKANVVADALSCKASCHCLTVRTPDTTLCQEMEKLNLGMIQHGTLNQLKLESILLQRIIDAQRNDKGMKYIHEKIEAGKANCFRKDDQGIVWFNNRIVVPKNDEVPQQNFG

SEQ ID NO: 355717 - protein, 77 aa, Zea mays
  Clone ID: MRT4577_87580C.1.pep
EWFRQQYKPDRDKIDLCVHGVGHTTLCWAVPLCTKSRQSFIHRKLGNVCLLPFAWTPPMFGTFLGSVWGLKNGQWKF

SEQ ID NO: 355718 - protein, 149 aa, Zea mays
  Clone ID: MRT4577_87581C.1.pep
GAKKPKGGKIKKGGEEGVFNNTKGNRGGKGGTKTLKIYSLAGFFGGKTREKSPGWPFKKANPGGAPPKNSRGGISRARGLKQLGHKNLEKPRGGEGTKPIKGGAWGKFKGPLGGENFCPGGGKKGGGPPPKKKTLWSLEKPLKAPWEPP

SEQ ID NO: 355719 - protein, 64 aa, Zea mays
  Clone ID: MRT4577_87582C.1.pep
PPPGFPVFFLPVVLEGIDFWIQVKYLMETRLVLYFSLLSNGSSFLAESFPPKNHRKPGPNKKIH

SEQ ID NO: 355720 - protein, 88 aa, Zea mays
  Clone ID: MRT4577_87583C.1.pep
ICHHFPDHTQTQEVEIRKMQAAVYCRRVLRRAARQGQADGEEQGAGRVPGTRTSCPSKCRRHDQERGDQTTAERGRGARCGAETFLAR

SEQ ID NO: 355721 - protein, 80 aa, Zea mays
  Clone ID: MRT4577_87584C.1.pep
PTRTLTRNHILIVSRIVNAADTQSVNRSLFSASTPMSTSLSLHQHITISNIISHTTTYTISMPTDSTRPLAPILHSTSAG

SEQ ID NO: 355722 - protein, 70 aa, Zea mays
  Clone ID: MRT4577_87585C.1.pep
NLKAWPHVAIGQLVVSAHDRAKGNQITTMMLGINKSNTKKYATSNVILSQQFHYLLLVCWDCCMASWCSR

SEQ ID NO: 355723 - protein, 53 aa, Zea mays
  Clone ID: MRT4577_87586C.1.pep
YLYTLEVPGSTIVSNARAHTSMCKSTHPLGRFGESQINSLECIGKHTLGVALL

SEQ ID NO: 355724 - protein, 69 aa, Zea mays
  Clone ID: MRT4577_87587C.1.pep
KGVKPHKATMGSFSNYFTGKELASPRIFISFAFSCYRGGFVHLLTPNLCLGGQQLPQFFTKFILPGVNK

SEQ ID NO: 355725 - protein, 65 aa, Zea mays
  Clone ID: MRT4577_87588C.1.pep
RLCNSIMTPINICHRVYNNTYIVITKIMQCKPNRRRVYIYLEIHIPATTFLLVGNHILFASRCLH

SEQ ID NO: 355726 - protein, 90 aa, Zea mays
  Clone ID: MRT4577_87589C.1.pep
LGTSRPAGVHFLDACFLCRKPLAGNRDIFMYRGDTAFCSDECRSAQMAADEAAEKRRKARAVTRGAMFAREAEGPQESGKVRAGSSILAL

SEQ ID NO: 355727 - protein, 67 aa, Zea mays
  Clone ID: MRT4577_8758C.1.pep
HITVSVCASRTSTPTFFLMYAMPRTFSDVMWSSTPRIHFTGCNLLKSSLSLLHTPVHRSFVVPHVLV

SEQ ID NO: 355728 - protein, 122 aa, Zea mays
  Clone ID: MRT4577_87590C.1.pep
DGHVPSARRVPPPRQCRPRDDSDMSPPALVRRRGSSTAGLLDRSRLPAAGSEPPDDDTARRFRILLASLTAAAAATASSAAAPSSASPHLGIASSQDSSCFLLLLVPLMSCLACLSDLGRSA

SEQ ID NO: 355729 - protein, 106 aa, Zea mays
  Clone ID: MRT4577_87591C.1.pep
QSQFKHQAAEAKKSCLSKFRASDSNNRRRPQLSACKPANICKRKRRSESHQQSRLGSVWVGLKHGNLMFVDKAIKTNCWVLAKKDKKISQSSRQRLLITLTPMACS

SEQ ID NO: 355730 - protein, 88 aa, Zea mays
  Clone ID: MRT4577_87592C.1.pep
PIPVDPRSGVDVLGNEVHVAPNVSAAGGRHAGSRALLCTPSSQGLTFLLPSRSSLVMLCPLAGFKSLTIHPFHSFHTAHSQQNVLLPS

SEQ ID NO: 355731 - protein, 808 aa, Zea mays
  Clone ID: MRT4577_87593C.1.pep
MGAMSASISSVNWLVEDDILLKNAVEAGASLESLARGAVCFSRKFTLHEIQDRWNSLLYDPDISTQAASRMAEYENELSTSDPAKAHKLFNSKAKDFSFQKRKIDSVKNLYYAMRKRVRNDPRNSGDLGFLVPCSCTAIGSECICGGLPNNIEPELNSVSRYGQVGSRYTIGHSYSEMNEHAFHTKHTESMTRDGDGTSNVVYGYSDVGQLYEHHAYTANNHGNREGNNLSLKSITNFQDSMQFQQLDNNQCGNGVVDSKALVIPNHFSGSVQEPMPLQMIGQPEGSEAPGGAILSLQRSDRLALADDKDVKSEDRDPLTFEAHLDGGISGLDHATEFMDFPYFTNSEDLDILNSENLLNSPSEGIQEDLDDTALVVHGVRSTMQNLVHADEANMSCDQIDLGDVKNNVDASGIILFPTSLVVPCPGLYVECKLNTEDTEIPCNDDVSTPTEYPLECCTSTFGQKSENTIYSVSPAISPPSIAEQPNPSTSEQKEDSVAHDEGGVLGAKPSEGALTVGGLLPGNIDTNDANTCMLALPSFSTAGFGEGSPCSLGPHESFDNSHGLTLQNSVQAPDQMQHNSLDGKPELGDKAALQNCMPSNALPDLDIQNTIANAPTPAQAEECPDYEKDVPNYYDLEALILDQDLIPWDQDSDFMHPEVTGFPHPESRKALIRLEQGARSCMNRAIMSHGAFAVIYGLHLRCYIKDPEVTLGRETEDIKVDIDLGKEGRANKISRRQAVIKMDESGYFHIKNTGKCPIFVNSKEIPSCKRINLSSDSLIEIKDMRFIFHVNQEAVRQYIDRDLKPER

SEQ ID NO: 355732 - protein, 82 aa, Zea mays
  Clone ID: MRT4577_87594C.1.pep
GGKNLGFKMVKKKFGGQTNKNFFSNPKKRDKEKFFCRQNFLILSERKTPEGFLVKTGGETQEDWNPLLFQNGPFLGGGQYRP

SEQ ID NO: 355733 - protein, 86 aa, Zea mays
  Clone ID: MRT4577_87595C.1.pep
TKAQSQDNSIRSRHKQPGGQTSLDLELANKLLGSINLLPSPMSLAGLSSFTPTSWSLAGVNLHELSEDPTGRPRGCSPWRMKTLRS

SEQ ID NO: 355734 - protein, 126 aa, Zea mays
  Clone ID: MRT4577_87596C.1.pep
GREHPTPRTPSRQPAAGERTPNHEIRERRVQCWASGTRAWASAVLGTQATRSRGRARGRGVAHGDGGRRTREQAALCHRSSRRPSVHPPVLPPPRLRPFTASSSPPSSTRYPHSASLANPPPATPI

SEQ ID NO: 355735 - protein, 87 aa, Zea mays
  Clone ID: MRT4577_87597C.1.pep
RLGQRHCCTFRWNWSSYARGPPISRSIDFKVRRRAYARSMTLREVMQIASERRGLNSKGSSARQGPWSRRLSRLLRCVWFVESLYAS

SEQ ID NO: 355736 - protein, 134 aa, Zea mays
  Clone ID: MRT4577_87598C.1.pep
NSSYSWNSWKSSSTTSSSPKQWLQHGQPSPTDCCSGSSPATPSDSTNWPLSVVMSRRDRLAVWGRFMAETSVGVQSTVSRASPVPSDVCTSFHGSLVTSTVRSSRMNRWRVEDCVRWPCTRFPARGGILSRTGR

SEQ ID NO: 355737 - protein, 71 aa, Zea mays
  unsure (1)..(71): unsure at all Xaa locations
  Clone ID: MRT4577_87599C.1.pep
PPPPPPYNXPPFPGCPPPVPTRAPXXPPGSSPRRPGPALRARPPPGPLAAPSPSPFCSFFSRRKQRRRFRT

SEQ ID NO: 355738 - protein, 38 aa, Zea mays
  Clone ID: MRT4577_8759C.1.pep
AVDITVVRDQHQSLLQVQVHHAAGARLASYLPLLAPCL

SEQ ID NO: 355739 - protein, 58 aa, Zea mays
  Clone ID: MRT4577_875C.1.pep
FIVITPDDPMSMSSATRWISRGRISNRVVFGIRSTSRYTSSYCQCRLQAPRLRLDAWI

SEQ ID NO: 355740 - protein, 116 aa, Zea mays
  Clone ID: MRT4577_87600C.1.pep
LDPLTESDEIDLNTFYIPQPATELPSQRKDNFFMFVRSRYIATVIVFFSCLWTYIVCFPVLKASPRRPGGGPTPRRLARLPRLGVQAVVQHLVSPYPFKTHAVFSQGLVYHYVWVG

SEQ ID NO: 355741 - protein, 125 aa, Zea mays
  Clone ID: MRT4577_87601C.1.pep
QDSTQHSMCTPAEHMCTNKAFDPNQRGKLIVNAFVAFNSLPNLTAFVSTVLVKVAEQVDANVEEADLDGEAGVKQDVDCPVVHCSWADSRRPNSRGRASLCAVTSTCHSTGTSASLTTPAFGPPS

SEQ ID NO: 355742 - protein, 119 aa, Zea mays
  Clone ID: MRT4577_87602C.1.pep
MARSSFKLEHPFERRQAEANRIREKYPDRIPVIVEKAERSDIPDIDKKKYLVPADLTVGQFVYVVRKRIKLSAEKAIFIFVKNTLPPTAALMSAIYEENKDEDGFLYMTYSGENTFGLF

SEQ ID NO: 355743 - protein, 50 aa, Zea mays
  Clone ID: MRT4577_87603C.1.pep
AMRAPTRPSTGAAVYDDWNHIENAMLVGVHTDRVMIDSLWPMDSLLTQCN

SEQ ID NO: 355744 - protein, 62 aa, Zea mays
  unsure (1)..(62): unsure at all Xaa locations
  Clone ID: MRT4577_87604C.1.pep
KKKKKKKNIIFYLKKKIKKXKKKLKLKKKKKKKKKKKKKKKTQEKKKKKKKKKLVPARAAAR

SEQ ID NO: 355745 - protein, 62 aa, Zea mays
  unsure (1)..(62): unsure at all Xaa locations
  Clone ID: MRT4577_87605C.1.pep
TRISRGGHAFRVRLQSIVTPLTKFDHPXKGGALHCGATRCNYPQLTNFIESDXLEEQVEPIN

SEQ ID NO: 355746 - protein, 68 aa, Zea mays
  Clone ID: MRT4577_87606C.1.pep
MLVAMVGRGIAILFRLVYPATSMRSKAGLQFPVGRIARFLAAGKSAERVGAGAPVYLAAVLESLAAEV

SEQ ID NO: 355747 - protein, 33 aa, Zea mays
  Clone ID: MRT4577_87607C.1.pep
HLDLSISEKFHELHRDLHQGIEAASDQDDLRWW

SEQ ID NO: 355748 - protein, 128 aa, Zea mays
  Clone ID: MRT4577_87608C.1.pep
RIEDRITCLFHAQRKSTASSSSSPLQSQPTGAEVIFDVDDTDALRYMKHTGQKEERRRLYDSCWMVLPHGAAPIPGQTRKHHGGDAVHAQHGQRCLEILEFKVFGKICPRRTRTRRPTWTHWTSSSSR

SEQ ID NO: 355749 - protein, 97 aa, Zea mays
  Clone ID: MRT4577_87609C.1.pep
SYPLQHSLHNLTLETDSVKVGQGYNHLLADLKQYLRTARYLIGTNNQRITNIHNARPKQTPNSHGPNIHHKPPTIYPLPLLKLKGSTLNGQRIQRKT

SEQ ID NO: 355750 - protein, 97 aa, Zea mays
  unsure (1)..(97): unsure at all Xaa locations
  Clone ID: MRT4577_8760C.1.pep
CPSWGRTLFFLQEYSAXIKKKTSHLPGVSIAIMGCIVNGPGKMAXAHFGNVGGAPGKNDLYVGKTVFQGAIPMEGATYAFIQLIKDHGRWVDPPPQK

SEQ ID NO: 355751 - protein, 201 aa, Zea mays
  Clone ID: MRT4577_87610C.1.pep
MASGGAAISAGPTPPSATASSVEWHQRPPNPKNPVVFFDVTIGSIAAGRIKMELFADIAPKTAENFRQFCTGEHRKNALPQGYKGCQFHRVIKDFMIQGGDFLKNDGTGCTSIYGTKFDDENFIAKHTGPGLLSMANSGINSNGSQFFITCAKCDWLDNKHVVFGRVLGDGLLVVRKIENVATGANNKPKLACVISECGEM

SEQ ID NO: 355752 - protein, 61 aa, Zea mays
  Clone ID: MRT4577_87611C.1.pep
IANLFVFCFMTYFFVSSRRVLMELYANYVPNTAQNFRSLCTVHNCVLNFFKPLYYNCSIFL

SEQ ID NO: 355753 - protein, 85 aa, Zea mays
  Clone ID: MRT4577_87612C.1.pep
PPPPSIPFHHPDLAGVCSASLRCDPTLRFETVLRCVRVSRRFATRVRLKVSEAVRAQMKDSAHRTTVVLRRLPPAISHQVVVVQV

SEQ ID NO: 355754 - protein, 72 aa, Zea mays
  unsure (1)..(72): unsure at all Xaa locations
  Clone ID: MRT4577_87613C.1.pep
PDAVYAHILQLTRFGALAILRARGKHLVRDPRMKRLDRRIDEVVSSVHCPAAAAAXREMQEHNPSFLSKRSG

SEQ ID NO: 355755 - protein, 64 aa, Zea mays
  Clone ID: MRT4577_87614C.1.pep
NTTPRCPSSSRPVTRPSGSSIAFRTLAPGQQAVRSVPRAPGPPLHRSAASAHRQRASPKANDAA

SEQ ID NO: 355756 - protein, 81 aa, Zea mays
  Clone ID: MRT4577_87615C.1.pep
LHLGGPLQIIGGSNPPHTVYRRFLAFHGSGSRLLFNTLIILPDPDTTGTIPVLCNKCQRKLPETTGSVKLAKLVGRTCTYP

SEQ ID NO: 355757 - protein, 41 aa, Zea mays
  Clone ID: MRT4577_87616C.1.pep
IISRQNCEANDQPVSTYMQSLYITRNGNHGLLKRKKSPFCI

SEQ ID NO: 355758 - protein, 76 aa, Zea mays
  Clone ID: MRT4577_87617C.1.pep
LQAVEGTSLVRALLPMITIAPLLYNISPDHAPSMPKGNGGFRSLCMLYVFPPGCSSHVSVLFVCMYKTNLALQMVW

SEQ ID NO: 355759 - protein, 75 aa, Zea mays
  Clone ID: MRT4577_87618C.1.pep
FDGACTSNLLSRWGVLHSDQWLFFSGGAVSTVASLAAKVGAFASALAWGMVKMWNVSPLTGSQGRVRINCCRVNG

SEQ ID NO: 355760 - protein, 106 aa, Zea mays
  Clone ID: MRT4577_87619C.1.pep
GKFFLFFRPYPPKKTLFPSRTNYTNSHKNPSRPPNKPKSQNPGQTPNHQQTKGTPANTNRRENPPPGGLNLPEEEILPPLQELVGPGGDIPLNPGLPQQKNEALPE

SEQ ID NO: 355761 - protein, 86 aa, Zea mays
  Clone ID: MRT4577_8761C.1.pep
RHVKGRSLHSDLLVGPPELSGCLSLFVNLGNPRRAGSMFGPAAAVFDVLQLIIMFVRLEAVGRQVFAGIVKKAATCTVGGTKLLFQ

SEQ ID NO: 355762 - protein, 117 aa, Zea mays
  unsure (1)..(117): unsure at all Xaa locations
  Clone ID: MRT4577_87620C.1.pep
KSPLVKLQDLFKEEGVEAKLRFXGPNPFFFDNSKYMVVFFFNPPIKNGLAPGQEIPLLEGVFAHGLFFNMGGSVFFFGTAGVSVKTKWVFELLCCLCWVFQFNVQAFGVKPADKMLQ

SEQ ID NO: 355763 - protein, 138 aa, Zea mays
  unsure (1)..(138): unsure at all Xaa locations
  Clone ID: MRT4577_87621C.1.pep
ARLLPFSISLTSTYYDMLSPRSSVQPFXSLLPFYPNLISWAQGKGRAWXFPFSFPGXPQGFGGPPFLLSCLPPGGGLFLLKNFFFFFPRGEKRGGNLFPPYKGGALLFLFFWKKRKNFLLKKGAPPPRGRPKKKPPPF

SEQ ID NO: 355764 - protein, 92 aa, Zea mays
  unsure (1)..(92): unsure at all Xaa locations
  Clone ID: MRT4577_87622C.1.pep
GGSGGEIEPVIQLGASKVLPDLSGTLGKVEGLPVIPPIRLVPSLKTXGPFGAWGAGSAPPFPFPVQQGRAMVGFFARVGFSPPPVGVYVRSL

SEQ ID NO: 355765 - protein, 67 aa, Zea mays
  unsure (1)..(67): unsure at all Xaa locations
  Clone ID: MRT4577_87623C.1.pep
AYALKRIRDHIFKVTPQPIMSLVCSRDENKSSXLVKXLHPASLVPXGLEDTLILSMKGMAAGMQNTV

SEQ ID NO: 355766 - protein, 61 aa, Zea mays
  Clone ID: MRT4577_87624C.1.pep
ATALTLTLAAPKLHELKKLVACVTRINQNIKLRLLVGKLCYSSESVPALWRYLVLDWLCRN

SEQ ID NO: 355767 - protein, 63 aa, Zea mays
  Clone ID: MRT4577_87625C.1.pep
MKLVLVVLAFIALVSSVSCSQTGGCYCGQQQSHALQHHPQLHYPLKQLHQPPPQHHLLLLLQQ

SEQ ID NO: 355768 - protein, 73 aa, Zea mays
  Clone ID: MRT4577_87626C.1.pep
GKQNFFFWARTPGGFKTNIFKFRNQPTFLTLRTKWPPKALKNKGVNRVKGLRGLGTKKTKPFPARGETPGSPN

SEQ ID NO: 355769 - protein, 71 aa, Zea mays
  Clone ID: MRT4577_87627C.1.pep
VLPQGYLLLLLVFLEGHGRPSSWKCAHAGPPPPNKMLYLYARPLKMHKCLFNVIFWVWARIFICPGKKLYL

SEQ ID NO: 355770 - protein, 136 aa, Zea mays
  Clone ID: MRT4577_87629C.1.pep
SEGGSGGTIIDSGTTLSYFVEPAYQVIRRAFIDRMSGSYPPVPDFPVLSPCYNVSGVERPEVPELSLLFADGAVWDFPAENYFIRLDPDGIMCLAVLGTPRTGMSIIGNFQQQNFHVAYDLHNNRLGFAPRRCAEV

SEQ ID NO: 355771 - protein, 32 aa, Zea mays
  Clone ID: MRT4577_8762C.1.pep
TKLGDCTCHTKGCSVNYPGSKGSARMQAPSCL

SEQ ID NO: 355772 - protein, 62 aa, Zea mays
  unsure (1)..(62): unsure at all Xaa locations
  Clone ID: MRT4577_87630C.1.pep
GGCSYCHWNSIQIGGTCKLLGHYSKISHRTLNLKAIVMLSXLYSASTCTWTSXLPMWDIPYN

SEQ ID NO: 355773 - protein, 72 aa, Zea mays
  Clone ID: MRT4577_87631C.1.pep
KFTIRSDNKYHHIRDQTPPSPGSHAPDHGHVLPVLPAFTSYVTKWRSSRHIGQRRVDVLSHHSVLENRTRNE

SEQ ID NO: 355774 - protein, 88 aa, Zea mays
  Clone ID: MRT4577_87632C.1.pep
VHSQDLKEVMLSSTGGFVSSFSCQDTMYIITSHSMHGNLVQSGLRTDGVLGSFQDAVKGRVPPLMFMPFVDKFPACRQLKALPLWDLN

SEQ ID NO: 355775 - protein, 63 aa, Zea mays
  Clone ID: MRT4577_87633C.1.pep
MTSPRKDAGFLTQDQREKLRIAVQNAETQSLASPRSPTGGTTSALLQQYELQMLEQKRAARGR

SEQ ID NO: 355776 - protein, 51 aa, Zea mays
  Clone ID: MRT4577_87634C.1.pep
PGRWRSPSQAGCPVGPPSQRDLERCRGTEARLQLGRTDLSAHHMAIASTQE

SEQ ID NO: 355777 - protein, 119 aa, Zea mays
  unsure (1)..(119): unsure at all Xaa locations
  Clone ID: MRT4577_87635C.1.pep
PRVRYYNAEADKILHINLSDGEATATLPSRLSNARQQQAXTPGSRSIVMXSLITVPGTXTNDXVVDMXLINQILPTPXRTISASSXSPRLFIPHSPRAVSDISIQILDGLLHGSSVAKH

SEQ ID NO: 355778 - protein, 78 aa, Zea mays
  Clone ID: MRT4577_87636C.1.pep
DILEETMTIATCKQLIKQKTWSHLLHPFAIQEDASRICFGITMQAFNNLNHQWDQSLSRRGIQRGRRRSSLLCCLRQH

SEQ ID NO: 355779 - protein, 74 aa, Zea mays
  Clone ID: MRT4577_87637C.1.pep
APYLFPSDPFFFFFPLTPCSISPRASLFVPGSLQCLCPKFCFGFCVPGVSIFGMFLSFCPSKASLVFFLKPNVY

SEQ ID NO: 355780 - protein, 62 aa, Zea mays
  Clone ID: MRT4577_87638C.1.pep
FGPHNSCCRDTLVHSTSVINPFSISPFSLRKPSNRSRPPSSTKLPHPHINHIPEPAGVPTFP

SEQ ID NO: 355781 - protein, 34 aa, Zea mays
  Clone ID: MRT4577_87639C.1.pep
YFTPPCSILFLFVIIELWTNVQHDKLIFNIIKFK

SEQ ID NO: 355782 - protein, 93 aa, Zea mays
  Clone ID: MRT4577_8763C.1.pep
FLSSGNNAEYFFFFFFFFFFFFFFFFFFFFLLKTHEKGGGRGPTTTNKRVHGTRSTPGRGGSDQTMVIELGPNLITTTYSKYLWLARVPTAYQ

SEQ ID NO: 355783 - protein, 128 aa, Zea mays
  Clone ID: MRT4577_87640C.1.pep
TNMTTRHTTSRHNSHITLRSSRTRQTNTPRSNRHRRSTRKIIKPHNNNLTTNLRPPRLRQRHSNRQQQHSTDNQLTSYFLKRRGKTGLTHYHTLTRRVRSKENARQARYGRVGRTDNNKGRKSEPVRQ

SEQ ID NO: 355784 - protein, 112 aa, Zea mays
  Clone ID: MRT4577_87641C.1.pep
LLFVTLYVTHWISNEKSADHMDGKVHNWFLPRESRLLFGKVHLTIWNYCKTLISRSPFSLVKLEDGRKHRENESNLDSGLPKKKKKKGHYMRQAWLSILRHYTRVLCVVTTA

SEQ ID NO: 355785 - protein, 60 aa, Zea mays
  Clone ID: MRT4577_87642C.1.pep
VHSPHRICYTGLGVTNRRVTLFNFCTDWPTTLPITNFSIQNERRASPLPSHKLFVLGPKA

SEQ ID NO: 355786 - protein, 65 aa, Zea mays
  Clone ID: MRT4577_87643C.1.pep
IGTLLPTHPHFSPHNHFPHHPTSYALTCIQKYILCPNFNPRNKFNNHKISYISLTPVCFHLFYTS

SEQ ID NO: 355787 - protein, 692 aa, Zea mays
  Clone ID: MRT4577_87644C.1.pep
MWRLKIGEGGGPWMQTVSGFHGRQVWEYDPDAGTDEERSKVEQLRREFTENRFRRRESQDLLMRMQLTGQKHLLADMRAATKIEDGDEVTEESLQESLKRALGWMSGLQAEDGHWPGDYSGIMYIMPFWIFALHITGSIDAVLSKEHRREICRHIYNHQVIGVYDWRGNNPVVPELWLVPRFLPIHPGRFWCFTRITYMSIAFLYGKKFIGPITPTILELREELYSLPYVQIDWSKARNSCAKEDIRNKPSEIFKFISTCLNMFVEPVLNYWPLNKLRERALNHILEHIHYEDETTQYIGISPVTKALNMICCWVENPNSDALKRHIPRIHDYLWIAEDGMNTKIYDGTHNWELALIIQAMLSADAANEYGPTIQRAMEYLKRAQVTTNPPGNPSYWFRHRSKGSWPLSTIDNGWGSSDTSAEATKALLMISKVYPNLVENSNGDEWMLNAVDCLLSFMNKDGSVSTFECQRTYSWLEILNPLESFRNIVADYPTVECTSSVLQALVLFEEFNSEYRSKEIKENVKKAAIYIENNQNKDGSWYGTWGICFVYGTLYAIKGLVAAGRNYENSICIRKACNFLLSIQLKTGGWAESYHSCERQVYVEGHSTHVVQTAWAMLALIYTGQMERDPTPLHRAAKVLINMQLETGDYAQQEHVGSTNCSVYFNYPNYRILFPVWALGEYHRKVCTKSN

SEQ ID NO: 355788 - protein, 133 aa, Zea mays
  Clone ID: MRT4577_87645C.1.pep
GTKFNLFQGAKQKRGPRKGSLGTKGDKKNSKKVGGSQRGAMGPNGPIAKGLIFLPPGGGGGTPCFGKPAPPKGHHFRGGEAKGFTKGSETHYPTWKGGATVGGPRPRPMPHNGHPPSLIAPGGVTSNRYRTRG

SEQ ID NO: 355789 - protein, 152 aa, Zea mays
  unsure (1)..(152): unsure at all Xaa locations
  Clone ID: MRT4577_87646C.1.pep
ASVEGKRHTCWAPAASVLIRTTLVGLLLDRGYNGHASVLNXLDKADTEHLVGLGXAPTXRLXVLPGDLLYRPALMAAARGCSGVFHLATHCTRYPMSDPHGQMXQPAEEGTLNVLRPYKGGPYRSTEGGNMMXSDIIPSPVWPAWEPRHELC

SEQ ID NO: 355790 - protein, 219 aa, Zea mays
  unsure (1)..(219): unsure at all Xaa locations
  Clone ID: MRT4577_87647C.1.pep
RPGSESNYNHIVTDIISNEYSTTNXLTTFMKILDEEVRILKETMTTTQSYMGDERLLXERHRELRRAHXALLNIMPTMTGAAEGVALELPQLKRKVNGIALRLATPNVYEGHLLIHIVNTGITGDHVNVHLHKAAAAPLDGMLQAYDEPLESVDFRXSDASXTIQASLRMVMGDDMLKDDAXYDNDXPYTQRVVDLPHLEARKXPGATXRGILDPLEDF

SEQ ID NO: 355791 - protein, 78 aa, Zea mays
  Clone ID: MRT4577_87648C.1.pep
TRALNRRTGTRASHHHDHDQIAFMHRRSDASFGMGVAPNIMETFIEPEMKTASQYAMSKIYEKQKHLTVENTRATTAS

SEQ ID NO: 355792 - protein, 238 aa, Zea mays
  unsure (1)..(238): unsure at all Xaa locations
  Clone ID: MRT4577_87649C.1.pep
MQDNEECTPDKYIFPNTCDHLFSLTVMQRPRSAPSTSSLXLGHRHXRPPPCNLLEMSHHHRHRSPPSSPLLVPSSPPRSLLEQSHHHHHKSPPMPAVPLPPPCSLSKMSHHYSHRSPSLPPVSSPPPLELVSXVTTTXLFETSHHHHHRSPQSPQVLSSPPHDLSEMSQRHHYWSSSLPLVQSSSLPCSLSETVSLKPKPETCYPYNNRFCLTHDCETCARKMALNQKKLLCERGMLM

SEQ ID NO: 355793 - protein, 38 aa, Zea mays
  Clone ID: MRT4577_8764C.1.pep
SIDSLANNKAVSVSFIEGGSKFTWIYLLRYKSEVFTFL

SEQ ID NO: 355794 - protein, 61 aa, Zea mays
  Clone ID: MRT4577_87650C.1.pep
VRYAHSFMHTVFPLSEYRNSSELRSRQSVPCAITSISQWLKVDSCTIRSDQSGANMTSRLV

SEQ ID NO: 355795 - protein, 257 aa, Zea mays
  Clone ID: MRT4577_87651C.1.pep
MASSSSQVAAARGMGMTNPLAEWTDRVRSLEAGVRAWLAKQPTHVEAAVVTAVGAVQGAALGGLMGTLAPDGGAALPVPPPPPGTDPKVLASFKQAQALAGGPLVQARNFAVMTGANAGISCVMRRIRGVEDVQGSMAAAFGSGALFSIVSGMGTPNPVANAITTGVGFAVFQGGFFMISQKFSQPQSGDTYYSRGRSMLQKLGLQNYEKNFKKGLLTDQTLPLLTDSALRDVKIPPGPRLLILDHIKRDPELTKAN

SEQ ID NO: 355796 - protein, 83 aa, Zea mays
  Clone ID: MRT4577_87652C.1.pep
TLVWVAHYLPGFEIQCGHLMSRPEALFLGGSWQRGSPHLNRNPLVFKLIIGSLGSSVVQLSSVGISQRVSRQVLYLAGPRHAK

SEQ ID NO: 355797 - protein, 54 aa, Zea mays
  Clone ID: MRT4577_87653C.1.pep
FSGHSFSLIKWESTSMCFFQHEKTRLNASNPCYQHIALHMDFTLCPLLSCCANF

SEQ ID NO: 355798 - protein, 155 aa, Zea mays
  Clone ID: MRT4577_87654C.1.pep
KEWETIRSFKDEWTQLDMFYRNWALKESFIKAIGVGLGFELQRLEFDLSPLNLDIGQVYKETRLFLDGEEEKEWAFEESKIDEHHFVAVALRKPDGSRHQDVPSQDDSKPTQRQFTILNFNDLMSSAVPMTPEDPSFWDCFCFTEEIPIRNGTKS

SEQ ID NO: 355799 - protein, 154 aa, Zea mays
  Clone ID: MRT4577_87655C.1.pep
PHSAMCVRISRDSYPNLRALRNASHASLTDAAYVKISEGDFGYVLDDVPHLADYIPDVPTYPNPLQDHPAYSTVKQYFVDEDDTLPQKVVVQKNSRRGVHFRRAGPRQRVNFESDEVKACIVSCGGLCPGLNTAIRELVCELALMNNANNILGI

SEQ ID NO: 355800 - protein, 85 aa, Zea mays
  unsure (1)..(85): unsure at all Xaa locations
  Clone ID: MRT4577_87656C.1.pep
ASLKKITTHSSSSPPSQLKQRSSIERPLLLVLLHNPLEARTRPGHELERTHQRNLLGPQQTFXCHRIQETDHRPLTSRLSESTLH

SEQ ID NO: 355801 - protein, 34 aa, Zea mays
  Clone ID: MRT4577_87658C.1.pep
LTFAILLLFDLLVSSLLLKSFAPPSILIHYSLKC

SEQ ID NO: 355802 - protein, 176 aa, Zea mays
  Clone ID: MRT4577_87659C.1.pep
RQTMQGNIWAVLDGQGLPESMTLVLRFQLQPSLASSNLLGGSFDQEHYSSLPSNQIAGLKVLLIDDDEINLVVARKLLERLGCTVSSGSGLMDSSSACASFQLVMVNLEMSAIDPLDAASRIRQQYRSSHWPLVMAMTSEQNVWEKCAQSGINGVLKKPLVLLEVKEELERILQNT

SEQ ID NO: 355803 - protein, 63 aa, Zea mays
  Clone ID: MRT4577_8765C.1.pep
YHSFLAGEEVKVRIINGLVIEHLDKRPSGLAVHQDGVVAVVTVLHPSAFGLLYRLSVEAVLGP

SEQ ID NO: 355804 - protein, 54 aa, Zea mays
  Clone ID: MRT4577_87660C.1.pep
IPLHPEYAIQLDATITWKLLHELLQNTAHYKDTPARLKLSNLHPYAKMLSFTHE

SEQ ID NO: 355805 - protein, 139 aa, Zea mays
  unsure (1)..(139): unsure at all Xaa locations
  Clone ID: MRT4577_87661C.1.pep
HRHHSRRRTTSPTPSLRSLFAGPFRSAMVKRLRRKGDVSSAPPPKAGGSRSTNPDKFKKKGVKTDPEKLKAACTESANIAEASASAQTPTPKPVKTSPAAAAAAEIADDRVAQSXXXDGKFSWKETMMGLVVLLGVGAC

SEQ ID NO: 355806 - protein, 93 aa, Zea mays
  unsure (1)..(93): unsure at all Xaa locations
  Clone ID: MRT4577_87662C.1.pep
RTCVCGRVVTKLLNDLFGVRTRGGCACAVRFALLGVGEDLALRIRDAIVKGYHGVKXKPGWSRFRFAYYLSHNEDLLLHICDAIVKGYHDVNS

SEQ ID NO: 355807 - protein, 69 aa, Zea mays
  unsure (1)..(69): unsure at all Xaa locations
  Clone ID: MRT4577_87663C.1.pep
TTTDVHDQTFLKKNIQSNIGPVWIGFWPPNASLLSPLHEGMKQLSQXSWGLXPXVGEXXAEEXGENXXX

SEQ ID NO: 355808 - protein, 485 aa, Zea mays
  Clone ID: MRT4577_87664C.1.pep
MVKRLRRKGDVSSAPPPKAAASRSTNPDKFKKKGVKTDPEKLKAACTESANIAEASASAQTPTPKPVKTSPAAAAAAEIADDRVAQSKTEDGKFSRKETMKGREEQKGEGASDGVTQTKTEDMNVTRKETMKGGERKGDGSRKEMMKGREERVKTEEKTGKEKEEEKSGSGFIFMCSARTKPECYQNGVFGLPRGKMDVVEKIQRGTKLFLYDFDLKLLYGVYKADTRGGLDLVRHAFDGKFPAQVKFSVFKDCLPIPESSFKHAIKENYSSKGRFTQELNTKQVQRLLALFKPISLSKPAPQHIEDIRKPSDYEERRQLQHIEERAAPINVHAHPLEDRYKMTRSLHPPLFDEPRRGLVLNPYHMQEPQHVPLNYYHQVATRSPYHQPHMDIMHERTAAEVTVRDHQALPGELAARSERVDELYRSYKLSTRAMDLSPGASYLTTYEHPTSVYGEGIQRPALTRVSGPSVPVSTRYSFAGPPAY

SEQ ID NO: 355809 - protein, 73 aa, Zea mays
  unsure (1)..(73): unsure at all Xaa locations
  Clone ID: MRT4577_87665C.1.pep
FLGYRQLVTVVMGTAQESDNRALFVPGQXMDQLARMFLDPPYYPSLHPAKTFRADYWVQLQQISKDYAPSSHI

SEQ ID NO: 355810 - protein, 67 aa, Zea mays
  Clone ID: MRT4577_87666C.1.pep
RRRTTIEAGANLRWLITIDNAAVNALRLITIVGMMVKCASGLRTDYVNAMVLTGDGGKFCGGSDMNV

SEQ ID NO: 355811 - protein, 59 aa, Zea mays
  Clone ID: MRT4577_87667C.1.pep
WPMVVVSKWYGVISLSPVFKLCTWRISSCGVVVSPSSSFWGYRGMRNVLPPRCRPRFIF

SEQ ID NO: 355812 - protein, 42 aa, Zea mays
  Clone ID: MRT4577_87668C.1.pep
RSPSYSYRSAIVAVLIALVCLVPMLPVQFSDGPVTCQAGTIC

SEQ ID NO: 355813 - protein, 78 aa, Zea mays
  Clone ID: MRT4577_87669C.1.pep
DSPMSASASLSSVNCCLTSQRRKHSLPSAASVDGSSGSAPVNRSHSPGMAPPSAIQEMREGLNNSRDDRTGKKKRAAA

SEQ ID NO: 355814 - protein, 109 aa, Zea mays
  Clone ID: MRT4577_8766C.1.pep
CVMVPLHALIMGVFLPLSWNGPLPIMIDGCGCAHTHFDDTTPFFLSFSGELASVRCLFAISRSADACMLVVHSPYRKNVSLACPLAGLLPILFRPTGITWGNPWPGPPA

SEQ ID NO: 355815 - protein, 72 aa, Zea mays
  unsure (1)..(72): unsure at all Xaa locations
  Clone ID: MRT4577_87670C.1.pep
HGKTRGMGTGRNSRXHRRNQSXADKAYKXKHLGNEWKNPFAGSSHAKGIVLEKIGIDAKLPNSAIRKCDRVQ

SEQ ID NO: 355816 - protein, 105 aa, Zea mays
  unsure (1)..(105): unsure at all Xaa locations
  Clone ID: MRT4577_87671C.1.pep
ECDHHDIRTRVNNYLGPVHDERMQYINIQAADRKLLTDTPTDLQQNDRIHHLIKSALLNVNMVSSKYHHETTDNRKLXAKELLDKWNRPILNTSTRLADMNRYDD

SEQ ID NO: 355817 - protein, 62 aa, Zea mays
  Clone ID: MRT4577_87672C.1.pep
EKELPWLIIYMHQSTTIVVTILFSMLLKVKQLDGWVKRGLFACYNCSRVLVVGSCACLTLIK

SEQ ID NO: 355818 - protein, 72 aa, Zea mays
  Clone ID: MRT4577_87673C.1.pep
MEISFALYLRSATSSCPFSSMPRPPPPPPLGGLTTGAPTSGTDWEIAMRDWRAASICVNSADAAAAAGEAID

SEQ ID NO: 355819 - protein, 56 aa, Zea mays
  Clone ID: MRT4577_87674C.1.pep
LSLSTVFAKIRGKEPPVELEGRYQYHRLAQRQPAVQSQLMGEGATGQTKQARSQTV

SEQ ID NO: 355820 - protein, 106 aa, Zea mays
  Clone ID: MRT4577_87675C.1.pep
EGCKDCKGLFVPDKLSEYHCYMKAYMSHRSIKRPQHHGAPLYLTDTVSNPRTITVEGIAIFMSRCRSAVTPSAWNRLRDTATTARYTSVSVFTVCPARMPNRSKKC

SEQ ID NO: 355821 - protein, 91 aa, Zea mays
  Clone ID: MRT4577_87676C.1.pep
MASPTAAAAPAEFTQMEAARQSLIAISQSVPEVGAPVVSPPSGGGGGRGMDENGHEDVAERRYRAKLISISNQSPDARARPTTCPRNNGAA

SEQ ID NO: 355822 - protein, 70 aa, Zea mays
  Clone ID: MRT4577_87677C.1.pep
LHWRVAGEAEEGKVWGRRCYGSSSRAAAHSNTWHTRKAPPRMSMSLPFFHGVLVSCTHAAIFPDRRSSAH

SEQ ID NO: 355823 - protein, 78 aa, Zea mays
  Clone ID: MRT4577_87678C.1.pep
KASSNYKPTVAAVFKGNGPLKAPSGPPHPRRAETPPPPPFFPPDPEGPRPKKQTFLSPPPPLFPEKQTRGQPPWVPLQ

SEQ ID NO: 355824 - protein, 123 aa, Zea mays
  Clone ID: MRT4577_87679C.1.pep
IPGSPPRLRAEYYRSEVWLTDAVVARAGGTGAKRDTNMAPRACMDHLVCVHYRPQDKPAMGILVSMLQTEQHIDPPPHPDAHLAPYTGRATQAFGDTTYRPVFRARQMKILGLSKSGTIGCLS

SEQ ID NO: 355825 - protein, 66 aa, Zea mays
  Clone ID: MRT4577_8767C.1.pep
FGSCASNSCFCRTCAAVISWITSSAKSDRANSFHAQTPNKKNHLSTRPNILFTQERQKETQGIKYG

SEQ ID NO: 355826 - protein, 50 aa, Zea mays
  Clone ID: MRT4577_87680C.1.pep
RGRSTARRVSIPHRQLYIHQDFWILNSPSNKRTLPMSQLESELLIGPSVF

SEQ ID NO: 355827 - protein, 122 aa, Zea mays
  Clone ID: MRT4577_87681C.1.pep
MRVLLVALALLALAASATSTHTSGGCGCQPPPPDHIPPPVHMPPPVHLPPPVHIPPPVHMSPPVHLSPPVHVPPPVHMSPPPCDYTTQPPRPQTHIQTHTCACQQTHTSPCQLQRTCGVGST

SEQ ID NO: 355828 - protein, 105 aa, Zea mays
  unsure (1)..(105): unsure at all Xaa locations
  Clone ID: MRT4577_87682C.1.pep
LSAEKTWIGRQYNRTDLSQAYFGQPEMDLXELTCPNLMGCHCQFGRCKTFGATRIYESVHMTIETAVRIETFTALWVNDSLCSCVMLCTEDHADSKVERDYAHEH

SEQ ID NO: 355829 - protein, 51 aa, Zea mays
  Clone ID: MRT4577_87683C.1.pep
GTTAPLLQQRTTKIDCLLQLNSFATNCGCSNISFSSCLNIDSFHALYKEKK

SEQ ID NO: 355830 - protein, 75 aa, Zea mays
  unsure (1)..(75): unsure at all Xaa locations
  Clone ID: MRT4577_87684C.1.pep
YXGFHFSGVLFFLLVWATKLYRFSTYSFSXEGLRASTTTTTTTTTTTTTTNTFTLCFADANTSPFTPDNRTALDA

SEQ ID NO: 355831 - protein, 75 aa, Zea mays
  Clone ID: MRT4577_87685C.1.pep
NSDIDLNQTVYSKGFLRCCLLFVGTSKVKIRLFDGLLAVSLAKNFLGDISVFPYLGPLAWVVSRSTMTGSFSLRD

SEQ ID NO: 355832 - protein, 82 aa, Zea mays
  Clone ID: MRT4577_87686C.1.pep
IPSLNQPGFETQIPKIFVYPPKSFIWGAPCLCLKILGGRKNYFPKAFLKTLFCKGNAGPPATHVLFAPGQNPSRSHNAPIPL

SEQ ID NO: 355833 - protein, 60 aa, Zea mays
  Clone ID: MRT4577_87687C.1.pep
TIKTYTVNQDTIVIDPLHKYKSSTFIYSQKHYNYNIISQLDHLQMFSLNYYKSLIKYLLQ

SEQ ID NO: 355834 - protein, 102 aa, Zea mays
  unsure (1)..(102): unsure at all Xaa locations
  Clone ID: MRT4577_87688C.1.pep
LEFPPGDVPNFPTFYGSVKIPKKSXVRLKIFGSRVDAPKIFFLGPIKDXFLGVFNDPGAPVLMVLKTKLFPLVLTFEDLPKRVLSLVPLNSHGCSGCGPSSE

SEQ ID NO: 355835 - protein, 270 aa, Zea mays
  Clone ID: MRT4577_87689C.1.pep
MDDNPILWRPYVSQAAMATESCYPRGLSWFAWSCIPADLAHHSKAPGPRPLHGPRRRGSRARTPHRGTPRRAPAGYPRLRAPRLAPVAPRRLPLLRLAPHVPHIPVAAPRERPPPPMRPRCTVLPSPSPNHAPPAPPIRVCRPAADDVFVSHLVTDTMHYNPSDLSSWVESMLSELNAPPPLLPPVTPFPRLASTSSTVTSGVAAGAGYFDLPPAVDSSSSTYALKSIPSPVVAASADPSPDSVREPKRMRTGGGGTSSLSSSSSSMDGG

SEQ ID NO: 355836 - protein, 211 aa, Zea mays
  unsure (1)..(211): unsure at all Xaa locations
  Clone ID: MRT4577_8768C.1.pep
MVSSPQANKFPLRKQISSPSSSCMAPHVLLVLVILLYLVRTLRPWRSRRNSTCCTPSLPPGPVPWPVVGNLPEMMLSDKPAFHWIHHIMKEAGTDIACIKLGGVHVIPISCPKIALEVLSNQDANFASRPLTFASKTFSTGYRDAAMSHCGDHWKKMRRVLASEIVCPSRHRWLHDKRADEADKPHRYVYNLATKAXVXSGAVDVRHIARH

SEQ ID NO: 355837 - protein, 154 aa, Zea mays
  Clone ID: MRT4577_87690C.1.pep
MATAEVQTPTVVAAEEAPVVETPAAVVPESCPARRASQVCLCPRLPGDTERERSASVGRPSGNRREASVSVVQNSAQQRPRESCVSLWPDPRAPGSKCVRVPHRVCLLCPTAQRVCLDPSTGAAPRGQAARSLPAVFPALHYRLCILRCVWGGG

SEQ ID NO: 355838 - protein, 109 aa, Zea mays
  unsure (1)..(109): unsure at all Xaa locations
  Clone ID: MRT4577_87691C.1.pep
KAHQTKPXKSPRXKXSPQRRGTRLFFFLSTPKNPTGGGGKFSCXRLTPGFESTAYTPGIGHNLQEHSVVLVRRRKVKDLPXVRNPIIRRTLXAXAVKNLNQGXSKYGAK

SEQ ID NO: 355839 - protein, 103 aa, Zea mays
  Clone ID: MRT4577_87692C.1.pep
KDVVRRAVRLAVNVDACGRPNSSSRPSFFPLALQAAGLTLQSSSKQQQRRACILHAYIGRSDPALLTYSGGGGVCAGQQCMPLFSGPAPSYLQRLSSQQNLAS

SEQ ID NO: 355840 - protein, 113 aa, Zea mays
  unsure (1)..(113): unsure at all Xaa locations
  Clone ID: MRT4577_87693C.1.pep
MGSKHLAVGSCLLLLLLLPTASAATXVDYCSKKDXTRAKVSGAHIVPDPAEPGKPASFKISATTDKTIEKGKLVIDAXYIIFYVHSEDRDICGETSCPVNGDFVLXHQHTLPG

SEQ ID NO: 355841 - protein, 135 aa, Zea mays
  Clone ID: MRT4577_87694C.1.pep
MRVHRIVSLLAALLVLLALAAVSSTRSAQEESVADNAGMLAGGIKDVPANENDLQLQELARFAVNEHNKKANALLGFEKLVKAKTQVVAGTMYYLTIEAKDGEVKKLYEAKVWEKPWENFKQLQEFKPVEEGASA

SEQ ID NO: 355842 - protein, 83 aa, Zea mays
  unsure (1)..(83): unsure at all Xaa locations
  Clone ID: MRT4577_87695C.1.pep
AASPXPXLXFXXLXXLXSPACXXXXXXXXFSXLAGVSPAXFLXXPRLLPFPPRAAPPGGGLLKXRKLLPFNPSLLLTGPKVFL

SEQ ID NO: 355843 - protein, 64 aa, Zea mays
  Clone ID: MRT4577_87696C.1.pep
MKPWLPFRLHISFQHVQDMYVHHYSSLFRSATAFGCIVLDSPGKYRSWQVRLFPHGSASSNFGQ

SEQ ID NO: 355844 - protein, 38 aa, Zea mays
  unsure (1)..(38): unsure at all Xaa locations
  Clone ID: MRT4577_87697C.1.pep
ARGDGEVNKLYEAKVWEKPWENFKQLQEFKPVEEGXSA

SEQ ID NO: 355845 - protein, 135 aa, Zea mays
  Clone ID: MRT4577_87698C.1.pep
MRKHRIVSLVAALLVLLALAAVSSTRSTQKESVADNAGMLAGGIKDVPANENDLQLQELARFAVNEHNQKANALLGFEKLVKAKTQVVAGTMYYLTIEVKDGEVKKLYEAKVWEKPWENFKQLQEFKPVEEGASA

SEQ ID NO: 355846 - protein, 135 aa, Zea mays
  Clone ID: MRT4577_87699C.1.pep
MRKHRIVSLVAALLVLLALAAVSSTRNAQEESAADNAGMLAGGIKDVPANENDLQLQELARFAVNEHNQKANALLGFEKLVKAKTQVVAGTMYYLTIEVKDGEVKKLYEAKVWEKPWENFKELQEFKPVEEGASA

SEQ ID NO: 355847 - protein, 42 aa, Zea mays
  Clone ID: MRT4577_8769C.1.pep
LIGAKTYQTSQKSILRTPCMASPVNAFPLCIHILAGLIPIDN

SEQ ID NO: 355848 - protein, 39 aa, Zea mays
  Clone ID: MRT4577_876C.1.pep
WFCWIKKTHDKRIFKSTELEHSCHNCVKERLNETCAIRS

SEQ ID NO: 355849 - protein, 113 aa, Zea mays
  unsure (1)..(113): unsure at all Xaa locations
  Clone ID: MRT4577_87700C.1.pep
VPEISRVSTHAVRVHXALAGGIKDVPANENDLHLQELARFAVEEHNKKANALLGYEKLVKAKTQVVAGTMYYLTVEVKDGEVKKLYEAKVWEKPWENFKELQEFKPVEEGASA

SEQ ID NO: 355850 - protein, 135 aa, Zea mays
  Clone ID: MRT4577_87701C.1.pep
MRKHRIVSLVAALLVLLALAAVSSTRSAQKESVADNAGMLAGGIKDVPANENDLQLQELARFAVNEHNQKANALLGFEKLVKAKTQVVAGTMYYLTIEVKDGVVKKLYEAKVWEKPWENFKQLQEFKPVEEGASA

SEQ ID NO: 355851 - protein, 100 aa, Zea mays
  Clone ID: MRT4577_87702C.1.pep
RYQEQGEAPPGPTGLRVQHTPMEGSAAQAPAKTDLRVAANYGSLPKAHGNTDLIRAAGGICTERKPRGRGADQDPTRTAADEHQPHRDRAPERCTGAQKP

SEQ ID NO: 355852 - protein, 312 aa, Zea mays
  Clone ID: MRT4577_87703C.1.pep
MRKHRIVSLVAALLVLLALAAVSSTRSAQKESVADNAGMLAGGIKDVPANENDLQLRELARFAVNEHNQKAVWCRHVSPGVKMPKDYCYESGPRRWDPDPHVCRLGPRRWVYDLHVYRPDPAGRSRISVYVNWTLTRGVQDFKPAYTLGLCSGSNDRAARYRGGRSCHIDTRMVHTVTRMLLRHAVASQRRVRGQRHNGQPLAQAEYPLQCQQLASITINSCARQHGRSLHTSAYQTPLRSRFEPAERNALLGFEKLVKAKTQVVAGTMYYLTIEVKDGEVNKLYEAKVWEKPWENFKQLQEFKPVEEGASA

SEQ ID NO: 355853 - protein, 135 aa, Zea mays
  Clone ID: MRT4577_87704C.1.pep
MRRHRIVSLLAALLVLLALAAVSSTRSAQEESVADNAGMLAGGIKDVPANENDLQLQELARFAVNEHNKKANALLGFEKLVKAKTQVVAGTMYYLTIEAKDGEVKKLYEAKVWEKPWENFKQLQEFKPVEEGASA

SEQ ID NO: 355854 - protein, 70 aa, Zea mays
  Clone ID: MRT4577_87705C.1.pep
SKHYFFCQAKKEGLLPLLVRQFSFVYHCRQGCWAPVGGFFNKGAPRKICFPFVKKKKRKKKKKKKKKPPP

SEQ ID NO: 355855 - protein, 159 aa, Zea mays
  Clone ID: MRT4577_87706C.1.pep
MALAAAPASGDSQSGPQRNYQVVEMRKHRIVSLVAALLVLLALAAVSSTRSTQKESVADNAGMLAGGIKDVPANENDLQLQELARFAVNEHNQKANALLGFEKLVKAKTQVVAGTMYYLTIEVKDGEVNKLYEAKVWEKPWENFKQLQEFKPVEEGASA

SEQ ID NO: 355856 - protein, 145 aa, Zea mays
  unsure (1)..(145): unsure at all Xaa locations
  Clone ID: MRT4577_87707C.1.pep
AYCRSVVVSRASFGCCGGDLRPGPPRVKLFHIVPNIPTLPYESCKLDLLFTLCSSWGLFSASKFANLLADDLLRSVGDPGFDVMDESDDLRSASALGPVGIDGTVLSPXDLVTLGRVFLVKWRRHRGVQRRESGYNQTEIPAGLE

SEQ ID NO: 355857 - protein, 103 aa, Zea mays
  unsure (1)..(103): unsure at all Xaa locations
  Clone ID: MRT4577_87708C.1.pep
EKIIFLIDHGSEELFSLSAASLLAHKRTVPLHXLDTFINXTASSLASLQTNXDKAKKKKNLSQKRMICMSDSDLNKTSIVKRQPSPYWANSPLLPYRAQHMNY

SEQ ID NO: 355858 - protein, 265 aa, Zea mays
  unsure (1)..(265): unsure at all Xaa locations
  Clone ID: MRT4577_87709C.1.pep
LQILGLDMCADIIVGNELMRGISGGQKKRLTTGEMLVGPTKALFREDFSPGLDVTTTFQTVKCIQQIVHLGEATVVSWLVRPEPEVFEPFDDFMLLSEGRIDYQGPREYGLEFFLAGGLRSSSHIVISNAVHDHPVKKXHERXWITYKKRQQXAAGPEYLDNFLHVDIRKSLXKQLSVPFHXRKIHKSALVFSDKFVSTLELAQGLNYLRTTRPFMVSWSKEWLLMKRNSFVYIFKIVHLSKEALRCTTSQPRSAAPHRLRHQLQ

SEQ ID NO: 355859 - protein, 126 aa, Zea mays
  Clone ID: MRT4577_8770C.1.pep
KVVVFAAAMALAVEVGMAWVPDSARVVVFVAAAPEVVAGGLAKDLAFGFVKTKHSVVVAGVGAAPAFLITIDTSACSIRLPLVLSLTFVFIHASYLAMTMGDGDILHTRIICVLHVMLAPYKHSEI

SEQ ID NO: 355860 - protein, 111 aa, Zea mays
  Clone ID: MRT4577_87710C.1.pep
FKASQISLAKCSESIVFLIPQANDHARSAIKSLPAVQHCIYAPFSSRGFNLSLERKKACRRYLIRRCSMLVIDGSIPQACIRSYIAWSHECPIRMTSTSNVVVVALSGMDL

SEQ ID NO: 355861 - protein, 129 aa, Zea mays
  Clone ID: MRT4577_87711C.1.pep
ALFIQKRAHMSRFLTRDHLERRSLLDDPRLPPPVGRGLVLLSCDPLAVHRPRWYILTHWKYPGNSHLGAWRAFPLSSALRDDQIGGSATALPSTTCDMSLTGTRPCVQLNRAQIDSATGPVISGILQRR

SEQ ID NO: 355862 - protein, 60 aa, Zea mays
  Clone ID: MRT4577_87712C.1.pep
ATMQILSRFKFSTKKCVTINAAEHKLANTPKSCAHMLKSTERVNNATHVSDEPTRHATRP

SEQ ID NO: 355863 - protein, 43 aa, Zea mays
  Clone ID: MRT4577_87714C.1.pep
RVFYLKLFLPNFPVLGNANNHSLAYNFMNSSPCNLSAIAPVTM

SEQ ID NO: 355864 - protein, 67 aa, Zea mays
  Clone ID: MRT4577_87715C.1.pep
LQTLDVRGTSVRSLPDGFWRIQTLRHVLGDRLILPKRVGDLRNLQTLNSVKPDYVTPMPGTTRPSTT

SEQ ID NO: 355865 - protein, 165 aa, Zea mays
  Clone ID: MRT4577_87717C.1.pep
MSGASNYGSLIDEWLPPPTPSPRTLMSSFLNEEFSSAPFSGPHDQSEKSREVLNSSDEVPSHAVKGLFQNGFSNLFSAKSNSNGGLAERRAARAGFSVPKIDTSRVGSSTVIRSPVSIPPGLSPTTLLESPVFLYNKMAQPSPTTGTLPFLMATNDKSTYPQLPR

SEQ ID NO: 355866 - protein, 62 aa, Zea mays
  Clone ID: MRT4577_87718C.1.pep
TRPDRANHYSYLGNRYQRWLGGPVTRREGRCRSFQTKHSACTIARMCISLMTVMRTKMNPVN

SEQ ID NO: 355867 - protein, 80 aa, Zea mays
  Clone ID: MRT4577_8771C.1.pep
EETETMVPAEKIPEPWPPITNGPASTVHSATAQPEGGAQDIVTRERMGHNEGIFLTKPENSLPRGIEPRTWRCYSEVLNH

SEQ ID NO: 355868 - protein, 89 aa, Zea mays
  Clone ID: MRT4577_87720C.1.pep
HPVQRLADKVAGNFTYGVMALSAATYMFWSILGSQLVPAAIQHGGAMSLALQLSCSVLVIACPCALGLATPTAVLVGTSLGATRGLLLR

SEQ ID NO: 355869 - protein, 70 aa, Zea mays
  Clone ID: MRT4577_87721C.1.pep
QKIFKFNKQKRGGFFINLPHFPPTKKNFILLYLNFTEHNFRPHSGGHVLGNKFLYLCCALILIYGFLVGT

SEQ ID NO: 355870 - protein, 102 aa, Zea mays
  Clone ID: MRT4577_87722C.1.pep
MGPASSRAVREPTVVVQTTSEADILDDGYRWRKYGQKVVKGNPNPRSYYKCTHPGCSVRKHVERASHDLKSVITTYEGKHNHEVPAARNSGQGSSGSGSGPS

SEQ ID NO: 355871 - protein, 124 aa, Zea mays
  Clone ID: MRT4577_87723C.1.pep
PIITLTSWALLPPGPCSLQGVRLHPPFLLFAVSKFNQDPIPWQGVFPWTESPRQASGVKWVMGFVVPGPSFNGVWGLGVHGPLELSSFSRHLFSPFTFPGLRFPQVSGFPSSKDKGPRPKRNKD

SEQ ID NO: 355872 - protein, 72 aa, Zea mays
  Clone ID: MRT4577_87725C.1.pep
NHAICSKGGRAVAPPIGDSGATGKNLHSRSVGDRFSSITFRSFFFQEKKPNEQMYIDIMASPFQCSPQSICP

SEQ ID NO: 355873 - protein, 76 aa, Zea mays
  Clone ID: MRT4577_87726C.1.pep
KDWTVFHCKKLKRRITYELRCNRLHKSTQLNPSILAPLLARTMKMISSAHRWDNLQREVPKIRHKLPPAGPQNLNK

SEQ ID NO: 355874 - protein, 63 aa, Zea mays
  Clone ID: MRT4577_87727C.1.pep
NFTCLYIEWHLDHQKEVLLMLCKTNRTQLLRTTGEHLVIYWPGTDTETLCMHATGMLSKQEPF

SEQ ID NO: 355875 - protein, 55 aa, Zea mays
  Clone ID: MRT4577_87728C.1.pep
VDRLTDTSRYTGSHKERFDESGKGKGIAGRQDILDDSGYVSAYKNAGTYDAKVKK

SEQ ID NO: 355876 - protein, 128 aa, Zea mays
  unsure (1)..(128): unsure at all Xaa locations
  Clone ID: MRT4577_87729C.1.pep
KKAGVPILEVQAVPNAFXTGPICGPGGYVWFPQPPPRGHPGGYILKHPITPPIFGKPIYGQLRFALGLRPLLNRXFRGKDLPVQNYIAKEGQLAIKIHCPHQRFMSWGGFFGEKFQEKNSLLGAWVRV

SEQ ID NO: 355877 - protein, 82 aa, Zea mays
  Clone ID: MRT4577_8772C.1.pep
SAAGRARLVLLDRQGYYRCCRGVGALRISSCGLAAGPPSPSPARPDGPRPWSHTPHHRLAHPSPVASYQIPGASATNVRCRM

SEQ ID NO: 355878 - protein, 121 aa, Zea mays
  Clone ID: MRT4577_87730C.1.pep
ENTAGQVTINNEILPMALIPEACITIKPLHGHGVVINSGEGCDSWGKGTIRTRSKRAGGLLIPLGFLCMGGNHWPRGTPYRLKKKNRRTGGREPFSKQIHSSAEAQGLVGVLSSPGEPSFP

SEQ ID NO: 355879 - protein, 90 aa, Zea mays
  Clone ID: MRT4577_87731C.1.pep
HGRHSDTETDEAMFEAMTCSPIPAKSASGTVLMMVTIVHLATCLFLQVADPLFSANARLIGSDSPIMACVFGYRLAGFLVPWLYCLGRLA

SEQ ID NO: 355880 - protein, 117 aa, Zea mays
  unsure (1)..(117): unsure at all Xaa locations
  Clone ID: MRT4577_87732C.1.pep
TNCLHLTFGFNLQQHFPFSQLAGFHPQKFFTFSPLIALISAAYLRQQLXPPFSLVEXVSPIAFLTQQQLLLFPVRFAPXFGTLLQLQRLLPFSQHAFNNTTALLRQPIMGGASYRLL

SEQ ID NO: 355881 - protein, 71 aa, Zea mays
  Clone ID: MRT4577_87733C.1.pep
QAQSKLLHVSVDLRSPENRPTLAGHPGCKALYFCPTCCLLSGSIAQGTHRKAGGEPEAHWLSSSTGFEVPG

SEQ ID NO: 355882 - protein, 55 aa, Zea mays
  Clone ID: MRT4577_87734C.1.pep
AACLSASPPSLSVDEIKRPSHSLGTPMLPLISVQPQILLYSWLAVHQILFCISVA

SEQ ID NO: 355883 - protein, 66 aa, Zea mays
  Clone ID: MRT4577_87735C.1.pep
FQFFCVLYNGALKNASSEFGARLFSMDSFSKNAGDMLVGFPFPYNRTRQASFPPGLFEFLFGASAL

SEQ ID NO: 355884 - protein, 89 aa, Zea mays
  unsure (1)..(89): unsure at all Xaa locations
  Clone ID: MRT4577_87736C.1.pep
TYTTTRRTVAIGVGLSLYARDRTTGIVXDSGDGGSHTVPIYEGYALPHAILSIDLAGRDLPATLTNILTERGYWFTTRFERKILRYIRE

SEQ ID NO: 355885 - protein, 101 aa, Zea mays
  unsure (1)..(101): unsure at all Xaa locations
  Clone ID: MRT4577_87737C.1.pep
PKNAPLVASASYALYPAEGDCLRLSTSAAAEADCAHCVVAGPTSLREGMPNSPXDRPXLGAITAAVAPRTRTTHYPMSSSPLMVATIIDVNCALVRATTPA

SEQ ID NO: 355886 - protein, 57 aa, Zea mays
  Clone ID: MRT4577_87738C.1.pep
KKPRTVGGKIAPSYCIKKKTLSHRSRKPSNPYAPPIHNGTVAHVRTTTTETGLRPLL

SEQ ID NO: 355887 - protein, 217 aa, Zea mays
  unsure (1)..(217): unsure at all Xaa locations
  Clone ID: MRT4577_87739C.1.pep
MAAQRLLFLKCCRGYSTSAEDMVISSLRLIPSPSVSVTNPPPLPTILHSTDSPPDPHPPLTTMLLSAADRLRGVFLRKPSSRNVLHQALSSTGIGTTMALSPEVLANVVNTSNLNGAATVTYFFWAVTNSKPPPSVHTCNIVIRALGRKKXFDYFDDALQIMRRNNIFPDLTTLGDHWGIGLVGCQMSVGAVEVDQYPIQYGIWGFGKNLAQERDAF

SEQ ID NO: 355888 - protein, 70 aa, Zea mays
  Clone ID: MRT4577_8773C.1.pep
SGRIPHRAMRMHVCMRIDVHDRQQHSGSVSPIAMRSYIGGGEVVAASAAMRGRRSELVSESAPDAWANAW

SEQ ID NO: 355889 - protein, 75 aa, Zea mays
  Clone ID: MRT4577_87740C.1.pep
MSVYALKSPKGPLFPLRSILVFLIALYGFYVCYFFFNQIDLENKENLISGEEQIRTLCRRHTISNELMQYVHFPK

SEQ ID NO: 355890 - protein, 116 aa, Zea mays
  Clone ID: MRT4577_87741C.1.pep
GTSSRPLRPAAEHTILSTRIPKPSPPSLATASIPCSDLHPVASSPEASAAASPLLARGLAPPPRAPQSSLAILCSTPRCTPSGSISSSPKTSYRLAPSPGRNTWQIQGLRMCYAPG

SEQ ID NO: 355891 - protein, 86 aa, Zea mays
  Clone ID: MRT4577_87742C.1.pep
SRPEFLPHIFFRWGKPTALTGLFGRSLNKSASGDPVGVSLKRILPPKSQDTHLRVETLQKVDFLLRGILSIFSCPIRRQHCFFFSP

SEQ ID NO: 355892 - protein, 272 aa, Zea mays
  Clone ID: MRT4577_87743C.1.pep
SFLGNPKLCGFMIGRRCGSADVPLVSTGGRNKKAILAIAFGVFFAMIAILLLLWRLLVSIRINRLTAQGRREDNGYLETSTFNSSSEHGVIMVPQGKGNENKLTFSNIVKATNNFNKENIIGCGGYGLVYKAELPDGCKLAIKKLNDEMCLMEREFTAEVEALSMAQHDHLVPLWGYCIQGNSRFLIYSYMENGSLDDWLHNRDDDASTFLDWPTRLRIAQGASRGLSYIHNDCKPHIVHRDIKCSNILLDKELKAYVADFGLSGLILSQQT

SEQ ID NO: 355893 - protein, 268 aa, Zea mays
  Clone ID: MRT4577_87744C.1.pep
LACIDIDMEETQRFADSVAGLALERETKTNFSRFQEWLEANKDYQAIVDGANIALYQQNFAEGGFSLTQLDGVITELRDRYHGKWPLVILHNKRISKLMENSSNRHLIETWRTNGALYTSPSGSNDDWYWLYAAIKLNCLLVTNDEMRDHIFELLGPSFFPKWKQRHRVKYTFNKGKAVLVMPPPYSSELQESEMGSWHIPIEEKSGNERGRIWLCIGRGGSCKEHGEVPSTNGAVHKVPQTEASNVVQQGLTENKDESITGKRKDRD

SEQ ID NO: 355894 - protein, 137 aa, Zea mays
  unsure (1)..(137): unsure at all Xaa locations
  Clone ID: MRT4577_87745C.1.pep
WLPXILSPACAASCALFASANXNASYYCPQMSHFCCASSDYSHSFSSSPVTFNVPCFRPRVLQALIGYNIAIACVAFYNXPIVPIANNQSLAHSNNTKPSASQSATTCSYHLLSHPSHGVTLCVYFATAACLXSNPL

SEQ ID NO: 355895 - protein, 79 aa, Zea mays
  Clone ID: MRT4577_87746C.1.pep
SPDHSNGMLKQELLSLQNFPKNIGGRKRRSFPGDESHKEMESLLQTMTLVNRECCIYILMCRSKPSSMSTCTCSCTFDC

SEQ ID NO: 355896 - protein, 63 aa, Zea mays
  Clone ID: MRT4577_87747C.1.pep
KYVIYTILKAPVSTVVMRHLFTNNPHNYFKLIRCTPINGQTVARHGPDARGPQLWLRHVMPAY

SEQ ID NO: 355897 - protein, 49 aa, Zea mays
  Clone ID: MRT4577_87748C.1.pep
LCVTYIGTFKLTLQFTEDYPNKPPTVRFVSRMFHPNIYADGSICLDILQ

SEQ ID NO: 355898 - protein, 47 aa, Zea mays
  Clone ID: MRT4577_87749C.1.pep
NASPCEFNKNCQPQNIATKKLLNTNTDDIHSTAAFQQSSCNSPRGAY

SEQ ID NO: 355899 - protein, 107 aa, Zea mays
  Clone ID: MRT4577_8774C.1.pep
VYSPRTAYFMSGALGTSDRLSWFPTVSVREMYVLVAVVHESVREDDEESRGYRIANEGSTVVQDRGGGGDGDTALVRAVHMGNVLSANYGEGSCKACCSEGRDTKLC

SEQ ID NO: 355900 - protein, 113 aa, Zea mays
  Clone ID: MRT4577_87750C.1.pep
SSLTIDCVTSIGTFKLTLQFTEDYPNKPPTVRFVSRMFHPNIYADGSICLDILQNQWSPIYDVAAILTSIQSLLCDPNPNSPANSEAARLFSENKREYNRKVREIVEQSWTAD

SEQ ID NO: 355901 - protein, 187 aa, Zea mays
  unsure (1)..(187): unsure at all Xaa locations
  Clone ID: MRT4577_87751C.1.pep
MELEEAVPPAAMVGEDNAAAPTQDFGLPAELIAVLPSDPFAQLDVARKITSIALSHRLGLLEAEAARLRSQLAERDAEAEDLREHVEQLDAALAVATGRLRHAEEEKDALQRDNSELSNTVRKLNRDVAKLEVFKKTLVQSLQEDDSSDNTAXGKELQQLQISPXPSDEDSAFSTSNHHKFQKPQVQ

SEQ ID NO: 355902 - protein, 108 aa, Zea mays
  Clone ID: MRT4577_87752C.1.pep
LCVTSIGTFKLTLQFTEDYPNKPPTVRFVSRMFHPNIYADGSICLDILQNQWSPIYDVAAILTSIQSLLCDPNPNSPANSEAARLFSENKREYNRKVREIVEQSWTAD

SEQ ID NO: 355903 - protein, 46 aa, Zea mays
  Clone ID: MRT4577_87753C.1.pep
VTQPLPPLGEGGPTNYQYMPHKGQTWQVARRLSRQQGSLRGGPHPT

SEQ ID NO: 355904 - protein, 113 aa, Zea mays
  Clone ID: MRT4577_87754C.1.pep
LYAYFFFRARALNPIPLSPFAGKRKTREPFGETSENEPHFSLETGAPSPTGIRPLFTLGPLKTTCMECLKPWNPVSKQSPRAQIDLLGVPKRRPKLCGFLSPNDVLPSPGDQT

SEQ ID NO: 355905 - protein, 52 aa, Zea mays
  Clone ID: MRT4577_87755C.1.pep
NAFWYNFTGCRCFFHKKTTDMGYVSSVCLSIFCRNQKRCSTCGLILFSSVLL

SEQ ID NO: 355906 - protein, 130 aa, Zea mays
  unsure (1)..(130): unsure at all Xaa locations
  Clone ID: MRT4577_87756C.1.pep
EYREVPTVSGKKARWLMLLGLKTSDATETMQGHCSQAAITRLIQRYLSXLVAYECKHXIVKHCTIHQEIQTGIVPLQPLLFQQPKGILHDHPVDHVVAHNIKGQHLQHLVLAHLAAYSQQHQFFSFNQLA

SEQ ID NO: 355907 - protein, 54 aa, Zea mays
  Clone ID: MRT4577_87757C.1.pep
KGLVFFIYKKRGGLVSPTQEKRVGGIILNLFLSVWNRDICFLFPESGKNFFLLR

SEQ ID NO: 355908 - protein, 238 aa, Zea mays
  Clone ID: MRT4577_87758C.1.pep
FLGLFFMAGSILLIFLTLLAGSRNTTPLNEVYFLQADTGNIPGAPSTSRWTFWNLCGVTDGGRNDCGSSHPAFPLDPPSHRNFDTTENVPSQFIGTNHYFLMTRFMFPFIIIGLFFAVVSLFTGLLAMCTRIGSYLSGFVAWLALTFQVITTCLMTAVFVQARHAFNSNGQNSKLGVKAFAFMWTASACLFLSCLMYCLGGAVGRKDDGYSGRKERRRGFFNSARSNSVRSQKKESYA

SEQ ID NO: 355909 - protein, 144 aa, Zea mays
  Clone ID: MRT4577_87759C.1.pep
RHVFSGAMTIHPCSFACTDRKMRKWVRARNSPVSASFTVDAGAVNAAFGSAPFPVIRITGGPPGKASNPPGVSHRFIPAAPLAGLLAPHAQQPRPPASRGVLTPRTPGAGYRSSLQGEAANNQARARGVDDPWVRPERISRPGR

SEQ ID NO: 355910 - protein, 104 aa, Zea mays
  unsure (1)..(104): unsure at all Xaa locations
  Clone ID: MRT4577_8775C.1.pep
SFFXXPXXLLXXXRPFLSLLXXAGAWGLAXXVXASGRPFWXVCLVPFWPXCCCLXXLSRGXPGASVFLAAXGXXAVAAGGAGGXLRLRGLRXRPXAPAAAWVGP

SEQ ID NO: 355911 - protein, 55 aa, Zea mays
  Clone ID: MRT4577_87760C.1.pep
RVIALSAGFPPSLRIGLAMCKCRSHGTVLLFGMQSSHLNVCNNLQYMHHRLQRKN

SEQ ID NO: 355912 - protein, 354 aa, Zea mays
  unsure (1)..(354): unsure at all Xaa locations
  Clone ID: MRT4577_87761C.1.pep
HARGHLGSYTIDSXLDRVKTVVXVAEGVREIWLSSXSEDTGAYGQDIGXNLPNLLNTIVAEHPVDRSTLLRIGMTNPPFILEHLKEISAVLRHPWVYSFLHVPLQSGSDAVLTAMSGEYTVGKFRKVVDALCELVPGMQIATDIICGFPGXKQVHGLAFHSXIIYEYIXDIVLTECPKRRCCXVCTKLTSHFXETDEDFSETVNLVKQYQLPQXQRSVNLQVLVVDILFLHVHRQRGFXGRPAARMKKVSSNEVKXRSRELTSVFESLSPYQGMVGKVERIWITEIATGGVRLVGHTKGYIQVLVIAPDSMLGASANVKVTSVRXDVFGEVVEEGSVAAGEAPKRTSATCSGGS

SEQ ID NO: 355913 - protein, 77 aa, Zea mays
  unsure (1)..(77): unsure at all Xaa locations
  Clone ID: MRT4577_87762C.1.pep
MPQTAPQTDAYGAYISTYSIQAYTGRKEAIVGRGPYGXAAADQLNKMSHFVTRVERAERMGRLMIYXGVPNMKTEQY

SEQ ID NO: 355914 - protein, 77 aa, Zea mays
  Clone ID: MRT4577_87763C.1.pep
GSTEFYEQGRIEKAGSDDKYRYFHYRHGCDMNDHSLHNALKKYGKGQEFKRILDRQTQRSRRLGLMTLFTEEAMRNA

SEQ ID NO: 355915 - protein, 122 aa, Zea mays
  unsure (1)..(122): unsure at all Xaa locations
  Clone ID: MRT4577_87764C.1.pep
SSFPGQYNKDLALXEGGTISLFFFKQVLGEKVSPNQVVFSKVVPKAPLFPPPGVKPVFPRFFNPFGGVFFYFPLREKTTLLPGVALFFFFLWRSSDPVFPPPRPARGPFFPPPAPFRWRFSP

SEQ ID NO: 355916 - protein, 113 aa, Zea mays
  Clone ID: MRT4577_87765C.1.pep
GAISELYEDRHSPAPVLLPPVLLRRLPLLLLCDLIIGPLKSAVASSKLFSPSSSSSCFLFLRQQVINKNRSSIIIISSSSSQVVVIPVPRCRRRRCRREAEGCRARTATRGRR

SEQ ID NO: 355917 - protein, 67 aa, Zea mays
  unsure (1)..(67): unsure at all Xaa locations
  Clone ID: MRT4577_87766C.1.pep
GKRRXTRKQSRYGGQNESVVHKRAETTMTIVLKLQRQSCMQXSQRAFMRCKHXETDGDYNGTGTYVF

SEQ ID NO: 355918 - protein, 105 aa, Zea mays
  Clone ID: MRT4577_87767C.1.pep
SSSLPPDPRHAAANNDQLTCPILLLLPPFVRLLNRRQHGRQEEVAARPLGRRSRAARGQRILQVRLLRTGDACATVSCARAALLSERGGKGRRAGQGGPFFFFHP

SEQ ID NO: 355919 - protein, 85 aa, Zea mays
  unsure (1)..(85): unsure at all Xaa locations
  Clone ID: MRT4577_87768C.1.pep
RGGVGGCFYILAGGEALLRDGGWIYHSPEWPGASVGPVLPSPPIYGGDMYFFLXAQSAHLVRLGWFVGWASPALLHVLLWLCGPG

SEQ ID NO: 355920 - protein, 45 aa, Zea mays
  Clone ID: MRT4577_87769C.1.pep
YVIWCEYCSSNSEIKCKTSEDNDVLLDYSVHTMKDVQIYIQRCVK

SEQ ID NO: 355921 - protein, 135 aa, Zea mays
  unsure (1)..(135): unsure at all Xaa locations
  Clone ID: MRT4577_8776C.1.pep
FGWSDVARSFSVPAELYWIQPASVLAVYLHLFRATDGVDRAIAAAGGYPWATIRLPGLPPLRVXDLTAFIXVGPRELPXYSFVDDAYHELVQTLARXDKPSALGNTFDATEPEAGAPLLEAGMDVVPDGPGASSL

SEQ ID NO: 355922 - protein, 256 aa, Zea mays
  unsure (1)..(256): unsure at all Xaa locations
  Clone ID: MRT4577_87770C.1.pep
MVVIELEPEEATRPSSPASEEKAAAAAGGEAARPSSSAAPEEAPTAAAAAVGGEASRAAGEEEEAFEDALTDEQLREKSRSQANDAKAEGNKXFFGSGQYEEALSKYEMALQIAAELESSEDIRAACHSNRAVCFLKLGKHDETVKECTKALELNPSYLKALLRRAEAHEKLEHYDEAIADMKKVIEMDPSNQQATRSLFRLEPLAAEKREKMKEEMIGKLKDLGNSVLGRFGMSVDNFKAVKDPNTGSYSIQFQK

SEQ ID NO: 355923 - protein, 297 aa, Zea mays
  unsure (1)..(297): unsure at all Xaa locations
  Clone ID: MRT4577_87771C.1.pep
MVVIELEPEEATRPSSPASEEKAAAAAGGEAARPSSSAAPEEAPTAAAAAVGGEASRAAGEEEEAFEDALTDEQLREKSRSQANDAKAEGNKFFGSGQYEEALSKYEMALQIAAELESSEDIRAACHSNRAVCFLKLVSHFSDWNIALXAEKKYIFMGHNYSLMSLAYYHDXSPDMNQYCLKVIEPXPCTSACHLLLFRLEPLAAEKREKMKEEMIGNVLLFFASTKNSIILVPCDLIVKSCRYLSCKMAFLAMHVCFAGKLKDLGNSVLGRFGMSVDNFKAVKDPNTGSYSIQFQK

SEQ ID NO: 355924 - protein, 134 aa, Zea mays
  Clone ID: MRT4577_87772C.1.pep
MAGAAAERKAIRVLLVEDEEIHRVLARALLRSACGGVELHEAGTGAEAVRRVRDGGAAAAYDLIITDWKMPVMDGHEATRQIRAMGVTTPIVGLSSDTLPPDVDAFIKAGADDFTPKPLSKEKLVRILTKFHLA

SEQ ID NO: 355925 - protein, 136 aa, Zea mays
  unsure (1)..(136): unsure at all Xaa locations
  Clone ID: MRT4577_87773C.1.pep
LAKRSFVFYIIPFLRDIGTVLEPEKADDVXKGVEGASKFLLSNLRSPPFFVGXPEGLSXVVFSFCKPGSPNWAFLYFFHGLKEIKRFLSDPCWVLYMFHCFTPPYICPACAPPRFFLKYTGPTLGPLLKLKIEITC

SEQ ID NO: 355926 - protein, 107 aa, Zea mays
  unsure (1)..(107): unsure at all Xaa locations
  Clone ID: MRT4577_87774C.1.pep
ALLRSPVGGVELDEARTGXEAVRRVRDGGAAGAYDLIITDGKMPVMDGREATRQIRAMGVTTPIVGLSSDTFPSDVDAFLKAGADDFTPKPLSKEKLVRILAKFNLA

SEQ ID NO: 355927 - protein, 100 aa, Zea mays
  Clone ID: MRT4577_87775C.1.pep
SGYSTRCSLASYLPARGVRSYEVILFLCRVLLFDLDDLHQALDRLDASIEFVLFLARPGHGAADCGGARMRRRLAPIFDHRGQPLGPCRRTLIEKHEARI

SEQ ID NO: 355928 - protein, 55 aa, Zea mays
  Clone ID: MRT4577_87776C.1.pep
NCEIMALGASKHYEIMLECDELAKRTKRAWRKYILVAHVVKLYSLRFKECGSHML

SEQ ID NO: 355929 - protein, 69 aa, Zea mays
  Clone ID: MRT4577_87777C.1.pep
HVHADRALHLLLQITVVVGRGLRPTRRRPAPTTCPRRRRLGHGPGARPLGPFDRRPHRMKTRAPAWLSQ

SEQ ID NO: 355930 - protein, 1616 aa, Zea mays
  Clone ID: MRT4577_87778C.1.pep
MATLPRAAPPTPAALLPLPRAAPPLLLAGRAAAARRSRLRARGPSAAARRSWVVASAASSSSRAVVGGVARREAPPAPQKPTQQAADLNHILSERGACGVGFVANLKNMSSFDIVRDALMALGCMEHRGGCGADSDSGDGAGLMSAVPWDLFDDWASKQGLALFDRRNTGVGMVFLPQDEKSMEEAKAATEKVFVDEGLEVLGWRPVPFNVSVVGRNAKETMPNIQQIFVKVAKEDNADDIERELYISRKLIERAAKSFSWADELYFCSLSSRTIVYKGMLRSEVLGQFYLDLQNELYKSPFAIYHRRFSTNTSPRWPLAQPMRLLGHNGEINTIQGNLNWMRSRETTLKSPVWRGREHEICPFGDPKASDSANLDSTAELLLRSGRSPAEALMILVPEAYKNHPTLSIKYPEVTDFYDYYKGQMEAWDGPALLLFSDGRTVGATLDRNGLRPARYWRTSDDFVYVASEVGVIPMDESKVVMKGRLGPGMMITVDLQTGQVLENTEVKKTVASASPYGTWLQECTRLIKPVNFLSSTIMDNETVLRHQQAFGYSSEDVQMVIESMASQGKEPTFCMGDDIPLAVLSQRPHLLYDYFKQRFAQVTNPAIDPLREGLVMSLEVNIGKRGNILEVGPENADQVALSSPVLNEGELETLLNDSKLKPKVLSTYFDIRKGLDGSLDKTIQALCEEADAAVRSGSQLLVLSDRSEAPEPTRPAIPILLAVGAIHQHLIQNGLRMSASIVADTAQCFSTHHFACLIGYGASAVCPYLALETCRQWRLSNKTLNLMRNGKMPTVTIEQAQRNFIKAVKSGLLKILSKMGISLLSSYCGAQIFEIYGLGQEVVDLAFCGSVSKIGGLTLDELGRETLSFWVKAFSEDTAKRLENFGFIQSRPGGEYHANNPEMSKLLHKAIREKRDNAYTVYQQHLASRPVNVLRDLLELKSDRAPIPIGKVESATSIVERFCTGGMSLGAISRETHEAIAIAMNRIGGKSNSGEGGEDPIRWNPLTDVVDGYSPTLPHLKGLQNGDTATSAIKQVASGRFGVTPTFLVNADQIEIKIAQGAKPGEGGQLPGKKVSAYIARLRNSKPGVPLISPPPHHDIYSIEDLAQLIYDLHQINPKAKVSVKLVSEAGIGTVASGVSKANADIIQISGHDGGTGASPISSIKHAGGPWELGLTETNQTLIQNGLRERVVLRVDGGFRSGQDVLIAAAMGADEYGFGSVAMIATGCVMARICHTNNCPVGVASQREELRARFPGVPGDLVNYFLFVAEEVRAALAQLGYEKLDDIIGRTDLLKPKHISLVKTQHIDLGYLLSNAGLPEWSSSQIRSQDVHTNGPVLDETILADPEIADAIENEKEVSKAFQIYNVDRAVCGRVAGVIAKKYGDTGFAGQLNITFNGSAGQSFGCFLTPGMNIRLVGEANDYVGKGMAGGELVVVPVDKTGFVPEDATIVGNTCLYGATGGQVFVRGKAGERFAVRNSLCQAVVEGTGDHCCEYMTGGCVVVLGKAGRNVAAGMTGGLAYILDEDDTLVPKVNKEIVKMQRVNAPAGQMQLKGLIEAYVEKTGSEKGIAILREWEAYLPLFWQLVPPSEEDSPEACAEFERVLAKQATTQLSAK

SEQ ID NO: 355931 - protein, 55 aa, Zea mays
  Clone ID: MRT4577_87779C.1.pep
RGPYHVCKFVVPQSRFLLVFFFSPVCFFYRGFLPLHFSTFVFFFFFRIFFFFYIF

SEQ ID NO: 355932 - protein, 303 aa, Zea mays
  Clone ID: MRT4577_8777C.1.pep
MHNKSTEFEMPLVIPDREYEIESLPLYQEVMVTRSLSSDGNFSDDFAASRQTKSKSMPSEDNFGDNFVYTRKAKGNKPVHGKSLVQVYTYQISEADILQVATMMGFDDELDVTDDIGAADVILASSSEMKQNPWIHNVAKYHKLPIFVVKTNTMAQIVKAIRMIVGRDNTSSSKQPEVMEGEIEIEDDAPKRKPSLEEIDALEEARLAIEYIVIPGGEPVELLPRCSEIVARQLELVESYQLLAETFGSDSNSRLQILPMKITKRGSSKDNGASKPTKQTGSDLIVSENGGGSSFSRLPFLPK

SEQ ID NO: 355933 - protein, 184 aa, Zea mays
  unsure (1)..(184): unsure at all Xaa locations
  Clone ID: MRT4577_87780C.1.pep
RGRPGYLSRVHGLXRRSLMTLDFPLIRQTLSDAAQFLSLSDYQDLLRLYAYWTKLKLMLAKHLSADHGVWHNAIKKSEAAFEDSQPHILMEIYMDHVREATSLYKRCYLQRFAVPGSYEICYXDIRSEEDNGPLXDYDLAAKKGTPHLEQLMTFQPHQDAKVEAYPSLHDNSNANDSSQNRNTK

SEQ ID NO: 355934 - protein, 196 aa, Zea mays
  Clone ID: MRT4577_87781C.1.pep
EFFFFFFFFFFFFFFFFFFFFFFFFFFFGPRGPGGFFYKNEPPFWAGATLNRKTGPKNPFLKTGGVNNFGPKRKPEKNPCFFCPGKKKKTFKWTPYFLGGGFNGFFGRKKKIFGGEKSLPLFLKNPFSWAKRGASHPKKKGTFGATRWGRINNPLGFPTTFKRAPKRGHKKGLPFFLGGRFLKGFHTRPFGGPSPA

SEQ ID NO: 355935 - protein, 85 aa, Zea mays
  Clone ID: MRT4577_87782C.1.pep
PTRQFQDTEKCPDRCVDERCDPCYGARPLRAAIMRLLKDSLAKKILTDEENEGESVIADEYSHGKVIVTNGESSVTEQLEPSVTT

SEQ ID NO: 355936 - protein, 89 aa, Zea mays
  Clone ID: MRT4577_87783C.1.pep
ECSYCSTLFLQTNLLVLMSTPPKCFLTVEGGLLRVKVNSRKYTEFWQNFRSCCYVSSKKIVFFCKFFSHFHPSLKKSKASCYTLTHIFV

SEQ ID NO: 355937 - protein, 224 aa, Zea mays
  Clone ID: MRT4577_87784C.1.pep
GPSRPAGQVIQTELDSFVEFAPHYFRHLTESLTSRSPTCLAKILGLYQVSIKNSKGGREVKMDLMVMENILFQRSISRVYDLKGSVRSRYNSDASGHNKVLLDSNLIEALHTKPIFLGSKAKQRLERAVWNDTSFLASLDVMDYSLLVGVDEEKKELVVGIIDFLRQYTWDKQLETWVKASGILGGPKNESPTVISPIQYKKRFRKAMSRYFLAVPDQWTSKGG

SEQ ID NO: 355938 - protein, 65 aa, Zea mays
  Clone ID: MRT4577_87785C.1.pep
FVCVDQIQCYADISTFCCSTTFNYNIHKSSLYNVCDHSSVIMSIFTPLRLVICICILEEAVVIVD

SEQ ID NO: 355939 - protein, 166 aa, Zea mays
  Clone ID: MRT4577_87786C.1.pep
MRIRKRTPARAASPGPPPLPPPPPLPLQRPTEKPRDEAAAEEEEEKRAVLAAGVREGDDRVRPAAAAAGSGNSSATDDVPRPEPQEQDAARCSRNDGKRWRCKKAAVPGYLFCDRHIAWSTRKRKPRASTKPKVHGSGVLEPTAIAQEFAEDHGPTQRDAGFLGGF

SEQ ID NO: 355940 - protein, 112 aa, Zea mays
  Clone ID: MRT4577_87787C.1.pep
PGGPAWRRPARRARPRPASTGATAMPTPPSATPSSTAKSAAPPDNKTHSTRPCHVKSSEPSVALCRLVTELFVCSSSVRRDGGHGIALCHLYTTPRTKITASVYLNCRVNGS

SEQ ID NO: 355941 - protein, 40 aa, Zea mays
  Clone ID: MRT4577_87788C.1.pep
QTKLLFYLTAPSQKDSFIFILTLAILSPIPTPINNNLSNF

SEQ ID NO: 355942 - protein, 89 aa, Zea mays
  Clone ID: MRT4577_87789C.1.pep
VPPLKAHFCWGSDLYILHVDGTVADQAAYDESPLRAPKWYGLAHVAVAGSRKTALPPSRLRTPQLMPRSDKRRRTLRISTWPSSPQRTL

SEQ ID NO: 355943 - protein, 59 aa, Zea mays
  Clone ID: MRT4577_8778C.1.pep
GRAGYKTNKQVSMRGSRSFLPCLPARAPPCSADSFRHVEVLFAWPFPFYFSPCSGASIL

SEQ ID NO: 355944 - protein, 56 aa, Zea mays
  unsure (1)..(56): unsure at all Xaa locations
  Clone ID: MRT4577_87790C.1.pep
YIVFGALNTKPVLYKKNKDKVNAFGXKAMVQLKKYYALFDEKGPSKIPKGPKDKKP

SEQ ID NO: 355945 - protein, 100 aa, Zea mays
  Clone ID: MRT4577_87791C.1.pep
MLVTRQRLALHPLVSCSPTADAPLLVTRMCATLGLPLRIHPPPKTSPHYLRLLSLSTPFPTYSIVKAGNSLEIRRRFRANFRVSRWMNRPERYNCKSENN

SEQ ID NO: 355946 - protein, 145 aa, Zea mays
  Clone ID: MRT4577_87792C.1.pep
RKRNTEGGSSSSDPHPSLPSAAARRRSGSVRSRVPRRIGRTENRTHARHRKRAQVVGTSGVGAGGARSSAARLRCHRRQDGTAGQDPPLTSPPPARAARRPPAAAVADLEPCVERSGEGGCWGRRARWEAGMGASGRDKRERGAG

SEQ ID NO: 355947 - protein, 174 aa, Zea mays
  unsure (1)..(174): unsure at all Xaa locations
  Clone ID: MRT4577_87793C.1.pep
RPAVYRIEAAQHPCVTCAEQSCGPNGVTYITLVAEFFISGEVDGAERLXRHRCLKXLNPNLVTFNSVVXGCARXGKMEDARKECDELMREGLAPDGVSYYTLLSGYCKARCSPEALSVLAKMTLIGIMPYVVTFTSLIHVMRKAGILERAVTLLTQMRERSLQMIEVSLTALID

SEQ ID NO: 355948 - protein, 178 aa, Zea mays
  Clone ID: MRT4577_87794C.1.pep
PRVRPRVRNRVLVDTAAPIESVKEAVSKFGGILDWKERRKNVQNELDKALEDAPRYKRRAEAAEAEKSKVVMELCTTRRTIEGLKLNLEKTQIEAIQAQQDSELADIRFKEIQQGIACRESAAARAEIELARYRYASALAELHLVKDELQQLQKEYMSLNTKRDNAETKACESSVASQ

SEQ ID NO: 355949 - protein, 69 aa, Zea mays
  unsure (1)..(69): unsure at all Xaa locations
  Clone ID: MRT4577_87795C.1.pep
PQPPAEILSKKGSSNSAPTLHPCNSPISNSFIFSPNHSTPTSIFLEALMTNSTSESHSNSTIFRAFXXR

SEQ ID NO: 355950 - protein, 49 aa, Zea mays
  Clone ID: MRT4577_87796C.1.pep
LNGENPALFPSFALAKYSLFRPLYYSIKGHSCWSYPQGVLFNGHWAPPR

SEQ ID NO: 355951 - protein, 43 aa, Zea mays
  Clone ID: MRT4577_87797C.1.pep
RLGCYKAAMPTVLAVTLDSDSGLPRFSEYSGLLDHKWRVRGTR

SEQ ID NO: 355952 - protein, 140 aa, Zea mays
  Clone ID: MRT4577_87798C.1.pep
RHAPTPARRSLAPRPIFNGTWLASFLLLQSAGALSRLSGAHLCSSSSSRISLLSLPQVLCAYRASPRWLPWSPPAARLAPILHGAWLCYSPPISLRLSLLADRAPSLQPSFFFYSPSRLLPLPGRGFPCSVPCRPAPLFL

SEQ ID NO: 355953 - protein, 34 aa, Zea mays
  Clone ID: MRT4577_87799C.1.pep
VALAITQPGPASESVLVSEQLGPRGGLIFRTRIK

SEQ ID NO: 355954 - protein, 81 aa, Zea mays
  unsure (1)..(81): unsure at all Xaa locations
  Clone ID: MRT4577_8779C.1.pep
MEMEYRDLEVTLVSEXDLNKESLFSWTSIYPAAAMSGIDLRIPIHRTQADHSSGCTPCWDAVVHFPSRDAADTRGLGLHVR

SEQ ID NO: 355955 - protein, 125 aa, Zea mays
  Clone ID: MRT4577_877C.1.pep
EMMFGGRYVIMMMAVFSIYTGLIYNEFFSVPFGLFGKSAYACRDSSCSDATTEGLLKVRDAYPFGVDPVWHGSRSELPFLNSLKMKMSILLGVAQMNLGIVISYFNAKFFRNSLNPGRVEYLVLW

SEQ ID NO: 355956 - protein, 123 aa, Zea mays
  Clone ID: MRT4577_87800C.1.pep
GPRVPGPKKMRGLAPRVVCFGMIPPFFIWAFAPRGQGGFFQSGYAPDPSLGPPPPGPLWGPIPPGAICFWINPPCGGTGCLPRVSPPPFVGGLNGSPVPPPWFPWWPVWGFLVLGPHRGLFPG

SEQ ID NO: 355957 - protein, 69 aa, Zea mays
  Clone ID: MRT4577_87801C.1.pep
TGRPLFARRRQRLPSAGVTLYHDLPPEHTELPDHAGVVVLGLDDRTRPRAEPFFRGLGCHGSDPDTRAE

SEQ ID NO: 355958 - protein, 88 aa, Zea mays
  Clone ID: MRT4577_87802C.1.pep
PRCRRCSAPSPHRSAEFLLPPSCARKDIRSCILYFYRIAADAGRGSLSTPAACTVQVAAPCRTAPHFDLLTLHTVTIVHGLHLLICMV

SEQ ID NO: 355959 - protein, 105 aa, Zea mays
  Clone ID: MRT4577_87803C.1.pep
SGFLGCLFRFSWELPWFSVLCWASSLRFGACGLFRGRLSVLGSWGLVRRFVRYSLSCVLWSTFLYGVALGVFPSVLVNHALGDSCRVFVPSHLFFFPPLGSGSGV

SEQ ID NO: 355960 - protein, 64 aa, Zea mays
  Clone ID: MRT4577_87805C.1.pep
FFFFFFFFFFFFFFFFSQTNDVSKLHAKFPPTKHDPKEALSSFQLTTRLEHRHQKIAPIYIKPL

SEQ ID NO: 355961 - protein, 78 aa, Zea mays
  unsure (1)..(78): unsure at all Xaa locations
  Clone ID: MRT4577_87806C.1.pep
PRVRGHVHELVAGAWGTKSGAASSEEGYGQPIRVNELADPLARYADLSTLXCWLRPSSCGVILRGSDRDGPHLFMIEP

SEQ ID NO: 355962 - protein, 181 aa, Zea mays
  unsure (1)..(181): unsure at all Xaa locations
  Clone ID: MRT4577_87807C.1.pep
RRRWRRSRLPRRETRRACCVWRSRRRTAAAAPGTTSASPAGSVPAAQIVSYTSSSWGGGGWFLSXFYLXFLVGWLIGYYMLNLFGLGXPVEYLRFXLYSMDXNLAKNEAXGIFGARFQSSDVMYILLQPYIEVLGLQGLHECELMHXRWAMLATLRSLSVKWLIGLTXRYAGKVEIVDWSY

SEQ ID NO: 355963 - protein, 84 aa, Zea mays
  unsure (1)..(84): unsure at all Xaa locations
  Clone ID: MRT4577_87808C.1.pep
LIPHXAQALPXALPRLIPYHXRRRIXFSSSEPAAGADGXXFQPDLDRPTPXPAVRKPLRRXAHSAPRNHXLPSNENSLXSVMGG

SEQ ID NO: 355964 - protein, 80 aa, Zea mays
  unsure (1)..(80): unsure at all Xaa locations
  Clone ID: MRT4577_87809C.1.pep
LWADLCACLCAWFVLLSLVIXLVLLMRRLVLLRSLVVLLRIXRRRRWWMICRRAFGSRFIWSLXRLLVFCIRLIIDDRSY

SEQ ID NO: 355965 - protein, 152 aa, Zea mays
  Clone ID: MRT4577_8780C.1.pep
NRTRLKMYIYISISESLATVMKSLCFDSSSTFLSSPPFVESKASSDRMASTSRSTTSQPARVCHGKRKWWPSQSHCPRVCCVVPLPMQPPPPWRRIERELVLDDEAAERRAVRDALAALRRLRRGRGEAPPLLGVAQRRGRRGVVVAAADAT

SEQ ID NO: 355966 - protein, 354 aa, Zea mays
  Clone ID: MRT4577_87812C.1.pep
MAAESENGSCKAWAARDPSGVLSPHSFNRRAVQSGDVSLKIIYCGVCYADVAWTRNKLNDSKYPLVPGHEIAGVVTQVGADVKGFKVGDHVGVGTYVNSCRDCENCNISLDNHCPKAVYTFNGIDTDGTVTKGGYSTHIVVHERYCFKIPDGYPLAKAAPLLCAGITVYTPMMRHNMNQPGKSLGVIGLGGLGHMAVKFGKAFGLKVTVFSTSESKRDEAINLLGADNFVISSDTQQMESLKNSLHFIIDTASGDHPFDPYFSLLKVGGVMTLVGFPSEIKMHPASLILGARTLSGSVVGGIKDIQEMVNFCAANNIYPEIEIIKIDYINEALARLVNRDVKYRFVIDIENSFK

SEQ ID NO: 355967 - protein, 93 aa, Zea mays
  Clone ID: MRT4577_87813C.1.pep
NPDRKTRACALARYFKELSMSITKRYFTFRLTSLARAPVVFFFFFFFFFFFFFVFFFFFFFLEHTNCIHLFKALFGSIHIGLSKVFSSFFLSR

SEQ ID NO: 355968 - protein, 161 aa, Zea mays
  Clone ID: MRT4577_87814C.1.pep
HMAVKFGKAFGLKVTVFSTSESKRDEAINLLGADNFVISSDTQQMESLKNSLHFIIDTASGDHPFDPYFSLLKVGGVMTLVGFPSEIKMHPASLILGARTLSGSVVGGIKDIQEMVNFCAANNIYPEIEIIKIDYINEALARLVNRDVKYRFVIDIESSFK

SEQ ID NO: 355969 - protein, 381 aa, Zea mays
  unsure (1)..(381): unsure at all Xaa locations
  Clone ID: MRT4577_87815C.1.pep
MAAESENGNCKAWAARDPSGVLSPHSFNRRAVQSGDVSLKIIYCGVCYADVAWTRNKLNDSKYPLVPGHEIAGVVTQVGADVKGFKVGDHVGVGTYVNSCRDCENCNISLDNHCPKAVYTFNGIDTDGTVTKGGYSTHIVVHERYCFKIPDGYPLAKAAPLLCAGITVYTPMMRHNMNQPGKSLGVIGLGGLGHMAVKFGKAFGLKVTVFSTSESKRDEAINLLGADNFVISSDTQQMESLKNSLHFIIDTASGDHPFDPYFSLLKVGGVMTLVGFPSEIKMHPAXLYLVILCSDTTKKKHGNRNESFKFNLNXSLGARTLSGSVVGGIKDIQEMVNFCAANNIYPEIEIIKIDYINEALARLVNRDVKYRFVIDIESSFK

SEQ ID NO: 355970 - protein, 39 aa, Zea mays
  Clone ID: MRT4577_87816C.1.pep
NHVKKNHTQLFTSHYCIYDDSACNNFSLLISVIVSSLYL

SEQ ID NO: 355971 - protein, 48 aa, Zea mays
  Clone ID: MRT4577_87817C.1.pep
VGVAVVFKHNFCNRESAYATCLAAAYTCASAFVVAVATWVSSTSIPFC

SEQ ID NO: 355972 - protein, 86 aa, Zea mays
  Clone ID: MRT4577_87818C.1.pep
MHLSWFIHDAEGETGHSVSCGAHQLLPPDLFDLRKHGAVERGWPTGRWLRFRRSILPSIRASLLARPRLRSRWRAGERSRHRRVHS

SEQ ID NO: 355973 - protein, 63 aa, Zea mays
  Clone ID: MRT4577_87819C.1.pep
HDELMSTTEEVDLVANTDALGSDDSYVPEHLVNYLSELDIAADLDKLGSWLDYVDDMISYDMA

SEQ ID NO: 355974 - protein, 116 aa, Zea mays
  Clone ID: MRT4577_8781C.1.pep
MAPPAPSSRTTLSRAVLYLLLLLSLQVAAPAAAAMDPAERETLLRVMESVSADRDWREAAGADPCSAPWPGLECRPGTAAARMHVARLDFCVPANPTCTDTGTFPLAAFALPELRA

SEQ ID NO: 355975 - protein, 71 aa, Zea mays
  unsure (1)..(71): unsure at all Xaa locations
  Clone ID: MRT4577_87820C.1.pep
NPAQLTPCAGPALKEGTEPPARSAQQRAQQGSXXGNARSPNNGSNNRSPNAARLYAISNRPKPRGRYRAAA

SEQ ID NO: 355976 - protein, 47 aa, Zea mays
  Clone ID: MRT4577_87821C.1.pep
ERVIALDITVLLFSELHGSTKLLVLSSRHPYMVEEKESLSRQKSQRA

SEQ ID NO: 355977 - protein, 126 aa, Zea mays
  unsure (1)..(126): unsure at all Xaa locations
  Clone ID: MRT4577_87822C.1.pep
ERIISDDRGEELLGAAVAEHGKGAVLAAVHEIQXRRDAAREVERSLLELHQVFLDMAVMVETQGEKLDDIESHVANASHYVQGGNKELGKAKEYQRSSRKCLCIGIIILLLLVLLVIVPIATSLRR

SEQ ID NO: 355978 - protein, 77 aa, Zea mays
  Clone ID: MRT4577_87823C.1.pep
SSGNNAEYFFFFFFFFFFFFYCNKKDIKNRDRIIENTHNNDNNMRRTTRSIAGRDIKRKLHHIYQRTDENKLAGTKN

SEQ ID NO: 355979 - protein, 119 aa, Zea mays
  Clone ID: MRT4577_87824C.1.pep
SLKKQLSVPFHKRKIHKSALGFSEKSVSTLELLKVSWSKEWLLMKRNSFVYIFKIVQRFFAEVHYKPTAISSSSSSSSSIAITAVPIVEICIIIEEPLSQYRRSCAFCPSYQNVLHPKG

SEQ ID NO: 355980 - protein, 314 aa, Zea mays
  Clone ID: MRT4577_87825C.1.pep
MNDLMTKSFMSYVDLKKAAMKDLEAGGDGIELPESGAGGVTDERLRGFFQEAEAVKAEMAAIRDALDRLHAANEEGKSLHQVDALRAHRGRVNADIVAVLRRARDIRARLESLDRANAAQRRLSAGCREGTPLDRTRTAVTSGLRKKLKDLMLDFQALRQRMMSEYKDTVQRRYYTLTGEVPEEEVIERIISDGRGEELLGAAVAEHGKGAVLAAVHEIQDRHDAAREVERSLLELHQVFLDMAVMVEMQGEKLDDIESHVASASHYVQGGNKELGKAKEYQRSSRKCLCIGIIILLLLVLLVIVPIATSLRKS

SEQ ID NO: 355981 - protein, 168 aa, Zea mays
  Clone ID: MRT4577_87826C.1.pep
SRGRGHDAFPDLIRQQLETLLAEKARLLHENTAYARENRFLREVVEYHQLNMQDVVGLDDDDIDADADYDVELEAEQYQDRRRSLPFHQLVLEEEEHQAADPGTEPQSPSRCTESPRMLSTNSGGSPDHESSQRMLNTNSGVGIAIESPRNRMLSTNSGESTQSFDQE

SEQ ID NO: 355982 - protein, 159 aa, Zea mays
  Clone ID: MRT4577_87827C.1.pep
RREGRGGEGPGENTIPLHRQEAGQVKPLPVEVKGNPLVAFNRGKVEVVLGGPRWVFRPGPRAGVFIFPPLVLFKPVGPAGKVDGGAGGAPPPPGFWLVLYGGKVGLKLWVTNLVPPLAMPGFLFFPLPPPPQGFFRSNKGASVWVPPPIQKAFLLTPGF

SEQ ID NO: 355983 - protein, 47 aa, Zea mays
  Clone ID: MRT4577_87828C.1.pep
LTETKTALHEALIRKEEPASRTSDLFFRWRGVRERRKQCFEYYPREG

SEQ ID NO: 355984 - protein, 40 aa, Zea mays
  Clone ID: MRT4577_87829C.1.pep
STGKRSRTLLTLRWQAVSLFLPPDECRVALESGVGCGDRS

SEQ ID NO: 355985 - protein, 50 aa, Zea mays
  Clone ID: MRT4577_8782C.1.pep
TLNSFYIFLNNSYKIRMSIRIRIRMFFHLFCCREKIMYIKNYTKIYLNTS
